United States Patent Application Publication US 2019/0348154 A1 - sequence listing, part 105

SEQ ID NO: 392125 - DNA, 423 bp, Salmonella enterica
gtgagcgacaggcgtttaaaactcaggacaggaaaatctcagtttgtaaagtttgacctcctgataagacaacggcggcgggaaggatatacaaacaggcagatatactttgatctcgttgataaaggccttcaaatcagtgagacgcagtttaatcgttatatccgccgtttttacggagaaggagcttcacagggggaaaatgttgttgctgaagacaaacggcactccgggagtaaggcaactgattcagcacagtatgggtggaataatatggccgtcacaaataaaaggctgattcgtgacctggaagcatatggactgacgccggatgatgtccggcaatgggggctaccgaatgaaatggctatcaggcaaagattaacgatgatgcaggtgaatgattcgcgcagtaagtcttaa

SEQ ID NO: 392126 - DNA, 558 bp, Salmonella enterica
gtgcagataaaaaaaattgatgctgcaaaagcagagtatatagcatcaaaagataaattctttccaacagtggacttccaggctggctatacagacaacacaccatcaaatgattctgatattgatgactataaagatgaatttcgagttggagtaaaagttggctggaatatttttaatgggtttaaagatgtttctgatgctaacaaaagacgcgatatgttgaataagactctcgcagaccgggatgatttacttaaagaagttacgctgaaaataaaatctaatgccgcgcagtatcgatctggtattgaatctttaaaattggcaaatcaatcatgtcgcaatgcccgagatttgacatctctttatgagcaggagtttaaaattggtcaaaaatccttacttgatctggtcactagccgtagtgaactctttcgcgcatgctcagaaattattgaaagccaatatcaggtatacacagccaatttggaccaaatattattaggcgatatgctaataaaaactattaatgaaaatgaaaatgtataccgttga

SEQ ID NO: 392127 - DNA, 552 bp, Salmonella enterica
atgcgtcatccaattgctgcgcagttagctgcgcctgaaacaaaggaattttgccaaaagattgttcctggcatccaacccgtattactgaacaacgttccttttccgggagcggaagagatggactgttttttcaatgttgaccgtgctattgaacagtatggcggcaaggccatctacggttgggctatctggcagataccaggtgtttatattgaggcagagttccactgcatctgggagaatgatacaggagatatgctagatatcaccccatacccttataggatggacagcattctgtttctccctgataacacacgaatgtacacaggtaagcaggtcgataatatccgtcaagctctggttgatgatcccgacgtgatcaggtggttgtaccttgccagaaaacgatttgaaatcttaaatactggcgacctagcgaaccagcatggacgtattgaattgccatcaaaattagccaaagagtacagcaaagttatggatgagatagacaggctaaactctcgactaaaacgcaggtattcatga

SEQ ID NO: 392128 - DNA, 903 bp, Salmonella enterica
atgtttgaaaagttattcgaagtattttctaggcgagaaaaagccagcagtattgttgaagtgaaaccattaacagaagaattcagaaatcgggtgttattgcttctgcgtgataaacttcaatatgatttcaccccatttcttagtgaacttcatcagcaagccacttatctttatggcaagttcggtctatcaggatcaactgctcactcctcaccagcagatgatctggtgaatttcttccttacttgtcaagatgagaattgtttggatttgatagagatcattttccgttcaaatctccgtggaatctcttggccagataatcccctaatacccactattaatcagtttttcagtattgatgcacttccttatcatctgactaattattctatagaagaatatgaaaccatgttatatggttcacctgccacaggtatgcgcattgttgagtatccacaaatcattcgcaaagatagtgaattagtgcatcaaaatgcgatggaacccgcgctccgtttgcttacagcgccaatattcaaaaatgctaatgaggaattcctaaaggctttggaagatcataggaagggagattatagagactgcctaacaaaatgtggcagcgccttcgaaagtgtaatgaaagttctttgtgagaagaactctttaccgttcaagtcgacagatacagcttcaaccttactaagaacgttgctagctaatgggcaattggagcagttttgggaacaaccattgatgttgattgcaactttaagaaatcgtttaagttcatcacatggtgctggaactcaagaaaagagaataccagaatatgtagctacatacacagtcaactctactgcttccgccatactactcttatgttccgcttttagatga

SEQ ID NO: 392129 - DNA, 846 bp, Salmonella enterica
atgaaaaactggtcaacggaacatacgaaagagatcaaatcttggctcgacattgatacttaccgcaaattcgaagagcttacacttatacggttctatcatgagctatgggcaaggacgttgttcttcaaaagctacagagaaaattttgagagcaaagctcttatgggatacttctcgaaaatctttagtgggaatccttttcttatagaagaagaaaagcttgggtatatgactcccgaaaacaagttgtttcaaccacctcatttctttcttactacaacagatgatattgcccgattaagcatacttgctatgaaaagagaaatgtatttctggagtggcggggatgggtatgctgtaaataaagagtttaaagaaaaacctgtctctgagagtatgccagatcagtttccccggacagttatgtttgaaatagatttagcaagtgggactgacgaggaaattgctgaatcacttaaggctgcactaccgcaatggcgaaaaattaaaggtatagaagaaaatcccctggagtcagttcggtttgggtatggaactatcaagaaactgatcaactatcgtgtaatacctatgctggatattctggtctgggccgccattaaaaaaatccgcgtctctgacgacagactatctaggttactatatacagacgatgacgcagaaagtgaaatgagattacctcaacaaatcaaggataccgacaggcctttggcgcttaaagcctgcacgattgattttatcaggcaatttcattttttcattaataagaataatcatttgaaagaaataaaggtatctgatgtgttaaaattaacagattaa

SEQ ID NO: 392130 - DNA, 363 bp, Salmonella enterica
  misc_feature (340)..(349): n is a, c, g, or t
atggaaaagcgttcttttgccagtgcttctgaagcattgtgtatcacacgctcaccattaagcaaagcaatcactgaaattgaagagcatctagacggcaaattatttatcagaaaacataacgatttaatacccacacctctggcaatagaatattataaaaaatgcaaaccgatatacgaagatttattaaagctggagcaaaacaaaacggtaaaatcatataagataattttcgacagttattttcctttgagttttgtaaatttcttacgcgattttattgaggcgccaggtattgaattccgcgttgaacacacaattattacacctgagaacnnnnnnnnnnctattctctcttaa

SEQ ID NO: 392131 - DNA, 1209 bp, Salmonella enterica; identical to SEQ ID NO: 139615

SEQ ID NO: 392132 - DNA, 141 bp, Salmonella enterica; identical to SEQ ID NO: 11535

SEQ ID NO: 392133 - DNA, 1113 bp, Salmonella enterica; identical to SEQ ID NO: 11536

SEQ ID NO: 392134 - DNA, 228 bp, Salmonella enterica
atgaaaataaaaaaacttattgctgttgcaacattatccgctgttttggctggatgtgctcatgactccccctgcgtccccgtatacgatgatcagggccgtttagtccatacaaacacctgcatgaaaggcactatgcaagataactgggaaacaatcggcgttatagctggcaccgtggcagctgtagcagccgtgacactcggcgttatcgccgtatctaaataa

SEQ ID NO: 392135 - DNA, 414 bp, Salmonella enterica
atgtgggctgatgataaaaagccacgtaaagaaaaagctgcacaacgtttgctatttgctgttgcatattcatattgtaaagcaaacaacttagatataagtcctgaagccgattcaggaaatggccccgttgactttaagctttcacaaggctttgaacaaaaagtattagtggaagtaaaactctcgtctaatggaaagttattgcacggatatgaaaagcagcttgaaatttataaaaaaggggatgacactgaacgtgcatttttcgtaatagttgatattggctatatcggagacaaatatcaaaaagttcagcaagccagaattgctgccgaaaaagaaggaaagaaagtttcaaaaattattcacatcgatgcccaacaaaaggactccgccagcaaacgcatttaa

SEQ ID NO: 392136 - DNA, 3147 bp, Salmonella enterica
atgaatttcagggcgctgtatttatgtattaaacggattttggggatattctcatctcaggagaatgatgcaacctctgtaatgattgaggatatatcaagcctctctccttttgcgcagattctaggagatcagaagtacactgttcctgatcatccaaatccagaagtcctgaaattcatcgagtatccaactcgtccgacgggcatacagacatttaatgaacagtcaatcctgtctctgtatcgggaaaagctgcactcaatttcaatgatgttagctatcagcgatagcgacatcagggacgatgcatatacatttactaatttagtattaaagcccttggttgaatatgttcgctggatacatcttttgccagcttccgaaaatcatcatcataatggtattggtgggttactttctcacagcctggaagtggccatactctctttaaaaaatgcgcatcactcagaactgagaccaatcggatatcaagatgaagaagtagtccgtagaaaagtatatctctatgctgcgtttatctgtggtttagtccatgatgccggaaaggtttacgatctcgatattgtaagcctgaatttagctagtccgatcatttggacgccaagctcacaaagtcttcttgattgggcacgtgaaaatgacgtggttgaatacgaaatccactggcgaaagcgtattcataatcaacataatatctggtccagcgttttccttgagcgaatcctaaacccggtatgtcttgcatttttggatcgggtaaataaagaacgtgtttattcaaaaatgatcaccgccctaaacgtttatactgatgggaatgactttttgtctaaatgcgtgaggaccgctgatttctattctactggtacagaccttaatgttttacgtgaccctatcatgggtctgcgttctaatgatgcagcagcaagggccattagtaccatcaagcacaactttaccagtatcaatatcaacaattacaatgctaagcctatgcacatcattatcgtaaatggtgaggtataccttaacgagaacgcattccttgattttgttctcaatgatttcgaattacataaatataacttccctcagggagaggctggtaagacggtattggtagaatccctagttcaacgtggttacgtcgagccctatgatgatgagcgtgtcgttcactacttcattccgggtatctattcggaaaacgaaatatcaaacatctttagaaatgggatagggaaactagaattctataaccttcttaagctaaggtggattggtttaatctttgattcctataaaatccctgactcagtgccgggtctttttagcgttaatgccaataaagactttatttacattgacgagcaaaaaacagttactgaatacagaagaccagtgcccggtcgggacgctataactaaaattactgatactgttgagacggctgttcttaaggttaatgatttaggccgctccactgcctctattgatgttgatatacattctaagaaaaatgaaggctcatccgacgattttgagaagaaagccgaaagtgataatgaaattgataatgacacgcagatagttaaatctgagggtgaggaagcagctgatcctgtcattcctgatatagaagaaagtgaagatgaatcggcaaaggacacggaatcccatgtcctggtcaaccaacttcatgaactccttttaagcgctccactttccaatgactatatagtgtgtgtagatgctgtcccctacctcaacatagatgccactatggcattgctgccgggattagatgaaaaagcatttagtgaagagccctatttccaactgacattcagagaaggctctctcgatggaatgtggatagtaagggacattgacgatctgcgtttagtccagctcggcgataactgcgccgggttccagctcacctatcatgagccaagaaggccaacaactttaaagtcacttttcaatacttctatgtatcaggcattagtgattaatgatgagtcttctgttgaaaactctgccccacgtccaaagcaaacgcttgagctgcctcccccacgtgtaaatgcagtcgaagaacattctggcgacgtggaatatcatggaaccgatagtgcatccgcgactggtccgctgaaaactgaggctgtggaatatgaacattatcaacatctttttgaggaagaagatgaagagcatgagatcattgattataccgatttcacacagcttagtgtttctcggccagaagtcggtagttgtgcaacaagctcttcggtccataatgaaaagcttctccccgagccgtcagaattaccagaacttaaccgagaacagaacgctgatccccagggtacgattgaacgctctatggatgtttctgtaggacaagaaaactcagaaccagatactgagggtaactgcccaccaccagctgaagttgtgtattcccagaccgaagcagccgcaaccagtgtgatggcaagtgaagagcccgccttacctcctgtacttgaagaatcaaatggagagcatgcgcccacagacgctaaggggcatcatctttcgccagcactggccagactgttcgccccaacagcaccggtagaaaaacaaaatcccaagcgcaaccggaataaatcatcggacaaagcagaagtacaaaaaccagcatcacctgtttctggtcacaatctgaacagtaaagtctttgcaactactgaatcagaccaaaatggtgaattctcgcttataagcgaaggtgacgttacagagcttgaatttgtagaaattgcgtcagtactgcatcaaattctgtccaaaatggaggtggcgtttaaaagaaagcgcaaaaacagatttatggtaagtactcctaatactctctatctgacccaatcttgcgtggaaaaatttgggtcgcagttagaggctcaagatcttttcaataagcttcctcagtacctcgttaattctggtgctgtgatcaatacaaaatgccatgcatttaacatgcctactttgctggccgcatcagaccgggcgaaagtggacattgaacgaattatcaataacctgaaagaggctgggaacctataa

SEQ ID NO: 392137 - DNA, 240 bp, Salmonella enterica
  misc_feature (195)..(204): n is a, c, g, or t
atgattaaaaacaacgagttaatccatccttttgacgtaaccagtaatgaatcaggtaagacttatcaactgacgcctaactcgtccaagtcggttcagcccgtggccctgttgagattgagtgtatttacccctgtcggcacaaaagaaaaccgcgaccgaaactttgaagttgatgcctctgatgagctttcnnnnnnnnnnttgcaagatcggagggttatgacgacatcaagataa

SEQ ID NO: 392138 - DNA, 582 bp, Salmonella enterica
atggctttcagtaaatatggttttacttccgagaagattaccctgacttttaacgagtttgcgaagatgtgtggtatcagttcaacaaacatcaacaaacgaactcgtgcgcgctttaaagagtcattaatgaaccttgcatcggtagtgcttgccttctcagactctcggagtggtcggttcacagtaacgcatctggtgcagaaggctatgattgatccaaaaagcgatactgttgagttggttggggatccttctatgtgggaactgtatcgttacgaccataagacattgttaagccttcaggttctatacattttggctaaaaaagaagctgcgcaatctctctatatttattttgaagcaatgccagctggtacgttgttcgttaatatgaaacggttgagggaaaggttgcttcttacaacccctattcgtacgcaaaaccagataattcgtaaagcaatgcgggaacttgaatctatcggatatctcgattatcaagaagttaagaaaggtcgcgacatacaatttcagatcttcaaaagaagccctaagctggccctcgccaaacaaggttga

SEQ ID NO: 392139 - DNA, 411 bp, Salmonella enterica
  misc_feature (394)..(403): n is a, c, g, or t
atgaaggtggatgggaaagtgttagttgcgaaatttgcacttaaacagtttttcaaagctgttgaacatggctttgtacgtgtagggcagcataagattaatcgccgtattaatgatgacttaaagttatgcattgatttcaatactgatgattatccggcaaatatgccagatatatatattaagtttaacgatacatttgatgggaacggggcgttatattgtgacaatgatgccctcatatccctctataccgatgttgcttcaattatcaatgtgccggtgatgatggaagtaagattgatcaataaaagagggcgtgttgtctgtgattcttcgcattcaacttacgtatctctcgaaagtaatgaccgatacagagtaactgatcgcnnnnnnnnnngtctatga

SEQ ID NO: 392140 - DNA, 516 bp, Salmonella enterica
atgcgtattaaaaaagatgtcatcatgcccaataatttcaccatggatttgcgtgactgtaaccttctgggttcagctgttggtgatttggcgtcacagcgtgcttacatacgtgccacttctatctcttgtgttaattcaaaagggaaagcttttgacgtaaaactggaagcatatgctgtaagtgaaaatgacggaaaaaatgggatccgaggcacgcttatcagccgaaatggtaacgcaattgcaggagctgccggtagcttaagccccagtaaggtatcttcacttaacatcgaccctaattcacaggctcagtatcagtcccctaattttggtgcacttggggcattagccggggctggtgcagctcaaggtggccttaatcgactcgtcgattactacaccgcaattgcagaacaacagtggccaatcgtagaaattagccctggccgagctattacatttgtcgttcagaccggaactacaattccaacgaatctgaccagtcgctga

SEQ ID NO: 392141 - DNA, 126 bp, Salmonella enterica
atggcttcggatattattgatgctggtaagctcataccccttagaaaaaaggccctttttctttcgaacatccagtacaacaacaacactctggcgaccaattgcctgagcaagttcggtaattaa

SEQ ID NO: 392142 - DNA, 207 bp, Salmonella enterica
atgaaaaatgaaccaacccgtctcatccgtctaccagaagttcttaagcgtacaggctacggtaaagcgtggatctatcgtctcatcagtgaagggcgttttcctcagccagtgaagattggactccgtgctgtcgcctttgttgagagtgaagtcgaggactggattcagtccgttattgaaacgaccagaaaaaatgttgcctga

SEQ ID NO: 392143 - DNA, 321 bp, Salmonella enterica
gtgtttaaaggggaaggagagcactggtcttttgcgctgcctaaaagtaataccactttggtagagcgtacaactgaaaaagagcgaatatctgatctatgctcaaatggtatgtacgggtttaaagataaagaaatatttattaacgcttacattgagctgattcggagtgatccacgtgaactttatattgcacctatgtttaattttatgatcgctaaaggaatgcgtgtacggtataagttagttaagcacgatgatcatatctttatggggacaccaaccgaatatattgattttttaggtgcaacgaatgtttaa

SEQ ID NO: 392144 - DNA, 237 bp, Salmonella enterica
atgggtgccaatttaaatggcacccataaattaaaagtaaaactaggaaaaaatatatttggctgttattcgttaatccaacaatcctttcgaaaccttactcgccgtctggctgaaattatatcggtcaacaacattctctttgaaccagatctcaagagagttcatgtgagccgtgttgctgttcttcagcaaggccagaccggggatgtagttcgagatctgactctcgcctga

SEQ ID NO: 392145 - DNA, 291 bp, Salmonella enterica
ttggggactgggattttagatatctggctacaacgtatctcttatcacattgatagcgatatagaatataaagagaccctttgttctatcgtatctggcgcacacgataaaccacatgagcatgtttggaattcggagtggattactgacaataattttaagaacatagtgatggctaccacttttattgattctgaaaagcttgaagactgcgagccagtaatacctgaagatgaagttgtgctatatccttatgatagtgactatgattatgaggaagaagaagagtag

SEQ ID NO: 392146 - DNA, 348 bp, Salmonella enterica
gtgatagttccgttgcatgaggggctgaacgatgtaggagaggttgaatttatagaggcgctaagtcgaaatagtgtactggttaaaaacagagaagctactaaatttgttgaaggggggctgcgcgatctttgtcaggagtttgaaaccatatttcatactcttgacccaaacgatgactttaaatccgttgatgactggattaagcagttaacggacccctgcgaaatagtcgatgatgtaaacttaacgggggctatttctccgagtgaaatcatagaggactatttttctgacgaatcagcgccgcggctgaaattcgttgatgaccattacagaaaagtgtga

SEQ ID NO: 392147 - DNA, 159 bp, Salmonella enterica
atgggcggtgaagaaaatatgataaaggccagacaagaaaatgctcaggctataaaagaggaaaatgtagattgtagctatttacctcgaccggccatatgtgaggtaggttcaactacgctggatccggttacgggcaagcagttgccgaaatattga

SEQ ID NO: 392148 - DNA, 174 bp, Salmonella enterica; identical to SEQ ID NO: 382219

SEQ ID NO: 392149 - DNA, 375 bp, Salmonella enterica; identical to SEQ ID NO: 392072

SEQ ID NO: 392150 - DNA, 246 bp, Salmonella enterica
atgggcgcgctgtatggcgtgctgggcagtaaaggcgtagtgaccgtgacggccaaaaaacgtgagaaatgtaatcgctgtatggattgttttcatgtttgcccggaaccgcatgtgctgcgtgcgccggtgctggatgagcaaagcccggcgcaggtaactcaccgcgactgcatgacctgtggccgctgcgtggatgtctgttctgaggatgtttttacaataactatacacaaaatcatttag

SEQ ID NO: 392151 - DNA, 348 bp, Salmonella enterica
  misc_feature (314)..(323): n is a, c, g, or t
atgacaatgaaagaaaacacctcctcaacagataataccaaccttaagccagaaactatttctgatataaaatcatacaaagtaagtggttttgacttgatagttacgacctctaatggtaataccacaactttaaaagatggcttaaccaacctggttttggggaatgttgagttacgtgataccacgggaaaaacaattaatcaggatcatattatctcttctataaaaacttatcagcttgggttagatacagtctacctggctgacaagttagtaagcgatgaatccacaccagaaactacaaaggatgnnnnnnnnnnaaggatgagtcagaacaacaggtaa

SEQ ID NO: 392152 - DNA, 243 bp, Salmonella enterica; identical to SEQ ID NO: 141335

SEQ ID NO: 392153 - DNA, 417 bp, Salmonella enterica
ttgcatatcttcaccgctggtcagcgccatcccttccggggcggtcatcagcagcgcctcgttgagcggtttcagccgctgcgcaaacatctgtatctgactgtcgacatccgccttcagcgcctgcgccttttctgcggctatctccagttgttgcagttgctgattaagcctgtcgatttccttcagcgcggcatccctgtccagcgcctcgccctgcgccttcggctgcgcgtccgcgctgacaaacagcccctttccggcgcggataacgccatgttcgtcggtgcgcaactctgcccccgtgccacgacgctgtcccttgctgtccaccagatgcccgctgttgagctgcgacttaccgtattccgtggcgagtttgatgtgctcttcaccacgcctgtcttccatccgtag

SEQ ID NO: 392154 - DNA, 1020 bp, Salmonella enterica
gtgccagcccgacgtttcaccggcagtcggtttcgccatccgcagccacaggtagccgtaaccggggtccgtcgcatcccggtcgaagtccagcctgacccggtagcgaccctgctcgtccaggtgaggggatatatcgttcttttcccggctctcaatccgggccggaagcgtccccgggatgagcggacgcgggatttcctccgggcggaaacagtaacgttcggtgtaaggcaccccccacaccgacacatgcagacgggaatcccgggccccccggaaggtcaccagggtgaggataacgccctctttcagggcagtaatgacatccccctgcggctccagcacctgcccgggcgtgaggtggcccgtattgctgaacaggtgaatacgggccgacctgctgagctcccgctcgtgatggatacgcgcataaaacgcgccggattcggtttccggctccggactggtgtcatcacccgcgtcacgataaggggcggtgtagcggtagtgtgcgccggtcgtcacggcatcgcttcgcacgctgaccgtcgcatccatcggcatggtggctgtccggtagttgtaatcccgcgtggcgacggtgccggtggcaatgttgtgccaggttcgcacatcccagaccgagtctgccgcgccgtcgaacagacccgatggctcgctgtagggcaactgcacatcaaactggtagttaagctggctgtcggccagtatgcaggtatccagaccgcgcacgtcgtccatctccgtacgccagtaaatccccacctcagacagaatgcgctggataaactgcaaatccgtttcccgccactgggtgataagttcacgtgccgggtatgttcgctccagtctgaattcaaaatcaggtccttccagaccgtgtttacgcaggacctgctccaccacctccgggacggacaggttctgaaatacggcgcactgccgggtgtatcccaggagcgtcaggcgggaactgagcgtgagccggtagtgtga

SEQ ID NO: 392155 - DNA, 138 bp, Salmonella enterica
atgcagggaggtgaactcgatgtcccatctgaacggttcgctcagggcttccctgccacgaaaacgcaggacatcagctttcacggtgctgtcattgatatccagaacatagcgggtctgtccgtcaaaaagcgctga

SEQ ID NO: 392156 - DNA, 894 bp, Salmonella enterica
atggcaaataccctgtctgagcttttccttttaaagggagagttgatcacgactgatccctttggggaccgtgaaaccagctactggtcggtaccacaaggttcatgccatgaatggattcaatcgctgaccaccagcgaaggtcctgaacgtaaattcgttagtttccgtatttctttcgataacaatgacgaacggtgtgatcttgtaaagaagaatgcccgtatgcttggttgttatcttttgccttatttcgtcgatttgacacgcacggtgggcgcattcattaatttgccaggtagtgtctcttttaaacaagtacagcgcatcaaaccccagattcatccagaaacaacacatagtcatatagttactattgaggactctccctttctttctcggttaaaatttaaaatcattactgccatagatcggcttcctgaccctaatggcctttatacaaacacctttaacagcattattgaccgtgcactgctgactcatctcaaaaccgaacaggaaaaaatagatagtccaagagtctgcaaaaatgtgatttcggcttttgccgactcaactctttctctgccggtgtttaacatcggcctaaacgagcagtacagatactggacgccgtggggcatcaactttatagaattttcccgccaggccgcaaaagcaaggaccgctgtatttgttcctgatgtgggacagatcgagtggaaaagcgcagagcataaagaactggcggagttaagcctcatcgaccaaatcatacctaaacagtaccactggctcctgggtatcccgacgatgtggcgtaacaactattgcaatcacgatcagaggctagctctttttcgtgaatggagggaaagcaatggctgcggataa

SEQ ID NO: 392157 - DNA, 204 bp, Salmonella enterica
atgcggcacgctgcaagtgattttaaatgccgtgtgttatctagggttattagacacattgttggcttttttacgcctgttttctgtacggggaaaatgtggggagttatccaggaaaaaaccgctaccccgttattaactacaatacataaattcagcaatcacatcgccgtactaatgatccagaaaaaggtctttttttga

SEQ ID NO: 392158 - DNA, 414 bp, Salmonella enterica
atgtgggctgatgataaaaagccacgtaaagaaaaagctgcacaacgtttgctatttgctgttgcatattcatattgtaaagcaaacaacttagatataagtcctgaagccgattcaggaaatggccccgttgactttaagctttcacaaggctttgaacaaaaagtattagtggaagtaaaactctcgtctaatggaaagttattgcacggatatgaaaagcagcttgagatttataaaaaaggggatgacactgaacgtgcatttttcgtaatagttgatattggctatatcggagacaaatatcaaaaagttcagcaagccagaattgctgccgaaaaagaaggaaagaaagtttcaaaaattattcacatcgatgcccaacaaaaggactccgccagcaaacgcatttaa

SEQ ID NO: 392159 - DNA, 150 bp, Salmonella enterica
atggttatttcttctctttcacctttctgggcttttcgtttgcctgtctccactgccatggtgggacagggttggtgtctgcccataacccttttgcctccttttgtgcgcgggatgcacaaaaaacaatggctatcgaaaaaaatataa

SEQ ID NO: 392160 - DNA, 1884 bp, Salmonella enterica; identical to SEQ ID NO: 377375

SEQ ID NO: 392161 - DNA, 732 bp, Salmonella enterica; identical to SEQ ID NO: 378102

SEQ ID NO: 392162 - DNA, 543 bp, Salmonella enterica; identical to SEQ ID NO: 377417

SEQ ID NO: 392163 - DNA, 426 bp, Salmonella enterica
atgtattccctgataatacagtacatgggattaataacaggtaaaattatgagttgttttactactccagcaataatggaaatgttaggtcattatagatggcgggtttacgaaccattccgattttatctcagtgaagataaaaatgatgtaattgaagtgccagtcggttttattaccgatctagccactgttccgcgtattttctggtcactgttaccaccggatggagaatatgccaaagcagcaatcattcacgactacctgtaccactattcactacgcgacagaaaagaatccgatttaatatttctggatggaatgacagtactcggtgtgccaaaatggaaacgaacattaatgtatcttgctgtaaggatgtttggatggaaatattatgactctcatacttcacagtctgattaa

SEQ ID NO: 392164 - DNA, 255 bp, Salmonella enterica
  misc_feature (230)..(239): n is a, c, g, or t
atgacactgattattgctgaagcaggggttaaccataacggcgatgaaaaattggcgtttaagctggttgaagcagcgtacaaagctggcgctgatattgttaaatttcagactttcaaggcgaagaatttagtgactgctgatgcagagcaggcaaaataccaacaggtaaataccaaaaaacaagaatcacagttagcaatgcttagtaggctagagctctcatgggnnnnnnnnnncaccacggactggtaa

SEQ ID NO: 392165 - DNA, 1296 bp, Salmonella enterica
atgaagggaatgcaaaaaatcagcaggggtaaaaacttctctggtgtcgttctctacgcattaaagccaggctctcaccataaatgcacaccttatgtcattggtgggaatatggatggaagtgatgctggagatctgatagctgaatttgatgcaacaaaaacgcttcgcccggatgttgctaaacccgtctggcacaattcgcttcgcttgccgaaaaacgaagcgctgacagatgctcagtggtcagggattgctgatgattacatgtcccgaatgggcttctctgaaacgcacctcagatgctatgtccttcatgatgatgcggccggccagcacatccacattattgccagtcgtatagatctatccaatagaagcctttacttgggcaaaaatgaaaacctcatcagcacccgtatcatccaacagttagaaatagatcaccatctgaccaaaaccaaagggccagaattggtagcatcaccatccccagcttcgctatccagaaaatccccgccccaaaaaccgataatcccaataccgaagcctaaaaagctatcgcgtaacgaagcgatgatggagaagtataaaggagagctatcacccaaatcggtagccctggaagcattacttgtcgataaaccatccaccactgattttgtgatgcaacttgccgccaacaatatcaaagcgcttccgaatattgcctcaacagggaaaatgaatgggttttcattcgaatatcaggggattgctttcaaagcttcgcagttaggtaaaggttattcttggtctgccttacaaaacaggctagattaccagccggaacgcgacaatgctttcctgtttgcattgaaaatgccctcagtcagtaaggcatcggttagcgaagcgcctaatagtgccatagcaacacatccccatgaaatcacaacagaagacgtgaacaatcctgtcgaatcgcttatcctcgataaccatgctggtcaggacgaatacactaacgcctcccacttagaagttggtgctggtgctaaggaatcgatagcaatcgaagagttaaaagaggctcccaagcgaagctatacggtctcatcgtttagatggcttgaaaccataccctatctccaaatcatcattggtatgttgaaaaacctaaaaatcccaacgctgcaacgtcctaaaaaacacaaaactatcactggcgtgagagtggtagaaattacgccctcaactacagcaaccgacattgaaatgccctcaattcatcgtagaccatcgccaacaatgtaa

SEQ ID NO: 392166 - DNA, 258 bp, Salmonella enterica
  misc_feature (152)..(161): n is a, c, g, or t
atgggtaaaaatgtgatctatactgctcgctcagattttaactatgtctggatgaagataaacgatggtttcgaaagcagcgatgccgttttctgtggtgtgctcagcatcggcaacccgcagttattgattcgtagcctcatcagtaccannnnnnnnnnaccaattttgactttacgaaaagcctttttaagtacaatgaaacaaaccagtttgtacaagagcacaggagcgattggctggattttggtcacttga

SEQ ID NO: 392167 - DNA, 441 bp, Salmonella enterica
gtggaattacagagggagcttgtcttcctgcatgcgccggacttcagccgcttcgaaaatatcacgcaggcgctggagctgctcggcgaggataagcaaaaggacaaaattcggcccaatctcatcaggattttccagcatcaccccgtcagaatacgggcacgctccaccagttcacgggcatcgggttcaacaggtttcaggttcatgattttctcctttcactgtacccattcaccgccccggatacgggcgatatccagcagcagtgacttcatcgcccgactcaccgcacacagcgtattgatcagcggtttatcagcattctgggtatcgggtctgcgcaccattcatcaaaccggatgtgtatccgggcgaatattgtcgccagcctgtccatctccacacgctctacgggccgtttttggttatgatcgctaa

SEQ ID NO: 392168 - DNA, 1560 bp, Salmonella enterica
atgtcagtcacaagaagaaacttgctcaaaggactcgcagcttcaagcgcattaggcgcaacagcagcagctgccggtttaagtgttacacacactaccgatacagttgccacaactaaaaaaataaccaagaagcctaatttgttaatcgtctttcctgatgaaatgcgggcacagtcgctgggctttatgggtcaggatcaatctattacaccctttattgatcgatttgcgagtcagagtgtcgtattgaggcaagcggtttcgaactacccgctatgtacacctttccgcggtatgttaatgaccggccaatacccatatcgcaatgggttacaaggcaactgtcatactggcgcaaacggtaattttggagggaaagattttggtattgagctcaaaaaagaagccataacctggtctgacattcttaagaaacaagggtttagcatggggtacattggtaaatggcaccttgatgcgccagaagcacctttcgtgccaggctacaataacccaatagaaggacgttactggaatgactggacaccaccagaaaaacgccacggtttcgatttctggtacagctatggcacttacgacttgcacctcaacccaatttattggagcaatgatacgcctcgtgataagccgttgaaaataaaccaatggagcccagaacatgaagcagatatggccatcaaatatctacgcaatgaagggggcaaatatcgtaataacaacgaaccttttgcgctggtcgtttcaatgaatccgccacattcaccgtacgatcaagtaccacaaaaatatcttgatcgctttaaaaatcagacatcccgcactttgaataaacgccctaacgtagtatgggacaaaacgtatcaggaaggctatggacctgaatatttcaaagaatatatggcaatgattaatggtgtcgatgaacaatttggacgtattctggctgagttggagcgcctgaaactggataaagatacgctggttgtcttcttctccgatcacgggtgttgtatgggttcgaatggtcaacccactaaaaatgtgcattatgaagaggccatgcgtattccaatgatgttccgctggcccggtaaactacccgcttgtcaggatgatttgcttttctctgcccccgatatttatccgacattactaggattgatgggcttgggtgagcacattccagataacgttgagggtactgatttctcaaagactcttatgggacatggtggcgataaacgtccaacctcacaattctatacatttatgccttacggcggacaatcttacggtagacgcggtgtacgaaccgaccgttatacactggttattgaccgtaaaataggcaaaccacttacctatattttacatgataataaaaatgatccctatcagatgaaaaacatcgcatcagacaatatgcccctggtgaataaactgattacagaagagctgattccatggttggaacattcaggtgatgtttggcgcccaaccgaagtttcagccaaggcagtaaacgcttatatttaa

SEQ ID NO: 392169 - DNA, 1401 bp, Salmonella enterica
atgaaaaaaattaccctctatgcgacaacggttatcaccgttgggctgttatgttatttaggtttgtccgggtatgtatggtattacgacaaacagcgcagtaaaaaaagcgatgtgcaggcctcggttgtgggagaaaataacaaaatactgggttatttcagggagaaaggatgtgattattgtcatacgccttctgctgaattacctttttattcctcttttccggtggcaaagcagctaatggattacgatatccagctcggctacaaatcgtttaacctcgaggcggtacgggccgccctgattgcggatacgccggtgccgcaaagcgaactgaataaaattgaatgggttatgcaacatcagactatgccgccaacccgctatgtcgcgctgcactgggcggggggcgtcagcgataaagagcgtactgatatcctgaactggatagccgatcaacgtaagcgtaactatgccagcgccgacaccgacgccgcgcaccggaatgaacccgttcagcctattccgcgcaatattcccgttgatgcgaaaaaagtcgacttaggtttccgcctttatcatgatgaacgtttatccggcgacagcacaatatcctgtgcgcattgtcacgcgttaaatgcggggggtgtcgatggcagaaaaacctcaattggcgttggcggtgcggtaggaccaataaatgcgccgacggtattcaattccgtatttaatatcgaacaattttgggatggtcgtgctgcaaccctgcaggcgcaagcaggcggaccgccgttaaatcctatcgaaatggcatctaaatcctgggatgaaattattagcaagcttgataaagatcctgtcctgaaaaaagatttccaggcggtttatccgcgaggatttaccggagaaaatattactgatgcgatcgccgaatttgaaaaaacgttgataacgccggattccgcctttgataaatggctacgtggagatgaaaatgcgctgaccgcgcaacagaaacacggttatcaattatttaaagagaataaatgtgcaacctgtcacggcggtatcattttaggcggacgctcttttgaaccgttgggattaaagcgagactttaattttggcgaaattaccgcagcggatattggtcgtatgaacgtcaccaaagaggttcgcgataaattacggcaaaaagttccgggtttacgcaatgtcgcgttaacggcgccttatttccatcggggcgacgtaccgacgctggatggcgcggtaaaactgatgctgcgttaccaggttggtaccgatctgccacaaaacgatattgatgatatcgtcgctttcctggaaagcctgaccggtgtttatacgccatatcaacctgaatatgcgcaatga

SEQ ID NO: 392170 - DNA, 690 bp, Salmonella enterica
  misc_feature (626)..(635): n is a, c, g, or t
atgaaagacgctaatggaaaggacctctgttacaactacgaagaaattaagagtatgcctgatgcatgtagttcttataaaaatgatgcagcatgtgtactcgataaacaaacatgtgcagagggttggttcgatgagggcactaacagctgctacatgtatgaacagaaatacacctgtgacagaggtaaggatgtagttcgtgaggttgaatcttctacaaatgcctgtgttggcatgatcccatgttctggaggaacatgcgaaactgggccaaaggaagagaacaacgattttggaaaagttgcggcttattcaaacatggttcagtacatgcagggcgaagccaaatgcgaagaccctaacgatgccaattcctgttctgtctttgaaggaaaacctgaatggtgtggtcgttcagtaggctttgtaaatggcctggcaaagacggactgctgcgaagcaccgcagggaaccgcaggagcacttgaaggtatcatgcttgccggatctatgatcagaaacactaactggaccagagttaatgctcagctaataaaatggaccggcggtgatacaggtacatgggcttctatgtccaatgcggtcggtgagtggactgcatnnnnnnnnnngtgctggccagttggcacaggaaacaatgtccagcttcggtataggtcagcttaa

SEQ ID NO: 392171 - DNA, 597 bp, Salmonella enterica
atgtccagcttcggtataggtcagcttaagcagatggcaatgaagaaagcctacgaattgctaccagatacagttcgagactttgtctttaagaacgttgctactaccggaggagaggttgtcttctcggctgcggttcaaaactttatgcttgcattaaacgtgatcggttggatttatacagcctatcaggtcactaaaatgcttttagaaatgttggtagcatgcgaccagaaagagatggaagcttctattcataagaatcaaaaatcctgttttacattagatacggaacgatgcgtcaaatatctgaatgttggtttcacaaagaaatgcgttaaaaaagcaacagacatgtgctgttataattccatgttgtcacgcgttattatgcaacaagcttatccgcaattaggaatagaccctgtcgcctctaattgcgtggggctatcaataaagcaaatacagcaactggatttcgataaaattgatctgacggagtggattaatgatgcagttcaggtaggagaagttcctgatcaatattcaaaattctcaacttccatcagaacgtaccaaggaagcaatgggcggtga

SEQ ID NO: 392172 - DNA, 159 bp, Salmonella enterica; identical to SEQ ID NO: 392147

SEQ ID NO: 392173 - DNA, 603 bp, Salmonella enterica
atgacaatgctcaaattactgattattggcgagtgcactgctgaaccctatatagatgccagcctgacctatataagcgaagtggaccctatgtgggaaagtgatctgcttacactcgtcctgaatcccgaggcagtagtttttgcaaacccaattgcctcaatggtgtgcgctgctgactgtgtagcagtaacagcaggaaaggataatctcgctgcatacttttgtgccggatgcgatggcaacctttacccattaaccggccacatttacgcaaatgatgacgctgtaaggacgagttcactgattacccagcgtcttctgacaaaactacatcgccaaggcatgctgatgcgaacgatgggagcagacgcaatgtgtgagaaaacgtgggaatactttacaccacgttcccagtatcggctttcaatgcttttccctactcctgaggcgaagggaccggattgctgtcatcgtcttggtgattcggtacacgactggtcaacccttaaaggtgggcgcaaaaaaataggcaacgataattatgtctatatgttgtggcgttacaatgactgttgtgttcgctacgttccaggcgtttga

SEQ ID NO: 392174 - DNA, 294 bp, Salmonella enterica
atgaacatcgtaaaatccggcttcagttgctgtcattggctgattagtgttgcttttaccaatatcaaactgcgatttttgaagcatcgtgccttcaagaaaggggctgcaccaggggctctttacaacttctacaatcttcaccggctgaaagactcaattgccaacctatttccggtacgccgttctgatctgtgcagtagcaacccggacgtgaaggtgcagcgccttctggagcagcccctatgcccattatcctcatgggaaaaatgcagctccaacagatattcttaa

SEQ ID NO: 392175 - DNA, 1128 bp, Salmonella enterica
  misc_feature (520)..(529): n is a, c, g, or t
gtgcctctttttcacccgacgttatatataacaactcaggtcagaaaccaaagtgattccatatctacagtcgaactcgttgccggtgctatttccttattctgcaatttcctgtttgacagaaatattgatatagaggaacgactccgcacaggagagaaccttgctattcatgaaatagatgctctgagggattattgtgagaggaaggtaaggctgagaaagtctttaccctatgacattcagaaagcgagacttgtaaacagtgcaacgagacacttcaggttaacccacatagcgagttatctgagctggttaggggagaggttgaatctgaaacagaataatacaaatgagatggtagaaagaataaaacagagacgaccgaaactaagaaggagatccagaagatataagcaagacagatctctcgatgaaaaacagatagcatcattacttgaaatcacaatgccgggatctacgctgaatccatttaaaaataatgttcagggtagaaacnnnnnnnnnnttattatacttattctctattcgctgggaatacgttctggtgaacttctaaatatccgtattactgatattaactttagagattcaagtctggcaattcgccgtcgagctgacgacaaagcagatcctagaattaaacaacctttggtaaaaacacaggaaaggaaactttcattatctgctccattggtcaaagaactacacaattatattaccaatattcgcagacactttaaaaaatccagaaagcatgaatatctctttgtaacccataaatcaggtcccaccaagggtatgcctttgtcatcaatggcatatcataaaataatagattcaatcagaaatgtggcacctgaagtcaacaggcttactggtcataaactcaggcacacctggaactatgaattctccaggaagttagatgcaatgccagatcctataagtgaagccgaacaggaagagatgcgttcttccctgatgggatggactcaaggttcaaagacagcacagatatataacagaagattcattgagaataaggcccagactgtggcattagcacttcaggaagacattaataaaaatggagatggaaaatga

SEQ ID NO: 392176 - DNA, 762 bp, Salmonella enterica
atgaatagtttaagcgagctattaaaagataaagatacatttgtatcgcatagcggtatatatatatcacggattcaacaactatcagttgaaaaattatctatttcgtttgccgaacgaaaactgatcgaaccgctctcatttacggctgttcctggagattttattggcattgttggtgcatcaggagcgggtaaatcatctttaattaaagcactgtcaaactctattaattgctatacagggtcagttaagctaaataatgttgatataacacacatttctgaagagtatatacagagctgtatcgcttatcactctacaaacagctcttttataaagggctcgcttcgtgaaaatttcatgatatatggtgttgtggatgatagtgatatcatagagatattaactttatgctgtagaaatcttattctttcgaaagaaaacgtagacgaaaaatttgttgatgagctaaacctttccaatggggaaaaacagaaaattttattatgtctcgcattatttaaaaaaccggagatggtgttcttggatgaatcgacatcttatctttcaaccgctgacgctttagattttctggaaagaataaaacatctttactcagatagtattgtcatttttgcgacccatgatatatcactacaaaggttatttactcgaaagattgaactctcacatgaacatttaagaactgtaagttgtaatacaacgataagtattccgaaaatgaaactgaatggatga

SEQ ID NO: 392177 - DNA, 330 bp, Salmonella enterica
atgatgcaacagagagatgaattttttataatcacgccgctgttttttactgacaagttttttaaacacatccatattcagccatttctgacgaagttgatatttcatctccccaaccacacgtttgaattcctcgtcagtattggttttacttttcgcaatgaaatcgatggcgtaatccaacagagaaacataagaactgaaaagctgctcgccatctttgctatcgataattcttttaataaaaaacgaattcttatcagcaagaaagttgaaaatagtcatgatgccgtcactacttattttatttttgttggatgcaacttgtag

SEQ ID NO: 392178 - DNA, 630 bp, Salmonella enterica
atggggccatccggatgtggaaaaaccacgcttttacgctgtctggttcgactggaaaaccctgattatggtaatatttactttcacggaaggaatgtttatgacaaagaatttaatattcttgagttcagaaaaaaagtcggttgtgtcttccagaactacgctttatatcgtcatcttaatgtcatagataatattacccttgccctatgcaaagtgtttgatatgcccggacagctagcccgggagaaagccttacatgagctacaaaaacttgacatggcctcacatagcgcgaaatatccttcgcagttatcaggcggacaacaacagcgtgtggccctggtccgcacaatggtcaccgaccccgaactcattattttcgatgagccgacgtctgcacttgatccgctcatgactcgtgaggtcgggatgttgatcaaacaacttcatgacaatggcgtcacgatattatgcgtcacccatgatattcgtctcgccaggttattaagcaatgacgtaacgtttcttaatcatggtaaaattcgggctgaaggcgctttttccgatcttgcctcacgagaaacagatccggatattcactgtttttttagcgaggcacaactatga

SEQ ID NO: 392179 - DNA, 198 bp, Salmonella enterica
atgttaaaaaatattgttcctgagcatccacaaagagatagtttagggatagaaatgagtacgttcgatgttagatgggcttgggaaattgggttaaatgatgttgattgcattggggttaatttaaaagaagatgacccctatattcctagtgatgtagctgagatcccattattgcaattgataaacagtaaataa

SEQ ID NO: 392180 - DNA, 552 bp, Salmonella enterica
atgactcgtattgcattagcgccttcaaagatggttttgcttatgtctttggtaattactggtgcccacgccagccctgagcaacccctaataaaagatacgccctttgtatcaggccaggcttataagaagggtttcttctggtatgacgatcctgctaaaaaaagcgaagctgaagaagaaaaggttttgccaccaaccggtgctgctagctcgccttcaaaagaggaaaaggtagatttaaattcaaaatggctaaaagagaatatgcctcgactgttaacgcaggcaatggataaccctaccgcagaaaatctatcacgttattacacggcgcaaaggttaatgctggatatcagtacgcgtttttctgacaaatcaaaagattattttcttaaaaacccgatgatgtctgaaaaacgcaggcaaccagtggaaaaggtggcactggatgctcaccgcactgttgttgaaaaaaatcagcaaacggtaatgaaagatatctttactaagtcaggtgtattaagagctgaaaaaaatcatcaccagtaa

SEQ ID NO: 392181 - DNA, 222 bp, Salmonella enterica
atgcttgtcgaaggttacagcaatcatgccgggagcgttccaggatttagctttaccaatatcaccttgagcgacgatttgctgcaattgctcaagtcgctttgtataatccagaccatcatcagactcttcaatttcaaagtgatacattttgatcatgcatggatcgtcttcattgacttgagttatttcatagaattgaccttcataagcattctttaa

SEQ ID NO: 392182 - DNA, 402 bp, Salmonella enterica; identical to SEQ ID NO: 379236

SEQ ID NO: 392183 - DNA, 171 bp, Salmonella enterica
atgatgataaaattagttttcattagtcagcacctctacaatctgcttcatttttttcttaaacttatactgttcatggaaataactttcctgcctgtcaataatgactttaagctgttcagtcttcttattttccatttcctcgttaaactcagagtttttcttcattaa

SEQ ID NO: 392184 - DNA, 228 bp, Salmonella enterica
atgttatggagtaaaggtcttggtgatctcattgaggcaaaaaagatcctcagacaaaagaatattcattttatcttgaatgttgcaggtattttggccgagggagataaagatgctatccctctggaactcattcatcactggcataatgaggggctgattaactggctgggacgatcgttgcattaccatctgtttatcctgaagggattccacggcttttattag

SEQ ID NO: 392185 - DNA, 399 bp, Salmonella enterica
atggcaagacatctgaataaaaacgatatagcgataataataaatgtgattgtgcagtgggatggagataaaatcacctgggatgggatatgtgcggctgtcgaatcattgattggtaagaagccgacaagacagtctctaaatatgaataaggacatcgttgcggcataccagatcaggaagaaaggcatcagagctacagacaatgccatcaggcgaccagcgaatctgaagatcgcagctgcgagaatcgctagtttagaaaagcagctttaccatctggaagagataaataagagcttaaaagagcagttcatccgatggcaatataattcatacaaatatggtttgaaagaacatcagctaaatgaagatatgccgactatcgacaggctctaa

SEQ ID NO: 392186 - DNA, 210 bp, Salmonella enterica
atgaaaaaaacattaattgttattttattatgtttttgtcactcagttttagcatatccataccgtatctatactgtcccggaaggggcattagtaaaaaacatactaactaatgaatatctaggaaaaacccctgtggttgtggacgtgagcaataccgaagctggttctacttttgggagttcttcgattttactttctactgactga

SEQ ID NO: 392187 - DNA, 231 bp, Salmonella enterica
atgtctcttaattgggttgaagacgaatggcaactcgatctcacgtttatcactggagaggttagctatttgatatgcccgatccgcatgttccgggccccactcaaacccatcacaaaaataggactttcgctcgggtatatccttatttttattttgataatcctgaaccagttgacgatactttcgctcattggagaaaaagttacttttgttaattacacgcagtga

SEQ ID NO: 392188 - DNA, 144 bp, Salmonella enterica
atgagcttgagcaaaaatttggctggcaacgtttccagcataaacaccatgagtcgcgttttacacgtttttacgaagactactggcttccacgacgttttgggtttcataagcggcgtgcccatttctcaagccttatattga

SEQ ID NO: 392189 - DNA, 606 bp, Salmonella enterica
  misc_feature (33)..(42): n is a, c, g, or t
ttgtcttcggcgatatggacctgtttgagatcnnnnnnnnnngcaaaatatctctttgagtcagagaaaaatgcactcttttttgactataaagagcgtgaggatttaaaaacttccgagaccaaaatctacacactccatggtgtggagcagcatgataatttcctgaatcagacgtttgaaaataccggtaaacacatcacgatagtctctccatggctgacctggcaaaagctggagcaaaccggttttcttgattccatgattgcggcgtgttcacgtggtattaacgtcacggtagtcactgacagaagctacaacactgaacataatgattttgagaagcgaaaagagaagcagcagaacctcaaagcggcgctggagaaactgaacgcccttggtattgcgacaaaactggtcaatcgtgttcatagcaaaattgttattggtgatgatggtttgctgtgcgtgggatcgttcaactggtttagcgcgacacgtgaagcgcgatatgaacgatacgatacatcgatggtttattgcggtgataacctgaagggcgagattgaggcaatttacaatagccttgagaggcgtcaggtttag

SEQ ID NO: 392190 - DNA, 255 bp, Salmonella enterica
atgcttcctgagcatctggtttcctctcattttcgcctgtcatcgccgccccctgaagccacagaaaacagtaaaaatttgcctaagggaaagacaaaactcagcgattacgagcccgatattttaattagcgctaacgctgccgggcaacacagaaacgtattatttgaagaacgcgaccgtcatattaaagaacgtctgtattgtgtggctaaaattgaaacgtttgcccgcctgataaacgcactacactga

SEQ ID NO: 392191 - DNA, 687 bp, Salmonella enterica
  misc_feature (647)..(656): n is a, c, g, or t
atgctcttttttacctcatgtctagttttcagttctattggaatcggagccattgcttataaaatactttttgccgaattggtcgggtggaaagctaatctattaaacgcattatcttatatgataggtatgcttggcttgctatatatatactatagggggatttcagttgacataaaattatcactaatagtcctgtatcttccagtgggtatgatttcattgtgctatattgtatatagatacataaagctttatcacgttaaaacaacaaaatcttattatatagcgattttacgtagatcttcagggttttttctttttactttattatcgatagtggtacttcaaacagattatatggtcatttctcaaaggctaactcctgctgatattgtccaatatacagtaacgatgaaaatttttggtttagtcttttttatttatactgctattttgcaagcattatggcctatatgtgctgaattgagagtcaaacagcaatggaaaaaacttaacaaaatgataggtgtcaatattttgcttggctcactatatgttgttggatgtacaatatttatttatttatttaaagaacagatattttcagtaatagccaaagatattaattatcaagtttctatgtnnnnnnnnnngcatatatttctgtattcgtgtttggtgtga

SEQ ID NO: 392192 - DNA, 150 bp, Salmonella enterica
atgttgactcactttacataccatcttcagaaactaagcgggaccattatccataccctgattatgtttgcatggcaattcttgagtattatgcgtttgatgcaagccaagcaaacaacgccacagctcttagaaactatcgtcttttag

SEQ ID NO: 392193 - DNA, 675 bp, Salmonella enterica
atgagtttcacttcacttccactgacggaaattaaccataagctacccgctcgaaatattattgagtcacagtggataacattacaattaactttatttgcacaagagcaacaagctaagagagtttcacatgctattgtgagctccgcttaccgtaaggctgaaaaaatcatccgagacgcctatcgttatcagcgtgaacagaaagttgagcagcaacaagaactagcgtggttgcgtaaaaatacgctggaaaaaatggaagtggaatggctggaacagcatgtaaaacatttacaagacgatgaaaatcaatttcgttcattggtcgatcaagcagagcatcatattaaaaatagtatagaacaggttctgttggcctggttcgaccaacagtcggtagacagtgttatgtgccatcgtctggcacgccaggctacggctatggcggaagagggagcgctttatttgcgtattcatcctgaaaaagaggcattgatgcgtgaaacttttggcaagcggtttacgttgattatcgagtctggtttctctcccgatcaggctgaactttcctcaacacgatatgccgttgaattttcactttctcgtcatttcaacgcgttactgaaatggttacgtaatggtgaagataaaggaggtagcgatgaatattaa

SEQ ID NO: 392194 - DNA, 534 bp, Salmonella enterica
ttgaacatcttcgatgaagaaactatagcggtaagtctatcaagcaaccaatcactgaaaagccagcgctcacaaataatatcgagtagtagcggcagtaatgtattaggcggcaactggcaaatccactcctcacgctggcactctttttcaaggccaaggaataacaacaaacgacgcaaacgtactaatgctgcggccaaacgactttgctccgagggttcgatgcatatgctaagttcaaaggctatcgctcttagcaaaatacggacccgttcacagcgatccggccagtctgccacgcgtctgaaccactgcgataagagcatttcatcgttgtctatcgcctgttgcataaaacgcttcagcgaggacagcgtagcggtatccacttcgccaagttccagtaaactaaaaacggcaagttcccatccctcctccgctgtaagcgtatccagttgcgattgcaaatcgcgttttttcttttttgacaacccgccggcagtaagcgccattgcaagagcgataatttga

SEQ ID NO: 392195 - DNA, 300 bp, Salmonella enterica
atgaaattgcaggcaggcattggctgcttcccagctggctttcgcagcaaggtatttcgccatattagcctgtgctccacaatcaagatgctgatcaaaaagctcgcacgctttaaaacgcatcagattagccgcttccactgcaataaatgcttctgcaataggaaactgcaccccctggttctgaccaatgggacgaccaaaaacctcacgctcgcaggtatagcgggtaacacgatccataaaccaatatccatcgcctatacattctgccgcaatcaaggtacgctctgcatttaa

SEQ ID NO: 392196 - DNA, 282 bp, Salmonella enterica
atggaggcctttcgggtaaaaattaaagatttaatagaaatgtcaattcctgggttgcaatacagtaagattagtatcttgatgcagcctgctgaattcagaatggtacctgatgtacccgtgaaacaaacattctggattatggacgtgatcaacgccaataaagggaaggtggagaagtggttgatgaaatacccttatcagttgatgttatcgttgacaggactgttaataggagtgggcatcctgatcggctatttttgcctgagacgccgtttttga

SEQ ID NO: 392197 - DNA, 360 bp, Salmonella enterica; identical to SEQ ID NO: 384202

SEQ ID NO: 392198 - DNA, 609 bp, Salmonella enterica
  misc_feature (587)..(596): n is a, c, g, or t
gtgaggggggctaatatcaggaaatctgaatacgaaagagataatagtaaaactgactatgaaaaaacaaagaatatagtgtctcaggaggttgtgacaacctattataacatcagtaaatatcgtgaaatgattgatggcgtaaatctggagaaagagttttataaaaagatgctggaaactttttcgctgttggtatcttccggtgtagcgatgcaatctgatatgcgtaaagtacaagtatctatcgatgcattaaatacccgaagcattatgtatcagtcgatgttggatgatgaaatgtataaaatgcagaatatgactggtctgaatttatcaccagttcagattcaaagcgatgaaaaattcaacctcttcaaaaaatatatctttgtcgaaagtcctgaaaaacttatggacatggtgatgaaatacaatgatgactataagatgcttgtcaatacccgaaaagccgcgaccgaagatattaatgccgcaaaatcatcctattttccgactgtagatctcgtttccagctatgtacagaataacccgagcggtagtgccaaaaaaagtgattatgaagnnnnnnnnnntcaacatttttaa

SEQ ID NO: 392199 - DNA, 375 bp, Salmonella enterica
atgattcttttaaccgcagaagatgtgatcgcctttaacgaggaaatcgtaacgggcgtaacgaacgaccccggcagggtggaagccgtcatcgctcgcgtggagaatgcgcggcactatgacgatgtaacggatatctacgaactggcggcgctctaccttatcaccatcgcccgcgctcatatcttccttgacggcaacaagcgcacggcttttcagtcaatggcgctgttcctgatggtcaacggcgtcgatctgcaagcctcccctcaactggaagatctcacggtagacgccgcacagggtaaactaaccgtccctacagtagcctcactgttacgcgcactgacagagccagatcaacacggagactag

SEQ ID NO: 392200 - DNA, 210 bp, Salmonella enterica
atgctatctatcagttacacctcagcccgtagccaccttgctaaagtgatggtcgaagcccaggaagggccggtactcatcacacgccgggggcatgatgaagtttacgttatcagcaaggccgactatgagcggctgacaaaagcaaaggcccgcgagcacatccagcacaaacaccgtgacaccatcgacgcactggcggacagatga

SEQ ID NO: 392201 - DNA, 621 bp, Salmonella enterica
atgcaaaaatcgcagaacggcgcggatattcttgacactgcattattcaggcaaagtatcggggtttacgacgcttccacctcacaaaagggactggtgcgcctgaatggcggggtgtctgatgcagatgacacgttaggcgctacttcaggggcggtaaaaattgcctatgacgcagcacgatcagcctatcgactggctctgttaaaatataccgcagacggagcaaccactggaaaagctggtcttgttcagcttgtgaattcaatgggcgggtctggttcactggtgatgccacaggtggctgtaactaccgcaatacagacttatccgtctctcggcaaaggtcagacattacaggatttaagaggctctcgtagtatagatgcaacttataccaactcaaccggattcccgattgcggtttacgtccgaatttctggcggttattcagcaaatttatacgctcatgtaaatggaatagagttcggcggcggtgggtcaacagcatctaatatatccatagcaacggcgttttttattgttcccaatggcgcaacttaccgcgtaatggctactggtgcgtcccctgcattacagatgtggtcggagttgagataa

SEQ ID NO: 392202 - DNA, 2067 bp, Salmonella enterica
atggcccagagcgttatcacttcagcatttgagcacctgaaagcgcaggaggccgcaggtggcaatcgtatcatcattgaccagtttgtatttgcaaatatccccggtctgaacgttactgatacgccaccggaaagcgagccattaccacctgatgcgcagatagttcaccgtcaggccgttgatcgtaacggggtggtaaacgagaataccgttgcctactccgttaccttaccagagtcagtgggcgattttacttttaactggctgggactggtgagcagcgccaccaatacgctttgtatggcggtatacctgcacccccaggaaaaaataaaaaccgcagatggtaaacagggtaataccctgatttattctgaaattatggaatatgccggggccagtgccgcaaccggtatcaccacgccggtaagcacctggcagattgattttacggcacgacttcacggcatggacgaggccacccgcaaagcggcgctggatatctacgggccgggcctgttctttaatgacgcctttaaactcaccgctcaggctacagggcaggcgaccttcgcgccgggtattgcctatctgcgcggattacgtgtggaactgggtgtaccaggcacactgacatattccaccggaatttcacaaactgtttatattgacgcggcattaaccggcacactgaccggggaaaataaagccacattcagcctgacgagtcagaaatcagcagactatatcgacagtctgggatttgcacattacgttgaacccgtcgccacaatatcagccagcggcgagattaccgatatacgaaaaacccgcaagccattaaatgaccgtcttgatggtgaatacctgacccgcgacgggaacctgaaagaaattgaggacaaaggcgaacaggcacaatctgacgcccgcgagcatatgggactcggaaacagcgccactcttaacgttggcaccacacaaggcactgtagccgcaggtaacgacagccgcatcactggcgccatgcaaaaagaccagaacggcgaggatatcccgaataagccgctgtttatcgaaaacgtcggtttaaaagaaaccctgaatccgacaaaacgcgtcagtattggcaacatcggaaccggcgcttttgacggcagcacaccgagcatcaatatcggcgacagtgatagtggattcatcggtagcgcagatggcgtactggatatttactgcaataacgccaaagtgggttatatcgataacgccggtctgcacatgctcgcgggcatagcaactaacagcgacgttgtactacaaagcgatgcacgcagacacattattatccagaatgcggatggttcggcacgtgcttatatctataaggacaaagatgatgacggtatccatattaataacggcgctgatggttggggggattttgttctaggtaaagacagcatcctttacgtaccattcgcagtccgtgcaggcggcggtaagaaactggctattcagtccgataacaattcagcattagacgcaacgttcaatttatgggggagacctgaacggcctaccgtaattgaactggatgacggtcagggctggcacctgtacagccagcgaaatcctgacggttcaatcctgtttacggtcaatggcgatattatggctaaccgtaaattgaatgtgggtgacgctacgttctccagtgacggtaatgttaacggttcactatggggtggctggctgaatgactggcttaataacaatctcagccgaaaaaataccgccagcctcgaaaccaacggctggtttaaggatgcgtcgaccggtctgattgttcagtgggggataacaggcgggaacctgaacaaagccgtcgttaaccttccgatcccattcccgaacgcgggtctttggtcgctgggttgggtagccggtacgctggatatgggtaacgatgactggtcaaactccgccagtctgttaaacaattctcagctaacggttacaaccgatcactggtggagtacagcctggatagcaataggaaagtaa

SEQ ID NO: 392203 - DNA, 2070 bp, Salmonella enterica
atggccgctgaacttgatttcacattaagcctggttgataagctgacgaagcccttaaaacaggcgcagtcggccttaaccggctttgctgacaaggcaacggctgattttaagcgcatcggcggcggtgcgctcgccttgtggggtgttaacaaagcgctgatgggcatgatgcgccctgcttatgatttgcaggacgccctggatgattctgtaggctcaggctatgccgccgcaggactggataaactcaccaaagccgcaaacagtttcgccattgaatacggtcgctcgtcgctggagttcgttaaaaactccacgctcattcgccgcagtatcggcggcattaccgataacgatctgcccgcttacacccatgcggcgagcgtgctcggcgttgccatgcgcaccggcaccgaagatgccgttaattacctttcccatatgactaatctgatgccgcagatggtcaaaaaaatgggtagcgtcgattttgcgggcgcaatggccggtctggcctcgcagatgaaaaacagcttcaacagttccctcaacgatatcagcgccatgattgagcagtcgaaaggcaccggcagcgcctacggcgtctcgctggccgaacagcttggtacgatgggaacggcaagccaggtattaggaagcggagccagcgcaggctacgatcagttattgcgccatctcggcagcggtgacgccaccaaagcgaccgggatcaacttccgcgacgcgcaggggcagatactgccgatcatgtcgattctggacaagctgaaagcgaagtacggcgaaaacattgaaggcaacgcccgcgcacaggcggcgatggaaaaagccttcggcaagggcgcttccgttattcgtgcgctgtggaataacgcggacggactgagcaagagtattaatgcgctgggtaaaaatccggggctgaaagccgtcgaagagatggcgaaaaaaaccgttgtaccgtgggaacagttcgccgccattctggaagccatacgcgctgaaatcagtctgcgtctgcttcccacgttcgggccgttctttgacgccctggtggattgcggcaaagagtttgttaactggcttcacgccttccccaacattgcccgctggattgggtatatcgttgttagcatgataagtcttgctgctataggtgctacggtagcgatcatcatgggaataatctccctgataaaactgggcgcggaagccagcggcagtataaagcttctgaaatatacccttgatttgttgcgcccttccctgatctcaacacgcattggcctgatgggtctgtggattcaggaaaaggccgtctgggtatggtcaaaactggtcgccctttgggcggggatctgcaaagtggcgatcgccgcctggaacgtggtattgcgcacctgtaccgttgccatgcgcctgtttggtattgccgcccggtttgcaggtatgggtctgggctttttactttccccgattggtttgatcctgctcgccattgccgcgctggccgtggggatctatttcgctatcaaatactgggatgacattaaagccgccatcatggacacgcaggcctttaaatggctgcaaagcgctatcgcgccggtagtggactggtttaacgatgcctggaaaagcatagaagacggctggaacaacctgactaactggtttaaaaacttctcgctggctgactcgttcggcaacatcacagccgggatcggcaagctgtttgacggtatctgggacgccatcaaaaaaacgtttctgggaacgtggaactggattgttgaaaagctcaacgtgatccctggcgtaaatatcagcacggtacagcagaacgtcgccccgacaccgcagccagcgcttatcaccggcaaccgtgccgccgcaatccccggaggcccggtaagcagtcaaatcagcaacaacaagagcgaaaaaatcatcaggagcgacgttaagcaggatatcacgctgcacgttgacaccatgccaacgccggggcaactggcggaatacagcgaactggcggcggggtga

SEQ ID NO: 392204 - DNA, 465 bp, Salmonella enterica
atgaaccgcgcaacgttcgcctttatcgtcttcatgggggttgtcgtagcctttctaggcgcaatgactgattacctacacgacagctacaccagggcagaaaaagcccgtaaggaagcggtagcacttgccgatgcacgccagcagaccattgacgatatgacgcagcgccagcgccagaacgccgcgcttgacgcgaaatacacacaggaattagccgatgcaaaagccgaatccgaaaagttacgcgctgatcttgcttctggccgtcgccggttgcaactccacgccgtctgtatgcccgccgccgcgcgtgataccaccgccaccggcgcaactgatgcagccaccgccagacttactccggacgctgaacggaattatcagcgtctcagaaccgaatccagagccgttacagcacaggtgaacgacctgcaacagtacattaccgaacaatgccactga

SEQ ID NO: 392205 - DNA, 354 bp, Salmonella enterica
atgaaatatttacctgacgttttctttgatctcattgtggctgcattgtttgcagccggtattggtctgaacatcgacggcgctacagctactgcgcatggtcttttgtggctgtatgccattgtcgtattgctggccttgttgcttcccgacgtaaccaaaaaggcagaagaggagtacgtacactgcccgttattgtgggctatctgcagactgataatggatctcgccattatcgcggtaactgtctggcttaactggcatgtgctggcagtatttcttttgttggacataggactacagcaggcatttttccataaacaggaaaagcgcctgaaggaacaggcagcatga

SEQ ID NO: 392206 - DNA, 480 bp, Salmonella enterica
atgagccagttcgacagcctgtatgcgtatctgcgccaggtgtttgacgcttccatatttgacaatacctatttcgattcgtggatgagtgatattcgtcttttgcccgccatgaaaaacatggggcttggacagataagaatgggcattcgccagtataacgccgtattcgactggcaacgctggccgtggcgtcagattgatcctgatttgctgttatgcacactgcttatctggcgcgacgaacaggctaatgacctctacagtcagcttgaacttgatgcgccggacatcaacatcgaacccacagacgacaacatagcagaagtaacaatcagtatgccgctcgccgatcccatcattctaatcccggacgagaccggccttatcaccatgaacgacacacgttaccgactggataagccggaagtctgggtggctgacgatatcactgtatccaccgtcaggggcgaggaatga

SEQ ID NO: 392207 - DNA, 471 bp, Salmonella enterica
atgaacctgaaaccaggctacagcaaagaccaggacaccgacgccgctacaggcgtgcttaaaaatgacggcttctggccggatctggttctggctgattttcgccgcagccggactattccgctcgacatccccgcatcactggcagaacaggcgctattgtctgccgtctttgaggtgaacgccgcactgactggcgtcaaaacccactacacgatgcagggcattaatcaggcttcagacgtggaaggcccgcagcttaacggcaaaagcgcgctttgcgcacagtacgaaaaagcggtatttgcccgcgctaaagcggatctgctcggtgagtttacggcggtgaatacccgccacgctgacagcaatatcgacagtaacgacacccgcgaaaccctgcttgccgaagccgcttttgtgcttcgggccattcagggcgctggccgtgtgggggtgtacatcttatga

SEQ ID NO: 392208 - DNA, 162 bp, Salmonella enterica
atgtcacattcagacataaaaagtgggcttgagcgcgtcaaaaacttggaagcactttaccctaagctaaaaagtcatgggcgaaaaatgacttttgaagaggcgttaaagaagacgcgcgagcggcacgctgaagttatcaggctactgatgaataactga

SEQ ID NO: 392209 - DNA, 420 bp, Salmonella enterica
atgcgtagttttatactcgacctgacgccggaacgctgggaaatactgaaagccagccccggaagcttcccgataaccgaagccgatctcccgtctcagccagaacccggcgacacgctcatcatcaggcacctgctacccaacaggaggggtattatagatcttggggattgcgtcatcgcctgggcggaaccggtagccagtaacccccaccgctaccggctgaaagtgaccttcaacatgacgccggaacaggtaaagcagcgctacggttgtcgttgcacgaaattatcgtcgatattgtgccggtacaaagaacaggaagcggaaaaagagcgggccaggtgggaaagaaagcgccagatactggcgcataaggcagaaacagcagtacggtatctgggcaacaaaaagaactga

SEQ ID NO: 392210 - DNA, 2505 bp, Salmonella enterica
atgaccccctctcgcggacgctgcgcccccactccaccaccaccgtttcccggcaaagccccggacacgacggtttacccgtatccgtggaacagcccagactacgacgccgccgcagcaaatgaacttaccccggaacccgtcaccaccagtgacgaccagggcgacccgtcattgtgttttgaatatctgacgccagacggcgagcgccgcgcgctcacgtatgaagaacttcaggagttgtgcaatacaaccctggaaaatcgcggccttattgagcaggaaaaagccgctgcaaaagagcgtgagaagcgcgaaaagtaccttcgccgccgtctgcaatcactgccggggatcattcgtcgccgtttcgccctgaaaatggccgcacttgatgaaagtaatcacgaaagcgcggttaagtggctgtttggcacctttgagcgccacatattgcgccgcgttgagatggtcaacgtgcagtattacccgtgtgacgcactccccgcactgttgctacccatgcgtgacgacttccatttactgccgtgggccgacaaaaagaaactcagacgcatggcctatacgctttccagactcatgaaaacggagtttgaaagccagtttgactaccagtacagccagaccgaagacctggatttctccgtactggacgcttacggctatatcgccagcaaggcccgcgccctgaatattgcgatccccggctgggataagtacagcaaggaagaactcgacgccgaagaggcgttacgggccgttggtcgtctccaggcggaaaaatggtggctgggtaagctgaggcgtattcacgaccgctggcgcgaacacctgatgatagcggcgggctatgtcagtaaacaggctgcgcctaaatgttcggaaccctgcctgaaagagtggattgcgcagcaaaaagccaacatggcctggctgcacaaaatggaactggaagacaaggacaccggcgagcgctcgccgctgatcgataaggtgctggcgagcacgtctaaccccaaaattgcccgcatggaactgcaaacccgtgcagccggttttcaggatatcgccgacgaaatggggcttatcgggatgttctacaccctgaccgccccgtcttcgtaccattcaacccgtatcaaagacggcaaacgtaacgacaaatacaacggggccagccccagaaagacgcagaaatatctttgcaaggtctggtcacgcgtccgcgccgcctggcaacgccggggcattcgcacgttcggttttcgtaccgtggaaccccaccatgacggcacgccacactggcacatggtgctgtggtttaagcctgaagacctcgaaaaagcaacaacagtgtttcgcacgtatgccttacaggaagacggcgacgaaccgggagcagaagactaccgttttgaagcggttcaggaagataaaagccggggccgtgcggtaggttatatcgtcaagtacatctcgaaaaatatcgacggtcacggccttgatggcgaagtggacaaagagaccgggcgaccgctaaaggaagaagccagacgcgttaaggcgtgggcctcccgctggaatattcgccagtttcagcaaatcggcggcgcacccgtcaccatctggcgcgaattacgccgcctgggcgatcgtgagctggtcttacacccggagatcgaagccgttcgcgccgtggcggatgcgcctgactggcaacattacaccatgtatcagggcgggccgttcgttgcccgcgacgatctcaccgttcgcctttactacaaccacaccgaaaacggcaatgattacggcgacacggtatcaaaaatagagggggtttacagtccgttcgcggacgaggaagccatcatctacacccgcaccgcaagctacaacatcgtgccgaaactgaatccggcaccgggcggggttttgcctttaacaggccgcgaagcggccccttggagttctgtcaataactgtacgcagcccccgaaatccggcgaaaaaagcgacagtaagccgacagaacttccgcgaaatattgacgatttacggcgatattcccgccagcaaaagcaggaaatcatcgaccgcctgaaacgtgaaccccggttaagtgcagatgaagccttcaccatcactattcagcacatgaaagcgaccgttaacgacatttccgctacccagtgggggccggaagtgaaagctgcataccgcgaatttattaatctgacgccggaagaacaggcggaacactggcggaaaaaactacacgaagaggcgctgcaacgtgcggccagctacgccagcgccgatgccatctaccagcagaagaaagccgaagccattcgtgattcggaacaacgtactgacagcaggaaacaggaacgccggatatctgaaacatccggcgccaggcgtacccttcacaacctgttatcccgctggcagaaagccacaagggggaaaaatgcgtag

SEQ ID NO: 392211 - DNA, 1044 bp, Salmonella enterica
atgaccgccaccgcctactacaacgaaatcgatccctttgccgccgcctgggtgcgaaaccttatcgacgctggttgcattgctcccggcgtcgttgacacgcgctcaattgaggaagttaccgccaatgaccttaaaggattcacgcaatgccatttcttcgccgggatcggcgtctggtcttacgccttgcggtgcgccggatggcctgacagtcgccccgtctggacaggttcatgcccctgccagccattcagccagtcaggaaaacgccggggattcaacgacccccgccacctgtggcccgcatggttttaccttgtatcgcagtgccgccctcacgttatctttggtgagcaggttgcaagcaaggacggccttacatggttcgacgttgtacaacttgacctggaagaggcggaatacgccgtcgcagttgtcgatctttgcgctgcgggcttcggtgcgccgcacatccggcaacgcctcttctgggtggccaacgccacttacaagcaacaccaaaaatgcctatcagaatgcagagaaagtcatcgcccgtattctggccggtcgccagcagaatctacaggatattgcctgtctcacgggctggcccacaccgacaacgacagcagggaaaggcggctatcagggtggcaggattcgcaacgggaagttgtcaacggatcgtctggatgtggcggcacagatagcaggctggcctacgccgacaacaagcaacgaccgctcaccctgcccgcaagaggctatgaagacatatcgcgacaatggaacaaaaattcagaagcgattgcaggatttagcagcgacagcggcgccagtccggttaacggcttctggcgagatgctgactggttgttctgccgggatgggaagtggaggccagttaaacccgggcttaagccgctggttaatgggactcccggacgcgtgggccagttgcgcgcctacggaaacgccatcgttgcgccggtcgcggaaacgttcataagagcatacatggaggcggtcacgtcatga

SEQ ID NO: 392212 - DNA, 534 bp, Salmonella enterica
atgcttctgaaacctatgggaacgccgggtaaatgcccggtatgtgtacgcgcctggacgccggaagaagacgagttgctgataagtctgcacccgtcaatgacctataaagaaatgactgcacgtctggacagaaccgagcgggcaataagagcgcgtgcccgtcattttatccagtcaggaatcctgctacctaaaagaaaccctttcaccccagcacaggactcatttattcgtgctaaccgccaccgcatgacattctcagaggtggccgcttatctggggaggcgagaggatgcagtcagtcatcgcgcccaacgcatgaaagttcgttatagaaaaacaggagatctccactggtcaacgaaatatccagatagtgacgttgagtttgttcgcatcctgcgcgatgacggcatgatatttccggtaatagccgaaaaattcgaaatgccagaatcatcagcaaaagcgttataccacagacgacagaccgctattgacgccatcgcaggggagtacctcccacgatga

SEQ ID NO: 392213 - DNA, 330 bp, Salmonella enterica
atgttgatggattacctttgccatatcggtaacaccctgatttgcgcatatcaaatgccattcagtcaggaatgggacgaccagcttaataagcttctggatgaagggattttgctgttcgtagatagatgcacagcaactttttctatcggtgaacacacggtagaaatctggatcgccaatcgctggtattcgtttggcggaatgtatcgccttgacgagagatgcaaacccagatttaccggctaccgcccacgattccgcaccatgcgccgcctgcacgccgccgtcaaagaccacgtcgcgaaggagtttaaatcatgcttctga

SEQ ID NO: 392214 - DNA, 441 bp, Salmonella enterica
atgattaacccaaataaaagccttacccaaaaagcattagccggtgtgcaatttttgcgtatgcacgcccaagcaatggctgacgatgatgatttttttatcgcaataatgtctgatcctcacgccgtagccgctaccgccatcgaacaactcgttaaagaaaacgccgaactccgcgcccagctcgtcgcttttcagaaagcggctaaccctgccattacctttgatttagccggtggatcagatagcacagcctggtacacacctttcgcaagaggcgctcgcgtacacctgaaatcgcaccctgatcaacacggaatagtagtcgacagctttatccattcacgcgccgggcttcgatgccacgtctgtttcgacgacgaatgcaatagaagccgttgggtaaacgcaaagaacctggaattagtccccgacaaatga

SEQ ID NO: 392215 - DNA, 507 bp, Salmonella enterica
atgattctggatcgtgctttacaacttgagttaatggaaaagctttcccttgtgtatcctgagcatgtgccaaaaacagacagacaaaagtattttgatatttttccagataaagattcgtatgttgctaatgccttttatcttgaggagcaagggttgatagaaagcggaataagcatctgtgatgatgggcttggtggttatgttagtaattcccatttcagattgactgccaatggtcacgactttctcatgaaagacggtggaatatctgctattcgaaatactgttgttgttaagtttcatgatgataccgtctccgctcttattgatataattaatcgctcgaatcaaagcccgcaagataagacgcgattgatagatcagctaaaatcgcttcctgccgacgccacaaaacacatcgtaatgaaactattggatcatgcgattgtggcttctcctgcgttaattccgtggctacaaaacttgcttgcttctcaccgttag

SEQ ID NO: 392216 - DNA, 342 bp, Salmonella enterica
atgaacatcaatatttcatgcctcgttttttgtcgtcgggcattggttgcatatgcaaatacagataatgatttctggattgaagtgcctgaatttatttcaggtggcgattcagcaaaaactatggcgtggattaagtttgaaaagctccacgccaatgaaaaagaaaatgctaacggtgagaagcaagcaagttttgtagccacggaattaacgcaggagaagccacaatcgcatgatccaatagtttcattacgatgtgttttgtggcgtcggcaggaagcgattttagctgatctatcaatcgcgtcttatcttgcgggctttgattcgagcgattaa

SEQ ID NO: 392217 - DNA, 231 bp, Salmonella enterica
atgttagagcgtgagcggctttcttctttagccatcccatccagcactgcgaactcttcttcatcaagacgcaacaaaaccatctttcttgggcttgatgcctttggcgcgcgggatctggtgtcatgtatctgttccatagtgatatattcgatctcgttgttactcggtttttatagttttgaccaatattattgtcatgtcaataaggatttatacatattatggtaa

SEQ ID NO: 392218 - DNA, 354 bp, Salmonella enterica
atggtaactatgggtgatcgaattcgtgaggaaagaaagaaactcaagttaaatcaagcggattttgctgggttagctgggtgctcacgtaatgcgcaagctatttatgaaagaggtgagagtctaccaggctcggcgtacttggttagattgtcggaaatcggggttgacgttcagtacatccttacgggtcaacgacttccgcttactgaaatctcgatggaggaacgcgcccttctcgaaaactatcgcgccatgaatgaggcggcgcggttaaatatgcaggcggttagcgctgcgttcgcgcaggctaacttaaacaaagacgacctgaaagacggcagtagtgagtag

SEQ ID NO: 392219 - DNA, 147 bp, Salmonella enterica
atgaacaaggcttttgaactatgggttcgtcagcggtacggaaaccgctatgacctgaccaaggttcaggacgatgtttactgccgcgaagtggttaaacgtatgtttgagacgtggtgccactgtagcggactgagagtggtgtga

SEQ ID NO: 392220 - DNA, 192 bp, Salmonella enterica
atggcgacccgatatattggtatgaaagaaatgtgtacgcttaccgggaaaagtaagccaactctctggcggatgtatgcaaaacgcaaagaatttcccaagccagagaaaacacccagcggcatttttctcggttggactgagtcagtttacgaagaatgggtgaacaaagagaaaactgccaacatctga

SEQ ID NO: 392221 - DNA, 270 bp, Salmonella enterica
atggttcgagcgagcagatgccaccggctgaatatgaaaacctatatcatcaacgactcagaagtgtccaggttatccgtggtgattcacagatatgctcaccttgcgcctaatcatttaacggaacacgcgaggaaaatagacgacatttttggtgatgatgtcccaaatatgtcccatatggaaaataaggaggaaataaagaagcgtaacacgttgatttataagtggcgcgccctgcaggattcgaacctgcgacccacggcttag

SEQ ID NO: 392222 - DNA, 1221 bp, Salmonella enterica
atggccagcactcttctgactgacagtaaaatacgtgggctgaagcctaaaaaatctgcgttctacacctggcaggcatctgccaccagaggaacaggaaggatcggtgtaaaaacatacccgtcggggcgcaaaaccttcgtataccgatacttcctcaatggtaaagagaaattcgtcaatcttggtgatttcccaactgtgtcacttgccgaggcaattgaaaaagctggtgccgccgccaagaacatttccgaacctgcgaaagcgatagcagaccttgcttccattaaaaaacttttcgacgattatatagaagatcagaaagctcgaggaaaacgttcctacgaaaaaacgcagaaccgaattaaccaagttttggacagcgagcatattgatccaggaatgcttgcgcgagatgttacccctgaccacataaaacgagtgctatctgagttcatttcccggggagcaaaagcaggagcaaacaaggttcgagccaatctccatgcaatttttaacttcggtctatttgctgacaacgatccagcaaacattgacaacaagacagtatacggacttgatcgcaatcctgtatctgtcgttccggcccaacgtggggtcgataaggcactggacagatttctcctatgggatgaattagccgagttgttggatattcttcatcggcctgcatcgtcagtaccaatgagtagtgattttgttcagcttctgctctgttgtatccacacagcaggacaacgcccttgggagatcatgacgaataccaaaagcaattgggataaaaaaggtaaaatgctgacggttccccctgaaatatccaaaactggtgattatcacgtcatccctttgagtgcgacagctaccagcattcttgaagagatggaaaaacgctacccagattcagatttccttttccctgcagatacagcagaaggacatctgctctcggccgagtacggaaagcaactacgaaaattctgtgaacgcgcaccatttaataaatttacgccaagggatatacgccgcacctttaaaacactagccggagatatgggtataagcaccgagatgcgcgaccgattgcagaaccataaacggccaggagtgtcagcaaagcactatgaccgctatgactatcttaaagagaaaagggaaataatagaagagtgggagttgcggcttttgtctctgcggtaa

SEQ ID NO: 392223 - DNA, 408 bp, Salmonella enterica
atgaccgattattattacagctttaaagaaaaaggctttttctggcagccggatgccaaatcaggcgattacccggatgatttaatccccctgaccgatgagcattaccgagagcttatgcagggccaggtggacggaaaatatattgaacacaggaaaggaggcccggtactggttgagcatcgcgaatatacacctgaagagctggttgcacaggctgaagccagaaaagcggaacttcttgctgaggcagagtcagttattgcgccactggcgcgggcggtaaaattgaacattgctacagatgaggagataaagcggctggaggcatgggaactctacagcgtaatggttaaccgggtggataccacaaatcctgactggccggaagtgcctgtaaaccaataa

SEQ ID NO: 392224 - DNA, 426 bp, Salmonella enterica
atgaaaaataaattaaaggttttgactcttgcttttgcctcgttatccagtgtttgttatgcaaatatggctggttataataagtatgtaagcaatgttcagattaacaatttgtcttatggtgtgtatacgtcagcgggtaagcaaactcagtttctttgtgtcggactgaagagagggagtcaagtccctgatgtcaataccatgtgtaaaatagatgtattcgggaatcataaacagggatttgataacatgctggagacagcgaaatattattatgcaacaggggaggaagtgaggttatattatattgataatgtctggagtgacagtgatttcactggcgcattctctaacaaggaattaatttcgataactacttgtagcgcatcagattattgcatggggcctacggtgccaaattaa

SEQ ID NO: 392225 - DNA, 804 bp, Salmonella enterica
atgaaactggaagcatcgctaaaatacttcagcccgcagggtatgcacatcagcgacgacgtgaaaggaacctctccggatcgtctcaccggtacagatgtaatggcggctactggtatcaccagcagccgtgcgcgcttcggcctggctgctttcttcggaaaggccgggatcagcaaaacggatgagcaactggcggttcaggcgctggtgcgtcacgcgatggatactgcaccgaagaacgtacgcaaagctgcaggtggtgaacttggctggtgtatgctggtactggcgcagtttgcctttgctgagtattcccgttcggcagctaccagcgtgacctgtcacagttgcagcggtaccggattaacatctcagtatgaggatgtgattaaacatcctggagtcttcaactctgacggtatggaaatcgcacctccgaaaatcaagcacgaactggtcaaacgtacatgcgcgacatgtaacggtaaaggtgagctattcgctcgatgccgttgcggtggaaaaggtgaggtactcgaccgcaaagccacaagcgattgcggcgcgccggtatttaaaacatgtgagcgctgcagcggaaatggattttctggggtgccgtctactgcagcctataaagcaatactgaagcgtgttccggagctacacgtcagaacatggactcgcaactggaaaccgtttctggaggtgcttgtcgacgtctgccacagggaagaacaaaaagcagactcggcgtttcaggatgcaacgagctttcgtgatgatgtgagcaatatttag

SEQ ID NO: 392226 - DNA, 294 bp, Salmonella enterica
atgtacccggattatgtgcaggttgaaatgccatcgctttacagccaggcggatgctgcatggatacaacagcaattattggggctgcctccgtccctgcggcgcaaagtcgtgctgaagtacgccgaggtttacgaaattacattcgacgccgagcctgtttcataccgaaaagagaaccgggcaaggcatgaggcaaacacaaggcttcgcctgtttgtgagaaatcagggcagagccttacaggggtataccgccgaacctcccctggcaggatcgcaatcgcgctcctga

SEQ ID NO: 392227 - DNA, 657 bp, Salmonella enterica
atgagcacactggcagaacgtcttaacgcttcacgcattagcgcagggctaactcaagaggccttagcgaaaaaagctggggtaacccgagtagcgatcagtaaagcggagcaagggcttaccaaaagctttaatggcgatacgctcttcaaaatagcggcagcactagggtgtaatccccaatggttgcagtcaggaaagggcgaagaaaaagcatggagtacaaacatcaaatcaaccacgcagccggatatcaggtattcatatccaatgttaaattgggtccaagctggtcatttttctcagtgtggtgataactatagtatgtatgatattgataactggaaggaatctgttaaatatgctggcgaacgaggattttggctcgaagtccatggtgattcaatgtcatcacctgtcggggtaagtttcccggaaggcatgtcaatattagtaaacccagaagccgagccttactctggtggttatgttatagccagaaagaaatcttcagatgaggtgacgtttaaaaaatacatttatgacatggggagagagtttcttaaacctcttaatccccagtatcctgtgatagaaatgaataacgactgcgagattatcggtgttgttgtcgatgcaagatgggatatattttaa

SEQ ID NO: 392228 - DNA, 198 bp, Salmonella enterica
atgattgcacatactgaatgtacaacttattgcttggatgaattaagtaaattaacgaaactcttatcgttattaggacagtccgtaacggatgagaaggctgatatggatgatatagagggatgtctcgggattgcatgggatatggctaatactattcataaaacactcagtaaaaccattcaggggtttgagtaa

SEQ ID NO: 392229 - DNA, 192 bp, Salmonella enterica
atgaaaaccttcaaaggactttcccttgtcccgttagacgcacttaaaaatatcagcgccattattgagtgcggacatttaatgacgtcttgctctgataaagaatgcgaagaaattggtgatgtgattatcgactttgcacgtcagtatgcagcttctgcacacgcatatgcacaggaggaaaagaaatga

SEQ ID NO: 392230 - DNA, 195 bp, Salmonella enterica
atggctgatatttctttagaacaagcaaccgaaaaagcatgtcaggtcgaaagtctgttacgaatgttcgaaagctacccggacacgttgagcgaaacggaattatcatctgtaatcactttaatccgtcgcttatctggtgaagtacatacatggcttatcgaagagcaggcagacagggggaaggataaatga

SEQ ID NO: 392231 - DNA, 237 bp, Salmonella enterica
atgaactcacagcaaacgatgacatattgcggcatgcaggtcccaccaccagttctgaatatcgatctgcacgttttgccgaacttcactgggcgcgtggttctttatatcgaaaacgggcgtgttatatgcgatcggcaacttctggatgatgaacacgtttgttctctggactcttttatcgaaatagctcgtgaagcaggaatccgttttgaggagatatcaaatgttggataa

SEQ ID NO: 392232 - DNA, 423 bp, Salmonella enterica
atgaataagcaattctggtatcccgctggatcattacaggaagcccaccagcaagcgctgatatgggtgtctgatgcctacctgttccacttagtcagcatgcatcgtcgcccggtgtaccgccatcagtacggggatatttcactagaccaaccagccattaagggttttatcgattcgtatttggaagataagggatgggatatggaaaaacgccgtgcccattacatcaacattctggacctcattaaatatatgcaccgcagtaattcggacttcatcgactgggggactgtaccaacactaaccccaaggggcatccgatggatgaatgcttgcttctcgcggctgggcgaaatggttaacagctatggtggatgggaaaactacacaaaagaaactgctggagattcaatttcatga

SEQ ID NO: 392233 - DNA, 225 bp, Salmonella enterica
atgaaaatccaataccaggactatggcgccgtagcgaacatcatcatcaccagcactgtgtttgaattccgtaaacataaccgtgtggtagacgcaacactgctctgcacaccaggaatagttgcaaaccgtagtggaatattcttcatgaagtcggttttgtccggtaaatcccgtgacatgctgcgggcgcacaaaactgtatcgcgggaggcaggacgatga

SEQ ID NO: 392234 - DNA, 408 bp, Salmonella enterica
atgagcatcacactcgaaaatggacgtatcaacccggattccctggtgaccattgaagaccacctgcgcggactcgcgctggcaaacaggacgctggacagcattaaagaccaattatccaggtgttccgataaaaaatcggactggtaccgctgcgccacttcagcgcacaaatcatggttctgggtacgctcccggatctgcgaacaactggctattttgcggcgtcaggaaaaagacgttaaccgccttcgctggcggtacgaaaacgaagccctgctgtcgcaattaaaaagtcaggtaagtaaagaggtttttagtgagtgtatacgtcaggcaaaaaataaagccgaacagcggctggagcaagactttcgagctgcaatgattgaggtgggcaatgagtaa

SEQ ID NO: 392235 - DNA, 306 bp, Salmonella enterica
atgatcaaacatatattactaatgaaatttaacaatgatacatccagtaggcaactttctgtaattcgggaagtttttttatctatctccgatacaatacctggggtactttctgtcgaatggggggtaaataatagccaagaagacgaaaatgcggggtttactcactgtgtaatgatgacatttatggataagtctacaaaagatgaatatctctcgtatacagaacaatttgcgtttgaaaaatttttcaggcctcatttggtggatattattgtttttgattatcagtttggtcgcttataa

SEQ ID NO: 392236 - DNA, 198 bp, Salmonella enterica
atggaagagagatataaatttcgcagtctgacagacagtattgacaccagtacccagatgcgtaggtttttcgtccatattatggagacgctatctcgggctgattacctcaatggaacagagggatatactgccggaaatcagctagtaaagaaattgcaaaaaaaagcccgtcggacatggtgggcgcaaaagtaa

SEQ ID NO: 392237 - DNA, 627 bp, Salmonella enterica
atggcgttcgctcagcgtggcgacaggatgaaacatcgatttttcaacatcagccatcggttcgccgttaacgttataagcgtaagcggggaggggatcgccggcagtattgtcactgtcagccggagtatccatggaggccgtgtcactgctggcgtcatcatctgctgccatttgttcatgaaactggtctgcgggaaccgcgccggggatcagcatcatggtttttccgtcttcgccgcctttttcgtaacggttgcagaattcagtatcaaacacaccttcagggggaaggtcgccaatggcaggaagatttacacgaacgggttttttaaaatcgtcctcgtcataacccttatcgtccatagcagcaatgcagcgggaaatggctaccgacagttttttagctgtagtccagaagaaacctgcttttattccaagccgctttctggcctcttcatttttaacaaggcagtgcaacgcaaaatcttctttattttcactcattgttttttaacctcagttaagattaaaatcgttttgccagtgaaaatcctctccgggtgctcactggtcatgtctctggtggtgggtctggtcgctcacctcagcatcgccgggatgtaa

SEQ ID NO: 392238 - DNA, 1575 bp, Salmonella enterica
ttgtttgaaaaggctattagtgatggttgcaaagtcattttaattagtgatatgtaccttccatcagcaatattaaaggagttgttaacatcatgtggctatgatatcagtaacattccagtttattcatctggcgaagagcggtactctaaaaatagtggtaaattattttcaatagtcaagaaaaatgaaaatgtagatattgcatcgtggatacatgttggcgacaatgttcatgctgatatactgaatgctaaaaaactcggcataaatactctccatgctgattggtcagagtataatcatgggatatctaatcattggaaagctaaagatattattggtgaatctatttgtaagactttattacttaaacaagtttctgctttccatcaaaatgatcctttaaacgagataggatttaaagtatttggtccgttattattaggttatgtatcctggttagcgaatcagttaaagattcataaaattgataaagcgctttttttagcacgcgatgctcacttaatctataaaatttataatgaatacttttcagaagaacatgtaaaatgtgaatatttatatatatcccgcgcatcagcttatatggtggggatgactgattggccgatgcacaggatttggcatctttttggtggtaagaataagaaaagtattaaaaagatacttgctatcgcggggttagatgcgagtgagcatatttcagatatacatcatgttggttttcctgacgaggagtatattcctgtttcaggagaggaacataaggttcactggcttataaataaattatttccatatattttattaaaaaatactcagcacagggaagtttacgctgattactttaaaacggcctgtgaaggttttaaaaatatagcacttatcgatgtaggatggatgggtaatattcaatcagtatttgctcgttctttaggtgcgcaatgggcagaaaaaaaaattcatgggttttatttggcaactttttctggcgccaatgataaccgatctatttataataagatgtttggttggctaaccaactatggccatccccacgataagtgtgaacttttcttatcaggaggggtggaaataatggagttcgctatggctgataatactgggtcaacaattggctataaaaaaacggataatggaataattcctgtacgtgaagatagcagtggttctgaaattgagtatttaaaaaaagcggcaagattgcaatcagggattatttctttttttgagtacgtcaaaccgctcatacaaaaaggaaattatgcagcacttagtagtgttgtattgtcagaacctttttttgaattgatagccagaccctcaagcgctcaactggacgccttatcttccctcacacattcagagtccgcgggatctaacgcagaaagaatcgtgctagccaagaaactgcctttaaaggataaactttttcccggagaaaattatatcaaagagttgaatgccagttattggaaagaaggctttaaaaggatcaacagaaaaaaattttgggcaaaatataactaa

SEQ ID NO: 392239 - DNA, 942 bp, Salmonella enterica
atgagtcggcacatagaaaaaaacatctggaaacgaaatgggctagcacctttagattactgttcaattccacgggcagcaaaaatactcgaatgcgaagaaagtgatatttatcattggtgttacactggaaaaataaacctttgcttaaacttcactaacatttattatttttacattccatttttaaagtccgatggtgggatattagaacagatagagtctttgaacaatgaattacttccttctggagatgacatcccatatgcattttcagataagtttaattcaggaaatttttacatccctgaaaaatttcatctagtagaaacagaagagcattatttagtccagacaaatctaaatggaatctggccggtagaaggaaaggtattatcagcaatagacactggctttttggattataatgaactttcattacttagcgaagaaaatccagagttcaaatcaaaaggtgagcggttccaacttatatctcctataatgatgaacaatcaatttcaaggtaaattaaaaaatcatatggaaggggacattaaatatctccaatatctttgtgaacatgcgcctgacctcaaccataaaaaccatcaacttcaaataaccgggtattacattgattatataaacaaacatgcattatctggctctcatatgccaataatccataaagataaagatgccagaacgttgacttcatatcaatcaacagacatgccaaaaataaagacaaccgctaagcaatcaacatacattgcctccttaatgaacgcattgggagtaacggaggaaatgatgagattttcatcaattactcagattaaagatcttctaagtaagaaagctggttgtgaaatggaactacctgaaattactgatgatactttggatgactggcttaaaagggctggcaaaagatag

SEQ ID NO: 392240 - DNA, 948 bp, Salmonella enterica
gtggaacaggacacaactgaacatcatccggacccgcagccgctggagaatgagccacctgtaagccagacagaagcaggctacaagaaaatactggcagaactgcacgaagcacgtaaaaacattccacccaaaaacccggttgatgttggtaaacaactggcagccgcgcgcggtgaatatgtcgaagacatcagcgacccgaacgatccgaggtgggttcataacaattacagcgcctcaaatcagggtgaaaaagaagaagtggtgccggagggaaaacaaccagcagcagagccggaggctgtcaccagaaacgcggacgggactttcgatgtatcagcgctattcctgcccccctcaaaccagaccgaaaaaacggaagccagaacagaaagagatggagaaacgccgaaagagagcaaccagcaggaaacggctggcgatacaggacaggaaattacaacggacggtggatcaggtactggcggtgatgaagctggcgaagcggcagatcccgtagaaaacggaaatttcactgtccctgataatatacagccaggtatttactatgacatccctaacgaggcgtatcacgctggccccggcgtcagtaaatcacagcttgacgatatcgcagacacaccagcaatttatctgtggcgtaaaaatgcccccgtggacacggagaaaacaaagactctcgatacaggaacggcttttcactgccgggtactggaaccagaggaattcagtaaacgcttcatcatcgctccggaatttaaccgccgtaccagcgcaggaaaagaagaagagaaaacctttctggaagagtgcgcccggacaggaagaaccgtgcttacggcagaagaaggccggaaaatcgaacttatgtaccagagtgtgatggcgttaaccgagtgcattgctggagaagttgatcagtga

SEQ ID NO: 392241 - DNA, 1080 bp, Salmonella enterica
gtgagtcgaaaaaagtacgatgctaaccttccgaggtacctcacctaccgtaaggccagtaaatcttttttctggcgtaacccggtaactgacaaggaatttccgctcggtcagatcgcccgcagggacgctatcacacaggccatagaggcaaacaacttcatagcgcaaaaccacacgccagtggcgcttattgaaaaactaaaaggaacggactcattcactgtgtccgcatggattgatcgctatgaggttttattacagcgccggagtctgtcggttaatgcctacaagattcgcagtaatcaattagcgaccgtacgcgaaaaaatgggagaaataatactggcagaagtaacaacccggcacattgccaagtttcttgagtcgtggataaccgagggaaaaaacactatggcgggagcaatgagatcagttctatctgacatgttcagagaggctattgtcgaagggcatattgtgaaaaacccggtggaagcaacccggataccagagattaaggtggccagggaacgcctgcaactggaaacgtataacgccacacgagcggcagcagagcatatgcctgcatggttccctctcgcgatggatttagcgctcgttactggtcaacgtagggaggatatcgtaaatatgaaatttagtgatgtttttgacaaccgcttatacgtaactcagattaaaaccggaatgaaaatagccattcccctctccctgacacttcgggcgacggggttacgtctgggaacggtaatcgatcgctgccggctggtaagccgcactgatttcatgatcagtgctggaatcaggaaaaatagcccaaccgggaatattcatccggatggattgacaaagacatttgtaaaagcaagaaaagcctccggtgttaacttcagcaataatccaccgacatttcacgagatccgaagtctggccgggcggctgtacaaaaacgagcacggcgaggtgttcgcccaaaaactcctgggccacacatcagcgaacaccacgaaactctatctcgatgagcgtgatgataaagcttttatgatgctctaa

SEQ ID NO: 392242 - DNA, 837 bp, Salmonella enterica
atgaacaatgaaaaagactctactcatttagatcgtagagaattacttggtaaaggcgtgaagttagctgctgctggcgttggtcttaccattgctagcagtgcaatcgcaagccaaccatcaggtacagcctcaaaaagtcagtatgcagagcccgccgtttatggtttacctcgtaacggaataaaatttgataaaagtaaggctgcacttgttgtggttgatccgcaagtagattttctaagtccaaaaggtattggttgggctgtactaaaagacagtattcttgaaaacaatactgtatcaaacctagaagatctattcaaaaaatcaaaagaaattgatttacctgtgttcatttcccctcattattattacccatatgatcatcaatggcagtttagcgcgccaggtgaaacatttatgcatagcactcatatgttcgaccgtcagggaccgctaaccatgaatggatttgaaaactctggtgctgactttatgccccagttcaaaccatacatatttgatggtaaaactatcattgcatccccacataagatatttgggccagaaactaatgatttggttttacagttaagaaagagaagggtttctcaagtgcttttagctggcatggctgcaaatttatgtattgaatcacatatgcgtgagttaatcgagcagggttttgaggtagttgttatcaaggatgccactgctggtccaagaattccagaaggagatggttatcttgcagcactgacaaactacagaataattgcaaatgacttatggacaacgaagaaaaccctaactattcttactgatgccaaataa

SEQ ID NO: 392243 - DNA, 996 bp, Salmonella enterica
atggataagcgtcatgagaaattgcgaataccttacagaaaagagggagagtctttagactatgaatcagatgcaaaagttgaggcattacaagaaataaacggtgaactgattcgtgtagggaatgttgatataagagagactacccaatctactctcgtacttgaaaatccaaagattcgcattcagactaatattggcgacactttgaaattacgaagtcaacaagatctatcatcttttattcgtaggcgtcatgcagttacacgtattttaaatgctgaatcggctatcccctcattaatcaattactttgaaccattaacttgccctcatccacaatatctacaaccagagccaactgattctgatcttgatgcttataatcgatatgataaagatggagagctatctttttcactcaatcgacagcaacgagatgccttttctaaactttggtcatacggcccattgagtcttttgcaaggccctccaggcactggtaaaacttcattcattgcttcatttatccattatgctctctcacaaggagcccaaagtatacttcttgcaagccagtcacatgaagcagttaataatgctgcagaaaaagtaattgaactttgtcagcacagcaatctgcccctagatgttgttaggttcggtgcagaaggaatggtctcagaaaaacttcatccatatcattcatcttccattttgcaaaattatcgagacttattccgctcagaaatgcgagttagaatttcagcaatgaaccgaaatttaggtctccctaacaaatttgtagaaagatggttcgatattgaatatcaacttaagcgtttgaatcgtgaaatagaaagattaaccacaaaactaaataaaaatgaaatatcagaagctaataataatcctctgatagctcgaataaatcagcgacttgaacgatttaaaaaaattgcatctgaaaagtttggtttgagttgccacggataa

SEQ ID NO: 392244 - DNA, 780 bp, Salmonella enterica
atgcaattacaacatggggatctgcaccctaacaatattctaatagaagtgggagatgttcgcttcattgatgcacttgatataccttgttcaggtgagaatataatattcactcctgcatatgtacctacagattacgaatctttgcctatggaggaacgtgattgctacgctgtggccaaagtgtgtaatgagattttagaacacgacgttaactgggaagggattgatccatcagctttacttaatgagatcagaagttgtatggggcgggattttaaaatttattctcttgaccgaataaatgatgaaatagaggtgttaatcaaccctccaaaaataaatgagggagtgaggttgtcagtattaatgaggcaactgacctccagccagaaattaataaatgacaatggtgtataccatatcagtattagtgaagaacgagtccgttcgccaaagcagcagcctcatattatcgtggcttttgccggagtacgtaaacagttacaaatctatcttaaagcgacccaattagattttgcatttttacgaactaaagatatagcccatagcttatttgtacgaatggcatcacaagccattacacaactcgaagctaatatactattcgaaccctcatccgcggatgaccctagcaagttattagaacatgtaaaaaaatacctgaggttatctctgcaatatcgagaattcagaatagaattctcggtggcgatttttcttctgatgaggaagaaattgagaactcagaaactttaa

SEQ ID NO: 392245 - DNA, 339 bp, Salmonella enterica
atggttatttatcctattgaggaaaatataaagcagggcataagtcatttatataaatcgactttttctggtgagagtgtttcggttaaagtatggtatgggcggaaaccagatataaagcgaccggaagaggctttacaacttcagaattttctcgataaagctcgcctaataaaatcccagccctgttcttctcttgctgaagttattgattttggtatttcagatgcaggaacctatttagtccaaaaatggttgaatggggaattcctaaatgacgctgtcaaatcatgtcatgttggtcgtgaattgatattactatgcaaaaaaaatagttag

SEQ ID NO: 392246 - DNA, 387 bp, Salmonella enterica
atgaaggaattaaaaacactcttaaataaagatataaccagttgctttgaaaaaactttttatagcaacccttacattaaggaattaagagacactgaacagcaaaacattcttcttaaaattaaaaatctatctccctctatcactaaactacatgaaaaatataaagcagaatttgatgacgatagcaagttattgaatgctggaaaagaaagttcgacaagattaaaagaggtggaagattatttaataggaataggaggttacacagaaaacagcaaaaaggattttgaaaactcatacatagaatctggagcatatgacttggttgtaaggtatgggtttgaagtcaatgatctattttccaaaaccatcagagacaattaa

SEQ ID NO: 392247 - DNA, 279 bp, Salmonella enterica
atgagcggtaagcgttatcccgaagagtttaaaattgaagcggtcaaacaggttgttgatcgtggttattctgtttccagcgttgcaacacgtcttgatatcaccacccacagcctttacgcctggataaaaaagtacggtccggattcttccactaataaagaacagtcagatgctcaggctgagatcctccgtctccagaaggagctgaagcgggttaccgacgaacgggacatattaaaaaaagccgcggcgtacttcgcaaagctgtccgactga

SEQ ID NO: 392248 - DNA, 738 bp, Salmonella enterica
atgctgaccgggcagatcaaacagttctggcttgagtcaggctgcgtctatggttatcgcaagatccacctcgatctgcgtgacaccgggcagcagtgtggggtgaaccgtgtctggcggctgatgaagcgggccggcataaaggctcaggtcggataccggagcccgcgggcacgcaaaggtgaagacagtatcgtggcacctgaccgactccagcggcagtttaatccggatgctcccgatgaacgttgggtaacggacataacctacatccgaacccacgaaggctggctgtatctggccgtggttgttgatctgttctcccggaaagttatcggctggtcaatgcagccccggatgaccaaagagatcgtcctgaatgcgcttttgatggccttgtggcggcgtaatccgcaaaaggcggtgctggttcactctgaccagggcagtcaatatacaagctatgaatggcagtcgtttttgaaatcacacggcctggaaggcagtatgagtcgtcgtggtaactgccacgataatgcggtcgcagaaagcttttttcagctactaaaacgtgaacggataaagaaaaagatctacggaacgcgggaagaagcccgcagcgatatttttgattacatcgaaatgttttataacagtaagcgtcggcatggttcgagcgataagatgccaccgacagaatatgaaaaccgatattaccgacgactcgaaagtgtctag

SEQ ID NO: 392249 - DNA, 189 bp, Salmonella enterica
atggatttactgaataaatatctgtcgcgggctaaaaaagaaaaaaatattactttcattggtcgtcttggcacttatcgttatctcgatatggacatcacgatagctgaagcattacagacggcggacgtatacttaacgtcgctatatgaacaaaaagaaatgccagcttttacagttaccgtttga

SEQ ID NO: 392250 - DNA, 1212 bp, Salmonella enterica
atgaaatctgattacagcaatgacgactccattaccaactttttcgattcatttaaaggtcgaaaacttttcaagttgcctgtagagattgaagaaaaccaaagcttagtaagcgatttcattgaaaaatgcaaagcaatcaaaatacacattgaagaacatatcaataattcaaattatgaaaactcttctcaattagaaaattgcttagacgtatttgactcacttgaaagggggatatcacaaactctagaagcatttctatcaggagatatcaaagcctcatacgataaattcgaaaaaatgttggaatcgaaacatacatctattcacttaacaaacataagtactcggttgagtgcaatttgcaattcagagacccctttatacagagtaagaaaatctgataattacttaacaaaaagagaagagatttttcacatccccttcagccaacgtcatttagttcgaaatcaaagatattcagtagcaggactcccatgcttatatttaggcgcatccttatacgtttgctggagagagatgaataggcctgactttaacaaactttttgtttctgctttctatacgtcgcaaactcatccggaagagatgattttgaatctaaatatcgaggcgctgattgatatcacatcaaattttagaaataaaaatcaaccgaaaaatttcaaattagcattatcactcgtcgctttatggcctctaatattatcctgcaattatttgaacaaacaacaagatgccatttttattcaagaatacgttattcctaatttgttaatgcagtggataagtcgacaagctgaacataaaataatcggcattgcataccatacaacaaaaatcgatagtggatactatggttacaagggcttgaatgttgtattccctccccaaattaaccatagcgatgttaagcgccatgattattgcccacatcttgccaaacagtttgtatgcacccctcctttatcatggcaagttcttaaatccatagaatacattcctgaacgccaatcaatatcaagcacagaaaaacttagtaaatatctaagaagaggtaaaaaatgggatatcttagaccaattagatgaggagatagtgagcgtttatcaactgacagatttttacaagctagaagtttgcatccaagacgttcaaaatcctggaaggataaaaaccaaaaaatag

SEQ ID NO: 392251 - DNA, 633 bp, Salmonella enterica
atgatacaggtaaaggctggagagaatactgggggtagagaggctatccataggctgatggctgcctataactttaagtccagacagcaactgtgcgatcacttaggcgcttcaaaaagcactatggcaaacagatacttaagagatagttttccggcagaatgggtgatccagtgtgctttggaaaccggagtttccctactgtggctgacaaccggccagggtgatccgggttcaaatattgatccaaaaaaagatatcaatttagtgaactcaagcaaagttaagccactttctgaacttgtttcgccggaaatcgacaaagctatccttagtggtggttcactcgctgaaggtggtaaagcagtgattgatagcagtctgattccctccggagcagatgacctactgcttgttaacacagatagcgattcttacctggtagaccgtagccaaaccctgccagtaaacggcatgtggttagtagatatcgatggaataaaaagcattgtgaaattaacacgcctacctggtaacagattagttgtgcatcaagatgaatcatcgtttgagtgcagccttagtgatattgcggttgtagggcgcgctctaaaaataattaagagcctttga

SEQ ID NO: 392252 - DNA, 276 bp, Salmonella enterica
atgaaaaataacgaacaacagaacgaagctcttaaacagttaactaacgtccttactgaggcaggtaatcaaaccagagtcgatgtcctcgcccactcaatcctgctgcaagctattttttctgttctttccgaagaacaaaaaaatcaaattattaaaatccttcagaccgctaccgttaatcaacatgctgcgaccgcaggcgttgaagcagaagtaaaaatgtctctcgctcagcttttaagcggttttttaacgcctcagaagctgaattaa

SEQ ID NO: 392253 - DNA, 195 bp, Salmonella enterica
atggaagaaccaagttttgcatcattattgaaaaaacaaagtccagctatgcactgcggccatggctggattatcgggaaagatggcaagcgctggcacccgtcccgctctcaggatgaactgctggcagggctgaccactaccaaacgggggaaaccatggctattgaaggcgctgcggcgactgttccattaa

SEQ ID NO: 392254 - DNA, 228 bp, Salmonella enterica
atgcagaacgaattaccaaaaatgtttgcaccagaaaccgaccagcttatggcggtgatcgatattgccaaacgtgaggagcgcaaaggacgcgcgcttgcagtttcaatccgtcttgaggcgctggcaacccatatcgccaacaaagggttaaacggtattgaagcggctgaactgctgcgccgtgaagctacccgctacgaaaacgaatcccaggagctgcactaa

SEQ ID NO: 392255 - DNA, 228 bp, Salmonella enterica
atggctgactctatggatctcgtacagcagcgggtggaagaacagctgcagcgccacatccacaatgcccgtatccgaaaagttggggcttcctcactggagtgtgaaagctgcggaatagtcattcccgaagaacgccgggccgccatgccgggctgtgatctctgcgttacctgtcaggaaatcgcagagcttaaaggtaaacactacaacggaggcgctgtatga

SEQ ID NO: 392256 - DNA, 234 bp, Salmonella enterica
atgttctggttgccaggcgtgcggcgcacgtatttcacgatgtgtcagtgctggtacaatatcgccactttcaacgcgactgatttacagggaatttcttgtaaagagtggaatgctaacatcaaaaagcaatccaacacgatgacgagtttcaccggcggcaagcaaccgtccggcctgctcccattgttccggggtgagctttggacgcctgccaccaatacgaccttttga

SEQ ID NO: 392257 - DNA, 189 bp, Salmonella enterica
atgtgtctgacaggcatctttccattcaaactaacgtttcgctaccgtgaaagtgctacaaagataaagatttggtttcaaaaggaaataatatgtaaacaaatgttatttttacagaactttgtgaacaacgtcaaacttcccctgagttatcgttttgatttgatcgtttttcttttatatccatga

SEQ ID NO: 392258 - DNA, 303 bp, Salmonella enterica
  misc_feature (185)..(194): n is a, c, g, or t
atgaataaaatacatgttacatataaaaatctcttacttccgattaccttcatcgcggcaactctaattagcgcctgtgataacgataaagatgccatggcggaagctgaaaaaaatcaagagaaatacatgcaaaaaatccagcaaaaagagcaccagcaatcaatgttcttttacgacaaagnnnnnnnnnngccaatatcaacgcaaaaggtggagcccatcttgcgattattgaagtccgtttcttcaagggcgggtattcattcattcgacaaagcgttaacacccctgctaaagtag

SEQ ID NO: 392259 - DNA, 756 bp, Salmonella enterica
atgggtactgtccatttgcttgaaacagttaagcaagtaggtaacataaaggcagtcgtaaatatcaccagtgataagtgctacgacaatcgtgagtgggtgtggggctatcgtgagaacgaacccatgggagggtacgatccatactctaatagtaaaggttgtgcagaattagtcgcgtctgcattccggaactcattcttcaatcctgcaaattatgagcaacatggcgttggtttggcgtctgtgagggctggtaatgtcataggcggaggcgattgggctaaagaccgtttaattcccgatattctgcgctcatttgaaaataaccagcaggttattattcgaaacccatattctatccgtccctggcagcatgtactggagcctctttctggttacattgtggtggcgcaacgcttatatacagaaggtgctaagttttctgaaggatggaatttcggcccgcgtgatgaagatgcgaagacggtcgaatttattgttgacaagatggtcacgctttggggtgatgatgcaagctggttactggatggtgagaatcatcctcatgaggcacattacctgaaactggattgctctaaagcaaatatgcaattaggatggcatccgcgttggggattgactgaaacacttggtcgcatcgtaaaatggcataaagcatggattcgcggcgaagatatgttgatttgttcaaagcgtgaaatcagcgactatatgtctgcaactactcgttaa

SEQ ID NO: 392260 - DNA, 876 bp, Salmonella enterica
atgacctttttgaaagaatatgtaattgtcagtggggcttccggctttattggtaagcatttactcgaagcgctaaaaaaatcggggatttcagttgtcgcaatcactcgagatgtaataaaaaataatagtaatgcattagctaatgttagatggtgcagttgggataatatcgaattattagtcgaggagttatcaattgattctgcattaattggtatcattcatttggcaacagaatatgggcataaaacatcatctctcataaatattgaagatgcaaatgttataaaaccattaaagcttcttgatttggcaataaaatatcgggcggatatctttttaaatacagatagtttttttgccaagaaagattttaattatcaacatatgcggccttatataattactaaaagacactttgatgaaattgggcattattatgctaatatgcatgacatttcatttgtaaacatgcgattagagcatgtatatgggcctggggatggtgaaaataaatttattccatacattatcgactgcttaaataaaaaacagagttgcgtgaaatgtacaacaggcgaacagataagagactttatttttgtagatgatgtggtaaatgcttatttaactatattagaaaatagaaaagaagtaccttcatatactgagtatcaagttggaactggtgctggggtaagtttgaaagattttctggtttatttgcaaaatactatgatgccaggttcatcgagtatatttgaatttggtgcgatagagcaaagagataatgaaataatgttctctgtagcaaataataaaaatttaaaagcctgtctcttatacacatctccgagcccacgagactcctga

SEQ ID NO: 392261 - DNA, 402 bp, Salmonella enterica
  misc_feature (369)..(378): n is a, c, g, or t
atgaaaatctcttgcaaaaacgttggcgtaatactccctatatttaactccagccaccgttcatttaaaaaaacttttctacaggctgcttcaggtggacgaattggctcatcgaataccgggattattgaagtagaggcattaaaaaaaattgattttacgcttaccgaaggtaaccgtcttgcgcttatcggacacaatggttcgggcaaaacaactcttctgagagtacttgcaggggcctataaaccaacttcagggaagtatgaatgtattggtcgagtcaccagcctcattgatcccatgatgggaatggatggtgagcttaccggcctggaaaatataaaactgaggggactatttctcggnnnnnnnnnnatttctcggtctgtcaaaaaatga

SEQ ID NO: 392262 - DNA, 243 bp, Salmonella enterica
atggttctgaggcttggtttttctatttctactgcaattaatcctgaaattttactgatggatgaatggatgagcgtgggtgatagtgattttaaaagaaaagcagagatgagattaaatagctttatctctaaagcgggcattatggtaatggccactcacgatgatgaactggctaaatctgtatgtaataagttcatcaggcttgagcacggtgagatagttagcaaaggcggattttaa

SEQ ID NO: 392263 - DNA, 243 bp, Salmonella enterica; identical to SEQ ID NO: 373967

SEQ ID NO: 392264 - DNA, 243 bp, Salmonella enterica; identical to SEQ ID NO: 375752

SEQ ID NO: 392265 - DNA, 1419 bp, Salmonella enterica
atggaaagcactacaacaccatgggttatcaagccttggacggatgacaatcagtggctaacggatgccgcagcggtcgttgccactttaaaacaatctaaaactgatgggtatcagccaaccgtaagcgattacgttaaattcccaggaatagaaacgttactcccacctaatgcaaaagggcaaaacataacgtctacgttagaaattagagaatgtataggggtcgaagttcatcgggctagcggtctaatggctggttttttgtttagagggtgtcacttctgcaagatggtagacgccaataatccaagcggaggtaaagatggcattataaccttcgaaaaccttagcggcgattgggggaagggtaactatgtcattggcggacgaaccagctatgggtcagtaagtagcgcccagtttttacgtaataatggtggctttgaacgtgatggtggagttattgggtttacttcatatcgcgctggggagagtggcgttaaaacttggcaaggtactgtgggctcgacaacctctcgcaactataatctgcaattccgcgactcggtcgttatttaccccgtatgggacggattcgatttaggtgctgacactgacatgaatccggagttggacaggccaggggactaccctataacccaatacccactgcatcagttaccactaaatcacctgattgataatcttctggttcgcggggcgttaggtgtaggttttggtatggatggtaagggcatgtatgtgtctaatattaccgtagaagattgcgctgggtctggcgcgtacctactcacccacgaatcagtatttaccaatatagccataattgacaccaatactaaggatttccaggcgaatcagatttatatatctggggcttgccgtgtgaacggtttacgtttaattgggatccgctcaaccgatgggcagggtctaaccatagacgcccctaactctaccgtaagcggtataaccgggatggtagatccctctagaattaatgttgctaatttggcagaagaagggttaggtaatatccgcgctaatagtttcggctatgatagcgcagcgattaaactgcggattcataagttatcaaagacattagatagcggagcattgtactcccacattaacggggggcccggttctggctcagcgtatactcaacttactgctatttcaggtagcacacctgacgctgtatcattaaaaattaaccacaaagattgcaggggggcagagataccatttgttcctgacatcgcgtcagatgattttataaaggattcctcatgttttttgccatattgggaaaataattctacttctttaaaggctttagtgaaaaaacccaatggagaattagttagattaaccttggcaacactttag

SEQ ID NO: 392266 - DNA, 588 bp, Salmonella enterica
atgataaggaatattttttttgcttctgcgatcgtagtagccatctctggctgtacagcaatggataaactggcgggaatgggtgtggtttctcaacaaacatccacttttgacaactcaactgtcatagatgtctctccaaattcgctatacgacccgaacagcacttggggaacacaacttcagttaggagcaatatggtccagctcccaaccagatcaagtagggctgatcctttcctacaattcaaatgtatctaatggaagttccgcatacttaggtttcataggaatagatataaatattgatggcaagatatctagctataaagcacagcaactaactaatctaagtaacagtggatacaatactgtatccaaaacgatctacacatccagcaaaaataccgttgttatcccatatgaagtgctagaaaagatggtgtcggctaaaaactgccgccttcgcatacatacaactgaaggtaatcaagacatcgatttctcagctgcaagtatccctggggggaaagctactgcgattgtttccattaaagaattcatgactaaagtggcaaaagttaaatag

SEQ ID NO: 392267 - DNA, 519 bp, Salmonella enterica
atgaagtgtttctgggcttgctcagtctcagtagttttggttatgtcatttacagtcgcttctgcggagaacattacacacacaaaaccgttagccaggagcgacttatatcttacctgtaaaggttatcaggtgaagggggcgtctgtaattaacgtcgagaaaccttcttaccttgaaggtacaggtgagcaggttgagtttgcaatcatttctctcggtgatgcatctgatggactcaaggttttttttgattcatggggtttttctccttttggattgattgaaagtcatgtaatgcatgagcactggtctttagttcatgttggggggcgtgtttcagtcaagggtgaaaagattgattattcatttgtagataaccagccacaggagggtgggagctataaacccaaaacaggtgtgttcctgtatggctgcattaactctgataaaaggccatcttgggtcgaaaaaatctacacaagaacaggcgtgtttcgagggggcatagaagactaa

SEQ ID NO: 392268 - DNA, 198 bp, Salmonella enterica; identical to SEQ ID NO: 379698

SEQ ID NO: 392269 - DNA, 456 bp, Salmonella enterica
gtgatcaatatcatttattctaaaaaaccggcaacattagaggatatctctgattttgagagagagataaagggggttttaccaattgattataaaaattttttgatgaaacataatggagggcaacctcagcctgactcgttcaaatttttttctgatagaaatgatgcatcttcagttgatcggtttcttagcttaggtaaagagaaaaatagtaaccttcttaaatattacaataattataaagatagaatcccatcaggctttatccctattgctcatgatgcgggaggtaaccttattattatggagctgaaagataacgaaaataaaatttatttttgggatcatgaggttgaagttgatgaaggagagactcctgatatgagtaatgtttatttaatcaatgaatctttttctgattttataaataatctttatgaagaagttatctag

SEQ ID NO: 392270 - DNA, 1014 bp, Salmonella enterica
atgaaaatgagcgtcgatagtcgttgtttcgattcttcagccaccaatattgttagtgtttcaggcggcaaagatagccttgctcaatggcttctcgctgttgaggccggagtaaacttttctgtggtgtttgctgataccgggcatgaacatccacaaacaatagaatacctggattaccttgaaaaaaaactggggccagttaagagggtcagggccgatttcactcgacgcattgcaggtaaaagggaatatattgccaaacactggcctgtttctttagttgatgaatgtggattaactcaggccatcgctgacgcgcgggttaaggaggcgctggatttactccatccaacaggtattccttttcttgacctttgcatgtggaaaggtcgtttcccttcaacaagagtacgtttttgcacttttgaattgaaacatgagccagttaaatgccaggttgttacgcctgcactcgatgaatatgacgaagtaatcagttggcagggcgttagggcccaagagtcatctgatcgtgcgttattacctgtctgggaagaagatgcagacaaaactccaggtttacatgtttacagaccaatccattcgtggagtcacgaggaagtttttgcgtttgcacgtcgccacggcataaaacctaacccgctgtaccaacaaggatgtacccgtgtgggctgtatgccatgcattcatgcgcgcaagtctgagttagcagagattttccagcgctggccggaagaagttaaacgtgtggctgcatgggaaaagcttgttgcagcctgttcccggcgcggaaattccacattcttcccgtcaacacttgatccgaagcgagcagaaaggcggattgaagtaattactgttgatggatatgggattgaaagctaccgcgactgggcaatgacaacacgtgggggcagtcagtttgatttgcttgctgctacaaatgaccttgcggtgtgcagtagtgtttacgcgggcgtttgcgaatga

SEQ ID NO: 392271 - DNA, 1533 bp, Salmonella enterica
  misc_feature (1511)..(1520): n is a, c, g, or t
atgagtggtgaacatgagctatttaatgtagatagcgtaactgttccacctaaaagtactgagcaaattatatctgagggaaaggaaattcaaaggcaaattttcttatcttcccatagcagcaatcatcttcagccagtaaccattcataaaatggacaggagtattaaaaacattgcagtaactggtttgttattatcatcaagattagcagtaacatctggtgattataggataaaaaatggtaattcagaaggtgagaataattttttacccgttaaagaattacagagatatgaaagggctctcccggaggatcatcctgccccaactacggagcctaacctggcaggtaaggtgttagatggcctatttgaacactttacatctatggcgggaggacgccttatctcaatactcaaactactggtaaaagaacaagaggcaaatagttataaaagaggctatcatgaattacttgcgttttctcaaactgggcagtggacgcatgatgggagagctattgccgctgaatatatgttcaaaggtcttttagttcatttaagtgatcgtctcattgttctcggtgagggaagtttcatttctgttctatcttttgtaagagaaaatattcaacatcaatataaaatatatgagctaatggcgcgtgatatgctggttcatcctatgcatttcagtactgagcctgaaccactcatgatagacaggcctttatggacaagggaaagccactatgcgaaagtcctgtatgaaaagtttcctgctatttctggttcaagctttgacgttttctatggtaaggatgctattattacagcattagaaatagtatctttcaatagacaggaaagaggaaagagcgcttttaataaaaaaaggatgaatcatctttttaagctgattcaattagtgatacaccatttatccagcaatggtggtgatagagtattgcttagccctgaaggcataaaaaataattttattattatgcgtaatattattttttggtgtgcaaatataacggggccaattaatgatgaaaaaatagacacaatagcaagaaaaattgtggttaataataaatttaccaaaggtgttaaatcaacacttcccaaaagtaacgatcctttaatattgttaatgaaagctgcgatcaataaacagctagactgggcggagaaatattatcgagcagagactcatatgaaggaacatatgcaggagtgtgatatcttaggactaatggatatcaacaaaatggtgcaagaggccgttgttgggcttattcacgagatcagtgatattgcgcaaagcagttggctgacattagaagaacaacatgagagacaggctcaggctctcgaatcgttcaaggagaagctttcctccatgaatggcgggcaagaattcgtttatgcatttaataagattattcaggaggggttgggaggattaattgagctgagctttgatcttgatgatactatacnnnnnnnnnnagctgagctttga

SEQ ID NO: 392272 - DNA, 1065 bp, Salmonella enterica
atgattttctgtatcggcacatttagtcaggcttttgctccaacgataaatatatttgccatattaagatttattgcaggatttggattcggaggtgtgatcccattagtactttctctgttatctgaatattcaccaaaaacaagtaaaagtaaatcagttgctacagcactatgtggcaatcaatttggtgcgattattgcttcttttgttgctatatatgttacaactcaatttgggcagtggagaccagtattttggttagggtttatacccgttttattattgccatatataataaaaaccatgcctgaaagtgctctttttatgttaaaaaataaagatgtagaaggcttaaagagagtgttgtctagaatagacgcaaactacgcttccagcataaatattgaagaatctgttaatgactttactgtgaagaaagaatcaaataaagtctactacaaagatctatttagtaaaaaatatgcacttgtttcaatattagcatgtgttattgctatcatggggttgctgtttattaatggtgtaattgtatggctgccaggtgtaatgacaaatgcagggtatgctattggttctagcatcgcttttaccatatttttatgtacaggaacagttgttggcgctattttttggggctccgtagcagataaaaagggatttattgttttaatgccgagcatttattttattggctctagttgtctgatactgatgggtgttaaatctaccattgtagtactgtatatattgattactcttgtcggttttttcttgtttgctgctcattcactcgttaatgcatttattgctcaacattatccccatgatttaagaacggttgcaatcggtctgccaaattcactaggacgaattggtggtttacttggcccagctttaggcggactcttaatggcaaatcaattttccgtaatgggatggttcatggtttttgccggtactggcttgattgcagcagtttcgtttgtgttaattaatctacaaactcgtaaattaatgaaccaactaactgactacgcatga

SEQ ID NO: 392273 - DNA, 252 bp, Salmonella enterica
atgtcagacaaatttatccgctttgctgaagttgaacgtcgaacaggattctgccgtgcctggatttaccatctgattgcgcaaggagaattccctcgccctataaaaacgggcaacgtgccgtatcttttattgaaagaaaggttgatgcctggattgagggtaaaatcaataacacaaactcgcacaagtaatactatcactgaaatcgcattgttattgaattacaaaaacatcacggatgtctcttga

SEQ ID NO: 392274 - DNA, 549 bp, Salmonella enterica
atgaaaaggaatttattatcctcagcgataatcattgcattaatagcgttagggacaacgggatgcgacgaccaaaaatcccagaagagtacgtcaacagactcttcagccaccagtacctccgtgaatcagaatgattcggatgcaatattggcacaaaaaatgagtgtttatgttgaatgctataatgatattaatcccatgattctttcgagtgttaaaggctatgccgattgggtggacatggataaaggtccaacgggtaaagaacggtatatcagagggatgggagatgttactgtcgatttagatagatgtctggcaaaaataacaaaagtttcatcattgaaacctgaactaaagcccatcgatactctggcgctaaactatattaattcttcaatagacatgaagaaaataatacgtgaaatgaatagttactatacccaggaagactacaaggatgatgctttcacgaaagcagaaaactctgcatactcagtttatgcagacattatcggtattcaaaccggcatcagaggcctatga

SEQ ID NO: 392275 - DNA, 942 bp, Salmonella enterica
atgaatgtgttttgctccatgggttgccgggctgtggttttgctatgggggctgggatccttttccgctttcgccgcgctgacgccagccgacggacagcaaatcaacgcgttggtggatagttggaacgatgctctgaatcgaacggaaagcacgccgccgcagtcactgtataggggaaaggtggagtggtatggtcagtcgctttccgcgcagcaggttgtggccagggagcaggcgtttttggcgaaaaatagtgactatcagcaacacattgtcaccgcattgaatattcagccagcggaagatgataaatcagtcatcgttcgttttgttaaacgcgcaggtacgacgggaaaaatgaccaactatcccgaggaaatattgctgatgcgcgacgcggcgggatggcgaatcacccgcgaaaccgacggcattacgcgtgctaatcagagtaaagagaaaagtgccgaagttgccaggggtaaatttgatggccaacatttgagctacgtctggcttcgcgaggaaaatccacggactggcggcgcgtgttcggacgatagtgattgtgattgctcgctgtggagcagcgatgcggaagtgaagccagtgaagttatcgcaatgcctggtcggaaatgttgagacgctatccgggttggacgatagcgggcgggatcgcgtcatggtttctccacaatggtggagtagcgtatttcgtgtggtgtatctgtttgatatccagaagaaacaatggattcaggccacgtccgcttttactcgcaaccttaatatgcagccgacggaaacagcatcggatttggtgaaacccgatttacagcgtccggggcggatacgcgtcacgcaggctatctatgacgacgcgaaagaggtgacgactattgacgtgattagccagcccctctggacgctgaaataa

SEQ ID NO: 392276 - DNA, 525 bp, Salmonella enterica
atgaattctcataaaatatatatgccacctccctctaattggcaggactttcaaacgttagtaggtgacgttgctatattgaaatatgtttcagagtcagttcaagaatatgaaaggcaaggtcaaaaacaaaatggagtagatgttattgcagagagcataaatggagatataattagttttcaatgcaaagagataacgaaaggcactattactaaagaggttgttgattgtgagcttgaaaaagctaaaaacttcgtccctaatttatctgtgttctttataattacaacttcccctagagatgtacatttgcaagattactgtaataaattaaataaaaatggtggtcttgggtttaaaatttatattaagttttgggatgatatgattgacgatattaatcgttctagaccattgcttgtatcatcttataagtattacctcgaggagttcggaacgcgggaaaaaagcccatctgtattcaatagctcaagcctttactcggccggcatttacagatga

SEQ ID NO: 392277 - DNA, 165 bp, Salmonella enterica
atgccaataaataaacataaggaacttcccatgatgcaactcagctttgcgggaagcggcgtcatgtccgctttttatcccgctgaatccgaattatcaaaacgtgttcgccgtcttattcgctctgtccgtaagcaactggaggcgttatgcaaagccaaataa

SEQ ID NO: 392278 - DNA, 153 bp, Salmonella enterica
atgcaaagccaaataaccatcaatcaccaaaagttaattgcagcacaaagcaaggctgttatcgctcgttttcttggtgacggacacatgtggaaacaagctaccgaggaaatgaaatcagcaataaaccttccatggtaccgcaagaaatga

SEQ ID NO: 392279 - DNA, 309 bp, Salmonella enterica
atgattctgactctgaatgataagcgtgaaatatcgcaaatcatcgcaagttttaccgatgatgattatgaacgaattaacagtgaagttgatcgcctctgtaaacgttgcgacccaataagtgaaatgcttcgctcatataaaccagatgaacacactaaggatgctatcgactggctggaagatgatgactgtaactatcaggaaaaagccgctgaatggttctgggatgcaataaccgaaagagttaaggctgaatatgccttcgcaatattcaaacgcagacatatttatggagaagctgcatga

SEQ ID NO: 392280 - DNA, 903 bp, Salmonella enterica
atgagcaatatcgttgaattcgttaaacagcaagagcagttattctgcggagcattgactgaacagacggtgacatgggctaaggaaagccagtttgcaattcagtatttccagaaaaacgattacctggctaaaacggcactggcaaatccaaccagcgcacagaacgccatcatcaatgttgcggcgatcggcatcaccttaaacccggccagcaaactggcttatctggttcctcgcgacggcatggtgtgccttgatatcagttacatgggattacttcatcttgcgcaatcgacaggatcaattaagtgggggcaatgcaaactggtgtactcaaacgacacctatgaatcaaacgggcttgattctgcaccaacccacaaatacaacgcatttggtgagcgaggctctattgttggtggttattgcacagttaaaacagcagatggtgactacctcactgaagaaatgagtctggcagaaattaaagctgtggaagcaacgagcaaggcaaagaatggaccgtggaagacattctgggaagagatgtcgcgcaaaaccatagttaaacgcgccagcaaatactggcctaaagcccagcgactggataatgccattcatcttcttaacgaagatgaaggtatgcatcaggaaccagttatgccgcacaaatcagaggaagatatccgcgaagatgaacggaaacgccagcaggaaataatggaaaaagcacaacttctttgtgatgaaatggctcaggctgaaaacatggatgatttgaagagatattttgcagaagcatatcgcctgacatctggaatgaaattgcagcagaacatacaagccatttacatagaatgcaaagcgaaactggaggttgccagtgagcaaactgtatga

SEQ ID NO: 392281 - DNA, 483 bp, Salmonella enterica
gtgagcaaactgtatgaaattgccaatgaatacgcaaaattgatggattcagatttagaaccagagatgattgctgacacaatagaaggcatggaaggagaatttaccgataaaatagagcaacttctttccgtcattaaaaatgaatctggttatgctgaacgcctcaaggaagaggcaaagtcactaaatgagcgagccgcagtaattcaaaataagattgacagcattatggcgtatatagcgtcatcgcttgaaatggttggcaagaaaaagattcgagcaggtattcaccaggtaacaatccgcaaaccgtcagaaactgtagaaatcatcgactcaagcgcccttcctcctgaatacgttgagtttgaaacgacaattaaagccgacaaactggcaatcaaacaccaactaaaagcaggaataaatatcccaggcgctcaactcaaagttgggaaaccttcacttcttatcaaataa

SEQ ID NO: 392282 - DNA, 573 bp, Salmonella enterica
atgaacaacttaatgatcgaccttgagacgatggggaaaaataaggatgcaccgatcgtttccattggcgcggtgttcttcactccagaaaccggagacatcggacaagaattctatgcggttgtcagcctagacagtgctatgaagcaaggagctacacctgacggcgataccatcctgtggtggttgaaacaaagccctgaagcgcgagctgcaatctgtattgatgatactttgtcgatcagcgatgctctctcagaactaaaccatttcattaaccggcacgcagacaatacgaaatatttaaaagtctggggtaacggggccaccttcgacaacgtaattttacgtggagcttacgagcgagcaggacaaatctgcccgtgggcgtactggaatgaccacgatgtacgcacgatcgttacgcttgggcgttccatcggattcgaccccaaaatggacatgcctttcgatggcgaacggcacaacgccctggctgatgcccgtcatcaggcaaaatatgtttccgctatctggcagaaattaattcctgccaccagcacagaattatga

SEQ ID NO: 392283 - DNA, 537 bp, Salmonella enterica; identical to SEQ ID NO: 18095

SEQ ID NO: 392284 - DNA, 1131 bp, Salmonella enterica
atgagtaaaaccaataaattaaagatcattgatctgttttgtggcgctggcggcttgtcctgcggcttcatgaaagggaagaatggcgctcattttgaaagcgttctggctctggacaatgataaggcggctatcagaacgtacaacgccaactttggcgagcatggcatcgtcaccaacatagaagagtggatcacggaaaataccgtgcctgaagcggatattgttatcggtgggccgccgtgtcaggggttcagtttactcaataaaaaccgggaaggggaccatcgacgcgcgctctgggaaccgtacatggacatcattgagcgatcgggcgcttctgtctttgtgatggaaaatgtcccgggtctgttaaccagtgatgaattccaggatatccgtgaacgtgcggagagtatgggctttttgcttctcaacccttctgtgctgaatacggcagactatggtgtcccccagacgcgtaaacgtgccattgcgatcggcattaagaaagaccgttttgtgcggggggacatccctgcgttcccgcctgcgccgtcgcatcggcatcccgataaagccggagatctgcctgcctggctgacggtcagagaattcatcggtgatttaccggagccggttggtacagaagtgcgcgatctgcctccgcctttagatctgcattttgggcgaaacccgactgcactgtctcaggagcgttatcgtgctgtgccggtcggcggaaaccgtttcgacttacaaaaaaacagacccgatattacgcctgcctgctggatcaaaaaaacgtccggtggtacggatttgtttggccgtttgtggtgggaacgtccttccgtaacgattcgcaccgagttcttcaaacccgagaaagggcgttatctgcatccggaatcacaccgcccaattacgcaccgggaagcggcgcgcctgatgagtttctcggatgattttgttttccttggatcaaaaaccgagatcgcacgtcagattggaaacgcggttccgcccgtgtttgcgcaaaaaattgcgacctatgtgcttactttaatggaatatcagattcaacatggcgagaagatcgaagaagagcgaaccggaaacgctgcgtaa

SEQ ID NO: 392285 - DNA, 984 bp, Salmonella enterica
atggcgagaagatcgaagaagagcgaaccggaaacgctgcgtaaacagctcctggcgttaattaccgattttgaacacaagctcgcagaggactccctgcgggaacaggttctttctctcatccctgccaaccatctgctgcgggatctcggcagctctctgatgcatgaggagggctgtaattcggcacgcgaccgtattctggcttatctcatcaaatatccgcgcgtcatcattcacggggatgaactgatggtggtggctgggataagtgagtatgcgcggcggataagagagctccgggtccagtttggctggtccgtattaagcggtaccacgctgaaggaaatgattgaacaggatgagataacgctggaggaactccaggcccgcacaatgaccgctcttaaaacggatgtctatgcgctgatgacaacagaacaggacagggaggccgccctgcgatggaatgaggctaatgttctgcggcgaagtaagctttcgacgaaagacaaaattctctcctatctgcgtaaaaacgttggccgtccggtaacgggcgaagagttacgttatcttgcaaacgacagtaaggaatgggcccgccgtacacgcgagctgcgtaccgaagagggctggccgattgccaccaggaattcaggccgaccggagcttgaagtgggggcctatttgcttgaggaagatcgtcaggctgaggtacatgaccggaaaattcctgatccggtgcgcgtagccgtccttgagcgcgatcatcacgcctgccggaactgtggctggtcgcacgcccgtaaaacagcaaatgacccccgaacgttccttgaattgcatcatatagagcatcatgctgacggcggtgaaaatacgctggataacttaattacgctctgtaatgtctgccatgatgacgtgcaccgccgtaaagtgtcgggggaggcgcttttacacctgttgaagggagcctga

SEQ ID NO: 392286 - DNA, 798 bp, Salmonella enterica
atggcgttaaggatcagggtattgctcgaaaatcataagggagctggagcggataaatcgttgaaggcccgaccaggattaagcctgttggtcgaggatgagtctacgtctatcttgttcgataccggccctgatggcagttttatgcaaaacgcgttggcgatggggatcgacctgtccgatatgtctgctgtggtgctttcgcatggtcattacgatcattgcggcggcgtgccatggcttcctgataacagtcgaatcatctgccatcccgatattgcgcgcgaacgttatgcggcaatgacttttctcggtattacccgcaaaataaaaaaattgtcgcgtgaggtggactattcacgctaccgaatgatgtacacgcgtgaccccctgctgattggcgaaaactttatctggtcaggggaaataccagtggttgcgcctgaagcctacggcatttttggcggccacgatgcggagccggactctattttggatgagggcgtactgatttaccagtcggcaaaaggattagtcatcattacgggatgcgggcatcggggaatcgcaaatattgtccggcactgtcagaacattaccggtataaagcggatttacgcgcttgtcggcggatttcatctccgttgcgcatcaccgttcacgctgtggcgagtcaggcgctttctgcaagaacaaaaacctgaaaaactatgcggttgtcactgtacaggggcctgggggcggttgtggctaccggaaataaccgcacctgcaaccggtgatgtgctgcgcttttaa

SEQ ID NO: 392287 - DNA, 2700 bp, Salmonella enterica
atgacacagatagaatatctggactacctctgctattgggggaaaactgataaatcaacaaaaaacataatctgtaattatcatttactggcataccattgcctggacgttgctgcatgcgggaaatacataataaaaaacaatatattcaattcatgtaatatattaaaggaatgtaatatctcaggtataaatgcagaaaactggataatctggtttcttgccagccacgatatcggaaaattcgccagaggatttcaaaaatacgccgaattcccaaactctcccttagtctctcccgttagcggtgtttccgcgtttgagagacatgattccttaggcttctatttatggggtaaattatttgaagcgtggagttcaggcagtaatgaaattatcgcaggtattgaaccagaaaatcgcgccaggtttgaaagcgctttaaatagctggatgcttattagcaccgggcaccatggcatcccaccggacaccatgaaaaacagaagctcgctggcattcaccgatgaagacattgtcgcagcaacgcattatctggaagcattaagtgaattatttcctttcactctacctcaggagtggaaaaccaaagcagggagaaaatgtttaaaacagcacagttggtttttcgctgggcttgtcacccttgccgactggatgggctcggatgaaagccagtttccactgctcagcagcgccatgtcattgaaagattattggcctctcgcttgtgaaaaagcccaacaggccatcctccgaatgccgccgttatctcagcacagccattatcaagatcaccgggcattatttccgttcattcagacgctcacccctcttcagcaacgggcaagcgaactggatatttcagcacccggtgcacagctggttgtcctggaagacgttaccggagcaggcaaaacagaggccgcgctgattctgactcaccgtttaatgtcagccaataaaggccacggtctctacgttgggttgccgacaatggccaccgcaaacgccatgtatcagcgcctggcatcggcttatcatgcgctatttaccgatgagtccaggccatcgctcatcctggcacacggtgggcgagaaatgtcggactctttccgacaatccatctggcagccaacagaaaatctagctgaagattatgcccgtgatgatggcaacgcgactactgagtgccatacctggtttgcagattcacgcaaaaaagcgctgctggcggaagtcggcgtaggtacgctggatcaactcttaatggcggtgatgccttttcgccatcaatcgctccgattgctagggatgcgcgacaaaatcctgctgctggatgaagtgcacgcctatgatggttatatggttaaattgctggaaggtttattgcgcttccatgccgcccagggcggtagcgctattattctgagcgccactcttcccgccgctttacgggaaaaattacttaatgcgtttagcgatggcgcgggatttatgagcgctggtggtagcgataacgcgggttatccatggttaagccacctcacttcctccggtctgttagagcaaccactggccacacgtcccgaagtccaaaggactgtagccgttaattggatacagcagcgccaggaagcactggacattatttatcgcgttgtggcaaccggacagtgcatttgttggatccgcaacacggttgatgatgcactggacacttaccagcagttgctacacgagggaatcgttccagagcaggatcttttgcttttccacagccgttttgcttttatcgatcgtattgctattgaaaataaaacgttaaactggtttggtaacaatgcccccgtttctgaacgacgtggtaaggtattaatcgccacacaagtcgttgaacaaagtctcgatctggactttgactggatgatcaccgatctggcgccgattgatttattgatccagcgcgccggtcgcctgcaacgccatatccgcgatgcccatgggcaacgaaaatctacgcttccggatgaacgccagccaccaatattgcatattctggcccctcactggcaggagcaggcagaagagggctggttggggcaagagctaaaaggtaccggctttgtttacaccgatcatgcctgcctgtggcgtacccaggcgctgctgcgtcaacatggtgagatccgtatgccggataatgccagagcactcgttgacggcgtatacgagcagaaaattgctgcgccagcaggcttgcagacgatctctgacgttgcctttggcaaagtccttagccaacgttcagtggctgcgcaaaatttattacgttacgatctcggttacgatcgggaagccagcgactttttatgggataaagatagagaattttctacccgtctgggtgaagagagtgttgatgtttatctcgccagaaaagacattgatggacagctacgccctttagttgatgaaatagatttctgctgggaaaaaagtcgcttatccgtccgaaaatcatggtggcaaaaaaattctggtacattccaatgtccagatgaggaaacattagcctgtttcagaaaacgccaccatcgcccttccggacagattgtgctggtatctgatgccggagaagctagctattacagtaaacgttttggattggttggataa

SEQ ID NO: 392288 - DNA, 210 bp, Salmonella enterica
atgaaggctgatgattggattaatgttgaagaacagttgccagaaagcaaagaagggatgtggtctaaacaggttatagctcttactgatactggtgacgtgttcaaactatcatgtatgggctcttactggcagagaaccaaggaattcatcgattcaggagcaagcaaggttacacactggatgccgcttaattacccagatgattaa

SEQ ID NO: 392289 - DNA, 183 bp, Salmonella enterica
atggtcggggaacgattacgtggtttctgggcaacggtaaatcaggggatggctgataatgacacacatctttgcctgctacttaacacccagagcgaaattgatatcgcaggagccaattccattaacggcggcaggtcaggactcatttgcggcgcggtttctggttcggaaaaaagatag

SEQ ID NO: 392290 - DNA, 225 bp, Salmonella enterica; identical to SEQ ID NO: 85214

SEQ ID NO: 392291 - DNA, 1248 bp, Salmonella enterica
atgaaaggaatgcagaaaataaagaggggtaaacagtttacaggtgttgttctctacagcctgaaatcaggctctcaccacaaaatcatgccttatatcattggcggtaacatgaccggcagcaacgccgctgagctaatcagtgagtttgatagcgctaaaaaaatgcgccccgatatcgccaaacctgtctggcacaattcgcttcgccttccagaaggagaaacgctgacggtcaggcaatggacagcatttgcggatgagtatatggcccggatgggttttactgacacacatttgcgttgctatatcctccacgacgatttttgtggccagcacatccacataatagctaatcgcattaacatggccggtggaaagctgtatctggggaaaaatgaaaacctcatcagtacccgcattatcagcgagttggagatagtgcacggactaacccaaaccacgcaagcaaacggcgttcgtcgtcagagtaaaaggaagccttcccgcaatgaactgaagatggcggaacggacagtagctccctgccctaagtcacagttgcagactctgatcgataatacattaacctgccgccccgatttactcacctttgtccgtttactggaacaggaaggcgtagcctgcaaacctaatattgcgtcgaccggaaaaatgaacggtttttcatttcagtaccagggcattgcatttaaagcctctcagctcggaaaaaaatatggctggtctaccctgcaaacattgatcgatgttacaccagagcacctggccttactgaaaaaagaacaacagcaggctgtgccagtaccagtgtcagtgccagtgccagtgccagtgccagtgccagtgccagtgccagtgccagtgccatcatgcgagtctgaagaacaggctgcaaaccgggaaacgattctggagaaaatccttcagcttgaagaaaaaattcgtctggaaagacaacaagaaacagtgagtgtcattcaactcagaagcaaactgcacaatacagctcgtcagataccccgccagcgtcgtctaaaggcgtggcatttattactcagtcatattgttgtgctactcaggcgtaggggactgtcactgctacataccactacacacccctttcgccagattctgcacctgcacctgttggcaccagttcctttcacagcaggttattctcttcaggaacaatcagttagcaataatcatcaccactctccataa

SEQ ID NO: 392292 - DNA, 423 bp, Salmonella enterica; identical to SEQ ID NO: 85211

SEQ ID NO: 392293 - DNA, 345 bp, Salmonella enterica; identical to SEQ ID NO: 95526

SEQ ID NO: 392294 - DNA, 234 bp, Salmonella enterica; identical to SEQ ID NO: 95529

SEQ ID NO: 392295 - DNA, 159 bp, Salmonella enterica
atgcacgaaccccccgttcagtccgactgctgcgccttatccggtaactatcgtcttgagtccaacccggaaagacacgaaaaatcgctactggcagcagccattagtaactggaggtatacgagagacaaattaagaggtcttgaagtatgggcctga

SEQ ID NO: 392296 - DNA, 1497 bp, Salmonella enterica; identical to SEQ ID NO: 279150

SEQ ID NO: 392297 - DNA, 501 bp, Salmonella enterica
atgagtaaaactgctaaatatttttttatgctattgatatttccgactatatgctttgcggattgtgcccgagaagtaacttcatgttaccttaccaaacttggcttgcttgaacagcgttccaaagaagaagcaagagatggctattcacatctaattcttaatggtgtggaaatatacaaaacaaaaactccttttatggcatttatttctgatgacgaaggtgtctttaagaataaaaaatattttacgaccaagactattttcacattcattccagcggaaccctgtagacacaaagagtattatgggtattgccgcgtaagtgtagttctcgatttctcgggcgacaagcccgttatttccaacgaatttatttcagattcggggagttcggttatcgactgggtctcatggggaaaagcaaatgcgatcattgtatttgaggatggatcaaaatttaaatatatgaacggacatgttgagcgcgtcattaaatag

SEQ ID NO: 392298 - DNA, 588 bp, Salmonella enterica
atgaataatgcaataactcttattcaaaaacaagctccgcatgttcggttggatatatcttctattattgatggaccgatcagtgaatatttaaatataggcgttattgacctaattgtaactccaactaacttagtatcgtctcaacatcctgccgaatacctttttgacgaccaatatgtttgcgtagtctggtctggtaatccgctatgccaatcaggcataaatttggataattatctgtccagtggtcatattgttgcaagatttagtaaaatgatcgggtgggctcttgatgaggtttttatcagccagtcaggatatcaacgtagaatagatattattgttccctctttcagtatgctgatgacgcaactgatcggtacaaatttaattgccactgttcatgaacgttttgctcgctattactctaaataccttccggtagagatcttcccatgtcctattatttcagagcctttcgatatgaagttgcagtggcatcggcatcatgacggtgatcttggtattcaatggctacgtcagattctacataaatcagtattgaatctcgaaccacttagttga

SEQ ID NO: 392299 - DNA, 204 bp, Salmonella enterica
atgtgttttgctgttctgttatatagagtctacaaagtgcattttctgcatttgctgctgcatcgagaacgaagcaaaactcagcgttcagagcgtgaaatatctctggtggagttctccacaagtcctttatctcaattggagtgtttgatttatctgtcatgctgctttgtctccccatctcgctttccattccagcgctaa

SEQ ID NO: 392300 - DNA, 228 bp, Salmonella enterica
ttgctgtggttctggtttagaaatttccgttataaatttcttagcaacagcagactcatattttcgataatcatcaagatattgaacatctatatgatttttgtagcggacattaaatttattggcagtcccagttttatcatctttgcgttcatccgttggtctgaaaaatttattgtagcgacgtggagatacaccctcaaagtcacaaaatataactttagatga

SEQ ID NO: 392301 - DNA, 153 bp, Salmonella enterica
atggtcgacatgaaggatgacatctggagcagaattcccacagtactggcatttgaagccatcgcgcttgaaaacctcaaaccgtattttcttggtaatgccagaacgaatcttttttacctggtctggtgtaggtttttttgccataattaa

SEQ ID NO: 392302 - DNA, 1326 bp, Salmonella enterica
atgacacagtatcaggcgctcattattggttttggcaaggcaggaaaaacgttggcggcaactctggcgaagacgggatggcgcgtggcgattatcgaacagtccgccagtatgttcggcggaacctgcatcaacattggctgtattccaacgaaaacgctggtgcatgatgcggaacgtgagggcgatttttctgtcgccatgcaacgtaaagcggcggtcgtaaattttttacgcgacaaaaattttcataatcttgccgacctggacaatgtcgatgtgattgagggaagggcggagtttattgataaccataccttacgggtatttcaggcggacggcgagcgggtgttacggggagaaaagatctttattaatactggcgcagagtcggtgatcccggctattacgggcttaacaacgacggcaggggtgttcgatagcaccgggctactcagcctgagccagcgtccggcgcggctggggattttaggcggtggttatattggccttgaatttgcctcaatgttcgccaactttggtacgaaggtcactatctttgaagcagcgccgcaattcctgcctcgtgaagatcgggatatcgcgcaggcaattacccgtattttacaggaaaagggcgtcgagctgattttaaacgccaacgtacaggccgtatcctcaaaggagggcgcggtacaagtagaaacgccggaaggcgcgcatcttgtggatgccctgctggtggcgtcggggcgaaaaccggcgacggctggcttacagttgcagaacgccggcgtggcggtgaacgaacgcggcgggattatcgtggatgattacctgcgtaccacggcggacaatatctgggcgatgggcgacgttaccggtgggttgcagtttacctatatttcactggatgattttcgtattgtacgcgacgggttattgggagatggcaaacgcagtacccgcgatcgccagaacgttccatactccgtctttatgacgccgtcgctctctcgtgtcgggctgacagaagaacaagcgcgggcaagcggcgcaacggtgcaggtggtgacattaccggtggcggcgatccctcgcgcccgtgttatgaacgatacccgtggcgtactaaaagcggtagtggacgtgaatacgcagcgtattgtaggggtgtcattgttatgcgttgattctcatgaaatgattaatatcgttaaaaccgttatggatgcagatttaccttatacggtgttacgcgaccagatatttacccatcctacaatgagtgagtctttaaacgatctcttctctctcattaagtaa

SEQ ID NO: 392303 - DNA, 855 bp, Salmonella enterica
atggatgcgcttagtcggctattgacgcttaacgcccctcagggctcaatcgacaagaattgcccgttaggcggcgactggcagttgccgcacgccgctggcgagctatcggtgattcgctggcataccgttacgcagggcgaagcgcaactggaaatgcctaccggcgacgccatgacgcttacgccgggaaaggtggtgattctgccgcaaaactccgcccaccgtttgcgccagtctggcgaagcaccgacacatatcgtgtgcggtagtctacgtctgcacacgacgtcacgttatttccttaccgcgttgccggaagtgttatgtcttgccccgccgccgcatagccccgccagtatctggcttaacgccgccattttgctgttacagcaggagtcagaacaccatttacccggcgctgatgtcttatacagtcagcagtgcgccacgctgtttaccctcgccgttcgcgactggctatcgcaggctggcacggcgaaaagcgtgctcaatttattgctgcatccccggctgggccgcgtgatccttcacatgctggaaacaccggcgcatccctggacggtcgaaacgctggcgcaacgggtacacatgtcgcgggcgagtttcgcccagctatttcgcgacgtgtccgctacaacgcccttagccgtgttaacaacgctgcgtctgcaaatcgccgcccagaccctgtcgcgtgaagcgctgccggtgatggtgattgccgagtcggtaggttatgcgagcgaatcttcttttcacaaagcgtttgtccgtgaattcggttgtacaccaggcgagtaccgcaaacgggtcagcgcgctcggacgataa

SEQ ID NO: 392304 - DNA, 1557 bp, Salmonella enterica
  misc_feature (1540)..(1549): n is a, c, g, or t
atgattgaagttttaaaaaataactatgaagcatttataattcaaaactataaattcaatcacttaggtttatttcatgacgaagacagtatttatgctgtaatacagaattacaaagaatctaatactacgttagatgaaatacaagaactttacaactacagatttaaaaccgcaggtgttccgggaccaacgtttacagaagaagtaaaagacaactatataaaaatagatcttagaaatacatatgaaaaagtaagtttatttggccaaccatttaacgcattcgaatttaataataacatacgcatagccataccatctaaatttcatccttttcatgttgacatgaagtggtccgacaacagttttacatttaccttcaataaagaacttactcctaatgatattgatgaaatcattttaatatgtgaaagcttaggtttttatggttataaatacaatattaaaacagaccatgaactacctgattataatcatcaaataaagaaaagtaatacacaaggaaatcttacattagttgcgagtcaataccttaggaataatcaacctaaagaaatcttggagaaatatgaagaggatcaagacttttggacagaaaaaagagccaatattttttcagatgtcaatctaaccaaggatgaatgtcttattgattcattcagaaagagtcaaaacagatgctttgtcgatgccagtgtatttccacgaaataacataagagaatatatatcactgtatgacactgtaatcattgcaattccattagcagattcacccaatagtcagagtttttatgacatttttaaaataagcaagattgagctgttagagttagttcgacgtggacgtataaaattcgtcgcattccaaaatctccagcggtatgattcaaattttttggcggatgttctgtctgttgatccagaatgtgtattattttcaagaagattagccgccgcgacattattagcaattagagaaaaaacaggattatttggattcgcatttgatagcagcactcaatataacttattgaaagaatgctacaattcaaaagtcgatgcacttaaaatattagcagagtcgttatcggaaaatatagcattttttgagtatggcataaatcaaagaggtgcattgggtattagtcaattttgtggggcaagctttgcagcccaaatatataaatcacgcggtcgcgattatggtattgagctaatgacaagcgcaatgtcacttgagttctcactagggctaggggcacatcactttccctttgagcacacaggttattctgaggtaaatgcctgtaaaatccttaatggcatatataatggagttcagcaatcacaaaatgaacttcgagaaatggagatacagactttactatcaaatattttcactattaataacgacatgaatgttctcgagttagatgacatcttaagcaaatacagtcgacgtatgatcccacaaatattacaagagtatgcccatctgacacctgaagaattannnnnnnnnnctctctaa

SEQ ID NO: 392305 - DNA, 192 bp, Salmonella enterica
atggagtataagggactatcgggagcgggttatattgcgttgctaccatggattttcaaattattaaaagtcaccaccaataattcaaagatattcagcaatgaaatatttagtaatttagaagctttaactttaaatactccaagaaacacaatgttggtacataaaataagacaagacatgcctaaatag

SEQ ID NO: 392306 - DNA, 921 bp, Salmonella enterica
atgctttttttagggttgctggctgtcgtagctaatacgaaaaaagaaacagaaaaaatcggagcgacgataaaggtagtgctaggcgttttcgttatattttattttgcccattcattttttgtttcaattatgtcgccttcggtaacgttttcttgggctaatcttactgaacttctgacgccagttttattatcattttcgtttatgccatttatttatatgctttacctttatcaagcttatgaaactaagttattaggattaaaaatatattttgacgatgaggctctgtttaattatgcaaaaaaattagcgatttgcttctttagaacagatcttgatgctcttaatcgctgggtaagaaacatacatattaatgaaattaagacgaaagaaggaattaaggcaagtttaaaagacgtaaaattacggaaaaaaatcgaatctaatccacccgaagtagataataaatatgggtggtcaccattcttagccaaagattttcttgttggaaaaggagttgacaccaatgattatcatttcagttttgatacttggatatcatgtagtcatatgattgagattggtaatgatggtttatttcgtgatagtgttgcatattatttatatggagatgaatatgctgctaagaaactcaagttaagagctaatataaataattcacccatatcaaattgttcaaaaaataccatttcattgcttgcggaagaattaatatcaaaagcattaggggatgatgactttaatattaatgagctatttagtaagatcccagttatgataaagaaagataatcgctatgtgtctattaccaaagaggattttgcaagccagaatggtgggtatactttagaagttgttatagagatcgagggttattcttcaaaagatcactaa

SEQ ID NO: 392307 - DNA, 681 bp, Salmonella enterica
atggtattgccttcaatgaataaatcagttgaggccattagcaataatcaccttcaacagccgaacaaatttccattaataaatggattagctgacgtaagagactattatgtcgcaaactgcttattgtttaaacttaataaaggcagtttgcgaattgaaaacgaatttggggagttcatcgaacgatctgcgccgtgtttatttttattggaaaaagatcaaacaatcacgcttagtatgagcgaaatagaagggcatattgatttttcttcactggaagtttcctatgacttaatgcaaaaattctacaaagttttttacagtacaagaaactataatgatcgagagctatcattaaaaacgaaaccaaagtatttttttcatgcggacttgttgccagggatgagtgatacttttgactctattttgcatggtgtggcatgtccacgggtttgtagtaatgtgagtattgatgatcatgattattcatatttctcattgatgtatcttatatcggcatttgtacgtaagcccggtgggtttgatttccttgagcgagcaataaaaattacgacaaaagagaaagtttataacattattatcagcgatctcacccgcaaatggtcacaggctgaggtggcaggaaagctgtttatgagcgtatcaagtctgaagtga

SEQ ID NO: 392308 - DNA, 435 bp, Salmonella enterica
  misc_feature (247)..(256): n is a, c, g, or t
atgggcgtcgttaagttagctgattacaggcataaccctgtacaacatcaggaggcatccagtatggggtatgtctctatacaccgccagtttatggacagcaggctctataaggactctcaggcagtacatctttggcttcacttaatcctcaaggctaatcacgaatctactgtcgtcaatacggatatcgggccgataactgttgatcgcggtcagacggtggagacctggaaccgcgacggcnnnnnnnnnnagggatgcttaatatttgctcgatggggaagaaatttagcctgtttacaatcgttaaatatgacgattttcaggcaaaaaattgtccaacggttgtccaacggttgtccaacgcaaacaccagtaatggcgcggctctcagcggagattgtccaacggttgtccaacggttgtccataa

SEQ ID NO: 392309 - DNA, 264 bp, Salmonella enterica
atggtcctcattcccgccgaaatgcgggaatacaacgcgcatcagttggtgcgtataacttcttatttgttaaggaaatacttacatatgcaacttacaagtactcgcaagaaagcgaatgcaattacaagcaaaatgggaatgcttctggctgttcttgaatggggtgttgaagacgaggagttggcggaactggctaagcaagtagccagaatgctgacaaaagaaaaagccccgaagaacggcgaattcttcgaggcctga

SEQ ID NO: 392310 - DNA, 195 bp, Salmonella enterica; identical to SEQ ID NO: 15260

SEQ ID NO: 392311 - DNA, 717 bp, Salmonella enterica
atggaaaataaaaaatcactgacgacagaacagctcgaagacgctaagcggcttaaggctttgtatgagtcaaaaaagaaagaattgggaataacccaatactcaatcgctgatgaactgggtatcacccaaggagcggtagggcattatcttaatggcagaaacgcgctaaacgttgaggttgcatctggttttgcacgattgttgcaagtctcaattgctgattttagccagtcaattgctgccaaggttgcagaacaggcagaaagccttaagagcgatgccaacgtaaggtatgcaggggaatacagagcaggaaagaggtatccggtgttaagcagtatccaggctggctcgtggtgtgaagcatgcgaaccatacaccattaaagacatagatgtttggcttgagtctgacgcgcatattcaaggtaatgcgttttggcttaaagtggaaggtgattcaatgacggcaccggttgggttaagcattccagagggaacattcgttcttttcgataccggaagggaggcgatcaacggcagcttggtcatagcaaaactttctgactctaacgaagcaacattcaagaagctgataatcgacggcggaaataaatacctcaagggacttaatcctgcatggcctctcgtgccaatcaatggaaactgcaagattataggcgttgcaattgagacaaaactaaggctggtttga

SEQ ID NO: 392312 - DNA, 300 bp, Salmonella enterica
atgacagtagtcattacatatctggctgacgataacgccagaaatcgccgcagagcacgcagacaggctcaacgtgaacaggcgatgcaagagcagcgactggcgcgaaaaattgcgctaaagctctctggttgcgtcagagcagataaagcagcatcactcggaagccttcgctgcaagaaggcagaaaaagtcgagcgtaaacagaaccgtatttactaccgcaagccacgcagtgaaatgggtgtgacttgtgttggtcgccagaaaatgaaattaggcagcaaaccacttatttga

SEQ ID NO: 392313 - DNA, 201 bp, Salmonella enterica
atgactacgactattgataaaaatcaatggtgtggacaattcaagcgatgcaatggatgcaagctgcaatcggaatgcatggttaagcctgaagaaatgtttcctgtaatggaagatgggaaatatgtcgataaatgggcaatacgaacgacggcaatgattgccagagaacttggtaaacagaataacaaggctgcctga

SEQ ID NO: 392314 - DNA, 243 bp, Salmonella enterica
atgaaaattaaaactatgggcgcaagcccattaagcggtcgtatttttcaaggaacattaaacactgaaaaaggaatgtgggtaggaaagaaagaagatgtcaccgaacaggcagttaaggcagtagctgaacacctgatgataaaagaccagaaatacgcatacgaaacgaaggatggcaaatggctgataataagtcatcaaatagttgataaattaccagaagagtttattgctgattaa

SEQ ID NO: 392315 - DNA, 198 bp, Salmonella enterica
atgttgacagttggaaagacatattcaactaaaaacggaaagacatttagttgtgaaaaagatattggagaaatagacactatctttccatttggtggatggctatacaattctgatggaagcaaagacaggtttgcatattacaccagaggaggtacttataaactaaccaaatcagaatatgatttaattatttag

SEQ ID NO: 392316 - DNA, 912 bp, Salmonella enterica
atgagcaatatcgttgaattcgttaaacagcaggagcagttattctgcggagcattgactgaacagacggtgacatgggctaaggaaagccagtttgcaattcagtatttccagaaaaatgattaccttgctaaaacggcactggcaaatccaaccagcgcacagaacgccatcatcaatgttgcggcgatcggcatcaccttaaacccggccagcaaacttgcttatctagttccgcgcgacggcatggtttgccttgatatcagttatatgggattgctccatattgcaatggagtctggtgttatctcatggggtcaggcaaaacttgttcatgctaacgatacctatgagtcaaacgggcttgataaagcaccaacccataaatacaacgccttcggtgatcgtggtgatatcgttggcgtttactgcacagttaagacgccagcaggtgattatctaacggaagagatgagtctggctgaaattgaggctgtaaggaaaacaagcaaggcagcattcagcgataaaggaccatgggtaaatcactggaatgagatggcgcgaaagacggtcgtaaagcgtgcaagcaagtattggcctaaggcatcacgtcttgatagtgctattcacgtactaaacgaagaagaaggtgtgtggactgaaccagttatgccgcacaaatcagaggaagatatccgcgaagatgaacggaaacgccagcaggaaattatggaaaaagcacaacttctttgtgatgaaatggctcaggcagaaaacatggatgatttgaagcgatattttgcagaagcatatcgcctgacatctggaatgaaattgcagcagaacgtacaagccatttacatagaatgcaaagcgaaactggaggttgccagtgagcaaactgtatga

SEQ ID NO: 392317 - DNA, 492 bp, Salmonella enterica
atgaaacaaatgtcactaattgagatggatggatttctgaaaggtaaatgcatcccccgagatttaaaggttaacgaaacaaacgctgaataccttgtccgtaagttcggtgaacttgaatcaaaactggaaacggcgttgcgggagtgtcgttctgctggaatcacgattgataaccttgaggctaaatgcgcgaagatggctgctgaaaatacctcgcttaagcaatctgagaaggaatttaatgacttttgtcgtgaggagtttagcgaatgggaagatgatgttactgaaaccccagccaccgatgctttcctggctgaagtacgggccagcgaacttgatagcttggctggcttggctgaaacaatgttggtcaagttctccaatcagcagtgctcatctgatatgcatgaggttgttggctggaagatggttctccagcaggccaataatcgcgcctaccggctccgcaaaggaggcaaacagtga

SEQ ID NO: 392318 - DNA, 192 bp, Salmonella enterica
atgaacggacagatatcaattgttcgaccaggagcatgtgacgatcgcgaaatacgaatgattattcgtctggcgatggggaaaacaataacagctctcattactccagaaaatctcgcattagcattaaccggaaagtcagacctgccagtagagctaatgctgcgaaatgttgagattaaggtgaaatag

SEQ ID NO: 392319 - DNA, 144 bp, Salmonella enterica
atgaaagtatgggtttatgatccagaaaccatattaaacgctgaagagcgcaggagaacggaagtctatattcataaccttaatgaagatggatttacaccagtgcttgtaaaggctactccgcaggaggttaaccatggctaa

SEQ ID NO: 392320 - DNA, 594 bp, Salmonella enterica
atgaaactgattgatgtcttggtgcgtgatttagagaaattcgacggttggccagaaggcgctgttgaatgccatcgttttgcagacgaagcagttgtagacttctttgataaggatggcaactggccttatgactgcactgctaagtacggttcaattgctatcgagtgcgtaagtccaatagtaatgggcgaaggcattgctagtgaaaccgtaacccgcgatcaatacgaagcagcacttgcagccagcaagacagaatgggatggagctggacatccacctgctggatgcaaatttgagtacaaggcgtcatctggaaagtggttcacggcaacaatgaagtattgcggggaaagcttcgctatcgttgatatggacggttctgagtcttgggttactcttgatgcgccaatgcgccctatccgctcagaagaagataagaagctagaccaaatcactcagtcaattctggacattctcaacgattacgactttgaaatggtgcatatcagatctgaccaaaagagaattgcaaccgacattgttgagcgcattacctcagggatgattccacacatccgcatcgaataa

SEQ ID NO: 392321 - DNA, 141 bp, Salmonella enterica
atgaaatcagggaaaattaaacgtggtcggatgaatattacagaccaaagtatttgtatgggtgttatttttattgtcctggggattgtggttgctgttggctatacagtatacagtaaattctgggtttgtttgtcataa

SEQ ID NO: 392322 - DNA, 444 bp, Salmonella enterica
atgattcaatctctaggtacaattatgagatcatctgctaccgtaaccgttctcaccggtgtaaccgtttttgttgtcggtcaactcatcgcaaaaagattcgttgaaccttatgtatcattcagggaacaattgggtaggattactgttctgctattgcgtgagcaagccaaaataacgaattctaatgttgacgctgaaatcatccacgatttgaaagatgccgctgctcagctaatggcgaagtattcagccttgcctaatagtttaaaaagaagctatataggaatgagatttataccctcagaatctaaaattcttgagtcagcgcaaaccctgaatttggtagcatcaagacttgaaggtaagtccggagaaaatacttacaatctcataaagcagattggactcaatctcaatataccaactacctattctccttaa

SEQ ID NO: 392323 - DNA, 231 bp, Salmonella enterica
atgtttaaaaaagcaaaaatctataaagcgattatctcgattattgccttattttcctttgttaagtgggggcttgatcccaatgtcatttgcagggtagcaagtgaaacacctcaagtctgcggttattctgaacatggtgtagtgatgaatgcttttggctcaggctttgctttcattttaaccgctatggcagccgcaatacttacactgtgggttagaaaagattga

SEQ ID NO: 392324 - DNA, 294 bp, Salmonella enterica
atgccaaaattcgcaaaagaaattatcgtaccagagagttacgctataaataatacaactctccttgcagctatgggactttgcttctttgttttttctgaaatcattctgattattaacgctgttgcaaggcttttcgcatctgtatggatgtattcatacgaaggtagcagtccggctaggtcaggaacagcatttcttcttgctgccgtatgtttttttattgcaattttttgtcataaaggtttccaacattgcttgttcaaactgagacaacaccggataccgaactaa

SEQ ID NO: 392325 - DNA, 1851 bp, Salmonella enterica; identical to SEQ ID NO: 21737

SEQ ID NO: 392326 - DNA, 477 bp, Salmonella enterica; identical to SEQ ID NO: 239698

SEQ ID NO: 392327 - DNA, 1260 bp, Salmonella enterica; identical to SEQ ID NO: 239697

SEQ ID NO: 392328 - DNA, 381 bp, Salmonella enterica; identical to SEQ ID NO: 7626

SEQ ID NO: 392329 - DNA, 891 bp, Salmonella enterica; identical to SEQ ID NO: 7627

SEQ ID NO: 392330 - DNA, 183 bp, Salmonella enterica
gtgatcggcatcggcggcctcggccatatcgccattaagctgctgcgggcgatgggcgccgatcgcgtagtcaatagccgcgatcctgaagccttaaaagtgctggccgggcagtttgacctgagcatcaacaccgtggcggtggatcttgactggcagccgtacttcgaagccctgtcctag

SEQ ID NO: 392331 - DNA, 228 bp, Salmonella enterica; identical to SEQ ID NO: 7628

SEQ ID NO: 392332 - DNA, 867 bp, Salmonella enterica; identical to SEQ ID NO: 7629

SEQ ID NO: 392333 - DNA, 888 bp, Salmonella enterica; identical to SEQ ID NO: 7630

SEQ ID NO: 392334 - DNA, 825 bp, Salmonella enterica; identical to SEQ ID NO: 7631

SEQ ID NO: 392335 - DNA, 1074 bp, Salmonella enterica; identical to SEQ ID NO: 7632

SEQ ID NO: 392336 - DNA, 1311 bp, Salmonella enterica; identical to SEQ ID NO: 7633

SEQ ID NO: 392337 - DNA, 366 bp, Salmonella enterica
ttggctattttaattaacctcttaacggcgttactgttccattgctccccaaacccctttatagcggtacgggtgctgggcctgcggcagggaggtatcagtgaagaaacacaaaatgacagctgtgagaaaatactggcgccgacagagtggaaattgctgtgggttaagctggaaggaaaaccgcttccgtcacagacgccgacactgaaatgggcctgtctgaaactggcgaaactggggcgatggtatgacagcaaacgcacaggccgccccggttgggtagttatgtgggatggctggttcagacttcaggatatggttgagggttacctggtgatgaagtctcttgatcaggagatctga

SEQ ID NO: 392338 - DNA, 459 bp, Salmonella enterica
atggcactgctggataagctgcgtgagcagtacggggtcagaccggtatgcagtgaactgcatattgccccgtcaacgtattaccactgtcagcaacagcgacatcatcctgataaacgcagtgcacatgcacagcgcgatgactggctgaagagagagatacagcgcgtatacgatgaaaatcatcaggtgtacggtgtgcgtaaagtctggcgtcagttgttacgggaaggaatcagggtggccagatgtacagtggcgcgcctcatggcggttatgggacttgccggtgttctccggggtaaaaaggtccgcactaccgtcagccggaaaaccgttgccgcaggtgaccgcgtaaaccgtcagttcgtggcagaacgtcctgaccagctgtgggtggctgattttacttacgtcagcacatggcagggcttcgtctatagtggcgttcatcattga

SEQ ID NO: 392339 - DNA, 168 bp, Salmonella enterica; identical to SEQ ID NO: 30089

SEQ ID NO: 392340 - DNA, 1983 bp, Salmonella enterica
atgtccaactactgcttttactctcaggatgcattagctctggctcaaagtgctggtgttgatgtaataataaacagctatgctgagcagcataaaaaacaaacatatattctttgcagacctctatctaatgaggatgtaaagtatgattatgaccgagcgattgcagtattttcttctggtataaaacctttttttatagattttggggatgacgatgatctttttgaggagtatcaggaagattttctcgaagatgtttcttatttagcggagaaattcaagtatcgagataagatcggcaggaaaaaatcgtggcaaattttatttgaatcgctttctcgtaatgatatcgatttcaaaaaactggaagtcgaaactaaagaaagtagggtgattgatttaattatctcacttattgttggtagtattaacgacacatcaagaattaaccttgaagcaaataatttattagatacaataaaatccaaaattattttatttgatacggatcaaacaaagtttgtcttccagagtggctttggaaaaaagagtgtaatacaaggattagctggttcaggtaaaactgagttacttttacacaaattaaaagagatttattcaaaaaaccctgattctagaattgcatttacttgctttaataaaattctcgcttccacaatgagaaccagaatccctgagtttttcgattttatgcgagtcgaaaaacagatagaatggggtacaaaacttttttgcttcaactcttggggtttgactaaagaacctttttctggaatgtacagatatatatgccattattacgaaattccatttgggggatttggtaatggcgattttgatgccctatgtaagaaagccattgcagatataaataatagtgggagagctgataaaaaggcacttgattacgtatttatcgacgaaagtcaagacttcccacaaagcttcattgatctctgtgaaatggttacttctaaaaaattatatgtagcaggtgacgttttccaaaatattttcatgccgattagcgataacgtgaatcgagcagatatcgttcttaaaaaatgctaccgcacagatcctaagaatttgatgttttctcatgccttaggaatgggactctacgaggaacctgttctgcgttggttaaaagagcctgaatgggattcttgtgggtataaatataaaaaagtaggagatagagtccatttatcaagagaccctttgaggcgttttgaagatattcccaaaaatcataaaagtactgctgttcatttgttagaaggaacagataatgggccagataaaatagttgatattataatcgatattaaggaacgcaatccatctttagagcaaggagatattgctgttatttttcttgacgccggtggttatatttatgagtacattcattcgctaaaatcaaaagtaaaacaacagcttgggtgggattcaaatatctcacatgaaacaaaatcaaagcaagatggtaaactttttatttctaatataaataatgcaaaaggtcttgaatttccatttgttatttgttttgccatgaaactggtgaagagagctaattttcgaaatgcactctacactatgatggcgaggtcatttttagaaagtcacttagttttaaataatgataatgaaaatccggcaatccctacaattctcgaaggtctgaactttctcaatgaaaacaactacatggatgtaaggcttccttcagatgaagaaatacaaagtcaaaaagattttattgttctagatgagtcggtttcaatttctcagatggttaaaagttattgcgcagacaagaagtctacacctcgactaatagcaaaaataactgatcgagtcgaaaggataattgcggaagatgatgatgctgacggggaatacattaaaggcttgattgaaatagaatatgaaaggaacaaaaaactatga

SEQ ID NO: 392341 - DNA, 168 bp, Salmonella enterica
atgcacctgaaggtggatgatgaggttgtttttttgtatgtggtgctgattttttgtgcactggcgggcttcaggcgtgcgaatgcctccggcgcgtgccgaattattcagaggaggtcactttcagggggaagctgtggccaggcggctgtaattgcggttacgtga

SEQ ID NO: 392342 - DNA, 327 bp, Salmonella enterica; identical to SEQ ID NO: 206274

SEQ ID NO: 392343 - DNA, 258 bp, Salmonella enterica
atgaaactgaacaactacctaagcaagttctttgatgttgtagcggatgaagtggagaacgatgaaggtgaaaaaatcccttctctgtggctctatgagaaaggggaagactctgaacctgtagttatcctgaaacagacagaaaagcccggagaatggcgcgtaggagatatttactcagctctaacgaatgatgcccggctatccgaagaacagatcaagaaactggcaaaagctggaatgattaccaaaaactaa

SEQ ID NO: 392344 - DNA, 843 bp, Salmonella enterica
atggtaaagcaaaaagcaaaaggtgtcttaccaaaaataaaagagtatcaagagcttttaaaatcaatagaagaacaaagatttcttactgataatgttcagatctcatgtttgaacgatttgtatcaaatggaacaagaattgaagtatttgagagatttgaatgaaaagtatgaatgcgaagctgttttacatgaccataactatacacaattagctcttgatttggatgatagcaaagctaaagtagaagagcttgaaagtgaaattgttgagttgaaagcattaataaaagaaatcactgataaaactcaggaagagttgactgatttagaagagcataacatcattttaattgaaaggttgagaaatgaagaaagtgaaaacaaagatctgataaaagagaactacagcttacacttaaaaataaaagagcttaatgatttactctatgaccaaaacgaagaaaaaatagaacttgaaggttctaatcaggagttagagcagtctctttcccaatgtctgaataaaatccaaacataccaaaatacagtagctgtttttgaagataaaacaagacttcttgaaaaagctaataacgatcttgaaagtgaaatagattaccttaaagaaaaggctcattgtcttgaagaagagttaaataatgaagttgaggaaacaggattttttaaagaaatgtcagaagactttatcactcagattaaatggttaaataacacgattgaggtttatcgtggtgaagttgatgaagacactataagaagagttgaatacacggttcaacagctcagggaaagtttcggtgatgattatgaggtctga

SEQ ID NO: 392345 - DNA, 435 bp, Salmonella enterica; identical to SEQ ID NO: 229010

SEQ ID NO: 392346 - DNA, 312 bp, Salmonella enterica
atgataaacaaaatcaaaaaaagcttaaataaaataacagtaagtgaaatatttatagcaggtctattaatgctacctatgacactgatattccctgaaaacattatgtgtggatacatgtcggcattaggtgcagcaattacattcgcaacaataacttttaaattagcattgttcttcatttggtttattcatctcacttttttaatgagcatgagaggaacaacggagagagcagaaatatatatatctgatttgaaagctgaacacttaaaaagtggaaaggaaatatttttcaggaggtcaaaatga

SEQ ID NO: 392347 - DNA, 321 bp, Salmonella enterica
atgataaataaagtcataaatagattagttatgaataaagtatttaagttaatgatctttgtattactggaggtaccaatattattactattattggggaatatacacaacgctccattatttggtttttttatgagcactacatttagcggagcacttacagacacaggtgataatttttacacaccaactaacttaataaatgacttttattgtggttcaatgcatttctatttaatcatttcagttttaatagtagcaaagttgatacattcaagatatggcaagaagatagacgcagttttaaggaggttctcatga

SEQ ID NO: 392348 - DNA, 696 bp, Salmonella enterica
atgctgatgacgaggcggctgttgcgctggccgctgctgtacttgctgacgttgcagcgtttgtctcagatatttttgctgcggctgccgatgcggctgccgccttttccgacgctgccgccgcagtggctgacgcacctgcatcaccggcactggaagccgcctgcgtttctgacgtcttcgcggcggtttcggatgctccggcgcgctctgctgatgtctgcgccgccgtcgcgctggcggctgcggcagcagctgaatcgccggcggcagtacgggagacatctgcattcgcttcagatgttttcgctgcggctgccgatgcggctgccgccgttctggctgtgtcagccgacgccgcgctggctgatgcctccccggcttttgtggtcgccgtacctgcgctgctctccgcagatgctgcggatgaggctgcctgtgtggctgatgcttctgccgctccggctgcattcactgctgccgtggcgctttccgctgcctgacctgctgatgtctgcgcctgttcagatgcctgccctgcggcggtggcattccgcgatgcctccgatgcctggcgggcaacttcttccaccatcgcctcaaaacgtcgcagcgcctccgggcggacgtcgtcttccgtcatggcccccagaaaatcattcagggtgcccggttttgaatcatcgtagaccgtaa

SEQ ID NO: 392349 - DNA, 516 bp, Salmonella enterica
atgaatttgcctttcattagggtcccatctacggtgtttgagactatttattatgcgatgcgcccagagaggttttctccagtaagaactcaggttactgatgttcaaactgtgtcattcgttggtatgattattgatcgaaaggtattgaataaccatcttaacgatatccatgatgaacttttcctttattatgatgattttttctttggttataagctagtattgtccgggcagaaaattcgttactccccagaaattaaatttattcatgatatctctattcatggaaagtgtatctgccccgaatggaaagtatattatctttgtagaaatttgttgctgctgagaaaacttttacccgttcccaggatattcagtgttctttctatagtgttacgcctctctaaatatctcgccatattaccatggcagcgtaagaaatttcgttatctatattttatctggcagggaatacttcatggacttaaaggtattagtgggaaatatcattag

SEQ ID NO: 392350 - DNA, 339 bp, Salmonella enterica
atgtcagcggcgctggcgcaatttcgtaaccgtcgcgattatgaaaaaaaatccagtaatttatctaacagttttgaacgcgtgctggaggatgaggctttaccgaaggcgaagcaaatcttaaagctaattagcgtacatggcggcgcgttagaagattttttacgtcaggcgcgtagcttatttcctgaccccagtgatttagtccttgtgttacgcgaattgcttcgtcgtaaagacctggaagagatcgtgcggaaaaagctggagtcgttacttaagcacgttgaagagcaaaccgatccgaagaccctcaaggcagggattaattgccgatag

SEQ ID NO: 392351 - DNA, 243 bp, Salmonella enterica; identical to SEQ ID NO: 373967

SEQ ID NO: 392352 - DNA, 462 bp, Salmonella enterica
gtggagcagcatgataatttcctgaatcagacgtttgaaaataccgataaacacatcacgatagtttctccatggctaacctggcaaaaactggagcaaaccggttttcttgattccatgattacggcgtgttcacgtggtattaacgtcacggtagtcactgacagaagctacaacactgaacataatgattttgagaagcgaaaagagaagcagcagaaccttaaagcggcgctggagaaactgaacgcccttggtattgcgacaaaactggtcaatcgtgttcatagcaaaattgttattggtgatgatggtttgctgtgcgtgggatcgttcaactggtttagcgcgacacgtgaagcgcgatatgaacgatacgatacatcgatggtttattgcggtgataacctgaagggtgagattgaggctatttataatagtcttgataggcgtcaggtttag

SEQ ID NO: 392353 - DNA, 261 bp, Salmonella enterica
gtgggggcaagccgggctgctgtagatgctggttatgcaccaaatgattatcagattggccagaccggaaaaatcgttgcgcctcaactttatattgctctgggaatttctggcgccatacaacatcttgccgggatgaaagagtcaggcgtcattgtcgctattaataaggatcctgacgctcctatcttttctattgcggattatggtttggtagctgatattttcaaagctgtacctgaacttatcgataaattataa

SEQ ID NO: 392354 - DNA, 240 bp, Salmonella enterica
atggaactcagaagaatatctgtaaataatttgttcggaattttaaactatgatattgatttagggaactcagaaacaattattattaccggaccaaatggttacggaaaaaccatgcttttaaagataattgacaacattttaaataaaaatatagattttttctttgatttgcgatttgaagaaataaaatttgaacttgacaccatattactatgtatagagaaacaaaaaaaataa

SEQ ID NO: 392355 - DNA, 576 bp, Salmonella enterica
atgacttttaaaatgagcgaacaggcgcagacaattaaaattttcaatctgcgttcagatactaacgaatttattggggcaggtgatgcgtatattccgccgcacacaggactaccggcaaactgtactgatatcgcccctcctgatattcccgccagtcatattgctatatttgacgctgaaacccagacatggagtttgcatgaggatcaccgcggcgagatggtttacgacacaacaaccggcaatcaggtttatatctccgctcctggtccgttgcccgaaaatgtcacatcagtttcaccaggtggtgaataccagaaatgggatggtaaggctaaggcctgggtaaaagacgaagtggctgaaaaagcagcgcagcttcgtcaggcggaagaaaccaaaaacaggctcctgcaaatagcatctgaaaaaatcgcgccgttacaggatgctgttgatcttgatatcgcaacagatgatgagaaagcgcagctcgacgaatggaaaaaatacagggtgctggtaaaccgggtggatacctcaaatcctgactggccagcgcagccagcctga

SEQ ID NO: 392356 - DNA, 684 bp, Salmonella enterica
ttgtataccgggcttagcatacgttgccgggcaaaagctattctggaacactaccagttcgttcagtcctttccggaaagtaaaattaaaaagatcctcctgtccgaggaacaaatcttactcgctcacctggaaggaaaaaacggtgctctggtagatatctactgcggtccctgtggctatgacagagaaggtgaactgacattaacgctgtgcttcaatgatacgccgttggcacgtttatcattttcctttatccgccatgaagggaagcaaatagcgctggttgccgggttacaagggcccagtaaacatatcggcccacaagtcatacgtaacgccaccaaagattgttacggtctctttcctaaacggatgctgtatgaagcatttgcgacattgatgcaggcctgtaatgtcgacgagatttatgcggtcagtgaaaacaaccatgtttatcgtcaactccggtacttattccagaagaaaaaaacttttgtggccagctatagtgaattctgggagtcgctaaacggcgttaagaaaggtgccttatatcatctgccatcacaggtgatgcgtaaagcgcctgaaagtatccccagcaaaaaacgcgcagagtatcggaaacgctatcatattctggatacaataatacaagaggtcaacagcctctcccggtag

SEQ ID NO: 392357 - DNA, 510 bp, Salmonella enterica
atgaatcaaattaaagtcaactttcccgccattgatttagctgacaatcaaaacatggtagcggttcaagttactacgaatgcaagcccggcaaaaatcaaaaaaaccatcacagcctttgaaaagacaaatgaattaggagtgagtctcaaagataaatactctgtgttatatatttttggtttttgtaaaagctcaaaatactcagttccaagttattgtaaaataatcgatcccggctatttcgtaaatgaactttgcgataaagcagatgaagatatgatccttgatatgcttgatgccattcatcgccatcaggattatacgtcattacacccatggaatgataaagattcactcgaaataatactcaatatcattaatcgcaatgcaattaaacaccggatgaattgcgaaggcagcatatttgatatgcttaccggtttaaaggaaattaatgaagtaattacaaaaggaacaatccaacgtaagcaacgttcaaaatcctga

SEQ ID NO: 392358 - DNA, 186 bp, Salmonella enterica
atgggtgatctgtctgttattcaagctatagtgaataaatcaaaaattaaccaaggtgatatggtttgtatcagctatgaagatatgattactattgataaattaaaagctaaaatagcaaacgattcatcagagattgcaagtctaaataatattgacattacactaaatattgttgatttataa

SEQ ID NO: 392359 - DNA, 339 bp, Salmonella enterica
ttgtttctccatctggttaaaggcattgacgtatgcctctttgaattgggcggcgcgtttgcccgtaaagcccatagcaaggaaagcaaagccgtcgcgggtgatgttatagcagggaagtttgcggccagatgcgtcggtgtaatcactcaccgcaaaattgcgggcagtaaactcaggagagcaatcaagtgcgcggatctttttcagaacatcgtcatgacgtttggtgaagtagtcggcaacagcaagggaagaagtaacggcttgcccgttaataacactgatttcaggttgagcgagagttgggactgtagccatgatggccgcctccgataa

SEQ ID NO: 392360 - DNA, 144 bp, Salmonella enterica; identical to SEQ ID NO: 376341

SEQ ID NO: 392361 - DNA, 237 bp, Salmonella enterica
atggagaaacaactttcaattccatcggtgctgagcgatgcagcacataatgccagcgttctttattcctacatttcatccattcatcaggtctggttacagcagctttatcccatgctggaaaaagcggaatctccgctggccgtaagcctgtacgaccgcatcaatgacgctgcggcgcttgcgagccttatcaatatgacactgaaccgttcagaggtaagggggcgcaaatga

SEQ ID NO: 392362 - DNA, 225 bp, Salmonella enterica; identical to SEQ ID NO: 386359

SEQ ID NO: 392363 - DNA, 138 bp, Salmonella enterica
atgcaaagaaatgtgttctccagaaattacagactatatgacaaagaggtgaaacttgaaaatgggtggaaaaaatctggtaataacgtatacgatattggtgttgtaggggaaaccatagttgttaggtttaattag

SEQ ID NO: 392364 - DNA, 294 bp, Salmonella enterica; identical to SEQ ID NO: 376650

SEQ ID NO: 392365 - DNA, 219 bp, Salmonella enterica; identical to SEQ ID NO: 379719

SEQ ID NO: 392366 - DNA, 999 bp, Salmonella enterica
gtgcagaaagcgtatgatgtgaaagatacagcagtaacaacgaaagcttatgccaataatggtactacactggatgtatcgggtcttgatgatgcagctattaaagcggctacgggtggtacgaatggtacggcttctgtaaccggtggtgcggttaaatttgacgcagataataacaagtactttgttactattggtggctttactggtgctgatgccgccaaaaatggcgattatgaagttaacgttgctactgacggtacagtaacccttgcggctggcgcaactaaaaccacaatgcctgctggtgcgacaactaaaacagaagtacaggagttaaaagatacaccggcagttgtttcagcagatgctaaaaatgccttaattgctggcggcgttgacgctaccgatgctaatggcgctgagttggtcaaaatgtcttataccgataaaaatggtaagacaattgaaggcggttatgcgcttaaagctggcgataagtattacgccgcagattacgatgaagcgacaggagcaattaaagctaaaaccacaagttatactgctgctgacggcactaccaaaacagcggctaaccaactgggtggcgtagacggtaaaaccgaagtcgttactatcgacggtaaaacctacaatgccagcaaagccgctggtcatgatttcaaagcacaaccagagctggcggaagcagccgctaaaaccaccgaaaacccgctgcagaaaattgatgccgcgctggcgcaggtggatgcgctgcgctctgatctgggtgcggtacaaaaccgtttcaactctgctatcaccaacctgggcaataccgtaaacaatctgtctgaagcgcgtagccgtatcgaagattccgactacgcgaccgaagtttccaacatgtctcgcgcgcagattctgcagcaggccggtacttccgttctggcgcaggctaaccaggtcccgcagaacgtgctgtctctgttacgttaa

SEQ ID NO: 392367 - DNA, 966 bp, Salmonella enterica
gtgcaacaaaaatataaggtcagcgatacggctgcaactgttacaggatatgccgatactacgattgctttagacaatagtacttttaaagcctcggctactggtcttggtggtactgaccagaaaattgatggcgatttaaaatttgatgatacgactggaaaatattacgccaaagttaccgttacggggggaactggtaaagatggctattatgaagtttccgttgataagacgaacggtaaggtgactcttgctggcggtgcgacttccccgcttacaggtggactacctgcgacagcaactgaggatgtgaaaaatgtacaagttgcaaatgctgatttgacagaggctaaagccgcattgacagcagcaggtgttaccggcacagcatctgttgttaagatgtcttatactgataataacggtaaaactattgatggtggtttagcagttaaggtaggcgatgattactattctgcaactcaaaataaagatggttccataagtattaatactacgaaatacactgcagatgacggtacatccaaaactgcactaaacaaactgggtggcgcagacggcaaaaccgaagttgtttctattggtggtaaaacttacgctgcaagtaaagccgaaggtcacaactttaaagcacagcctgatctggcggaagcggctgctacaaccaccgaaaacccgctgcagaaaattgatgctgctttggcacaggttgacacgttacgttctgacctgggtgcggtacagaaccgtttcaactccgctattaccaacctgggcaacaccgtaaacaacctgacttctgcccgtagccgtatcgaagattccgactacgcgaccgaagtttccaacatgtctcgcgcgcagattctgcagcaggccggtacctccgttctggcgcaggcgaaccaggttccgcaaaacgtcctctctttactgcgttaa

SEQ ID NO: 392368 - DNA, 474 bp, Salmonella enterica; identical to SEQ ID NO: 376462

SEQ ID NO: 392369 - DNA, 333 bp, Salmonella enterica
atgctggtatggcagccatcctttgcacaagaagcattgaccacacaatattcacagtcggaactcttaaaaaattgggcgctgagtcattgtctggcattagtatacaaagatgatgtcgttaaaaacgatgccagagctacggccagtgcttaccttgaatatggtaaacaatctgtggagatttaccatgaaattgatgagattgcgaaaaaatattcagggttgaaatataacggttcgatatcatcagattttaataccatgaagtgcatagattttatccatgacagggaattaaatgaattaattaaaaggcgtgtcgagaagtaa

SEQ ID NO: 392370 - DNA, 855 bp, Salmonella enterica
gtgaacaagaccattaatttgctaaaattactgcccgtagtattattaagcgcatgtactacatcgtatcctccccaggatacaacatcggcacccgagttaccccatcgtaacgtactcgttcagcaacctgataactgtagcgttggctgtcctcaaggaggaagccaacaaacaatctatcgccatgtctatacgctcaataataatagcgtcacgaaatttgccaactgggttgcctatagcgtgacaaaaaccagccaggcaagcggtcgcccgcggaactgggcgcaggaccccgatttaccgccctcggatacgttggccccttccgcctataaaaatgcccatacgctattaaaagtcgacagggggcaccaggcgccgttggcaggattgggcggcgtatcggactggccgtcgttaaattatttatcgaatattacgccgcagaaatccgccctgaatcagggagcatgggctgcactggaaaaccgggtgcgcgaacttgccaaacaggctgatgtatctgtagtgcacgtagtgaccggccccctttttgagcggcatatcgccacattgccagaagatgcgacggtagaaattcccagcgggtactggaaggttttattcactggaatggcgccgtcaaaaagtgaaggaaattacgctgcatttattatggatcagaatacgccccgttcggcgaatttttgcgactatcaggttaccgtggaggctatcgaacataaagcgaagccagtgctgacgctgtggtctgctttgcctgaagcggtagccagcgaggtgaaaacgacaaaggggagtctggcgcagaagttaggttgtcgatga

SEQ ID NO: 392371 - DNA, 1362 bp, Salmonella enterica
atgcatgttggcgacaatgttcatgctgatattctgaatgctaaaaaactcggcataaatactctccatgctgattggtcagagtataatcatgggatatctaatcattggaaagctaaagatattattggtgaatctatttgtaagactttattacttaaacaagtttctgctttccatcaaaatgatcctttaaacgagataggatttaaagtatttggtccattattattaggttatgtatcctggttagcgaatcagttaaagattcataaaattgataaagcgctttttttagcacgcgatgctcacttaatctataaaatttataatgaatacttttcagaagaacatgtaaaatgtgaatatttatatatatcccgcgcatcagcttatatggtggggatgactgattggccgatgcacaggatttggcatctttttggtggtaagaataagaaaagtattaaaaagatacttgctatcgcggggttagatgcgagtgagcatatttcagatatacatcatgttggttttcctgacgaggagtatattcctgtttcaggagaggaacataaggttcactggcttataaataaattatttccatatattttattaaaaaatactcagcacagggaagtttacgctgattactttaaaacggcctgtgaaggttataaaaatatagcacttatcgatgtaggatggatgggtaatattcaatcagtatttgctcgttctttaggtgcgcaatgggcagaaaaacaaatacatgggttttatttggcaacttttgctggcgccaatgataaccgatctatttataataagatgtttggttggctaaccaactatggccatcccaacgataagtgtgatcttttcttatcaggaggggtggaaataatggagttcgctatggctgacaatactgggtcaacaattggctataaaaaaacggataatggaataattcctgtacgtgaagatagcagtggttctgaaattgagtatttaaaaaaagcagcaagattgcaatcagggattatttctttttttgagtacgtcaaaccgctcatacaaaaaggaaattatgcagcacttagtagtgttgtattgtcagaacctttttttgaattgatagccagaccctcaagcgctcaactggacgccttatcttccctcacacattcagagtccgcgggatctaacgcagaaagaatcgtgctagccaagaaactgcctttaaaggataaactttttcccggagaaaattatatcaaagagttgaatgccagttattggaaagaaggctttaaaaggatcaacagaaaaaaattttgggcaaaatataactaa

SEQ ID NO: 392372 - DNA, 891 bp, Salmonella enterica
atggaaattagacaattagaatattttgtaagcgcttctttgttaggtaacttaaccagagttgctgagcggcattttgtttctcaacctaatatcaccattgctattaagaagttagagactgaattaggggtgacattatttgatagaaagaaaaataaacttgtccttactgaggagggcatgtttttcttacaaaaaattgaacctatccttattgcgttaaaaaatagcgtagcggaaatgaaagattatcgtaatgaaaatggtggcatagtaactttggggatcccaccgatgataagtttgtttcttttttcaccgctcttcaagcatttccgagagatttatccagagatggaactctctcttgttgaagaggggacttttggtttacatgataaactttctgctggagagctggatcttgctattgttattattaatgactgtccaaaagaattagttacggtaccattaatgactcagcagcacgtggtatgtatgtcagataaacatcctctggcaaaaaaggatagtatcgattgggaagatctacaatatgagccattgatactaatgaaaaaagattcctggcatagaaaaacgattattgaagaatgtacaaagcgaggaattcatacacatatttttctatcatcaaacagggttcaaaccaacatagatctggttgctaaaaatgaaggaatttctttcattttggacgctgtcgatcttaaagccgaaaaagtaataaccaaggccatgactgagccgacttatgttacgattggtttggcctggaagaaagataaatatttatcatatgcaaccagagcgttaattaaattcattgaggattatattaaagaacattttacaattaaataa

SEQ ID NO: 392373 - DNA, 384 bp, Salmonella enterica; identical to SEQ ID NO: 376427

SEQ ID NO: 392374 - DNA, 177 bp, Salmonella enterica
atggatgaggatatgaataatgttcatttagcgctatccgatctatcggctactgataaaaagattattgccaatactaaagagattagtgctgaaatggttagctaccgtgatacctatatgccattaatggaaaagcaacgtttgttaaacaaggaggaaaaaaatgaagattaa

SEQ ID NO: 392375 - DNA, 243 bp, Salmonella enterica; identical to SEQ ID NO: 375752

SEQ ID NO: 392376 - DNA, 243 bp, Salmonella enterica; identical to SEQ ID NO: 373967

SEQ ID NO: 392377 - DNA, 129 bp, Salmonella enterica
atgaaacagggaatttatatctatatttctggagtgctttatgaactgatcggccagaaatgtcgcttcatattggctacattcagatgtaagcagcgcctgccatacgttgatcttatcttcatataa

SEQ ID NO: 392378 - DNA, 660 bp, Salmonella enterica; identical to SEQ ID NO: 381244

SEQ ID NO: 392379 - DNA, 549 bp, Salmonella enterica
gtgcgccacattgaaagctatattcatgaaaggttggcgcaggggatcggcaaacgcacgctgcaaaatgaaatggcctcgctgcgcgctgttctgcaacaggccgggcgtaaacaggtggcagagcataagtggctgactaataaatcgctgggtctggctggtgcatcgcgcagcgggacgcgacaggcgatcacgccggaacattatcatcatgtgctggagacggcccgcatgaaagatccgggactggcggcggcgctggaactggcgaggctgatgggcttacgttcacaggaagcggtgcagagcgtgcaatggatctggggcatggggacgggcgtgggcggtatgtggcgcaggtgtatgggcaaatttgacagctggctaagagcgagcagcggatggagcaggttaccaccgttcacagttagtgaaagactgggcggaggtggtaaatatcaggctgcattaccttcccccttacagtccaaacctgaatccgatagaacgaatgtggaaattaatgaacgaacatgcccggaataa

SEQ ID NO: 392380 - DNA, 294 bp, Salmonella enterica
  misc_feature (274)..(283): n is a, c, g, or t
gtgttgccaggccgggacaaaatgctctatgtcgctgcgcaaaatgaaagagatacgctgtgggctcgtcaggttttagcgaggggcgattatgataaaaatgcgcgagtgattaacgaaaacgaagaaaataagcgtatctctatctggctggatacctattatccgcagctggcttattatcggattcatttcgatgagccgcgtaaacccgttttctggctaagccgccagcgaaacacgatgagcaagaaagagctcgaggtgttaagtnnnnnnnnnngattcggttaa

SEQ ID NO: 392381 - DNA, 168 bp, Salmonella enterica
atgcactcgtttagccacggctaccgcaccagccatgtcttgggccgggttataatcaagcagaccattttgtaccgcgaaacgcatgatagcagttgtacgttgttgaagacgagaggcaacttcatatcgtccgctcgcctcaactacctttatcggggcgagtaa

SEQ ID NO: 392382 - DNA, 162 bp, Salmonella enterica
atggagcgttcactcgatagtctggctggtatggctaaatctgcttttggcgcggggacttctgctattctgagacaagagaaattccgcttgtctcttttgaaaaaatatgtcgagctttactattcagatgcgaattttctctccctcaggattctgtaa

SEQ ID NO: 392383 - DNA, 153 bp, Salmonella enterica
atgaacttgaaattatacttcctgaatggagggttccagatctccccatttatcttgtatggcgtcatcgtcagtattattctcctttatttcaacgctttctgtcttttattgaagataaatggaataatcgcccacaaattgattttctga

SEQ ID NO: 392384 - DNA, 483 bp, Salmonella enterica
atgtgccactggttagaaatcagtaatacgattttatcaggctggtgctctggcctgtcaggatttgaggtatccacccggtttaccagccccctgtatttggcaccagtggaacccacttcccgatccaggatatccagtacccaccaccgaacctctttccccaaaagacatgagcaacctcaagcgccttgtctggatgataaccacggtatgaagtttgataacacgtggaatcagggcgtatggttcgctctccgttcagcaactggacgcccttctccccagcctttcagcgttgaagatttgccagcgcagggtgaagagtgtaggcgaattatgaaaatcacttctgccgtttatacttcgaaaaagacgttatcagaaaggtggttcgcaagcgcggagttattaaacctttacttaacgaaatacggtttaagttgcttgaattgcagcagaaagaaaacgacggcttgctga

SEQ ID NO: 392385 - DNA, 315 bp, Salmonella enterica
atgttttgtttcctgaataccgaaatattcattgacgttgcgcgccagcgtcaccgccagacagtggtaaagctcatcaagcgcgttccgcaacacatagccaagctcccggagtttctccccctcttcatgcgttacccagaaatactggctgctaccttgctgatggattgttggattaatgccaaaggaaacaacttcatcggaataatttaccactcgcatcaaatcaaaatagaccgtaaattgttcaacacggatctcattaatcaacaatacgatgctgttatcgtccaggccctcgccatcgcgtaa

SEQ ID NO: 392386 - DNA, 750 bp, Salmonella enterica; identical to SEQ ID NO: 388740

SEQ ID NO: 392387 - DNA, 135 bp, Salmonella enterica
atgcatatgcataaccatttttgcctttggggctcttttgcggatctggcggtacagctttatgctgttatgaacgatgattacactatcatcggtaacgttaaagtcttttgcaatattcagaatacgctgtga

SEQ ID NO: 392388 - DNA, 468 bp, Salmonella enterica
  misc_feature (339)..(348): n is a, c, g, or t
atgcatttccataaaagaacgttattaagcgtggcgacgcttggtatgttggctgtttcagtcgtactgatggtagtttgggtacgaaacagtaaccatagttctattaatactaatgaatttttatgtacgacaagaacggtaacgacgatacaacctaaagatatccatgccgatggcagtcttgttcttgattttaagatgaagagaattacgcttcaatatgaaataaaaacaaaagataacggtgtaaaaatattataccgggacgtgtatatgaaaaatttacatcgaacagcgcctggtgtttatacgttcgaagtatcccaggtaaaagtnnnnnnnnnntcatatttacgggttctgcatccggaagcggctaatgagattcgaatatctaaagtgggtgagaaaacctttttttattctcttaatcggcagctttataacgtttgtaccgcgcagtag

SEQ ID NO: 392389 - DNA, 240 bp, Salmonella enterica
atgtggacctatatcggtctggttgtcgcaggaatggcttttatttacggggcgtggatgattttggatacgctcgccttcggaaacccagtaagaggatatccttcattactcgtctccatacttttccttggaggggtgcagttgatagggataggcgtgctgggagaatatattggcagaatttatattgaaaccaaaaaacgtccaaaatatttacttaaggatattaaaaaatga

SEQ ID NO: 392390 - DNA, 558 bp, Salmonella enterica; identical to SEQ ID NO: 368614

SEQ ID NO: 392391 - DNA, 234 bp, Salmonella enterica
atgaagaatttatggatgctgctggcgctgtcgctattttcaggccatgcgctggcagacggaacgatgggcaacggaagcggctggtgtcaacccaccagcggcacgcataatttcttttttccccttgaccagaccattaccgatacggatgagaaccaggcagggaaaatagtcaaagagagttggttggtcggtcggcggcgaatacagcgccaggtgcgactgcgataa

SEQ ID NO: 392392 - DNA, 171 bp, Salmonella enterica
atgtcctggcaaacacataccgtctttaatcaacctgctccgctcaataacagtaacttattcctgtctgatggcgcgctgtgtgaagcggtttcccgggaaggcgcgggatgggatagcgatcttctcgccagcattggccaacaactgggaacggcggaatcactgtag

SEQ ID NO: 392393 - DNA, 324 bp, Salmonella enterica
atgcgaatactcaccaatgcactgaacaaaatactggccgggtgctgctgtattattctggcgatcatggttgcctgcgtatcctggcaggtggcggcgcgctttatattcaacgcgccaagcagcacgctcgacgaattcacccagattctttttatgtggatgattctgttaggcggcgtctataccgccggattaaaaaaaacatttagctatcgatttgttagcgcaaaaactctcccgaacgcccgccctcgtgctcgacagtatcattcaggtgattattaccgtgttcgcgctgatttttatggtgtacggcggtga

SEQ ID NO: 392394 - DNA, 1131 bp, Salmonella enterica; identical to SEQ ID NO: 369770

SEQ ID NO: 392395 - DNA, 432 bp, Salmonella enterica; identical to SEQ ID NO: 379800

SEQ ID NO: 392396 - DNA, 498 bp, Salmonella enterica; identical to SEQ ID NO: 370972

SEQ ID NO: 392397 - DNA, 501 bp, Salmonella enterica; identical to SEQ ID NO: 379864

SEQ ID NO: 392398 - DNA, 231 bp, Salmonella enterica; identical to SEQ ID NO: 379757

SEQ ID NO: 392399 - DNA, 189 bp, Salmonella enterica
atgcacaaaaatggaaaatttatctccctgcttgcgttgggattcacattctttttatctggttgtgattacttcgcagataaacaccttgttgaagaaatgaaagaacaacaaaaagaacaagaaacaaagataaacctgttagaaaaacaacaaaaagaacaagaagcaaagataaatctgttataa

SEQ ID NO: 392400 - DNA, 531 bp, Salmonella enterica; identical to SEQ ID NO: 379766

SEQ ID NO: 392401 - DNA, 231 bp, Salmonella enterica
atgccagcaatcatttcattattttatttagtgtttggtttttttttatttacaagaaaaattaggatctcaaaacttctctctgggtttttattgtttttatcattgaatatattgcaacataaccctctgctgatatttatctattgtctttttattatcattgccactattattattggcagaataaataccagcaaagcgcgcagggaagactattaccgccgttag

SEQ ID NO: 392402 - DNA, 870 bp, Salmonella enterica
atgagaccacgtcgcagtatgttgtttatccccggcgcaaatgcggccatgttgagcacctcgtttgtctacggtgcggacgcggtgatgttcgacttagaagacgccgtagcgttacgtgagaaagataccgcccgtcttttagtccatcacgcgcttcaacatccgttctatcaggatgttgaaaaagtggtgcgcattaatccactgaacacgccgtttggtctggccgatcttgaagccgtcgtgcgtggtggcgcggatatcgtgcgtctgccgaaaaccgacagcaaaaacgatgtgctggagctggaagcgcaggtcgaacggatcgaacgtgaatgtggacgtgaagtcggcagtaccaggctgatggcggcgatcgaatcagcgaaaggcgtggtcaatgccgtcgacatcgccacctccagcccgcgcatggtggcaattgcgctggcggcatttgattacgtgatggatatgggcaccagccggggcgatggcaccgagctgttctacgcccgctgcgcagtgctgcatgcggcgcgcgttgcgggtattgccgcctatgatgtcgtttggtcggatatcaataatgaagaaggcttcctgaaggaagtgcagttggcgaaagggcttggttttaacggtaagtccttagtgaacccacgtcagattgagctattacatcaggcttattctccgacacgtaaagaagttgagcatgcgtatgaggtgattgccgccgctgaagaggctgagtctcgcggtctgggcgtcgtttcactcaacggcaaaatgattgacggcccgattatcgaccacgcgcgcaaagtggtggcgctgtcggcttccggtattcgtgattaa

SEQ ID NO: 392403 - DNA, 666 bp, Salmonella enterica; identical to SEQ ID NO: 379867

SEQ ID NO: 392404 - DNA, 675 bp, Salmonella enterica
atgagaacaatagtttacgtagatgggttcaatttttatcacggattggttaagcgttcgggatataagtggttagatctctataaactctttgaagaacaactacttccgataagatcaagagagtcacagttgattcaggtgaagttctttactgctgagatcaaagcaaagtttgcttctcggggtgaattggcgcaccaggctcagcaagcctaccatcgagcattagtacagatctatggcgataaactacagataatcaaaggttattactcagagcgtcaggaatgtgcaatgacctttaatgaggggcatccgccatcaaaaacggatagaacaacggtctggaagttagaagaaaagcagaccgacgttagaatggctttagaaatgtatcgcgatgcgatccgtggtgaggcagaacaattggttctctgtactaacgactcagatatgataccgccaatagaaatgataaaagccgatcgacctgagttaaaaataggaattgtagtgccaagggaacaagatactagtcgagtgattagtagtctggctagtttaggggattggagcttgccatatgtatcctatgaagccttaagattagctttattgccagataaagtccccactaggcgaaagccaatactgaagccaaatcactggtaa

SEQ ID NO: 392405 - DNA, 417 bp, Salmonella enterica
atgtcagatcaaaaaaataatttagaccttcaaaaacagacacttgaatctaaatgggggaaggaggcgttaagcatgggatggtcagccattcctacatcccttttcttcctgcagggcgcactcaatatgacccccacaacattcaatgtgctacttcatctaatcatccactggtggaaaccctatgattggccacatccatctcaagagagcatcgcggttagaatgggagtttcatcaagaacagttcaacgctcactccaagaacttgaaaattacgggttgcttacaaaaattcgtacaagcaaggacaaccctaagtacaaagggcgaaacatttacgatatgtctcttttagttaagtcactaaacattcttacgccagaccttaatgccaaactgaacgaaaagtaa

SEQ ID NO: 392406 - DNA, 264 bp, Salmonella enterica
atggctgtatacacctctgagactaaaaaatttttagacagtgtttctcacgataaaacttggtggacatcacgatataacccagctgacgatgtaccggtatcagggatctatcgttgtactgtttgcggaaaagagataactagcaataaagatgacccgtttccgccgcaaaaccatcatcaacacagccaaagtcaggcaatcaagtggcaattaattgtcagaacagatacgcaaggaaatggttgtggttctaaataa

SEQ ID NO: 392407 - DNA, 399 bp, Salmonella enterica; identical to SEQ ID NO: 379783

SEQ ID NO: 392408 - DNA, 1797 bp, Salmonella enterica
atgataaagaaaagaggatttactctattagagatcaccatcgttttaggtataggttctcttattggttttatgaagtttcaggacatgaggaaagaacaggaagcagtaatggcacaggcggtaggctttcaaatgaaacaggttggcgaagcagttaaccgttatattagcattcgctataataagctttccacactgtcatcttcacgcagtcaaagtagcgatccgggaccaagaacctgtacggctaatggctgtgaaatcacttaccagacgctggtgaatgaaagtctcttgccctctacatatgcgggagttaatgcccaaaagtcttcttataaaatcctgttaaaacgatcaggcgtatcaccaaactatgttatcaatggtttgattgctacgacgataccttgggtcgaaggtggaaaaacgcgatacgacctgttaggaaaatcgatgcaatcagcaggtattgatagcggtatgacgaaatcgcctgctcaggcatcaggatataatggagtgtggacagaaaagtctactgattacccggcaattaataaagcaggattactggtttaccgtgtgggctatgatagttctatgtattctgtttacttgcgtcgcgatggaacattgcctatgactggaaatctcaatatgggcactaacgatattaataatgccaagaacattaccgcatcgggaacggggatctttggtggggatgtttcttccgcagggaaaataatcgcagcacaagaaataatagcgcataatggttatggtgatgccatacattttggcggcgatgctgttaataacgactatgaaataaccatgtctaaggataagaccttatctattcatatggcaagcaatcgaacagatctcactacgctgaaaattagtggaggactgtctacgattggtaatggaacgattagtggaacattagatacaggtaaaagtatcacatccggtggacaatttaatggtcataacggtggtggtgatagtttcagtattggtggtggagatgctaacgattatgagttcagattagatactgttaagccgctaaccatctggcgaaatggtggcaccagtactgaaacaaggcttcaggtttttgggaaacaaaccaaccaaggtgattttgctattactccggggacaggaagcactggtagtattgcagcatctggaaatattcagggacatactctacaacctacatcgacgaatacaactggtgggacatgtccaagtataggcctgatatctaaagacaacatgggaaatatattatcctgcgttaatggaaaatggtctgttgtcagtaacctgccagttggttcacctgttccttggccttcaaatacagcgcctgtaggttggttaatatgcaggggacaatcttttaatactgccctatatcctcagttagcaaaagcctatccaagaggaagacttcctgatttaagaggagtatttattcgagggctggattcgggaagaggacttgactcaggaagagttattaattcttatcaggatgatcagattcaaaatattacaggtcatatggcggctgatgtatcacagagtggaaacatcggtaaatatgtgagtggcgctttcgcggatagtggtgcgttaggtgaaggtgatgaaggtcataaaagcaatgaagtaaggaaatatacgtttgatgcttcgagagtcgttcgggcaggtaatgaaacaagacctaagaatgttgccatgaattatatcgttcaggcacaatga

SEQ ID NO: 392409 - DNA, 153 bp, Salmonella enterica
atgaccatcttccttgttgagcaaaacgctaaccaggcgctgaagctcgccgatcggggttacgtactcgaaaacggtcatgtggttttagaagataccggcgcacggcttctggcgaacgaagcggtgcgtaacgcctatctgggaggataa

SEQ ID NO: 392410 - DNA, 132 bp, Salmonella enterica
atgattatgccaaaacgcatgcaggttctcattctcaaggccggtgtgcggaatttacccgaaaggcaattcaggcgggcggtatcacgctggggcatacatatcatgcgaaagattatggcccaatgttaa

SEQ ID NO: 392411 - DNA, 255 bp, Salmonella enterica
atgctggtgccattccgtagcgagggcatggaacgtattggtggcagagattttctgagtgagtttttcctttcgcttcttttcgcccgggtcaccaccttcggagatgatttttcgggcatcgtcgcgtttgattctggcctcagcaagggagacgtcgggatagacgccgagggccagttttttctcttttcctgctatccggtatttaagccgccagtagcgggcacccgtggtttttaccagcagatataa

SEQ ID NO: 392412 - DNA, 954 bp, Salmonella enterica
gtgagtgataataatcaggcagaaagacaaccggccgatcaacacctacaagacaaaccgcaaattttcagaacactgagaaatattgacctcaatctgttgacgattttcgaggccgtatatgtccataaagggatcgtcaatgcagcgaaaattcttaacctgacgccgtcagccatcagccagtccattcaaaaattacggactatatttcccgatccgctgtttattcgcaaaggccagggcgtaacgcccacgacgtatgctacgcatctgcacgaatacatcagccaggggctggaatctattcttggcgccctggatcttacgggcagctatgataagcagcgtaccattacaattggcacgacgccttcggtcggcgcgctagtgatgccgattatttaccaggccatcaggccgcgttatcctcagcttttgctgcgcaacattccggtagacgatgccgaaagccagcttagtcagtttcagaccgatctcattatcaatacccatagctataacaaccggagcatccagcatcacgtcctgtttagcgatacgcttgagattgtctgccgccagcatcacccgtgtctggcgaacgccattactgaagagagactgaacagcgcggatcacacctttctgatgctggagggacaacatctttccctgctgcgccagcgactgcaggagacatttcccgatcagcaaatcagttttagcagctacaatatttttaccattgcctcgctgatcgccagcagcgatctgctgggactgatgcccacccgcttctacgacttatttagccgttgctggccgcttgaacgccttccctacgcgccggtgaatagtgaacaggtcgagttctcgctgcattacaataaactgagtctgcgcgatccggtgctggagaacgtcattgatatcatccgtgaggcgttctga

SEQ ID NO: 392413 - DNA, 348 bp, Salmonella enterica
atgaattattgttcaatagatactccttatactcggattactgagcacaaatatttttctccgtgggagagacataaagcttcaatatgttatcaagaatatagtcgggaatgtgaagctggtgatataccctactatcctgttcgcagggcagataaaatggatttactgaataaatatctgtcgcgggctaaaaaagaaaaaaatattactttcattggtcgtcttggcacttatcgttatctcgatatggacatcacgatagctgaagcattacagacggcggacgtatacttaacgtcgctatatgaacaaaaagaaatgccagcttttacagttaccgtttga

SEQ ID NO: 392414 - DNA, 315 bp, Salmonella enterica
gtgttcccagccagccacatcgcgcaacgggatgaaagggatgccgctggcgcgatcgccattacgcatatccagtttgtgcgcgacttcatgaataatgagattgaaacccgaagcatcgaacgagtcctggatatccagccagttcagaataatgggcccttgttgccagctttgccccgactgtacgacacgctggctgtgcaccagacctatgtcatcttcccattcatcatctaccacaaagggcgcgggataaatgagcacttcatgaaaaccatcaagccactcaataccgagctccaggatcggtaa

SEQ ID NO: 392415 - DNA, 231 bp, Salmonella enterica
gtgaacctcgtagtcatcaaacaacacttttcggacttgccgaggttcataccgagtctgctgtacgccaattgctggatgtgctgtaagatcagcgcatccagtaatcaggcgatccaaaacgtcatcggcgtgctggcggctatactgaagggcaaaacggtagatacgctccaagtcatcctgagctttaagcgtccagtaaatttccatttatcaagctttctttaa

SEQ ID NO: 392416 - DNA, 564 bp, Salmonella enterica
  misc_feature (472)..(481): n is a, c, g, or t
atgaatctggatctgttagatgaaccgttcgctgctgaagatattgagtggcgaatacagcaaagcgggaaaacacgagatgggaagctatgggctatggtgctggcttatgtcacgaacagggcaataatgaagcgcctggacgatgcttgcggcaaagcaggatggcgtaatgaataccgcgatatccccaataacggcggcgttgagtgcggcatatcaatcaagattgattcagaatgggtcaccaaatgggatgccgctgaaaacacacaggtagaagccgtcaaaggtggtcgctccggcgcaatgaagcgtgctgccgttcagtggggaattggtcggtatctctataaccttgaggaaggttttgcgcagatatccagtgataagaaacaaggatggcacagggccaaactgaaggatggaacaggattttactggctccctccatcgctgccggactgggccnnnnnnnnnnggccatgccagcatcatgcaatcaaccatcaccagaaaataccaaccagaaatctccatcggttgactgcgaacaaatcctga

SEQ ID NO: 392417 - DNA, 1044 bp, Salmonella enterica; identical to SEQ ID NO: 372917

SEQ ID NO: 392418 - DNA, 240 bp, Salmonella enterica
ttgctggccatccagaatcaacatctcaggctcggttttctgcaattctacattttcaactggacgcacctggaagcgaacttctcccccagtctccagcagcataaccgcaccaacgggaaaagaacgggcaatactgaccagcaaagaccggacatgctcatcatcccatacccaccctctctggaaatcaggcaactgtacccgtccatcagtaatctgccccaggatatcttttaa

SEQ ID NO: 392419 - DNA, 471 bp, Salmonella enterica; identical to SEQ ID NO: 389554

SEQ ID NO: 392420 - DNA, 1293 bp, Salmonella enterica
atggctaatgcatcatacccgacaggcgtcgaaaaccacggcggttcgctccgcatctggtttctgtataaaggtaaacgtgtcagggaaaaccttggtatccctgacactgcaaaaaatcgcaagatagctggcgaactgcgttcttcggtttgttttgcgataaggatggggaattttaactatgtggaaaaattcccaaactcaccgaaccttgcccggttcggtcaggatagaaaggaaattactgtgctggagcttaccgaaagatggtccgagctgaagagaatggagatcagctctaataccatgagtaggtacgaatctatcataaaaaacatgcttccactcatcggcgaaaacaaaatggtttctgcggtgactactgaggatttgctgtatgtcaggaaggagttgctgacgggctttcaggtaatgaagaaggatcaccggactcaggttaaaggccggaaatcgtccacagtgaataattacatgatgctgatggccgagatcttccagtttggaacagataacggctatgcaaaggaaaacccgtttagcggaattaaccgtctcaagaaagcgaaaggggaaccagatccactcacgacagacgagttcatcaggtttatccaggcatgcggacaccagcagatgagaaatctctggtcactggcagtctataccggaatgaggcatggggagttgtgcggtctggcctgggaagatatcgatctgcatgccgggacgatcattgtgaagcgcaaccttacccagacggatgagttcaccctgccaaaaaccgacgcaggtactgacagggtgatatatctcattcaaccagctattgatgccctgaggaatcaggcccagttgacacgccttggccggcagtttgaggttgaagtgaagttgcgggaatatggacaatctgtcattcagccctgcacgttcgtattcagccctcaatgcgtcaaacgtggacctcgcacaggatatcactacgcggttaattccattaataaaatttgggccccgataatcaagcgtgccggcattcgttaccgtaacgcgtatcagtcacgacatacctatgcatgctggtcattatcagctggtgctaacccaaactttatagcaacgcagatggggcataccgatgcacagatggtttacaaggtgtatggaaagtggatgtcagagaagagcgcagaacaggtttctctgctcaaccaggcactttcccgctatgccccatcactgccccaaagcatggtagcagcgcagtag

SEQ ID NO: 392421 - DNA, 249 bp, Salmonella enterica; identical to SEQ ID NO: 376948

SEQ ID NO: 392422 - DNA, 213 bp, Salmonella enterica
atgcgtgacgctgactgtaacgttgataacatccgaatcgatattctgcagaataaaggtcggtcgggtgcgattggtcatatcatcgccaggcgtaccggtatcatccgtactatccagcgcaatggtcggcgtcgacaaccgggtgtcgatgaaaaattcaagcgtttgcgtcgccgtattgcccgctctgtcggtgaccatgacggttag

SEQ ID NO: 392423 - DNA, 501 bp, Salmonella enterica
atgtgtgatacatcattatcgacattaccgataataaacaccggtttgttaatcctggtaagattatcattagtatcatcaccagtatcatgggtgggatcgagtacaattgtcggctctcgcagagtcgtatcaatcgtaaactgcagcgtttcttgcgcaacgttgccggcgatatcagtcacatcaaccaagagagtgtgtttcccatcaggtaatgccgaaccgacattaaatatccagcggccatcccctccttttgtgagttcaatccaattagcggcgttatcgattttaacgcgcacatgggtaatatcatcagcggtaacaatactaaactgcggcttgtcgactttggtaatgttatctacatcgctatcaccgctatctgtaaccaacgtgacgctttcaatttcagccgtcgtatctatcacaacaggtaatggtttcgatgtcgcggtatttccggccttatcttcaaccgtaacggtaatattataa

SEQ ID NO: 392424 - DNA, 738 bp, Salmonella enterica
atgtcatcttgttggagatttacggattcgctaacaagcctatggcatactgcgtcgatgaagattttattgattgaagataaccagaaaaccattgagtgggtacgtcagggactcacggaagcaggctatgtggttgattatgcctgtgatggacgagacggattacacctcgcccttcaggaacattattcattgattattcttgatattatgctgccggggcttgatggatggcaggttttacgcgcgttacgcactgcgcatcagtcccctgttatttgcctgacggcgcgcgactcggttgaggatcgcgtcaaaggtcttgaggcgggcgctaatgattaccttgttaagcctttttccttcgccgaactgctggcccgggtgagagctcaactcagacagcatgtcccggtctttacccgactgacgatcaatggtctggacatggatgccacaaagcaatcggtgtcacgaaatggcaaaccgatttccctgacccgcaaagaattcctgctcctctggttactggcgtcccgggcaggagaaatcgtgccccgaaccgcgatcgccagcgaagtttggggaattaactttgatagtgaaaccaacaccgttgatgtcgcgattcgtcggctgcgcgccaaagtagacgatccatttgaaaagaagctcattatgaccgtccgggggatgggttatcgattacaggcggaaacgtcgcagaatggttaa

SEQ ID NO: 392425 - DNA, 561 bp, Salmonella enterica
  misc_feature (20)..(29): n is a, c, g, or t
atgtgggtgttaatgagctnnnnnnnnnngttattaggcaatgatttacgccctgaagccagaccaggtggctgggttggcgaatggctggcgcaatacccggataattatgaggtcgtcaatacattagcgcgccagattaaggatatatggaaaaataaccaacatcataaagatggcggcgaaccctataaactcgcacaacgccttgccatgttagcccatgaaattgacgcggtacccgcctggaattgtaaaagcggcaaagatcgtacagggatgatggattcagaaatcaagcgagagatcatttccttacatcagacccatatgttaagtgcgcctggcagtcttccggatagcggtggacagaaaattttccaaaaagtattactgaatagcggtaacctggagattcagaaacaaaatacgggcggggcgggaaacaaagtaatgaaaaatttatcgccagaggtgctcaatctttcctatcaaaaacgagttggggatgaaaatatttggcagtcagtaaaaggcatttcttcattaatcacatcttga

SEQ ID NO: 392426 - DNA, 201 bp, Salmonella enterica
atggtcttgctgcgtgcaagtccgggcaaattcatcgcgtgccaggatggctgcttcgatggcctgccggatttttggcagccagtccgtttggttttctttcagccagtgcaccggaaaaaactcaccgtggttatcaggggcatgcgcgtagtcgtcaaccggccatgggtgatcggctttttccgtttgctgccttaa

SEQ ID NO: 392427 - DNA, 621 bp, Salmonella enterica
atgacgctgggtgattttttgacccaacaacaagaggcagggctggcgagcatcgttgaattgcgtggttttaaccgcactccgccagaaactctacttcctgaactccatgagtgtttattcagaactccctatcctgccgcatgcagttggacggatcggcggcaggctctacgacatttacccattcggcacccgatgctttttttactcacattcaccaccgggaaaagcacgtttccattgcaggctcctcttgctcaccagttccccctgtttctggcagagaatatatggtcggatgaacgaccatttgcgcaaaatactgacatcacgccttctcgtattactccagaactatggcagacaatgtatgtgggcaaccaccagccagggcatcaggcttgtgctccatgggaagcgctaaaagcagcgctactctctttacttcctgatgaacaagcgcaagccgttgcccgtctggcttacggtctcggccgtagtacaacacaagatattgcgaccacgattgacgctcttgccccagaattagggccatatgttcaggaaatgactaccggcgaatcggcaagcgtacttgagcaccttttccagttataa

SEQ ID NO: 392428 - DNA, 246 bp, Salmonella enterica
  misc_feature (224)..(233): n is a, c, g, or t
atgacgaaatacggtgttgtaggtacaggttattttggcgctgaactggcgcgatttatgtctaaggttgaaggggcgaaaatcactgcgatttacgatccggtaaatgcggctccgatagcgaaagagttgaactgtgtcgccactgcaacgatggaggcgctttgtacccatcctgatgtggattgcgtaattattgcttcaccaaattacttacataaagnnnnnnnnnnaggatatggttga

SEQ ID NO: 392429 - DNA, 429 bp, Salmonella enterica
  misc_feature (408)..(417): n is a, c, g, or t
atgagtgaatcgttcatgatcttctccctttcccgcattgtgtgtggttttgcggttgggatggccggaacggcatccaccatgtatatgtctgaactggcgcctgctgaaattcgcggcaaagcgctgggcatttacaatatctccgtggtatctggccaggttatcgtgtttatagtcaactatctgatagcaaaaggaatgcctgctgatgtgctggtttcccagggctggaagactatgctttttgcccaagtggtaccctccattgcgatgttagcgattacgcttttcctacccgaatcaccggcatggtgcgcccgtaacaaccgcagcgaagctcgttcgataaaggtgcttacccggatctacagtggattaacggccacagatgtggccgctattttnnnnnnnnnncgctatttttga

SEQ ID NO: 392430 - DNA, 159 bp, Salmonella enterica
atggcggttttattaaaatcgatattttcaatttgggcgatgaaattaacgggtttggattctgtactgggggattgttttgcacatatattcgcgcaatataatgaaactataattgttatgaatattttcttcaagatgttctccttgtatgaataa

SEQ ID NO: 392431 - DNA, 330 bp, Salmonella enterica
atgtgggcattcgccatctttaattttaccttgggcaaagtaacgtttactttcaacggctccgttttcatggtatacgatgtattccccttcgggttgaccatctttaaacgtcagcgtttccgctattttgtctttttcatcaaagtaagtttcagcttttccgtcacgcttattttgcgcattataatgataaatatttttgagattgccgctttcatagaaagatttaaatacagaaacacgttgtcggttagcgaagttttcttcgttggtatagccttcaaaggctatctgtttactctgcatcacctcccctgtttcttctga

SEQ ID NO: 392432 - DNA, 234 bp, Salmonella enterica
atgttgcgattttctgtgcccggtattatcaatgagttttcttctgtattaaaagcgacgccctttgcttatactgtaggtatcgctgaaataacgaagcaggcaatgtcactgacagccatcacgctgaacgggttacagatctatactcttgccggggtattatatttcattatttataaagtttttactcttctggccggagtgtttgagaaaaaatatcgcatcagttga

SEQ ID NO: 392433 - DNA, 402 bp, Salmonella enterica
  misc_feature (375)..(384): n is a, c, g, or t
atgctggctatcttttatttcctattggaagggattggtaatacgctgcttgtaacatttacctgttttctctcagcgtttttgtttgggcttacagtcgccgtattacggcgactatccccccttccactacagaagatactcgacgtactggtctttattcttcggggaattccaatacttattgctgtttttcttgtttattttggattgccatcgattggcatatatgtttcacctctggtggccatgaacctcagcgtcggcttaatcagtgggagctatcttgccgaggtgttcagaggggcgcttaaattagttgagccatacgaaattacggtagcgaaagtagcaggaatgcgtcaattacaggtnnnnnnnnnnggttataataaatattga

SEQ ID NO: 392434 - DNA, 312 bp, Salmonella enterica
  misc_feature (193)..(202): n is a, c, g, or t
atggatttcgataaaatcgcccaatcgttgcttcctttattaggtggtaaggagaacatcgccagtgcagcacattgcgccactcgcctacggctggtactggttgacgacacacttgccgatcaacatgccattggccagattgatggagtgaaaggttgttttcgtaattcagggcaaatgcaaattatcnnnnnnnnnnggttaataaagtctatgctgcctttattcaggttgcaggtattagcgaatccagtaaagcagatatcgctcgactcgccgctcaaaaactcaatccttttcagcgaatag

SEQ ID NO: 392435 - DNA, 216 bp, Salmonella enterica
atggcgtacttgtgtattttcaggggcagtttatccactatcccgccaaacctgtttctgtcgtcgatacgaccggggcaggagatgcttttgtcgctggattacttgccggtctggctgattctggaataccaacaaataccagacagcttgaacgaatcattgtacaagctcagatttgtggtgctctggcgaccacggctaaaggcgcgatga

SEQ ID NO: 392436 - DNA, 1845 bp, Salmonella enterica
  misc_feature (1796)..(1805): n is a, c, g, or t
ttgactctgtttacctggcaaacgcaggctatcgcgacggaaacgtttgatacccattttatggtggggggaatgagagatcaaaaaataacaaatttccatctggatgagaataagccaattccgggacagtacgaactggatatttatgtcaacaatcaatggcgaggtaaatacgatatcattgttgccgatgaacccggtagcacgtgtatttcaactgagttgttgaaaaatattggagtgataagcgatggtctgcaaccgcagggagcaacggattgtattgcgttaaaagatgtcgtgagaagcggtggctatacttttaatattggcgtttttcggctggatttgagcgttccccaggcctatgtaaatgaggtcgaggcgggttatgtattgcctgaatatctggagcgcggtatcgctgagctcctcggcacattacgcgccggggatcagtatacctcgtcagagatttttgattctgtgagatttaccggcgttcgcctgtttcgcgatatgcaaatgttgccaaactcgaaacagaattttacgccgttggtgcaggggattgcacagactaacgctttggtaaccatcgaacagaacggattcgttgtttatcagaaagaggttcctcctggccccttttccattgcggatctgcaactcgcgggcggtggcgcggatcttgatgtcaccgtgcgtgaggcggatggttcgataaatacctggctggtgccttacgcttccgtaccgaacatgttgcagcctggcgtctctaagtatgatttttccgccggccgtagtcatattgaaggcgccgataatcaggccgattttacacaaatcagttatcagtatggccttaataacctgttgacgctttatggcggtacgatgctatcgaaccattataatgcgtttaccctcggcacggggtggaatacccggattggcgccatttcgcttgacgctacgcgagcgcacagtaaacaggataatggcgatgtatttgatggtcagagttatcagattgcttataataaatacctgacccaaacattaactcggtttggtctggctgcgtatcggtattcatcacaggattaccgcacatttaacgatcatgtctgggccaataataaaaataactatcgtcgcgataagaatgatgtatacgatattgctgattattatcaaaacgattttgggcgtaaaaatacgttttcagctaatgtgagccaatccttgccagaaggatggggcgcagtatcactgagtgcattatggcgtgattactggggtcgtagcggcaccagtaaagattatcaaataagctattccaatacgttccagaaaattaattatacgttatccgccagtcagacttacgacgaggatcataatgaagataaacgttttaacctgtttatttcaattccctttgactggggggacggtattactaccccgcggcgtcatctgaatgtgtcgaactcgacgacctttgatgatgatggatttacctcaaacaatattggtttaaccggtacggcaggcagtcgcgatcaatttaattacggcgtgaatgttagtcatcagcgacacgatagtgagaccactgcggggacgaatttaacctggaatacgcccgttgcaacgcttaatggtagttacagccagtcgtccaattatactcagaccggcggaagtatttccggtggggttgtagcctggagtggcgggttgaatttatccagccggctttcagatacctttgcgattatgcnnnnnnnnnnacaaccttacgccatatcgcgaaaaccatcttatgcttga

SEQ ID NO: 392437 - DNA, 624 bp, Salmonella enterica
  misc_feature (596)..(605): n is a, c, g, or t
atgatagtaatcagggtttttggtgacagtatatacctgatgtatgtgttaccagccgtattctacacgattactattatgctggcctttgctctgtcacatacagatgggaaaatgaagtggtcaatcgcagcgctaattccatgtgtaatcatttcatctcctatggcgtcaaccatgacactagagacatgtgtacatgtaggaactatcatatttgctctggtgtgcttaaatatgcttaggtatgataaacatacaacaattaaactgacaagcgtcacgactctcactgctgcatctgtattcagtgactcgatattcaactactatatcactataccgatagttgttacttttgttgttcatgtattgataaacaaagattttagcaagtggcgctatgtatttgcagttattgttggcgttgtcatagcaaagtttcttgctttagtggcaaattattttggtctactaaacacccccgggactcaacctccagcatttgttaattacgagaatataccatctaacctcaatcttttcattgttggcatcatccagtatttcgacgccttcattttcggaaaacagcnnnnnnnnnntctgcaagcaatgcgatga

SEQ ID NO: 392438 - DNA, 234 bp, Salmonella enterica
atggtctgcatcgataactccggcacgcaaatcgccatcgatactcatttgtttgcctggcatcccatcaagcgagaaacgtgcgctaacttccgccaccctctcgataccttttgtaatgacaataaattgcacgatagtaatgatggtaaatacgaccaacccaacggtgagatttcctcctacgacaaacttaccgaaagcatccacaatattaccggcattatgttgtaa

SEQ ID NO: 392439 - DNA, 369 bp, Salmonella enterica
atggattgggatctcattactgaacgtaatattcagctttttattcaattagcaggattagctgaacggcctttagcaaccaatatgttctggcggcaaggacaatatgaaacctatctaaactatcataacggtcgtattcacttatgtcagatactcaagcaaaccttcttagacgaagaactgctttttaaagcgttggctaactggaaacccgcagcgttccagggtattcctcaacgattatttttgttgcgcgatgggcttgcaatgagttgttctccacctctttccagctccgccgagctctggttacgattacatcatcgacaaataaaatttctggagtcgcaatgcgttcatggttag

SEQ ID NO: 392440 - DNA, 261 bp, Salmonella enterica
  misc_feature (170)..(179): n is a, c, g, or t
atgaaaagcataaaaaaattgattatcgcaagtgcgttgagcatgatggctgctagttgttatgctggctcatttttgccgaacacaatgcaagagaaatcagtggatattaactttgccgctcccgaacatttaaccgtatcgttggatcaagtgccgggtttaattgnnnnnnnnnncctacaggtacggctattgcgaagcttacagttgattctacttctgttaaagaattcggggccaggggggcttctggcgtga

SEQ ID NO: 392441 - DNA, 465 bp, Salmonella enterica
  misc_feature (383)..(392): n is a, c, g, or t
atgtctttacccgattcgcctttgcaactgattggtatattgtttctgctttcaatactgcctctcattatcgtcatgggaacctctttccttaaactggcggtggtattttcgattttacgaaatgctctgggtattcaacaagttcccccaaatatcgcactgtatggtctcgcgcttgtactttccttatttattatggggccgacgctattagctgtaaaagagcgctggcatccggttcaggtcgctggcgctcctttctggacgtctgagtgggacagtaaagcattagcgccttatcgacagtttttgcaaaaaaactctgaagagaaggaagccaattattttcggaatttgataaaacgaacctggcctgaagnnnnnnnnnnggattacttatttatcttccctttctggctattgacctgcttatttcaaatatactgctggctatggggatga

SEQ ID NO: 392442 - DNA, 327 bp, Salmonella enterica
  misc_feature (308)..(317): n is a, c, g, or t
atggctaaaaagaaaagtattatcagcgaccggctgggccaaatgtactacttcggtacagaatctcatgaattgagcagatgcttgcaagagtgcaaacaacgactcaccagaaatggcgctaaagcggataatttaccgaaaggaccagagaaaaggttacattttctccgtacgttaccacttaaggccaaacctgttgtgtctgattggcttcgtgaaaatttaacgtttcctgaacaaaatgacccacaaatcgttcttagggatctgttagaagcagaaagtaatgcggaagatattgaacnnnnnnnnnntgtgctttaa

SEQ ID NO: 392443 - DNA, 189 bp, Salmonella enterica
atgtgcacattcgatgacatagtggatgtcaccacattccataccgatccagagcaacaacttaacgacgtgatggcggtgaaacaggagatatttgcccttcccccttatcctaactggaccgctgttggcgttacctggctggccggctttgattttgaaataaaggttattgcccgaatcccctga

SEQ ID NO: 392444 - DNA, 231 bp, Salmonella enterica
atgagcgtatcaagtctgaagcgaaaactggccgctgaagaggtgagttttagcaaaatatacctggatgctcgtatgaatcaggctataaaattattacgtatgggggctggaaatatttcacaagtcgcgacgatgtgtggctatgatacgccttcttattttatcgctatttttaaacggcattttaagattacaccgcttagctttatgcgtacaatgaaccattga

SEQ ID NO: 392445 - DNA, 189 bp, Salmonella enterica
atgaccattacgcctgttaacggaacaattcttgttaagcaaggaaacagggagttcaacaagctatatgagaaagtatttccggatacaaaacagggaatgtctgatgcgtatacatgggctgctggaatagctcttggctgggataagtggcaggacgaagaatgggaggcgcgtcatgttgcatga

SEQ ID NO: 392446 - DNA, 186 bp, Salmonella enterica
atggccgcgaataatggcgtctatttgttcgtcacaccagatttcaaaatcgacagaaagccagcgcgcaaagcgaacagccagttttgggtgcagccatgtaccaccgccacgatctttacgcgcccgactggtttttacatacgggattttcccgtatctacgctcaagtcctttaatatatga

SEQ ID NO: 392447 - DNA, 132 bp, Salmonella enterica
atgagtgagctgagacagcacaaaacgttgtcgcattcgctcgaactcctgctgcttactccatcgatctcgtactgtttacttttccgaggattacgtcaaatttgccgtcaggaactgtgcgccacatag

SEQ ID NO: 392448 - DNA, 882 bp, Salmonella enterica; identical to SEQ ID NO: 380547

SEQ ID NO: 392449 - DNA, 537 bp, Salmonella enterica
atggcaaaaagtcctttcttacttagcatcagccaagatatgcggcaaaaaggctattcgttgcgtaccgagaaaacttacattcactggattaagcggtttattttgtttcatggtaagcgtcatcctctagagatggctggtgaagaagttaggctttttctttcacatttagcgaatgcggaaaacgtctctataaacactcaaaaaactgctcttaatgcgctcgcttttttatataaccaatttttaaataagccattgggtgagcttgattttgtgccagcatccaagcctagacggctaccctctgttatctctgcaaatgaagtgcaacgcattttgcaggttatggatactcgcaaccaagttatttttacgctgctgtatggtgcaggtttgcgcattaatgaatgcttgcgtttgcgggttaaagattttgattttgataatggctgcatcactgtgcatgacggtaagggtgggaaaagcagaaacagcctactgcccacgcgcctaatcccagcaataaaataa

SEQ ID NO: 392450 - DNA, 417 bp, Salmonella enterica
atgagtagtccacaagaaaatttatacgatgcaattcgtattgtaaaaaggaaaatcattcctttggcctttattctttacttttttaactatatggatcgtgtcaatattgggtttgctgcattacgcatgaatgaatctctcggtattacgcctgaggatttcgctaatatttcttctatattcttcatatcatatttaatctttcaaattccgagtagcattggcttgcaaaagcttggcgcaagaaaatggattagttccattattatcggctggggagcggtaacagggctgattttttttgctaaagatactcaacatattttgctggctcgcatttttttggggatatttgaagctggctttttcccgggcatggtttattatcttgcatgttggttcccggctctatga

SEQ ID NO: 392451 - DNA, 534 bp, Salmonella enterica
atgttttcccggattagaggtttgatttcatgtcaaagtaatactcaaaccatcgcacctacgctcagtccaccttcatcaggccatgtaagttttgctggggttgattatcctctattaccactagatcaccaaacgccgctcgtttttcagtggtttgaacgcaatccagatagatttggtcaaaacgaaattcccattatcaatacgcagaaaaacccttatcttaataatattatcaatgctgctataatagaaaaagaaagaattattggtattttcgttgatggcgattttagcaagggacaaagaaaagcattggcaaaattggaacaaaattatagaaacataaagattatttataattctgaccttaattatagcatgtatgataaaaagttaacgacgatttatttagaaaacatcaccaaactggaagctcagtcagcaagtgaacgagatgaggtcttgcttaacataataaagacaaaggtcacttatggtttgacttctacagaaatcttttcctgctaa

SEQ ID NO: 392452 - DNA, 138 bp, Salmonella enterica
atgcctttctggaagctggtaaacctggttgccatcatttgcaaccaggcggcggttgcatatatcttgatgcagatatgttacttactgataaactcggcacgttgtatttacctgatggtatcgctatccatgtaa

SEQ ID NO: 392453 - DNA, 138 bp, Salmonella enterica
atgaggcgttatagcaggcataaatcgggttcgcgcgagcttgcgctggcggtcctgtccgccagcgacaacgatttaccgactacgcttcgcatggcgctcccagttatcctgtttagcctgcaccgttttacgtaa

SEQ ID NO: 392454 - DNA, 468 bp, Salmonella enterica
atgatatctaacagctgcttttccaggttttccagcttcgcttccgctttctttgtttctggcatccatggtccaaaagctgacttttctttcaggccatcttttatgatttgcgcggtatactctgcccccaccttcatcagtagcgtcttcgcctcaggagaatcactggtggcgttgagcgctgaacgaaagagcccggcaaactccattatcgctttcttaccggcgacattatttgaattggtaaaaacttcttttaacgcctcagcgtctttcccgcatttaaacaacgcatccagactcgcctgtttgatcagcgcgggaaaatcttccagttgcgggcctttaatttcccctgacagcgtcgttgtggcactttctctgactgcggaaagattcgccgcaagattcgtggcctgcgttttgatctcggtctgcatacctggcattatgacggggggctga

SEQ ID NO: 392455 - DNA, 465 bp, Salmonella enterica
  misc_feature (22)..(31): n is a, c, g, or t
atgataatggtcgttatattgnnnnnnnnnntttatgataatggtcgatatattggtaattttcctcatggcgtgcgcggcataggttatagccagcgtttcgaaatgccctatatcgggctggcgggtgattatcgtattaatgactttgagtgtaatgtactgtttaaatacagcgactgggtaaatgcgcatgataatgacgaacactacatgcgcaaacttaccttccgtgaaaaaacggaaaattcacgatattatggcgcttctattgacgccggatattatattaccaataatgcaaaaatctttgctgagttcgcttacagtaaatatgaagaaggtaagggcggtacgcaaatcatagataaaaccagcggtgatacggcgtattttggtggcgatgccgcaggtatagctaataataactatacggttaccgcggggttgcagtaccgcttctag

SEQ ID NO: 392456 - DNA, 495 bp, Salmonella enterica
  misc_feature (466)..(475): n is a, c, g, or t
atgaatgtgatacaggccatgtcggggatgagacacagcgaagtgcttggcgtgatgcacggttcactgatttatgatggtgatatcctgggacttcgttcggtgttgcataagttcgccccggaaggtggaagtcacgaagactgggttgtttgtcgctatgtggaaaagccttttcagcatttacgcagaattaatcaaatcatgacaggcctggacgggaagacgctggacaatgttccattgtctttaaatatcaggtcgtggttctcggagcaaaaactctcttttatggggacgcagcgccagactgagtgggcaaagaaatttgtgaaaagacaccatctgttcatccgacgtgaccatattgatgagttcaggcttttaaatccaaacatacgtgatgatgaacgcgttgcgatggagattcgggagggggctttctggccattgcgaacccatcagnnnnnnnnnncctcaggcgtcttgatctga

SEQ ID NO: 392457 - DNA, 177 bp, Salmonella enterica
atgatcattgaccaatgtaatatcagtaatgctggtttgcgtatctaccgtcactatcagcggcgtggactgacgaacgtttcctgcgttatccgttacctctaccgtcagtgtatagctaccgtccgcccagtcagcatctggcgtaaagcgccactgtcctccaacctgggttag

SEQ ID NO: 392458 - DNA, 213 bp, Salmonella enterica
atgcataccgccttcactaccggccttgagattaagccagctatcaaaactgcgcaggctattggcataggggcgcagctcagaattgcgttccgcgcgggaataagaagggacttcatcaaacggcgcgcccatcagggagtcgggcgcatcacaaataaacagtgtgcggtcaacatcatctccattacgctgatgagcatgtcccagtaa

SEQ ID NO: 392459 - DNA, 219 bp, Salmonella enterica
atgcgtttgcaaactatccatgttatcttcaagctgcgtctgttcaacctgagcatccccgacaaaggctgcgagatcgcgcattgcttctcggaagccatcatccagcagttgctgctgcgcctggatgctttccagctgtttagccggatcaagaaatgccagccagttagccagcacatccttcaggaaggactcgttacgacggatcccctctaa

SEQ ID NO: 392460 - DNA, 1104 bp, Salmonella enterica
atggttgtagacagttatcaacggcgtcaggttttacagctactggatgagatgcgagagccaatcagtaacggcacgctggatgcttcaggtagagcgatggacgatcttgttaagcgtctttcagccatcaggaagccacgcaacgaggttaaacctgtgcgactgggggaaattatcaatgattacactgacacgcttgacaggcgtctgaggaacggagaagagtcggataccctgaagaccggaatcgaagagcttgacgctatcaccggaggaatgaacgcagaagaccttgtgattattgctgctcgtccaggtatgggtaaaaccgaactggcgctgaagatagccgaaggcgtggcaagtcgtgttattcctggttctggcgtccggcgcggtgtgttgattttctcgatggaaatgagcgccattcaggttgttgagagagggattgccggcgcaggaatgatgtcggtcagtgtgctgcgtaacccgtcacgaatggacgatgaaggatgggcgagagttgcaagcgggatgaagttgctggcagatctggatgtgtgggtagttgacgcatcgcgtttgtctgtcgaagaaatcaggtccatttccgaacgccacaagcaggagcatcctaatctgtcactgattatggctgactatctcgggctaattgagaaaccaaaagcggaacgtaatgacctcgccatagcacatatctccggtagcctgaaagcgatggcgaaagacctgaaaactccagttatctccctaagccagctttcacgcgatgttgagaagcggccaaacaagcgcccgacaaacgcagatttgcgtgattcaggaagcattgaacaggatgcagactcaatcatcatgctttaccgtgaagcggtatacgacgagaacagtagcgccgcaccatttgctgaaatcattgtgacgaaaaaccgttttggctcgcttggtacggtttaccagcggttctgcaacggacactttgttgcatgtgaccaggatgaagccagacagatttgcacagcatcaaatgcacctgctgcgcgtggcagacgatatgcacaaggggctgacgtatga

SEQ ID NO: 392461 - DNA, 705 bp, Salmonella enterica
ttgattgatgttgccctgtatgagggcagaggccttcctacgtcgctaatttgccagaaactccatttcatctatcaaccaaaaacagggcaactggccgatgtgaaactgttctgtgggaaatcgggacagttgttgctggcaaaagtttgtattgggaaccaggagcagcaacgagagaaactactggccgccgccgtcacggataacggtgaggtactagcagaagaaacggtgtcccgcctgcttctcttacccttgtcagagataacctctatcgaagaacaacctttattgcccgctttaacggcacaacgtgaagctttgcagaattcttttatccaacaggtcgaacgcgataacgaactttattacaatgaagaagtagaaaaactcgaacgctggtcagaagatcggcgtatcgcactggacttacgcatcaagcagttagatgcggaaatcaaagacgcgcgtaaagctgcccgtcagcttccttccctgaaagagaaaatggaagccaaacgcgcgctaaaagtactggaacgcgagcgggacagtatcatgttgcagtaccatgatgaaaagaaaaaaatcgagcaggaagaagatcgtctgctggaagaggtcgaacaaaagctggcgacagagataacgtccagtcaattattcgcggtgagctggacgttgagttcgccttccgcatga

SEQ ID NO: 392462 - DNA, 321 bp, Salmonella enterica
atgcagtacatcgctgcgtcgatgttcttcaagaagttcatcaatcactgtagcactggttgctgggaggatcatttcatcaaggctgcgctgcggctgtcggagatccagcagcggcagccccctctctttatctatcggtgccggaggaagcacaggcgaacgcgaagcctgaacaatatgctcgccgtaaaggatatgttccagatcgttagccagaaggtggtgctgtttctgacgttcttcatcaataatggcttccgaaacacgacggaaagtggcggtatcgccggttgcgcccgcttttatcagctgtcttaa

SEQ ID NO: 392463 - DNA, 600 bp, Salmonella enterica
atgaatcttaaaggcgctgtccttaccggagcaaatctgacggcagaaaatttatgtggcgcagacctaagcgacgcagatttagggggggcagtactgtttatggcggattgtgacggtgcaaattttaagggcgcaaatctatcgggagcatcattaggcgacagtaatttaatgaacgcctgtctggaagatagtattatgtgtggcgctaccctcgatcgcgctaatcttactggtgccaatttacaacacacaagtctgttaggctgtagcatggtagaatgtaattgttccggtgcgaatatggatcacgctaatgtttcaggcgcaacccttatacgtgccgatatgagcggtgcgacattacagggtgctactataatggctgctgatatggaaggcgctatcttaacccgggcaaacctgcaaaaggcgagtttcatttctacgaacctgggcgaggctgatttgtccgaagctaatttaaaaaataccagttttaaagattgtacactaaccgatttgcgtactgaagacgccacaatgtctacgagtacacaaacactttttaacgtattttatagtgaaaatatttag

SEQ ID NO: 392464 - DNA, 417 bp, Salmonella enterica
atgattttcactggcttcacaaaatgctgttatccctatcagaaatttgattccgtagacggagagcttcgtctggcgcaaatactggagaatgatccttcagtaattcgttggatgaaacctcgccccggtcagttccgtatcgaatatgctaatggtaaaaactatgaacctgattttgttgtcgaaatggatactggttattgcctaatcgagcccaaaaaagcgacagaaatcgacactccagaagtacaggccaaaacacgagcggctatccgttggtgtgagttcgccaatcaaaatgcagatcagcttacagggaaaacgtggcgatacgcgcttatccctcatgatgaaattgagttaagccgttcaatttctgggctaatggctgattttatgctgtcaattaattga

SEQ ID NO: 392465 - DNA, 417 bp, Salmonella enterica; identical to SEQ ID NO: 392464

SEQ ID NO: 392466 - DNA, 834 bp, Salmonella enterica
atgccgcgcttacttattttggttgccgttttattgttgagcggatgcttaactgccccgccgaaacaagctgcgaaaccgacattaatgccccgcgcacaaagttacaaagatttgacgcacttacctgctcccaccggtaagatctttgtttcggtatataacattcaggatgaaacgggccaatttaaaccttacccggcaagtaacttttctacggctgtgccgcagagcgccaccgctatgttggtcactgcgctgaaagattcgcgctggtttatcccgctggaacgacaaggcttacagaatcttttgaatgaacggaaaattattcgcgcagcccaggaaaacggcaccgtggcgatgaataaccgtatcccgcttcagtcgctgacggcggcaaatatcatggtggaaggttctattattggttatgaaagtaacgtcaaatccggcggggtcggcgcaagatatttcggtattggcgccgatacgcagtatcagctggatcagattgctgtcaacctgcgcgtggttaacgtcagtacgggcgagatcctttcctcggtgaacaccagtaaaacgatcctttcctatgaagtacaggcaggcgtgttccgttttattgattaccagcgcttactggaaggcgaaatcggctatacctcgaacgaaccggtgatgctgtgtctgatgtcagccattgaaaccggcgttatcttcctcattaatgatggtatcgatcgcggactgtgggatttgcagaataaagcggacaggcaaaatgatattctggtgaaataccgtgagctgtcagtaccgccagaatcctga

SEQ ID NO: 392467 - DNA, 381 bp, Salmonella enterica
atggtcgcaggactggcatgcctgcagaacatggaatggtacagaaagaaagggtattcgagtattggtgatttgttcaaacgcaacagtactgacaggattgaagagacttggctagttaataaggaggtcggagctattgagctggctgaagctctgcagggatttacctccaaagaggtcatttcccatggagatcgcttcatccttatcattgataatctggaccgaatcagtgcagacaaagtgaaagagctctggagtgatatggagcttattgccggagccactcatgaacacttcaggatagtggtgccctattcggcaagacaggtttcagcctcactttctgttgcaggaacggtaaggttcagaatatga

SEQ ID NO: 392468 - DNA, 162 bp, Salmonella enterica
atggaagaagattcgcgcaaagtcaggtgggcatctgtatcatcacattcacgagctagattgtacactgttcatcatcatttatcctctattaaaattcttttgttgattgaaaactttcacgacgtgcttttagtctatccggaatggataggccaataa

SEQ ID NO: 392469 - DNA, 468 bp, Salmonella enterica; identical to SEQ ID NO: 379784

SEQ ID NO: 392470 - DNA, 177 bp, Salmonella enterica
atgcttagtccatcccaatcccttcaataccagaaagaaagcgtcgagcgggctttaacgtgcgctaactgcggtcagaagctgcatgtgctggaagttcacgtatgtgagcactgctgcgcagaactgatgagcgatccgaatagctcaatgtacgaggaagaagacgatggctaa

SEQ ID NO: 392471 - DNA, 789 bp, Salmonella enterica
atgaccgatacaataaaagcgctgaaagaagcgacagagcaaagaatcaccgaattagaagccagaataaccaaccttgagtatgaactttcggaagaaagagacaggctcgacgtatacaaacaaaatttacgtgaacgccagaacggggaagacctatccagtattacggaaagagatggcagagccgaatattggcttgagcaaatacaaaccaaatatcgccattatcctgattacgaagtagctatgattctggacaaggcgggattatcgtctatcgacctgtgctgtctggttgtcgatatggcgaagataatcaaaacagagaacaaaaaaaacatcgaagcaatatccaagctggtggactgcaatgatatggtaacaacccccggatttgaccccaaatgcgccgcaattcttcagcaaatatggaacaggccatttgataccaatagccgaaccatcaagcctgtaaacatccaagatatgacggatagatttgcacttgaattgtcattccaaaaaacgctagacatcatccggcattgcgccacagtagagcacgtacggcgatcgaccaaaaatagaacaccagataaagatgaaagagatgggataatcatcaaattatggaatgaacatccagaatttcatagtcctatcaatttgaaagcattttgtgattgcatacttgtgattgaacccggtgaaactaaagaatcaatacgagataccaatattaaggtaagctcatcaacggttaggcgcgtaataaaaagtcattaa

SEQ ID NO: 392472 - DNA, 474 bp, Salmonella enterica
atgttgacacttaacccgcgcttagcgcatcataacaacgcacctgcacaatcaggtgtcgggattggtctcccggaaaatgtcaaaggcgataacacacgcgccaaagcgtgttttttattgtctaatcatcagcacgccttcaatggtgggctggttgtggagcttctcacgaagcgccgggatcctttgacaccggtaagaccaatctgcaatcagttcaccaccaatcgattggtctcgatttgtggtgatttaaaatcactgtcaaaggagatcgcctctatggctatcaacgcccactcacgccttaaaacctttatttttgccgccgttgagcgtgcaaacctcaaatcaagccgcccggtaatgctgcacatcaccgccgcaaccgaacgccttgcccgccagtctgcaagccgccaatacgtgctctctttcgctggtgttatccagaacggggggactttgtaa

SEQ ID NO: 392473 - DNA, 525 bp, Salmonella enterica
atgaataaccgcccttcttccgttacagctcaaccagaacgccgcgcaggtcatgccagccgtaggaaaaagctccaaaaagaaaagcgtcgcgccagagctttagctgatagcacaagtaagagcttaaccaatacatcagtgccagtaagtacaccaaaaccagtgaaagtaaaggccgcttctgagtttagcggatggtttattgggtcaatgcaggcaggcaaatttagtccttatcgcacgttccgtatggagtacgggcgcatcaatgggggcttgtctggtacattggtgccggtttatgccaaaagcgaagaatctgcacaaataatgcgagatgcgccagaaagagagcgcgtaattttaactgacgctaagccagcaactggcgataagcattacctatctaccggaaagaatttctctattcgagtgggcgaaccaaccgcgcgccaactcaggacgggagttaatacttccagtggtggtcgctacgcccatgattgggggtatgtaaaatga

SEQ ID NO: 392474 - DNA, 756 bp, Salmonella enterica
atgcatgttgtggttgataagctgagtgtgacgctccaggctcgtcgggtgttatctgatatcagctttgttgcgcaacgttcgcaaacggtggggctactcggtcctaatggctccggtaaatccacgctgattcgcgcgatagctggcgtccagccctgcacgtatgcgagcgtgaaaattggcggcaagctgacaagtaacttgagccagcgccagctttcccgcacgcttgcttttgttccacagcatgcggaggcagaggcggaactgagtgttattgatattgttcgcctcggccgcacgccgcatcgcaaggcattcacgccatggcggcaggctgatgaagatgctgtacaacaggcgctttcgatgatgaggcttgatgctctgacccacagaacctggcagcgtctgtcaggcggcgagcgtcagcgctgccagatagcccgggcgctcacccagcagccggatattctgttactggacgaaccgattaatcatctggatatccagttccagcttgagctgatgcgccttatttccgcgctgccgattaccgtgattatggcattacacgatctgaatctggctgcaaaatattgtcagcacctggtcgtgctgcatgaaggtcacgttgtggcatccggtaagcccgctgctgtgcttactccggagctgatccagtctacctggcaggtcgatgcgaccatctgtcgaactgaacggggaatgatgaacatccagtatgcctga

SEQ ID NO: 392475 - DNA, 1029 bp, Salmonella enterica
atgaccagcaaatctgttttttactggcaaatcggcctgataatttcctgcgggatactaagtctgccggtaatgatgacccttgcagcggcaaccggcgatataccggtaagtttcgcgactgcctttcgcgcaataactaatggtctgggtctgacacactttgatttacccgccgtcgaagcagggattgtctggcagtaccgtatgagtcgtgcgctgatggcggccagctgcggtggagggctggcgttatgcgggctggttctgcaatcgctgttgcgtaattcgcttgccgatccttatctgctggggatctctgccggtgcctcaaccggtgccgtcagcgtgatgttgcttggtattggcagcggctccatcacgacgggagtcggggcgtttattggagcctgtaccgcttttatgctgatcatattgttatcgggcggtatgcgcgtgaactcggcacgcattattcttgctggtatcgccggtacgcagttgtttaacgcgttaacatcgtacattgtcagtacggcggccaatgctgagcagtcgcgcggcgttatgttctggctgctgggtagcctgagtggcgtacgctgggctgatgcgctgctgtgcttcgctgtagtcatcatagggttgcttatcgtggtttgctatagccgctcactggacacctttaacgttggtatggaagtctcctcgacgcttggaacgcgagtgctgcaggtacgcgtcattttactgctgaccaccgcgttgattacggcggtaatcgtcagtgccatcggtgctgtgggctttgttgggctggtcatcccgcatataacccgcatgattgccgggcatcgtcatctgctcactatccctgttgcttttcttgccggatgccattttatgatccttgcagacttgctctcacgcaccttgatcagtcatcaggttttgccgattggtgtagtaacggcgcttgtgggcgcacctgtttttgccatgattctgtaccacaaccgggagaaatga

SEQ ID NO: 392476 - DNA, 1017 bp, Salmonella enterica
atgaaactcattctgccactgctgatgtctgtactgctgtcgtttcccctgactggcgcaactgtcgccaactatccactgacaattgaaaactgcggcattaaagaaacctttaaccatgcaccttcacgcgtggtgacaattggtcagcacgaaacggaactcatgctggcgctggaactgaaagataaaattgtgggcactgctgtttggtttgggccattacccgatgatttgaaaaagcaggggagaggactgaagcgacttgctgagaatgcgcctggattcgaagccgtagcggctcagcgtcctgagcttgttcttgctcagtacagctggcacgttggcccgcagggagaggtcgctacgcgtcaacaatttgaactgctgggtatcaggacctggatctcgccagccgactgtacggcaaaaacagtcacagcgacctccaacggtgatggcgcacgttcagaaccttactcaattgatatcattcttgatgaaatctcggcgctggcgcgcgtttttgatgtaccagcacgtggcgaggcgctgaagcagaagctgtctgaccgcattgtcgccgcgcagcagcaaatccacatgcagccgcgagcgccgcttaaagtggtttactggttttcaagtccccgtctgaaaggcgatccatgggtagcaggcagtaaaggcgcgccagggtggatcaataaaacacttggtctgaagaatatcatcgattctgatgaggagtggcctgcggtgacctgggaacatatcgttaagtctcagcctgatattattgttattgcgagtatggaaagacggctgtaccccgccgatgacgtagcggctaaaaaacggttcctggaaaccgatcccgtcacgcgtgaaatgcctgcggtcagacaagggcatatagtggtggttccggccatgtcgcttaatccatcattgcgtaacgtagaagcagtagaactgattagccagcagattaacgctttcgctctctccagatga

SEQ ID NO: 392477 - DNA, 7269 bp, Salmonella enterica
atggacgggaaattgcataacaagatagaccgttttttactggcattgctgttggtggcaggcgtttgcgttactcctgcatccgcgaatcttaagcggggcgcctggcaggaactcagtacctccaccgatgcgataaatggcactgtcccccagaccgacggcgcaacgacgccggtttatcagggcagcgtgttattaacgccggataccacacattccgttgcgtttaccgccatgccgcgagattttagcgttaccgccgacagcaataagatgcaggccgttaacccgagagataccgaaggcgatattttttcgacgccgcctctgcgctgggaaaaccaacagtcgccaacggtggggctggtatgggccgatgccgccacgccggatgaaccgcttaatccgcagcctgtacaaaaccaaaccttctgcgcccagaatttggccggacgccatttggtggtctggccggaaattgaaagcgatgatacatcgcctattcctacgctctatctttggaccacaactggtatacctaacagcaataccgtctcgctactgcagcaaaagatcgctattgatatcgccgccgcgacgggcgaaccggtgacagtgagcgctaaccactataacgaatcgctggctgcctcaaaagcgaaagcgggtgaaagcatcaccctgaccattacgacgaaagactgtgctggcaatcctgtcggtaatgcgccgtttgtgattcgccgtgatgacgcactaaaccgtaaaggtgtagtgaataatgacaatccggtacatgtcggcgatacggaactgacgaccacgacgacattttatcgtggcaccaccagcgctgacggtacggcttctgtggtggtgactcagccagacggccccggcgtaaaaacgccgcttatcatcagttctgaaagcttcccggagctgaaaacgcaaaccgatgtgattttcactacgctgaccagcccggatagcgagttggcggcgatgtacggccacatgcaggagagcgctaccgccgagcttaacggcgttacctatacgtttacccgcccgaaactggcggcggaaaccagcaataccagcggtacggttgttgataagaacgaaacctgggcgcagtttaactgggctggcgcggataaccattgtgacattttgccggatgcggaacagatagtggccatgagaaacgcccatgatactgaggcgacttataccggctggccggtgacgaatgatgcggaatactggtcctccaccaaagaccagcttgaggaatatcactatgctgtccatatcaactccggtcgcgtgattcgcgaaagcaaccgttccgcttttttggtcagctgcgtcgataaagccctgccggcggcgcatccgcagattacgctttcgccttccgcgccgtataaagcagaagtcggcgactccattgaactcaccgcaaccgtcgtcgaccgggatacgcaacagcctttgccttaccgctatatggagcttttcatcgattcggcctcgaaccgacaaggcgtgcataaggctgagtgggacaatttgcccgtgaccattaacagtgatgatatgcgcgcgtcttcgccggagcattacactggcgtcaccgacgccaacggccagattcatctggacttgaaacatgacaatggcgttggcgtagaaacgccgattcgtatcgtgatggaggatgatgacggcaatgatgtcgaattgccgtttagcgtgattttcaccgtggtaaccagcccggacgttgatggggcgaacatgtacggccatatgcgcggcgtcgtggatgcgggtaacctgtataaacgtccgctgctggcagttgaagccagccacaaaaccggtcagcagagtgaaaataacgaagactgggcaacgttcagttcggtagaggccgccactgcccagtgcggtacgggacaggtgccgaatagcggatcgcttgagcatctgtatggcgaacatcctgataatcaaatgctcaccgaacacggctggccgacgaacagccacccttatatcgcggcggaaaccagcgactcgcagacggcgtacgttaacctggcaaatggcggccagggctatggtagccagccgaactacctcacctgctcggccaacgaaatggtggcgacgctcgatgtttactttaacgatgatgtcgccgtgcgtaacgccgaggccaaagtcggcgagcagataaaaatgaacgtccattcgacgaatgccctgaatggcgaggtgataccgtacaccaactttacggtcacgttatcccctggtaaacagcgtgatggccttaccaccggtttcaccgaccccagcaatggggagctcattattgacggcgcagcctacagcgctgcgcaagcggcggtttatcatggtattaccgacgcccagggcaatgcggaagtgcttatcgaacagccaaggggagtggggcttttgacgcagttgagcatcgcgccggaggagtccttgctgaatatttccgccacccgcagcgtgaaatttaccgttgccaccagcccgaataccccggatgcgaatatgtggggtcatatgcccgataccattaccgtaggcgatatgacctttgaacggccaaaactggcgcatgaggtgtcggcgacacgcgtacagaatgaagctaacgagagctgggcgcgcgttacccacgctgacgccgaaggtaatcctgacgcgggcggttgcccggcgaaccgcctgccgcgtatcgatcagcttgaagcgctctacaacgccaacagcggcggcgcgatgcacagtgttcagggatggccggtggcgatgcaatactggtcttcttcacccaccagcccaaccacctggaaaatgatggcgctggataccggcgctgaaagtccgggcggcaacgtcactctctttaccagttgcctcactcacgataacccggtggcggcatctattaccatcgaaccagtagatgcttcgctatggtatgacgccaccaatgttcatgcggtgaaagtgaaaaaaggcgatacgctacagttgaaagttacggtcaaagacgccagcggcatgccgttgccgaatgcgccattcgtgctctctcgcggcgatggttacaatcgccaggggaataaatatatcgcggctaaagggaacagtgacgcgattgtcacgccggtggtgattgatggcgaagcgctgaacgataccgcgacgaaaaagggcgcagtgaccggctccgatgggagtaaaatcattaacgttacccgcccggatacgcacggcacccgcaccgccattaccgccgcgttgtatgataatgcaggcgtaaacgccagcattgacaccatttttaccgttatcaccagcccggatagcaagaaagccgaaatgtgggggcatatggcggagtcgctgacggcagcggacggtaccgtgtatcagcggccgctactctattcggagctgagcagcaccagcaataccgcgcaatatacagaagataacgaatactgggcgggcttttacgggccgggcagcagcaaaaacaacgcggccaactgccctacaggctattacccatccgttacggcgctggactcgctctataacacctatccaggccgcacgataaaaacggaacagggctggccgattgaccactcttactggagtggaacgccttcccagccgctgtcgttaaatacgcccaactcttactatatcgtcgatttggatgacggcagccgccgcgcgatcgtcaatagttccatcaataatatgcagtatcagatttgcgcctcgaagagggtagcgaaagcggcgcagattgtactctcttcttcgctggcgttggatggcgcatcgcagtccgtgaaggttaaaaacagcgatccgattccggtgacggtcaccacaacggatgccgccggtaatccggtcggcaacacgccttttgccataaaacatgatgcgggtacggcgcgcaataccagttattcaggctgggaatcgtttcaactgacgattgatggcacgtcgcaagtttggtcgaaggacgatacgtattatggaacgaccggggatgatggcaccctgacctttgaggtctatggcgaacgtgcgcctggcgtcaaaaatatactgaccgccagcctgtacgagacgccaacggtgacatcgacgctgccggtgatattcaccgttgtcaccagcccggacagcgatcaggccaatatgtggggccatatggcggagacctttagcgccagcaacggggcggagtttatgcgtcctcgactgcggtatgaagaaggctccagttccaatacctcctatattgcggctaacaatgaggcatggctctcactaaaagcgagtcttatcgcgtcgaaaggcattggcgcctgtggtttgaaccaaatgccgctgctggccgacctgacttcactgtataacgatcatcctaatggcaagctggaaacggatttagggatgccgttaacgacgacgtcatccacccgctggtggtcaggcgacccgatactaattaatcaaagcgttaattatcagtactataatatgaagtccggcggcggcggctataacgccgggaatgaaaactatctgcaaatatgcctgacgcaaccacggcaggcgcacgttgcgctctctttaacgtcatgggacgaggcgaaagcggcggcggtagtgaaaaaaggcgagtcgattaacgcaaccgtagctgtgaccgacggcagcggtcaacccatgagtcatgcgttagtcaaacttactcgcagcgatgcgctgactcgcgccgggagtgtttataccactaacaatgcggacgatatcacgttaagcaatgtccagccatcgggcacatcaagcttcgtgatggacacaagcagtcgatatctgtacatagagaccgatgcgcagggccgggcgacgtttacggtgtcgcagaatgcgagcgcggggcttaaaaccacccttagcgccgcgatgatgacggacagcgcaacggtagacagtaaagacgtaattttcacggtcattaccagtccagacagcgccagcgcggcaatgtggggtcatatgccggagaccgtgaccaatagcgcaggcgttacgttccgtcgcccattactgtctgcggagatgccgaccagcgcccccagcacctataaacttaacaatgaaacctggccactggtgaataaagccaatacgcaagaagctggtacgaccggctgtgacgaagcgtatcagccgttgatgaacgatttggccacgctgtatgccgatcatcctggcggtgaaattggcacgctttacggttggccggtgtcgggcggcaagtactggtgggcggtcgacagagtggcgaagaacggttactaccaaaatatgcgtctggatacgggcgtaacgtcaagtaccaattcgacgagcacgacgggggctcagatctgtctggccgatcctcatgcgccgctgccggcgaccattgaactgatatccacgcttcctgtcaccgctagcgatgcgattaaagtgaaaacgggtgaagcaataccgatgaccgtcaccgtcaaagacgccagtgggattccggtggcaaatgcgggatttaccctttcgcgcagcaggggcgtcaatcgtggcggggccgagaaagagaccgggaacggcggtacgacggatgacataaccctggagcagctgacgccgacggcaacgacggtggcactgccgcgctatgctgattcgtatcatggtattaccggtgcggatggtacggcgacctttaatttacgccaggatactggaatggggcttaaaaccgtgatcacggtgaaaatggacgattatcctggattaagcgtgtcgtctaatgtgatttttaccgtggtgagcagcccggataccgataaagcgcagtattggggccatatgccggaaacggtgaccagtagcgatggcgtggtgtttaaacggccgctgttgatggcggaagcgccgtcaagaacgaatacttttggttctcagatctacggtaatgaaacctggtcgctgtttaaccataatggtatcggcctggcgagccagtcggattgccctgctgcgtatcagccgacgctgagtgagatgcaacagctttatgaggattatcccgatggcaaacttggcgagctgttcggctggcctgtcgatcgctcgacctttagctggtgggtttccgataaagccggatccaattatcagaccatctatcttatgaatggtcatgtctattcgaataaaacatctttcgatgaccaggcgctggtttgtctggcgaacccgcacccgatgcctgcttcagtcaagattacgtcaacgatgctgaatactgctaacgaggcggcggtagctaagaaaggtgaagcaataccgttcacggtgaccgtcgcagaccgtgctggtaacccgcttgccaatcaggcgtttactctggtgcgcggcgagtcgttgaatcgggctggcgagaaggttgcaggcgcgctgaccattgagggcgtcgcgccttttgtcagtgcgaaatcgttggatgccagcggtgatacgttcaccggaaccaccggcgcgaatggctccgcgacctttacgctacgtcaggataatagcccggggttaaaaacgaccatcaccagccagatagcggacaataccgttatccaatcttcgctcggtgtcatctttacggtgctcaccagcccggatacggataaagcccggtactggggccatatgccagaaacggtgaaaaccagtaccggcatcacatttcatcgccccttattagctgcggaagccccatcgggaaacggttcttatgatgttaataatgaaacctggtccagtgtcaacgcccaaaacaggcaaacgccgggggcgacaggatgcgatgaagcacgtcagcctctattcagcgaactgcagacgttgtatgacgacaacagtaacggcgcgctggggacaaaatacggctggcccgtgggcggagacagcaattactggtgggcgtctgatgttgatcctcaaacgcatacttatcagtcgatcaatttaaataccggtgagcaccatgattttacgtcaacgacgatgtattcacggcaggtatgcctgaatcaggcgcgttcaacattacagaaacctctgcgatga

SEQ ID NO: 392478 - DNA, 969 bp, Salmonella enterica
atgcaagcaacaataaaacggcgactgacaaaggtcgccttagcgctggtcgtcgcgggatactgcgccgcgcctgccgtcgcggcgaatggcaatctgaaggccggccagtggcagattgttagtgaaacgaccgggacgattcaggggtctgtaccgtggattacccgtagtacggagaaagttggcgataacgataaaaaccatgtgacggtcactgtcgaccgtggaggccgtgctgccgccactgacggcgacaagcagttccacgtgggcgacaagatcacgattaactgggcgattggcgatacggaaggcgatcttgacgccaataacacggcgacgaaatcgacggtagtctgggtgcgttctaagaaccaggatggctcggatgcagcggagatcgacggcactaccggccaggacagttataccatccaggctggtgatgcggactattacctcggtattaaaatcacaccaaccaccacaaccggtgatccctacgtggcggaagttcagttgctgagcgatctctccaccgatgcaggcggtggcgcggacgatgatgatgtaccggaaggtccggtagtgaacgagagcgtgaaagtggtgatttacaaatctggttctaacaccaacctgttgggcacgcagacgaaactcgaaaccaatgccacctataaagtgctgctgtggagcgataaaaacgccaatggcacttatgatggcggcgaagagaacgtcaccacccagtacgattatcgctggaaatttactggcaccagcgccaaggctggtaccgggtctgcgggtattgtcaacgaaagttacaacaaccgcgacctcgttatcccggttaccaacgccgaagcgaaaacggcgttcgagggcgcagagggcggcgttaccgtcggcaccgatggcgttcagggctttggtctgtctatcgactaccgacgcaaataa

SEQ ID NO: 392479 - DNA, 333 bp, Salmonella enterica
atggattattttgataattcaatttcattacctaatggagtctggtcatcaaggactcaaacattacaatcactttctgatgaccagctttataccattcgcgaacagtctcgcgccagtctgcataatccatcaccacaaagttacagcaaagtgactattgatggtcgtgaatattccgtaacctatcatcctcaggatgaccttttcgctgttgaaagaattaatggatgccagggaaggcttgttcagtggctttataacatggcaggccacccccggggtcagattacctggcaattaacctaccagctcaactcaccgaacagctaa

SEQ ID NO: 392480 - DNA, 363 bp, Salmonella enterica
atgatttatgctctggagcatgagacaacgcgtcaacagaacgttaatcatcacgaacttcagatcatcaaacctgttgatcgttcgtcccctttgctgaacaaagcgatcaacgataacgaaacactggagtgcgaaatactcctctatcgcaccacccctacaggaatgcaagagatctattataaaattaaattatccaaaacacacatatcaaacatcaaattaatagtctctcataatattattaaaaacggaaacgaagcacaggaacgagtttcgtttatttatgaatcgattagttgggaacattgtatggcaaataccagtgcttatagtttgtggagtgaacgaactttctga

SEQ ID NO: 392481 - DNA, 432 bp, Salmonella enterica
atgcaaataatatatcgtcgaatggcagttttatgtgttattttaatttttggctcttggctttatattttgttatttggacatgtaatgcatgacttcttatccttactaaccatgggggaaattatctcttatggtaagtatacgtgtatattcataggcggtataccattgctatttactatgttttccgttctggtcatggctctattcagtaaggattgtcattcgcaacttccggcatcaatagaaagcggtgtcaccattatcgttgcaattacttttattaccggaatagttgcaaactgtattgtcccatttttgctactggcactttcatactcgtcctgccctcaggaaaaattacatgactattatgtaaccgatatagaactttgcaataatatgttaaacaaccgtacatggtggtaa

SEQ ID NO: 392482 - DNA, 1020 bp, Salmonella enterica
atggaaaggacaattgcgctggatggcgcacaaggagaaggcggcgggcagattttgcgctcggcgctgagtctgtcgatgataactggccagccgtttgagattaccggcatccgcgccggtcgcgctaagccaggattgctgcgccagcatttaacggcagtgctggcggcgaaggaaatctgtgatgcagacgtttgcggcgatgaactgggatcgcagcggttgcgctttgcgccagggcaggttcgtggcggggagtataaatttgctatcggcagcgcggggagttgtatgctggtactgcaaacggtgttacctgcgctctggtttgccgatagcccggcccgtgtcgaagtgagcggtggaacgcacaatcagtcagctcccagcgccgattttatttgtcgcgcctgggagccgctgttggcgaagatggggataaatcagcgcaccaccctgataaagcatggtttttatccggcaggcggcggtacggtgatcactgaagttgcgccggtcaaagcgctaagcgggttgcggctattatcgcgtggtgaaacggtgtgcatcagtgctgaagccctgctggcgtcggttccctggcatgttggcgagcgcgaagtgatgacgttggaggcgtatctgccgctggcggaaagaaaggtgcgggcgttggaagacgggatcgggccggggaatacgctgtcgttgaccgttgagagcgaacacctgacggagctgtttgttgcttttggcgccaaaggcgcgagtgcggaaaaggtcgcacaccagctggcgacggaggcgcagcgctaccttgcaagccaggcggcagtgggtgagtatctggccgatcagctgattttaccgctggcgctggcgggagagggcgcgtttaccgtggcgaaaacgtcagcgcatctactgacgaatatcgcggtggtcgagaaatttttgccagtcaggttcacctgtgagccgaacaatggtgactaccttattcaggtaaagcgttaa

SEQ ID NO: 392483 - DNA, 1611 bp, Salmonella enterica
atgcgcaaaacggtggcctttggttttgtcggtacggtactggattacgttggtcgcggtagccaacgttgggaaaagtggcgaccaaccttatgcctgtgccagcaggaaacgttagtcgttcatcgttttgagctattgtacgatgcccgctctcgggggctgtttgaaaccttaaagcaggatatcgccagcgtatcgccggaaacggaagtcgtcggcgtcgaaatcgctatccgtaatccgtgggatttcgaagaggtttacgcctgcctgcacgatttcgcccgtagccacaggttccatcctgaagatgaagactatctgattcatatcaccaccggcactcatgtggcgcagatctgttggttcctgctggctgaagcgcgctatctcccggcacgcctggcgcaaacctcgccgccacggaagaaagataagccccacagccccggcggcgtgacgatcattgatctcgatctcagccgctataacgacattgccagccgcttcgcccaggaacgggaagagacgcttcattttctgaaatccggtatcgaaacccgtaatccgcatttcaaccgcatgattgagcaaatcgagcgcgtggcgatacgttcccgctcgccaatcctgcttaacggcccgaccggcgcgggtaaatcatttctggcccgccgcatctacgaactgaagctggcgcgccatcagtttaacggcccgtttgtcgaggtgaactgcgccaccctgcgcggggacgctgcaatgtcaacgctatttggccatgttaaaggcgcgtttaccggtgcgcgggaagagcgggccggtctgctgcgcagcgcgaacggcggaatgcttttcctcgacgagattggcgaactgggtgcagatgaacaagcgatgctgcttaaagcgattgaggaaaagcgcttttatcccttcggcagcgaccagcaggtcaacagcgatttccagcttatcgccggaaccgtgcgcgatttacgccagttggttgcgcagggtcagtttcgcgaagacctgtacgcgcgtatcaatctgtggacgtttgaactgccgggtctgcgccagcgccgggaagatatcgaacctaatctcgactatgaaattgagcgtcacgccgcgctaaccggcgacagagtgcgcttcaataccgaagcgcgccgcgcctggctgacgttcgccacctcgccgcaggcggcgtggagcggcaacttccgcgagctttccgccagtgtcacccgtatggcaaccctggcggagaacggtcgcatcacggtgaatacagtagaggatgagatcgtccgcctgcgacacggctggtgcgatggcaatccttccagacttgatgtccttttaggtgaagaggtcgccacgctggatttgttcgatcgtctgcaactggaaaatgtcattaccgtttgctgtcaggcaaaaagcatttctgacgcaggacgacagctcttcaacgtttcccggcagggaaaaaccaccgtaaatgacgctgatcgcctacgtaaatacctggcgcgtttcggcctgacatgggaatcaatcagcacaattccagctgtatatggtggtcggcgatga

SEQ ID NO: 392484 - DNA, 228 bp, Salmonella enterica
atgatctacttacgcaaagcaaacgaccgcggccatgcgaatcatggctggcttgactcctggcataccttctcttttgccgattattacgatccgaactttatggggttctcggcgctgcgtgtgattaacgatgatgtgatcgacgcgggccaggggttcggcactcacccgcataaagacatggaaattttgacctatgtactggaaggcgccgtagaacactag

SEQ ID NO: 392485 - DNA, 210 bp, Salmonella enterica
atgtcatctgttgatgaaataattcacgtgatggataatgctaattcgggtgccagaggaattgtctatggttcgtatggcccgggacagccagggcatgtctttaatgttgtaaatcaaaataatacaatcagatttttggacggacaaacggggaatgccgccgatcttaatcagttcaaatcgtttcagctattgaggaccaactag

SEQ ID NO: 392486 - DNA, 543 bp, Salmonella enterica
atggaaatgtatattggcctgggcatcattgccgtggcgctcctttgggctatcgtcacctataaccgttttatctcactgcgtcgttttaaagacgaagcctggagcggtattgccgtccagcttaaacgccgtcacgatctggcccccaatctgcttaatctggtcaagcgttatgcgcagcatgaaaaagcgctactggaagaaatcacgcgccagcgcagcattctgcaaggtaatcctcaacaaattgcggacaatgagcggcaatattcaggcacgttgagccgcatattcgctcttgcggaagcgtaccccgaacttaaagccaacgaaaactttctctcactgcaacaaaccctcgccgaaatagaagaacagcttcagatggcccgccgctactttaacggcacggtgcgcaattttaatattctggtggagtctttccccagtttgctgctggcgcggctgtttaatttcaaggcggagtctttctttgagctggactctcctgaagaagccaggtgtccacggatggagtaa

SEQ ID NO: 392487 - DNA, 2037 bp, Salmonella enterica
atgtcaaccttatccgcccaaatcatacgcggttttggcctgatctttctgctgatgataagctcagtctcactcgccagcgataatcatataataaccgatacatcacaacgttcagacaatgagcagttgacgcctgctgatgagcatattatctctttcgactcctgggcgcgttttaacctggatggcagcatggaggtgcgtgagaacgtcaccgtattctctctgggaaatgaaattcgccgggggattttccgcacgctgcccctcacctggcaccggcaggacggtaaaatttttagcgtggagtatgcaataaaatcggtctcgcgcaacggagcggcggaagcttacagcctcgatcacggtacaaaaacgctgaccgtccgtattggcagcgccgagcgactcctgaaacccggcatttatagttatgagatccgttatcagatcagcaatcatttcagccgttttcctgactgggatgaactttactggaacgtcacaggaaacgactggagctggccgattagcaaagccagctttcatctggcgttgcctgacgccgcgcatcatttagacgccaggggaaaagacgccagattacgcactattgacgtttacaccggtagcgtgggggcgaaggagcataatgcaacgatcctacctgatggcagcatacaaacctcgcgccccctcgctacgggagaaggtttaaccgtcgtctatacctggccacgcgacatcctggctaacgcagccgcaccggaagcggtgtggccattggttcatctgctgatacccacgctggaaaccagtataatttggcttcctctgctacttcttataggttattactggctttggtggcgcaaaaacgtaacggcgacagggttaaaaataccgccggttgtgccgcaattttcgctgcctccaacaatgtcgccaggctatctacgtttcattgcccagcgtatgtacgacgatgtggcattcagcagcgatctgcttggcgttgtcgcaaaacgcggtatgacattgaaaaaacagaaaagcaaagcggtaagttcatggctttcgcccgctgtcgatgagcaatggctatccctggcgccagctgataaacatcagcagttaaacgctgccgataagcaactgttgagtatactttttagtggtaaacgtaagaatattaatctcagcactcctcatcagaaactcatgcagaatgcccgcaaatggttagcagagcgttgtgaacatcagcaaccgcagctatttcggaagtggggtaaaccatttcgtcgttgtatttaccttgctctacttgtgccgatcgtgtgcggcgtctggtttgatcctgcggtagcattactctccattccgagcctactatttctggctatcggcttctcactgctgacgtttttactaaaatgtcttcgccatccaataaaagccgggcgcagttggggggcgatgcctctctttatggcgctaacattttgcctttttgccctggtgggcggtggagtattcctgttgggtttgttacctgttacccagcttcctgccggatacgttggcgcactgctgtccgcaatggcactgtgcgccgtcgttggctggaaaacaccccgctatacacagcaggggctgaacgatttggccgtcgccaggggactgaagttatatataaaaaccgctgaagaacaacgttatcaggcgctctatccgcctgaacagatggttgctcactttgaaaacctgctgcctgtcgccctggcgcttgatgtaggaaaaacgtgggcaaatacgtttgccagatacttagcgaataccggcgcgatgtcagaagtgtttgataatgcagactggacgagcatgaatagcttttgccagggctgtcattctgcggccagcgagaagtcaaactatagttcagacagcagtgattactacagcggttccggctcttccggaggaggctcgtcaggcggcggctccggcggcggtggtggtggcggctggtaa

SEQ ID NO: 392488 - DNA, 213 bp, Salmonella enterica
atgcttgaacaccataagagtagcctcttgcttgttgaaaatcaacaccggaggccgggaatgccgcagaaaggtatgttatacagtttaatagtgatatgtctcactattttattatttacctggatagttcgtgattcactgtgtgaattacatatccgccagggaaataatgagctggcggcatctttagcctgtgatagcaaacagtaa

SEQ ID NO: 392489 - DNA, 288 bp, Salmonella enterica
atggctgttcttacccgtcctttttcggccttcgaagttcagaaagcaaaacccggtactacagactatgaactgtttgtcataaccagcggcaaaaaaatctggcgctttcgctacaaatgccccggttcggcttccggaaccaccattactctggggtattttcccgccatgcaacttgccagcgcccggacactgcacgttgaacaccttgccctgttgcctggaggcattgacccgaaaattttgcgatggcaggagaaatgtaacacatcacccggcagataa

SEQ ID NO: 392490 - DNA, 1038 bp, Salmonella enterica
atggacggagaaaaccgggcagttcccggtgatgtagaagacgcggaaactcggtttttacacaatgtctgccatggcaacttttaccgcgtcactgaactgctgtatcgccagcagcaggatgaactttccctgagaactgcgccggaacgggaaaccgtacgttttcgcgccagcgccagcaccgcatttcccctgcgtgacattgaatcgctggaaaaaaacgcggcgggacagtacatcatgaccaccacctttctgggactgtccggcagttcatccccgttgcccggctattatctggataacctggcctggcaacaggcgcagggcaacagcaccacggtggatttcctcggcatgttcactcaccgctggacgcagtttttgtaccatatccggcgtaaataccgctggtatacccgcttccgtccagatggcacagacactattacgcagcgtatgtacgcgcttatcgggctgggcaacccgcgagtgcgtgagcggctgaatatctgccatacaaaactgctggcatacgccggaacgctggcgggcgcggggcgttcgccggatatcatctgcaatctggtttctcactgttttgatttaccgaaggtgacattacagccctggcagttccgccgggtggcgatcccggtggatcagcaaaccaggctgggtgttaccgaacccggccctgatggcaccgtaataggacgttcggtactggggaaaaatttcgtcctgggtgagcgcgtgccggatcgcggggggaaatttatgctctgcattgataatctgcccctgacgcgctatctggcttttttgccggaaggcgaggaatatctgccgctgaccacgctggtgtcctttctgatgcgggatcaactggcatgggatttaaggctgggacttgagcctgatgccatcggcgggatgcggctgggagataaacggtgctcacaactgggacgaacctgttttatcggaaagccgccgaaagaggcttttgtgacaatcacggtcaggagatag

SEQ ID NO: 392491 - DNA, 1845 bp, Salmonella enterica
atggccctgaatacctcttattatcgcgaagaactggattatctccgtcagtatgcaaaattgctggtgcgggaaaacccgcaactggcgtcatttctggcacataaagaagccgatcctgatgtggaacgtctgatggaaggattcgcctttctctccgccaggctgcgggagaaaattgaggacgagtacccggaagtcaccataccgctgcttaaccgcctccagcccaactttctgcgcccggttcccgccatgaccattatcgaatacatgccggatatccgcagacttactgcgcccgttgaaatcacgcgcaatgagcaaatcatgaatacgccgctggatgactcacaggcgggtattccgggtgaggaaagcggcgctgataacggtccgccgtcctgtattttcacgctctgccgtgatttctggctgcttccgctgcgtatcaatgatatacaacagcacagttcggccacacacggcattatcgatattaccttcgttaccccaaaagcttaccaaatgacagcagaggatttcagtcgcctgcgtttctggctgggcggggatgagtacagccgcagccagctttacctgtggctttgccgttaccgctcgggggcggaactgattagccgcgggcggcattatccacagccggacctcgcgttaacgccggcaggctttgaggccgaagattccctgctgccatggccgtcgcgcgttcatgccggctaccggatcttacaggaatatctgtgtttcccggatgcgatgtatttttttgacctcagcggcgtggcgcttcctccggggacgcccggcaacacattcaccctgcggctacagtttgatcgccccctgccggaaaacctgcgtatcagccgcgattccctgcgcctgcactgtacaccagccattaatctgttcagccatcgcgcggttcctttcacgccggatggcacatgccaggaatacccgctactgaccagccggaaacatcccgatcgctatgagattttttgcgtcaccggcattcacggtcaggaagatacaccggaacggaataatgatcttcattcagtagcgcgttcccgcgaggaacaggggccgctgtcgctggacagttttcagcaccggctggaataccaccgggacagacaggatctctactggcagcatcgtacaaaaccggcattgtggcgtgaccgtcccgatcacgtgatccgctttacccattctgacggcagctttcccgatcccgggcggtttcatcatgaacccgtggaggcggcgctgatatgcaccagcggcgaccagccttccgccctgaaaccgggcgatatccacagggccgtggggcagaatgcctccacagcgtcatttcgcaatatcaccatccccacgccatcattaccggcggtaacagatggcgtactgcactggtcgctgctttccgccatgacgctcaattacctggcgctcaatgatgtggaggtattacgggataccctgcgcacctttgaccggtgcggcattcatacgccactgatggcccggctgtcgccggaaaaactgaacgcgctggaaaaactggaaaccatcccgaccgatcgcctgtttaccggcataccggtgcgggggctgtcttcaacgctgtatatcaacccacagccattcacctgcgagggagagatatatctgctggggacggtgctttcacattttttcgcgctgtatgccagtgaaaattcctggcacatgctgaccattatcaatacccaaacgcaggaggtgtggcgatggacggagaaaaccgggcagttcccggtgatgtag

SEQ ID NO: 392492 - DNA, 216 bp, Salmonella enterica
atgatcgtttccgtactgtttcattatgtcatatcccgggtgaacaccacctcatttgggacagttaattcacattaccacgacattatgatcttatatatatgtttttatgaatatattttcattgactactgtatgattcagatcatgttagtctcacaaattatgcaggactataatactttaattattttaaggatggatgaaatgaaataa

SEQ ID NO: 392493 - DNA, 2121 bp, Salmonella enterica
atgccacagacaggagttcgctttactgttgatgttgacggacaggatgcagaaacattcgccgtggtcagtttccatcttgttcagtcctactcttctctgtttaccctcgacattcatgttgccagtagcaatatccggcttaacgcccgcgatttgctggagcagacggcggtacttaccatctggcagggcagtacgccgcaacgccacattaaggggctgacggcccgccttgagcgtggcgagtatgacggccatatcatgcactatcatctgcgtgttcatccccctttctggcgcagcagcctgcggcagaattttcgcaactttcagcagcaggatatcgaaagcatcattcagcgcctgctggatgataaccgggtgacggatacctcatttttgctggggctggcgcacccggagcgggaattctgcgtgcagtatggcgaaacggattacgaatttctctgccggttattgtcggaagaaggaatttttttctacgaagagcacgcgcgggaagggacaaaccagttgctgatttttgccgacaaggcattttatctgccggaagcgttcactatcccctataacccgcagccgcgccccactgcaacggcgtgcatcagccagttcagccactgtgcgcagatacgcccggcgtatgtggtgtcgaaagattacacctttaaatttcccgactggccggggcgttttcgccacgacgcggatgaactcaacggccagcgtaaccagtatgaggtcatggactatcctggacgcttcaaggatgagcagcacggtaaggattttacccgctaccagctggagggctggcgcaatgatacggagattgccgcaggcaacagtaactcggcaaaactctggcccggtacgcgctttacgctgactgaccatccggcggacgatctgaaccgggactggcaggtggtggcgagcgagcttcacggtgagcagccgcaggcggttcccggcagtaatgccagcggtacgacgctgacgaatgcgtttcaggcgatcccggcaaacaaaacctggcgacccacgccgctgccaaaaccgaaagtcgatggcccgcagcccgccattgttaccgggccggagggggaagagattttttgcgatgagtatggacgggtgcgggtgaagtttttgtgggatcgctatcatgccgccgatcaggacagttcatgctggatacaggtctcgcaaccatgggccggggcgggttttgggcatctcgccattccaagagtggggcaggaggtgatcgttgattttttgaatggcgatccagatcagccaattattatggggcgggcgtataactttaataattatacgccggggagtttgccgggaacgaaaacgcagatgaccattcgttcgcagacatataaaggtgaagggtttaatgaactgcggtttgaggatgcagcgggacgggaggaagtttatgttcatgcagaaaaggacatgaaccatgtgattaataatgacagaaccagtctaactaaacggcattcggtggataaggttcaggggaacagtgctgtattaacaaatcgaaataggatcattcacaccgcaggaacccaagatctacatgttggaggtgactatattttatccgttggttcagggtttactgatggactcaagatgatgagtctaacaagcgatgatgataatgtggggaatgtattaaaacatttgacattctctgttgcatcacacggtttagtatctggaatgggtaatatgacaacatatgtacaaggaagtcgaattgaacatattaatttaactgatactagttttagtttaggctcgaaagcaattagtgccggagagatggttacaatcaatgctggaacactattaaatttagttgcaggtgggaacagtaaggatgtttgtggtggagtgaagttttttcaggctacggaaggaatagagttacatgtcggcaagtcctttatttcactcaataaaaatggtcaagtaatacttaaaggcaataatattattatagaaggagataatgaggttttgataaaaagcaattctgtgaaaatagagggtggtagtatatga

SEQ ID NO: 392494 - DNA, 354 bp, Salmonella enterica
atgaataagatattacatagtgttttatttataatgttatttattttgatgaccattgagattggaatgcgcttttctatatggtattctttaaataaaacagtgccagatagtgtggaatttaagatgtatgttaccattgataaaaacattagtcctaattggtgttctacggattctcgtgaaaattaccaagcagtattttatactgtttggattttattaagaatgaaagcagcgtctgtttgtcaataccaatcccctcatgttatattaatagtgaatacagacacaagtgcatctagttatcattggtcattttataacatgggatttattaaagacaatggataa

SEQ ID NO: 392495 - DNA, 762 bp, Salmonella enterica
atggaattacaaattattgagagtgtgatttcattttttatagatttagttatcgaaaatagttctggaaaaagtgagtttctaaaaggactctgtgatggattaaataataataaaacaaggctaaaggcatttgggaaactaggcgttatatcaccatctattggatcgaataatactaaatggctggcaaaccggaataataccgctgaaaatatatatggtacttactacgattcagataccgaggtagacctttatgatttagatttttggtatagtgaatatgcgaagaaaaaaggtgatgaattacagtggggagatacaaaaataagtatttatgattttaaagaaccgattaggcaacattatggtgcaatgttacgtattggtaatgatgcaaaaatatatagcaatgaagggttctctaatttagattgggggattcttagttatcaggttgggataggtcctgataacgcaaaaacgtttgcaaatatggatcccagttcaagagatgagattcaggatgatattgctacagatgaagggtataaattagcaataaattccgccagtagcaatgaaaaacctgtattttttgaccgccggaaattattccttaacacggtaaaaactattcaaagaacaggcggatattatactcacctggaggttcaaatacataatgaagaagaaaaagcgcgtgaagaaagattacgttttgaatcaagaaaatatacaccacaaaataaagcgtaa

SEQ ID NO: 392496 - DNA, 300 bp, Salmonella enterica
atgagcaaacccgtcgcactaaaaggacataaccacacctgcccaaaagttgatcctggccctcagccccatattggtggtcctatcagtgaatgccagcagacttttgtcacttacaacggtgttccgcttgcgctggtgggcgacaaacttatctgtgaaggtagtggtagtaaagataccattgcttctggttcatcagtgctgaccatcaacggcaaagctgtcgcccggatgggagatacaaccgaacatggtggcgtaattatggaaggcgaatctggattactcgtttcctga

SEQ ID NO: 392497 - DNA, 933 bp, Salmonella enterica
atgaaacacgaactatcaagtatgaaagcgtttgtcgctctggcggagaccacttcttttaacaaagcagctaaattactcaatattacgcaacctgcgttaactcgcagaataaaaaatatggaggatgatttacatacactcctttttgagagaactacacgtaaagtaacattaacaaaagcgggaagaatgttgttacccgaagctcgtgaattaatcagaagactggatgaaactatttttaatgttcgtgaactcaataattaccatcacggtataattacattgtcatgtattccaaccgccgttttctattttttaccgctcgcgattggcaaatttaatgctttataccccaacattaaagtgcggatacttgaaaaaggcaccaataattgtatggaatctgtactgtgcaaagaggcggattttggcataaatatgaatagcatcacaaatcccgcgattgattttaccccgctggtaaacgaaccgtttgttctggcctgccgacgggatcaccctttagccgccagacaactggttgaatggcaggaattagtcaatcacacgctgataggcgtacgcgcttcaagcggcaaccgcctcttaatcgagcaacaacttgctgataaaccctggaagctggagtggttttacgaggttcgccatttatccacttcgctgggtctggtggaagcaggtttaggtatttccgcattaccaggactggcaatgccgcaggcaccgcatcctacgctcattggcattcctctgatagaaccggtgatcaggcgcactctgggcattattcgccggaaagacgccatgctttcgccgccggcggaacgttttttctcactgctgttaaatgtctgggccgatggcaaagacaacctttggacgcattttgccaaaccgcagccataa

SEQ ID NO: 392498 - DNA, 1056 bp, Salmonella enterica
atgaaaaaaataccctgtgtattaatgcgagggggaacctccagaggcgcttttttattagcggaacatttacccgaagataaaacccagcgagataacgcgttaatcgcgattatgggatcgggtaatgcgttagaaattgacggcattggcggcgggaatccgctgaccagtaaagtcgcgattgtcagccgttcggatgatccgcaggcggatattgattatcttttcgcccaggtcgttgtgcaggagcaacgcgtcgataccacgccaaactgcggcaatatgctttccggcgtcggcgcatttgctattgagcaggggcttattaccgcgacatcgccggtcacgcgagtgcgcatacgtaatgtgaataccaatacctatattgatgccgatgtgcagacgccggacggcagggttacgtatgaaggcaccacgaaaatcgacggcgttccggggacggcagctccggtaatgcttacgtttttgaatgctgcgggcgcaaaaaccggcaacgttttccccacaggacgccgtatcgactattttgacgatatcgccgttacctgtatggatatggcgatgccggtggttatcattcccgccgccagcgtagggaaaacaggctatgagtcgcctgtggaactagacagtgataccgacttattacgccgtattgaatctattcgtctacaggccggtaaagcaatgggccttggcgatgtccgttccatggttattcctaagcctgtacttatttctcctgcacaacatggcggcacaattaatgtgcgttattttatgccgcattcatgtcataaagcgctggcgattacgggcgctatcgccattgccagcagcagtgtcattgacggtacagtgacccggtcgcttaccacagaccatggctacggcaatataactattgaacatcccggcggctgtcttgatattcatttaaaaaatgatggcgatacccctgattccattcgggcggcagtcattcgtaccgcaagaaaaatcttttctggcgatgtctatctcccggaataa

SEQ ID NO: 392499 - DNA, 1434 bp, Salmonella enterica
atgaagcgaaaatctttatggaagctaataacgatattagctatcccttgtattattgccttgttgccggtgccgactgggttaagccagttggcgtgggtactctttggtatttatcttgctgcaatagtgggattagtcattaaacctttcccggaacccgtcgttttattaatggcggtcgcggcatcgatggttgtcgtcggtaatttaggcggcggagcgtttaaaacttccagcgtattgagtggttatgcctccgggacaacctggttagtattttccgcctttactctgagcgccgcgtttgtcactaccgggctgggcaagcgtatcgcctacctgttgattggtaaaatcggcaacaccacattaggtctgggctatgttaccgtttttctcgatcttgtcttatctccggcaacgccgtcaaatacggcgcgggcgggtggaatcgtattgccgattattaatagtgttgcggtagcgctagggtctgagccggaaaaaagcccgcatcgcgtgggtcattacttgatgatgtgcgtctatatggtgacgaaaaccaccagctatatgtttttcaccgccatggcgggaaatatcctggcgctgaaaatgatcaacgatatttgccatctgcaattaagctggggcgactgggcgctggcggcagggctacctggcatcgttatgttgctggcgacgccgctggtgatttataccatgtacccgccggaaataaaaaaggtcgataataagaccatttccagagccgggcttcaggcattagggccgatgcaggcgcgggaaaaactattattagtgattttcgttctggcgctcctcggctggatttttagcagctatctgggcattaatgagtcagccgtcgccattgtggtgatgggcgcgatgctggtgcttggcgtagtgacctgggatgacgtagtaaaaaacaaaggcggctggaatacgttaatatggtatggcggtatcatcggtctgagttcattactgtcaaaagttaaattttttgactggctggcggaactgttcaaaaataatatctcatttgatcatcatggtaatgtcgctttctttgttattctttttatgagtatcgccgtgcgttattttttcgcatccggcagcgcctatattgtggcaatggtgccggtatttgcgatgctggcgaatgtgtctggcgcgccgctgatgttaaccgctctggcgttattattttctaactcttacggcggcatggtgacgcattacggcggcgccgccgggccggttatttttggcgttggctataatgatattaaatcctggtggctggtgggcgccgtactgactatttttaccttccttgttcatattaccttgggcgtctggtggtggaagctattaataggctggcacgcgctataa

SEQ ID NO: 392500 - DNA, 2259 bp, Salmonella enterica
atggttacgttatataaatcgggtgtttatctgtcaggaaatgaggttattgccgaagagcaatatgccgggccagtcgataaagcgcaggctaaaaaaggtaccattagctggtcaatcctcgcctcgcataatacgtctgacaatatggacaaactgaaaattaagtttgattcattaacctcgcacgacattacttatgtgggcattattcagacggcaaaagcgtcggggatggagcggtttcctttaccttatgttctgaccaattgccataactccctgtgcgctgtcggtggaaccattaacagcgacgaccatatgtttggtttatcggcggcgcaacggtatggcggcatttatgtgcccccgcacattgccgttattcaccagtatatgcgtgagatgatggccggcggcggtaaaatgattttgggctccgacagtcacactcgttatggcgcgctgggaacgatggcggtcggcgagggcggcggcgagcttgttaaacaactgctgaatgatacctgggatattgattatcccgatgtggtcgccgtgtatctgaccggccagccagcggcgtatgtagggccgcaggatgtcgcgttggcgattatcggcgcggtgtttaaaaacggttacgtcaaaaataaagtgatggagtttgtcggccccggcatccgtcatctttctaccgatttccgtaacagcattgatgtgatgaccaccgaaacgacctgcctgagttcagtctggcaaacggatgaggaaacccgaagctggctggcattgcacggtcgcgagcaggattatcgcccgctcaatccgcagccggtggcctggtacgacgggtgtatttatgtcgatcttagcgctattaagccgatgatcgcgttgcctttccatcccagcaacgtctatgaaatcgataccttaaatgaaaatctggcggatattcttcgtcagacggaaatagaatcggcgcgcgtggcgcacggacaagcgacactctcactggtggataaaattgaaaacggtcgtttaaaagtacagcaagggattatcgctggctgttccggcggtaattatgagaacgtgattgccgcagccaatgcgttacgtcatcgttcatgcggtaatgacgcgttctcgcttgccgtttatccgtcttcccaaccggtgtttatggatctgacgaaaaaaggcgtcgtagcggagttgctgggcgcaggcgcgataatcagaacggcattttgcggtccctgttttggcgctggcgatacgcctgtccataacggactgagcattcgtcataccacgcgtaacttcccgaatcgggaagggtctaaaccggggaatggacagatgtccgccgtcgcgctgatggatgcccgctccattgccgcaacggcggcgaacggcggctatttaacgtcagcggcggaactggattgttgggataatgtgccggattatgtttttgatcctacgccgtacaaaaatcgggtttatcagggatatgtaaaaggcgtgacgcagcagccgcttatttatggacccaacattaaagactggccggagtcaggcgcgctgacagagaatattctgctcagggtctgctcgaaaattctcgatgaggtgactactaccgacgagttgatcccttccggcgagacctcctcttaccgctcaaatccggtggggctggcggaatttaccctctcgcgccgcgatccggactatgtcggcagaagtaaagccgtcgccgcgctggaaaaacggcgacaggacggcgaggtcgccgaactggccccggtgttcgcgtgtattcagcagattgccggtcaggaaaacgtacgccctgaagataccgagataggaagcctgatttatgccgtcaagccgggggacggctcggcgcgggaacaggcggcaagctgtcagcgagtgattggcggtctggcgaatatcgcgcaggaatacgccaccaaacgctaccgctctaatgtgatcaactggggaatgctgccgctgcaaatgaaggaggcgccgaattttacggtgggggattatatctatattccgggcattcttgcggcgctggaaaccgcgcgtcctgccgtgacgggatatgttattcgcgataatgtgctggtcgaggaaattgcgctgtatatggaaaatttgaccgccgaggagcgggaaatcatcaaggcgggatgcctgatcaatttcaataaacaccgcttgcagtaa

SEQ ID NO: 392501 - DNA, 438 bp, Salmonella enterica
atgaaaacggtattaggtatgcagcaaaccgaaatatgtagtattcctatggatattggtacgggatataatagaacctattcgggaaaaatttattacggggatggtcgttttggcatatacacgacaattcaagtccttggcagcgatggtgaaccgttaaattcgcaatttgaattagatgcgtgctatgacatgtttttttcagaaatgccctgtgatgaaaaaggcgtcattctgttagatcattatgagattaccccctatcaaagcactacgtttccccatgttggtacccatttcgtccaattgatgctcatttgtagtcgcgaacctacctaccgcgttaatctattttctggcgaactgacaaataacctggacgatcacaaatatatccgtggtatggaaatgtcctatgttattgcgcagtgttaa

SEQ ID NO: 392502 - DNA, 438 bp, Salmonella enterica
atgaacaaagtcgtaggtatgcagaaaatgatgttgggtaatattcctatgaaagaagatactggatatgatgatcccacgagtggaaaaatttactttgcagacggtagttttggattatatacaaggatgcgagcaaaaagtagtgtagatctgccacttgatacgagatatgaaaccgatgcctgctacagtattgagttttccgagttaccctgtgacgcagcagggaatatcttgctcgatcattacgagttgacctttttcaagcgtcccattgagccatacctgggggttaactactgtcagttgatgctggtttgcaccagggaaccaacttatcgcgttaacctacgtaccggcgtcctggtaaagaacacacacgattctcaatatatcaccaatatcggtgtttcttgcattaatgctgaatattaa

SEQ ID NO: 392503 - DNA, 438 bp, Salmonella enterica
atgtatactgaattaactatgcagcagatttctgttggcagtattccgatggaaattgatgtaggatataaccatccttatcatgggaaaataaattttcaggatgggcgattcggcctctatactgtagtgacattgatcggaaataacaataaaccacttattaactatgaagggggggccgtctcatgctgtgctttaacgttttcagaagtaccttgtgatgcaaaaggaaacattctactggatcattatgagttcgaagaagtttatcagaatatgacgcctgaagaaatcgttgatacagttcaggtaatgctggtatgttctaaagaaccgacccaccgtgtcaatttacgtaccggggacgtatatgaaaatataaaagatggcatctatatagataatatggttctttcctatattatagggcaatga

SEQ ID NO: 392504 - DNA, 219 bp, Salmonella enterica
atgagtcagcattacggggagtcacaggctaacgaccttagctctgagtattcggcgctggcaactgggctgacgaagcgggtccaccgaatctttccctatgccctggtgaaggttaagccgatgcagacaaacggcttaaatagcgataccagcaaaagcgatcgagaaaagctgaaccgcatgctggaggagatgttcgaagaggctgatatgtga

SEQ ID NO: 392505 - DNA, 510 bp, Salmonella enterica
atgacgcaatggcgattacgactgttaacgctggcgttgacggcgctgttgagcggcgcagcgccgctgatggccagcgataaagaggtcacgttgacgctgcatgtcgtcattaacgcgccgccgccctgtaccgtgaccggcggcgaggtggagtttggcaacgtggcgacgaccagcgtagatggcgtcaataacgctcaaaatgtcggatatagcctgtattgcaccggccggatcagcgattttctgaaactacagattcagggaacggcagtggtgataaacggcgagtcggtattacaaaccgatgtgccaggtctggggatccgtctgcaactggccgacgataacacgcttattccccccggcacgacggactggctaccgtttcaataccgtgatgatgccgctcccggcattaaggcgattctggtgaaagagaataacgtgacgttaaccggcggcgaatttaacgcggtcgcaactctggtggtggattaccaatga

SEQ ID NO: 392506 - DNA, 477 bp, Salmonella enterica
atgaaaaaaatagcattgatcgtagcaatgagcggctgctttgcggcgcaagcggcagataacctgaagtttcacggtacgctgatctcgccgccgaactgtaccatcagcaatggcaataccattgaggtggagtttggcgatgtgttgatcaacaagatcgacggtacgcgctatatccaggatgtcccctatgagatcacctgcgattcgacggtgcgtgacgaatcgatggcgatgacgttgacgttaagcggcgcggcaagcggtttcaacaatgccgctatcagcacgaatgtaccggggctgggcattgagttacagcaaaacggcgaacctttcacgctgggatcgaccattaccgtgaatgagcagtcgatcccgacgttaaaagcggtgccggtgaaacagagcggcgcggcgttgcgggaaggcgagtttgacggcacagcgaccttacaggtggattatcagtaa

SEQ ID NO: 392507 - DNA, 540 bp, Salmonella enterica
atgatcacacggcatacacgtcaggtctggaaggcgggcgcggttttgcttctttgcgctggggcgacgtggtctgcaagagcggcggataacgtccatttttccggtcgcctggtcgccagcgcctgcacgttgacactgcaagggactgacgtcgccgttgtggatttcgcgcagctcgacagcgccgattttatccccagcgggcagtctgctcgcaagccgcttatctttgaactgacagattgcgattcagcgctgagcgatggcgtgcgggtaacgcttgtcggtgcggaagtgccgggttccagcggtattctggcgatagatagcggttcgatggcgtcaggtatcggcatcggcattgaaacgctggcgggggcgcccgtcgccattaatgacgccagcggcgcgacctttacgctctctacgggcaacaatacgcttcgtctgaacgcctgggtgcaacggctttccggcgaagatctgacgccgggggcgtttaccgccacggcgacggccacatttgagtacctgtga

SEQ ID NO: 392508 - DNA, 876 bp, Salmonella enterica
atgaaaatactgcgaattttattttggctgattgttgcgacgggggctgtttcgtcggcctctgccgggcatcgcgggccgatgcttaaagcaacttttcaaagtaccacgctctattatgggatggggcctaccggggggaacaggagtacgaagttaaacgttacggtggcaacaccacagggtgtttattacggcgtctggttttttggtggggagacctcaagccgaccgggtgaaacgctgcctcttatctcctggacggggccgggcgattttcctgcgccaacgattacatcacgaggttataataatcgcagtattcctcgtgaacgctgcataaatcttccgagcaactggagcggttgcggatcccttacggtggatattgaagtcgccgccgatgattatggttgtccctggctggcaagttcgcacatgacctctaccgatctattctacgccaatgaggtatatagtccgccggatgtccgtggctccgtttgcccgaccgttccattggatacttttgatatttcctggagcccggacagaccacagcatgacctgacgttaaggtttgatgcgaccggtagcaccgttaccagcacggtacatacctacctgctggaaagcaacaaactgtgcgatggcagcaaaatggatacgcgtggcgcttactgccgctttgtgtctaccggtatcacgctcaacgtactgggctgtgataagtcggaggtcactaccagcgccgtcgcgcatccaatcacggataccgaactgcacgatattaatgtgtcggtaaacacgaaaaggattggcagcggacagttctcatccacctgtagctttcagtacattctggatgagttataa

SEQ ID NO: 392509 - DNA, 327 bp, Salmonella enterica
atgctggcattaccctttgacctggtttttattgctaacgagcccggttatgcgttgctgatcgcaattgtaagtccgctagcgacattgataattttggggccttttctctacgtaccagggttgaaatggctatgcggcgtgctggccggaacggccgctattctgttttttcctgggctcgcgatgtcggtcgtactctttttttgcggtattagcggggtaaaaattctgctctgctggctggcgttgctattgggggtgctaagcttcgtgctacttaatcaccaccagctccgcgtaatagtgagtgaatataaccattag

SEQ ID NO: 392510 - DNA, 561 bp, Salmonella enterica
atgaatctgtttatcgccttaattatcgttgttctggtattactcggcagcggcggcatgttggcatccctctataatcgactggtcatgctgcggcacaatgttgataaatcctttgccaatatcgacgtcctgctaaaacagcgggtggatgaattgcctgagctggtcaacgtgatcaaagccagcgctgcgtatgagcagcaaacgttacaacagttgacggaactgcgcgtctcatggctcaacagtagccaacatgacgaaaaagtagcgctcgccaataaaatgaacgtcgcgctcacccgtctgtttgcgaccgctgaaagttacccgcagttgcgggctaaccagagttttcttcggttgcagcagcgtatttcagagctggaagagcagatcgcagatcgccgcgaattctttaacgaaagcgtgaccctgtataacgtgggcatcaacgagtttcctaattttctgttagcaaaattaatgggttatcaaccacatccgttattacatattaccgcagaagagacgcactatgctggcattaccctttga

SEQ ID NO: 392511 - DNA, 1113 bp, Salmonella enterica
atgtttaaatcacttgctcgttttttcgccggcggcgggattattctgctgccagtaatactatttattctcctcaccgctgtgggtagtttattttatctaatctttggcgatgctttttttaatacgcttttcggccctgtcggcgtgatgttgctggttgccgtgatgctttttacctgctacggcgtttctgcgctaatgaaccttcctcatgaagagaaacataccgcgtcatcccaccgccccgtccctggtgggcgccgcaaatcaaccatgtgtcattccgctcccgccaacggtaagagcatatcagtccctcctccgacagcaccatatcagcccttatggaaaaaggcgctgaaaggaatggtaatcgtcggatttatgcttataccgttcctcggtatgcctggcattattctgtttatctgtctgcttattatcgtctctatgctaccacacgcgcagagccgctttatgcgttatcagcagattctgcccaccagtaaagtccgttcaatggcgacaggcatcgtggagctggaaggcaggctgctggcgcaaaagcaaatacaagcgccgcttagcggacaacgctgcatcggctattactacaccattgaacgggaagaacgagaaagcgatggtaaaacgcattaccggttgatccatgaagagaagcgctgccagccgttccaactgcaagatgatacaggctcagtgtcagttgatgttgagaggctggattttcatttactggcgaccaacaagatggtacggcgtggcgatgagatcgcgaaggaatatcttcttacgcgggaaacaacctacctgatgattggtcaggccgcacgccgaagcggtgagttagtgctcactcgcgacagatttcgtcgcgtgtttggcatcgctcccatcaataatctccaacgtcgcagcaagctggacgcgctgtttggccgcgccagatactttatcctcgtgacggcgatgaccatcgcactgctactggttatgccaatagaagtacagcaccgccaggtcatcattcattttacgcagttgctgccattcgcctcctcgcagccagcgtcaggaatcattcaatga

SEQ ID NO: 392512 - DNA, 225 bp, Salmonella enterica
atgtttttttgtgattttgatctgataaatgaaagtttcgaaagaaaatggaagctagcgaaagttgagcatcaaaaaagcctgtcgggcagacatacttcaggctacagaccaagggcgaaaaaataccgggtggcgctggcgcttacccggtctacagattatgcggttataccccgttcggagaatggcgccgtctggatcaggtcactggcgctgggttaa

SEQ ID NO: 392513 - DNA, 165 bp, Salmonella enterica
atgataatggcgaatcatggctaccgttactggacctggaaagtgaccgcggtgagtattcttatcccgctattattagcgatgggggcgtcgtacatatcacctacacctggaaccggaaaaatatcgtatattgtcgattacaaacggtgtaaggcgttataa

SEQ ID NO: 392514 - DNA, 141 bp, Salmonella enterica
atgaaagcagcggcaaaaacgctatacgcgaaagcatttatagtgcctcaaggcggcaagcgcacgagtcctcgggagcttactcaggtaagtgacaggggcgagtgtgcgcaggcaacgcagaggcagcttgaaggatga

SEQ ID NO: 392515 - DNA, 1779 bp, Salmonella enterica
gtgagcgatttgctttacctgaaaataacaggtgagaaacaagggaatatatcctctggctgcggaacgtacgagtccgttgggaatcgttggcaggttagtcatgaagatgaaatttttgtattttccttagttaatacagtaaccagtacaggtaatggccttaatctacaggggcttaacttttgcaagctgatagacaaaagcacacctcttttttgcaatgcgataacgcaaaatgaacggccatatattgaaattgacttttatcggataaataaaacaggccgctgggaacgttattattatattcaactgaggaatgcttcagtagtaaatattcatacaagcttcaccaacaataatcttgatacagaatccattactgtcacgtatgaatatatcgtatgtaagcatcttattgccaataccgaattcgactacctggcatttcctgctgaatataacgctatgttcatcccgcgcagggttaggcccgtccgaaagacaatacctgcgccagtgccgaccgttaatcccgttccgccacctcctgaggtaacgccagtttatgccaaatcctgtctgaaagagaaaggatgtacggatgcagggactgcggaagaacctgctgaaaactttgggcagatggcgatttttgcgcaacctgcggtggatgactgctgtggataccgtcatcaacctgatgacagaagtgcgattcatccacctgtagaaggcgcggctgttccatgggtgctcgcgagccaggtctggggggaatggtcgctcggtggtgtgcttagcgccgcaagaggtgtgccatatatcggcgcgttagcctctgcgctgtacattccgtccgcgggtgagggaagcgcccgcgtgccgggtcgtgacgagttctggtatgaagaagaactgcggcagaaagcgctggcggggagtaccgccaccacccgggtgcgttttttctggcgggatgatattcacggcaggccgcaggtttatggcgtacataccggtgaaggaacgccgtatgaaaatgttcgcgtggcgaacatgctgtggaacgaggagacgcagtgttatgaatttactcccgctcacggtgtagacgggccgctgatcgcctggacgccggaaaagcccgaaacggggaatttgcctggccacaccggtaataaccggcccccaatcgatcaggcaactattctggtgacgccgatcccggacggaaaggatgagtacaccacgccgccctttccacttcctgatataagcgattttaacgattacatcctggtctttccggcagattctggtattaaaccgatctacatttatctgaaagatgatccgagaaagcagccgggcgtggtgacaggcaagggggttgagctatcgccgggaacacggtggctggacatgtcggtgacaaaccagggcaacggcgcgcccattccggcacatattgccgataaattgcgtgggcgggagttcaaaaattttgatgatttcagagaggcactgtggctggaggtgagtaaagatcctgtgttaatggagcagtttataggaaataacaaagtaaatattagccgaggcgctgcaccttttactccagaacctggttactattatggacctaatgaaatagtcaataaatttcatatacaccatataattgctattgaacacggcggtggtgtctatagtattgataacatgagaatcgttacaccccgattacatgatgaaattcattacaggaggtaa

SEQ ID NO: 392516 - DNA, 291 bp, Salmonella enterica
atgtttaattttaaagaaaaaattacagattatactgaaatggaatttattgattttttgaaagagctttctaatccaactaagaatggtaagcccctaataggcaaagaatttgaaaaataccaagatgttttatttaatcatttcatcaaaattacagaacatccggcaatgggagatcttctgttttatcccgagaatcctggtgatgatgaacctgagaaagtagttaaaatcgtcaaggaatggcggcgctctcaaggattgccgttgttcaaagattcaaagtaa

SEQ ID NO: 392517 - DNA, 291 bp, Salmonella enterica
atgtttaattttaaagaaaatgttgcagattataccgaaaaagaatttatcgaacttcttgaggagatagtaaatgcaaccagcaaagataaatctctaaaagggaaaaaattagaaaaatatctcgataccttagtggatcatttcattaaaattactgggcatcctaaaaagggcgatctcatcttctatcctaatcccccagaagatggtgaacctgaaaaaatcataaaaatcgtcaaggaatggcggcgatctcaggggttgcctttgttcaaagattcagaatga

SEQ ID NO: 392518 - DNA, 291 bp, Salmonella enterica
atgtttaattttaaagaaaaaatagaatgctacactgagatggaatttatcgaatttttgagagagttcagaaaggcaacaagaaaagatcagtctttaaaaggaaaaaagctggagatatatattgatgatttagtcgatcatttcatcaaaataacagagcatcctgcgcaaggcgatcttatcttttaccctgaatcagtagaggcacgtgaacctgaaaatattttgcaaatcgtcaaagaatggcggcgctcccagagactgccgttgttcaaagattcaaagtaa

SEQ ID NO: 392519 - DNA, 291 bp, Salmonella enterica
atgtttaattttaaagaaaaaatagaaaattatacagagatggaatttttggagcttctcggagagatcagaaatgacactcgtacagaaaaaaaattgaaaggagatgagttagaaaactatattgtttttatagtaaatcattttattcatattacggaacatccggcaaagggcgatctcattttctaccctgaaaacccaggagatgaggaaccagaaaaaattttgcaaatcgtcaaggaatggcgacgatctcaggggttgccgttgttcaaagattcagaatga

SEQ ID NO: 392520 - DNA, 855 bp, Salmonella enterica
gtgttaattatcgaaactctgccgctgctgcgccagcatatccgtcgtctgcgtcatgaaggcaagcgcgtggcgctggtgcccaccatgggcaacctgcacgatggccacatgacgctggtagaagaagccaaaacccgtgccgatgtcgtggtggtcagcatcttcgtgaacccgatgcagtttgatcgtgccgaagacctagcgcgctatccgcgtacgctgcaggaagactgcgaaaagctgaacaaacgcaaagtcgatgtcgtcttcgccccctccgccacggaaatctacccacaaggcctggaaagccagacttttgtggatgtccctggcctttccaccatgctggaaggcgcgagccgcccgggccatttccgcggcgtttccaccatcgtcagcaaactgtttaatctgatccaaccggatatcgcctgctttggtgagaaagatttccagcagctggcgctgattcgcaaaatggtcgccgacctgggctatgacattgagatcgtcggcgtaccgattatccgtgccaaagatggcctggcgctcagctcgcgtaacggctacctgacggcggagcagcgtaaaatcgccccggggttatacaaagtgatgagcagcatcggcgaaaaattacaggccggtgagcgcgaccaggacgagatgattgccattgcagcgcaagaactgaatgaaaaaggcttccgcgccgacgatattcagatccgcgatgccgacacgctgcttgaactcaccgaaaacagcaaacgtgcggtcattctggtcgccgcatggctgggacaggcgcgtctgatcgataatcaaagcgttacattagcccagtag

SEQ ID NO: 392521 - DNA, 1119 bp, Salmonella enterica
gtgaaaaaaataaaacctttattactctttcccttagcatcatcagccctactactggcctcatattccaaccccgcatgggcggcagggtgcgggtttatgattagttcaagaaccgacgagctcaactatacaaccgatatcacgctaacgcccaccgccgatgcgcaagcgtttctttctgaccagaccaacctgataccgaaaaaccagagccaggtcgtcacctattggggaagaaaccaaaacgacgtatcaaaaactatcatttttaaaccagagtcgagcgaatttaccgttgacgccagcaatccaaagggatggctggtagacagctcagtaccggggctctatttcacattatccgttaatatgcccgcgccgaacgggagcacatggggacagttttctccggtaatgcctatctatttatccaatgacagcagtgttaatcaatcaacaccagccaatggttcctggggttgcgccagcgatagaaaagatacctaccatcaaaacggcaatatgacgttttccctgagtttctatacgacctcagcatttaaccctgcccaggccgccggtaaacagctcatggttaacaggaaacgggcaggaacgctggaaaactcacgagatagcggcggggagtttgatatttatctgcaaggtccgctgaccattgcggccgccggatgtggcgcattcagcgccgagaaaaccgtcgatttaggcgaaatcccgcttaacaccctcaaatctaaaccggacgatgagcacaacaaaaccccgttcgagataacattaaaaaactgctacgccaaacccacgctgatcgttaatctcgccacaaacccatcgaccaacaatctgctgagccgcaatcagggcagcgccaaaggcgtaggcgtggggctgggatatttcacatccacctcagccagccagcgtctggacttaagcaatcccaacacgattagctcgagcgatctggagtatagcggtaacaccagcgacggggttttacatatgtacgcgatccttggcgtaacggataaatcagccttatcagcaggctcggtatccattccgacagtgattaccttgacccacccctga

SEQ ID NO: 392522 - DNA, 582 bp, Salmonella enterica
atgcactggcgtagaatacttctcttcgcactgaatgcagggctggtttcagccctgcctgtcactccgctactggctgacaccaacgttgatttcacggctaccgtgcagaaagacacttgccagattacgactgacggcaatggcactgtcaatttagcgaccgtcggcccgagctactttgccgatggcgtcacggcggaaacggattacaaaggcggtgaagagtttcagataaagctggtcagttgcccggtcagcgacggaaacatcaccaatgttacgttcaatttcgcgccgcaaagcgggcagttcgctaccggtaatcagcaggtgtttgccaacgatttagccaccagcgccggtggcgccgccaacgtcggcgtggtgatttttaccaccgaatcaccccgtaataacgttctgaataccgatggttcctcgcgggcgacctttgccgcgacgacatacagcgatacctcatggactttttatgcccggatgcaaaaaatcctcagtaacgacgccgtcgtccccggcaaactcagcagccgtgtactggtaaacgtcagctacgagtga

SEQ ID NO: 392523 - DNA, 615 bp, Salmonella enterica
atgaaaaagcaattatttcgtgggttaatggttggcgcactggcaacttttgctacgggcatctcgacatttgcccaggccgacggcacccccagtctcgatttaaccgttaaggctaatctgacaaccggcacctgttcagcctcagtcgtggaaaatgacgcagagactaacactatcgcctttggcaatgtttatctctctgaagtcagcgcgaaaagcaagtctaaaacctttgtgctgcgcttcagcgactgcgcagggttaaaagataaaaaagcgacttttaaactggtgccgaataacgttgactgcgcgggtctgacggccaaaacagatggtcaattcgataacgcgatcctccccgaggatggcggttcatccaaagtcgtggttgatgtatggacgacagatacgctgggaggcgctgataaggaccggcttcactgctggactaaacccccacaaaccgtcgatttatccaccgcaaatttaacccagccggttgatgttccactcaaagcgtatctcatgcgtcaaaacggaaccagtagtaaagatatggtcgcgggtaattttcgttctccgaccaccttcatcatcacttatcagtaa

SEQ ID NO: 392524 - DNA, 567 bp, Salmonella enterica
atgaaaaggaataaataccttttgaccgcctccgcgctcgcggtgctattcccgctggccggacaggcagaagatctcaacgttgactttaccgcaacggtactggctaccacttgcagtatgtccattgccgcactggatggctcgactatcacgggcgatgcaaccagcggctatacgctggatatgggcgatatcggtatggataaagttgtcaaaaaaacaactgaatcgcagaaaaactttaagttcgtcgccagcgaatgcagcgcgtcgttaagcaaaattaccacgactctcgcgacctcatcttctgccagtgggaattacatcaaaaacgagtctgccgacagcggcgcagcgaccaatgtcggtataggatttaaacaaaaagatacgacaggtgaaagctggttacagccggggacagggaaatttgactggagtgataagcaacgtaccgctaacgaggcggaaatgactgttgcgctgcgtgagcttgtagagggcgcgggcacaccaggcgcattcagcgcaaaagccacttttaactttacctatcaataa

SEQ ID NO: 392525 - DNA, 2634 bp, Salmonella enterica
gtgcaaaacgtttccacaaccaggactatgccaaaaaagacgctgctcgcggtgtgctgtgcgttactgtacagccagcccggtctgactgcggatgtcgttgaatacgacagctcatttctgatgggcgatggcgcggcgtcgattgacgtcagccgttattccgatggcaaccccacgccggtgggaacgtataccgtcaaagtgtttgtcaatgagaaacccgtcgccagccagactatcccgtttattgatgttggcaaaaagagcgccgaagcctgtctgacgccgaaaaacctggcgcaactccatattaagcaaccggagatcgtcggcgaaaaagcggttctgaaaagaggcgatgaagagagcgacgactgtttaaatttgcccgcgctgattgaccaatccagcgttgaatttgatatgggcgatcagcgtctggatatcaccgtacctcaggcctgggtgaataaaggctatgagggctatgtggagccgtcgctctgggagagcggcatcccggcggcgctactgtcctataacattaacggttaccataataccaataacggtgttgataacgacagtatgtacgccgccttcaacaccggcgttaacctcggcgcctggcgttttcgcgccaacggcaactataactgggacaaagataacggcagcaatttcgactttcagaatcgctatgtgcaacgcgatctccctgcgctgcgctcgcaactcatcatgggtgagtcatataccaccggtgagaccttcgactcagtcagcattcgcggggtgcgcctgtacagcgactcccgtatgctgccctcgcagcttgccaactacgcccccgtgattcgcggcgtcgccaataccaacgccaaagtaacagttacccagagcggctacaagatttacgaagccaccgtgccgccggggccattcgagattaacgatctcagcccttccggttacggtagcgacctgatcgtcaccattgaagaggccgacggtagcaagcgcacctttagccagcctttctcctcggtcatgcagatgcaaaaacctggcgtcgggcgctgggatttcagcgccggggaagtcaacgacgacgatattcacgataagccatacctcgcgcagggcacctactactacggtctgaacaactatctgacggcctatagcggcattcagggaaccaataatcattatctggccgggctgatcggcgtgggccttaatacgccgtttggcgcgctggcgctggatgtcacgcactcacgcacggaaatccccgacgataaaacctatcaggggcagagctaccgtttaacatggaacaagctgattgaacctaccaatacctcgtttaacgtagcggcctaccgctattccacccaggactatctgggtctgaatgatgcgcttcagcttattgacgacgctaaatataacgatgacgaccagcgcgacacgatggataactacgcgcgcatgaaaaatcaaatcaccctcagcatcagccagcccttgcaggatggcgaaacagattacggctctttttacctgtcaggttcgtggaccgattactgggcaaccggcgacagccgcagcgactacaccctgggttacggtaaaggattctcctggggcagtatgagcatcaacctgcaacgcacctgggatgaagacggcgagaaagatgattcgctctatatcaacctgagtatcccactggctaatctgctcggcggagaagatcgccgttccggctttaccagcctctccacccagatgcgtaccgactttaacggcggccacaatctgagcatgaacagcagcggcaacaatgaagacaatacgctgaactatagcgtgaacaccggctacaccatgcagaaagaggataagaacatctcggacgtcggcggctacgtcagctatcagtcaccgtggggcgatatttcggcctctgcctccgccaacaacgacagcaatcggcagtattcgctctccaccgacggcggctttattttacacagcggcggcctgacgtttaccaacgacaacttcagcaacagtgacgcccttgtgctggtaaaagcgcccggcgcgaaaggcgcgcgtatcaacggtggcggcagcaccattgaccgttggggttatggcgccagcaacgccctttccgcctaccgggaaaaccaggtcagcctggatatcgacaccctggaaaacgatgtggaactgaaaagcaccagtaccatgctggtgccgcgcgacggcgcggtggtgttcgccagttttgaaaccgatcagggacgctcggccatcattacgatgacgcgcaatgacggcaaaacgattccgtttggcgcggaagtattcgaagacaacacgccaatcggcaatatgggccagggcggtcaggcttttgttcgcggcatcaatgatcgcggcgaactgacggtgcgctggtttgaaaacaaccaacctacccgttgctcagcaacctaccagttgccgacagaccaacaaacggtcgggtccggccagacactactgttaaacaacattacgtgtcgtgttattaaccacaatcagaatggaacccataatgaaaaggaataa

SEQ ID NO: 392526 - DNA, 597 bp, Salmonella enterica
atgaaaaaagtactcctggcgacagctattgtaatggctatgggctcgactagcgctatggcgaccgaaggcggtcgtattaattttgaaggcctggttagcgcagaaacctgccagaaagtcgtcagctccgcagccggcgacagcgctacagacggcacggtgaccctgaaaaccgcacacgtcagcgacatcaccgctgaagttagcgataccgccgcaggtgcaaaagcggaagatttctctatcgctatcgactgctccgaagcgggtgccagcccggctaaagcttccctgacgctgtcttcttcctttagcaacactaaaggtacgctggataacgacgagacgctgagccgcaacggcgaagccgcagcgaaagcggttgatatcgcagttcaccgcgtagccgatgacaccaatgctctctcactggtgaaaatcaacgatccggcgaacgttatggatgaaaacttcaccaacaacgtcgccaccttcaattttaaagcctcttatgtgaaatcatcagatgctggcgccgaagtgactaccggtccggtcacaaccaacgcgatttatacctttacttacgagtaa

SEQ ID NO: 392527 - DNA, 168 bp, Salmonella enterica
atgcatctattttattatgtaaaatatcaattaattatttatcggcttaaagtattttttattggaatgatttttcggagggcatggagtgacaacggtggaattatagattcaggtgataataaaagacgtaatgccgtgatgatgttcgcaaacatggtgatgtaa

SEQ ID NO: 392528 - DNA, 288 bp, Salmonella enterica
atggataacagaaatgaagggctacgcaagaactggcaccgaatcgatatcgttgcagcgatacataaagcaggtctaacgatgcgagaactgtcagtccaggcagggcttaaaccagattcattgaagaacgcactggctcgtccttatcccagaggagagaggatcatcgcgtcagcactgtctctcaaaccggaagatatctggcctgagcgttatagcaatcaacagaagcgtaatcatctgcataaacaaatgggaactaacgatggaattgggccagcgtaa

SEQ ID NO: 392529 - DNA, 219 bp, Salmonella enterica
atgaattgtccatcatgtggttcgccaaacgtgcagcaaagacatatcgggaaaagtattggaggaggtattggtgctgtcgcgggaggtatggcgtcaattgaaggggcttccgcaggcgctgtcattggttcagctatccctatagtgggaacgctggccggggggatattggttttctggttggagcatgtagcggcgcagccgttggtgcgataa

SEQ ID NO: 392530 - DNA, 1503 bp, Salmonella enterica
atgaccgctgaacaacatccggaaatcctccgaaccgagggcgtaagcaaatattttcccggggtgaaggcgctcgataatgttgattttagcctgcgtcgtggtgagattatggcgctgctcggtgaaaacggcgctggaaaatcgacgctaatcaaaacgctgaccggcgtttatcaagccgatcgcggcacgatctggctggacgggcgtgcaatttccccgaaaaataccgcccatgcgcagcaattagggatcggcaccgtttatcaggaagtgaacctggtgccgacgatgtcggtggcggataacctgtttattggccgtgaaccgcgtcgttttggcctgctgcggcgtaaagagatggaaaaacgcgccacggcgttactggcttcatacggtttttctctcgacgtgcgtgaacctctcaaccgtttctcggtggcgatgcagcaaattgtcgctatctgtcgggcgatcgatctctctgcctctgttttgattctggatgaacctaccgccagcctcgatatacaggaagttgagatgttgtttggcctgatgcgctgtctgcgcgatcgcggcgtcagcctgattttcgtcactcacttcctcgatcaggtgtatgaagtgagcgatcggatcaccgtgttacgcaatggtagttttgttggctgtcgcaacacgcatgaacttcctcagatcgaactggtaaaaatgatgctggggcgtgagctggaaaccaatgcgctacagcgagcggggcgcacgttgctaagcgacaaaccgatcgcggcgtttagccgcttcggcaaaaaaggcacgatccaccccttcgatctggcgattcgtcccggcgagatcgtcggactggcggggctgctcggatcgggtcggacggaaacggcggaagtgatctttggtatcaaacccgccgacagcggcagcgcgtcgatcaaaggtaaaccgcaaacgctccgatcgccgcgtcaggcgtcgcgtctggggatcggcttctgtccggaggatcgaaaaaccgatggtattatcgctgccgcatcggtgcgggaaaatattatcctggcactacaggcgcagcgcggctggctgcggcccattccccgcaaagaacaactggcgatagcggaacgctttattcgccagctcggtatccgcacgcccggcacggaacagcccattgaatttctctctggcggcaatcagcaaaaggtactgttgtcgcgctggctgctgaccaggccgcagttcttgatccttgatgagccgacgcgtggtattgacgtcggcgcccatgcggagatcatccgcctgatcgaaacgctgtgcgccgatggcctggcgctactggttatctcgtccgaactggaagagctggtgggctacgccgatcgggtgatcattatgcgggatcgccagcaaatcgcggagatcccgctcgctgaactctctgtgccggcgatcatgaacgccattgcggcgtaa

SEQ ID NO: 392531 - DNA, 1023 bp, Salmonella enterica
atgcctcaatctctcccgcaagccgccgcgtcgaagcgacgtttccgctggccgaccggtctaccgcagttggcggcgctgctgctggtactgctggccgacagcgtggtcgcgccgcatttttggcaggtgatgttgcaggacggtcggctgttcggcagtcccattgatatccttaatcgcgccgcccccgtcgcgctactggcgatcggtatgacgctggtgattgcaaccggtggtatagatctttcggtaggcgcggtgatggctattgcgggcgcgacgaccgccgccatgaccgttgccggacacagtctgccgatcgtgctgctcgccgcgctcggcgctgggctactggcggggctatggaacggttttctggtggctatcctgaaaatccagccgtttgtcgccactctgatcctgatggtagccggtcgcggggtagcgcagttgatcaccgccgggcagatcgttacgtttcattcgccttcattgtcgtggttgggcagcggttcgctgctgctgctcccgacgccggcggtgattgtatttctgacgttggcgatgttctggctgctgacccgcaaaacggcgcttggcatgtttattgaagcagtggggattaaccttcgggcggcgaaaaatgccggtgtaagcacgcggattatcgtcatgctaacgtatatgttgagcggcctgtgcgcggcgattgcgggcattatcgtcaccgccgatattcgtggcgcggacgccaacaatgccgggttatggctggagctggacgctattttagcggtggtcattggcggtggttcgttgatgggcggacgttttaacctgctgctgtccgtggtgggcgcgttgattattcaggggatgaacaccggcattctgctttccggatttccgccggagctaaaccaggtggtcaaagcagttgtcgtgctgtgcgtgttgatagtgcaatcgcagcgctttatcagtctgataaaaggaaccggtagccatgataaaacgtaa

SEQ ID NO: 392532 - DNA, 453 bp, Salmonella enterica
atgacaaaagcccgttttaccgaggaacaaatcgctgattttcttcaccagtctaaaaatagtatatcaaacaaagaattaagcgaaaaatatggcttcagcgtcactacgcttcgccgctggcaggaacaacatgctgaaggcgtgcgccgtgaattaaaagaggcggaaactatcgctgcgttagtctttttaggttttttcgtcttagccttaatgctcgcccttgccgtttccaggcttactggcgcctgggtgattctgccctgcttactttactgtatttattacatccgtcactttcgccacctatcggcaaaacatattaaagaggaagatacccatctctcccgctctggtcgtggggcaaacaatgtgttttataaactctgctgggcgcttattttcttttttgtctttacattcatgtatttcatagcgaaagtaagctga

SEQ ID NO: 392533 - DNA, 156 bp, Salmonella enterica
atgccttatccggcctacaaaagcgcgttacctgtaggccggataagagacgtgagtatcgccatccggcatttttcgtttaaaattaaaactatttatgaattttatttacatattactgttaattttagatgtgataaaaataaaattgattag

SEQ ID NO: 392534 - DNA, 537 bp, Salmonella enterica
gtggtagcctttattttgctgaatggcgcgatgttttgctggttagcgttagtctggcttaaaccgaatcattatctggtgcgcattttgggcggggtgacggcgctggtggggctggcttctattctggtgacgtcgcaagtctattatcagatggcgctgcatccgctgtggcacacggtcgctacgccggtcgggttcttaggcacggcggtactgcttggctttatgagcgtcacggtggcgtatggctattggtatagcgcgttttcaacgttgtgtcggggaggcattgtgcttggtatcgtgctgagcgcaggcgcgttgtgggtccgataccatgttccgggcgccgatgctgcaagcccgttactctggtggcagttatgcgccagcctttgtgtcgcggtatggggcgtttcgcgtttgcgctacggtgtgcacagttgggcgtgggtggccttaatcgtgaccggagagctagcgggaagaatgctgttttatagcaatgtgatgagcggagcgccgtggttctaa

SEQ ID NO: 392535 - DNA, 225 bp, Salmonella enterica
atggaacactatgaattgccattggtcttttttaccgttttcgcgcaatggggaattggtggcgtgctggcgttaacgctgtgtcagcatttcagctcggcgacatttagcgcaaaacagcaccgcctgttagcgttgctattctggatcgttacggtaataggttcactggcctctctcgtacatctggggacgcctggcggcgcatatcgctcgctggattag

SEQ ID NO: 392536 - DNA, 549 bp, Salmonella enterica
gtgacgaagcaatatggatttcttatcgatatgcagaactgctatggctgcaagacctgtagcatggcctgcaaatccgaaaatatgacgccgcttggcgtgctatggcgtcgggtacgcgaatgccgtaccgatgaacccaatacgcaggcatttatcagtatgtcctgcaatcattgtgacgatccccagtgtatgaaggtgtgcccggcgggcacgtataccaagcgggcggacggtattgtggtacaggatcatgaacgctgtattggctgccggatgtgcatcatggcctgtccgtggagcgcgccggtttacgatccacaagaggggaaaaccagtaagtgtaatctgtgtgcggagcggctggatgaaggattgctgccgcgctgcgtggaatcctgtccggcaggcgtgctgcgctttggcgatattgaggagctacgcaaagaatacaccacggagtggacggtgctggaaaaacgctacggtttgccggaccacactatcagcggacctaatatcgtcattattccggcgcggagctaa

SEQ ID NO: 392537 - DNA, 2334 bp, Salmonella enterica
atggaagcattgcgtcatattcgtttaaaaagaagaaccttattgaaagggttgggggtagtggggctggcctcgttgagcgcgagttttctaacgttacggcaggctaacggtacgccattgccgcgttttcgcctgaaggagtcggattaccgcacatttcgctcgacctgtgccatggagtgcctgcactgcaatctcaccgcttacgtatggaaagatcgcttaatgaaaattgaagcgacgaaaggtttcaacgtgaagtgctgtttgcgcggaattagccgcacgaaatgggtgtaccacccgctacgtctgacacaacctttgctgcggacaggggaaaaaggcgaaggcaaatttaaaccgattacctggaatgcggcgctggatttaattgaagagaaaattcgcgaaatcctcgccacggatggcaataaaggcttattactgactgccgcatcaggaaatatggactccatcaagaatgatatggggaaagcattttttgattatctgggcggctcgacaaaacatgccggatcgctatgctgcgccgccgtcactgcggctatgataccgatggtgggtttacgttatgctgatacccgcgacacgatagccgaaagccgttatatcctgtgttggggaaataacccggcagtgaccatgcacgcctattttaaacactactcgcaggcgcaacgcaatggggcgcggctggtggttatcgacccccgttttaatgaaaccgcagccaaagcagacgaatgggtgccgattgtccccggtacggatatcgcgctggcgctgggaatgattaacattattatgcaggaaaagcggcatgatgttgattttctgcgcgcgcatacgggcgcggtgtatctggtggatggccaacagcagcttatgcgcgccgatccacaggataaagatagctatctggtatttgataccgtgaccaaaacgttgaagcggcatgatgaagcgggcgtggttccggcgctgctcagcgaggaactgccagccgatagcgcatttaccacggtgctggatgcggtgtgggaacaggcgaaaccctggacgccgcagaaagtagaagccgaaaccgacgtgcctgcgcagaccgtgttacgcctggcgcgcgactatgcctccacccagccggcgatgattatccagaatatgtcaggggcgcagcgaacggagtttggcacctatgtcgccgccagccagttttacctggcattgatcaccggcaatatcggtaaacgtggcgcgggcgtttgtgatgccggcggcgtcagacagatggcaaaattttcgccgattattcctcctgcgcctaatgcggcaaaaatccccccgatacccattcctaaaatcggcgactggatcgttaatgagaaaccgcatcctattaagttctggtggaatatgacgctgggcgcgatgacgcaacttcccaataccaatcaggttcgggaggcctttaaaaaagtgccgtttgtcgtggtggcggataacctgatgagttcgtctgcgttgtatgccgatctggtactgcccgtcacgacgatttttgaagacgtcagcttaatggcgggcgtgcgcagccactatgtgcagttaatggaaaaagcggtagagccgccgggagaagccaagcccgactactggatttttgcccgtctggccgaacgctttggctttggcgaggtgtttaatcaacccatcgagcactatatcgacgcctgtcttaaaggatcgggtatcacccgtgaaatgttgaagaaagggccggtgtgtcccgttgaggaggactgggttcccttcaaagatggccagttccgcacgtctaccggcaaagcccatttttacattgaggagtgggcgaaaaagcaatttatgcccgtggtgacgtggaaacaggtcagcgagtcggtgaaaggatcgccagaacttgcccgccaatatccgctgatggcggtacagcgcaaactggcgcgtagcgtgcactccagtcatggcatgaatgaatggattctggaagttcagcgtaatcgccctaacgtgatgatccatccggaagatgcgcgtcagcgccagattaaagcgggtgaatgggtcgtcgtcttcaaccatcgtggcgagcaccgggccattgccgacgtcacaacgcatattaagcaaggcgtggtgagtctcgataacggctggtgggagcagcagggcggaagtagtagccatgtgaccaacgatcaggtggagttattgagcaacgggcactgttgtaacagtacgctggttgatgtgagaagggaggcttaa

SEQ ID NO: 392538 - DNA, 687 bp, Salmonella enterica
atggctgaaatatctcaaggcgtgaattcggttgatatcgccgttaacattctgacttttgttgccagccagaacggtcaggccagggctattgatatcgcaacaggctgcaacctgtctaaaagccgcttacataaatatctggtttccctgtgtcgtactggcatgttatgccaaaatgagaaagggctttatttgttgggcgcaacgctacgccaactggtggaaagtcgttcttttgaacacgatccgatccgcgatcttaacaacgtattgatcgcgtttcgcgatacctttaatcactccaccggcgtcgtggtggcgacggataccgggttagtgcttaaacattatcatcgcagcttccgtaacgttgatatcgattttcttcccaatacgccggtgccgctccacgccagcgccgcaggacaaatatggatgagtttttccggcgttgaggcgcaagacgaggcgcaagcagatctgattaatcaggtgaaaatgaagggttatgcggttcgctacaatccaacgcaagggatccctggcgcgcagtctattgcctgcccgcttctggacaataatgagaagttaattgcgattgcggtgacaatgggattttttagcgcagaagccatcccgcacatcgccagccagctactacacgcgctcgccccgctatattaa

SEQ ID NO: 392539 - DNA, 1014 bp, Salmonella enterica
atgaacatggtaatgctgtcgatcgtccggtatgcaattgcgctgtttgttctgacgtgctcaattacaggttatgccagtaattgtagttatatagacggtaccagcgcatcatcctataccgttaccattccgccattagatgtacaacgtgatatgcctgccggtacgattttatggaacagtggaacgttggtcgctccgaataaaacatctattaaatgtactactgcatcgccgatttggcgggggtattatgactccaccttaacgcctgttaatgtgctggataataatggtatttatcaaactaataatcctggtatcgcgattcgtgtctggtgggtgaatatgaaaaacgcgagtgtgtcagacgcgcgtgcgtttcggtcgccaaagagtaaggaaggctctggcacatgtggcggatctggttgtacatactcggatatacaaggtggatttgatgtacaactaattgctacaggtaaacctattacggatgatcctttacaactcaccagatttagcgctgctcgctcgtacgatgaaacgcctgtgctttatattagttttgttgatacggatgtggtggttaatagcgccagttgtgtccttaacagtaaaaatattagtgtagatttaggcaaacaaatcctgggaacgcatttagttcatccaggtgatacttcgtctccggttggttttaatattgacctaacctgtgatcctaataccaatgtgaatgttttattctcgggtgctaccgtatcgggtgataatacaacgctggcgctcaataaccagacggattctacgtctgcgcagggcgtcggggttcaggttttatataatgagcagcccatcacttttggaaccttattgcctacaatgcaaaatgtcgcgcaaggcagcgttattctgccttttcaggcccagataatgcggttaaatgaggagttaaaggctggtgaagtgaacgctaccgcgaccttcgagatgatttaccgatag

SEQ ID NO: 392540 - DNA, 1467 bp, Salmonella enterica
atgcagcgtcaaggcgcgttacagtacagtcttgccgcagggcagtatcaaagtaacgataattctgatgagcctaatctggtcgaaggacaatttatttatggtttgccctatggccttacggtttatactggcgtgctggggagcgatttttatcgttctggcgcgttaggatttggtgttgatttacagaattatggcgcattctcatttgatgctacatgggcgagaagcgagatccaggataaggtatggcaggggatgtcttatcgtgcccagtatgcaaaaaatatcgactcgacgaacaccaaccttacccttgcgagctatcgttactctacccgtaatttttatacctttacggaagctttaaataatcgaactaccgatatcgacgatgacagtttttacgcttatcgcaacaccaacaaccgccgtagccgcttgcaggttaatatcagtcagaacctgaacgaactgggttccttctatctctctggttatcaacaagattattggggactgcagggctatgagcgtacgttaactatcgggtataaccaaagctgggagcggattcgttttatgctcaactattcgttgacgcaaacgccgacatccaaccgtgatgaacaaatatcgtttaccgtcagcattccgttggataaatggttacccaatgcctgggcgaattatacctggacggataaccgccaccaaagccaacaacatcagatagggcttagtggaacggcgctacaggataataatcttaactataaccttcagcagtcctggggtaataacggaatgggtggcaacggcagtatgaatgcgacctatcaggggtcattcggtactgtttccggcgggtataactatgacaatgatagccaacagattaattaccagttacaggggggaattatagcacatgcgggtggtattaccttagctcagtcgctccctgaaaccgtaaccttaattaatgccgaaaacgctcccaatattaaggttgaaagcagtaacggcatttataccgatgctttcggctatgccgtggttccgtattcttcgccttatcggacgaataacgtggtattaaatacggcaagtaaccctcaggttgatattagtgacccagttaaagaggttgttcctactcgtggtgcggttgcactcgcaaaattcgccacgcgaaccggtatacgcgtattgttaacgctacagcataataatgacgtggttccctttggcgcgctcgccactctggcgggtgataacgagaaaaattatgccagtattgttggcgataatggtcaggtttatttaaccggggttacgaacggcgatcgcgtcatagtgaaatggggtgaaaagagcagtcaaaaatgtattgcggatattgctttccctgaagaaggattgagtaaaaccgtaggtatattaacatcagagtgtaaataa

SEQ ID NO: 392541 - DNA, 225 bp, Salmonella enterica
atggcggtaaatactctattgccatatgattggcttagccttctgacaaatagttctctcatccccgcatccgcttttgttgctatttgtcttttcattctcagagagttgccagatggatgtcgaaaagctaaggccaggaaacatgagattcgagcgttaaagcaaattttcgcgcgcgaatgccaacttgcctggttcatgctacgtccgtctgcgggatga

SEQ ID NO: 392542 - DNA, 1074 bp, Salmonella enterica
atgatagcggcgctacgcttattcttgctcttactattcattgccgtcccgtttcgctcagcactagcagtgcactgttatcttggtagctcaggtgggccggttgaaggctataccgctatagagccatttgctgtacccaataacgccaaacccggcgataaaatatgggaaagtaatgatataaaaattcccgtatactgtgataacgccagatccgataatggttataacggtgaaaacgtttatgcctgggtcaatccctattcttctgttaacgatacttattaccagctaggcgtcacctacgaaggtgttgattatgatgcaacgcaaggtactgtcagtattgatactcaccaatgcatcgataatcagaagcttaaggtctatactccggagcaaatcaaagccagcggttgggagcactatctctgttcaggcaacgcggaagatacgcacttctcaagaacatttattgcacgaatgcgcctgtacgtaaaagtgatttccatgcctccccatgactacgccagtagtattaacgattatattcttgtacagtttgatggcgttggcggtattaacgtcagtcctgatgccgctaacctgaaatatcatgtcactggattagatcacatccgcgtgctggattgtagcgtaaaattcaacatctacccggaaaatcagaccattgatttcggtacgtttaataatatggaaattaattctaaaacgctgacaagaagtttctccataaagactacaaaaagccaggatacagaaagcgggtgtactgatacattcaaagtttcatcgtcattctatacaaccgaagaattggcagataatgatacttcattgataattggtaatggcttgcaattaaaaatacgcgacatggaagataacacgctctcaacctataatgcatactctgaatatgctgaatttaatacagaattattgacccgagagaaaagttatcaggcagaactaagccaggttactggcgataccgtacagatcgggccatttgaaacggtagtattgtttaaaatcaactacaaataa

SEQ ID NO: 392543 - DNA, 732 bp, Salmonella enterica
atgacatttttaaaaacattaccgatactattactcgctatatcgctcagtagccaggctgctattcaacctgacagaactcggattattttcaacgccagcgataaagccagcagtctgaaactcgaaaaccaaagtaagcagttgccttatctggcttattcctggattgaaaatgaaaaaggaaagaaagacgacacttttttagtcgctcttcccccgatccagcgattaaatccaggtgcaatttctcaggtgaggatcgttaagcaggataagactcgttcactccctctcgatcgggaatcactgtttttctttaatgtcagagaaattccacccgcgccagaaaacaagggagacaatgcaattgtgcaaatggccctacaatctcaattaaaattattctggcgtccggcggcattaaagaaaaaacctggaactgaagttgaacatcaactcaagataagccagcagggtaatgcgttgctggtcaataaccctaccgcctactacatcacgttggccttttttggcaaagacatcaaaagccagttgtctggctttagcagtcaaatgctttctcctttttcttctgcaaagttaaatgcgggaagttatagcggaaacacatttgtgctgggatatatggatgattacggtggactacgcatgttgaacgtcaaatgtcacggcaagtgtcaacttactgtcccggaggcaaaaaaatga

SEQ ID NO: 392544 - DNA, 2448 bp, Salmonella enterica
atgaatacctgtaagcttgtagcctgtggttgcggtttattgctgacattttctaccagggctactgaattcaatctgaacgcactggataaatccatgcgtaacagtgtagatatttcactacttaaagatgaatctgtagtagtacctggagattactttgttgctataaccgtaaataaaaatacaatatcttcaggtcgtcagttgagttggaagaaacgggataaagacgttgccgtatgcattccagttgatcttgccaatcaactggggttaaaagaaaatgttttacagtcattccctgtcaaaaatgactgtgttgattttagtgcaaatccagatattgtcttcacattagacatgcctaatcagcgcttaaatataagtattcctcaagttttaatggcatggaaatcagaaaactggatgccgccatcaacctggaataatggaatctcaggtctgctgttcgattataatttatttgcaagccattacagcccggctcaagggagtagttcggagaattataattcctatggtacggcggggctaaatattgggccgtggcgctttcgtagcgattaccagataagccaaaaccgtaacgatgatagtacacaaaccacgaaaagcatttctcgaacctatctttttcggccaatcccttcgctgggtgccaaactcacattaggtgaaacagatttaagctccgatatattcgatggcttctcctataacggcgcagcattggtaagtgacgaccgcatgttgccatgggagttacgtggatatgcgccacaaataagtggcatcgcccagactaatgctaccgttaccgttagccattctggccgcgtgatttatcagacaaaagttgccccaggtccatttgttattaccgatataaatcaatcggtgcagggcacattagatgtccagatcgcggaagaagatggcagaacgaatacgttccaggtttccgctgcctccacgcctttcttgacccgtgaaggccaggttcgctacaaaattgcagcagggcgtgcgcgcccggacatctctcatcacgttgttagtgacacatttgtcagcagtgaagcgtcatgggggatgctgtccaacacctcgctttatggcggactcctttttgcgggtagcgactatcgttcagcggcgctcggtatcgggcagaatatgctatggctgggggcgttatcctttgacgttactcgttccagcagtattttcgatgatggtcatgaagagaatggtctgagctatcgtctgaactacagtaaacgcattgatgccactaacagccagatttcactcgcggcatatcgtttctccgagcgagaatttcatagctatgccaactttatcgcgcatcaatataacaataccgatactcaggatgaaaaacagaccatcagtatctcctttaaccagcccattgaccctctacggatgaatctgtacatcagtgcactgcgccagcagtggtgggatggcgatagctccacgacagcatcggttaccgccggatttaattttgatattggcgactggaaaagcttatcgctatcgacatctttcagtacaacgcaatatgaagaaagcgataacgacaacctggtctatctttcactttctgtccctttcgaccttggtcgacggttgaattacgacatgcgtaatagtagcaacacgacgcatacgctctcctggaatgattcgtccgacccgcataacacctggggcgtttccgcgggtatggcaaccgacagaccgaataacggcgcacaatttcgcggcaactatcaacacaccacatcagccggggaattacaattctccgggagttatgccgccagcgactacacctccgtcagcgccagttggaacgggtcaatgacagctacacgcgatggaatcgcgttgcatcgccgcagctttggcaatgaaccaagagtcatggtcagcacggatggcgtcgccgacatccctattcaagggaattccgactacaccaatattttcggctatgccgttgtgccgatgatttccagctaccaaccctcaaccatcgccgtcaacatgaacgacctccccgacggggtcaccgttgatgaatcaatcacacgtgaaacctggactgagggagcaattggctacaaatctctcgtctcgcgttcagggaagaatatcaacatcgtgatccgtctggaaaatggaagttatccgccgctgggggcaaccatacatcaggttaataacaatgcaaacgtcggcatggtcagcgaagatgggcatgcctggttggggggcgtcaacagtggacaacaatttgcagtgcaatggggcgaacagcaaacctgtaacattacattacctgaattattggatatcgccacagagcagttactactaccctgtcattaa

SEQ ID NO: 392545 - DNA, 336 bp, Salmonella enterica
  misc_feature (302)..(311): n is a, c, g, or t
atgaaatcaggaaataaagcgttattagctctggctattgccgcactgacatccagctatgcttttgctgacgttgacggtggtggcggaaaaatcacattcacaggtagcgttattaacgcaccttgcgcaattgagcccgatgatatagataaacaagtgatgttgggtgaagtccctgccagctacatcaatactaacggtcattctgatgcggttgattccagtcttcatttaatcaactgcgatctgccaaactctgataacggcagcggcgtagcggtaactaaagttgatgttannnnnnnnnnacaaccgatgattccagtttgttga

SEQ ID NO: 392546 - DNA, 399 bp, Salmonella enterica
atggatctggcgttcgcctgttataaaaggcatttcggcatacgtcctgtgggataccgttctccctattgggattatagcgagaatacgctggatcttctggaggacgccggttttctctatgacagtagcctgatggcgagagattttgtgccttaccatcctcaacgttggcaggtgaattgggagacgggaaatattgcaggcccagccagcgcgattctggaaattcctgtcagttggtatctggatgattttcccgcactggcgtataccggcaaccaggaggggatgagcgatactgacggtgttctgtatcacgattcaccagcgtcgggttttcatgatagtaaccatggtgagcgatttcatgcccggcatcaaaaatcgctttactga

SEQ ID NO: 392547 - DNA, 249 bp, Salmonella enterica
atgttgaaaaatggtgttgaaaaatatgcgtcagatgttattgaatatccatttttcattcgctatctgagtgcgagtaattattggcttcacgattatgcatataatacgatgttgtttggtatcagcatgaatatcatgttgtattcttttaagctcattttctttgatggcttcgatgtttatctgttattgatttttgctgtgatagcgttgtctttaatgatgagaatacctaacggctggtag

SEQ ID NO: 392548 - DNA, 174 bp, Salmonella enterica
atgggttatctggcggacatccagtttgttgatgttgccgccggggccagccgttacatcgccgccgccattgaaatagccgacgacatcatggaactggcggaaaccgcagaagtgcagagcagggggagtgcgaccaacaacggcaaaagtttcataaacgatcctctttga

SEQ ID NO: 392549 - DNA, 294 bp, Salmonella enterica
gtgtttattaaatcggcgcaggagattgtcgacaaacatggactcgatgggatcgatcttgactgggaatatccggttaacggcgcatggggacaggtggatagccagcctgccgatcgtgataactttaccctgctattaaaagcgcttcgtcaggcaatggacccccaaaaacgggtcaccatcgccgtcggcgcgaatgtggaaagcccgaaaagctgctgggaatatggcgccgatgacaataaccagttagcgaaacaattggcggactcgctggacattaagcgttaa

SEQ ID NO: 392550 - DNA, 207 bp, Salmonella enterica
atgaaacgatttaaagaaatgttttttatcgggatttttacattaatagcggcaggtttttcagtatcggtaatggcagatgcgaaacctcccgaacacacgcccgctgctcatattcatcagggggtgcactggtgtactatagttggtccagatgaagaggagcttcctccacctttaggcgggaaatggccttggtgtacgtga

SEQ ID NO: 392551 - DNA, 408 bp, Salmonella enterica
gtgatcgcccagcacagtgaggatcgctatcgggatggcgatcgttacgactgggccacctttaaccttcgagcttcacaggcgattacccaaaattttgctctgctctatgaagcttcctggcaatatatggatctcaacgccaatggcagaacctatcgcgataacggttcgttgaacacatatcagaacgtgaagggcagtttctataaattgaccttcgcgccgacgtttaaagtaggtaatgtttttgatatcaaagcgcgtccggaaatccgtttctttgccacctggatgaactgggataaagcgctggatcggtatgcgactaacgatgatttcggcagcgagggatttagcgctggaggtacgtggaattttggcgtacaaacggaaatctggttctga

SEQ ID NO: 392552 - DNA, 537 bp, Salmonella enterica
ttgcagaaggtcgaaccgctattacacacattttgcgcccgcgaggctgcctgttatggctggctatcgccggatacaagaatgcaatgccgttcacttattgaaaaaatcttctcgttacggtttgctgatgacgcaaaatgcgcattacgggaagcatccttttttcaattggttacgactattttgcacgcgcaaacggaagcggaatacaacaatacccgttataaattacataagttactgacttatctgcaagagaactgttttcaggagcatgactggcatagcctggccacacaatttcatcttacgaccagaacaacatttcgccatattaaagaggctaccggcttaactccggatagttacctaaagcgtcttcgtctggtttccgcccgcgtaaaattacgtgagacagagatatcgatcaccgagatcgcctatatgtgtggattcagcaacagcaaccactttacgacgctgtataaaaaagtattcggtataacgcccagcgatgagcgccgacgtacataa

SEQ ID NO: 392553 - DNA, 990 bp, Salmonella enterica
atgcacaaatgtactaaggcgttggccatcattggcctggctgcggttatgtcacaatccgctattgcggacacaatgaaacttggtttcctggttaagcagccggaagaaccctggttccagacagaatggaagttcgcagataaggccgggaaagacctgggttttgaggtgataaaaattgccgttccggacggtgaaaaaacgttaaatgcgatcgatagccttgcggcaagcggagcgaaaggatttgttatctgcacgcctgacccaaaactgggttctgcgattgtggcgaaagcacgcggctacgacatgaaagtcattgcggtagacgatcagtttgtcaacgctaaaggaaagccgatggattcggtgccgctggtcatgatggcagccactaaaattggcgagcgtcaggggcaggaattgtaccatgaaatgcagaaacgcggttgggatgttaaagaaaccggtgtgatggcgattaccgccaatgaactggacaccgcgcgccgcagaaccaccggttcgatggacgcgctaaaagcggcaggcttcccggagaaacagatttatcaggtgcctaccaaatctaacgatattcccggcgcttttgatgccgccaattcgatgttggttcagcatccggaagtgaaacactggcttattgtcggcatgaatgacaacacagtattaggcggcgtgcgcgccacagaaggacagggttttaaagcgccggacgtgatcggcattggtattaatggcgtagatgcggtcagcgaattgtcgaaagcgcagccaacgggattctatggttcgctcctgcccagcccggatgtacacggctataagtccagcgaaatgctatacaactgggttacgaaagatgcgcagccgccccgttttaccgaagtgacggatgttgtgctaatcacccgggagaatttcaaagaggagctggcgaaaaaaggtctcggcgggaagtaa

SEQ ID NO: 392554 - DNA, 1515 bp, Salmonella enterica
atgcaacagtcgaccccgtatctttcatttcgcggcatcggtaaaaccttccccggcgtcaaggcgctgtcggatatcagttttgactgttatgccggtcagatacatgcgctcatgggcgagaacggcgcaggaaaatccacacttttaaaaatcctcagcggcaattatgcgccgtcggcgggcactatggcgattcatggacaggcgatgcgctttgcggatacgacagccgcgctgaacgccggtatcgccattatttatcaggagctgcatctggtgccggagatgaccgttgcggaaaacatttatctcggtcagcttccgcataaaaacgggatagtaaatcgcacgctgctcaataaagaagcggggctgcaacttcaacacctcggtatggctatcgatcctgatacgccgctgaaatatctttctattggtcaatggcagatggtggaaattgcaaaagcgctggcgcgtaacgctaacatcattgcttttgatgagccgaccagttcgctctccgcgagagaaattgacaacctgtttcgcgttattcgcgaattacgccaggaagggcgcgttatcctgtacgtttctcatcgtatggaagaaattttcgcgctcagcgatgccattaccgtgtttaaagacggccgctatgtcacaacgtttaccgatatgcgccaggtgaatcatgatgtgctggtacaggcgatggtgggacgcgatctcggcgatatttacggctggcaggcgcgtccctacggcccggaacgcctgcgactggagagcgtgaaagcgccgggcgtgcgaatgccggtgagtctgacggtccgtagcggggagattgtcgggctgtttggcctcgtcggcgccggacggagcgaactcatgaaagggttgtttggcggtacacggattaccgaaggtcgggtatttgtcgatgggaaagccgttgatatccgtaaacctgctcacgctatcgtcgcgggaatgatgctctgtccggaagacaggaaagcggaaggtattattcctgttcattccgtgcgcgataacatcaatcttagcgccaggcgaaagcatgttctgggcggatgcctgatcaacaaggcctgggaggcgatgaatgctgaacaccatattcgctcgctcaatattaaaacgccaggcgcggaacaactcattatgaatctttccggcggtaatcagcaaaaagccattctggggcggtggttatcggaagagatgaaagtgattctgcttgatgaaccgacgcgtggtattgacgttggcgcgaagcatgaaatttacaacgttatctatgcgctggccgcccgtggcgtcgccgtactctttgcctccagcgatctgcctgaagtattgggcgttgccgaccgtattatcgttatgcgggaaggcgagattgccggtgaactacttcatgaacaggcggatgaacggcaggcgttacgccttgctatgcctaaagccagccaggccgtcgcctga

SEQ ID NO: 392555 - DNA, 462 bp, Salmonella enterica
atgactgagcgccaaatccggctgatttgtcagcagtgcatagagcgatgtcgtgcggctgagacatggccgccggacctggctgagtttatttcgctggtttctgaaagcggagctaatgcgtttggtctcacagccgatgcggtgctggcggagtatcgtcactggcgtaacgagtcctggcgctactccggcagtgataaatatccgtggcctcagccggttctgtatcacatctgcaccgagatgcgcagaacgggcgttgagcaccagatgacggaaggcgaactgaaacgacttgcagaacggttactggcgaagtggacaaaacacgtcggtaatggtttcagcataccgccggtacgccgtcgactggcagcgccgcgtcatccggcagggccaaccccggcacaactgatgatggaagaattcagacggcgtaaggcggcgggaaggctttaa

SEQ ID NO: 392556 - DNA, 693 bp, Salmonella enterica
atgccattaagttttccaaatgtatatttaaatacccgtgggagaatagagacattaccttcggatattctcgacagtatacgtaatgcatccagacctcctgatggcgtgactgggccgactgaaatacaggtgcaactacgtgatgtgttataccaggtacgtcatagccccgacgaaggagcatttgaggtggttccatggcgtgagccggggcaggtttatagtgatattcgcaggaattatccagaaaggtttagcaatgcagaaaggctggcaagccaactaaattgtacatggaatatgcctgcaccacctacatttttaacgtttgctgaacaccagaacgccagatatcgtttcaatactcaaccttccaacataaatcattcattacctgccaggattaatctatgtagttttcaggttgaagcaggaagttttgcatgttctgaagaacatttaacttgtccgataacgctggatattccaacagaaggtgtttttgttaaagtatcatcacagtcagatgtttgttgcttatttgatagagaggcattcctcaacctggtgcgccaggaattaaaacaccctttgagtcgggagtctatctgtatgggtatgatagttagaaagagcgaatgtttttttaataccgagcgtgataagtttaccttgatagtatctgattaa

SEQ ID NO: 392557 - DNA, 402 bp, Salmonella enterica
atgtccagagcagaattactacgcgatattgaagcgattgtctcaggagctggtttcgaacttaacagctcagaagccccgatgacttataagaaaaatacaagctacccaaggttgatcgaaggcaaaaatgaaacagctcactttttgctattcaccagctcaggaagtatccagataacggctaaatggcaggaagtgaatggtactgcgatagagaagctgggccatactgcccttgatgcacaaaacactcggcatcagcattacttcgttgtttgtggtgggaataagcttgttaccagagctatcaactatttaaatgctcagcagcatttagccccacgcctgagagcaatggaagtccggcaactggaacctgtactggaagcaatcctttaa

SEQ ID NO: 392558 - DNA, 243 bp, Salmonella enterica
atgagtcatatacctgccgtattaaaatcacgtcctttgaatcttccctgtgttgaaagacctgatgccagggagctggttgatcgctcgcgtgtactggtgaatgcaatgctggaaagcccggatgacgcagggcctaactttgttatgttgcttattctcgccgatcagctacagatgctgcatgatgattttgaagaagaagaagtccggcaactacgggcagaaaaattatctgaataa

SEQ ID NO: 392559 - DNA, 360 bp, Salmonella enterica
gtggtagataacatgaatgatatagaaagcaaagttgtcgactggtatcgggataactggaataaaccggtctttcctttcttctggaagcgtccagtgctaacacctgaaaccagtttatctaccgggaagcatccgtggattgctgacgatgcgatggatatattagacgattacttttccaggtttcaggtgaacagagacaacttcaattttaataaatactggcctaatgaaaatacgtttatgccattaaatttcttgcgtcctaaaaataataaatggcgatggacagagccagaacccctgacacttaatatgttaatcgaatcagcgaaagctggccgttggatttactga

SEQ ID NO: 392560 - DNA, 447 bp, Salmonella enterica
atggacactgttgaagagctaaacggtacatacttctatgatggcacatcaaatttaagtgctggtgagttgtttttctggattatggttgatgagacgcttgatcacttcggtgtcactgatatcgcaggtgttgtcgcagtatatctcggttcaaacagccttactgtggccggaaaatttgccggggcaacgccaggaacatctgtcgcatcggtttactcgcgcaggttgttcagaggccgaatgatgcccgtcagattgccgacctggatcggctttccacccaatgttaaacgagttatgacacaacgactgggtacattcgttggacgttcgatcccagtacttggctgggctgtattagcaagcgatgtcgcattaatcacgttcaaatcagtcaataagtataacactatcgcccatccatcggatcgcctgtggtag

SEQ ID NO: 392561 - DNA, 876 bp, Salmonella enterica
atggatattcgccagttacgcgctttcgtcatgcttgctgaatgcagcagctaccgcgaagcggcacaaaggctgttcatcacgcagcctgccctgaccaaacaaatccagactctggaaaatgagcttggcgtcacgctgttcgtccggggacgtcatggtgcacaaatgacccacacagccaggcttttactggacaaaacccgccagttgatctgccaggctcatgagtatcgggagttcgccctcagcgttgcccggggaacaaagggccatctggcgattggatttgggatttcagggattaagcaggcaccggaatgggtgacagaattccgccaccattacccggatattgaaattagtctcgaagatatgccctcccgacagcagaaggaaggactgctgaacggtcaactccagctggcattcatacgcctgccagtagatccaccattaacgggacactcattaagagctgaatcccttgctcttgcagcaaagaaaacgacgcaggtatcagcccgactggctgaagaaggaaataacttattggcgacattgccactattattgcttacaccagaaagaggaacagggctcgatcgtcaggtgtctcgttttctgcaatttcaccgcgttaccccgaatattgttcagagggcgggagatattcaaaccctgatggcacttgtagaagcggatgctggcgtcgcaatcgtcccccaaagtgcggtgtggtttgccggggatgatgtggagctgatatcattaaacggcccttattccggctgggatgttggactggcctggaatccatcgctggaagatcctgtgcgggatttatttattcagatgataaggaaacaagaatag

SEQ ID NO: 392562 - DNA, 225 bp, Salmonella enterica
atgcggaaacaatactttatttttcttctgaaaggaaagacggtgacaccgcagtcactggaagaaccctgtgccgaaaaggtgatatgcgagatgctccggcagcagttttatctttcgcgtattcatatttttgctgccacaagtcaggaggcgttagagaagtttcagaaattaacccaatactacaccagtgaattatcaccggaggttattttatgttga

SEQ ID NO: 392563 - DNA, 1161 bp, Salmonella enterica
atgttgattcttggcgtgacgaataatgatactgcgggcgcgtgtctggttaaagacaccgaaattctctcggcagtacatgaagaacgttttacccgcgtaaaatgccataagatctggccgcagcagtcgattgattttgtgctgagggagaataacatcaaactggatgatgttgatattattgcctacggctggaaggcgggattcaacgaagactactgcctgaatctctatgttgaaagggtcatcgctgaatgtgtgcgtaactttgacaatgttggagccctgcaaaagagagtcgctgatgaattaaataatgatcgtgaaaaacgagccgagtttgatcaatatatattttcaaacaatctggaaacacgagtcaggtatatcgatcaccatgatactcatgcctggggagcctggctgtgttctccatggaatgatgcgctggttgtcacctgcgatggccggggagattttctttccttcactgttcgccatattgttgatggtaatgagtctgttttgcatcgtgaaaccacaattgacagcctgggatatttttacggcagaataactcacttgctgggatttaccgcaaaccggcatgaaggtaaagtgacggggctggctgcgcatggcgatccacagagagcgctgccattgatgcgtaaaatgatcgacgtttacggccatcgactggttgccagttgcggtgactattatttgccatcctatcagggatattcagaaaaattacgggaagaaatacagaaatactcaccacaggatattgctgcggcggcacaataccatacagaaaatattatctgcaaacttatccggccttatgtccagaatcataagatcaggcatatatgtctggccggagggttgtttggtaatgtccggttaaatcaaaaaatacgtgaattacccggcgttgaaggtgtttttattcttccctgcatgggtgatgaagggttgcctctggctgccgcagtaacggctgcatggagagagcagaaaacacgttgtcggtttactgggatgtctgttgggccacaattcagtaatgaatatgtgcaggatcttattgaagtttcaccagacctgcattgtgatatcccggaagatatgacggagtatataggctaa

SEQ ID NO: 392564 - DNA, 489 bp, Salmonella enterica
atggagtttgggccccgggcattatgcaatcgtagtattatttaccatgcccataatgcggatattaatcactggctcaataataagcttcagcgcaccgaatttatgccttttgccccagtcacaacagaggatctggccgatatgtgctttaaaaactggaagccaggagatattgcctctgaatatatgaccataacatatgtctgcaaacccataatgaaagaacggtgtcctgcggtggttcatgttgataatactgcccgccctcaggtgatccggggcgacaaagatccttttatgtacagattaattaatcgctggtacgaactgacaggacaaccctgtctggtcaatacgtctttcaaccgccatgaagaacctattatcaatacaccgcaacaggcgcactctgtattgcgtaaagggatcgtagatgtggtgatactgaatgataaatatgttctgacccggaagaatatacaatga

SEQ ID NO: 392565 - DNA, 690 bp, Salmonella enterica
atgaatcccagcacgcagaattttacaacattcttatttgatctcgatggtgtcattgttgattctggtaaaacaattgttgaagcatggaagatggcggcgcagaagtacggttacgtcatcagcgatgaactggcaaagcgttttattattggtgcatcaccggagtttacgctggcgatgttgtttcccagggaaaatacccagcgacgcagaatcattcatcgtctggtagaccaatgggaggagaaggccgattatgccctgattcctggtgtaatggttttcctgaaagcattaagtcgccataacgtcaacatcggtcttgtgaccagtagctggccggagaaaattgacaatatcctcaataagaaccagttgcatatgtttgcacatattatctcccgtgatgatgtcacaaaaggtaagcctgaccccgaaccctatcttacggcaatcagccgatttggtagccgtgcagaacagaccctggtttttgaagattccggtcatggtattgctgccgcgcttggagctggagcgaagtgcattgcaataggtaacgaagcacagaagcatgatgtgcctgctgtagccgattttcgtcagctttgtgtcaccagagatgaaccggagtggcggtttttagatagcccattcggtataaaagttgtggccgacagaaattga

SEQ ID NO: 392566 - DNA, 1452 bp, Salmonella enterica
atgatcgttaagcgttttcaccgccccttttcgctggcgacgcgcctgacgttttttattagtctggcaactatcgcctcattttttgctttcgcctggatcatgatccattcggtgaaggcgcattttgccgagcaagacattagcgatttaaaagagatcagtaccgcactggaacgtattttgaataacccgcaggagtcagaatcccgtcgtctcgaaacactaaaaaatgtggtttccggctattccaatattgttattttactggaagatggcaaccaaaacgccctttttcactctccaggcgcgttagatctgcgccagtacattaccagcgcaacgccggataaaaatgcccgccagggtaatgtctatttattctccgcgccagcgctaacgacgaaagcgcattctgtcacacacaacgaccagaccaactggcgtatgatccgcttaccggtggggcaactccccgatggtaaacccgcgtatacgctttatatggcattatcgatcgattttcatctgcactatattaacgaccttaaaaataagctcattatgacggcgttgctgattagcatgatgattatttttattgtgctatttgccgtgcataaaggtcatgaaccaattcgtactgtcagtcgccgtattcaaaatatcacctcaaaagatctcgatgtacgactggagccgcaggcagtgcccatcgaactggagcaactggtaagttcgtttaaccatatgattgagcgtattgaagatgtgtttacccgccagtccaatttttctgccgatatcgcccatgaaattcgcacccccattacgaatctggtcacgcaaaccgaaattgcgcttagtcagccccgtagccagaaagagctggaggatgtgctctattctaatctcgaagagttcagccggatgtcaaaaatggtgagcgatatgctatttctggcacaagcagataataaccaacttattccggagaaaaaaacgctcaatctggcggatgaagtcagtactgtctttgattttttcgaggcctgggcggaagaacgtgaaattagcttgcgctttgaaggtcgagcctgctgggtcaccggcgatcccatcatgctgcgcagagctatcagtaatttactctctaatgcgatacgctatacgccgtcgggtaaaaccattactcttcggataaaagaagcggacgaccagatacatattattgttgaaaaccccggtacgccaatcgcgccggaacatttgccgcgccttttcgatcgtttttatcgggttgatccctcccgccagcgtaaaggggaaggcagcggtataggcctggcaattgtaaaatccatcgtgactgcgcatcagggaaaagtttctgtcacctccgacacgcgcgctactcgttttattttgacattacccaaacacctccgttga

SEQ ID NO: 392567 - DNA, 684 bp, Salmonella enterica
atgaaaattttgattgtcgaagatgagaaaaaaaccggagaatatttgacgaaaggtctgacggaggctgggtttgtcgtcgatctgaccgataacggtttaaacggttatcatcaggcgatgaccgctgactacgatctgctgattctcgacattatgctccccgacgtgaacggctgggacattgtccgtatgctgcgcgcggcaaataaaggaatgcccatcctcctgcttaccgccctgggaaccattgaacaccgggttaaagggttagagttgggcgcggatgattatctggtcaaaccgtttgcgtttgccgaactgctggcgcgcgtcaaaacgctgttgcggcgcggggcggcggtgatagtcgaaagccattaccaggcggcggatctcatgctcgatcgggtaagccgcaaagtaacacggaacggcgtgcgtataacccttaccagtaaagagtttacgctactggagttttttctccgccatcagggtgaggttttaccccgctcattgatcgcctcccaggtatgggacatgaactttgacagcgataccaacgctattgatgtggcggttaagcgactgcgcgccaaaatggataatgattttgaacccaagctgatccagaccgtacgcggcgtcggctatatgcttgaggtgccggatgatcgttaa

SEQ ID NO: 392568 - DNA, 1323 bp, Salmonella enterica
atgcctgagtatcagcgcccggcgtccccggtcccccaacagttctctgtacgtcataacgcgctggtgacgacgcctggcgaatttcaggatagcggctggcgaaatttttttgtggacccgcaggtgaaaacgctgattgacgaggcgctgcgctacaaccgcgacttacggatggcactcttaaaagtgcaggaagcacgggcgcaatatcaggtgactgatgccgatcgttacccgcagttggatgcgcaatccagcggtagctggcaaggtaatattcaaggcaatagtgcgacggatcgccagtacgatgccgggctaaatttaagctttgaccttgacttctttggtcgtttaaaaaatatgagcgaagctgatcggcaaaactatttggccagtgaagaagcgcgtcgtgcagtgcatattttgcttattgcaaatgtctcacaaagttattttaaccagcgtctggcctatacgcagttacaggtcgcagaagagacgctgcgtaattatttgcgctcttatgcgtttgtcgaaaagcagcttttaaccggcagtaccaatgttctggcgctggagcaggcgcgcggtatgattgaaagtacccgtagcgaaatagcgaaacgtaaaggcgaactggcgcaggcgaataatgccttgcaactgcttgtcggacgttattccagcttgccggacgataaccatcgcagtcgtggtgacatcaacagtgtggtattaccgccggcgctctcctcgcagatattattgcagcgcccggatatcatggaggccgaacatcaactcatggcggcaaacgccaacatcggcgcggcgcgggcggctttcttcccttcaattaccttgaccagcggtgtttccggcagcagtagcgatctttcccgtttatttgatgccgccagcggtatgtggcgttttatgccaaaagtagacatcccgatatttaacgccggacgtaatcaggcgcagcttgatatcgcggaaattcgccagcaacaggcggtggtgaattatgaacaaaaaattcagaacgcgtttaaacaagtcgccgatgcgctggcgttacgacaaagcctggccgatcaaattaccgcgcagcagcgttatctggattcattacagataacgttacagcgcgctaaagcgctctatcaacatggcgcggtgagctatatcaacgtgctggatgcggagcgatcgcttttttccactcgacaaacgttactcgatcttaactattcccgtcaggttaatgaaattacgctatttaccgcgttgggcggcggctgggtagagtag

SEQ ID NO: 392569 - DNA, 345 bp, Salmonella enterica
atgcattatactgttaaaaccgtgctgtttagccttttctcaaccgtggcgtttaatgtcatggcgaatgaccatcagcatcaggaaatggtaaacacagcgccagccgcacagcagcaggttattaacgctacgggcgtggtacaggcagttgatagcgataataacaaaataaccattcaccacgatccgattccgacggtgggctggccagcaatgacgatgcgatttacgcgcacgccggatacgcagtttactacggttaaacccggtgataaggtcgcgtttagttttgtccagcagggtaatctttcattattgcgcgatattcatacccgccagtaa

SEQ ID NO: 392570 - DNA, 1284 bp, Salmonella enterica
atggcgtctttaactctaaaaacggccacgcttattattgccagtatgctcgcgggggggatgctttccgcggctggctatgcgtatttttcccgcgctcactcttctgacaatacggcggccccggaaaaccgcaaggtactgttctggtacgatccgatgtatccgaatacccgttttgataagcctggtaaatcgccgtttatggatatggacctggtggcgaaatacgccgatgaggagacgggcgacgccgcctcagcgggtattcatatcgatccgacccaaacgcaaaatctcggcttaaaaacccaaacggtccagcgggggccactacgttatacacaaacttttccggctaacgtcagttttaatgactatcagtctgtcatcgtacaggcccgatcggcgggatttattaataaagtctggccgcttacggttggcgataaaattaaaaaaggccagccgctgattgaactgacgattcctgattgggtggaagcgcaaagcgaatatttactgctacaggaaactggcggtacggcgatacaaataaaggggattctggaacgtctgcgactggccggaatgccggaagaggatatccgccgtttaacgtcgacgcatactatccagacccgcttcacgcttaaagctcctatcgatggcgttattaccgcctttgatttacgtaccggcatgaatatcgcgaaagacaatgtggtggctaaaatccagggcatggacccggtgtggattagcgctgcggtacctgagtcggtggcgtggcttactaaggacgcttcgcagtttgttatttcggtaccggcctggccggggaaacggttcaccatcaataaatggacggtgttgcccggcgttgatgccgcgactcgcacattgcagttacgtttgcaggtgaataaccctgatgaagccctgaaaccggggatgaacgcctatctgaaactgaatacccaaagcgagcctatgttgctgataccgtctaaggcgttaattgataccggggcggaacagcgggtgattaccctcgacgccgacggtcgttttgtgcctaaacgggtatcggtatttcacgagtcgcagggggtaacggcaattcgtgaggggcttacggagggagagcgagtggtctccagcggactgttcctgatcgactctgaagccaatattgcgggcgcgctggatcggatgcgtactcaggagagcgggatgaaaaagggatccgctacgcccgttaacgatgcgcacgcacactga

SEQ ID NO: 392571 - DNA, 1014 bp, Salmonella enterica
atgccgatcactatagggaatggttatttaaaaagtgaaatatttatcacccccccagaaaacacaagagaagcatggtggaaagtgttatgggaaaaaattaaagacttctttttttctactggtaaagcaaaagcggaccgttgtctacatgagatcttgtttgccgatcgcccacccactcgagaacggcttacagagatttttttcgagttgaaaacattagcctgcacgtcacacagagatagatttcaggtgcataatcctcatgaaaatgatgccaccattatttttcgcatcatggatcaaaacgaagaggatgaactgttacgcatcacacaaagtaccgatacctttagctgtaatatcatgggaaagtcttatcttttcatgaaagattgcccaagcattttaaaatctcatccacaaatgacgctcattattaataaaaggtatagcgaaaccgtagattatcctctcccctcgacattatgtcttaatcttgctggcacgccaatgctatcggttcccttagacaacatagagggatatttatattctgaatggagaaaaggaaatttagatgcgtggaaagcgcaagaaaaggctgcttacctggcaacgaaaattcagtccgggattgaaaagacaacgcgcattttacatcatgcgaatatatccgaaagtattcagcaaagcgcatttttagaaacaatggcgctgtgtggtttaaaaccgctggaaacaccaccaccgcatacccacatacctattgaaaaaatggtagaagaggtcttactggcggataaggcgtttcagacgttcctcgtaacggatgccagcgccggtcaaaacatgttagctgagataatcgaagccatctctgataaagtttttcacgctctttttagaacagatccccaggctatacaaaaaatggcggaagaacagttaaccgctttacatatccgatcgctccgacaaggcggcaacagattatgttgttttttataa

SEQ ID NO: 392572 - DNA, 546 bp, Salmonella enterica
atgaaaggaaaatttgccgctaccgtattattcaccgccatggggcttgcttcatctgcaatggctcaggatggtcaggttaattttaccggcaaaattatcgaagcaggttgccagattaacggcagcgtcaccagctctcaggaggtcaaactgggcgaagtgtccaaaacggcgttcgccggcactgctggcaccacggcggcaaccaccaagttttcactggtgttaactgcttgtccagccgacctgctgggcaaaccggttgccgtaaaatatgacggtacgccggacactctgaacaacgactacctgcaaatcactggctacggtactgacggcatcgctaaaggcgtggcgattcaactgttgaacagcgataacagcgaactgccgctgggtactgaatctaagtcggttacccttgcctccgatgcggcagaagaaaccaacctcgactttttcgcccgatatatcgcgacagaagatgaggtaactgccggtaatgccgatggcgtcgtgaactttaccctgacctacaactaa

SEQ ID NO: 392573 - DNA, 678 bp, Salmonella enterica
atgaataaatatagtttacttaccaccgccacgcttatatttcttacaacgagcgcacaggctggcgtgattatcggcggaacccgcattatttataacggcgataaaaaagaaacgtcgatcagtgtaaaaaacccggataaatcttcttatttaattcagtcatggagtgatgcgggtgaaaagagtagtgataaatcaccgtttatggtcacaccgccgctctttcgtttaggtgccggtcaggaaaataacctgcgaattattcgtactggcggcaatctgcctgaagatcgtgaatccctctactggatgaatattaaatcgatcccgtcaacgactgaaaaacaggataacgttaataccctgcaaattgcggtgaaaacccgcattaagttgatttaccgcccgcagagtctggcggggcagccggaaaacggcgccacgaagttaagctggcagcgcagcggcagtcgcctgaccgtgaccaaccccaccgcctactatatgaatttcagcacggtgaaagtaggtgccagcacggtgaaagatgccacctatgtggcgccgatgagttccgccagctttaccgttcctactggcgccagcggcgacgtcacctggacgcttattaacgatttcggttccattggcgctgaacatcgctcaaccctgtaa

SEQ ID NO: 392574 - DNA, 2553 bp, Salmonella enterica
atgaatgcagacgcatacaaaaaaagaatgacgctcagtcagctcgcctgctttatcgcgttgcagtgcgccctgccagtctgtaacactgcgtttgcccgcgaatattttaacccggcgctgctgggaatcgacgggccgggaaaagaccttaccgatctttccgcttttgaagagggcgtcggtcagatgcccggcgcttatcgcgttgacgtcatcgtgaataaaacgtccgcaggcgtgcatgatgttaattttgtaatgcaaaaagataagacaggcaacgccacgctacaaccttgcctcagcgttgacgaactgcgcgaattcggtattcgtaccgacacatttccaggcctcgtcggtcacggcgactgcgcaaacctggcgtcgatcccgcaggccagcgccgagtttgtctttgaacgccagcagttacgattgtcgattccgcaggccgccgtgaacagccacgcccgcggctatgttgcgcccgaacggctcgatgaaggcatcaacgccctgttgctcgactataacttcaccggcgctaataccgaagcacgtcacggcgatatgaccgattccgacagctattacctgagtctgcgccctggcctgaacatcgggccctggcgcattcgtaactacagcacctggaatcgcaacgttaacggcaacaacgctgatgaaagctgggattcgctctatacctacgcgcaacgcaatattatcgcgctgaaaagccaactgacgctcggcgacagcaccgcgccgtctgaactgttcgacagcgtcccattccgcggcgcgcaactggcctccgacgatgacatgttgcctgatagcctacgcggctacgccccggtggtacgcggcatcgcccgtactaacgcccaggtgatcatcaaacagaatggttacaccatttatcaaagctacgtttcgccgggtgcgtttgaaattaccgatatgtacccgaccggcagcagcggtgatcttgacgtcacgattaaagaggccgacggcagtgagcagcatcagacggtggccttcgcttcgctgccgattttgcagcgcgaaggacggctgaaatacagtctgaccagcgggcaatatcggccatatgatagcgatatcgacaaaaagatgtttacccaggcgacggcgatgtacggcttacccgccgggtggacgttatacggcggcgggcaattctctcagcactaccagtccctgctctccggtgtaggtaagaacttcggtacgctgggcgcagtctccgtggatggcacgcaggcctggtcaaaacaaaaagatcaggataaagaaagcggccagtcctggcgcgtgcgttacagtaaaaacattctggaaaccggcaccaatatctcgattgccggctaccgatattctacctccggctactacaccctgtcggaagtactggacacctggcgtgataacgactggcagaccaataacgatcgccgccgcaatcgggcggaaatcacgctgaatcagaatatcggcaatagcctcggttccctgtcgctaaacgccatcagcgaggattactggaacagcgaccgcaaaatgcgctccatcggtgtgggctatagcaacaactgggcgggcgtgacctggaaccttaattacagctataaccgcaacacgacggaccaggacgataacaacaaggtttacgaggaagatcaggttttctcgctgaatatcaacgtgccgctcgaccgctggttaagcaacagctacgcctcttacagcctgaatagcagcaaacgcggggataccagccatacggtgggtttaaacggctcggcgctggaagaccgtaatctgaactggaatatccagcaaagcgaaaccaaccacggcgaaggtaacggcggctatgccagcctcgattaccagggcacttacgcccgcatgaataccgcctacagctacgaccatgaccaacggcgcgtcagctatggcattgaaggcggcgcggtggctcacgcccacggtctgacgctcagccagtcgctgggcgaaacgtctgcgctggtggaagcgccgggagcggcaggcgtctccgtcagcaaccagactggggtaaaaaccgacttccgcggttataccatcgtgccttatgtcacgccgtatcgcgaaggtaccgtctcactggataccgccacactaccggatagcgcggatattgagctgaccagccagaccattacgccaacccgtggcgcgatcgtgcgggcgcattttgatacccgcgtcggtcgccgcgtactgatgacgttgacccgtagcaatggcgaagtcgtgccgtttggcgcgctcgttgccgatgggcactcaacgaccaattcagcgattgtcggcgatggtggacaagtttatctctccgggctggcagataagggaatactcatcgcaaaatgggggcattcagccagtaaacaatgtcaaatcaactggcagttacccgatgaaacaccgaaaagcggcgtcgtcgaattaaatgctcggtgtcaatga

SEQ ID NO: 392575 - DNA, 981 bp, Salmonella enterica
atgagaaaatctctaatattcgttctaaccatcgcagtgaacatggtgatgattaattatgcccaggcaaattatattggggacgatattaatattaaagatatgggttatgacctggacgcatttacccttccagctactgtaggagacagtactggctaccatgataacagttcaataacgtatcatgaagcccaaaccggtagttctacaggttatgtaaatctctccattagcggtactctattaggggataatctgtgggcaaccagtaatccaggaataggcatccagtatcgtctggaatccgggagcgcagattttacccctcgagatactgaaacttcaccagactatcgtgtaaacctgaccggttccggcgcgatacaaacaagttattttcatgtacgttatcgactagttcgattgctggataaaatccccccagggaaaataaccagtttgcccatcgtcacgttaaacgtgcataacccggaaggtgaaggcacaccgttaatttcaggaattgtgctttctaagattaccagtaatatcaaaacgactgcatgtaatatcgatgcgccaacggaaataaaactaccgacattatatggttctgatctggttaatggtgcgcaaaacgttacaaaagcccccactattatgctcaggaactgccccggcgcaattgatggtattacttataaatttagtgctgtctatggtactcacgcagcagaaaatggcgtattgaaaatggttcaaggcgagggctatgccaacggtgtctatgttcagatacaaaatgcggatggctccgcgtataaaaatgtcaacgcatcggttaatctcgctgattataacggctccggtgactatgctatacccgattttaaagtggcctattttattgatgatgccaatacggtaaccgctggcaatgtgaaaacagccatcgaaattaatttgagctataattaa

SEQ ID NO: 392576 - DNA, 525 bp, Salmonella enterica
atgaatatcgcaaataaaaaaataacggcattatgtattctggcctgcggagggcttttttcggcatccagctctgcccttactatcgatattaccggcacggtcgttgcctctccctgcactgtcaacggcggcgatgaatcactggacgtgaatttaggtaataatattgaggccgatgaaatgtcatcaccaggaaacgccacaaactggaaaaatttttcgctgaagctcaccaattgtccgccttccaccacctctttcagcgtcgcctttgccggtactgccgacagtgacgatgccagtttttatgccaacaccggtaccgccactaacctgaaactggcattaaccagtcaggacggtagtaccgtctttaacaatggttcctcgctggaaaatgtcctgattgataccagcaccaacgcctacagtctggatctgcgaacccgcgccgagtcaaaaggcctcgtgatgccgggtaccattaaaggccagatacaggccacctttacctaccagtaa

SEQ ID NO: 392577 - DNA, 525 bp, Salmonella enterica
atggcgcaacagataaacagacttctccccgcgctggcttgcctgtggggaatctgcggggtccagggcgtgcaggcgaccgatatcaatatcaatggtacggtagtggcctctgcctgcagtgtggataccggcacagtagatcagacggttaccttcgaacaggcccgcgccgttgactatactaaggtgagcgataccagtgaatggcaggattttgagctcaccctctccgcctgcccactatcaacaacgcaggtgacagctcagttcagcggcgatgccgataacgacgatagcaccaaattcgctaacgctcagggcagcgccagcggcatggcgttacagctcatgacgcgcgaccatcagacggagatttcgccgcagggtacgctgacggtcgacgtggataaaaacagccgacgagcagtgtttcctctttccgcccgtatgtatacgccgacaggacacgtaacatcaggtgagttccagacaacggttcagctcaccttcacctatcagtaa

SEQ ID NO: 392578 - DNA, 378 bp, Salmonella enterica
atggcgctggaaaaaggtattgcgcaacaggtggaggcgtttattgcatctggacgcccctctgttcgtcatcagaatattgatgaccggagagcggcatatgttgccagtacggcgctcgctggcggaacggaaagtcgcgtagaagtggatgagtttgtactggaaggaatgacgtttcgggtgttttctccccgccacgcgtcaagcgcgctcccctgtgtgatctattatcacggcggctgtttgtttgagcgccttacggcgcagggcatcaattgcacctgccagcgctacctcggcgtcattcaccgattcttccagcctggtggagtcagccagagcgcgcgcagcgcgatacaggatattgcgtggtga

SEQ ID NO: 392579 - DNA, 717 bp, Salmonella enterica
atgaacgctcttttcaaaaaaggagtgctggttgctgcgctggcaatgacagcttcctccgtaatggcggctgactctattgacctgaaagtcaccgggaaaattattccgcctgcttgtacgccggcatttgccagtggcggcggcacagtcgatttcggtgatatcctgacctcttctcttcagattgcaaaagacagcaagctgccagaaattaaagaagttccggtcactattacctgtgaacagccctcccgttttggcgtaacattcactgatcagcgcgcggattcccgctccacaacggaaatggattctctttttgccagcactgattttgctcctaccccagactactattttggcttaggttttacctccgaacagaagcaaattggtgtgtatgccttaggtgttaacgaattaggagccccaaatgccgacggtgaaacgcgttacccgattttcagtaccgacggcggtactacctggactagcgggcatgacatctctgcgggcacaggctattccccaatcaaaaacaacggtacagatattttagcgtttgctaaagataacgaatcgacagtctctcctgaaacgtctctcaccttcaggattggcgtttcggcggttatccaggatcttaataccctgcacgtgactgatgaaattacgctggacggtttaaccgcaattaacctggtctacctgtaa

SEQ ID NO: 392580 - DNA, 693 bp, Salmonella enterica
atgcggaatattattaagggagcagtactgagtattagtttgctttcatctgcggtggcaatggcggcaggtatggtgcctgagacctcgctgctactggtgaacgaagacgagcacggcgccagtatggacgtgaaaaataccgatgaacaggcgcaactgctgtacaccaaaatcatcaatttgccggatgataccagtggaccggaattaattgtcactcagcccgtagtgcgggttgaagggggtaaaattcagcgtgtacgttttgtattaaaagacgcagcgcaaaaaatgaacgttgaacatctcaagcgcgtcgttttttccgctatcccccaaatggaaaaaaacaaagtcaagatgctgttcacccagaatttacctgtgattattcgcccggcggatttagcgccaatggccgatccatggaaagatttaagctggtcattacaggcgggtaatgtcgtggttaaaaacgatacgccttatgttgttcgtcttgagcaaaacgtgaaagtattgccctcaggcaccatccaaaagttagacaagacgtatattttaccaggccaaaaaatgacggctaaaccacaaaaaatggccgctaacgcgacggataaaaaagtcgagttttatccggcaacgcgctatggctataaagtagataaattcattgcagatataaaataa

SEQ ID NO: 392581 - DNA, 2445 bp, Salmonella enterica
atgctaacaccaaaacaaaacgtacgtttgatggcttttactttgagttttctggcgttaagtgtccgtgccgaaataaataacctggctgatagttctatgcctctggcccgcgcattcttcgactcttctatgcttaaaaataatggtcttgatcctgagttggcagagtatcttgcggtgggggcacgcttcacgccaggctatcataacgtatcgctcaagattaacggcgacgagaaaggcattgtccccgcgaaaattaatgatgccgggcagctttgtgtcgataaagaattccttgctgctgcgggtctgtttgaaagtacgaaacgtgaaacctgtccacaactctctcaatactggcgcaatgcgacggtaaatttaattccggaaacggaaaccattgaactggtggttccgttcgaagcgattaacccagaaagcggacgaaaatattcgaatgttcagggtggaaacgccgcgatgctgaattattccgtctttggcacccattataaatatagcggtgacaccaacgataattttcagggcaccctggagatgggctttaattccggcgactggatcttccgcagcacgcagatgctttctgatggtagccagcagggtttttcatcagactcgctctttacttacgctcaacgcacatttgccgattacggcgttatggtgcagggtggtgagatcaacgtggcaaacacccgctttagtgtaccgacaatctatggcgtgcaggttatgccggataccgcgctcgcacaaaacaaccagagcggcattgacgttaccggtatcgcccgtagcccgcaggcgagggtagatatccgtcagagcaaccaactgatttactcaacgcttgtccccgctggcccctttactgtggcgaatgtgccggtgattagcgctacaaccgatctgaaagtcacagtcactgaaaccgacggtagcgagtctcattttaccgttgccgccagtagcttccgtggtaacagcgtgatgcactccggcggtttttccttctccgtcgggcggataaaagatctggactcccgctttgacgaaccgtggattatggcgctatccaacggctggacattgaaccgccgtgtcagcaccgcagcgggcatggtgatggctgataaccactattacggtttttccggcaacctgaacatggtaccggtacagaatctctatacctcactgggtttccttgggtcgatagataatctgtcggctacggacggcgcaaaaaccacactcgatatcaactatgggctgccgtacaacatggctatctcgctgggaggaagctatggctcgccgcattatcgggagctgtctgaactttacgaagaagacgacgacgatttttctccaacgaaatatgacaccagtgtcggcattaactggtcgcatgagacactgggctatttttctgtgagctattacagcaataaaacctgggattcagattacgacagccgccgtatcattacctcctggtcaaaaacgtttaagtgggccacggttaacctcaactggcagtcagacgtcagtaacgatgaggatatggatgatgacatggtttatgccagcatttcgatcccgcttggacgaggcgtctcaaccaatacctggtatcgtgaacgcgaaggggaaacttcctacggttcgcgcgtctcgggttcgcttagccgtaatagtcagtacacattaggcgtgtcacaagatcaggatgaaaataccacctcctgggatacctcgctgagcagcaaccttcattacaccagtcttagcctcgcagcgggtggtgataacgacaacaataataattactcggcgcaacttagcggcggcatagtggctcacagcaacggggtgactttctcgccgtatgcgctcaacgacacttttggcattgtttctctggacaagccagtagcgggtgtggaaatcaatacctcccgcggcaccgtatggacagataaatgggggcaggcggtgatcccctcgttgacgccttatcagcaaagttcgctgaaccttaacacccaaagcttaccgggaaatctggatgtgaaaaacggtaaagcggtgctgaaagcctcgcatggcgcggtggcgaagtggcagtttgatacgttgagtcagcgtcgtgttctgttaaacattacgctggaaaatggcgcgccgttgccaaaaggcgcgtctattacaagtgataataacgaatatataaccagcgcgccggagaacggaatggtatttctgaatgatatttccgccagtcagacgctgctcgcgaagttcaacggcgaccggtgcagactgatatttacgctgccggaagcggacccggataaattttacgaagaagtgacagggaaatgtgtcgccggaacagggagtatccaataa

SEQ ID NO: 392582 - DNA, 579 bp, Salmonella enterica
atgaaaattgccgccgcgttaagaagtctcgccgccgtcactgtactgtcgctgtttagccattctgtgcttgcgagcgatggatgccagataatttcaggtacccagcaggtagattatgggcgttttatccgcgatgacatgcgtagcgggaaaaccgatgtagacggtatcgcctaccagtggcttgctgcgcagacccgtacgtttgacgtcacggtgctttgcgatgagccacaaaaaatccgcctctttattgatggtccggcgcgtaaaaatacggttttccgttttgggcagaatggcgcgataaacctgaaagtgaaaaatggccgcatggatgatcggtctgtacaactggcgaccggcgcgcgtggcgcgacgttgacccagggagcggattcacaaacggtgaaacccggcttcggcattgcgccgtttgatggacaggtacttaccgggcgtcagtttgtggtgacggtagaggtaacaacctatctttcgcagaaggctttccagtcgcgtgataatgcgcaaatcgaagagatcctcaacctcaatttcgaagcgcaaccctga

SEQ ID NO: 392583 - DNA, 834 bp, Salmonella enterica
gtgccgaactcaaataataaaactgcaatgcctccgcttcccgccggagtgatgcggcattcagtttatcaattgccgcatctcactcgcccagtccaggacagtcttgcagaggaagttcccgttgcgctggtgtacaacggtatttcccatgtggtgatgatggcctcgccgaaagatcttgagcttttcgccattggcttttccctctccgaaggcattattgaacacccgcgtgaaatctatggcatggacgttgtgtcagcctgtaacggacttgaagtgcagattgagctttccagccgtcgatttatggggctgaaagagcgtcgtcgcgcgctggccggacgcaccggctgcggtgtttgcggcgtggaacagctcaatgatattggtaggccggttcagccgttgccgttcacgcaaacctttaatctcgcccatcttgatcgggcgctcatgcatctcaacgacttccagcccatcggtcaactgaccggttgtacgcacgccgcggcgtgggccatgccgtcgggtgaactggcggggggccatgaagatgtcggacgccacgttgcgctggataaactgctcggtcgccgcgccacggagggtgaggaatggcggcagggcgcggcgctggtttccagtcgcgcgagttacgaaatggtgcagaagtcggcgatgtgcggtgtggaaattttgtttgcggtttccgctgccaccacgctcgcggttgacgtcgctgaacggtgtaatctcacgctggtggggttctgtaagccgggtcgggcgacgatttatacccatccgcagcggttaatcgcggactaa

SEQ ID NO: 392584 - DNA, 342 bp, Salmonella enterica
atgaaaaccagtaatctgaagctatcacaagacgttgaagttactctggaagatattggtagtgtcattgaggaaaaaccgttctatgaatataccgcggtagcagatggagaaagggtggaatttagtatttttgccgtggacgaaagttcacagggcacagagcttgtagtgaaattcccgaatggtgatacttattcttctggcggcattgagtatattggcggcagttgggtgtcacccgcgttaatcgcaggtaacacctatatttttattgctgagaatatgctggatgttgagcaggtgatcggcattcatatggaaagcatttatcccgcttga

SEQ ID NO: 392585 - DNA, 291 bp, Salmonella enterica
atggaccaccgttttcagcgtaatacattgattttctactgtgatactctgtgggttaaatttaatccccaggctagcgatcaggtccggggaaatgcaggtactatcaagatcatcctgaatattaacctcataagttccacgccattctttattgacataaatgtccatctcataaacgccagccatgggtttggtgctgtcaatctgataacgggacaccttttcacctttcaacccaccgaacataaagttagtatcgaacgtttcttcttcagcccaggcgggtga

SEQ ID NO: 392586 - DNA, 330 bp, Salmonella enterica
atgtttttgatggggaaagctaccaggttgcctggaataaatatcttccgcaatcagccacccatttttctctggcagcgtatcgctactcatcacgtgattatcgcacttttaacgatcatgtctgggctaataaccgggacaactatcgtcgcgatgatgacgatatttatgatattgcagattattatgagaatgactttgggcgtaaaaataccttcactctcaatattaatcagacgttgcccgatgggtggggatattttactgccagcgccctgtggtgcgactattgggggcgtagcggcactggaaaggattatcaactaa

SEQ ID NO: 392587 - DNA, 837 bp, Salmonella enterica
atgagaataaatatcaccaaagtgctgaataataatgttctggtgattgttgatgaacatcaacgtgaaaaagttatcatggggagagggattggttttcagaaaaaaccgggcgacgacatcgatccaaaccttattgaaaaagagtatgcgttaagcagcaacgagctgactggaagattaagcgaactgcttggccagatcccccttgaggtcatgactacatgcgatcgcattatatcgttagcgacggaaagattaggaaaactgcaggatagcatcttcatttcgctgaccgatcactgtcagtttgcgattaaacgattccaccaaaatatattgttggcaaatcctttattatgggatattcagcgactatatccgaaggagtttaagctcggagaagaggcgctgattattattcaaaaaagactaggggtttcgttaccaaaagacgaggttggttttatcgccatgcatttcgtcagcgcgcaaatgaacgtgacgatgacggatgtagcaggggcgacgcagatgatgcgtgaaatgctacagctgattaaatttcactttggcatcagctatcacgaggaaagtctgagctaccagcgtctggttacgcacctgaagtttttatcctggcgcgtactggaacgaacctctatcagtaatgatgatattgagttgcagcaggcggtaaaacaaaattatcctgaagcatggcgctgtgcagaacgtatcgccatctatattggtttacagcaccagcaaaaaatttctgcagaagaaattatgtttctgacgattaatattgaaagagtacgtaaagagcattaa

SEQ ID NO: 392588 - DNA, 1869 bp, Salmonella enterica
atgacggaattagccaaaaaaattgtggcgggtgtcggtggggctgaaaatattatcagcctgatgcactgtgccacacgcttgcgctttaaattaaaggacgaaagtaaggcgcaggctgaagtactgaagaaaacgccaggcatcattatggtagtggaaagcggcgggcaatttcaggtagtgattggtaatcatgtggctgacgtctatcgggcggtcaatcatgccgcagggttaggcgatcggacgtcaccgcagcctgacgtggataaaaaagaaagcctgattaaccgttttatctatgttatttccggtatttttaccccattgataggtctgctggcggcaacagggatcctgaaaggaattctggcggtagccgttagctgccagtggatgtccgaacagagcggaacctatttggttctctttagcgccagcgattctctcttctattttttcccgatcattttaggctacacggccggaaagcgattcggcggcaacccttttgtcaccatggtaatcggcggcgcgttggttcatccgctggtgctcagggcgcttgaaagcgaccaggttcatcattttttgggcattccggtcacactgattaactatacctcctcggtgatccccattattttctccgcctggctttgcagcatgatggagaagaagctaaatggctggctgccttctgcgataaagaatttcttcaccccgctgttttgtctggcgattatcacgcccgtcacctttttggttgtgggccctttatcgacctggattagcgagctaattgcggcgggctatttgtttctctataacgccgttccctggtttgccggtgccgttatgggcggcttatggcaaattttcgtgatgtttggccttcactggggactggtaccgctgtgcattaataactttacggttctgggttatgacaccatgatgccattgctgatgcccgccatactcgcgcaggtgggagcggcgctcggcgtcttcctatgtgaacgagacgcccagaaaaaagtggtggcggggtcggctgcctttaccgggttgtttggtatcaccgaacccgccgtctatggcgtcaatctgccgcgtaaatatccctttattatcgcttgtattagcggcgcgctgggcgcggcggtgatcggtcaggcacaaacgaaggtgtactcctttggtctgccgagcatctttaccttcatgcaaaccatcccttctaccggcgttgattacacggtatgggcatgcgttattggcggcgcgatagcgcttggctgcgcgttgctgggaacgctggtttttcatctcttttttaatcagaaaacggtagaagcgccagcgtcggttgcgccgtcaatgaatagcactccccgtaaaagcgatgatttaagaaccgttttctcaccgctaacgggtgacattattcccttaaccgaaacggcggacgccacttttgctagtgggttattaggtaaaggcattgcgattaagccttccgtgggggaagtggtttctccagtcaacgggcaaattgcctcgttattcgaaacactgcacgccattggcattgagtctgatgacggcgtggaggtgttaattcatgttggaatcgatacggttaagctgaatggacaatattttacggcgcatataaaaccaggcgatcgcgtaactattggcgacagccttatcactttcgatattccttctattgttgcggccggctttgacattaccacgccggtagttatcagcaatagcgatgattttaccgatgttttgcctctggcttcagaaaaagtgaatagcaaagcgtcactgctatctatcatccagtaa

SEQ ID NO: 392589 - DNA, 1407 bp, Salmonella enterica
atgaaagcatttccggaatcattcctttggggcggcgcgacggcggctaaccaaatagaaggcgcatggttaaccgatggtaaaggactttcaaccgctgatttacagccttatggcgtcatgggaaaaatggagcagcgtattcctggaaaagagaatattaaagatacggccattgatttctaccatcgctatcctgaagatattgcgctgtttgccgaaatgggatttacctgcctacgcgtatctattgcctgggcgcggatattcccgctgggcgatgagcatgagccgaacgaactgggactggcattttacgatcgcttgtttgatgaactttccgcatcgggtattaggccgctggtcacgttatcacattatgaaatgccttatgggctggttgaaaattatggcggctgggcaaatcgtgacgttattagccattttgaacgttatgcgacgacggtattcacccgttatcagcataaagtgaagctgtggctcacctttaatgaaattaatatgtcgctgcatgcgccgtttaccggcgtgggtctggcggaaaatagcgctaaggcagaggtttatcaggctatccatcatcagctggtcgccagcgcgcgggcggtgaaagcctgtcacgatattattcccgatgcgaaaatcggcaatatgctgctgggagggctggtctatccgctgagctgtcacccgcaggatatgctgcaggcgatgcaggaaaaccgtagctggctgttttttggcgatgtgcaggcgcgtggcgaatatcctggctatatgcgccgctttttcaaagagcacaatattgccattgagataaccgatcgggataaagccgacttacagcatacggttgattttatctcattcagctattacatgaccggatgcgtttcccatgatgaaacaatcaataaaaatgcgcagggtaatatcctgaatatgatccctaatcctaatcttaaaagctctgagtggggatggcagatagatcctacaggattgcgggtattattgaatcagctctgggaccgctatcaaaagccgctgtttatcgttgaaaatggtttaggcgctaaagatacgcctgaggccgatggcactattcaggaccactatcgtattcaatatttaaatgaccacctaattcaggttaatgaagcgattgaagatggtgtgcaggttatgggctataccagctgggggccaattgatttagtcagcgcgtcacattcacaaatgtcaaagcgctacggctttatttatgtcgatcgtgatgataacggacagggaacccttcgccgcatccgcaaacaaagcttctactggtatgccgaggttattcgcagccggggattatccttgaaacgtcgcgacgaagaataa

SEQ ID NO: 392590 - DNA, 1617 bp, Salmonella enterica
atgtttagaaagaacgtcattacctctgctatactttttatggctcctttatcgataagttataatacgtttgcagaatcgctgtccgttgagcagcggcttgagctgcttgaacaggcgctaaaagatacgcagaaggaactcaagaaatataaagacgaagagaataaaaaaagtatcgttcgggtatcgcaggaacaaccgggcgtcactgataaaggtaatgctgccaatccttttcctgcccaaaagacgacgaaacctcaggctgtactggtcaaaaatgaaaatgccgaggctgatggctccggcagcatttactcatcaatgtcgatgaaggatttcagcaggttcgttaaagatgagattggctttagctacaacggttactatcgttctggttggggcacggcgtcccatggctcgccaaaatcctgggcgattggatcgcttggacgactgggtaacgaatattccggatggtttgatttacaattaaaacagcgtgtttataacgaaggtaataaacgcgttgacgccattgttatgctggatggtaacgtcggacagcaatattcatccggctggtttggcgataatagcggtaatgagaactacatgcagttctccgatctctacgtcacaacgcaagggtttttaccgtttgcgccggaggctgatttctgggttggtaaacatggcgcgccaaaaattgaaattcagatgcttgactggaaaacgcagcgtaccgatgcggcggctggcgtggggctggaaaactggcaggttggtataggtaaaattgatgttgcgctggtcagggaagatctggacgattacgatcgcgcgctggaaaataaacagcagataaacaccaataccatcgacctacgctacaaagatattcctttgtgggataaagcgtcgttaatgctgagcggtcgctatgtcgcagccaatgaaagctcctctgaaaaatataaccaggataacaacggttattaccagtggaaagacacctggatggtggggacaacattaactcagaaattcgataaaggtggatttaacgagttttctttattactggcgaataactctattgccagcagcttctcacgctatgcgggctccagcccttataccaatattaacggtaaatactatggcgatcataccaacggcaccgctttacggctggcctcacagggtgaggcttatattggcgagcactttattgtagccaatgccattgtctattcatttggtaacgatgtttacagctacgaaacgggagcgcatacggatttcgaatccattcgcgcggtggtgcgtccggcctatatttgggaccaatataatcagaccggcgttgaactaggctacttcacgcagcaaaacaaagatgtaacggggacgaagtataacgagtcgggttacaagacgacgttatttcatacctttaaagtgaatactagcatgttgacctcccgcccggagattcgcttctatgcgacgtatatcaaagctaccgataccgagctggatgatttttcgtttgaagatcagaaaaacgatcagtttgcggtgggtgcccaggctgagatctggtggtaa

SEQ ID NO: 392591 - DNA, 1170 bp, Salmonella enterica
atgaattttaataaatctgctttattactggcgctggccggtgcttttattgcccggtcggtcggcgctaccgatcttcctgtcactccgaacgccgccataccggtgaatcagtatgttacacaggttaatgcagataatagtgtgacgtatcgtttttttgcgcctgacgctaaaaatgtctccgtggtgattggtattccggggccggaaacaacgcacccgatgtctaaagacaaaaccggcgtatggagctggcggggaccggcgatgcaacctaacctctatgagtatttctttaacgttgatggcgtgcgtagcattgataccggcacggcgatgaccaagccgcagcggcaggtgaataccagcatggtgctgataccgggcagcattctcgataccaaagccgtaccgcacggtgatttgctcacgctgacttaccattcgaatgccctgtcctccgagcggcagatgtatgtctggacgccgcctggctacaccggccagggggaacctttgccggtactctatttctaccatggctttggcgataccggtcgttcggcgattgatcagctccgtattacccagatgatggataacctgctggcggaaggacggatccagcctatgctggtcgtcgtcccggatactgaaaccgatgccaaagggattattgcggaggatttcgctccgcaagagaggcgtaaggttttttatccgcgaaacgcgaaagccgctgataacgagttaatgcatgacattatccctcttatcagcaaacgctttaacgttcgcaaagatgccgatgggcgtgcgctggctggcctatcgcagggaggatatcaggcgctggtttccggtatgaatcatctggatagctttgcctggctggcaacgttcagcggcgtgaccaccgtttccgttcctgatgctggagttagcgcacggctaaacgatccgcaggcgattaaccagcagctgcgcaattttacgatagccgttggtgataaggatgtggtgaccgggaaagatatcgccggactggttagcgagcttaaaaagcagcggatcgctttcgattatcatgcttatcctgggctgaatcatgaaatggatgtctggcgacccgcgtatgcagcgtttgtccagaagctatttaaataa

SEQ ID NO: 392592 - DNA, 720 bp, Salmonella enterica
atgaaactgtttgtagcggaagactacgacgaaatgagtcaggttgcggcagcgtatttactgagctttatgacgcagccacgtcgtgtcaatctggcgattactgccggcagcacgccaaaaaaaatgtacgaataccttacggcaagtgtgaaggggaaacgcggatgtcagcaggctcatttttataattttgatgaaattccctttcgcggtcggtcaggcgatggcgtaacaataactaacttgcgcaatctgttttttaccccggccggcattgaggaagcgcagattcataagttgactctggaaaattaccattgccatgatgaaaaactggccctggcgggcgggttggatctggtattgctggggctgggagccgatgggcatttttgcggtaacttacccaataccactcgttttcacgatatgacggtcgaattcccgattcagggagaaatggtggatattgtggcgcatggtgaacttgacggcgacgtttcgctggtgccggatagctacgtgacgatggggcccaaaagcattatggctgcgaaaaacctcattgttattgtaagcggtgaagcaaaagcgcaggcgctaaagagtatgcttgaagggccggttacggagcaggttcctgcttcggtgctacagctgcatccctcgctcattgtgattgccgataaagccgctgcgtccgcgctggcgcgttga

SEQ ID NO: 392593 - DNA, 2889 bp, Salmonella enterica
atgaaaagtatggcaattatgcagatactactccaggcaactcttccggttgcattgagtatatccgcatctgtccgagcggctgagttatcacaaagcacgcgctcggttgataaagataatacctcgccttattccgcgcagatgactcagacggcaacagcattatcttccgggaatgtgtccgccgcaagtgcgaatatggcctccggctatgctggagattcggttgaaaaatggttaagccagtttggcaccgcgcgcgtgcagcttaacgttgatgataaaggcaactgggatgatagcgccatcgacttcctggcgccgctgtacgatagcaaaaaggcgatgctgttcacccagcttggcctgcgagcgccggacgatcgcgtaaccggtaacttcggtttaggcgtgcgcacgttctatagcgaaaactggatgtttggcgctaacgtcttttttgacgacgattttaccggcgataaccggcggattggtttgggcggcgaggcgtggaccaattacctgaaactctccgccaatacctatctggggacaacggactggcattcgtcgagagactttgacgactactatgaaaaaccggctgacggcttcgacgtgcgggccgaggggtatctgccagcgtatccgcaattaggcgcgaaggtcatgtacgaacaatattacggcgataaagtcgccctgttcgataaagacgacttgcagagcaatccctcggccatcacggtgggcatgagctacacgcccgtcccgctgattaccgccgccgtggattatcgtcgcggacaggactcgatggacgagacccatttcggcattaactttcgttataacttcgggcagacgctctcccaacagctttcctcctccgaagtgcagaacctgcgcagtctggcaggcagtcgttacgatctggttgaacgtaataacgaaatcgtattgcagtataaacaaaagaaacaggccgacgcggtggcaaatatgctgttgacgacggtaaaagacaacagtccggcagatggcgtggcggcgaatacggtcacggtgagagccacgacatctgatggtacgccggtacgtaacgcggttatcagttggagcattattggcggcgcgcagaagaccgccacaggcagtacggcaagcgatgcacaacttagcgcggagagtggcgtcactgacggcaatggcaacgccagcgtgaacatcaccagtaagactgcagggcaggttacggtgcaggcgacgtcgggcgatatttcaggcacggcagccaccacctttgttcaatcggtgggcagcctgaatttgacgctgacccaaaacaatagtccagcagacggtagcggccagaatgcgggcgaagtcaccgtgaaggacattaacggtaatgtgatgtcgggcgtcgccatcaactggagcgttaacaacgatgcgaaagttgtcgccagcgatgttcagaccaatgcgcaagggaaagccagcgtgcattacactaatacgaaagctggcgcggtaacgttaaccgcgtccgctgctggaaaaacggcgtcggtgaattccgctttcgtgtcgcagtcggaagtcagcaatgttacggtgaccaccaccactaacaatgcgcaagccaacaatagcgcgaccaacgcggcgcaggcgctggtgaccgatggaaacggtcagccaatggcgaacgccagcgtcacatggtcgataagcggcagcgctaccgccagcctgagcagcgcggcgacagtaacgaccaatgcgcagggaatggcgaccgtaaccgttaaagactctgtcgcggaaacagtgacgattgtcgctaacgcaggcggtaagagcggttcatcaagcgcaatattcacccagactgccgcgaccaatattctgcttactgtacagcagaataacgcgacggctgacggggtttcgacgaatgccgtgcaggcaaaagtgactgacggtagcggtcagcctgtagccaataccgcagtttcctggagcgtggggggaagcgctaaggcgacttcagctgtcaccgttaataccaatgcggatggcatagcgacgctttctctgagcgacagcgtcgcggaaagcgtgaacgttaatgcttcagccaatggcgcgcaggggcaggcgacggctacatttaatccggcagccgttgaggtgagttcggtgacggtaacgatccctggcaacaatcaacctgcaaatggtagcgcaaccaaccaggcgcaggcgctggttacggatgtcaataatcagccgctggcgaatgtgcagttggtctggtcgattaccggcagtgcaacggtaaacgccactacgccgcttagcgtgaccaccgacagcaacggtatcgccacattacgttttaccgatacggttggggaaagcgtaaccgtgacagcgacggcgggaggaaaacaagggcaggcgacggcgacctttgcttcggcagcgttcggaccgctggtgattgaacttgaacacggtagtaataccgaggcaattaatgtggcaaccgttcgtgatgggcttgagttaaccgtggatgcctatcctggaatggccgaaggcgatcagatcactgccagttttaaggtgacaggtgtggtagatcctgattcgccaggaggaactctactgccagacatcacgcttccagtacataccgtgatggcatcagaggtagggcaacccattgttcttacgtttgatggcgacgggttgcttgggttccagggggagacaacggtgttaacaggcaccgggacagcaatagttgtcagaccttcaactcagcagcagataagcgactcaacgtctcgtgtatttgatacctggtaa

SEQ ID NO: 392594 - DNA, 519 bp, Salmonella enterica
atgcatctctcattcagtgaagcgaagttagaacaggcgataattgaactgctacaggatcagggctatcagcacctgatcggcgatgatgtgccacgttccagcctcgatcaggtgattatcgaagacgatcttcgccattacctcgccgcccgctatcaggccgacggcatcaccgaagaggagatccagcggctgatcaagcagttcaccaccctgcccgcctccgatctctacgaaagcaacaaaaccttttgcgcctggctggccaacggtttcctgtttaaacgcgacgatcgccagcagaaagatctccatatcgaactgctcgacacccggcacctgcccgccgcgctgcgtgaactgttcgataccgaagaggttccgctgcaacaggccgcggaaacgcctgcaagctatcttacccagccgctgaaccgggtgaaaatcgtcaatctggcaaagaaaatcagccgcgcatcccggacgccattctgtatatcaacggcctgccgctag

SEQ ID NO: 392595 - DNA, 576 bp, Salmonella enterica
atgaaattcaaccgcccgcatttactgattgccctcgctgttggcgcttcgctctttagccagattgcgcgagcggaagatgaatgtcagctcacgctcgccaccaataatgtgagcttcggcctgttcaaagaggacgatatcgtcgacacccaaaaaggctggcatcagatgccctccagggaggttaacgtcaacgtttactgcccggaaacgcagacgatggcgctgtttgtccaggcacgggcgggggaaaaggggcgcttctactttggcgatagcagcggtctggccttacgggtgagtcagatggtggtggacggtaaaaactactccgtcgccaaaacaatcgaccggacgcagtttgtgcctgaaggggaaagtggcgaaagcctgctgctgcacaataatgaggggattatcgcgatggataatcaaacgctggtgagcggcaagcagatgaacctgacgctgaaaattaccccggtgttaaacaatcagcagtttacgcaatctgctgacgtgacgtcgcttgaaagcgacctgctgtgggaagtggtaacaaaaccgcagtag

SEQ ID NO: 392596 - DNA, 2415 bp, Salmonella enterica
gtgaaaagtcttaatcttgcctcttgcatacgagccgcattaccttgctcacttactgtctctttgcttctcgcgcttccggcgcaggccagagaagtgacgtttgatacggatattctcgcttcaagaggcatcagtaagaaccttgccgattatttttctgaagcgccgcgatttctaccgggaagccataccgtagccataaaaatcaacggtatggaaaagggatcgctggccgttcgtttcaatgaagaaggtcagctctgtgttgatgaggattttcttagcgcgacgggcctgatgcccatcagcatcggcaaaaacgaagcatgtcacgacctgcgcgccacttatccttcagccgtggtaaaccccatgccgaatagcgaatcgctggaactttatgttcccgcgcaagcgctggataacggctttctttcgccacaaaactttataaaaggcggcaccgccgggctatttaactataacctgttctccagccgtaatgacgtctccggcggcgacagcagcacctactctcaggctagcctggaggcggggttgaatatcgcggaatggacgctacgcagccgctatatattaaccgacgatgacggcgaatatcagtcagacagcctctatacctatgcggaacacgttttccagcaacaaaaagtgcgcgttcaggtcggtcagattaacgtcagttcatcgctgtttagcggcgcatcgattgacggggtgcagtttcttcccgaacaaaacctgcaacaggatattccgggcgtcaccatcaatggtattgcgcgtacccaccaggcgcgcgtggaagttcgccagtccgggcagttaatctataccgcccctgtgaatgccggcccttttaccctcgataacgttccggtggtgcgcagcaatgcggatcttaatgtcagcgtggtagaaaccgatggctccaccacgcgctttatcgttccggcctcgtcgttcaatctgcagtcattgcgccctgccgggctgacggtgtcggtaggccgggtacgggaactgaccaccgattatgacaaaccgtatgtcgctaacatgacgaacggctggaatctaaaccgtaactggagcagcaccgtttccggcgtattagcagaagattatcaggcgacgggtggtatgcttcagtggctgcctgcgcaggggataatgatgtcaggctcgctcctcggcagccgggaatctttcggcgacgcccagcagggtgcgaagggggaattatccaccagcatgggcctgccgggcgattttagtattgacctgagcgccgcgaaatacagcggcggctatcgcgaactgacggaagcgctggatgatgattttcacggttatcaaagcagctatagcggcaacctgagctggagaaatgacctgctgggttcgttctccctcggctattacgcctatgaagccaccaacggctacgacgattcccgcagtatgattgtttcctggggcaagtcattcaactatttcaacatcaacgccaactggcaacatgccgttaatcagcaggatgacgatgacagctacaacgatgatgatgtgttttacgtcaacgtcagcattccgttgggtacccagcgtgtcggcgcttacatgcgtaatcagggcgaaaaaaccgcctacggtttacaaaataatggctctctcggccaggatacccactactacatttccgtcgatcgcgataacgaaacgaatgaaaactccttcaacggcaacctgaataccaatcttcactatacccagttgagcataggcgcaggctcaagcggcgacaatcagcataactacaacgcgacgttaagcggcggtattgccgcccacgaacatgggctgacgttcacaccttatagcgttaaagatacctttgccattgcccgcctgagcgaaccggaaagcggcattgaaatttcgaccccgcagggtcgggtatggaccgactattggggccaggcggttgtgcccggcctgaccgagtggcggaaatcgcgtattgaagttaacgccaacaccttaccgaaaagtatggacctggctaacggcatcaagaatgtttccgtcgctcatgccgcctttaaagagctggaatttaaagtgctcaacacccggcgcgtcatgctggaagtcaaacaagccgacggttcctggctgccgaaaggcaccagtattgtcgatgagcagaataactatctggtcagcgcggtggatagcggacgcgtatttattaccgatatgtcgaataacccggcgctctacgccgtcgacgacgatatgcatcgcctgtgtcaaatcaattaccacttgagcgacacgcaggacaaagaggcgttttatgaaatggcgaaaggagtgtgcaaatga

SEQ ID NO: 392597 - DNA, 702 bp, Salmonella enterica
atgtcaaaaacacggtgcacattcgcgcttgccgcgccctttttattcgccacgcttttttctcaggttcacgccgacggtatggtgccggaaaccaccttactggtgattgacgagtccacccatagcggcgtcatgaacgtcaaaaataccgatagttccccggcgctgctctataccaccattgtcgacctgccggacgataccggcgtgacgctcaacgtgacccagccggtggtccgtgtcgagccaggccagcagcaacagttgcgctttattatggaaagccagcaaccgctgacggtagaacactttaagcgcgtgttattcgaaggcatcccccctaaacgtaccgacaaaaatatgaagattggcttcaatatccgccaggatctgccggtattaattcgccccaaaaatctgccggtagttaccgatgcctggaaactgctggagtggtccggcagcggcaaagccgtcaaagtgaaaaacccttcggcttacgtggtgcggatgtcgcttaacgtggattttctgccgtctggcgctaagggcaagctgaaaaagacctacattctgcccggcgaaacgctggatgtgaaaatgcaaaacggcatcgcaggggatacctcggttcgtttctttccggcaagccgctacggtgtggaagtccccagctttaccgcgccgctcagccaataa

SEQ ID NO: 392598 - DNA, 690 bp, Salmonella enterica
atgaaaaagattttagttgccactgccgttgcggcggtgcttgcctccagtgctgccaacgcagcgtccaccgccttactgaaagtgaccggcctgctgtccgtagcggcctgtactccaaccctgagcggcggcggcaccgttaattataaccgcattcacctggcggacctggacgccaccggcactaaccaactgggcaccaaaaatatcacactaaccatcacctgcccggcggcgaccaaagctggctggaccatcaccgatgaccaggccgatacccatccgggcgcatcggttattacgattaacaacgcggatgtcgcaaacggctccatctctgataccagcgagtcctacggtgtgggtgaaaccgcaggcggcgtaaaaattggcgcctactccatttttaccgatatcaactttgtgaccgccgatggcgtaaaagctgacgttatttccggcaatgcggtcagcccgacctggcaaaaatccacgaccggcgtcattaaaaacggtaatgcggaagtgatgaccgttgcagcagcagggtcaaccgatccgctggcgttcaccacggcggttttcccgctgaaaacctccctggccatccagggtaccagcgtgctggcggtcaccgatgatactgacctgaacggtcaggcaacgatcaccgtgaaatatctctga

SEQ ID NO: 392599 - DNA, 681 bp, Salmonella enterica
atgaaaaaaatattcattgcaaccgcggttgcattgtctttatctgcggctgcgcaagcggctgaatctaccgccgtgttaaaagtgaccggcgttctgaccaacgatgcctgtaccccggcgctggacggcggcggcgtggttgattttggcaccaaatatatcaatgaactgtcggcaacagagaccaaccagttagggcacaaagatgtgaatctgaccattaactgtactacgccgacaaaagtatcatggtctgttaatgacaatcgcaccgattcaatggtaagactgaccatcaccaacggagcctgggtcggggatgagacggcatggggtcaagatcagttgttcggtgtcggcaaaacggcagagggggtcagtattggttcttatgccattgatatcaatgaaaatgaatcaactgctgatggcaaagtatcaacggtgcttacaacgattggtctttatagcaccacttggggtgaactcgcagctacctttgccgattccctggatggacaacaatacacccttggaacagcagatactccaaccgcctttaccaccgccgttttcccactgcgcgtcgcattagccgtacaaaaaactgacaccctggcgattaccgataacacgacacttgatggtcaggcaaccattactctgcattatctgtaa

SEQ ID NO: 392600 - DNA, 399 bp, Salmonella enterica
atgttgaaatcccccctattatggaaaatcgttaccttaggcggcgccatgatcctgctgttaatttccctgatgctgatacggcagatcctcatggagcgcgctgattatcgcagcgatgtggaggccgctattcgtcagagtaccagcggcccgttggtcgcgattccggtaagcgaactctataccgtgctggaagagaataaagaggtgcggcataagcgcagctatctctatttttggctgccggaatcgctgttggtcgagggcaatcagaacgttgaggcgcgaaaaataagcatctatcaaggccaggtgtggaataccgatgtggcgataaaggcagaatttgatgtggcccgcctgcatgagctggacaaaccgacgattaccctctga

SEQ ID NO: 392601 - DNA, 147 bp, Salmonella enterica
atgaatgacaaccaggcggatagcgtcattggaagcagcacggcggattttattgccccgcagatcgtttgtcctgtcatcatcgtgcagcgctctcatagcacagaacgacgttttcaattctgttatgttccctggcaacgataa

SEQ ID NO: 392602 - DNA, 453 bp, Salmonella enterica
atgggaagccgaaaagccaatttattacttttgcgtgatttcagcgacctgaccaggccggagttaattgcccgggctaaacagctggatatcctccgggctcgggtagcgtatacccatgacaatttttctccccggcagctaagggcttttgtcctggccactctgatgttgttcatgagctacgtgttaacggaatccatccttttcagtagcgttgccagcctgataacaatcatcggggtactgcattattcccggttacccatgacatggcacacacaactgaaagacggtatttccctactcgagagtcttcgaagttcgccgcttcgtcagatggatgaagccaatgcctattttgactggcattacgcctcttattgtctggctgctgaaatccagcttatttactcagcgctttcgcagccagccagacccttcagcgcataa

SEQ ID NO: 392603 - DNA, 354 bp, Salmonella enterica
atgaaaaataagcaaatcgctttatcagcggttatctctggttgcctgtcattaagcgggccggtgtttgccgcgcctgcaattcttcaaccagttcagacagttatagaaccagacggttttaaaaacgttccggtacgccagattcagcagggagaacaggtaacgaccaacgttctgttgcgtcagatcctggcggaggtgataaagacaaatagtctgaaggaagataaacgctgtagcgatggtgagaagaactattctccgggctacatcatcagcgttggcaataaaacgctgcgttgtgatattgccaaggattaccctcaatggatcgaggaggacaaagcctga

SEQ ID NO: 392604 - DNA, 249 bp, Salmonella enterica
atgtcgcaggtcgaaaatgcagtaacttcctcatcgaaacgcgtttacagaaaaggtaatccactttctgcatcagagcgtcaacagcaggcgcttgcccgtaagaaagcaactcacaaagagatcagggtttttgtaaaggatgcgcttaaaaatcagcttcaacttttgtgtgagaaagaaggtgttacacaggctgaaatgattgaaaggctgattgcaatggagtcagctaagcataagcagtag

SEQ ID NO: 392605 - DNA, 252 bp, Salmonella enterica
atggctacaaacacacaggtgaaacaccttgtttcaatgatgaggaatgaactggtcacctgtaatgagcggagtgtacgctgtgaactccgcagaaatgaacttcagcaccatcagaaccagctttttaaagtgcttactgaggcgctaaaaaaatatgaacgtatgggcttcactgcagccattcattcagtctcaagcgcagcaaaacggcgcaggctgtcactggaaagaacagtatcagggtcatag

SEQ ID NO: 392606 - DNA, 483 bp, Salmonella enterica
atgagttcagaagtttatgattctctggaaggaggatgcacttgtggtgcggtacgttatgttgtgacagcatctcctttgattgttcattgttgtcattgtcactggtgtcagcgtgaaacggggtctgcatttgtgataaatgcggtgattgaaaatatgcatgttcacctgataaaaggccaggtcacggttatcgatacgccttctttaagcgggaaaggtcagaagatcgcccgttgcccaaaatgtcagatcgcattgtggagccactattctggtagcagtaaactcacttttttacgggtaggtacccttgatcatccagaacgcatgccacctgatgttcatatttatacagaaagtaagcagccctgggtggcattgcctgaagatgctgttattcgccctcagttctatgaccctgatactgttctttccagtgacagcctgcgccgttttgctgcgcttgagactgaatga

SEQ ID NO: 392607 - DNA, 648 bp, Salmonella enterica
atgaatatgccggtttatgctgaacaaaaatttacgcttgatcagtttacgggtaagaaaatttcagatgcaaaattttacgcctgtgatttctcagaaactgacctgacagaaacgcaatttgttaattgccatttctggcacccggataaacaggttggatgtgactttagtggcgccaccctcaaggaggccagttttgtgaactgtgatctgacaatgagtatatttaagaatgcagatctgttcggtattgaaatcagggaatgccgcgcgatgggatgtaatttccgccaggcaagatttatgaaaaaaatgagtccccgactctggttgtgcagtgcctacataaccaaaagtaacctgagttacgctgatttttcaggtgttatactggaagagtgtgaactttgggaaaacctctggaacgagaccattgtcacaggtgctaatttcagtgggtcagatctttccggaggggatttttcgcgcttcaactggcgtgctgccgatgtcacgaactgtgatctcaggagagctgtcatgggtgaacttgatatccgtcgcaccaatcttgagggcgttaaaattgatgacgagcaggcatcctccttattggcatttttaggtattactgtaacggagtaa

SEQ ID NO: 392608 - DNA, 378 bp, Salmonella enterica
atgacaacaccattacgatttactgccagagactcccatatcagcgaatatcctgaccctattactttcacccgtggtaccagtctgataattcacgagaagtatgagggagaggaagagtgggataactggttctactgcaccatgcctggccataccggtggctgggtacccggacagatactccacagagatgaggggacttaccgtgggcttgcaaaggaggattacaccgcccgggaactggaggtgaggaaaggtgatgagctggttggcctgaaatcactgaatggctggatgtggtgtgaacgtctttctgacgggcaaagcgggtggattcccctctcgctgctgcataggaatacggcggagaattga

SEQ ID NO: 392609 - DNA, 543 bp, Salmonella enterica
atgagcatggcgcatcagcgtaagaaagagccgcaaaaagtcaggttaaaactgattgaaagcgcgtgcaggctggcgatggaaaatggcctggccggcgtcaatgttgaagccgtcgccgctgaggccggcgtgagccggggagggctggtgcatcacttccccagtaagcaggtgctggttgagtctgttttccggcatatgctgaccgggtttgagtctgaccttgcggcccggatgtcagctgacccggagccctctggccggttcacccgcgcctatatcctgtcggtgtttgacccgggcgtgcatgcacagtggggaccgttgtggatcgccacggcaacggaccctcagctcaggaagatctggggggagtggtttaatgaccaggtcatgcgtcatggcgaaacagcgccactgctggaaatcgcccgcttcgccgcagatggcgtctggatgggccggatatacggcgttattcccggccatgctgaggcgctcagaaatcatcttatcaacatgacgacaccagaaaaatga

SEQ ID NO: 392610 - DNA, 1488 bp, Salmonella enterica
atgatatcagaaaaaaatccctggcttgtgcttgccgtggtatccgccgccctgtttcttgtggtggtggatatgacggtactgaacgttgctcttcccgtgctggcccgtgagctgaacgccaccaatgcggagaaactctggatggtgaatacctattctctggtgctggccggtctgttgcccggttttggcactttgtccgaccggatcgggcaccggaaggtattcacggccgggcttgtcatttttggtttagcctcggcaatggcggcttttgccccgtcgtccggctggcttatctctgccaggggcgtactggccgtgggggcggccatgatgctgccggcgaccatatccattattcgtcttgtgttcaccgaagataaagagcgtgccgtcgcaatcgggatctggggggcggtcaccgccagtgctgcggcgctggggcctctcctggggggagcgctgctggcgcatttctggtggggatcggtattccttatcaacgtgccggtggtgctgttaacactgctgttcacatttgttctgatccccggccttcccggaaatgcagggcgacactgggatttactcaccacggttgtgcttaccgttgcgctgatatcttccctgtatgcaataaaaagcgtcctgaagagcagcatcagctgggatgaggtggccattgcggtggttgcggggatcgttttctttcgctggtttttacagcgtcagacacgccttccgtcgccgctgattgatttcatccttttccgcaacgtacgcttttcagtcgggatggccggggcgttctgtgccagcgtggtggtggtgggcctgcagtttgttctgagtcaggagcttcagcttgtgcggtcattttcgccactgcagaccggcctctttgtcatgccggtcgcggtggggtcctttgtggcgggtccactgctggggtccgttcttttccggtttggtgttgagcgaatgatggcattcacgctcgggatcgcggcagccgggctgacgctgtatacgctggcatggatgcattcgctcccgctctggcagctggcagcactcgggctgacggggtttggctttggcggcgttatgtcagtaggctccacgcttatcatgatcaatgcgccggaagacaaggcgggtatggccggtgctctggaaggtatttcctacgaactgggggggacgctcggcgtggctgtgatgggaagcgtgatggcatcggtatacacccgttcctttacgccgccggacaatgcttcacttgcccccgtggcgtgggacagccttgaccagacgtttatcgccgtcagcgggctgccggcaggggttgctgacggggtgatcctcgccggaaaatctgcatttataagcggtgtctcggtaacactctgcgcggcggcggcggtcacgatcgtcctgtttattgtcatggccatccttgccagaaataagtatccatag

SEQ ID NO: 392611 - DNA, 891 bp, Salmonella enterica
atggatatcagcacccttatttcttcctccggccagctgcagctgtcagcggatgaaagcaaaataccctgggacgagccggcgttcagccagcgcatgctggaaaaccacctgtcgcaggatcatgactgggccagccgcaggcagatcgtcattgagcagcaggtcgggtggattgcccgtcaggtaccggctggcgcacgcattctggatctcggctgcggcccgggtttttatacccgcctgttagcggagcgtggatattgctgcacgggcgtggatttctcaccggcctccattgagtgggcacgccggcaggcgcaaaccgccggcctgaacattgattacattcagcaggatattcgcacttactggccggaaacaccgttcgatttcatcatgatgaccttcggagagctgaatgttttcagtgccgctgacgctcaggctcttatcagccgctgcgcgcggtggctggcgccaggcggcaggctgcttgctgaagttcatacttttgatgaagttaaacgtcaggggatggcgccggcgagctggcaacgctgtccggacgggctgtttcttgcggcgcctcatctgctgctgacggaaaacgcctgggatgaagagacgcagaccagctcaacgcagttctgggcgatagatgaaaacggtcgcacctgccgtttcggcagccagatgacggcctggcgcgatgatgaatatgccagcctgctcggtaacgcgggtttcagcgtaccgacacgcccggacagtatcgagtggccggtcagcgagacttttgagggcaagctctttgccctgctggccgaaatctcagaatccccggcagggcgttccctgaatacgcagcttaaaaaaggagtaaattaa

SEQ ID NO: 392612 - DNA, 753 bp, Salmonella enterica
atggatatcccacgtatttttaccatcagcgaaagcgaacaccgcatccataatccgttcacgccggaaaagtacgccacgctgggccgcgtgctgcgcatggagccaggcgcgcgcgttctcgatttgggcagcggctcgggtgagatgctctgtacctgggcgcgcgatcacggcattaccggcaccggcatcgacatgagtccgcttttcaccgcgcaggcaaagcggcgggcagaagagctgggcgtcagcgagcgcgtgcattttattcataacgacgcggcgggctacgtcgcggaagacaaatgcgacgtggcggcctgcgtgggtgccacctggattgcgggcggcgttgccgggacggctgcgctcctggcaaaaagccttaagcccggcggtatgctcctcatcggcgaaccgtactggcgacaggtgcccgaaacggaagaggttgcgaaagcctgtggcgttccctccaggaccgatttccttaccctgcccgggcttgtcgcctcattcgacaaccttggctatgacgtcgtggaaatggtactggcggaccaggaaggctgggaccggtatgaagccgctaaatggctgaccatgcgccgctggctggaggaaaaccctggcgatgactttacgcaggaggttcgtgcggagctgacgactgcgcccggacggcacgtcacctacacacgggaataccttggctggggcgtgtttgtgctgatgctccggcaggcgtaa

SEQ ID NO: 392613 - DNA, 1374 bp, Salmonella enterica
gtgccgggttcaaagagaatttgcaggcagtgtctgaacgatgaccgttatctgaacaacatcatcgcaagcgatcctgatgcctcagaatcatgcgattattgtgactccgaagagatgacgatgtcgatggaaacactggctgaaaaggtcgactggttgattgaaaattattatcggggcggagaatataaccattatctggaagagtatgaaggtgaaccgctcatctctgttctggagcaagaggttacagacaatgataatatcatcaatgacttatcggaactgctcgccgagttatggtttgactatagctcacatgaaagaaaatatggtgatgagccgcattttgttgaagctgtaaccatctcaggaaacctttccagaaaatggaattcaatggaaaggaaacttcgggagagtaatcgattttttaatatggacgcgatggcaactttcgaagaggtttttacttaccttcacgaaaatcatccctcagcattcatcgattttgagcctaacaaacctattttccgtggtcgtattttccagtcagaggatgcacttgaaatcgcattacgtatgcccgagtcgagtttcggtcctcctcctcctgaactgacaccttccggcagaatgaatgctagaggtatctcagtcttttatggcgctacgtccagaaaaaatgccatatccgaagtgcggccacctgtaggtagttatgttgctgttgctgagttcactttgttgcggacagtcagattactcgacctctccagtctgaaagggctggctgttaacggatttagccgctttgatccggagtatctacttcgatatgaacgcagtagttttattcagaatctctccagaaaacttgttatgccggttgttcctgagcttgaagaaacaaattacttgttgacgcaagctatcgctgattatctctcaacatttgagcgttgcgaactcgatgggatactgtttacttccgcgcaaaagccaaaggaaagcacagacccttctgtcatgaatattatcctgtttcataaatcgtctggggtactgaattcagaccgaaggtcccgggaagctgaagtaaatatgtatcagcacgatgaggatatttcatactttgacccagagataaggacgactcccgatgatttccgtcgtgaatttaaggtgctatcacgtaagaaaaatagggaggatgtacttgagctaaaactcgatggcatagaagttcataaaatagagggtgttgattactccacatcagaaacaacagtcacgcactatttaacggaaggccgcacaaaagaagtgatttcgcatgcgaaatctggctattcggatgacgaattctga

SEQ ID NO: 392614 - DNA, 147 bp, Salmonella enterica
atgggtgggcatgtgaaggtcagctttgagcgagcagcggacgtatttcacttgctaaaagagttagaaacctacagtcgtacaaacataatttatttgtatccatcagtggcgaaatgtaactccttggttatatttaaaaaatga

SEQ ID NO: 392615 - DNA, 204 bp, Salmonella enterica
atgactcacgtatttgtttatctcgttatcgcttcatctgtacatggtggcagcagctggaacgtaacccctatgcctaatatggatgtttgcaatcagttcagcgaaagtatcactaaaccccggggatttgaccttaatttccctcgggcaagcctggttcgctgtgttgaggtaaagactgataagtcagttaatccgtaa

SEQ ID NO: 392616 - DNA, 375 bp, Salmonella enterica
atgagatactggatactggttgttctgctaaatggattatttgcgctggtcattcactttgccgcgccggaattgttcggaagtactgagcattatgtcggcgctgggatctgtgctctgatagcgatagttattacctggcgagatcctccagggatgctggacaacgtgctcttatttctctttaagtggggaattgtggcttcaggtctggcgttttttttctggggtatcggatacaagctggaattctggggaaatcataaccccgatgaagttttcaccagcgcttttgacatccttctgccaaatctggcattgctgagcggtattgtgattctggttagtgcctggatatcctggaggcaaaggtaa

SEQ ID NO: 392617 - DNA, 489 bp, Salmonella enterica
  misc_feature (439)..(448): n is a, c, g, or t
gtgactaacataatacaatccacccagtcctatagagtccatagaagtgatgttgaaccagtaaaagaaaaaataacggaaaagagcgctttttcacaacgtattactgccgttagaaatagctttatcagcctgtcgacgagtctgtcagagcattttagcctgcacctgcaaacagaaagggcggccacccattttcatcgtgggaacgcttctgatggtagggcaatagtaaccagtaaaattgttaaagattttatgctgcaaaaactcaatagtctggatattaaaggtaatgcgagtaaagatccggcctatgctcgccagacatgcgaagccatattatcagccgtgtacagtaatattaaagatcactgttgtaaattacttatcagtaaagggatcagtattactccttttctaaaagagttgggtgagnnnnnnnnnngggtgaggctgcgcacaaggcggggttacctggggagataa

SEQ ID NO: 392618 - DNA, 153 bp, Salmonella enterica
atggttgccaataaccgcggcgatttcaacgtccagcccgccatagttggctttcatcagcaggtcgcccagacaatgcgcctctttggtaaccagaattactacccgacggcgtccggcgggattgagttcacgaacagagccttccggtaa

SEQ ID NO: 392619 - DNA, 1374 bp, Salmonella enterica
atgccgtttacatttcatatcggaaatcatagttgccatatatcagaaagtcatttaagagatatcattgataataaaagagagcatgttttttcaacgtatgagaaatttatagattttttcaggaatatatttaccaatcgtagtttaatttctgattatagagagatatataatctactgtgtcaaaaaaaagaacatcccgatattaagggacctttctctccaggacctttttcgaagcgggaggaagactgtacacgatggcgacccattctcggatatgttaaacttattgatgcctccagatctgaaacaatagataaatacacggtagaagtattagcacatcaagaaaatacgttactactaaaactgttttatgaggggatattagtgaccgagacggagtgttctgagcgttgcgtcgattttttaaaagaaacgatgtttaattataatactggggagatcacgcttgccgctttggataatgataacctgccgccgagcgaagcaggtgggaatggggtttatgacgtttttgagcaacgtttgatagacttcctgtcaatgcccgccagggcgtctggtgatgatagcggcgctattgatcagggggatgccccacagccagcggcaatagaggtgtttattaactcgccggagtttcagaaaaatattcgcatggttgatattgaaaaaaataaaataggtagcggaagttatgggacagtctatcggttaaatgatgaatttgttgttaaggttccaattaatgaacggggaataaaagtgaatattacctctccagaacatcgtaattgtcatcctgagcgtgtcagtaaatatttgaatatggccaatgacgacaaagatttttctcgttcggcctccatgaatattaatggcaaagacgtcccggttttagtttcaaaatatattcaaggtcaggagctcgatattgaagatgacgataactatcgaatggcggaggcgcttcttgaatcccggggggtttatatgcatgatataaatatcctgggtaatattctggttaaagagggggttcttttctttgtggatggcgatcaaatcgtgttgtcccaagaatcccggcaacagcgaagagtttctcttgcaacaacgcaactggaagagcaaattaaggcccgtcacatgataaaattaaagcaggccgagaccgaaggaaatgctgaagatgttgaatattataaatcacttattatggatcttaatgagctagtcggagaggaagcaccgccccctgcgccaggaagacattttaaattagactcacctaatgaaggggctcttgtggctaaagtattaaaggatgaattaaaaaaatag

SEQ ID NO: 392620 - DNA, 678 bp, Salmonella enterica
atggaaaatgtatcaactatcaatactgtatctgccatgcaaaacccttacgatttgggaagcatgacccgggaggaagtaattcaactgttcgaaaagctaggcgtgtttcaagctgcgcttactatgctttcatatatgtacaatgcacaaagtgcgctttcaatttccatgtatgctgatatgaatgaagcatccaaagcatccacaactgcacaaaaaatggcaaacttagtggatgccaaaattgccgatgtacaaagcagtagtgacaaaaatgccaaagccagactgcctcaggaagtcattgattacattaatgacccgagaaatgggataactattagcgggttaagtgaaaagaaattaacagatgctcaaattaaagaaaaaatgcaagaatacatgaagacgcattccttcacagaatccttaaaaatgccagatttttcagcacaaagaataccaacttcactaaccgatgagatgggggccggagacctacagactgtaaaagctgccatctctgctaaagcgaacaacctgactactacagtgaataacagtcagttgtccatccagcaaatgtcaaatacacttaatctgcttacaagcgctcgttcagatatgcaatcccttcagtatagaacgatttcagctatctcatttggtaagtaa

SEQ ID NO: 392621 - DNA, 4143 bp, Salmonella enterica
atgagcggaaaaccggcggcgcgtcagggcgacatgacgcagtacggaggcccggtagtccagggctcggcgggcgtgatgattggcgcacctacgggcgtggcctgttcggtctgtccgggcggcatgacctccggcaacccggtcaacccgctgctgggcgccagggtacagcccggcgaaacggattttgccctgcccggtccgctgccgtttgtgctctccagaacctacagcagctaccggacgaaaacgcctgcgccggcaggtcttttcggccccggctggaaagcgcccttcgatatccgtttacagatacgcgataaagaactgatactgaacgacaacggcgggcgcagcatccactttgcccctctgtttcccggtgaaacggccttcagccgcagcgagtcgttctggctggcgcggggcggcgtacccgcattacatgaaagtaatccgctgtatcttctctggcagtcgctgccggaagacatccgcaccagcccgcatgtttacctggccaccagcagcttacagggaccgtggtggatactcggctgggctgaacgcgtccctgcgccggatgacgccttacccgccccgctgccgccgtaccggacgctgacggggcttgctgataatttcgggcacacactggcataccaccgggatgcggacggggaatttgccggggaaatcaccgccgtgacggacggcgcaggccgccgcttccgtctggtgctgaccacacaggcacagcgggcggagcagcaccggcagcaggcagtatcagaagccacatcccccctctcattcccggacaccctgcccgccacggcttacggcgcagacagcggactccggctggcggaagtgtggctgacccacgacccggaatacccggataatctgcccgccgccccgctggcgcgctatgaatactcgcctcgtggtgaactggcggtggtatatgaccgcagcggtacggcagcacgcgggtttacgtatgacccgccgcatccgggacggatggtggcgcaccgttatgcgggcagaccggagacaggctatcggtatgatgctgccggacgggtggtggagcagcgtaatccggcgggattacgctacacctacacgtatgacaggaataccgtcaccatcaccgacagtctgaaccgccgggaggtgctgcataccgaaggcgaaggcggtctgaaacgggtggtgacgctggagcgcgcagacggcagcgtccttcacagcgaccacgacccggcgggaagacttattgcgcagaccgatgcggcgggccgtaaaacggaataccgtctgagtcccggctccggcctgttaaaggaagtcatcgcgccggacggcagaaaaaccgaattttactacaacagccagcgccagttaaccggtaccgtgtacccggacgggctgcaaagccggcgggaatatgatgcccggggcaggctcacagccgacaccctgcgcgacggcagcacgacacgctatttttatgacagcccgtacagtgaataccctgcggccaccgaagacgccaccggcagccgcaaacagatggtccggagccgctacgggcagctgctgaccttcaccgactgctccgggtatgaaacccgctatgaatatgaccgtttcgggcaactgaccgccgttcaccaggaggaaagaataagcctgtaccaggtttatgacagccgtggcaggctggtcagccggaaagacgcgcagggcagggaaacgcgctatgaatacagcatggcgggcgacctgacggcggtaacctccccggacggcagccgccgcgaagccgcccgtgatgcccgggggaatatcatcagcgccacgcagggggggctgacgcgccggatggaatatgacgccgcaggccgtgtaacaaaactgaccagtgaaaacggcagccacacggtattcacttacgatgtgctggaccgcctgacgcaggaaaccggctttgacggcaggacgcagcgttaccgctacagcgccaccgggcaggttgtctgccacgaagaagcagatctgaccacgctctggcattacgatgagtcagaccgcctgacgcgctgcaccgtgaacggtgaaccggcggagcagtggcgttacaacgaacgcggctggctggaggaaatcagccacctcagcgacggtcatcgggtcgccattcactaccgccgcgacaggcggggccgtcttatcagcgaacgtcagacggtccatgcccctgagacgaatgagcttctctggcagcacgaaacccggcacgattacagcgataagggactggcgaatcgcgtgacgccggacgccctccctgcggtggaatggctgacctggggcagcggttatctggccggcatgaagctcggtgacaccccgcttatcgacttcacccgcgaccgcctgcaccgcgaaacgcggcgctgctttggtgagtacgaactgaccacggtccggacaccgggcggtcagttacagcgccatcacctgaaccttccgcagcttaaccgtgagtatatctggaactgcggcgggcagcttgtccgcatctgcggacagtatgagacacgggattatcagtacagcgaaaccgggcggttactccgcacgcgcattacatcgccccgcagtgacctggagcagtggacgttcaccgacccggcgggcaaccggacagcggcgcgggacaaatacccggtgctgccggaaagcttcccggataaccgcatcagccaggatgtcgataacgtttatcattacgatgaacacggcaggctgacggaaaaggacgagcgccggatacgcccgcagggcagcctgtcgcaccattacgggtatgataaccggcaccggctgacgcactaccgccagatgcaaccgggcagcgtgctgacggaaagccgctatctttacgacccgctgggccgcagaatcagcaaacgggtatggaaaagccaggaggaacgcgaccttaacggggacggatatctctggctgaaccccacgccggaggtggcgtggtacggctgggacggcgaccggctgaccaccacgcagacggacgacacgcgcattcagacagtatacccgccggggagctttacgccgttaatccgcactgaaacggcaactgaagcgctggcaaaaacgcatcacaggagcctggcggaaaaactccagcaggatgcggggatggcgtttgtgccggagctggtggcgctgctggataacctggagcgggagctgaacgcaggccgggtgagcgaactgagccggcagtggctggcgcagtgtgggttaacgccggagcagatgaagagccagatggcgccggcgtatacgccggcgagaaaaatccatctgtaccactgcgaccaccgtggcctgccgctggcgctgattgacgttaagggacggattgcgtggcgcgcggagtttgatgaatgggggaatatgctgcgggagaataaccccgataacctgcaacagctaatccggctgccggggcagcagtatgatgaggaatcggggctgcattataaccgacaccggtattacgatccgggacagggacggtatatcacgcaggatccgacagggctggctggaggattaaatccatatgtatatgcacttaatcctgtgagttggactgacccattaggtttagaacaatttttattttcaaatgccgatgaagccggattgtttgctataaaaatgtgtaacgctgactcaatagaaaataatctcgaatatggtggtttgatatgtaaaaaggatgaaaactatttttatactggtcctctaaaaggcaatttagcaggggtgaatccatacaaagttgcctgtcctgacgactcaaaaagggttggtgtataccatacacacggctatttttctgatacagaagggaataaggttttaaagggaaatgatgcatatgatagcttacatttttcgccgcaagataaaagtagtgctgatttttttgcaaaaggggaaaaagagtattcaagctatcttggaacaccagagagtacctattttaaatacaatccaaagacccaaaaagtatctgagatgaaatga

SEQ ID NO: 392622 - DNA, 303 bp, Salmonella enterica
atgaagtttcttatttttatttttatggtatgtactgtatgtaatgcttttggagggaatgtgatttatttaacaagtagagagcaactatccttgaaaattgcatccaatgccctaccagataatgagtcacttgaaagttataaagtgggtattgaagataaaaaagaatttattgaggtcattttttatgaatctgatgagaatatttatatccaaggtggaggcggtaaaatgtatgtatatcatgttgattttaaaaataaaacctgtactttggtgagaaaaacattaatgaaataa

SEQ ID NO: 392623 - DNA, 585 bp, Salmonella enterica
ttgaatgaacaatatcagctatgctgttatgccgaagtacgtgctgatcttcgtggtcttggctatcacattgagcacgttgagaataagagccagcatccggaacgtacttttgattatcagaatctcgctgccagtgctttagactcagcaaatggtctacgccagtacggtaaaaatgcttttggcggccattctcaaggaaagaacaagtcggtggatatggcaaaatttatccactgtcatatacccgattgttctcgttattttgcttacctgtctgatggtcggatagttcctgctgatgggttaaatgcgcaagaaatggagaacgcacagtacaccattgatctactaaacctgaatagtggctttctacaaaccgagcgccgtaattactgggaagaactggaacaaatttttgatgaaaacataggaaacagacagaatcttcaattattacttcaaattaatctggtcccttcgtcagatcataaactgcatgaattcttcagcattacacgccagtttttccagcaagaagctgaacaggtattacacatccacgccccagcattaatttaa

SEQ ID NO: 392624 - DNA, 714 bp, Salmonella enterica
atggcgcgtcttaaaactgctcagccaaactcctcactgcgtaaaatcgcagttgtagtagccacagcggttagcggcatgtctgtctacgcacaggcggcggttcaaccgaaagaagaaactatcaccgtaaccgcagcgccagccgcacaagaaagcgcatggggtccggctccgaccatcgccgcgaagcgttccgctactgccaccaaaactgatacgcctatcgaaaaaacgccgcagtcggtttcggtggtcactaacgaagagatgcagatgcatcaattccagtcagtaaaagaagcgttgggttacacgccgggcgtaacggtaagcagtcgcggcgcttccaatacctatgacttcgtgattatccgtggcttctcttccgtcggcctgagccagaataactatctggatggcctgaaattgcagggtaacttctacaacgatgcggttattgatccctacatgcttgagcgtgttgagttgatgcgtggcccaacgtctgtactctacggtaagagcaacccgggcggtatcatttcgatggttagcaagcggccgactactgagccgctgaaagaaattcaattcaaaatggggacggacaatttgttccagaccggttttgattttagtgattccctggatgacaacggtgagttctcatatcgtctgacggggctggcgcgttcgacaaatgagcagtaa

SEQ ID NO: 392625 - DNA, 249 bp, Salmonella enterica
atgttcgcggaactcgtttatgacaaaaggaatctgggcgaattgagtaagagggggcaccggattttccccaacgctgatgttcgggttaacccgatgatgacattgccagcgatcaacacagacgccagcaagcatgaggaggaacggataagccgtactgttcaggaaatgtttaaagaggctgatatgaggctggtgatcgagtgccccatggacagcttatccataggaacaaagtcatgttga

SEQ ID NO: 392626 - DNA, 306 bp, Salmonella enterica
atggctgccattggcagtacgccgtttgagcgcggtgatgcggcagagggattcctgattgttacctccgcagccgataaagatctggtagacattcacgaccgtcgccctctcgttctgtcacctgacgccgcgcgagaatggatgcgccagggcataagcgggaaggaaatagaggagataattgctgacggtgccgtgccgatagataaatttacctgccacgccgagacgcgtaccgttgggaatgtgaaaattaaggggacgaaccaatcacgccaatacgattacatcaccggacagtga

SEQ ID NO: 392627 - DNA, 654 bp, Salmonella enterica
atgaatgttataaagaactgtttttcatcacttaataatattttaggtatgagttgtagagcatacgcggtttcagaaggacatgctgcgagtaaatttggggataaaatattagctgcgaaaaatacacctgtagaattgcttacatacagaagtgcagatttatcaaaagagcgtgctattacacaggagattttgtcacgctttaatattactgaaaaatttgttgctgtaagaattcaggaagataaatttacagatttaaaaagcaaaacaatacagggacataaggatactgtggcaagggtaagagattggtataatccatatcaaaattatctcggtatttctatggggaaacttgaattatcatccaatgtgacaaaaaaagagtacagaaatgccatgaatgtaatgttgatggaaaaagatgactttaacaaaaaaatactaaattttgataacttacagaaaaattatggaggtaatggaaataaaagttgggtagttgcgccgttaaaagatctccttgataaaggtgcgaaactttatccagatgaatcatgttcattaagattaggtcagccatttattataacccttccggaaacgacaaaagtcaatgttgatatttatcctgtaagtaaaaaatag

SEQ ID NO: 392628 - DNA, 531 bp, Salmonella enterica
atggttgagatcacgtctacagaaatgaccccgcctgtcaatgactcgcatgaatttattcccatgcgcggcattcgtaatcgccatttacaaactatgctgccgcgtttaatccgccgcaaagtgaagttcaacgcccactggcagcggctggaattacctgacggtgactttgtcgatctggcatggagtgaagatccgcgacaggcgaagcataaaccgcggctggtggtctttcacggtctggaaggcagcctgaacagcccctatgcccacgggctgattgaggcggcgcaaaaacgcggctggctgggcgtggtgatgcactttcgcggctgtagcggcgagcccaaccggctgaatcgtatttaccactccggtgaaacggaggacggggcctggtttttacgctggctacagcgggagttcggcgccgttccgacagccgccgtgggctattcgctcggcggtaatatgtggcgtgcctgctggcgaaagaaggccgcgatattcccatcgaggcggcggtga

SEQ ID NO: 392629 - DNA, 198 bp, Salmonella enterica
atgactctggattcacggcgcagacaacacgcctgcaaggtgaaagacaatgcgtatacatatcttttaacggtaatcggcatctcgcttttaacccttgtgctattattcgcacctttggagcgtctgcaacgcgcagacgcgcttatcaatcgctatctcttcagcgaaataacaagaaattgtggtgacagatga

SEQ ID NO: 392630 - DNA, 1119 bp, Salmonella enterica
atgatttggcaacttaccaatgataaacgctggccagcattgcgccagcgctttcgctgggtggatgaaatgcaccaggtgccgcaagatccccgacaccatgctgaaggcaatgttggtattcataccgaaatggtgcttgacgcactcagtgccatgcctgcatttcaacaatgttctcctcagcagcaagaaatagtgtgggcggcgggactgctacacgacgtcgaaaaacgcagtactacccaatgcgatgaaaacggacgcatccagtcaccgggccatgcgcgtaaaggcgaactaaccgcccggcagctcctgtggcgagatatccctacgccatttgttttacgtgagcaaatcaccgcgctggtacggctgcatggattaccgctctggttgctggagcgcccagccgcagagcgtctgctattaaccgccgccatgcgaatcgatacacgtctgctcgctctgcttgccagagcagacacggaaggacgccactgccaggataaacaggagatgcttgaccgtatcgccctgtttgagcttttctgtcaggagcaacaatgctggggccaggcgcgcgcattcagttctgaccttgcacgctggcattacctgacacatccgaatagcgcgccggatttcgttccctgggaaacagaaacttttgaagtgactttactcagtgccctgccgggtatgggtaaggatcgttatgttaacgaacaatgccacggcttaccgatggtaagtcttgatgttatccgccgtcggcttggtatctcagcagaagacagaacggcaaccggtcgcatcgtacagatagcaaaagaagaggcgcgagtactgctgagacaaaaaataccgtttatctggaacgcgaccaatataacgcgtcagctacgtagccagcttattgctcttttcacagcctatcgggcaagagtaaaaattgtctatcttgaggtaccctggacgcaatggaaacagcaaaatgcgaaccgtcagtatgccgttccggatgcagtaataatgcgtatggccgcaaaactggagataccacagcctgatgaagcgcacagcgtagaatatcgggtagtcgatacgccatga

SEQ ID NO: 392631 - DNA, 708 bp, Salmonella enterica
atgaatacgcaacgaaaatatgggagaacgtggcattatcctttctcccctggcactacaagcgatgaccgtatcaacgccgattactggcgcgatatacaaggcatcccgcaattagtgcatactgaaaagctggatggggaaaacaattgcctcaaccgtcacggcgtatttgcccgttctcacgcggctcccacacaatcagcatggacgcataaaattcgtcagcgctggcaattactgaaaaacgatcttggcgatctggaattgtttggcgaaaacctgtatgccgtccactccattgaatatcgcgcgttagaccacgacttcttcctgtttgcgatccgttgtaatgatatgtggctgggctgggaggaagtgcaattttatgccgctttatttgactttccctgcgtaccggaaatcgctggcccacaaccatgcaacgatgaaaaagcctggcgaagcgattttctgacgctgaccgataggcgcggcgcattcgatccctgggatacccagctcggacacccctgtactcttgagggtatcgttagccgtaatcgcaacgaattcccggtaaatgatttcgctcatcaggtatttaagtttgtgcgcaagaatcacgtcaaaacaacagaacactggaagcgtaactggcgacgggcgcgaatgggatatgagttcggcagtggagaacgttcatga

SEQ ID NO: 392632 - DNA, 570 bp, Salmonella enterica
atgacaactcaaatttctgccgaaactcttgctccgattacccataaccaaatccccgtcattaccactgagctgttggcgcaactttatggaactgaaacaaacaatatcaaagtaaatttcagtcgaaattcagagcgttttgtatgcgggaaacattacttcaagattgaaggagatgaacttcgcgctatgaagcacgaggttactcaaagtaactctgtgaaaattgcccgtaatgttcgctcccttattctctggacagaacgcggcgctgcccgccacgccaaaatgctcgaaaccgatcaggcatgggaggtattcgagaagctggaggattgctatttcagccagaagcaacaaaccccaactcgccaggtatctcctgccgtagaaatgcttaacatcgatcttctcattcagatccgcgacggtaacgtcaaagacatcaggcaggttggccctgatatgtttgtcggtaaggtagaccagattctgaacggcttgcgtgaaagcggctggatcgttattaagcgcgaattgctggccaaaaaactggcagcatggtga

SEQ ID NO: 392633 - DNA, 276 bp, Salmonella enterica
atgagcaacgaacttgaacttatgaaaactcgcgacatctgctctcagttaggaattacaccaagaacactcgagcgctatcgcaaaagaagaaaaaacgaaaatccatttccagcccctgattgttcatacatgggcggatcaaataaatggctaaaaagtaaggttactgagtggcagcaaaaagaaatgcaccgtaaaactcgcctgccgatgtcccatttaaacctggttcgtgatgaacgtggcaggcttcgccgcccggacaacgtttga

SEQ ID NO: 392634 - DNA, 900 bp, Salmonella enterica
atgtcccaagaattatctttaacctttaccgaaaacatatattattcaactaaagaacctgtaagcatcaaagatgtgattacctcccttcaagggtgggaagccatcgcaaaacaatcagaaggtgttttgcaggaactgacaggggctaacattcttgatatatcggtgcatgttgcccgattagaagcaggaagcctctatgaagatattgttattaaactcctctttggtagccaagaagaaatggacaaatttcttgctggtgctcatgcaaagctcggaaatgggaaaatgagaaacgctctcgttggtgctgttgttattggtctggttggatatggcttagttctagcaactaaggctatggctccaaacaacacctcccactttgaagcgaataacaatacgatcatcaatattggtgccggtgaggctaatatttcacccgatcgccttcaggccatcatagaaagcacggttaccaataagaagactcttgctaaaagttccattaagacgcttgccccagccagggcagacgaaggatctacgatggtcataggtgcagggggcggcacagtgaccattcccgctgaaaccattaaaaaagccccaactgaagttgtgttcacgccagaatcatatactcaggatcactttgatgtggatgttgaaatccgtgcattagacctcgataatccagagaaaggttgggctgctgttatccctggattgatagatcgaagagtaaatatggttcttggtcccaacgtaaaaccatcagattttgcaggtaaatttgctgtacgggctgatataacaataacgtatcagcttaaatcctcagataaaaaataccaaccgaaagaagtctttatcaaagaaataatcaaataa

SEQ ID NO: 392635 - DNA, 288 bp, Salmonella enterica
gtgacatctcagtcggttaacaactggtttgtaaggggaactatcgggaaaaactccgcacttaagctagctgatgcgcttggtgtgaatgtagcctgggttctggggcaggatatagggcccaatgatggattaaaaagtaatgagcaagagcttttacaccttttccgtcaacttcctgaagaagatcagggtagagtccttaaggcggtctccctgcgcctgaaggagctcgacgaactgtacgccaagtatatggggcggcgaattaagggcgatacggagtaa

SEQ ID NO: 392636 - DNA, 240 bp, Salmonella enterica
atggctaagacacaaatgcagttagctaatcgtgcatggcgtaccgaaacaaaggctttgggatggcatcaggggcaaagctggaaaggtggccgtaaagcgtggaaagcgttttgtcatgaaaatgctacctcaaccgtttatgagcgtaaaaacagcgatgagccagattttgtagaccaggctgacgctaactggcatgttgccgaagaactcacctactggactccacaggactaa

SEQ ID NO: 392637 - DNA, 558 bp, Salmonella enterica
atggccactattactagcaagctcactaaagaacgcctgattgattgggctgtgatatctgtagctgaaagggtgcgagatttaaaggatgccccgggatcagtaaaagctgcggcgaatttaaaattagctgaaatagcgctggcagcgcttaccgctgaacctgtagcgtggaaatacagacttgtcgatattgattcaggcataggggatcattggaaatattcaactcagtgcatcacacctgcatccggaaagacgtaccgcattgagtctgttcctctctacaccgtctcgcaaccagtaccagaacgcgaacaggttcgccgtgaacacgccaagtggtcagataagacattcggcgatatcggtccagttggtccgctgaaacacctctcgaaagaagcgatggaggctgctgcagaacctgacgacctgagcgaatgggctgatatgcaattcctgttatgggatgcgcagcgccgtgctggtattactgacgaacagattacccgagtgatgaaagaaaagctggcgataaacaaggcccgccagtga

SEQ ID NO: 392638 - DNA, 381 bp, Salmonella enterica
atgacagttgtcttcattgaagcgcaactccgggttagcgccggtcgttcggaaatgaccagcatgatactgtccatcgtggtggcgaccgcaactgatgcacggcagatgacgatcccggtaccggatgaactcgttaaacgcctgctgagcctgtcggatgaaatagctcagtggcttaaccgcctgccggcgttcggcctggcgcttacgctcaaccttctcgactctcttcttttcccgctgagcttctgccttcacagtatcattcgctacttttccgtaacggcaggcgcactcaaacgagcaaacgatctgcccctcgcgtatcgggtgaaaccactggcggcattctttatttgcgcacttacggcgcggtaa

SEQ ID NO: 392639 - DNA, 810 bp, Salmonella enterica
atgaacctcgaatcaatcgcaaaatactttgcaccgaagtccccgatgttcagtgattcttcgcgggcaacagctacagacaatctcactggtactgatgtgatggccgcgctcggcctcgttaatgctaagtgcggatttggtttcgatctttacctggcaaaaattggcatcagcagcccggatcgggcaatggaggccctatatggctcagccgttgagatatcacgacatttcagaccaattactgaacttgatgaagacttgcgtcgacgagtcctcgaaattttgtgtgcgtttgcataccaggattatgcacgtagtgcggcaagcgtacgcaagtgtgaccgctgcgatggcagcggctttaccggagctgatgttttcacgaataaagtgcagtatcccgatggtaagccgcctaaatgggcaaaagttacaaagggcgtttgtccgtcatattgggaagagtggaagtcggtacgggaaacagtacgcgttttatgctcagcctgtaatggaaaaggtgttatcagtaatgcgtgtcgctgccatgggaaagggaaggtactggacaagaaagaaacggagatacagggcgtgccggttatgaaggtttgcgatcgctgtacaggtagaggttatgcccggcttaaattctctaatgtactggagggcgtacgaaccgaatgggatgtgaagaaaaccactgcctatgatcatatccagccattattcgaattgctggtagaagagtgtcaccggcaggagggatatgcagacagtgcattgaaatcagttactcaatag

SEQ ID NO: 392640 - DNA, 570 bp, Salmonella enterica
atgaacagtttacccgacgattactttctggatgcggacgatgagctcgttgctttcctggaaaagcagggagaggactgtatacgagagattcaccagtccaatgcactgaacaaagaaaatgctcagaagttattgagcatcctcattgctggtattggctcgtcttttttattgttaacgcaacgcactggctttgattacctcacagccggaatgtctgtttttttagtctactgggcaatgtgcgcggcataccttgttcgtcgcgtcctcgttgtaaggtcaagagctctcgcatcatcgacaccctatgcgttgtaccatgaaggttacaaggggttcactgaaggtgactattctggttttgaatcgaaaggattctcagcaaaacactctacgttgaacattttgaggcgttaccggctcgcagatttgactagaatggctgagatgagtaaacaagagaatgccagaataggccgtgagcttgaaagggtaaggatcgcaacaatccttacccctgtatgtgcgctgattatctcagcacttatttaccttttcttctaa

SEQ ID NO: 392641 - DNA, 153 bp, Salmonella enterica
gtggaaccaacaaaccatctggcgaaagtaagccgcagccagcgccgcaacctaaaccagcgccacaaccagctgaacgaaacctacgaactggctggactgtcgttggcgattctgctgatggccttagaagaaaaggtaaataagtgctga

SEQ ID NO: 392642 - DNA, 1263 bp, Salmonella enterica
  misc_feature (1229)..(1238): n is a, c, g, or t
atgaagacgcatattcttttggccagagtgctggcatgtgccgcgcttgttctggttgcacctggttattcaagtgaaaaaatacctgtaacgggaagtgggtttgttgcgaaagacgatagcctgcggacatttttcgatgccatggcgctacagctaaaggagcctgtcattgttagcaaaatggcggcacgaaaaaaaattacgggcaactttgagtttaacaatcctaacgtattactggagaagctctccctacaactggggctgatttggtatttcgatgggcaggctatctatatttatgacgccagtgaaatgcgtaatgccgttgtttctttacggaacgtctcactcaatgagttcaacaactttctaaaacgctcaggtttatataacaaaaattacccgttacgtggcgataaccgtaaaggaacattctatgtttcagggccacccgtctatgttgatatggtggtcaacgccgccaccatgatggacaagcaaaacgatggtattgaactggggcgccagaaaataggggtgatgcgtctgaacaataccttcgtgggcgatcgtacctacaatctgcgcgatcagaaaatggttatccctggtattgccacggccattgaaaggttattgcagggagaagagcaacccttaggtaatattgccagtagcgaacccccggcgatgccagcgttttcagcgaatggagagaaaggtaaaacagcaaattatgccggcggcatgagtctccaggaagctttaaagcaaaatgccgcggcgggcaatattaaaatcgtggcctatccggataccaacagtttgttagtaaaaggaacggctgagcaagtgcattttatcgaaatgctggttaaagccctggatgtcgccaaacgtcacgtagaattatccctgtggattgtcgatcttaataaaagtgatctggagcgtttgggcacttcatggagcggcagtattactattggggacaagcttggcgtgtcattaaaccagtcttcaataagtaccctcgatggcagtcggttcatcgctgcggtaaatgcgttagaagagaagaagcaggcgacggtagtttcgcgcccggtattactgactcaggaaaatgttcccgctatttttgataacaacagaacgttttataccaagctgattggggagcgtaatgttgcgcttgagcatgttacatacggaacaatgannnnnnnnnnttacccgaagtcggacgaacgttaa

SEQ ID NO: 392643 - DNA, 186 bp, Salmonella enterica
atgacgttagcagaacaactgaagcaggaaggtcgtatggaagagatacaacaagggatgcaaactggcgaacgtaaagcctcacgtaaaatggccaggacaatgctgaaaaaaggcatcccgatggccgatatcatcgaaacgaccgacgttagcgcaggacagctcccgccactgcggcattaa

SEQ ID NO: 392644 - DNA, 138 bp, Salmonella enterica
atgtctaaagaacagaaatctttttgtaagaaactaaccgatgaggctaaaaaatattatctgaaagacaaaagcagatatttaaatatggtaaattactgggagtgcttggtgattatatgtcggttcgagacgtag

SEQ ID NO: 392645 - DNA, 303 bp, Salmonella enterica
atgaataaagatgagtttctaaaaaaaatgaatttcccaattgagtggaaaatctacaacatgtaccctgataaactttatttcatgcaagtaaaaaactatcaagatggggatgaacaaggctcagaacacgatcgcaatggcgcttttcattggtggttaaaacgcgttccaaatagaaatgagttagcactattgattaaattaacatatttagacccagaccaactcatggcgaatgatgttcgaaattacatacggcaggcaaaaaattatgattgtggtctggaatcctctttctaa

SEQ ID NO: 392646 - DNA, 123 bp, Salmonella enterica
atgaaacataatttaaatgaagatgattttcatgacagtttaattcatggcattgttttttattctgagcctggagagttttattcagatatagcattggatattgactatatatatgaatga

SEQ ID NO: 392647 - DNA, 429 bp, Salmonella enterica
atgggtctcgcacctaataaatatggacacatgaagaacggtggctacggagcgaaaccgaccccaccacctaagcccaacccgggtaaaatgccaggcatagcggaaaaattgatgccaaattatcctattgaccaagccagcagtgagcccaacgttttcaaaacattttttaatggattcagcccgtacgattacacattgtattgtaaaaagtgggtgaaaccgaacctgatttgcacaccatgggatgatccaaaatatccaggtatggatacaaagacagcaattgattatctacccaagaagaattgggcagtaaatcaattgccagagggatattcttgtgcagaaccctatttattcccggatctcaatgaactcagtggaccagcaacggcagggatagatgatctgggtgagttatga

SEQ ID NO: 392648 - DNA, 582 bp, Salmonella enterica
atgaaacgactttttttctttataccgataatattcattagttttgacgccatggctacgtgtgaaatacagccaaaaaaccatgcttgcctgaccatttttaccaagggcaccatctattccgctttccccattttaaacaataagcctgaatggaaatggtatcagagtgaggatataggtgaatattactggcaaacagaactgggtacatgtaaaaataataaatttgtccctaatggtgccaggcttttaattaaccttggaacactgcgccccaaggaaaaccctccaactgaaggatcttttcaggatttactaaatgctgctgagaaaacagcatttttcgatgacgcaatcgttgataataatattagaagtcatatccgagggggcttctatcaaaaaaacagcagagattcagtattgtttgcaattcttgataactcaatcatggtaaagtattttaaagcagagaagtcaacttatgctcgcatgacagcgcatcttcctgaaaaaaatgagtcttacgaatgcgtaacgaaaatagaatatggggtgcttcgtagtgagaaaaaataa

SEQ ID NO: 392649 - DNA, 804 bp, Salmonella enterica
atggagccggaatacacaccggagaggacaatccacttgtaccaccggggcctgccgctggcgctgataagccaggatggtgacatcagctggcacgcagagtatgacgaatggggtaacgtgctgcgggaagataatccgtcgcagctggaacagctaatccggctgccggggcagcagtatgatgaggagtcggggctgcattacaaccggcaccgttactacagtccggggcagggacggtatatcacgcaggacccggtggggctggcggggggatggaatctgtataaataccccttcaatccggtgcagcgggtcgacccgctgggattatttgaagatttttctgcattcactaatgcccctggaattcaggctgaactatcaaaagcaatgataaccgaaccttggtatatgaatgccggtgaaactcgtatattgatgagtacgttgaataatatgataaattggagactggtacagtcagataaatttttccactgcactgcattctgtcgggtttcaaaatcgagaaatacagataaatttaatgcactaataatgggtattgataaagaaattttcgatcatatgaagaatatttttgggttatatggaaatggagagataagaagcgaatcggttatgctatcagatagcatagaggatttaaaagtgaattactatggtttaacttaccctccagaacaagcatgttcatctcgatgtgagggttatctcaatcccaaccataaaaaaacgaagtcatttctaaaaagcaaaggttatttggataactaa

SEQ ID NO: 392650 - DNA, 516 bp, Salmonella enterica
atgaagaataaaacaacaaattatgtttttacgtttatttttttatcttttgtattgtccttcatcaaaggtatatgtataaagaataacatccccaaatataaatacttcgatgaaataccaaagagtacaggagtgtactcatggttgccagatttctttccaactaactccaagggtattactatattcacagatgtagaaagtgattcattttatagtgattttaatttagatgaaaagtcgtcgaaaatattcgatgatacctttacaacgaaggcatctttgtatgctatagaatatattaataaaagtaatgttattaacgtatggtgtaagaaaggagattctatagacggtgaaaatagagactcatacaattcattatacctggtagcaaagttgccagaaaataaatatcatatattattggtaaaacgtggtgagaatacaggcgaattgaaagaagaagagtacagatactgtgtttcagtaggtaatttggggaacagatga

SEQ ID NO: 392651 - DNA, 510 bp, Salmonella enterica
atgaatcacggcttactgattttcaatcttctggttgcagctcctgtttttgcctgggagccacaaaccggtgatatcatttttcaagtttctcgcgcctctcaaagtagagcgattcaactggcaacccattcagattacagccataccggcatagtggtcatgcgtaacagcgaaccgtatgtctttgaggccattggtccggtggcctataccccgctacagaaatggattgcccaaggcaaggacggtaggtatatcgtcaggagagtaaggggcgggctttcatcaccgcagcagcaaaagctaaaatgtaggtttctttccaatacagattttgatttcatctgttccccaaattacctactgaaacacagtatctgtactcttcttctttcaattcgcctgtattctcaccacgttttaccaataatatatgatatttattttctggcaactttgctaccaggtataatgaattgtatgagtctctattttcaccgtctatag

SEQ ID NO: 392652 - DNA, 663 bp, Salmonella enterica
atgccagggataaatttaacaccatatataaacccccgtggtgaactgggcgcgatacctcagaatacactggaaagaatacgtagtcagggtaccggcggaagtgtgcaggttcaactgggtggttcagtcgttacaatgcggtttacttttgctgggcatttcttgggtagtattagtccgaccgggctttccggggaagggctcaggtctgcgctcagtaatattcacgctcttgaaaggcaacttaacagcagtggtatgtctcatcgtgaacttctggacagcatgccatcgactgttccaccgcgtcctccagtggctgcatcgcgttatcccgctgctcacactcagtcattgttaagccggatagatgcctgcagtttcagtgtcgggtcggcaaatttaactctgccacaagaacgcctgatatgtccgattacgttatgcgtccctgataatggagtatttgtccgaacgtcattgcagtcagatgtctgttgcttatatgacttaactgcactgaaagagctggtgtcccggcgtctgcctcatccgattagcagggaagccataacaggggcgcatatagttccgaaagaacagtgtcattttgaccaggagaagggcgcatttattcattctgcatctgaatcgcgatga

SEQ ID NO: 392653 - DNA, 1029 bp, Salmonella enterica
atgaacatatcatcaagcggaattaatttttccactattcctacccaggttaaaaaattagttgaaactatccatgaacgtacgaaaaactggttctcctcagaaataatcagcgtcaaaaacacacatatatctttaaatgaaaaattaaatatcggaaagacctcaccgattgagatagcgttaccagacaaaataaaagaattcttccagccgaaagataaaaacaccttaaacaaaacattggttactgttaaaaacattacagacacaaataacacatgtaagaaaaatatttcagaagaagatagctcaaaaattattacagcatgcatgcgtaagcatattgcacatcaatcatatgattataattacagagtgacaggtgcagatctactccccggtggagtctctatatcagccaataacaggccgactgtttctgaaggaaagagagatctgacttcgcctgatgcgaataaaacaaatagtcatgatgaaatgccacctataccgccagtagattataatgccactttacataaaggagaaatcgttgggaaaggagggaatgctattgtatatgctgataaagacgatgacacaaaagttttaaaaatgttcactatacctcaactccatgaagaggtagagcatgaagttgaatgctttaacacatattatggaaaaggtagcgcagatatcatatataacaacaatgatatatcaggtatcaaaatgacaagaatacaaggggaagcagtaatttatgctaaaaacttaccccctcatgcagaacaagctatatatgatatgtttgatcgactggagcgaaataatattctcttcgttgacactacagaaacaaatgtgctttatgaccgtgacactaatagatttaaccccatagatatatcatcttataatctaaagcatacagatagtaaggacaggcaagatagcattatagaatcctatattggtggcaaaaattatcttattaacacagtattaaacaaaatagaatag

SEQ ID NO: 392654 - DNA, 192 bp, Salmonella enterica
atgatactgccagtcaataataatcccggacgtattccaacattagcgccagaaacaccggcggctacgggcaaggactattctgctatctggcaggcctgggcaaaagaggcgcccgcaggaagccatgaattgagagagatagcgttcgaaagattacaggcctgcctgacaaaacaggaatgttcctga

SEQ ID NO: 392655 - DNA, 150 bp, Salmonella enterica
atgaaggggggagatccggcaggacttcaagactattacctgaacaatcgagtatttgtaagttatcaggtaattctgaaaatgaggctatcatattacctgaacaatctaatgattggagggtatcaggtagatgaggaagctctctaa

SEQ ID NO: 392656 - DNA, 600 bp, Salmonella enterica
atgaatcgcagctttataactggcgcagtaaacagcaacaacagctctcatcctctgaccgtgaaaatgaactatccactgaaaatgcccgtctcaaacgccaactggctgaatgagacgaggaaccggccattctccaaaagacgcgacatacttcgcgaaacgcctgaaatgaagtatgtctttattgaaaaatatcaggctgagttcagaatcaaagccatgtgtcgcgtcctccgggtggcctgcagcggctggtatgcatggactcaacggcgtgcagggataaactcacgccagcaattccgcctgagttacgacagcgctgtacacgggacttttcaccgggcaaaacagcgctacggcgcaccgcgcctgaccgatgaactgcatgctcagtgttaccacatcaatgtgaaaaccgtggcagctagcctgcgtcggcagggactgcgggcgaaagcttcacgaaagttcagccctgtcagttaccgcgaacatggcctgccagtatcggagaacatgctgaaacagagtttttacgctcatagaccaaaccagaaatggtcaggtgacatcacttacttatgtacgtactga

SEQ ID NO: 392657 - DNA, 408 bp, Salmonella enterica
gtgaacaacaaacaaacaattaagaacacttacaacttaagctatggagatttgaaggtaaatagtggtttgataaaatggtataatagattgttggataagacagcagatgaactggatgaaatagatgtttccaaaatgattaggcaggacattttagtcgatctggcaatagatagcgctataaatattttaaaagataatccatatgcaggtgaaatgtatgatggagatgttttgaattctcttaattcgctagtaaagaatgagcgagttaatattgatcaattaaaaaaattaaaaaatatcgtaggtgaatttaaggggagagtatcggaatttgaatggggggatattagcaagagagaactgttcataaaaaatatcgaagacatccttactatttaa

SEQ ID NO: 392658 - DNA, 4545 bp, Salmonella enterica
atgagcggaaaaccagcggcacgtcagggagacatgacccaggtcggcggtccgatagtccagggttcggcgggggtaatgattggcgccccgacgggagtggcatgttcagtatgcccgacaggaaaggcttcgccgaagtacggtgaaccggtaaacgcggtgctgggtgcaaaagtgctgccgggagagactgatgtggcgctgcctgggccgttatcttttgtggtcagccgcgcttacagtagctaccggacgaagacacctgcgccggtggggctgtatggccccggttggaaaatgccgtcagaccttcacttacagatacgcgatgatgaactgatactgaacgataccggcggccgcagcattcattttgaactgctggcgccgggagagacagcgtacagccgcagcgagtccttctggctggtgcgtggcggtgcggaggcacaggataaagggcacccgctggcggtactgtggggcacgctgccgaaagtgctgcggttatctcagcatgtctacctggcgacgaacagtcctcaggggccgtggtgggtgctgggggggcatcagcgtttgccggaatcggatgaaatcctgcctgcaccgctaccgccgtatcgggtgctgacagaggtagtggatggctatgggcatcggctggtgtatcaccgtgacagtgtgggagcggtggcaggcgtgacggacggcgccggaaggcgttaccgtctggtgctgacgacacaggcacagcgtgcagcgcaggcaccttcctcgccgcacgcgccctgctggccggagacgctgcccactacggcatacgggaaagacaacggcatcagactgtcagaggtgtggctggtggaggacccggtatacccggaaagcctgccggaggagccactggtcaggtacgggtacacggcgttcggggaactggaagcggtgtatgaccggagcggcacggaggtaaggcgctttgagtatgacgcggggcatccgggaaggatgacggcgcaccgttacgcgggaagaccggcgagccgctaccggtacgacgaggcggggcgggtcacggagcaggtaaacccgctggggctgggttattcgttcgcgtatgagaagaacaaagtaacggtaacggacagcctggggcgtcgggaagtgctgcacacagagggcgaagacggtcttaagcgtgtcgtgatgaaagagcaagcggacgggagcgtcattcgcagcgggtacgatgcatcgggaaggctggtgtggcgcacagacgctgcggggagaaagacgacgtacagcccggatgtagcgacaggaaagctgacagcggtgacggggccggacgggagaaagacaaagtacagttataacgaccagcagcaactgttaacaacggtttatccggacaggttgcgcagccagcgagagtatgacaggcagggtcggcttgtgaaaacggtctcgcgtgagggccgggcgacagagtttgtctatggcagcatgcatgacagccagccatcggtggtgaaggacagtaccgggagtcgccggataaaacgtggacgttacggagaaattttgtcacgaacggactgctcgggatatgagacgcgatatgcgtataaccggttcgggcagattaccgccgttcaccgtgaagaagggatgagcgagtaccggcgctatgatcgtcgcggcaggttatcttcagtgaaggacgctcagggccgcaaaacggagtacgaatacaacgacgctggcgacctgacgatggttatccactcggacgggcagcgacgagaagctgagtatgacgcgcgcgggcggatcatcagagtaacggaaggcgggctgacgcgtcgtgcagtatatgatgcggcgggacgtgtggtgcgactggtgaacgagaacggcgcggagatgcactttacgtatgatgcgctgaaccgggtgacggaggagacgggctttgacggaaggattaaagcatatcactacagtagtacggggctgctggaacgcagccgggatgaggatctgacaacagcctggtactacgatgacgccgaccggctgacacagcgtacggtgaacggtgaaccggcagagcagtggcaatatgacgaacatggatggctgacgtcactgagacacatcagtgaaggatatcgggtggatattcattatgaatatgaccggaacgggcggctggtgtcagagcggcagacggtgcatggcgcggagaatggcggcgaaccgctgtgggagcacagtgtggcgcacggttataacgaccaggggctggcaacgcgggaagtgtatgacagattgccggtggcggagtggctgacgtatggctctgggcacctggcgggtctgaagctgggaagccagccgctggtggaatacatgcgtgaccggctgcatcgcgagacagagcggtggttcggcgcatggcgaatggcgacgggatacaacgcaagcggcgaggtgcagtaccggcacctgtcagacccggcgctgagcagggagtaccgacatgacgtgttgggattcctgacagatattgagggcggggaggaaacctgccgctacggttatgatggctcgggaagactgacggaagtaagcctgacgaccagagagatgagcgtggacatcccgtacgagacggacgctgcgggaaaccgtttggaggccgtagcggaacggcgggaagcgaacgggctgccgggtgtcttcgcagacaaccgggtgacggaggacgggcagtatacgtaccgttacgacaggtacggtaatctggtggagaagggcgcgcgcctcccggcgggaacgatacgcagcggggatgaacgaacgcaccattacagctatgaccgacaacaccgtctggtgagctaccggtgtacggaaggttacagcagccggagtatcacggaaagtcggtacgtgtacgatgcggcaggacgtcgggtgtgtaagcaggtatggcggcgggagcgttacgggacgggacgtcaccacgactacacggcgctaccggaaaaaccgaaagtgacgtggtacggctgggacggagacaggctggtgacggcgcagacggagcagagccgaatccagacgatttatgagccgggcgggttcacgccgctggtccgtgtggagacgggaacagaagcgctggcaacgacccggccgcagagaagtctggcggagaaactccggcaggaagggaatgaagacggcacggagatggcatttccggcggagctggtgcggcaccttgatcgtctggagaatgaactgcgacgtaatgcggtaagcgaagagagccggaaatggcttgcgcagtgcggactgacagcggaacagatggcggaacaactggacgcacagacggagccggagaggacagtgcacctgtatcactgcgaccatcgcgggctgccggtagcgctgataaacagcgaaggagtccgggactggagtgcggaatatgatgtctggggaaaccggctgaaggaagacaatccgcaaaagcttgcgcagcttatccgcctgccgggacagcagtatgatgatgagacggggctgtattataaccgttatcgttactataatccggagcagggaaggtacatcagtcaggacccgattggactgcgtggcgggtggaacctgtatacgtatccgctgaacccggtgagcggaactgacccactggggctgtttgtccccttggtcattgccggatattatataagtgcagaggttgtagcgctggcttcatcagggcttgctgctgtgacagcggctctgtctacgccctcaggtcagcaggtagtgcaaaatgcagcaaatgcaataagtaatacatactatcaaatagcctcgcaggcaatgatagagaatccaggcctgatagcatttgttgcaggccagaatgcgacaggcagaagcctggttgattcaggtaatgcaatggctgactcgtatcagtctattttcagcgatccgtgcggcgcttttgccagtgtgtttggggatgataactcaacgaacccgaacgtaggaaaggacctgacagatgaagagaagaatgaactgggcggtgctggttctggttcgccaaatggatggggaccggaagatgaggagaatgcaagagggagagaggataacgaagctgatataatcgataagttaaatccagttcaaagaagtagcgttaacaaactgcataatattatcgaaaataatttaactgaaggtgattttagtggaactttagcggatttgcaagggaaccctatacctaaaccagggggaggtttttgggaccatttgacagaaatgaaacaatcttatgatggattaaattctgtcagaacaagtatagatggaactttaagaaatcccaatttagatcctcaaataaggacttttttagagggtgagttatcagaagctaatttatggataagtaaaatagaagatttatttaaaccatttggaggagtgaagtga

SEQ ID NO: 392659 - DNA, 2139 bp, Salmonella enterica
atgtctacaggattacgtttcacactggaggtggacggcctgccacctgatgcgctggtcgtcgtttcctttcatctgagccagtccctttcctcgttgttttcccttgatgtctcgctggtcagccagcaactccttaatatcgaattctctcaggtactggaaaaaacggcgtacctaaaaatttggcagggtgatgagattcagcgccgggtaaaaggcatggtgactttttttgagcagggggaaaacgacggcaaccagacgctgtaccggatgcagatacggcctcctttatggcgtgcgggtctgcgacagaactcccgcattttccagaatgaggatatcgaaaccatcttgggaaccatcctccaggagaatgatgtgacggagtggagtccgctgctgagtgaatcgcatccggcgcgggagttttgcgtgcagtttgaggaaaccgactatgactttctttgccgcatggcggcggaagaagggattttcttttacgaggagcacgcgctgaaaagcgatgaccagagcctggtgctgtgcgacacggtacgttccctaccggacacctttgaaatcccctggaatcctaatacccgcaccgaagtcagcataccctgtatcagccagttccgccacagcgcgcagatacgcccttcctctgttgttaccaaagactacacctttaaacgccccggctgggcgggccgctttgagcatgagggcgagagtcaggaatggcagcgcacgcagtatgaggtatttgactatccggggcgctacaaggatgcgcgaggaaagaatttagcccgctggcagatggagggatggcgcaactgcgctgaaattgcgcagggaaaaagtcgttctccggcgatatggccggggcgtcgcatcagtctgactgggcatcctcaggccagtctgaaccgggagtggcaggtggtgagcagcgatctgcacggcaaccagccgcaggctctgccgggaagtcacggagccggaaccacgatagataaccatttttgtgtgatcccggcagacagaacgtggcggccgcagccgttacccaagccccgggtggacggaccgcagtccgccgttgtcaccggtcctgccggggaggaaatcttctgcgatgagcacggccgggtacgggtgaaattcaactgggaccggtataacccggcgaaccaggacagctcatgctggatacgggtggcgcaggcatgggcaggagccgggttcggcaacctggcgataccgcgtgtgggccatgaggtgatagtagactttctcaatggcgacccggatcaacccattattatgggccgtacctatcaccaggataatcgctcgccaggcagcctgccgggaaccaaaacgcagatgaccatccgctctaaaacgtataaaggcagcggatttaacgaactgaagtttgacgatgcgacaggaaaagaacaggtctatatccacgcgcagaagaacatgaatactgaggtactgaacaaccgtaccaccgatgtgacgaataaccatgcagagaccatcggcaataatcaggcgatcaccgttaccaataaccaggtccagaaggtaggtagtaatcagatccagactgtcggtgtcaaccaggttgagtcggtgggcagtaaccaggtgatcaaagtaggggcaaatcagattgaaactgtggggattgtccgcgccctgaaggtcgggctggcatatcagaccactgtgggcggcatcatgaataccacggtggcgttgatgcagtcttcagaggttggaatattcaaaacacttaatgtgggaatgaaatacaacgtcaatgtcggacgtaacgccagcgttaatgtgggaaacagcaaaaccgaaaataccggaaaaactgctgtgtattctgcgggtgaacatctggaactggtgtgtggtgaggcccgtctggtgctgaaaaaagacggcggtattttcctgaacggtaaacatattgaattgcagggtgttgacaacattaacggcgactcgaagctgattaactggaattgtggagtgagtaaggcccccccggaagcaccagcgcaagaggatgatcctgatccggcgggactgattatgtcttga

SEQ ID NO: 392660 - DNA, 531 bp, Salmonella enterica
atgacagggcgtgtttgccgtgcctggatgatgatattactcaccctcaccttaagcggctgtgagacggcaaaaaaaatcggccaggtcatcaaaaacccggatattcaggtcggcaaactggctgaccaggcctcacaggtgacgattacgttgctgaccgagccggatgccaacctcaatgaggaaggtgagtcggcggcggtggacatccaactggtttacctgagtgatgattcgaaattgcaggctgcggattatgacctgctcgccagcacaccattaccggatgcgctggggaagaactatatcgaccaccaggatttcagcctgctgcccgatacagtaaaaaccctgccaccggtaaagatggatgaaaaaacgcagtttatcggcgttattgcctatttctccgacgatcagactacggaatggaaacaaatcgaaccggtggaagggacgggacacaactaccgcctactggtgcatatccggcagagcagtattgaaatgaaaaaagaggatgattaa

SEQ ID NO: 392661 - DNA, 1416 bp, Salmonella enterica
atggacttacgtaattccgatatctggtttgcacacctgctggaaaatctgccggaagaaaaactaacctctccgctgaaagacgataatcccgactgggagtatatcgacggcgaaatgctgaaactcggttcactggcccacagccagcttgatatcccggaaattcagcgtcgggggctggcactcctggcctcggagagcaaggattttcgcctgctggcgcacctgctgcgcaccctgcaacatgcgggtgatccgctactggcgctgcgtctgctggcgctgtacgtagagcattactggacagtggcggcaccacagaatgcggcacataaacagcgttttgccacccaggttatcaaacgctttgaagctggagtggaaaatttcgcagaaaatgcagacaccacacaacgtgaaagcctgctggctgagctggcaaaactggcgcagcgctggcaggagcaaaatatcccggcactggcactggccgtggatggcctctcttcgcaataccgccgtgcatttcgtggggcggcaccggtgcctccagcggctggcccgtctacacacccaacttcagtttcagccacacaatccccctcggtaccaccgtctgctcctgctgtggtgactgcgccagtggtggatatcgacagccatgacgacaaagcctggcgcgacacactgctgaaagtcgccgctattctttgcgagcgccagccggactccccgcagggctaccgtctgcgccgtcatgcattatggcaggccattacctccgcgccgcaggccgaaagcgacggtcgcacgccgctggccgccttccctgccgatatgatggatgattatctggcgcgattaaacactgccgatatggcgctgtggcagcaggtggaaaaaagcatattactggcgccgtactggtttgacgggcattacctctcggcacagaccgcgcaacggctgggttacaccagggttgcagacgccattcgtgatgaaacagtacattttcttacccggctcccccagcttgcagccctgctgtttaacgaccggacgccatttatcgcggaaccgacgaagcagtggctggcatcctcctttgcgggtaacagcgcagcgcctgccgtacaggccggtgaagagttacaggcggtccgggcgtgttttgaagaacaggggctggaagccgcgctgcgacatctggaaaacctgcccgcaggcgatccccgcgaccagttttaccggcagtacctcggtgcacagttgctggaagaggccgggatggcgcagcttgcacagcagcagtatcgcctgctgtgcactatgggactgcaaatgacgcttcccaactgggagccatccctgctaaatgcactggaacagaaattcacggcagaaaaataa

SEQ ID NO: 392662 - DNA, 483 bp, Salmonella enterica
atggcaaatttaagttacttaaccctggtcggagaaaaacagggaaaaatttcagaaggttgttcttcacagaaatctgtgggtaataaagcacagatagcacatactgacgagattatggtgtatgcattaatgcattccatatcaaggaaccagaacgttaaccatcacgaactggttatcactaaaccggtagataaatcatcgccattgctggcaaaagccatcagtgataatgaaataatgacaacctgcgattttacactttaccggaccagtaaagagggtatcagccaaccctactacacaataaggttatcaaaagcccggatatcaaatatcgattttgttactcctcattcggttatggaaaaagaaattgacccacaagagcgagtttctttcgtttacgaaacaatttcctgggatcatatgattgcggggacaagtacgatcagcaattgggttgatcgcgtacaataa

SEQ ID NO: 392663 - DNA, 162 bp, Salmonella enterica
atggggataatatacgcgacggaagtgatggtggtgggggaaggattattcgtcgctccgctcctcaccctccgggtcgttgcctgcggcaacgctttctcgctgcactcgaatcgaaccttagtcgaagcttctcatccttccctgtatggagagatatga

SEQ ID NO: 392664 - DNA, 141 bp, Salmonella enterica
atggttgtcacaaaaaatatctctcccaccccattcgccctcagcccttatatcatgggaaatcacagccaacagcacctcgcaatattcatgccagaagcaaattcagggttgtctcagattctgagtatgttagggtag

SEQ ID NO: 392665 - DNA, 966 bp, Salmonella enterica
atgccaattactatcgggagaggttttttaaaaagtgagatattttctcaaagtcccctctctcaacgctccttctttacgttactatgggaaaaaattaaggattttttttgcaacacgcgaaaagcagaggctgatcaatatataaatgagctatgtgatcttgcttctccacctgacgcacagcgtttgtttgatttattttgcgcgttatatggattatcatcaccatcatgcagagaaaaattccattttcaacactataaagatgctgagagtcaatatacaaatctctatatcaaagatggcgcagagattccgttatgcattgtgatacgtcaggatcactattattataatataatgggtaaaacggtgatctgcattgatacttatcctgaacccctgaaaacccatcctgatattaatataaaaaccggcacttatgtttgtgaaccgctatgttgtttgttccctgagcggttgttactctcgctatccagcgacataacattttccattgatttaaaacagataaaagagaaactcatcgatatggcagagaatggaactttatgtaactggaaggaacaggaaagaaaagccgctatctcctccagaatttataggggcataatacaagcaggtgtaacagctattgatgaagctaccaaaaatacaatagcctcaaaggttattgaggctactaacttaaagaatgcaacatttgatgcaaattacacgcaaagctcaattacgcaaatggtttattcatgtttgtttaagaatgacatattaatgaatatacttgatgaacaatcctgtcatgacctgctatgtttaaacgaccttactgaatatgtagcgctacaaattcataattgtcttttttctgaagacttatcttcactcgttaaaattacagaaaacgaggctcatctatactataaacatcatcatttatag

SEQ ID NO: 392666 - DNA, 741 bp, Salmonella enterica
atgagtaatttctattccagtgattttccagattttttctgtaatccaggaaactatcatttgaaatcgaaacttcatgcagattatcctataaataatgcagcattttttggtgatattgaaaaagttagggaattgataaaattaggtgttgatatagatgcacgtggcgatcttggatatacagcattacatcatgctgtatatcaaggatatgtagatattgttagacttttattagaatccggttcaaatatttatctggaaactgagctagggaaatctgtctttgatttggcgataatggttgaacggtatgatattcataaaattctttcagattattctagtcccaagcttaaggtagccctttcagatcttttggttaattattcaaaacgttacttttatggggatactatagatttggaatcaataacagaatgtggagaataccctatccatattgctgtaaagagaaaaaagattgatgaagtaaggtgcctaataaatgcaggggcgaatttgaatgttaaaacagatgatggatttgaatttacgccattacattattccataggggagaaatgttttgaaataatgagattgcttttaaaaaataatgcatcatatgaattgaaaagtgggatgggatattcccctctagatttggctgtgataatgggagataagaaaagtattttttatctgtatgagtttataaccagcaaaaaaagatga

SEQ ID NO: 392667 - DNA, 1050 bp, Salmonella enterica
gtgcatacgaccgccgcgaaccgcgagccggtccactggagcgagacgcggacagagctgtcgcgcaggccgtatgagacgtggtacggctgggagggggacaggctggcaaccatccggacacagcagcgccgcgttcagaccgtgtacgcgccggggagcttcacgccgctggtgtgcatcgagaccgacgcggcagcgcaggcgaaggcgcagcaccgcagcctggcggagaagctggagcaggaagggagcggggacggcgaggcggtgcagttcccggcggcgctgcaggcgatgctggacaggctggaggatgagctgaggcgtgacgcggtgagtgaggcgagccgggcatggcttacgcagtgcgggctgacggcggagcagatggcggggcagcttgaggcacaccctgagccggagaggaaaatacatcgttaccactgcgaccaccgtgggctgccgctggcgcttatcagcccggacaacacggtggcgtggcgcgcggagtatgacgagtggggcaatcagctcagtgaggagaaccctgagcacctggagcagctgatacggctgccggggcagcagtatgatgaggaatcggggctgcattacaaccggcaccggtactacagtccgggacaggggcggtatatcacgcaggacccgattgggctggccgggggatggaatttatatcagtatccgttggatccggttacagaggtagatccactgggtctgcttcctcaacaagatgatgatacaccatcacccaatggaatgagatttgatcctgatttttggaatgactatggtactagaagatcgaataactgttatagctatgccaatgatagaccttttattacaaccgatcaccctctcctttttcacacaccaagtgatttaacttgctctggaattgaaaaaaatctggaaaattctggtatccgcaaaatagactcatccagacgctgccctgatggttatcataaaattgcactttttattgcccctggtaaagatttccacttttatcgttaa

SEQ ID NO: 392668 - DNA, 645 bp, Salmonella enterica
gtgaaatatctaacattgatgcagtgggtaatattattaacgatcctgataaggcggttaggtcttataaacgatggactccagatattaattactctgaagggtgtgggacatattgtgcaaaagattaatatctgtatttttatttttttaataaatataaatagctatgccttggctaactgttatatgccaagtaaaaaaacaaaccaagtcaatacactcgatcctcatgtcaacaaaaaaccatttgacataaaaaaattagacatagaaaggataaggtatgatgaaaattcattttttatttggaaaaatgtagatgggtattatttttctttttatccggcatatttaaattcaggttttacaagagaaaaaattcaatacgatgtgtttttctgttcaattgatgaaatagattatatttttgaaagtaatgctgggaacgaaattgatttttatttgataatatcgccatatgatgataattttcttaacagaggagaaaagttgctagtaaaaaagaatgtgtattttcatgcagtgaaataccttcatgaattatctgttaaatataaagttaagttatttattcttgacgatgataattggggagggaaaatatcaaggcaaattaaataa

SEQ ID NO: 392669 - DNA, 426 bp, Salmonella enterica
atgcagcaacgtattttatcgttgaatagcacctgtattatcgggggtgttttgtggttacttccggtaatagcggttcatgctgatgaaattgtctgccccgctgttattcatttttctcaggcaccgaaaatttcctcagtggaaggatggaatgtctcatcccgtacagatcgtatgctgaatgatggtggttttctttcgtctggcgatcccaaagagcaggctgatctgaaaggtgaaaatgcaggcgttgatgggaaaaaggggcgtcagtgggcgttagatccggaggataatcgtcgggggatttggttctcgtgtagctatgggcaatggactgttctgcttgccagaaaagttcagggaacggtcgtgacatgctggagtccggatgccttaccggcgcggttgatttgtcagtga

SEQ ID NO: 392670 - DNA, 270 bp, Salmonella enterica
gtgtttggaaacaaaaccatcgacgcctggacagttttcgctatttttgtaaatgggcgatatccggatcacaatagtggtaaccccgctgccttttatctggggcaagatgttggcgggataggcatgatgaatcaatggaaagacgatattgcgaaactccgtacgtcaaagcgttatatgagaaagttgtgtaatggatgccttcatagtgagggagcttatataaggatgaacaataatgcagcaacgtattttatcgttgaatag

SEQ ID NO: 392671 - DNA, 291 bp, Salmonella enterica
atgatattacgttaccccgtgttattgacgtccctgttaatggtgggcgctttcagtgttcgaggagaacctcctttaccgcaggatgtgcagcattttctgagcaatgcagagatatgccagcatcttgcaggtgaatgggacagttctttaccagaagaggataaaaaagacatagaaaaggggatcaatacctggtgcccaccggcgaaggctgcgcttcctgagttgcggaaaaagtacaaagaaaataaagaggttataaaaaagctctctgaatatgatttttaa

SEQ ID NO: 392672 - DNA, 567 bp, Salmonella enterica
atggataagaaaaagctttttatcgtacatggttttatggcaaaaccttcagatcactggttcccgtggctaaaacgtgaagctgaaagacagaacattgacgttattattcctgagcttccctcccctgaatcccctgcactatcaaagtggcttgctgttttgcgggattccgtaggcaagatagataacaagacatggttcgtcgcccacagcctaggatgtgtgacaatacttcggttgttagcacaactaacagtaaatgagatgccagcgggtattattcttgtttccgggttcaatgagacactcccgatatggcgacaacacggtctttcagaaatggatgcattcatcgatcccccactagaaatagggcagatagttaacggagtaaaacaccgctatgtcattagctcattaaatgacaccatcgtgccgacggagctaacgcttaaactaagtcagcaactcaatgcccccttctatgcgcttcccgattcaggtcattttttaggtgacgatggtatcaacgaattaccactggttttgcaactattaacatag

SEQ ID NO: 392673 - DNA, 609 bp, Salmonella enterica
atgcttaagcgtctggcttacctgatagcaggcagcgctctcctcctgctagtagcggcggtgttctggtgtttcaaccgtctgaacaccctgatactggcgcagcaacagacacaacgccagataacacagtggcgcaaccagccgcagccggacagcgattatcgcgagctggaagctgccgtaaaaaacatcaccgatcgcacggaagcccttgccagacagcttagcgatgccactagcactcagtccgaacaacttcaacccatcaacgaacagctcagggtactgaagggacaaatccagaccctaaatgccagttatcaacacctgcaacaacagaccgccacgcgcagccgcgccacggcaaaacgccccgtcccctctccgctttgggccgcaaaggcccctttttctcttatcaacagcgagtttcgcgccgggcggcagttcgccgtcattgccccatccggatatcgctcgctctcacagcttcagcttgtggcccccggcgacagcgtgcagggctggcaattgctgcaactggacggcagtcacgccactttccgtaaagacgggcagcggctgacgctgaacgccggagggtaa

SEQ ID NO: 392674 - DNA, 684 bp, Salmonella enterica
atgcacgaccatgcgccgcaaggaccagtacgccgtcccggactactcggctggctcgcattgttgcccggcgtgctgattggcttttgcctcggcgcatggatgctggcaatagcgctggagtggctgggcgacgcgtttttctggcggaacacctgcgccagccacagcgaacaggtattgcaggcaacatggcagtggtggcagagttctgctggcgcaccggtgtggttagtagaagatctgacacttgtcagcggtaagttgcagcaagggagcgcagcgctaattgcctcactcaacgggcaaagtggcttgttctggacggaagccgtcactacggtaatccactgcgcgatactgtctgcgggtaatgttaccctaacctttctgctgcggctggcgattctgttgcaggcacttccgctatttgcgctgattatcgtcgtcgggcttattgacgggctagtaagacgcgacttacggcgattcggcgcaggccatgagtctgggtttgtttatcaccatgccaagcgtatgatcggttccagtctggcggcaacgggattagtatggttaatgttaccatttgtccttgtgccagagtatatattagtgcctggggtaatagttatgggattagttatatccaccacaattggcacatttaaaaaacacctatga

SEQ ID NO: 392675 - DNA, 798 bp, Salmonella enterica
atgtgtaagataaaaaccgtcagtgaatatatagaaatcattaactcaatggaacgaactggtagtttataccgaggacaatgtgacataaactttaagttaaccccatctatatttcgtaatatcgaaaatgagattgcgaaaaataaaaaacaaattatggatgaattagaaaatgggggcatttctgatgaggatcatgagacactcttatctatgttaatacccagcacaaaggaggttttaaagaaaagggaaataagtgcgattcgtattttcatggcagaaagcgccccatacttaaaccaaccagttgagtcttatttagaaatattggcactagctcagcatcatggtttaccgacccgcctcctcgactggagtctatcaccactggttgccttatacttttctgtagaaacaaacggtgctaacgatgctgtggtctacatcctaaaaaactctcaatggatcgatgagacagagtttaagaaacactcgacattaggtattgaagactatttagataaaatagataatgagatgataaataatattttcatgccaaaacatatcactccaagaataaaatctcaacaaggtgttttttctatacacagcttaaatgcccctgaattccaaccttccgaaattgaaaaaataacaatagacggtaactaccgcaaagaaataagaaatgaactacgtcaattaggtataggtgaaaggactatttatcctgatctatatggtttatgcaaagaactaaaagccttaaaacttgagtgtaatgactaa

SEQ ID NO: 392676 - DNA, 312 bp, Salmonella enterica
atgcaaaccatcacgataattgtcatcagcctgtttataaccagttccgctctcgcagcccccctaaccgagcgcgaagagctaaccctgtccctaaaccagcttacccaaatcgaagcttcgctccaccgcgcccaacaaagcgccagaaccggtatcaacgagcgctactacttcgactatccgcgtatccacggcgatatcaccactctacgcagcgggattgaacattacctcacccccgctcgcgttcaaccgcgtgatacggcgacgctggttgggcaataccgtgatgagaaaaccgcgccatga

SEQ ID NO: 392677 - DNA, 258 bp, Salmonella enterica
gtggaagatggctccatcaccaccgcgctgacgggcgacagcgggcagtacgtgctcggccaggcgctgggcggtggcctgaaggagagcgccgactggtttaaacaacgctacggccagatgttcgacgccatctacgtgtcacccggtcaggccgttgccatccatattacccgccagctcaccatcgactacgagcctgacggacggcgggtgaactaccgcacggcgggcgagcgcactggagacctggactga

SEQ ID NO: 392678 - DNA, 396 bp, Salmonella enterica
gtggcgcaaactgggatctggctgtggctggcgacgcagaacctgagcgactttccggacgatgcgaaaaaactactcaatatgattgaatggtgggagctactggtgatgccacccgaggaggtggagcaggtcagccgctttaaatccctgacgccggaacagcgtcagctactgctcagcgccaccaaagcgccggggaaatataccgaaggcgtggtgctttcgccgcgtgtggaagcgttgttccgcgtggtatcccctgccctgtggctggcactggggatgacggagaaacacgaaaaggcagagcggatgcggattatgcgggaatttgggtgcagtgagctggaggcggcgatgagggtggcggagaaatgttttgctatgtattag

SEQ ID NO: 392679 - DNA, 1647 bp, Salmonella enterica
  misc_feature (1611)..(1620): n is a, c, g, or t
atgttaacgctagagaatgccgttgagttagctaggccctgggctataaagttatttgaggaaaaaatacttcctttccttattaataaaggaaccgatgtttataaaaaagggcggggtgttctcaaactaagagggcaaatgtctgaatttttagctaaaacaaaagctcaatgctcaataataaactcactggcatttcctaatgttttaaaaaaaatcaatgacatttatgttcctttaaccttatcaacattagattctacagacgaaaatgaatatctcgttgacagaggggataagtttcttaagcattttaaaaatatattaataatcgataatgcaggaatgggaaaatcgacactaatgaagaaaatagtaattgatactattgatcattcagagtatatccctatttatatagagctacgaactctaacagatagccctattattgaacaaatcaataaactaatcggatttgataatgtcaatgataattattcattgaaaaagataccctttatttatttttttgatggagttgatgaaataccttttgatattaaaaatgatttaataaaaaggataaagtctttcagcgatgaaatggttgactcaaaaataatcatcacctctaggccagatcaatctctactcgaattacactcttttaatagatttagaatcaagccattaaatatagagcaatcttataaccaagtttttgaagcactttttgaaactcacgatcttagtaaagaaactggttatgttcgaagaaaatcctcaggtttagatataacagattttagtattatactgcgccgattggcattttggtgtttaaaaaacaatggccgactggaatttagcagggctgagcttgaagatgttataacaaacattactgagaaactaaaaggtattagtgttaaacctatattatttattaatgacttgatatactctgtaccactttttattaaagaaggttctctatatagatggtctcacaaatcacttatggagtatttttgtgcagaattcatttgtattgaagttaaagacaaaagggatgatttattattaaaattatacgaaagtaaaagcgtggtgaaattcaaaaacataattgaattaagttctgatattgattatgcatcttttagaaaatctattcttcaaaagtgtcttaatgaatatttcgagcacttagaaaaactaaaggattttaatttttcaaacgaatgtgataaagatatttgggcaagcattagttttttctctgacttgcgcctacttctaacaccttatagcaatgcgagcctaggtgatcttgatatctgtgataataatccctacaaggataatgattcactacataaccatttcgaaaataattttatagggtttcgagattttattacacacatcacatatcctatatctttaagaaatacagtttttgagattcttagattaaaaaaacccgaatacttctttaaagaaagagattatttcaatcgtatgtttctcgatactcttaaaatacctgagaatacaattatatcaacttccaatggttatacaaaggagcatgacaacgannnnnnnnnncaacgatatcataccagatattattag

SEQ ID NO: 392680 - DNA, 639 bp, Salmonella enterica
atgtctaagatcgaacgataccagggaaatttacgagcttttgcttcaggcgcggaagggctggagcgaacactttttggttctgcggcccaggctgatgaccttacctcgcaggttaccgccgcttttttgcgcgggtgggggattgttggagcctctgaatacccatcgttagaagattttaatggcgcgatgtatgcaatgtctcagtttttagcctaccagcatcaggtcggtgtacctgagtggcatgaagaccaggaatattatgttggttcaatttgcactcaccatggtgaatcctaccagtctcttacagatgcaaatgttggcaacgaaccgccatcagagcagtggacgccgattttaacagctgcaaatggcctcaacaatattggtttgaatatccagtttcagatgggagcgaatatttctattgaagctgatgaatacgggaatattccacagcaggacggcatggtgatgacatcaatttctattccacctgataatcattccaaaatacaggcaacattccagccgatacaggtgaaatttggcgatggtgactggcaggacttaaaaacactgaagccagcaggtaatttaaaacaggaggtatccgatgacaatatttaa

SEQ ID NO: 392681 - DNA, 723 bp, Salmonella enterica
gtgaatgatgacatcataaaccgctatacgctaatgctgattaagcagtactgggaaaagccaaaagcaaaatctgaaatacaggctatgttacgacactggcagattatcgccgactttattcgcaatccagataatttcgatcttgaccaggtaacaggttatcgattagacgttattggccgtataattggtctggcgcgtagtgttccggaagtaatcgccaaaatattttttggttttgacgggcatattaattcagcaggctttagtagcaaatcagatgtttcatttatcggcgctccatttttcagaaaatttgcgccagcatatggtgattatcagttaggggataatgaatacaggcgatttttaaaagtgaagatcgcgaagaatgccgcctcttcaacaatctcctctgatgatcgggtgagtttgcaggaagtgatacaggcggcgtttaacggcgaggcatatgtcactgatcggaaagatatgacgcttgctctaaatatttcgccaaaagtacccccggaagaattgcgactcattgttcaactcggtttgctccccaggccagcgggggttcgctacgattatttttaccaggtaacacccgggttgacgtttggtttttccaggaaccccgccgccagaggtttcgccagcaaatttaatgccgccagccagggcggttttttttcgaggaaaattcatgtctaa

SEQ ID NO: 392682 - DNA, 1182 bp, Salmonella enterica
atggcactacactttaatgacaatggccttgagacaaataactttcgtgaaatttttcagacgctgagtgacggatataaagccatttatgggcaggatatagatctggatcaggagtctcctgatggtcagcgagttgctatcgaagctcaggcgcgagcagatattgaagctgcgctgcaatggctttattcccaaatggaccctgattttaatactggtgatatgcagcagatcattgcaaagctacatggcctgtatctgcgtcccggttctcgttcacagcgtgaccttaaagtgacgaccgacaggactgtattgctttatagcgggtacaaaatacgtgatcaatcaaaccaggtatggtttgtgcgccaggatgtgcagataccagccgggacaacaagcgttactttctttgctcaaagtttcgggaaaattaccggactgacaactgatacttttactcaacttactcctgagcctggtgtggtggacatcaccaccgatacggaaattgttgtaggtcgtgatgaggaaacaccggaggaattccgccagcgtagaaaccgctcgctggagaaccctgctaccggcagtaccggggcgattttcgcgaaggtggcgcaactggcgggcgtgaccgatctgaatattgatgagaatgataccaaaatcgacaacgaaattactggaattccagctaattcgatctggcttgttgttgagggcggggcaatttcagaaattgtagaggttatggttaagcagaagggaggaggcacagggacaaaaggcagaatcactggtcggtatattgaaacactggtaaggcctgatggtagtacacttcagatagcccacgacatgcagtttgatcgaccaacctataaacccctacatattaaactcactgcaaaaaggaaagttaaaggtgagccgatagacattgatacgctaaagaaagcgctggcatcacgagttatgcacattggcgaatcagtggatgcaaatgagttttatgagaatggttatggcgttagccgggttaattttgttttgactaacctacagatcagtgacgatggcatcacgtacacagatgctgagttatcgcctggctttgaggggaaatttacacttgatgttgagaatattgatattagtgaggtggttttgtga

SEQ ID NO: 392683 - DNA, 597 bp, Salmonella enterica
atgattgaagaacttcacgacactatcgggctgggtgttgaattcgctctggccgatgttcacaccattgttgtcgcaaaaataactgtcgtgaatattaacacaatcagttgtgtcccggttatcaaccgggtcgttaaaggtgaaagtataaaactgcctgagttgatcgaagtccccccagtgatattgcaggggggcggtagctacattgccgagccgattaagcccggtgactactgtctggttcttatctcagaacgatgttatgacgcatggtatgcaggtagcgacttcgtttcaccgcttgaaatgcgcatgcatgattattcagatggttttgctttatgcgggattaatccgctggctaacgccatcgctatcccaaaacaaaaccggatgatgaacgggaacactgaccatgtgggggatctgaatctcacgggcaatgtcacggtatcgggcaacctgacggtgggcggtgatatcaactgcgccggacggttaactgtggcctcggcgaccattggtggtattaatttcggtactcataaacacaaaggtgacagcggaggcgatacaggaggcccgcagtga

SEQ ID NO: 392684 - DNA, 1359 bp, Salmonella enterica
atgccgatgtttgttcctcttacggcttcacgggaaaccgggcgggaagagatgcgggacctcagcgcgtggttttcgcaggtccggcgccagcagtcactgaatatcaggcctgttcccgtgatgtctgaaccgcccgcaaccacgctgacaaaggcaaccggtatggcgactgccacgataacgggggcagggaccgggtacgctgtcggcgataatcttacgcctgcaggtggtaactttgcggtgccgggccgaatccgcgtgacgggcgttgacggtgcgggggccatcacgggtgccgccgtccagcagccaggcatgtacgcggataaacccacaaatccggtggcgacaaccggtggcagcggcagcggggcctcgtttactgtcagctggaacgccggggttgcgtcctcagtgtataacggtaaaacctggtcacgtactgatgccggcgcatttctgtataccggctacaacatcatggacacggtttccggataccgggggaacgggatacagaacggtacacagtgcatcattgagtttataagcgatgccccctctctggattttcgcctggtgggcggtaattaccagggggacctgtatgtggatggtcagcgtatcagcgggatatcaatgaaaacagacagcagcggcgcgccgtatatttataccgttgactgggccggggaggtgaaaatccgttcttaccgtctggtgggcatcaataccgggttcgggggcgtcattaccgggcaggcttacaccgtccaggctcctccgggaacccgtcgccctcttgcatggcagatgggggacagctacacggtgggcattggcgcgagacagggcagctacaacgacttccgggtgatgtgcgatgccctcggtctggacggtattgcggacgggataagcggcagcggatggacatccgttcaggagggccgggtaccggaatggcgggtggaaaacaagctgggcagtatcacccgtaaaccacagtacatctttttctcgctcggctataacgactggtcagctgatattgcgcgcgtcagggcagcatttccgccagctgtcgcggccgcccggcgtatctgccccctggcgaaaattatcgttattggtcctgccactccggtcgggtcgacgacacagctgaatgccatccgggaggctgtggctgaaatgtgtgccggcctggatattgcgttcgtggatgtcagcgacgtggtgaatgcggccaacaagggtctgtatacaggcagtgacatggtccaccccagcgacgccggccacatttaccggggtgtgcagatggcgataagggtatctgagcttttgtaa

SEQ ID NO: 392685 - DNA, 303 bp, Salmonella enterica
atgagtcgctttccgacagaaaccattattgcgccggccagtacgctgaaagatttcagcggtcatactgttgccggtgcgggtaaagagataatgccgacagatgccgctgcccgtctgtaccggatacagaacctgagtaaaacggagacactctggttcaatgatacggggtccgtggctgcagcaggtgcaccgggcagctatgcgctggctccggggggctattacgaattttcatcaacgcacgcggtgtcggtgtatgccaacactgtggttgcgttcagtgcggcgaggtactga

SEQ ID NO: 392686 - DNA, 594 bp, Salmonella enterica
atggcagtgcttatttccggcgtactgaaagatgctacgggaacagcagtgcagaactgcaccattcagctcaaagcgaagaaaaccagcccgaccgttgttgtgggggtgatttcatccaccctcactgacactaacggccactacagtattgaggctgaaccgggttattacagtgtgtcactgctgcgggaaggttttcttccctcagtggccggagatatttacgtggccccgaccgatgcgccggataccctgaatgcgtttctcgatgtgccaaaggatgccgacctgcgtccggaagccattaagcgttttgaactcatggtaacggcggccgcacgcgatgcactggcaagcgccgcagcccgcgatgaggcagcgcaggccgcaggggatgcgcgggagcttgtggaaaacccggttgttattgtgccgacggcagctgaattaccggaatccccccgggggctgtatctggtggaagccgatgagaggaaaggtggcggcccgcagatttattattatcccggaagcggtcgccgtttctggtttgccagtgtggaggataccgaagtggagggtaccgaatga

SEQ ID NO: 392687 - DNA, 1803 bp, Salmonella enterica
atggcgatagttaacgagctgattaccaaatttggatttatcggtaatctggcgccgcaggaaaccttcaacgcgaatctgaaagcgtccattgctctgcttgccgggcttgggaccgcgattcagggatcggctggtgcaatggcagcatggtttaccactgttattaacggcgttgacccactggcgcaactcaaccgggaaactggtgttgccgtggagagcatacaaaagctggggtacgcagcatctgtaaacggttcaagcccggaggctatgaccaattcaatacgtgagatgactaagcgcattggtgagttcgtatctaccggacaaggcgaggccgctgacgttgccaggcggcttggcctaaatttcaaagacgccagcggtaaaattaaggatgctacagtcacctttggagatctgtcagataaaatgcagggaatgagccaggcggaaaaattctctatcctggataagatgggtatcgatcgttcgatggttcaaatgctctcacttacccgtgatgagcttagtaagacgatgaagcaggcggaggactgggggcttgttactacagaacaggctaacgctgcggccggtttcaatgactcacttaccgaccttcgttttggatacagcgcggtatcaacacaagtggcacttagctttttacctatgctgaaagatgtggtcgatggtatgcgtgagtggctacacactaattccgatcttattaaaaacgggcttcattcactgggcgaaatagttttttcgttggcaggaatgattcggcgtttattaccgattattgcgctggcggttgctggatttactatttggaagatcgcggcatttgggctgggtaatgctttaaaactcgcattttcccctgtgttactgataacagcgctaattataggtgttttgctggtcattgatgacctggtagtggcaatgcagggcggcaagagcgttattgctgatttcttcaaggataactggggaatagatattgttcccgcactgaaagaagcgaaagcggcactgctggcttttatcaattatgccatagatatttttaagcccctggctaatgcaatagtctccatgtttaagttcgtatggcatctcattacaggcgcgtttacgggcgattttcaggatgcgatgaatgacgcgcagggcgtgtttgattctctcatcgcatttatttctggcgcgtttggtgttgtcggtgatgctgttaaatatgtgttcggtgatgctggaacatttatcgtagatatattcgagcaaagcattgaaaacgtaaaaaacctgtttaacgcccttagaaagctggtaacaggtgattttcagggggcatgggatgatgttattaagacatttaccgacagcgtggcgctactcagaaagccatttgatgagtttatgaagtgggttctcggcctgttcgctaatctcggtgaaaccatcaaaaatactatcagtaatgccgcctcaaacgcatggaatgcaacgaaatcattctttgggtttggagaggatgagcaacaacctcaacagggagggacgggcggcggtaacggcggcatcggtcctggtggtattccttatggcataaatgcggcggtgggtatcgctggaggcggggcggcatacaataattcgtatagcttcagccagcaaaactacatcactgcacctgatgctacagcagcaggtgaagccgtggttgatcgtagtcaacagcagatgagtgatgcccggcgaatgtattctgggaatggtcgatga

SEQ ID NO: 392688 - DNA, 573 bp, Salmonella enterica
atgacgccggaagaaacgctcaaaatcaccactgaatacctgaagaacctggaggtgatgaggacgcattttgttgccgtaggtttgccagcgggcaaggtgggaaataaaacccacgatgacggaacatcgattatcgggatcggggcggcacatgaattcggtgctgaaatcgatcatcctggcggcactggctatatggcaacggctggtaaggctactttctcgaaaaaaagctttatggggccggttagcggttttacggcagcccacaagataagcattcctgaacgttcttttctccgcgcccccttcacccttaaaaagtcagaaatcaaccgggccattgaaaaggcggtcgagtcggtgggcgccggcaggcatgacgcaattactgcgttaaacctcattggcgttgttgcacggaatatcagtgtgaaggcattcgatacggcaggttatggctcgtggccagatataacggcagcaaccaaaaaggccaaaggttcgtctgcaccgttaattgataccggcaccctccgcggtgccattacatgggaggtgcgtaagtga

SEQ ID NO: 392689 - DNA, 1149 bp, Salmonella enterica
atgaagtggaaacgaacaccgcaggggtatgtgattactactgcgacgatcacccgcgccgggccgattgaatattacggccacgagctgggactcactggcagcgatgccaacaaaaaaatcacagttgtccgcaccctcgacgaattatcaaaaccagaaacactcgcttcattcaatggcctcccgttcaccataacgcaccccgacgacggggaagtcaccgcagcagaccataaagacaaagcatccgggcatatcgccaacacccgcattgagggcggcgaggtggtctgcgacgtttatctgacggatgccgtggctatcgagacgctggaaaaaacgggaatacgtgaggtttccgtcggttatgagcctgccgaactcaaggagagggacggaaagttttatcacatcaatattcgcggtaatcacgtcgcaggcgtggcagaggggcgctacgggcctcagtgtaagttaaacgacaaaaaaggtaagccgatgttcaaaacattaactgacgccctgagtttcctgaagggcaaaaaactgaaggatgcagaaggcgttgcgctgactgctgacgaactggtcggcatgatcgccgcactggaaaaggcgctggaagaactccaggggcaagggactgaagaggccatggctaaagcacaggaagtactgacgcagctcgcagatctgaaaaaacaactggaaggcgcgacaggtgcgcctgcgccgaacgatgatgatcccggcgcaggtggcggcgatgacaaggacgcgaaaatcaccgccctggaaacagaaaacgcggatctgaaagagaaggtaaaagcgctggaagacgagctggagcaactgaaatccggcaatgaaaccagcaccacactggcagacgcgaaagcccgtttccctaaagtcagcttcaatgatgccaaatcagcgcgtgacgtgcgcgccgccgtactggtgagcactaaagcatttaacgatgctgaggtcaaagcaatgactgacagcgaagtccgtgcggcttatgcagccattcaggccacctcgaagccacgcagtgaaatcggtgctcatctgtttaacgactccgcgaacaaaagcactaaaaccgcaactcaacgccttgggggtaaataa

SEQ ID NO: 392690 - DNA, 1065 bp, Salmonella enterica
atgctatccctagagaataatggtaatgcagtcgttatattaccaaacaggtttttttcagatgagaatcacgaagcaatcactcttaagaagaaattactgtcagatttcaatgtaactaaaataatatcattgcctgctggtgttttcttaccttacacagctgttaaaacgagtatactatttttcagtaagagcggacatacaaaaaaaattctagtacatgacgccagtactcaatacaaaataactaaatcaaatccttttaatattagtcatacacaggaaataatatcatcattagcgcaaaacaaaaattccccgaggacctggattttaaattatgaagacttatcatctaattataattttctagaacgcccagaaactcacagcgagcgactaaactttaatatttcattagaacagattgattctcttgatgataatttaaatgtttttgacgacgtactattttcgttgaaaaatgatataaagcaattaaagaatgatctcgacaacgtcaggactagtagtacatcaataaaatataaacttaatgatatattgataataaagactggtttattgttacagaaaaataatctttcagaagaaggaaaaataccagtttttggtggaaatgggattattggttatactaataaggcaaaagagtttggtgagactattgttattggaaaagttggagccctttgtggaaatgtgcgatattgcaacggagatatttgggttacaaacaactccatgattgttaaaaatagaaaagacgatatagtatacatgccctaccttgcgaagttattaaaagcaatggagttaagaaaactatcgtcagggactgcacagcaatatatcacagtccgtcatataaaatcgatagatataaacttgccatcaatagagattcaaataaaaatagatgctttgctgtgtcaaatagaaaataaaattaatacaatggttaaactaaaagagaaaataaactcttgcagcattcatatactgaatgatattgtttgcaacttacagataataaaataa

SEQ ID NO: 392691 - DNA, 1377 bp, Salmonella enterica
atgatcatgaacatactcccgctactcgacaggccgatcgccttccagcgcagttttatacgcctgaatattggcgctactgccgcgctttttctttcacaaatgacctactggactaaccgatccgacgatgacggatgggtgtataaaactcaggatgaatgggaagaagaaacgggcctttcccgttatgagcaggaaggggcgagaaagaaacttcgctcaataggtgtactgctggaaaaaagaaaaggtgtccctgctcgacttttttacaaggttgataatgatgttttatatcaggcacttgtagctgcaaacaagaatgtggaaaaaccacatactggagtgcgtaaaaccaccagacaagtaagtggaaaaccagcaaacattcatacagagattactacagagaatacagatccctctaaatctcccgttgggagtgatgtcgggcatgtattgcgtgaacaattaatcactcttctggaagggaagtttgattttgacaaagcagccgagcttcatgacgccgtcgaggctgaaataaccaacgctgggtttaactgccaacgcgaatatcctgtagctgatcgcggtgatggtcgtagggggcgaattgatctactcgtcacaggtcgtaacggtgagcaatgcgggattgaaattgatcgcatcaatccccgtgataagtcggtgataaaacttaagcaggttagcgatggttttattctggttcgtgacggaattctttctgaacgttatgagtttgacgggatcccggtaatcggggcgcacccggcaacatcgcccgttgaaaatataactcgagaaaaactgttcaacgatgcgcataaatctctggagttttataacgaaaagacaggtacaaattgccgtgacataaaacccttcctgatgcttatgaccccaacaacaactcgtaaggggtacacactggcggatatccaactggtaatccgttgggtgctggcaacatggcgtccccgtggtactggcctgcctaaacctgccagtatttgtcgtgttagccggtttgatggctacctcgctgacgccgaagcttgggcggtaatcgaagccgatattgatccggatgccgtcatgaacggctacaacgagatattcgctgacacactgcctgctgctgaactggatgcagatcgccgccggatgattattcgcctggcggcccatatgaaaaataaaactacgggagcattcctggggtacttcgaaaaattccgtgctgatgcccctgatttttatttcggttctaacggtggatggcgcgccagctttgactacttgatgaaaccagaaactttacgtaatacccgggaaggttcgctatga

SEQ ID NO: 392692 - DNA, 171 bp, Salmonella enterica
atgactaatgcagcaacaattcttgatatgtgctgcggttctcgaatgttctggttcgataagcaggacgaaagagcagttttcaatgataacgctgttcccccacctttcgcagaggcgctggtgagggctaatttacctgaattatgtgtaagcagggaggcagcataa

SEQ ID NO: 392693 - DNA, 294 bp, Salmonella enterica
atgaaaaaaatcgacctgacaaagcaggcccgcgatcgcatgtgtactgtacgaattccggggatctgtaatttcaatcctgaaaccagtgtgctggcccattatcgcatgagtgatacctgtggaacgggcattaaaccacatgacatgcaaggtgccattgcatgcaactcttgtcatgacgtaattgatggtcgtgtgaaaaccgatattgatcaagacaccctgaggctatatcacgctgaaggtgttttccgtactcaacagatatggagagaggaaggctttatatga

SEQ ID NO: 392694 - DNA, 579 bp, Salmonella enterica
atgatttatccttcaacttcaggaaaacccgatgagacattccggcttcgcacgctcgaatccgtgtggattcagggtaaattacgtatgtggggccgctggtcacacataggcggagggactggtggtaatatgtttaatgcgcttctcgcttcgaaaaaagtgagtaaaaccgccatacagcaggtattacggcatctcaaagcatcaggtttaagtaaggatgagttgcgggaatattttgaggatctacttgccgggaaaaataaaagtcacctggctttttgcacagatgcggaagggcttatgatggatgctgtgatcggtgaaatccttgttcgtgctggccataagaagctgtttggtcttatctgccagcgatataagcgtcgaatgagcaaaaaggcaatggcgcgagaactaaacgaaatgcatccggagtggagcctgagaacctgcgaaagcagaattgatgtctggttacaaatggcagaagcaatgttgtatcagccaatgtgtgaagtattcgaaaaaaaacctgacagatttcgtttgcatgattgcgcgggtgttgcttga

SEQ ID NO: 392695 - DNA, 225 bp, Salmonella enterica
atgcctaaagtcgatatgaaatgcccattttgcgcgaaaatcgcaccttttaaaaaacatgtcccggcggtacagggcatcagcgttaccgctgtcagcccggaagggactgatagcgagaatgattgtaagcactgcagattaatcaggtcaatagggctgcgtatttacgtggcctttttcgtattcaggctcacggatatcacttattgtgtgctttgttga

SEQ ID NO: 392696 - DNA, 195 bp, Salmonella enterica
atgatgaccattgagcaacgcgttgaaatactggaaagaaccgtctcaagattaaagaaaagcgcccccagtaaaaacgagacgcttgcgctagataaaacaaatgaaataactattgatttttctacaaatattaatggggaaattcgaaacgaaaaaattactggttcgttacgcgcccctataaaattgtaa

SEQ ID NO: 392697 - DNA, 252 bp, Salmonella enterica
atggaagaaaaaactatgagtgcaggggcgttgctggaggaaatctccagacttagagaagatgttaacactctgacggttgccttttcatacttagcatttgctatacctgaatctcaaatgaaacttacccttaccagtctccagtatgaatccacaaatccccggtggtccccccaacagcagaattccttcaaacatctggctaaagaaattgaagaaaggcttggttcctcaattacaattttatag

SEQ ID NO: 392698 - DNA, 474 bp, Salmonella enterica
atggatcccgaagttgaaattgatgatgatacctatgatgaatgccatgaggtgctatcacgcatactcgaagatgcatacactcaaagcgggacattccgcagactgatgaattatgcctacgaccaggaattgcatgatgtagaacaacgctggttactaggagccggagaaaactttggaactaccgtaactgatgaagacctggagagttcagaaggcagaaaagtgattgccctcaacctggatgatacagacgatgattcaataccagagtgctatgaaagtaatgatggtccacaaccatttgatacaacacgctcatttattcatgaagtagtacacgcgttgactcatcttcaggacaaagaagataacaatccaagaggcccggtagtcgagtataccaatatcattctaaaagagatgggtcacacatcattaccaagaatcgcctacaaatttagtaattga

SEQ ID NO: 392699 - DNA, 546 bp, Salmonella enterica
atgagcgaattcggtattactgcgctactggatcaggacatgtttattgcgcaagccgggcatgaaagctcttgttttacaaggctagtggaggacttcaactacagcattgccgggctgaccggattcatccgcgccgagagaattacttcagataaggccagtactcttgggcgaaaagcctgtgagaaggcgcttccactagagcgacagcgtgtaatagctaatctggtatacagcaagcgaatgggtaacaacgggcctggcgacggctggaattaccgcaggcgtggacttttccagatcacaggtctgaacagctaccgttattgcggtaacgggatcaaaactgagctcgttgcctattcggatctactggctcaggataagtatgctgcccatagtgcagcgtggttcttcgcgactaaagggtgtctgaaatactccagtggcatggtacgcgttacgcagatcattaacggagggcagagcggtattggggatcggcgggagcgctttgaaaaagcaaaatcggtgctggtatga

SEQ ID NO: 392700 - DNA, 636 bp, Salmonella enterica
atgccagggataaatttagcaccatatataaatccccggggtgaactgggagtaatacctcaggatacactggaagtcatacgtaataccagtatgtcaacccctgaaggggctgacatacaacttggcggtattatacatactataaggcatgtaactttactggactcctttctggttcatcctggcagaaatgttgacggtgtgggagttgtaagagacagcgataggaatatcttaaattctcaccgtctgagtaatcaactaaacaacagaagagtgtatgagagatcatctgcccctttttctacgcagttatctggaggacatcagcgagtaatgtctaagattgtcttatgcagcttcaatgcaggactggttggttttcaggtccccggcgaacaccttacttgtccgataacgctaagtatccctgagaggggcgtctttgcccggacatcattacagtcagatgtctgttgcttatatgactcaactgcactgaaagagctggtgtcccagcgtctgcctcatccgatgagcagggaagccataacaggtgcacatattgttccgaaagaacagtgtcattttgatcaggagaaaggcgcatttattcattctgcatctgaatag

SEQ ID NO: 392701 - DNA, 2277 bp, Salmonella enterica
atggtggcggctcgtctgctgggatgtcaggaaaactcagaggcagtgatacaaattcatgcgccagtgacaacgctgccggcgttattacccccctcgctgacggatctggtgctggatggctgtacggccctgcgtgatatcggtcatttgccggtaggtctgaaacgcctgagtgtggtggggtgcacctcgctggaagctatcagtaccccgctgcctgaaggtatctcgggaatttttatttgccactgtccggccctggcccgaatagaaggcgaattacctccacagctgcatcggatggtgtacgtcaatggatgcacagcgctggataaggctcagcgtgaattcctgtcatttccggttgataaaaatggtcgttccagtctgagtcgtgctgaattgcaggcggatatccggtactttgcggcaaacaggcatgaaggtgaaagtgtggaagaacggaatttttctggatgtgattttacatacagcgatcttcatggactcagtttatctgacatagaaatgaatctgtctgactttggaatggcgaacctgaccggggtaagattaacccatgcagcagtcaaagagtgtgattttacatcagccactttaacggatgctgttctggacttcagtaatctggaccagagtaattttacaggtgccaccctgacgggagtgagtctgtatgagacctcgattgatggcgtcaatttcaccgacgctaatctggagagagctcagatgggaggggcgtcttttgacgagagttatccggtcgttaccggcgcgcgttttaaaaatgctgttctgtgtccggggatgagtctggaaggcgcggttttaggtacggcagataacagtcctccacccaataccagtttgattcgtctggctgacgcatggctccctgtgcctgaggaatggggtcgggaagcgctggaactctttctggacaaggctaacaggccggagctctttttactgaatacaatagacagcatgggtgatcaatatgccggggagaaagtcagaaccgcagagcgactggtaagaacattacagttttccggggtggatgtttcctgcgtcggactttacctgatggagacgctgggcaaacctgattaccataccagcccgctgatacaggagtggcttgtgccgctcagtgacgcattctttagctctaatattgatgtggtaaactcaccgggctcttggctcagtagcaccgggctggcatatctgatggcggagtattttgttcgccacccggaaaaaatgcagtctcataacggcgcatttattaaaacgatgctgcagggaatgtatgatcaggaagtatcattcccagatctctctctgatatgtcaggagatatacacagattgttatctcacgactgacgcggtggctctgtacacccggcaggatgatttcgggaaaatggacggttccggtgagcctgactgggaaagtaaggatgcgtttaactgggtgcttctgtcctccccggaagagaatagcgtcatgatggtgtctgataatagtttgagtgaaatgcttgagcctgattttgacactcactggcggtccttttttttgtaccgggatggagagcttcaggaggcctgtggttatcagcttgaccatctgtttaatgatgtttttcctgtgttcaggaaagcttatcagtctttctgctcggcacatgagttcgggcgaattctggatatattacttcctgagggtgaagtgaaagagcagttccgaacggcagccttatctggtgcctcagatgtcaaaatggtggacgatgactcacagttgaaactgggtgagatttttgaaccttacctggatgactggttgttacaggaaggacacattcagcagataacagactgctatgaacttcaggaggtgtccagcagtgaaaaagcggagactttcttttgtctgggggcggcattttgccgttattcgtccagtgcagtattcggtaccgaatgggagtcaccgcagatactgaggggttatgccagtggcctgctggaagaagctcaccgacagcatccggcactgttcgccgctgcagattttacgccggaagaaaggatgggcgatatccgtggacggctgcggggtggggatggggggcattttacctgtacggctgtgctgtcagatatactggtagagcacgcagagaaaaattttccacaacggctggccacgttgtatccgatggcatggcggtga

SEQ ID NO: 392702 - DNA, 1917 bp, Salmonella enterica
  misc_feature (1899)..(1908): n is a, c, g, or t
atgatagtaggtgtaagtaatcagtctcccgtcatgatgcctggtgtgcaaaacgagagtaaaacgcaggccacggatcttgcggcaaatatttccgcagtcagcggaaataccgcaacgacgctgtcaggggaaattaaaggcacacaactcgaagaatttcccgcgttggtcaaaaatgcgagtctggagacgttatttaaatgcggaaaagacactgaaacgttaaaggcgattttccttacatcaactaacgttgctgccaagaaggcggtaacggagtttgcggggctttttcgttcagcgttgatcgacaccagtcactcgcaaacggcgacagaccaactgatcaagataggggaagagtataccgcgcaaatgatgaaagatggcctgaaagaaaaatcagcttttgggccatggacgccagaaacgaagaaagcggaagcgaagctggaagccctaaacaataagctgttggatatcattaaaaataacaccggcggtgatttaagtagagtatcgactgattttgttatgcgggaagtgatgccctatattgccggctgcattgaacataattttggctgtaagttagatgagcaaacctgcagcaatattacacagctggttgacaaagcagcggagaaggcggttaaggcacttgatatgtgtcaccaaaaattaacgcaagagcaggggaccaacgtagggctggaagccagacaccttgaaatgaaagcgttgatacctctattgctacgtaatgtttttgcacaaattccgccagacaaactgcccgagacaagaatccctgaacctgcagttggagcggtgccagatggtgggaaaaaaacagaatctgcgggaattaatatcaatattaatattgatagcagtaatcataatgtggataacagcaagcatattaataacagtcgaagccatgtcgataatagccagcgtcatatcgataatagcaatcatgataatagtcggaagactattgataatagccgaacacttattgataacagccaacgttatcacgagtcacaccattcgactaacaccagtaatgtaagacatagtcattctcatgtggattcgacgacgcatcaaacggagacggcacgcggcaccagcacggggatacttgaccagggcatcacgggtaaaattgacgtcacggctcatgctacagcagaggcgacgactaacgcttcatcagaaaacagcggcggaaaagttgtcatgcttgaaaagggcactacgagtgaaacaggctcttttgatgaagtcgatggcgtaacccgcaaggtcattatcgctaagccggcgcagaccacggtgcatagcgttgatgttaataaagagcaaagccagattgcagcagacatagtgaatgtgaagccgcttgccagccaactggctgacgtcgagaatgttaaaatcgatactttacaatcagaagcaacggtaattacaggtaataaagcgggtacgaccgataatgataatagccagacagataagactggcccattttctgatctgaagtttaagcaaaatggtttcctctcaacaattccgagcgttacgcatatgcattcaatgcatttcaacgctcgtgaggcgtttttgggggtggtacgtaaagccttggagccggatgcctccactccgtttactgtacgcagagcgtttgacagcttgcgcgcggaaatattgcccaatgacgaggtaaagagtgaagcattgaaagcgcaatgtagcgagattaacaataactcagaattgaaagggaaaattgatacgcttaaagaggtcattactcatcatccacaaaaagaaaaactggctgaggttgcgctgcagtttggcagagaggcggggttnnnnnnnnnnccaagctga

SEQ ID NO: 392703 - DNA, 270 bp, Salmonella enterica
atgccgccagtattgcgccaggaggtgcttgatgacgcggcccggcgcgtcgctcgcggcggcgtacaaaacccgctcgcctacctgctggctacgctgcgcaaagcgcaggacggcgagttcaatcagtatcgacgggataaacctgcggtgccggagtttgtgctgcctgtggtttcagagccggaaataccggcaaggccgcgccaaaagcgggatatcagtaagttagttgcggagatccgggcgcagagtctggggagtggctga

SEQ ID NO: 392704 - DNA, 156 bp, Salmonella enterica
atgaaactcggcccttacacgctgccgcttatcacgttatctacaagagcgaattaccataaccggattagcgccggaaatattgtttctgacaatgttgttgaaggctcaaagggtcacggcgcacttactgactctacgctcatcggttcataa

SEQ ID NO: 392705 - DNA, 144 bp, Salmonella enterica
atgaatcatcaccttttgatagtccatgtcccggaagtactgttattgcgacttatcacactcatggtgcttatagtttcggttatgcggatgatttcttctcaaaaagagatgtgggagtatatgaatataataacgtcttag

SEQ ID NO: 392706 - DNA, 1122 bp, Salmonella enterica
atgtttttgagccttgagttccgggtcaatagccggtgtgagcgcggaagcctcagcggaggggaatatatttacctggataaaaccccggaagtgacatgggacggcgacagactgaccatcaccgaaacagccacacagcgcgtgcagacgatttacacaccgggcagcttcacgccgcttatccgtgtggaaacccagaccgcagagctggcaaaagcagtccgtcgcacgctggcggagaaatttcagcaggaggcaaacgtcaccttcccgccggaactggtggcgatggtggatagtctggaagcggagctacagcgcggggaactcagcgaaaccagcagggtgtggctggcacagtacgggctgacaccggagcagattcaaaaccagatggagccggaatacacgccgcagagaaaaatccatctgtaccactgcgaccaccggggcctgccgctggcgctgataaaccgggaaggaaaaacagactggtcagcggaatatgatacgtggggtaatgtactcagtgaaaataaccctcacaacatgaaacagcacatccgtctgccggggcagcagtatgatgaggagacggggctgtactataaccggcatcgctactatgatccgttacagggacggtatattacgcaggatccgatagggttgcaggggggatggaatccttatacgtatccgttaaatccgttaacagatatagatccattaggattatttgtttccattttggttggattagcatgtggtttggtattcgactatgcattagataaatggaaagaagaacactgtaaagaccctgatgcagatactgcgcttggccaagcaggaaatgcagcaagtggggccgcagttggaacttttgggggatttgagaataaacctcgtggtggtattgccggaggtgggccatcaggaaacaaaacatctgtttatagcaaggttgttcatagtgcttataaaaatgaagttatcaataaagaaactacaagagttcttcgtaatggaggaaggcgagtagccaaatcaataccatatgtgggaactgctattactctatatcaggtttatgatgctagtaattgtgatgattag

SEQ ID NO: 392707 - DNA, 429 bp, Salmonella enterica
atgaataagataaatgccatcaatccgtattcaagaccacttggttcggtaattatcttttttttagaaaaagccagattttctgaaaaggagatagcttttcttacatatgatacaaggttatttcatgacttgcatttattcggtgacacagctgaagatgttttagaaattcttcaaagagaatttaatgttgatatgtcaccctttcaattcaataaatattttcctgctgaattctccaaagacgttaaatatatagacaaacttaatacattgctattttttaaattagatatccttgcaagtaagtattttacaagtataaaaaagaaagtggatgaaatatatggaaattatcatccccttacattgggtatgatagaaatgagtatcatggaaaaaaaatgggtcagccccattaaataa

SEQ ID NO: 392708 - DNA, 474 bp, Salmonella enterica
gtgcaaaaaacactgctggcaaaagcaatcctccgcacgctggcggagaaatttcagcaggaagcgaacgtgaccttcccgccggaactggtggcgatggtggatagtctggaagcggagcttcagcgcggggaactcagcgccacaaaccggacgtggctggcgcagtgcgggctgacggcggagcagatacaaaaccagatggagccggaatacacgccgcagagaacaatccatctgtaccactgcgaccaccggggcctgccgttgtcgctggtcaacgcggaggggaaagcggactggtcagcggaacatgatgcgtggggtaatgtactcagtgaaaataaccctcataacatgaaacagctcatccgtctgccgggccagcagtatgatgaggatacggggctgtactataaccggcatcgttactatgtccgttacagggaaggtatattactcaggacccgatag

SEQ ID NO: 392709 - DNA, 141 bp, Salmonella enterica
atgcagacaacgatgttaggcaaaaacggtccgagcgtctccagactgggctgtggcgtaatgcagatggcgatgaaaaaaccgcataatgaccagcacgctatcgctaccctacaggctgcgctggcatcaattttctga

SEQ ID NO: 392710 - DNA, 1059 bp, Salmonella enterica
atgaaaaagttacatttaatcaaacccgctattgcctttctatttatctcactgcttttacctgtcgtaagtccggctgctcagaccctaacttatagcgaccatgaaccgctgggcgacatgcgcactcgttttatcaatgatgttttattcccggccatcgaaaaagaatcacaggggcgcctaaaaatagtggcgcactggggtggtgaaatcagcaatggttatgaggcgctacgcaaaacgggcaaagaaggcgcggttgatatggctatcgtggtgcctgaatatgccgccgacactctcccgctgcatcaggtatttaaaagctttcctgtcggccccagcggagaacaacaagttgccttctttcgccgcgcatatgccgatatcccagctttttcatccgagttacaaaaagcgaacgtggtggctatttttttagccacgggttatcccatgtcattctttagcgcaaaaccgctccccacggtaaatgacgtcaaaggcggaacgtggcgctcggccagtttctggcaacgtggttttttgaaaaatcttggcgcgaagccagtcactatgccatggggcgaagagacgcggaaggcgctacaagccggaacgattgacggaatgatccttaacgtggatagcggttactctctgaaagctcagcagtttgcacccaatatattgatttctaaaaatttatggttgggacatctttaccttttagttatgaataaaaaaacctgggataacctttcccacgacgatcaagccgccattcagcgtgccgctgataccgcctaccgcgccctgggcccggtcatggacagcagctttgacgcgcagatagcggatttgcgcaatgacggcgcaacggtgcggctcctgacgcctgaagaggtcatacagtgggcgactgaaacgcactaccagcaagcgcagtccgattgggtaacaacgcaggaagcgaaaggaattaaggatgcgggcacagtcatgaatcaggttaacgtgctgatggatgaaacaatgaaacagaagacacggtga

SEQ ID NO: 392711 - DNA, 582 bp, Salmonella enterica
atgagcgggtatctggaagatcgtcaacaaatcgtcgatctgcttacggggtggatccaccgggatctgggtgaatgggaacaactacgtaatctttttcacccgaacggcactatcgaaatcacctggtttgagggaactgccagtgatttcgttgatggttcaatacgcatgggcgtctcggatgtacgcactaagcacttgattggcactccgattgtgacttttaacgccggtgcgacgaaagccatcgtcgaaaccaacgcaatgattatcgctgataacgtagcgctaaatttaggctgtattggccataaccgcttttacgatatggcagaaaaacgggatggcgtatggaaactacttcatcggcagagcatctacgatatgtccagcttcactttcccgctcggcatcgtcgaaatcgaccaaacaaccgtggcgaaatatcctcgagaatatgccgcgctgggttatttactggagaaaagcggttttccggtacaacgcgtatttgcaacgcgcggtagcgtgcttgaacagcaaatgaaaatccatgcgaaacactggctcgcggcctga

SEQ ID NO: 392712 - DNA, 879 bp, Salmonella enterica
atggatctgcgccacttacgttattttcttgccgttgcgcaagaagggcattttgcacgtgcagccgaacggttgaatattgttccgcctgcgctgagtatgcagatcagagcgctggaagaagaactgggtggcccgttgtttgttcgtaccagtcgtaaggtggaactgaccgaggctggcagaatattacagattgaagcgcagcggactttggaacaggcggcgttcgcccgtgagaccgttcagcgttcaatacgcggagaaacgggctgtgtacgtgttggttttgctggcaatgctgtgtttagcggtaagctaacaaatgacctgcgcgcttttcgtaaagcctatccagatgctgaactggttgttcgtgaagttgctccgttgctccaggccgatgctattctggcgggacagcttgatgtaggttatacaccagataatcataaagcgcatgatcacgcgctgaaggcggaacagatcggcctttggcatcgcctggttgctatggctgacgatcatccattgaccgttcatgcgtcgctgacagtaagaatgttagccgacgaaccgcttattttttatgatacccatggtgcggatgagccgctttataccactcttaccgccatgctggggcatgttccgaaagttgctcattgcaccgcgagtacgctgagtgtgcttaccctggccgcggccgggcaggggctggcgctggtgccggaacctctcaggcatgtgtctattcctggactggtctatcgtccgttggacgcaacggaattatcggccagtttaatgcttctcagtagacaaaacgagaatactggcgcagtaaacgcttttctgagaatggcgcgagaaacgtaa

SEQ ID NO: 392713 - DNA, 726 bp, Salmonella enterica
atgggatgtttccacataatgaagcttcttaaggcaacccagccttccgatgacacagattgtctcgaacaatctatgtccaatttagcggccgcaattgctgacccttcccgggtcagtattctttgcgccctaatggatggcagagcatggacggcaacggaattaagtgccgttgctaacattgcgccctcaacagcaagtgctcacctggcaaaactcctgcaaaacaggctggtgagctgcttgtctcaggggcgtcatcgttattacagactctcagggcaagacattgctgcactacttgaaaccttaatgggggtttcaatgcaatcagagccaaagttgaataccagaactccggtacacttgcgtaaagcgagaacgtgttatgatcatctggcgggtgaagtcgctgtaggaatatatgattttatggtcgagcaggagtggttactaactgaccgtgatttgttatcgcctattggaatcaagaagtttcaggagcttggtataaattttattcctcaaaccaggcgcaaatgtgcgtgtggttgtctggactggagtgagcgcaggtatcatcctggaggaaacgctggcgcgttgttgctggcagcattcgagcaaaaacagtggatatccagaataagcggttacagagaagttgttttcacgaacagcgggaaaaaagcgtttgattatttctttaatcttacactgtga

SEQ ID NO: 392714 - DNA, 1014 bp, Salmonella enterica
  misc_feature (948)..(957): n is a, c, g, or t
atggaacgttcactcgatagtctggctggtatggctgcatctgcttttggaacggggagttatgctgctatgcggcaagccacctctcccaaaactattctggaacatatcgttaacttttttacctatggggggatacgtcggagaaatgaaaaacaatatcaggagttgatagaggctatggttgagacattgaaaagtgcgatgcctgacagaggtgctccgttgccagaaaaccttatactggataatatagatggatgtcgtgtcgaatttagccttcctggtgataataacgaaactggacacgttattgtacgggtcagtaaaggcggcaattctgagacgcgagaaattccgactgactgttttgaaaaagtatgtcgaactttactattcagatgcgagttttctctccctcaggatgctattatcttaactccgcagggaggcatgtatcttaaaggcgctgtccttaccggagcaattctgatggcagaaaatttatgtaacgcagacttaagcgacgcaaatttagagggggcaatactgtttatggcggattgtgaaggtgcgaatctcaagggcgcaaatctgtcgggagcatcattaggcgactgtaatttcatgaacgcctgtctggaagattgtgttatgtgtggcgctaccctcgatcgcgctaatcttactgacgccagtttacaacgcgcaagtctgttaacctgtagcatgatagaatgtaattgctccggtgcgaatatggagcacgctaatctttcaggcgcaacccttatacgtgccaatatgagcggtgcaacattaaagggtactactgtgatggccactaatatggaaggtgttagcttaactcgggcaaacctgcaaaaggctagtttcacttctacgaactttgaaggggctgatttttctgaggctaatttaaaaaannnnnnnnnngttttaaagattgtacactcacccattcgcgtaccgaagaaaccagaatgtctataa

SEQ ID NO: 392715 - DNA, 285 bp, Salmonella enterica
gtggacatagacaacaaaaaggggctacgtattcacgttaccccttgttttatttactggcgtccttgtaattggtggggaaggtggttgagtttattggagattttgattttttgcgcgaaggcgaaggcgcaaaatagtggcaattgtgttgatatggaaggggtttttgtatattttttgatttttaaggttatttttatagtgctgaagtttattgtattgattgatgcctgcaatagatgcaaaacgaactatactagaaagagaaaagatctgatttaa

SEQ ID NO: 392716 - DNA, 10665 bp, Salmonella enterica
atgactaaattaaccaccccacaggctaaaaacgaggtttctgtcctgctccaggagttacagcagggaatcaaggtgacaggcagagcactggtattacagccccttcccccactgcctgaacgtccggtgtctccggaacttctttctcctctccggctggaagacgtcgatttatccggcttcgacattcccccgctgccgaaggacttcgatttctcttatattgaattccctggccccgcccatccccttttaccggaggacttcgttatctcacatctcgcggaaaaatggtccggggacgatgttcagatacgacaaagactctttccggactggcaggaaaagaccgacgctctggagctcagtctccgtcttggtgatgcgataacacaagcgcagttcagggaggttgaaacaccgcttctgaacctgataaatcagttaaccaccccacaggctcaaaacgaggtttacaccctgctccgggaattacagcaggggatacgctctacagaaagaaacctggaattacaccccctgcctcccgtacaacctcagccggtgcctcccgtacaacctcgtccggcacctcccaaagcaaactggctgatgacggacttcagggaacgtaatattaatatggaggctggctggagcgctcatgataaacaggtgagaagaaaagaagtccccggcctcttttatgaactgagacggctggctgaaaaaaaatcacccactcagtacgatttcatcaggctggacgggatgctgacacggatgataaggctgtttaccggggacaatgcccgggccaccatacagtctgtccgcgacgccatgcaccggtatttccacgactttactgtgccggtaagcaaacagactcatctgatattcagtgcaccggcagaacaggctgtctccttaccgcttcacagtctccggacgggaggcagcgaggttgtggtatggactgacaccccgcgcctgctcgatgacagtctgaaacgtgttctggtaaaagtggtcaggagcaggctgcttgacgataaagtggccggactccggcgttctgatgcggcttcttcccgacaacaggttgaattgttacaggcctaccgtcaactgatgacaaacaatcctcccccggcggataaactgacggccatgctgcagcagataaaagagactcccgaagtgcggaaatttatccgcagcgtggagttctctcttcctctgcttatacagaaggctctcggggaaaaatcagccgcatggggaaagatgctgacgccagagcagcgacaggattttctgaagtatgttgacgcctgtcgcagcccgtctctttctctgatggcccgccagcacctgcagcgactgaacgccagacctctggacctgtcgggctggattacacagcgtgaactgagagaccaccttaaccacattcccctctatcgcctgctgaatgctgaccattataccttccccgaccgtggcgctctgacgcagctgatgttgtccacgcagcaaaaggggctcattaccggcaggctgaagccggtactctctgaggaggccgtcatgctggtcaggcagagtctgggagatgaatatgcgactgacccgcaggtccgccacgcggtgctgcaggcgatggagactcacctgtcacggcaggcaccgctggatttactgagcaggccgacattatcgcatattccacccgtcagcctgcagatgctgaccctgcatttagagctgttacccggtgagcgctggttccggcaacccgactggcaggttccgctgtttggcgggatacggctcagcagcgacggtcagcgtctgacggacgcggccgtgatggtcggtgatacctctgaacaaacggcgtccagatattttaccccttaccttgagaagctctatgaccttcaccgacagtcacgggagggtagcctgacagtcgagtccgtacagcaaacactgcattctctggatatggaaaaccttacgccggaacaggtgggcacttttgtcagtgagatgaaaaaaaatccttaccagtccctgacggctgtttaccagctcctgacccgaaacccggcgttatcgctgactgagggggccctgcagtgggctgaaaaaagacatctgttgctaaaaaacctgatcgacaccgggccggaaggccgcgtgctctcccccctgctgcaattccctgaaagccagctgggaatcactcccccccttgtgccggagggcgccgacagagtggtggtcagcgccgggaggccagcaggtagcagcattaacagcaataacaatgccagaacggagctgtgcagtggagccgatatgctgacattgctccggaatcagcacgccatgatttcagacccacagaaaaaaagccggttcaacaccctgttgcaggagaagggagagacattacggcagcgacttgatgactataacaagcggctggataaaaactcacacagcggaaatctgttgttacaggagattgctcagcggatacgggaatttgaagccatttcaccctcgacgcagctgcagactgtacaggaacagctcaaaacagaattttacagtcacatggttaccattgagcctgtcgtccacaacgtctggattggcggcggtatcgatatggcacacctgccttatgcggtctcacagctgttaagctatccggatagccgttacatcctctggacagataaagacagttatggcacccactttttacactcggaactgaaaaaacaggcccacgcacaggcaacggaggagctggccactctgaccgcgcaggacagactgacatcgttgtccaagatccagaaagaaaagataacccgcaaataccaggagttatttcacagggcgttactcacgctgcaggatgatttatttgcttacgcttttgagcagaatatttttacctcctccgacaccatgcgcagaaattacctgcgcgacaggctgaaggcggacgagaatatgctttccctttttgataacacacttgcagataacaaaaagaaaaatcatgactttatttccgcattaaaagcgcgatttggccatgagcggattatggtccgggatgtggctcccctgctggataccatgagtccgacgttcaggctgggctatcatcaggaaatggaattacggggcaatctggccagcgcctcggattatctgcgccttctggccctgaaagagttcgggggcacctacgttgatgtcgatctgatgccggactactctgatgcggccatgaagataatttatgccaccgaaagccaggacggtatggaaactatctccacgagcagagaggccctgactgacctcagtgcccggctcgcggttcgcctgacgccagaggtaccggaagatacgtcctttcgcgccgatctgagcgccgggcagataaaaaccctggaggccgtctcccgtgcgcttatggcccttgatgacacgcaactgtttcgccagggggataaccaggtacttctggacggggcgaaaatactcaggatagcggaacagggatctaacgcctgtattatcgcacaccgcggcagtcgtgcgttatccgatatccttaccatcattggtgagcacacggcggaacgcagagaacaccgggcacgtattaacgccggagaaagtacagacacggtgcttgcgtccccgtcagatgatatttcctcaaggggactcaggtattccccggagagtatattttacgggtaccggagtgacggtatcctgcccggttcgatggacagtacgatttatttaaccggtccgaaggccgtgtctgacggtttaaaaaaatatgcagaggcgctcggtccgctcggcgaggagctggcaggggccagcggcgacagactgcgtctgtataacaatgacatggataccgggattgtccatgacgcccgctctaagcttgctccccactttaccggcggaatgaataccctgacgcccgctgaacagacaagtacctggatatccaaacaggacctgacggcggcagagattattcgccgcctgcagcagcgggagccggcaccgttccgtattcgtccggatacggactggcggcaactgaacaaagacatgtttgcacaggtcactggggctgaccgtacggccatagagcgcatatggcctgagatacagcagcaggccggacagctggcccggcgtcagcacagcgatactccactggctctggaagacctgtccggactggacaaggtgctcacccgactctccacgcagctgaccggagaagtggcgaaaacgggcgtatggatcctgcaacaaaagctggaagcgacctttcgaaccaccacacagacaacgccggatcatatacatctctttcctgaactgagttcgccggacccggacagtgacatgctggttgcagtccggcacctgcttcgcagtgaagggactgccggcgtaaccctctggctggataataatgctctgactctgcggtttatccgggatggctcggccatcgcccataccaacgacgcgctgcaacgtattgtggccggggaagacactacggtgagactgacggagcaacaggcctcgcttgtaaaccgatatcgagaacagtggctaaaaaaagccacgggaggacccggtgacccccgagcgttttcagagattctcagcaagataacggaaaatccgtttttgttaaacgtggtggaaagcactcttgcacagggggaacatgctggccgtacggggatgaacgtctggcgtggtgaggggggtaacaactcacgtttactttcaatgtttttagagcattctccgacactgcagaccgagctaaccagcctgtggcgtacaaaatatcagcctctgacgcaggagcacattaccctccggctgaacaatctttctccggagcacaaagcccggttgaccctcagaagtccgcaacagagcggcttttacagccgactgctcgacagcggctatgccaatactgatatggatatgctacgccgctatgccgcaatggccgaaggtcaggggggctggtttataacgggtgaaccatcccctgcgctgtcggagaaggccagcgttctgctgaaaaaacatctgccgtctgaagaactgacccctggcgtggcgaagaagattattgactttctgctagcgccgccgggcagcaatccggaacactttataccgccggacagacccgattatcacaaacccgcctggcaggctctgttcgctgagctgaaggccagcgcgccatcagatttattgcgctggccggggggggtggcagtcccgactgcaaccggagtcaggttcgctggccggtatggtgagctttctgaccatatcatgactgcggcgagacaggcatggctcccacaggcgctcacagggtacatggagacattatggcaaattcgtggactgagtggtgatgcactaacccctgccgccatccgggcacaatttgccggccagggactggaggggttactgagcgactctgacctggagcaatatattagatttgccggggacaacccacatccttcactgtccaatattcatttttaccttaccggccagcctgatttcagcgcgatggccgttccattgctacaaaagcacgctccaggtattgcgcagagactgcagaatagcctgaacgaccaccgtcccaattcattacagctggaggatgcataccggtatccatctttgtcggacgaaccacctcccttccggccagaagatatgatatcggaaaccgggcgacaggttgaaagcagtaagttccggctgctgcagtgggaggatttttatacccgtttcgccgggctgtgggacagcgccgtccggaacgctggcggtaccgatacagccttccatccgcaaagtctgctgtttgcgcaggaggggaaatgtatgggactgtcgctgctttatgcagaaacggctggtcagccggagcactatcaaatattgcaggaaaatctgatgaaggccagcgccctttttcagacccgacatcgcgatggtttaccgctgtctgaccatgatgaggatttcctgcgccgcacgctggagactgtagaggcggcacagcgcagggggaacgaaaagctgtccggatcaccgctcagcagtctgaatctggattcacccgacagggtggcacgtgaaattcggaaacgggcggtctcgacgctgcttgtgacgaccgaaaaacattcgctggtgatagagaagatggacaccggctggcggcttaccgaccccaatttcggccacagcaggttcgccacgctcccggaggcgtttgcctttattcaggctgtggccaggaagcctgaatttcagaccttatatggtctgggggatattaccgtctatttcagccccgagcatcgggactggatggaggtccggcttccggatcaccagagcgggacactcacccgtgaattacactacaccactgtggaccagttgctcttacggccggactctgtgaggctcgggaatacagaagtgcccagaaaacttctctacgatataggggcaatggcggggaactcacgtatcagcccgcagacggatctcagcgacctccgtaatatgaagatagatggacgtgttttacagcagtatctcgacagcaccgcggtgtcctcctcccaggctcatcagctaaacgcagttctggaggctaccggccttcaggccgatactccggcgatgaaaacagcgcagatacagacaacgccatcggagatactgccattcttaaagcgtcttcatcagcataagcagaacatgaagttgatgctcctcgatctcgcccagcaattgaatgtgcagttacagaaaaaagggctgaatatggaaaacactgttgcccgtgttgacaactttctgtttccggacgatgccgctgggactatccgggtgaaaatcaccgatatcgccgggcagcggcatagtctggatatcgatgttcgaaaagtgtttaaggccttcgacaaggggatgaagaaactatcagatataatggacaggtcgaacattgacggcatgttatccattatcggactggtgcagtatacccgtctgttacagagtggtgagcatgtcagcgccctgtcacatgccggcgcggtgatggatgttaaaaatctgtctgacaagatgcttggtggcatactgaaagcagtggggaacagggtctataacccgggggtctccggtgcccgcctggaaggactggtggccgcctatacccaaaaaatggcagcccagattggcgggacagccggacgctacctgtcaaaggctgcaaacgtgctgaaactcccggtagtagatatcgccatcaacctctggtctttgggggaaagtgtgaagagttatatgcatgcgaccgattatgacgaacgggtcgcagcaggggtcgacgtgggttttgctactgtgtcaaatgccctggtgatagcatctgttgcgtacccccctctggctgtgattgccgcccccttatcctacattggtggtctgatatctgactccattcgcaggaaagcaatagaaagaaaactgcgggaggcctggctggaaaccaaaaaatttcttgatgaaagcgccagaaacgttctgaaagccgacccgaaaaccggtattctggatttatccgggaacaaagtgctgggtgaagcctggctgcatatgaatgaaaatcctccccgtttaaccggctgggaatccgtcaacagtggaaaggattttggcagccgtcccgaactgtcggaccgacaggtgatggatgcccaggcctataactggataaccaggtatcagaatcctgatagacctgataccgcttaccgttcttatgacgtctggccattggcggatgaatacctggtacgcgggtatgcaaacagccgctggccggcggtaattccgcaaataccggcgggggattaccatacgatattgatgggattcggagaaaaactgcaggccaatacagaagttatcaggaaatcatattttcaatatgaagaaacagcccgtagtgatatgcctttgttgagcataacttaccaggcgagtgggatcgtcggaggaaataagcctcttacagtggttttccctgtagtggaacatctgagtatggataatcaacggcctgtacgtgacaagtaccgcggttataacttccatatccttggtggtaccggagaaattactgcttatgccggaaacctgggaaattatcaaatcacaggtcaaccaggcgtatcaaatacgctgtctttctggaacataccctatgctacggatatggctttaaatttatcctcgccgttgaaacaaaacgtactgaccacaactttatattctccaggaaaggacggcagctgggatagggtgccaaattggccaaccatgagcctggttcagaaaaacatcaataccgttgtcggaacaaagtatgggtataatcttatccagggtaatgacgaaaataatgtttttcatctggggctcggtcgcaacgtaatcgcttcagggggaggcgaaaatatgtacgtgatctctgatgaggaaaatacacgtgaccagactacgctgagcacgataggaatatctcccggctcaaaacagcatgttatctattaccggggaggctctgcgcactttaagccagagagttttcagctatcagagcaggaaattaagcttatttatcgtaaaaccaatacaacacatccaactaattctattaagatcatcggtaatgacagcgcaaagttagccgatttcgccgaaaaaatcatattaaaaaccgcggacagtctggaagcccactggaacgcaacgccactggctttgcaggtggccagtctggatgcccgccagtggggggaatatgagaacccgccacaggcactgccggatccggagtcaattatcgctgccttactggagcacggatgggcgctgatggataagcttagcatggactatccgggatatcaggtctggctgagccagcgggaagggcttttttatctggtgtatgatgctgatacacggatatgtcttccttcgggatacgacgctacagtgctggggtcttccgggagccgctatgtactgaacgccaacagtctcaatccggtcaccctgtatctgcgtgatgatgtacgggctgcagagcagattgatatcacgggattgttctcccgcgacacccctgcagatgtccgactcgtattttcagacgatgtcttcacgataacggctcagagcaacaacagcacacggactgttatgctccgccagatggcgcaggaagagggagaaaggttacccctcagtcgcagtcagacaaagctggttatgttctcgcaggacctcgcccggacgctggctgaactgtaccagcaggccaggggggaggcgtccattcagatccaggctcccactgacagagaaagggctgaaaaagagttttccctgataaaccagtcccgccagcaaatagcccggaactatgcaggacttcagtggccgacgcatatcccggttgcgcccgggacgtgggtcccagacgtgaatatgcccatgaatgccagaacgggtgtctggcgggacacaagaaatgcccacctctttgcgcaagggaaagtgactgactctggcagctggctaaaaaccggggacagtttcattaatattgtggtaccgccgggtagcccggggacagcgagaggaccgcgcagttttgatattgagggaaatcaatcaggcatgagagttttcgccggaagggccggtaagtacagtattattggcacacccggcgcccgtaatgaattgtctttccagcagcttcgcagtccttcctccctcactctggatttgtcccggcaggatgaacaagatctgacccgtgggcagggggcaataaccctgacgcagcgaaatatcaacacggtgacgggtaccgctgcaggctatgacgttattaagggcggcaaggaggacaatattttttatatcggacagggtggtgcccgaattgaatcaggaggcggtaataacctttatgaggttccctctgagccgcatgctaaagttttaatcttattgtcctcaaaatccgggcagaatcttatccgatataaagggaccagtatgcagttacagccggaacaggattcgacgtaccccctcagttttagtcacttaacggttggtggttatgatggcgtcagagcagatttaaatgacttcgggggcaagctgattatacagacatcagacggtctggagttttgttggcagggaacgccacgggcacttcagcttacccggatagatatcgcacagtggagcaagtcacagacacagaaggagcctctgccggaagcggaggatatggtggtaatccttagagcaaagtggttgttaggaaactcctttatcatggactatccgggatatcaggtcctggtttatgaggatacagggcttcaccgattcgatataagttaa

SEQ ID NO: 392717 - DNA, 216 bp, Salmonella enterica
atgaatgtaacttcaggcgtaaatgtgcaaataccattgctccctccttctgaacggtgtagtgaagaaaaaccggtagctgaaatcgttgagtttaacgcttacggcaataaacccagatgtttaatgtgcatgggaaccacggcattgtttacaggtgtttttggtggggtatgctcgacagtcgtcgccagtgtcagtagcggtattacataa

SEQ ID NO: 392718 - DNA, 228 bp, Salmonella enterica
atggataagccacgcatttaccgcactgatgatgatgtgttgctgaatctgcaacgctcactggatctgatgaactgcgccatacgcattctcggttccggggagaagaatatgcagatgtacgtgatgtctctcgttgacgttgcagcccatctgacacagcaatcaacaaattctctcgatttgggtgagcaggcagataacgaacatggggtgtgcaatggctga

SEQ ID NO: 392719 - DNA, 321 bp, Salmonella enterica
atggggtgtgcaatggctgataaaaccaacctgattacatcgggtggcgtagtgacgcacatgggcactaaccaggagctggctattgactcagatacattactgcaaatggtcaatgaagctcgcaaggaatgcggcgaaaaaccagtccgcaataacgatttcattgctcgtatcaaacacgaactcgatggtgagacttacgaaattttcatcgtacaaaacgtaaacaataccacctccgaaaaagcagttatacgcgtgagtcaggctatccgcgttgtcgctcggtcgaaagttgttcttcgttcactgacttga

SEQ ID NO: 392720 - DNA, 915 bp, Salmonella enterica
atgaataaagaaatgaaagagaacattatcagactgaaacgcagtggtatgggttataaagctatttcgcgtgaaacggaaataaacatcaatacggtaaaaagtatctgccgccgttcagggttattctgtgataaccctgaacacagggcgcttttcacgataccggaaccgaaatacagcactgaactggcgacgattaaacctctgccaccgcaacaggttattaccgggcataaacagacggatgcttatctttgggttctggaggttatcaaaacaggtgagcctgcccacattgccgcagcggaaactgcgctgtccaggctgatgattacgcccaaagaggcacaggaacggtatacgcgatacctgcaacagaacggtgctggctggacttcagtgttttcgacaatgtggcttgataacccgcaacactttatcagtaaagcaagattgcagcgggagaaagccgccagggttcgtggtgccttcggtagccatgaggccgtttttgaacccgtaccggcagaatgcctgattgagtccaggtatggatcttatcgggagatttactgcgattacatgcaggaaggcgacggagagtttatttacacggatgtgctgccagcgccttataccctcagtgatgttgttcgggaatatcagtactgggactggttgtcgcagatgcgagtcgcggcccacagagagttgtaccctgaagacaatccgtgggaaaactcacatctctggcacagggaaaactggctagagaaacagctggaaaatatcaggccggttagccgtggggaggcgctggacgttcttaaatggtatctggagagtgaaaattttgcggatatgggcaggcgtcaggatggcgtgtatctgaacctgattggctctcattag

SEQ ID NO: 392721 - DNA, 771 bp, Salmonella enterica
atgcggaacttagctttatcaggattattcgcagtttcacttttttcatccggtgtactggctgagtctgttacgattaatacgccgctgagcggttggcataagcaaagcggggagaacgcttactattctcagcaggtaaattatcctgcctcctcggtaaatacgcgcagtggacaatcgattgatgcgcaaattcaaggggtaataagcgacttgccgaaggataatcgtcagcctggtctgttaattgtcaatggtatcagtatgccgcagcgtattgaagacgacggtagtttccagcgtccctatattttcccgaacggtagtaacagcattgaggtcagaagcccggaccggaaagcggcgcgccgcgttcaattctatgccacacaagggcagggcgcgatcccggcaaaattacgcatcgtgttgtcctgggatagcgataatactgatatcgatcttcatgtcgttacgccggacggtgaacatgcctggtatggcaaccggaatttacgcaacggcgggtcgttagatatggatgtgacgacggggtatggtccggaaatattttcgacgcctacaccggtgaagggcccctggctggtttacgtgaattattacggtggctatggcagccaaatcctgacaacggcgcaggtgtcgattgtaacaaacgaaggctcgccagatgaaaaacaggaaacttttacgattccgctgcgtaatcctggtgaacttaccctggtgaaacgctttaattattga

SEQ ID NO: 392722 - DNA, 1647 bp, Salmonella enterica
atgcgccgggtatttttcgccgcgttatttctggcatcgacagtcgtggatgccggaacgctacagttggcatggcggcacaatagccaggatgagctaataacggtaacggcggagcagggggggattttacgtcagccgttgcccgccgatctggctacgccgcttggcagcatctggaaactctttatctatgcctggcttacggataatcgtattgcagagaacccttatcgctgcacagggcagtcgacggaagaagtctattgttgttccgtcggacaagagattagccgggagcaagcgttggtacagtcctgtgggctttatttcgcgcctgaacgctggcatatcgatgccagtgactggcgacaatactggcaaaaacgacatgctccgacatgggtgacatcgctgaacgccttacagccagcgacagtggtaaaggtgtcttcattattaacggcgctatccgtactgcccgcgcagcctgaggcgcgtaaaacgctgctcaatctgatggttcagcctacggacgagccgttagcgtcaaggttagggggacgtttacgggttaaaacctggtcatggcatcgcgaatccgatgcgacgcaacgacagggcggttttgccggttggcttactgacggtacgcccgtttgggcgaggggagacggcaccagcaaaacgatcctcgcacgctacgccggcgcgatagatcaggcgctgccgaccacccgaaccgtggatgcccaggcgtgcgtggaatcgcagttatttgtccgttatcccataaaagccgtcctgcgctcaggcgatgggcaaccggtgggagaagggcggctacagggacggtatcgtgtcttattccgccaggggaatgagatagaaatagtcagccagggcgagctatatctgcgctataagcacgatcagtggcatattaccgcccaattgtcgcgtgaggagtatgtcgccagagtacttgagcgtgaggcaaaagcaaaacctgccgaagcagcgaaagccctggcggtggtgatccgcacctatctgcaacagcaggccggccattcggcggactgcttatacattgaagacagcagttcgcgccagcgtgtcgcgccgcgtccggcttccgcagaaacccggcgaatcgctaactggacggaggggctggttctgagcggcagtcccgttcagtatcactgtagccggatggcggaaaaccaactttcctggcgtcatgcggtggagctggcccatcaggggatgcgctatgacgttattctggcccaggtctggccgcaggccacattaagcacctgggagcgtgtggtatcgaattgtcacgctataccagaagccaaagcgtggctgctgcgtcagcaaccgctatgggggaaaaagctagatgcggaaccgggttacgccgctacgacacattttgccgtttgtcagttacaacatgccggaacgccgtgggtcgatcgtgaccggcgacggatctatattcgtcattttaagcaacttcaggatcgcctcgatttgacgcatgaatatttacatctggcgtttaatggttatcccagtagcctggatgaaagctatatcgaaaatctggctcgtcatttattaatggaataa

SEQ ID NO: 392723 - DNA, 4530 bp, Salmonella enterica
atgatcgtggcgctattgttgcctgttgccacgagcgttgccgatgattacttaccgtcgtccggttatcagagcgtaggcgacacctttttcttgctggcggacagcagttttaccagtcaggaagtcgcaaaagtccggcttgaagcgcctggacgcgatatgcggcggtttaataccgaagagtacggcggggtcgatattcgcctgtataaaattactgaacccatggcgtttttgcgtaagcaaaagaatttgcatcgcattaccctggcggcgaattatcagggcgaggggctttccaatacgctctcctggctatgggataactggtatggcaaatccagacgcgtaatgcaaagcgcgttttccggaacggtgcgtaaacaagtgaccgacgtgttgccggagctgagagtcggcaatgcgattcttgcgcccacggtttatgatcgtcagccgcagttcgcgccgctaaaacaatttccgcttctcaagcagttccgttatcccctgtgggatgcaaaaccggttcagccgcccgctgaggtttctatggaaggcgcttccagtgaatttacgcgaacgacgccgggcaatgcctatattccactaggaaaactgaaaccggggctctatctggtcgaagcattattaggatcttaccgggccactacgatggtgtttgtgtctgactcggtggttatgagcaaaatcgcccataacgaggcgtttgcctgggtagcggataaaaacgccggacatgcggtagcgaatgcgactgtactgtggagcgatggcatgggcgtgctcagtagcggcgtaacgcagtcggatggcgcgctacgtttatcgcatgttgcgccggagcgttcctatctttttggtcaggatgcgcagggcggcgtttttgtgtctgaaaacttttattacgacagcgaaatttacgacactaaagtttatatctataccgatcgcccgctttatcgaccgggtgataacgtcgagattaaaatcctggcgcgcgactataaaaatgcgcgcgactccgtggcgccagccgctgggaaaatgaaattaacggttattgatgcgaacgggatgccggtacaagcgatggatcttgtgatggacccgcgtaccggcgcggacacctcgtttcggctggcgaaaacggcgacagcaggcgggtatgaaattcagttgcagtacggcgagtcgctatacagcagcgctttccgtgtagcgagctatcttaaaccgcctttcgaagtatcaatgttgctgaataaaagcaattatcacgcgggcgagccggtttccgggacgatagaactgcactacccggatggtcgtccggtagcgaatgcgcacgtgtcgttaaatctctattcgcagcagctttctatggttggcaacgagctgcagtatcaggggaaatttccagtctctctgcagagcagtgattttaccagtaatgaacaggggcaggtcgccctgaatttaccggcagcggaaaaaccgagccgttatctgctgaccgtttccgcaagcgatggcgaagcatttcgcgtgaaagccagtaaagagatcctgattgagcgcgatgccgcgcattatcagatacaggcggcgcagcagttcagcatggtgaatcagagcgtactcttccactaccgtagccgcgaggcgtcagcggtgaaaccggccagctacgagtggttgcgtctggaggatcagcacgtggaaagcgcgccgctaccggcctccagtagtgatagcttttcggtgacgtttcgccagccggggacctataacctgatgctgaaaagcgaatccggtatgatcctgggggcgatatctcactccgttagcggcaacgacgttcattcgactatcggcaccgtcgatatcgtactggatcaacctcgttatcagcccggcgacgtggcgaaagcgttgattacctttcccgagccggtcagcgaggcgttattaacactggagcgcgataatgttgaggcctccgcattgctgagtaaaggggcagactggctgtcgctgacgcgcatcagcgacacgcaatacctggcaagcattccggttaaaggcaattttgcgccgaatctgacattttctgttctctatacccgccacgggcaatacagtttccagaacgcgggtatcagcgtggcgattccgaaaatcgacgtcacggtacgcaccgataaaatgcgctatcagccaggtgatatcgttaacgttaccgtagcgacaacggtacaaggaaagccggtttcggcgcatgtgacggcgggcgtggttgatgaaatgatctatgcgttacaaccagagattgcgccgacgatcgagcaattttttaatcatccgagacgcaacaacgtgcgaaccagctccagtctgtcgttcatcagttacgatcaggcgctttccggtatgccaggaacgccggggcgcgctaactacagcgcccgcagcgtaaaagtgctggagcgcgctcgccgcgagaatgtggataccgccgcgtgggagccgacgttaaccaccaatgctcagggggtgacgacattcagcttccggatgccggattcgctcacccgttggcgacttaccgccagagcgcaaaatgacgccggtctggtgggggaaacgaaacagtatattacctccgataaacccgtttacctgaaatggagcgggccgcgcctgttccgccgcggcgataaaccgacgctgggcgtttttatctttaaccagcaggccactcatcagcaggttgagctctacgctaattatgcgggtaatgaattgcaccagaatgtcacgttgcgccaaggggcgaactatgtcgcactcccgacgactccgctggaaaacggcatttgggaaggtgagattcgccaaaatggtaaaacgctggatgcgttgagcgttaatgtgcaactggtcgatgagaactggtccgaggccaccaatgccgccattgcgctttccgagggagaaaatccgctgtatctaccgccaacggcgagccatattagcctgcgctttaccaacacgccccgcgcgctttaccagagtattctggataatttactggatgagccttacggcggcgtgctgaataccgccagtcgcttattaccgttgggcgtggcgtggccgcagctccagaagggtgatgcgcaagacgttgccgggttacgcgccgcgatacaaaataaccggttgcgtctaattcaaatggctgggccgggcgcgcgtttcacctggtggggcgaggatggcgaaggcgatgcgtttatcacggcttatgcctattacgcggactggtatgccagtcaggcgctggggttaacgttacctgacgatcactggtcgcgtatgcttgagctctatagccagcaggctgacagtatgccgctgctacaacgggcgctggtattgacgttcgccgacgatatgcatctgccggtattaaccctggcgcaaggcgtggaagcatcctttgcgcaggatatcaatatcgacgagatgaacatcccggcgacggacagtctggtcatggcggagccatcatccgcactgggggatgcggtcgcgcgggtacttatttaccagctattgcaacagcatggtcatcagcttgatgcgcatgaacagttgatgctgcaaaaaagccaaaccctgatcgataccagcgaacagccctttgcccaggcggcgctgttgcgaaaagcaacgtcgaacggcgaacagatccagacattattgcgccgaatcgcgcccaaccagccggggcttgagcgcgcgctctcgctagtctggttaagcggcgcattgaaaaattccgcgccagtttccgggccagtcgtccagtcagcgaactggcgtagacaaaccgatcttgatggaacgccttactggcaatggcagggcgctggcgtgccggatagcgtgacggtgagcggcgttgatgacgctgcggatgctttggtaacgctcacgctgccgcagggcgagcctgcgccaggcaacaaagtggcgaaggtggaaattcaccaccaattactgcgtctggtgccggaggacgaggagctgacgttccatctggagccggtaaacgatggcaacgtaaccagtgatgcgctttatcttgatcgggtaacgttaaccgcgaccggggatgcaccgttggcctggggcgaagctcaggtaccgcttcctcccggagcggatatcgaaagcacgacatggggcattaagattcgtcagggacatcaagcggaagatgaaaccgtttcattaacgaaagagaatcatgaatcaggcgtactgcattacatgattccggttaaatccttgcagggagagcggacatttagccatctggtgcgtttttcgcaaaaaggcacttttacgctgccgccaatccgctatcagcagacttatgcgccgcaaaatgttgtatatgaagctggtggcgtaaaaacccttcaggttcggtaa

SEQ ID NO: 392724 - DNA, 672 bp, Salmonella enterica
atggctgcctctgtagattcgttactcctaccatcgcgattaggcgtactgctgctggcgctgtgtctggcgccggtcagtatcggctggtcgcagagcgatggcgttggcttaaacgctcagcaaaccggcatttttcgcgcctggtttgtgcgcatggtgcgagagcaattgagacaagggccgacaccgcgctggtatcaacatgattgcgccgggttggtgcgttttgccgccaacgaagcattaaaaaagcatgatgcgaagtggctacgcagcaatggtatgtcgaatcgttatctgccgccggagctggatattactgacgcgcagcgtcagttggcgcaacgctggcggcaaggtgatggcaagaccggcccctatgtcgatgccgccaggctgattcagtacaacacccatctggtaggacgcaatatcaatcaggcccagcccggagatttgctcttttttgatcagggcgacgatcagcacctgatgatctggatggggcaatttattgcttatcacactggcaccgtaaccaaaacggacaacggaatgcgcgcggtcagcgtacaacaacttatgatgtggaatgacacacgatggatacccgatcaatcgaatcccaattttatcggcttataccgtttaaactttctggcgcaataa

SEQ ID NO: 392725 - DNA, 1686 bp, Salmonella enterica
atgtctgttatctccacctcttttttcaggaaaaagagcgtgttagtttctgcggcggttgtcatcattttagcgggtggcgtagccactctggcgatgatgaaaagcacgagccacaaagaacccattatgacaaaatgggtaccgcataataatcttcaggttgacgttaccagaccagatgtgcttattgagagccgctcattaagccagttaccttcggatattctgacgctcccttttttaaagaataccttaaccgaagattttgttttttattatcaaaataatgccgacagacttggtattgcaggcagtttacagcggattatttttgaacatcagcttacattaaaagattcgctgattaatgaactgctggatcagccggcccaaatagcgctgtggcgtgacgggaagggaaaactaaaccattttattatggtgattcaccgtggcggtctggcgaaaatgctggagccgcttgcgcatgtcgtcgtcgatgattcgcagctcagtaaggcgtcgcctgaaacaatccgtatcggcgatcgcgagctccccctgtacaaactgcgctataacgggcagaaaaccttactgtttgccagcgaaggggacaacatcgttctgctgtccagcgacgactttttgtttaatgcccaacagcaggcggcggacacgacggcgttagtgaatgatttgcttcatgagcgtcgtccctgggatgagagtttcgcaatggcgcaggatactgactctccccctcaacagcgcattatgctgcgttccagctatctggcgatgggatatcaacgatttattccagcgtttgccggtctcagactggataaaaacccccaggggtggagaagttatcttgaactgaacgaccgtgacggcagcgaggaagcatcgcttgacttcacgcccgtctggcaggcgatgccttccggcgcagggctgtgcgtcgcgttgccgctatcacggcgtatgccggcctttatgctgcgccagtcgggcgcgacgccggagatggcgcagcaaattggcgaacaattcagcggtaccgcggggttgtgctggtatccgcagtcacgtctttatacgccgttactggtcgctcagttaacacagacgcctgatgcgtcgtgggatgacgcggcggcaacgctatttagccggtttatcggccagcctgcgttacccattgatactgtcaatcacgatgacgttcatctgtggcagcgggaaatccgttcacgctatgcgccatacccggccagccagtcccgccatcaggacgcgcctgatcaggggcgctttttccgcgccagtctggcgcactatcagcagacggttatgttttcgctggatgatgccctggtagaaaacgccactcgcacgttgaagaaaaatttcccgccgatgagcgatattttaccggcagggcagaagaccgcgctttatctctcccctgcaaaactggcggatatcttcaagcaagagacctacagcagcctgccgcaggaaatggagcccattttctataacgccgcgcaaacattgctttatccgcgactgacggcgctggcgaaggaacctgcttatgcggtcgcgctggagaaaaattgcgagtttggatctgctccgcactggataacattgcaatggctgcctctgtag

SEQ ID NO: 392726 - DNA, 795 bp, Salmonella enterica
atgaataataaatcgttattgctcctgtttataagttcttttttgttaaccggatgctcaaaatctccgattgatgccaaaaaaacgcgatcgtcagttcaacgtactgcaatgtctgcgacgtcgcaacttactgatcaggatgtttttggtaatgagctaacgcttgagatctccgaagaggatatccagaatgccgtggaggaggctcagggacagttcagtatccctctgaactcagctattgtccttgtaaaatcgggttcgaatgcacctgatatgatgatgcaacaggaaatgcagcgttattatcaggtctccaccttctccggtattccggttgccagaagaaaacatgcagtccaacctgtaaaatcggtaaaacaagcggttagcgacactattgaagattatgcagaagataaaagtacagtaattaatgctaattatatgcaggcgctccgctatattgcagcaaaaggcaggcataaggcaatcgttgtctactgggaagatcttgaagcaggaaagtataactctgtaacaaaagagatagcctggaagaaatataatggtgaaaaattcccaggattatcactgcgctatcttatccgttttgcgctggtggatgttgcgaccggggagtgggcgacatattcaccggttaatacagaggtagttgttgtgcccttcacaggaaaggcagatgcaacagaacagcaaattgtaagcatgaaacagaatacttgtaaaatggtggtgcaggatttggtggaacggtatagtaagggttaa

SEQ ID NO: 392727 - DNA, 834 bp, Salmonella enterica
gtgcgcatgtcgaaacataatcttattatctatagcctgcttatggcggctgtgccgataagcgtctcggcggattcgtcgacaacgtccgcggcaaccgtcgggatgctttcttctcctacggcgccgagcgttgggcacagacctggaaaaaacatagacagctatcgattggagcttagtggaacggtatatttttcagatttaatatatgccccttttccgggactaacgatggcaagagaggctagagctattgtcagcgatcctgataattattaccaggcctctgaaacttttactacagtatgcacgtattatcaggtcaataaagatagttcacaacatatacttaaacgtgaaagaccttgtgaatataaaattgatattaaaaaggagcatgtgggggcaaaaataaaactcgagatttataatgaaacggatatcacttcagcgccaggatatacacctgtaccatcgatgtctgaatttagttacgttgaaacaaaaaccatatctaatacaccaagtagagattttacggttatgaatatagacaatacgatattgtcaccaggtgaaagtgcaaccataacaactattgttaaggatattgatgggaatcctataaatgatgcaatgattcaatcacatacaggacatgagaatggtgatggcctatggaatatgggacctattaagaaaggaagtaaccctggtgaatataagcaaattataacttatcttggaagccgtagtgaaagaatcgatgttaactataggtatcatggagatgtctttagaaaacgtttatctattagggggcggctgtga

SEQ ID NO: 392728 - DNA, 882 bp, Salmonella enterica
gtgagggccgttagccacattcgtcagccaggtataatcccagaccccctgtgccgcactcggcgtggcgtcaaaccacgttttgccgccatcaatgctcagtcttacaccgttgacatccgccggtactgtcacccgaaagtgcgggcgcgcttcattggtcagattatcgttggggataccgctgtcgttaaccagttcaatacggtcaatggcgatgtgcgtgtccactgtcaccgtcaacggcgcggactgcttcacatttccggccctatcttctaccttcaccgtcaggatatagtcgccgtccacccagtcgctggtcggcgcaaagcgccactgtccgccggtctgaaccagttgcacctcctgtttaatgccattatgcattacctccaccatcacccggctgacatcggcatcaatattgtcgagggtaaagcccggcgttttaacgttggtgatattatcgcccgcgatgccgctgtcatccgcgctgtccagcgagagggtcggtacagacagagtggtatcgatggtgaaatcgagtgtctgtgttgtcttatttcccgcctcatcggttgcttccaccgtcacggtatgggaaccatcggtcacatcatccggccagatatattcccaggcgcctgctgtattctgcgccgccgttacccatgtcttgccgtcgtcaatgctcaggcgtacctcgttgacatccgccggtaccgtcactcgaaaatgcggacgcacgttgttggtcagattgtcattgggaataccgctgtcgttaaccagttcaatactgtcgatcgcgatttgcgtgtccaccctcaccgtcagcggcgcggaatggctggtgttccctgccgcgtcttcgactga

SEQ ID NO: 392729 - DNA, 384 bp, Salmonella enterica
atggaactgtgggcgtgcttcattagtcaggttatccccgacaatacccgtgtcattaataagttcgatgcgatcaatagacgtttgcgtatcgatagtaaccgtcagcggcgcagaataatttatattacccgcctcatcttccacctttaccgtcagcgtatagtcgccatcggtccaggcagcgcccggcgtaaagcgccatacgccgccgttcttaatcagctctatctgttggttcttaccatcatgctccaccgtcaccactacgcgggtcacgtcggcgtcgatattaccgagggtaaagcctggcgtcttaacgttggtgatgttatcgccagcggcgctatcatccgcactgtccagcgtaatagtcggttctga

SEQ ID NO: 392730 - DNA, 735 bp, Salmonella enterica
atgcgtgacgcttactgtaacgttgataacatccggatcgatattctgcagaataaaggtcggccgggtgcgattggtcatatcatcgccaggcgtaccggtatcatccgcgctgtccagcgcaatggtcggcgtcgacaactgggtgtcgatgcgaaagtcgagtgtttgcgtcgccgtattgcctgccgcgtcggtaaccatcacggtcagggtatgtttcccatcgcccaactctgtcggccaggtgtagccccatacgcctttgacgccttgcgtcgcactcacccagtttgcgcccccatcaatgctcagttgcacggaattcacatctaccggcactgtgatctcaaactgcggacgggtggcgttagtcagattgtcatcaggctcgccattgtcattgaccaacttaatattggtaatgctggtttgcgtatccaccgtcactaccagaggcgtggactgacgaacatttcctgcgttatccgttacctctaccgtcagcgtatagctaccatccgcccagtcagcatctggcgtaaagcgccactgacctccgacctgggtcagtttcacttcctggctattaccgccctgcgtgatccgcaaaatgaccgagtgcgcatcggagtcaatattgccaatggtaaagcccggcgttttgacactcgtaatatgatcgccaggcgcacccgtatcatccccacgatccatcatgatggttggtattga

SEQ ID NO: 392731 - DNA, 408 bp, Salmonella enterica
atgtcttttagtcacaatgtggcaatgcaggtaagtaacgatgttagcctcgccgaacggacttccgggcgcgcgtatgttggtgaaatgtcgttcaccaaatttgtcgacctcgccacgcctgtgctcaatgagtgctgctgtagtggcaggctaattagaaaagcggtgctgacgttgtgccgcaatgacgacggcaaaatgcggtcgcttatcgtctataacctgtcaaacgtggtgatatcacaccttagtgttaacggcgccgttggcggtaagccggtggaaacgatgtcgctgaacttcacgaaaatcgaatggcaaatcgctgccgagaaatcagaaggcgctcagcaggaatccagatcgtcagtatgggatctggcgatgaaccagatagggaaatga

SEQ ID NO: 392732 - DNA, 732 bp, Salmonella enterica
  misc_feature (627)..(636): n is a, c, g, or t
atgaaatttatgataaaaaaaaacaaaagaattaatgaaaataacataagaaaaattattgataatcactttgcatacaatagctatgaattacccctaccaaccttcgaatgcaaaatgagcgaaatatttcctgatgctattttgtattttgtaaccaaagtgaatatagatattcatgaagaagtaacataccaaaaggataaagaaaaactggaaggattaatcaaaaccctcaatgataaggagggtgccatatgggtaagaataataccaacagtcatatgtattccgatatataaaaggaatgattcttcattggtcatgccttaccttgactttgatgggattacttataaaacctttaaaagggtagccacagaaggatgggatagaaaaaaatatgctcattacctctacattgaagatgctaatctatatcgtggcggtggtttttttatcggattaactagagaaccttgtgaaagccattttgatgaatggcatggttatttttcctctgttactttacaaaataaattcgatttttcagccaaagtgccaatcaaagttttcaaaacaggagcatcaataaaaacaacgaagagttgtttaaaacgaatcgannnnnnnnnnccctgtggcgttaaccacagggctttttctttatggagtttatatgtctcagcctgcatccagacttctctcagacggcccgtttacacgttctga

SEQ ID NO: 392733 - DNA, 240 bp, Salmonella enterica
atgtctcagcctgcatccagacttctctcagacggcccgtttacacgttctgatgccgaagtaatagtctcgctctacagcaatatcaccattgagaatgatcagggaacgcacttccgtctggttatccgcgataccgatggcagtcttatctggcgggactggaactttgctgccgaagccggggtaatgttaaatcgctttatcgacagtgacggcattccccgtaccgtttcctga

SEQ ID NO: 392734 - DNA, 441 bp, Salmonella enterica
atgagcatgaaagtactttgcccgtccacacccgcaacggctatcaccgccacaacgttatccgatgagcaacgcattaatttctggccccgttatttcaggaatgttcgccagtgggtatttctggaacctcaggtctttgcctggcttgacctatggagtaccgactatcagggcggcggctgggatttgcatacactatcgaatggcggtgcatttctgacaccaccagtcctggagagctacacattatttaacgagcataacggtaatgaagcgcaactcagcactgaggctaccggcatcgctgtatgcctgatggcctggagtcatcacgcctgccgcaccggctgtcaggctatcagcgaacattattatcgcctgcgcaattacgcactggctcatcctgagagcaacggtattctgcggataattgactga

SEQ ID NO: 392735 - DNA, 330 bp, Salmonella enterica
atgtcccaaaaccaaccctctatgcctgtctggggtctgcggagcgatatcacgccctcgtttggcgcgcggttagtgcaggaaggccgtcgcctgcattttctggccgaccgcgccagcctttgcggtgatttcacgctggagcaactgaaaacactggacgccaccttttcgcagttcttgaaacaactggaatcggcgctgaaaagcggggcgctcgatccgcgccagccgcaccgccacaacatcaccctcaatggcctgacctgcgaagccgacaccaacggtagctacggctacgtttatctcactatctacccgaccgaataa

SEQ ID NO: 392736 - DNA, 345 bp, Salmonella enterica
atgcaaaacgttttatcactgccttcaccggcagcggccccgtcacgcctgtcgcccatcgaagcctggcgaaaactgctgtcgtatttactgcaacgccactacggccttgaacttaacgacacaccattctgcgacgatattgttattcaggagcatatcaacgccggtattacgctggctgatgctgttaactttctggtggaaaagtacgagctggttcgtatcgatcgcagggggtttaactgtcaggagcagtcaccttatctttgggcggtagatattttacgggcaaggcaggcaaccggcctgttacggcaaagccgtcatcctccgacacgctga

SEQ ID NO: 392737 - DNA, 1530 bp, Salmonella enterica
atggcaagaaattcggctttggcgatgacattcaatgcacttgagggacttcttgagtctgttgatgcgcaccgggtaaaagtaaatagccaattagatgaagccactcgtggtcaaaaaggccaatttatgacgccagctgcagctgctcgaattttggctagcaagtttcgcgatttaaatggtgagttaaacattcttgacgctggcgctggtgtgggttctttaactacggcgttggtcgaaagagctttgagagatttttcaccaaagtctatacatgctaatgcatgggaacttgaaaatgtgcttattgaaaatttaaaatactctctggaattatgtgaacaagctaccattgaatcaggtatcacttggcattcaaaagttaattgtgttgatttcattagtcatgctgtaagtctaataaaacaaaaaaatagtggtcaaaaaacagcctcatttaataaagctattttgaaccctccctacttaaaaatttccgcatcaagtgaagaacgtaagcttttacgaagtatcggcgttgaaactggtaatttatattcctgctttgtagcattagctttaatgctcctagataatggaggagaactggtcgcgattactccacgtagtttctgtaatgggccatacttcaacgactttcgtagagttcttctcgatggaaataatttaaacaaacttcatatatttgaaagccgaactagcgcattcaaaggtgataaagttcttcaagaaaacgtaatattccatatcataaaaggtgatattcaaggatcagtggagattacatcaagtacttgtgccaacgatccagaacctattattcgcattgctaatttcgatgaagtagttaacccaaataaccctgaccgttttattcacattattacaagtgatgaacaagctgatatcgctagccgcataggagggatgccttgttcactagaagatcttggtattggggttagtacaggtaaagtagttgattttagaacaaaatcgaatcttcgccataatgcagaagaacatactgtaccgctcatatatccaatgcacttcaataatggcttgattgaataccctgtagaaagcaagaaaaaacccaatgcgatcgttctaaatgaagaaacagaaaaattgatggttccgaacggtacatatattttaactaagcgtttgacttcaaaagaagaaaagcgtcgtatcgtagctgggttatatatggccgatgtagcagatgtatcagtagttgggttcgagaataaaactaactactttcatgcaggtggacaaccattggacactgattttgctaaagggctgtgggcttatttaaatagccatattgttgatcaatacttccgtcagtttaacggtcatacccaagttaatgctactgatttacatactcttcgttacccaaatcatgaacaattagtcaatatgggaaaacaagtccaacagtttgaccaagatttttttgatgaacttgttgcgaaattataa

SEQ ID NO: 392738 - DNA, 162 bp, Salmonella enterica
atgatggcgatggtgatcgcgttacaccagaacagcaaagtgtgctggcagatgcaggtattacaattactattcacgactctatgcctgatgtgttgttatggaatcgtcagaataatagcctttgggttatcgaagctgttacaagcgatggtgaggtag

SEQ ID NO: 392739 - DNA, 327 bp, Salmonella enterica
gtgaaagtttcgtacctgtgcgacacccgacctggagacgttcttgatctacactgggatgaagtgatggacatgggaaactatagtgagcagaacaaaacagacacaaaacaaatttatgaaggcagcagtcgtgataagcagcttttctccggtcaccggacagaaaaccaggagctggcttacttacgaaaagtaacaatcacaccatcactgcccctcttctggcagaaaaagcataagatggcgatacgtttttcacgtaatattctgacagaatattctaactgtattctaagtgtgagactgatcgttgaaagaagatga

SEQ ID NO: 392740 - DNA, 552 bp, Salmonella enterica
atgataggtaaaatttataccccacctgttttttttaataatcgtattagtcatgacaatgctacacagccagaaaaaaacttgaaaaatcaggtaactggttctgttattaatgtaaaaaacaccagttctgattttcgtattatcagcaaagaactatctctatacagagatataaaaaatcatcccatattggcatctgttgcagatactcaatcacataataaccaggatgctcgactcagttctttaggcatggcggttactgccatatataatatggttgaaaatggaaaagctaaagaaaaatcagttgagatatgcgataaaatcccaagaaatcaatcagttgagttaaatcttgattcttctttaactaagagaggggcagaatatattaatcaattccttgaggctgaaactcctcttgattctactaactatgcaaccggacttagagttggatctgatataaagaatactgtattagatcccattatgatcaatcagtttaactcaacatggaatattcggcttaacatggctacttaa

SEQ ID NO: 392741 - DNA, 1092 bp, Salmonella enterica
gtgcaaaatgcattacgtgataagcaggtaaaggagtatcaggagcagatccagaaagcgatagagcaggaggataaagcacgtaaagcgggtatttttggcgctatttttgactggcttaccggcatatttgaaaccgtgcttggcgccttcaaagttgtggaaggttttctgtccggtaatcccgcagaaatggctagcggcgtagcctatatggccgcaggttgtgcaggaatggttaaagccggagccgaaacggcaatgttgttcggtgctgaccgcgatacctgccaggcgattattaacgtgacaagtaaggttcagtttggttgtgaagccgtcgcgctggcactggatattttccagattggccgtgcttttatggcgacgagaggcttatctggcgcagctgcaaaagtgcttgactccggtttcggcgaagaaatcgctgagcgtatggtaggtgcaggcgaagcagaaatggaggcgttggctgaagagtttggcgaagcggtgagcgaaaatttttccaaacaatttgagccgctggaacgtgaaatggtgatgacggatgagatggcgcaggagtctgccgagttttctcgtgacgtagaaaacaatatgacgcgaagcgcgggaaaaagctttacgaaagagggggtgaaagccatggcaaaagaagcggcaaaagaagccctggaaaaatatgcgcaagaaggggaaaattttctgttaaaaaactttcgtaataaggttctctccaatatgttcaaaaaaatcatgtatgccttactgaaggattgttcatttaaaggcttacaggctatcagatgtgcaaccgagggcggcagtcagataaatactggcgtgattacagcaaaaaaagcggaactcgaaaaaaaaatagagcaattaatcgctcagcaacagtttctggatttcataatggaacaaacggaaggccaaaaaaagatggaacaaaaacgcttacaggcgctttataaggatagcggtatggcgcttagagatgtattagagaccattgataactatagtagcgttcaggcgagaatagcgggctggcgcgcttaa

SEQ ID NO: 392742 - DNA, 588 bp, Salmonella enterica
atggaagcgagtaacgtagcattggtattaccaacgccttccttgttaacgccttcttccactcaatccccatccggggagagagtggatactgactcattgcttctgttatttgatcaaatctggatgaagttaatggagcttgccaaaaagctgcgcgatatcatgcgcgcatataacgaagtaagacagcagttgaattggggactgcaggtcaatgtgttacagacgcaaatgaaaacaattgatcaagcgtttaaagcatcaatgattactgcgggtggcgcaatgttgtcgggagtgctgacgataggattcggggctgcaggcggggaaaccggccttatagcaggtcaagccatcggacacactgctgggggcgtcatgggcctgggggccggtgtcgcgcaacgtcaaagcgatcaaaataaagcgattgccgacctgcaacaaaatggggcccaatcttataacaaatccctgatggatattctggataaagcaactgaaattatgcagcaaatcatgggcgtggggtcgtcactggtcgaggttctcgctcaaatactccaggcattaacgaggtaa

SEQ ID NO: 392743 - DNA, 783 bp, Salmonella enterica
atggagattcatattccgccagcggcaagcaatatagtcgatggtaatagtcttccttccgatatacaagcgaagggggcatcgtttcctcctcctgaaattccagcccctggcacccccacagcccctgtgctgcttacgcctgaacaaataaagcagcagagggattatgccgtacattttatacaatacactattcgtgcgctgggtgcgacagtcgtgtttggattatcggtcgctgcagcggtaatttctggcggggcaggattacccattgttattcttgcgggggctgcgctcgtaattgctattggggatgcttgctgtgcgtatcataattatcaattgatatgtcagcaaaaggagccgttacaaacctccagtgatagcgttgcccttgtggttagtgagctggccttaaaatgtggagcaagccttaactgcgctcacacccttgctaactgtctttctttattgatacgttcaggaatcgctatttcttttttggttatacctctacagtttccactgcccgccgctgaaaatatagcggtctctttggacatggggactgtaattacctccgttagcctgacggcgataggtgcggtactggattattgccttgcccgaccccccagggacgatcaggaaaattcttttgatgaactccaggccgatcccagtgtgttattggcggaaaaaatgacagcgctctgtcaatcagctactccacctgcattaatggacagttctgatcataaatctcggggagaaccatga

SEQ ID NO: 392744 - DNA, 822 bp, Salmonella enterica
atgattggtagcttgctatctatattaggcgcgatagcttccaatgttgcatttgtggtatctcccgcaatgccagaaagatctcttaatggagcgctttgctttttaatattgtcaacttcatttattgctcattctgcattcactaggttaaataaagattcgatatatatatctggaattgcgtatgtaatggtagtattgtattttatcccttcatacttactttactactcatcaatttattcaataaataaacaaactgaagttagaaatgagattataaagaaagcaaaagataaaaaaaaggatcatgccgtgatacctgattattatttcccccctgtaatgcatagagggccaagcttagatacatttaacagtgaagcaatgtccagatattatggcattaacttgaaaataactgctcctgggttctatgattattcatacgcttttaactcaagacctatctatgtaaacgcaaaattatataatgacgtttatataaaatcattgtggatatataaacaacaaattggaataaaaacttttgtaatatttgagtttaacaaaaatccatctgattctctggatgaaaatacggcgatgttcatccatatcaatactaaagacgggagatctataaatgctgatgttgataaaaaaacgtacgagatagatggtagatggctttctggtagggcaatagatggtgctgatattaataatattaaatcaataacatcaggcacatgggatattcataacggacaaagaaaaagtgaatatttgtcgttgataacgcaaacattaccataa

SEQ ID NO: 392745 - DNA, 477 bp, Salmonella enterica
atgggcgcaggcacagggaatctccttcaacagcgccggacactttctgacaaacaccgggctgactccctttggtatagagcgtctgcagccgccagcagaaaggggcgagcctattacaaatgcacaaattcaggcctggcgggatctgccgcaggaggaaaaacgcgaggcaggcggccgaataaagtgggcgcagacgcagggaatagccatcaaaagtgccgaaaactttctgacaaacaccgggctgaccccctttggtatagagcgcctgctaccgccagaagaaagaggcgcccctattacaaacacacagattcgggcgtggcagttattgtcgcaggaggcgaaacgcgcaacgggcggctgcataaagtgggcacaggcgcaggggatagccatcagcagtgctatcgcctgtctgacaaataccggactgacccccaatggcaggaaacggctgcaaccacctga

SEQ ID NO: 392746 - DNA, 132 bp, Salmonella enterica
atgcagatggtttcaccggtaccgcgtattcgctctgcggtaaagttagcctgccgtcccggagacgccagcgccttcagttttaaaaaacacttcagcctgtccggcgatgacgttccttcatccggctga

SEQ ID NO: 392747 - DNA, 336 bp, Salmonella enterica
atggatattaattcgtctgcaacagtaaacacaccattgcttcaaccctcaaatcagcaacgtgacggaaaacctgcagctgaaatcgttaattttcaggcccacggagagaaacccaggtatctaatgtgtatcggaacatcaatgatatgtgcggggaccttcggtgctatagcatcaggactggttgccagcgtcagtagtggttctgtcttcagttcatcactggtagtcgttggagcttctatggggctggtagtcattggcacgatggctatcggcgcgggactctaccttcattcggattcgatcagaactcatccagcatatccatga

SEQ ID NO: 392748 - DNA, 297 bp, Salmonella enterica
atgcccaaccggcgccaggcctatccgcgcattaaagtcctggttattcactatacggcggaaaactttggcatttcgctggcgacgttaacgggtcgcaacgttagttcgcattacctgattcccgcgatcccgccattatatggcggtaaaccgcgcatctggcaactggtgccggaacaggatcaggtcggcacgcgggcgtcagtttctgacgcggcgccacgcgtctcaatgattcgtcgtctattggccttgagctggaaaatcgcggctggcgaatgtccggtagggtga

SEQ ID NO: 392749 - DNA, 780 bp, Salmonella enterica
atgaacatatcatcaagcggaattaatttttccacaattcctttccaggttaaaaaattagctaaaactattcgtgaacgtacgaaaaactggttctcctcagaaataaccagtgttaaaaacacgcatatatctttaaatgaaaaattaaaaatcggaaagacctcaccgattgagatagcgttaccacacaaaataaaagaactctttcagccgaaagacaaaagcaccttagacaaaacattggttactgttaaaaatattacagacacaaataacacatgtaagaaaaacatttcagaagaagatgcctcaaaaattaccatagcattcatgcgtaagcatattgcaaatcaatcatatgattataattacagagtgacaggtgcagatctgctccccgaagaagtctcagtatcagccaataacaggccgactgtttctgaagccagaacaccaccaccagtatcccccccctcatcacctgccggctgggctgagaaactcaaggatgcagttctacgactgaaaaccggagaaatcctctcgaccacagaacgtgatttttcaaacgcagatttccgtaacatcaaattcagcgaagtattgcccccagcttcatggaacgagacggtgatattattaagggattcaacttttcaaattcaaaatttacgaattctgatatgtctgatttacattttgacaaatgcaagttcagccattcgtcgtttgctggtacaaactgtagcaatacgatattcagtaattcagacatga

SEQ ID NO: 392750 - DNA, 234 bp, Salmonella enterica
atgaatcttaaaaactaccttaaaacctctggcgtacgtcagcaggacttcgctgtattagtcggtgaaactcaagggtatgttagccgtgtagcttccggtaaatgccttctcggagctgcaacggcgcttaaatgggctgcagctactgcatttcaggtaacacctcacgactttcgacctgatctttacccaaaaccaaccgatggtgttccagataggaacgcagcttaa

SEQ ID NO: 392751 - DNA, 225 bp, Salmonella enterica
atggaaaacgctgtattcgttactgctactcaagcattgaatgtgatgctggataccatgaagcaagaaacaggaaccgctcatgtggatgacattaaagcggcccttcagtttcttaatgaagtagtaggcagatgtgatggggacctgcttaagggttacgcggtttgggctgaagtttgtaatgttggatgggaacgaacttcgacaggccgccaagattag

SEQ ID NO: 392752 - DNA, 243 bp, Salmonella enterica
atgtcagaacttgaacaacttaaaaacgaactggccgagatgcgagaagagctagaagcacaaaaggtagtactggttgctttgttatcagtagctccgattgaaaaccgcatagagttcaactcattggttcagaaaattaatcgggatctatttccaccttatggtactaatcttggcggcctgtcgaagttcgttcccatccaacattacaaacttcagcccaaaccgcgtaacccttaa

SEQ ID NO: 392753 - DNA, 969 bp, Salmonella enterica
gtgccacagggtgacgaggctttcatcctcactgcggataagctgtccggtggggctgtagtgataacgctgcgtccgcccgtcgaagcccgtttcctgcgccagcctgtccagcaggtcgtaagtaaaagtggtgcccgctccgttttcattaataagccgggtgacgcgcccggcagcgtcgtattccatctgccgcgtcaggccgcctccggtggtgctcaccggatgccctgcggcgtcatactctgtggtctgcctgctgccgtccgggtgaatgacagcggtcaggtcgccagccatgttgtattcatagcgggtctcatggcccgcggcatcctgctggctgaccagcctgccccgttcatcgtaagcgcggtactggctgagcccttcctcccggtgaagggcggtgacctgcccgaagcggttgtattcatagcgggtctggtagccggagcagttggtcagggtcagcagctgcccgtagcggctccacgtcatctgtttccggctgccggtggcgtcttcggtggcagagggcagttcgctgtgcgggtcatcataataataacgggtcacatcgccgctgcgggatttctcctgcgccagacgcccccgctcatcaaatgtctgctggctgcgcaggccgtcagggccggtggtggcgatgagctggcgctggtcgttataactgaagcgtacacgccttccgtcaggcgtgacaatttctgttacatttccggaagcgatattcagccggtattcggttttacgcccggccgcatccgtcatcgccaccatgcggcccgcgttatcaaattctcgcgtaatcgcactgccgtcggcctgttcttccttaatcacccgtttcagtccgccttcgccttcggtgtgcagcacctcgcggcggttcaggctgtcggtaatgatgacggcatttttctcatagccgtaggtatagcttaa

SEQ ID NO: 392754 - DNA, 942 bp, Salmonella enterica
gtgggacagctgaatatattcgttaccggtgatttctccgtatgtccgccggcttttccacacccgtttcccgatgcggcggcccggcgggtcatagaggtaacggctttccagcagggttatgccctgttgctcacgacggtagtgcaccagacggtgccggttatcgtagtggtaatggtgtacgtagccgccgccgtcgcgtatctggcgctcatcctttttcgtcagccgtccgtgcgcgtcgtggtggtaaaaatacgccacgtcttcactgatgcggttatcccgccacatcgcgggaagcgccgggtactgttcccggtctgccacccggttacccgccgggtcggtggcgtagcgccgcagcaggtcgttgtgccgggcgctgatgagccgccccgcgccgtcatagcggtagtcttcctcctgatgcgcgccacggatgtgtacaggctgcccgttgtcgttatagccgtattcccggttcagcaccgggttactgaacgtgtggctcagcagctgcccggtggcgctgtagagcgtgttctgctcataagcgccggacgttcgctgtgtctcccggtgcaggcggtcgcgggtgaaatcgataagcggtgtgtcgcccagcttcattcccgccagataaccggagccgtaggtgagccactccaccggcggcagattatcgggggtggtccgggtcgccagcccctccggataatcgtgttttgtttcgtgctgccacagcagttcccccgttccgggatgctgcaccgtctggcgttcgcagttcatccgtccctgtttatcgtactcatactgcacggcgacgcggtggccatcgcagagatggctgactccggtcagccagccctgttcgttgtactgccagcgttcggcctctgcgccattcacggtgcggtacatcagccggtctga

SEQ ID NO: 392755 - DNA, 1581 bp, Salmonella enterica
gtgccagagcgtgaccaggtccccgtcctcgctgcgcaccatctgcccggccgggtcatagccgtagcgctgcgtccgtccgtcaaagcccgtctgctctgtcagcctgtccagtacatcccacgtaaagccgctgtggctcccgttctcattggtgagctgtgtcacccggcccgcggcgtcatacgccatccgccgcgtcagcccgccccgggtggtactgagcacgtttccccggccgtcgtactgcatttcggtgcggctcccgtccggcccggttgtggtggtcaggtcgcctgcctcgttatagtcatagcgggtttcacgcccctgaccctctttctgcgacaccagaaggccgcgggtattataggtccggtaaacactcagcccttcctcccggtgaaccgccgtcatctggccgaagcggttgtactcataccgcgtctcatatcccgaacagtcggtgaacgccaccatctgaccgtaacgattccggcgtattgtcctgctgctgccggtggcgtccacaatccctgtcggcagttcgctgtccggattatcgtaactgtaccgcgtcgtctcccctgtccgcgaagtctccgccgtcagcctcccccgctcatcatactcccgcgtgctccgcagcccgtccgggtacaccgtcgtcgtcagttgctgccggtcattatagtggtaccgcgtctttctcccgtccggccccgtcaccgccgtcagcttccccgtcgccacgtccgggctgtattctgtctttctgcccgccgcgtctgtctgccactccagcctgcccgatgcatcatacccgctgcgcgtcacgctgccgtcggcatattccttcatcaccacccgtttcaggccgccttcaccttccgtgtgcagcacctcccgccgtcccgggctgtccgtgacggtgacgcggttcttctcataccggtaacggtaactcagcccttccgggttcagctgctccgtgacgcgtcccgtctcatcatagcggtagcgcatctgcggcctgcccgcgtaacggtggcccgtcatccgccccggatacgccgggtcgtacacaaaactgcgcacctgcaccccgccacggtcatacacggcggcaagctcgccccgcggcgtgtattcatagcgcgacagcatcaccggctcctgctccccctccgcgtccggctcatgtgccagccacacctgcgaaagccggataccgctgtccgtaccgtactccgtggcgggcagcgtctccgggtatgcctgtgcggcggatttacccgcctggcgggccgcctgcgcccgctgtgcctgcgtggtcagcaccaggtgaaaacgccgccccgcgccgtccgtcaccccggtgatgttcccgctgtattcgccgtcagccgcccgctgataccggagggtccggccaaaattatccgccagccccgtcagtacccggtacggtggcagcggcgcgggcagcacctcatccacccccggcacccgctccgcccaccccagtatccaccacggcccctgcggactgttcgtcgccagatacgtgtccgggcttaa

SEQ ID NO: 392756 - DNA, 969 bp, Salmonella enterica
atgcagcttcctctccggctcagggcgcggctccagctgatttttcatctgctccgccgtcagcccgcaccgcgtaagccatacccggctttcctcactgaccgcgtcacgcctcagctcatcctccagcctgtccagcatcgcccgcagcgccgccgggaactgcaccgtctcgccgtccccgctcccttcctgctccagcttctccgccaggctgcggtggcgtgttttcgccagttccgtattttctgtttccacccggagaagcggcgtgaagcttcccggctcatacaccgtctgaacgcggcgctgctgtgtccgcactgttgtcagcctgtccccctcccagccgtaccacgtctcatacggcctcgccgacagctccgtccgcgtctcgctccagtggaccggctcgcgcttccatacccgcttacccacccggcggcccgtcgggtcgtagatataccgcccctccgcctgcgtctccccgtactgcgtgcgcacataacggaccagccggtgctggttatcgtagtcgtaccggtgcgtccgctcgtcgtgcatccggatgaccccctccgggatacggtccgtcttctccgtcagcctcccgtaacggtcataccggtaccggtactgcatatcctccgtgatgcggttatccgcccataccgtgctgctgctctcagggtaaaactccgggtccggcagccggttccctgccgggtccgtggcgtacggcagggtgatgtccagattcgcggcggtggtgtgcaccccggtcaggcgcccggcttcgctgtagcggtactccctcgtctgctgcggcccgctgatgcgcaccagcctgcccccttcatcgtaaccgtactcccggtcaagctgcgggtggttcaggtgccggccctgaagctgtccgccggggttatacgtcgttgtcagttcataactgtccgggaggctgtctga

SEQ ID NO: 392757 - DNA, 783 bp, Salmonella enterica
atggtaacatcgtattctgatatgaccctgagaaccgttttaacaacacaggacacttcatggggacgcccgcatttatctgaaaatagaatcgatgaaatacaaatgaaggcacgaatgcagcaacgccatcatactctatttccagagacgggtgatgttagtattgtttcttttaaagggaaagagtatacaattaagtttttaagagacgggaataatagttatttttacaaagttaacagactggaaccgggtaaatcatgttgcccttgggtatcgcagtttttttcaggacaagtatccagaacacttgaacgccaattaaatgagcgacatataacgccgctttcctcaacctggtttccagcaacgcctttagttggttttttatctaatcaggggatgcactctttagcacgacaggtacaagcagatcctcatgatggactaaaaaatctattacaccccctaaaaaaaatgcaaccaagcgagccttctccgcgaattccacctgctgtaccgccaaagccacgtgttgtcgctgcagagaatccgctaacattgcagccgactgcggcattacaacccattgcggcatcaggtacgccttctccgcaatatccacctgctgtaccgccaaaaccacgtgttgtcgctgcagagaatccgccaacattgcagccggctgcggcattacaacccattgcggcatcaggtgcgccttctccgcgaaatccaccagccgtccctccaaaaccgaattttatacatcatctgtaa

SEQ ID NO: 392758 - DNA, 168 bp, Salmonella enterica
atgttgatgcaccatgaaaaaattcaggtgcatcaacatgattatttatctgattgtaattggcttatattctctcacatgaaacacgaaagttcgccagagagtaggtttactgaattctactggcataacctgctagattttcttcaggtttctaacgtaaagtaa

SEQ ID NO: 392759 - DNA, 1356 bp, Salmonella enterica
atggcgggtaaatggcatcttggttttacgccaggcgcgacgccaaaagatcggggctttcgtcattctttcgccttgatggggggaggcgccagtcactttgatgatgtcgtgccgctgggaaccgttgagatatttcatacctattatacccgtgacaaccagcgcatttcactgccctctaatttttactccagcgaagcttatgccagccagattaatcgctggatcagcgagacgccacgggaacaacctatcttcgcatggttggcctttactgcgccacatgatcccctgcaggcgccggatgaatggattagccgttttaaaagtcagtatgaacagggctatgcagccgtatatcgtcagcgtattgctcgtctgaagaaactgggttttctgcgtgatgacatacctttgccgggactggaacttgataaagaatggcaggcgatgacccccgaacagcagaaatacacggcaaaggtgatgcaggtttacgctgcaatgatcgccaatatggatgcacagattggcaccgttattgagacgttaaaaaagaccgggcgtgataaaaacacgattctggtcttcttaagtgataatggagttaatccggcgcagggctttcactatgaatctgaaccggatttttggaagcaatttgataatcgttacgaaaatattggtcgtaaaaattcatttatctcttatggtccctactgggctgatgtcagcaatgcgccttatggtcgctatcacaaaacgaccagcgcccaggggggaattaataccagttttatgatttccggtcctggtatcatacataatggtgccatagatcacgccacgatggcggcgtatgatgtcgcgcccacgctatatgaatttgcaggtattgatgtcagtaaatcattatctgaaagacagactctgccaatgaccggcgtgagttttaaacgctatctgaccggtgaaagtctgcacgcgcctcgcacgcaatatggcgttgaacttcataatcaggcggcctggatagatggagaatggaaattgcgtcgtcttgtcacagtattcccacaggctggtaatgcgccatgggaattattcaacctgcaacgtgaccctctggaagtgcataatctcgcagcagattatccggataaagtgaaaatactgagtagtgcatatgaggtatttgcaaaacagacaatggtgctttatgccaaaggcaagcttatcgattatgtgggtatcgacagtaaaaccgggcgttatctggctgtcgatccacagacattgcagccagttcctgctccgttagcgattcctttaaacacaaaatcgggtcactaa

SEQ ID NO: 392760 - DNA, 378 bp, Salmonella enterica
atgcctgtcttttttcacccgctcattactggggattcctcagcgcataagcgggcttttttgtcactcgggagccgcggctgctttgagtatccttttttgtctcctcatcgtctggttggtgtcctgttgacttctaacttccgtctggttttccgcaaaaaaaacgtgctaactttcctccatacgctttcctccggcgacggcgtttctgtgctggaggggagggggagcccagttctgacagtagaacgtaagttgtttatgttaaacatattacgatctgcattaagtataaaaaacacactatgtcttatacttacggtttttgtctctcagaaaaagacctttttctggatcactagtacggcgatgtga

SEQ ID NO: 392761 - DNA, 1188 bp, Salmonella enterica
atgcagaagtggctcgaatcggagctagagaaacatcgaggtcttttatctgtaattgatattgagaatgaaattaggaattttgatgcaaaaagtattgctgaaaagaaaatacaagatagctttactctttgcatggataacctggaaagtttacatgtgatatccgcagataaaaatatatctgtagataaaaaagataaattgcgaccagacgtagtcgcatattcaatagatagaaattcattggttataatggagctgaaaaatatcaagggccctactcggcaggctggcacagaattatcagcatacgcagcagagctaaaaggatatttaagtcacctttcagatggagatattataaatgttattgtttcatgtgagtggccggttttattaaatcactatgttttcaacacaatattttggcaacataaaaaccttatctgtttagaacccattgaagattcgtcaggctgtaaaaaactacgatgcagagacattaaaacaataatacaatctgatattaatgaaagatttgcatttcaacatcttgaaggatttcatatttctctgcatgatcggacgttgggtaatagaccatgcagggaaagtagacttcatgagaaagttgatgtaattaaagtaagcatggcaatgatggctgctgagtctgaaaaagatcatagccatggttttgccatgctgtgcaaaaaaaatgacattaccgatgcaccatatgtaattactatagctaatgtaagtggttttgcctctatagaaagacatttccatgatgagggctttgagactattgcagaccttccaattattggaaggcacattcatgaaataaatgagggcttttgtaacaaaggctttagcgcttcaacccttaaggcttacagtagagcgaaaggtgtattaaaaaaaatatgctctccacgcattgagtgccctgacagttggctaaatcttcaggcttttacaaatttccctcatgttgataaagtacatatagagttgtggggggtatttaaagaaaagtactttgagatgatttctgattctgcagaagatagtgattgtttgaatttaagtgatgtagacttaattcagagtataattgatggtttgatgtatgagagctatgagcatattcgcgtaggcagagattatgaatga

SEQ ID NO: 392762 - DNA, 693 bp, Salmonella enterica
atgttattgaaatcagtagcgttgttttttttaatctcaatactttacggatgcagtgtgtgtgatgatgtttttggaaaaaattactctttaagtgcggtatctagtttttcagaagatattgatgagttaaaaaaaatatggtttcattgtgagatgtgtttgaatgaaccatcgtgtaaatatgaagatgtcaaacaatgcagaaatatcaccctaccgagtagagatgaggccttaagcaaagctataggacgagctaatatcggagcagtacattttcttgttgatatagcaaaaacggacgttaatggagttactggcagatatcaaaatacaccattaatagttgcagcctattatggtactaaagaacaccaggatattgctgaatttttactatcacgaggggcaaacattaataaaatatatccagcagtggggggaactcctttgggtgttgctatatggaaacagaatgttaattttgcaaaatttctactcgaaaatggtgctgacccttctataaccatcaatggcagagaagaaggattcgcttgtgagaaggcaatgagtaaaaaattaccggagttatttccactgattcctggttgttgtcctttagctttacatgatcttaactttgatccaaatatagcaccacaaactatacctcaatgtagcgggttctaa

SEQ ID NO: 392763 - DNA, 252 bp, Salmonella enterica
atgaaacttgcatgcaaaaatgatttgacaggactacataaattgtatcgtcccgtttgtaacggtatggcaattggatatgagtttgcggtaagtagttttggcgattcagcatttacatccgcacaaaaaggggctttatataattatagagagctggagatgttagatttcttaaagtttgaactgggagaggatattgatcctgattatcatagtaaagcctattatagagttgctaatcccagatga

SEQ ID NO: 392764 - DNA, 363 bp, Salmonella enterica
atgttgcgagaacttatttcacctgtggaattttttacgccaacgctccacctcggtaactcacaacaaatacaaaacaaattacatccaaaaataagacgttactataaaaataataaaacaactctgcccaattattcattttttaccctctcatattcaattcccggcaccgatcagtttgagactcgcccagtaaagtatcatttgtttcaaaagatgtttgtcctaaaatggaccctgttatattttttttgcaaaaacatggtgaataaacagggcaacagaaatggactctccccaaccaacaccaacctgcgcttttattcaggccgtcagaacattattcacggttctaaataa

SEQ ID NO: 392765 - DNA, 1125 bp, Salmonella enterica
atgctgaataccaacacagaattattagcaacaccagtcggtataaatccaacgtctgactccaataccgacgttccggttaccggaaaaggattagatctacatctcaccagaacaactgatacaacttcggtgagatcttacacagagctcccaatccctattcaggggtacaaaatggtaacaccatcagctgctgaagatgtgttatcaaagctctttggcgggattaatggcgacaccgaaaaccatggcaacacggaaaataaggccaatgaagcaaaaacctacccttatctttcacaactcagcaatgttgatccacaagcaatgatgctgatggtcacgatgttgtcgatggacacatccacccaaaaagtggccatgatgaaagatagcaaccaactttatactgaagggcaaaacaaagccctggaaaataaagttgttgagtttaaaaaacagcttgaagaacagcagaaagcagaagaaaaagcacaaaaaagtaagattctgggacaggtctttggctggcttgctgtcgcttttacagcaattgccgctgtatttaatcccgccctttgggctgttgttgcagtgagcgcgacagcaatggcactgcaaactgcagtagatgtaatgggtgacaaagcccccgccggactcaaaactgcagcgcaagttcttggtggaatatcaatggctgcaagtattctgacagccggcattggcggggctgctgcattaatgtctaagtttagcgagcttggaacgaaagttggcaccactgtagtgaaagttgttactaaagccgcagatgtgcttattaacaacgtcgcttcaaaagcggcagccgtagcaacgggtgtgaccaatgcgtccaaatcagttggtacaaccttagtaaataatgaagcagcgcaatataacatgcttgctcaactttcggctttcaatgttggcaatctaacacgacagagtgaaatgatggcgcaaagtgcgaaagcggaactacgcagtgcggcaactgaaatgcaaaatcaggctaattatctgagtagtgcctctggtttgctttccgattctgctcgtattaacagtcggattgtaagtggccgaatctga

SEQ ID NO: 392766 - DNA, 939 bp, Salmonella enterica
atgaatactcttgttctccctaaaacacagcatctggtggtctttcaggaagtcattagaagtggttctatcggttctgccgcaaaatcgttagggttaacccagcccgccgtcagtaaaatcattagcgacgttgaggcctattttggcgttgagttaattgtacgtaaaaataccggcgttacgttgaccgaagcgggacaggtgctgctttcctggtctgaatctatcacccgcgaaatgaaaaacatgatcaacgagatgaacagtatgacgtgcaataccgtcgtcgacgtctcgtttggctttccttcgctgattggctttaccttcatgtccgatatgattcataagttcaaagaggtatttccaaaagcgcaggtatccatgtacgaagcccagctttcttcattcctgccggccctgcgtgacgggcggctggactttgctatcggtacgctcagcaatgaaatgcagctacaggatctgcatgtcgagccgctgtttgagtcagagtttgtcctggtagccagcaagtcccgaacatgcaccggcaccatcacactggaatcgttaaaagacgaacagtgggtgttgccgcaaacgaatatgggctactacagcgaattactcaccactctacaacgaaatggcatcagcatcgaaaacattgttaaaacagattccgtcgtcacaatatataatcttgttctcaatgctgatttcttaactgttattccctgcgatatgaccacgccttttggctctaatcaatttatcaccataccaataaaagacacgttacccgtcgcacgttatgcggcagtatggtctaaaaattatcgtataaaaaaagccgcttcagtattagtagaattggctaaacaatattcatcatataatggatgcagacgcaggcagttaatagaaattgaatga

SEQ ID NO: 392767 - DNA, 255 bp, Salmonella enterica
  misc_feature (195)..(204): n is a, c, g, or t
atggacatagttaataatagccgtgatgttattcattcatcaggtattgtgtttggaacgagtggtgctcgcggtcttgtaaaagattttacacctcaggtatgtgctgcttttacggtttcgtttgttgccgttatgcaggaacatttttcctttgataccgtagcattggcaatagataatcgtccaagtagnnnnnnnnnngttatgggatggctcaggcgtgtgctgctgcattggcggataagggagtaa

SEQ ID NO: 392768 - DNA, 402 bp, Salmonella enterica
atgtttaatagaatatatcttggtgatcgagccatcaagaaaatcgaatttgatttatggcaaaaagaaattagaattcaggttaatttaatttcaaggttggcctatggcacaacggaatggaacttttataacaatgaagacctggaagatggttattttgtattttacgatgtcgattgcttcaatataacacctgaaggttccatcccagatgattatataatttcaatgattacaaataaagtaaacggagaatattttgaatcaactatagcagttactggtcaaattccggatgcaaacaatggggatattgataatgttggagaatgtcaaatttttatcagatataaaaatggctggattgaaaataaatttaaagaaagaataatggagtag

SEQ ID NO: 392769 - DNA, 726 bp, Salmonella enterica
atgaaacagctcatccgtttgccggggcagcagtacgatgaggagacagggctgtactataaccggtatcgttactatgatccgttacagggacggtatatcactcaggatccgattgggttgcggggaggatggaatttataccagtatccgttgaatccccttaattatatagacccaatgggattagagctattattgttaccgtctcctaaacaaaaacccgcaagtcaatcctgtactattgatcctataactcaacaacctgttggtagatttataggtgattctaaaggcaatataatggttgagcctgtaggtggaagaacaatcccgtatcctctcagcaatccgggaagtgtagatacacacactctttatcccaataattcaaatgcttacaggcttaacccaatggggcatgagaacaattcaacacctcatgcgcatgcccatttaccaggaacaggtagcggtatgagagggcaaggctcatcccttgacgttaatggccgcgttgttccatggaatagtagtgccgcacatatcagtattaaatcactcggtccactaagcttttttagttcgattttacatatgtatacatttagatcatgtagagaaggaacgtttgggcaatgttattgtgctatgggtattgaaatgtcaacgggaagcagtcaagatgaggctgatataatgtgcggaatgcctgaatttttttag

SEQ ID NO: 392770 - DNA, 246 bp, Salmonella enterica
atgtttaatataaactccatgccgccgcttataaagaaaataacacacaggaactggctgaaaagcaaaccaaaaagtgaggtttcagcttccattgtagaattgaatatcgtccccattgtagcgccacgtaaagtatcaagcagaaacccagccatatcaactgcccaaaagggaaccgccgcacaaaacccaattaaaaagccaataattatctctcctgtgattaaccctaaccaactgtaa

SEQ ID NO: 392771 - DNA, 267 bp, Salmonella enterica
atgaatgattctgaattgacgcaatttgtaacgcaacttctatggatcgtcctttttacgtctatgccggtggtgttagtggcatcggtagttggtgtcatcgtcagccttgttcaggccttgactcaaatacaggaccaaacgctacagttcatgattaaattattggccattgcaataaccttaatggtcagctatccctggcttagcggtattctgttgaattatacccggcagataatgttacgaattggagagcatggttga

SEQ ID NO: 392772 - DNA, 573 bp, Salmonella enterica
atgggaacctctttccttaaactggcggtggtattttcgattttacgaaatgctctgggtattcaacaagtccccccaaacatcgcactgtatggtcttgcgcttgtactttccttatttattatgggaccgacgctattagctgtaaaagagcgctggcatccggttcaggtcgctggcgctccattctggatgtctgagtgggacagtaaagcattagcaccttatcgacaatttttgcaaaaaaactctgaagaaaaggaggccaattattttcggaatttgataaaacgaacctggcctgaagacataaaacggaagataaaacctgattctttgctcatattaattccggcatttacggtgagccaactaacgcaagcatttcggatcggattgcttatttatcttccctttctggctattgacctgcttatttcaaacatactgctggctatggggatgatgatggtgtcgccaatgaccatttcattaccatttaagctgctgatatttttactggcaggcggttgggatctgacgctggcgcaattggtacagagcttttcatga

SEQ ID NO: 392773 - DNA, 423 bp, Salmonella enterica
gtgaccttcccgccggaactggtggcgatggtggatagtctggaagcggagctacagcgcggggaactcagcgccgcaaaccgggcgtggctggcgcagtgcggcctgacgccggagcagattcaaaaccagatagagccggaatacacgccgcagagaaaaatccacctgtaccactgcgaccaccggggcctgccgctggcgctggtcaacgcggaggggaaagcagactggtcagcggaatatgatgcgtggggtaatgtactgcgtgagaataatcctcacaatatagagcagcacattcgcctgccgggacagcagtatgatgaggagacagggctgtattataaccgccatcgctactatgatccgttattggggaggtatattacgcaggatccgattgggctggaggggggctaa

SEQ ID NO: 392774 - DNA, 468 bp, Salmonella enterica
atgggattaaaaacctgtattttagtaacaaaaggatcaatgtcattgttgccgggattcagagaccatgcgtcgctatttattaaaagagcctatattgagaatggacagtatgagtctgtaatatatgatccttctggttcatatgccagatcaattgatatagggaacggggatcagttatttcatgaaaatgcgtcatttgaaaaatataaagatttctatagaaaacatgataattctacagttgatattacctgcaattatgaaactacggcagaagcagaaattaatttctataaaaaagttatggagttaggtgataggtctggtcctgcatgcgcctcaacagtatctactgttcttgacggttctccgttttttcctcgtgttacagagggaactttttttccagggaatttatttagagatgcaggcatagattattcaaaagctggagtgaagtga

SEQ ID NO: 392775 - DNA, 948 bp, Salmonella enterica
ttgtcctgccaaagccataaaacgacttgctaccttaaacttcctggctggtggtttgctaacctggcgattgctgtagcttatctcccctggttgcccgtattgtttaatttactgactcatatggcgcagttgagagctggtaatgatatcggctggattccccccgtaacatggcgtgatctgcctgcgatgtactggcatttttttaccggaaacaacggacagggttttccatcgatcattctgtggctggctgcggggtgttttatcggtactgtcgggcgaatatctttatgtaacggagaatatgaaagatatctgctgatattattttgtaatttggtcatccctgtgatgctggtattcatcatttcctggtggatgccattatttatcgatcgttatttcttcttctcatcgctgagcattcctcccctgctcgcggtattacttacccgcgcaaaaaaagcggtttgtggattctggtttatcatattcactttattattcggctatggtttatatcataataaccctacacatatagacgagtttaagccactggtaaattatattaatacccgctaccagcctaatgatgccgtggtagtcagtaaaatgttcgattatttaagctatgtgtattataacaagcgagattatcgtacgtttctttatacaccgcctaacgcacacggaacatcaggcagaccgaatgcctatggatttggttcactgttttatgcgcaagccgatcagacatatattgatactctgacaacgctttcaaaatgtcaccatcgtgtctggttgataagcggcggcaacttcagtcaggattaccccttaccgtcagaatggcaaaatattgcagacttcagaagtggtagatttcaggtacaattatttgtaataccggctcaacgggcgtgtcaaattcaatga

SEQ ID NO: 392776 - DNA, 801 bp, Salmonella enterica
ttgctggaggcttatcgtatcagcgtccggcggggatgcgggttgctgatgcagagcagaaccgtttaccactggcagagccggcgtgacgatcgggcgataaccctgcgtatccgggaaatagcggaaacccggatacgctacggttgcccgcgtattcatattcagttgcgccgggagggatggcctgttaaccacaagaaaacccaccggatttattgcctggaaggcctgaacctgcgcagaaaacgcccccgcagacatgtcagtgcagcacgccgtcagcagcgcccggtcctgacgcatgtcgatcagtgctggagtatggattttgtgtcagataatctgtttaacgggcggcgttttcgggcgctgactgtagtggataattttagtcgggaatgcctggcgatccatgccggaaaatcgttaaaaggcgaggatgtggtcagaataatggaggcactgcgggtgctggataagcggctgccggtacgaatccaggcggataacggcagcgaatttatctcaaaaagtctggataaatgggcgtatgaacacggcgtcacaatggacttctcgcgccccggaaagccgacagataacccgtttattgaatcatttaacggcagcctgtgggatgaatgcctgaacattcactggttcctgtcactggaagatgcgcaggaaaaactcgacaactggcgcagggaatacaatcatgagagaacgcattcatcattaaatgacatgactccggctgaatttatccgaagtctccggaaagacgaagatctctga

SEQ ID NO: 392777 - DNA, 267 bp, Salmonella enterica
atgaaaaagacccgttataccgaagaacagattgcatttgccctgaaacaggctgaaaccggcacccgcgtcggggaagtctgcagaaagatgggaatttctgaggccacattttacaactggaagaaaaaatttgccgggctgggcgtgacggagctgcggcgtctgcggcaactggaggatgagaatcagcggctgaagaagctggtcgctgagctgagtctggacaaggagatgctgcaggaggtactgaagcaaaagttctga

SEQ ID NO: 392778 - DNA, 291 bp, Salmonella enterica
gtgacccgcagacggggggaagtgctgtgggcgcatgagacgcagcaggaatacagcgcgcaggggctggcgaaccgcctgaagccggacggcctgccgccggtggaatggctgacctacgggagcgggcacctggcggggatgaagctgggggacatgcccctgatggagtacacgcgggacaggctgcaccgggaggtacagcggcggttcggttcagacagcctcccggacagttatgaactgacaacgactgaccttccccctgtaaacagtgccagtctaaactga

SEQ ID NO: 392779 - DNA, 225 bp, Salmonella enterica
atgaaatacttaaacggagtaactgttcatattaatgacaaagtacaattatgggagaactgcaacggcattgttgtgtgttctattgataccaatgaatactcagaggaatattcggaagctgactggaaaaatacacttaagcggggtgttttgattttatctgaccaagcggggttaattcactatgaagaggccgatcaggatttaacattacttgggtag

SEQ ID NO: 392780 - DNA, 987 bp, Salmonella enterica
gtgtgtactctcggtattgatgtcagtaaaaataaaatcgatctttgtctgcttactgccggccccggcggtaaaaaaaagcacaaggttctgactaacgaacccgctgttgcccgtaaagttgtcgactggctgaacgcacaaaaatgcgttcctgaaagtgtgactgtcgtactggaagcgacgggtatttaccatgaaaatctggcgtatggcctgcatgaggctggtgtcagcgtctgcatggccaacccctgtcgtgtccgcgaatttgcccatgggatggatatcctcaacaagaatgatgctgttgatgccttcgtgctggcctgttatggcgagctgaagtctccggctgtctgggttccaccttcgcccgaggtgcgtaagctgagggcattgctgcgccagcgggatgcactgagagaggatgtgcagcgtacggtgaaccggctggaaaaagcgaattccacatccacaccacaagaggtcatccgttcacttgagcgaatgaagagctggctgaacgaggaactggcccggatagagaagctgataaccgatcatacggataacgatccggggctgaaggctgatctcgatttactgaaatcaatcaagggagtgaaagatcaggtcgggcgggagatgctggcgttgctgaaagacgggacgttcaaaagcgcctcacaggtggcggcctatctgggactgacaccggtagagaaaacgtcggggagttcagtgcgtggcagaccacatatgtcaaaaacagggccgtcaggagtacgggctaagctgtatgttgcagcgctgaccgtgagccgctggaacaaacaagcgaaggctatctatgaaaggctggtcgcaaagggcaaggcgaagaaagccgcgctgggagctgtgatgcgcaaactggtgcatttatgcttcggcgtgttgaaaacgcggcttccgtgggatgaaaattatgtagctaccgcttga

SEQ ID NO: 392781 - DNA, 435 bp, Salmonella enterica
atgaccactcacagcggactctttaatcaggtgattttacactgtatcacaggtatggactgcactgatgacacccgccagaaagctgccgcgctttatgagcggtatcttgctcacccggcggtgtctccccatatcaataatgggctcttcggcaattataacggcagcccggactggacaacccgcgatgcagataatttcctgctggtttcttcccggacttcagacacggcgatgatgctctccgctgacacgctgttaacaatgctgaaccccacacctgacactgcatgggaccgtttttacctgctgcgaggggagagaacgtttccaccgcgcaaatctctccgggagagttattccgtcatgattttccggtgtttcacgccgcatttaatcagcaggcccaacagcgacgctttgggcaactga

SEQ ID NO: 392782 - DNA, 312 bp, Salmonella enterica
atggaggccgtgaaaacggttggaccagtcggtaagctggtctgcggacgggaatatcgccggagacagttcccaggctttctgcatcagcgcctccgcatagcctctcaggatggtcggagagtcattctcagtgccgaaaatagcgctggaggaatagcgtgcgaatgcggtactgaggcagaacagggttttcgcctgctcctgtggggaggcgtcagccagattgtaagcgctgaggatgtgctggtagtgtgccggactgagtttaccttcaggaagcaggggttcaaaaacagcgttcagacgtga

SEQ ID NO: 392783 - DNA, 165 bp, Salmonella enterica
atgcaatacagcgatcgccaggaagggtatatggctttagtaactttatataatgagttaagtaaaacactcaggatatcttccgcaaatcattatgaaaaaaaatggggctgcgataagtcaccccaatgtctgcttgacacccaactttttatcgttatttaa

SEQ ID NO: 392784 - DNA, 861 bp, Salmonella enterica
gtgacgatcagtaatagtctgcaaacgaatgcgaccttgttaaacgatgcctggtgtcgtctgtttcgggacaataattttactattggcgtcagtcttgagggcagtgaagacttgcaaaatcaccatcgtccgggcaaacgcggcgaggccagttatccggctgcactgcggggaatcgcattgttacaacactatcgagtcgattttaacgtactgattgtcgtgcatgatgacatggctcgccatgcggcagccatctacgatcatgttgttagccttggcgcacgttatctgcaatttcagccactgatgaacgaaggaaacgccctacagcaaagttaccaattgagtgcggataactgggggcgtttcatgattgatatctggcgtcaatggcgcaaacgcggcgatatggggcgggtctttgtgatcaacattgaacaggcatgggcacaatattttacgcatatcagcgccacctgtgtccactccgcccgctgcggcacgaatctggtcatggaaccggatggtaaactctatgcctgcgatcatctgattaatagccagcattacctgggacagcttgctaataatacgttagctccagccgtagattccgcaacccggcttccctttggtattaagaaaagtcagcgccgggagtgccaacagtgttctgtgaaaatagtctgccagggaggttgccccgcacatatcaacagtgccggctacaaccgactttgtagcggctattactcttttttcacggagattctggctccgctacgcgcctggcctcgtgatctgaatggactgaaggcctggcgtgctgacgttgtgaacagattttcgggctga

SEQ ID NO: 392785 - DNA, 729 bp, Salmonella enterica
atgaccagtcaactcatccccgtattcaacggcaccatttctaacgaatctgctttactttgcaatgcccgcgatctacacgcgttcctcgaagtagggaagcgctttgcttcgtggatcaccgaccgattaaacgagtatcaattcgttgaaaatcaggactacatagctatttcccaaaaacgggaaataggtcatgggcgtggacgtaaggattaccacctcacgttagatactgccaaagaactagcgatggttgagcgcaacgagaaaggtcgccagatccgccgatacttcatcgagtgcgaaaagaaactcaacctgagtcacgactcaactgttctgaccactccgaggcagagaacaccactacgtgacgccgttaaccttcttgtcggtatgcgcggcatgacatttcaggaaacctatcagcttatccaccagcgctttggcgtcagtagcattgaacaactcacccgcgcacaagtgatggatgccatagagtacattcattgtctgttagtggacggggcaacagggaaactcccctctggcgaaagcaggatattaatcacctttcgaaatggagaaataatcaagacaagagcaattggagctgatgagcatgtcgcaacgctggaggcttttatcgaactggcgagatgtgcgcattacattgtcatccacaaggatgatgcagcgccattgatgaacgcgggcaaggtgtaa

SEQ ID NO: 392786 - DNA, 600 bp, Salmonella enterica
atgaataaattaaatgcccttaccgggcagggactcactcaacctgaaatcggtcaggcagctatttctgcacctactatgagcagtcttgaaatggtcgattacattaataatgcaaatcgtaaagcaaaagcggaagcagagggattatcgttcccatgcaagaaataccgcaagctatcccataagaactttatgccgaaagtgctgagggtgttgggtgaaattcaatcggctaaatttttagccgattacattgatgacaaaggacgtactcagccttgctacaacttccctaaacgtgaagcttgcttaatggccatgagttacgactacgagctgcaagctcaaatcttcgattacatgacagaactcgagcgtaacattaatggggatctcgtctacacaattcagcagatggaaaatatcgtgtcaattgctcgaaaagcatctgatgaggattcgtcggatgctggacgccgattacgccaacgccaggatgatttgcctttactcgataaggcagaaaagctggtgaaggattttcgccagttttcgtttgagctgattggtggcgggaaagtcgaggtatctgaatga

SEQ ID NO: 392787 - DNA, 321 bp, Salmonella enterica
atgagtatcgtaagtagtaactccgagacaattgagatgtttcctgcggaacatccaatgtcctcaaccgatggtttagtccctgtttcgtctgctgatggcactaaaacttacatcgttctttactactatgatgcaggtaagaaagaaattcggtgtgagatctcgttcccggttggaatgaaagtggtaaatggattcgctaaagttaacttctggcgtgaacggctaatcataaacgcgctgccatttgacggtgcggatatcttcccggaagaagatttcaccgatgatgtatctatttctattgatatgaaatga

SEQ ID NO: 392788 - DNA, 591 bp, Salmonella enterica
ttgtatagttttggtgtcccttttgagctggagcagggagaagaggtctattttagtgatgataaagaaaccgcttttatcatccttctcaccgaagggtgcatttccgtctgccatttcaacaccgggcttcacgctggtacagggttcgcaccgacggtactcggactcatcgatggttatagcctctactatggcgtcgaaaatcgtcctcggcactatatttgcgcggagacacactgtaaaggctttaaggttcctctggcggcgtttgttgagcagtgtgacaaacatgatttgtggcacgatattgcgcgtattctggcgcaacggctgatgacgatgagcgcgatggaggaggagctggtcggccgcgatgcatatggctctattcgtgcggtcctgatggagctttggttatatccggaagatattcgcagtcagctcaatatcgcggcttttattcaaaagaggactaacttatcaagaagtcgaattatggatgtattatccgccttaaaaaaaggggggtatataaccattaaagtgggtaaactcgttgatcttaaaaaattacctaaagccttttag

SEQ ID NO: 392789 - DNA, 231 bp, Salmonella enterica
atgcgagtagaaacgatcagcttcgtcaagaagaatgctgcttctctcgaattgtcagcgccaattctggtaactcaaaatggtgtacccgcgtatgttattgagtcatatgctcagcaacaagagcgggaaaacgccattgctcttctgaaacttcttaccctgtcagagcaagacaaaaccaatggcaacgtgtattcaaaggagcagttactggacgggcttatatga

SEQ ID NO: 392790 - DNA, 630 bp, Salmonella enterica
  misc_feature (502)..(511): n is a, c, g, or t
atgcagtctgctgaacgcgataacctggaattgtggaaaaacgtgttcaaaacagatgagcgttttactactgcgttctctgtgaacggaggcggaacctcaatcaatggcacctacatgaccatgatcgctacacgcgaatttggtccaaaaggtatcggctggggtgtcgatattctggaagagcgctttgacaatggcgcgccaattactcgcacagtcaaaggcactgacggtaacaacacgtgggaacttatccccgacggtgtcggcggcgtcctgacagaaaaacatcacgttatcaaaatcagactttggtacatccgcaatagtgtacgcggtgaggagatttctttcgggtgtaccccatatatttacggcagcaaatatggccctatttgtgatggtgaagcaacaaaaaaatcactgactgacgcaaccaaaaaagcgctgtctgcgcttggtttctgcgctgatattttcatgggcctgtacgacaacnnnnnnnnnntgcatctgctgtatcagaaaacgagatcaacaaagtctattcatcgattgcccgcgaagcggaagtgcatcgcaaggatgcagaatcgaaaggtgatacacagcacgcgcgttacttag

SEQ ID NO: 392791 - DNA, 291 bp, Salmonella enterica
atggatattgcgaaaattatggttgcagaaattatctttagagcaattgcgggtattatagtttccgccggagccccggttattttaaccgcacttgctattattgtgattggagtaatgatcgcatggagtttaaacgaacttgattctgatgacaatctgaatttgtcaaacattctaaaaaacgcgataaggcgaggtagtattgcacatgctgaaatacttatacatgattctaaaaatttatccccgtggaaatttgccttgtcccatatgcggtcttatccataa

SEQ ID NO: 392792 - DNA, 372 bp, Salmonella enterica
  misc_feature (211)..(220): n is a, c, g, or t
atgatgaatctcaaattaacggggattttattttcatcggcattgatttttttgatgaatccggccatagcgggagtacaaattagtagtacgcgtattatctatccagagggagtggatgaagttcagcaaacggttaaaaatactggtgaaaataaccaacttgtccaggcatgggtagataatattgataaaaaagatcagcgtaagnnnnnnnnnnactggctggcgggcaggctaatgtcctgcactttatttctgtcgataagacggaaagtctggcaaaggatcgcgaacagattttttgggcaaatattaagtcgattggcgctacgccggccgagctttcacagcaaagtaaactgcaattag

SEQ ID NO: 392793 - DNA, 213 bp, Salmonella enterica
atgctccacgctaaccgtaacgcgaacggcatcatcatcaatatgctgcaggttaaatgtcggctgggcgcgattcgtcatgttatcgccctggacaccactgtcgtccacgctatccagtacgataaccggcgtcgacagcgtagtatcgatagtgaagtcgagcgtcttcgtcaccgtattgcctgcgttgtcagtcgctttcaccgttaa

SEQ ID NO: 392794 - DNA, 132 bp, Salmonella enterica
atggaaaaaaacatgcgtcatcaggcggcgcaaaaagagggacagaaaacaatcttttcccactacagaataagagtcgcgaatgtcttgcgtgaatattcatcaggaaactggagtgacccgaatgtatga

SEQ ID NO: 392795 - DNA, 489 bp, Salmonella enterica
atgctggtagtccggcccgtaatcaaaccacagttcttccccggcgctgatgttgcgtgtggtgaggaaaaagttgatattcttcccgacaagtaccacgctgacattctgtctggcttcagcctccgctgtccggcgggtaaataccggactgttaatcagactgaggagatttccctgcggccaggcggacaccagacgctcctggcttcgcgtggcaaaataataattactggcttcctttccatattctttttcatactcacgccacgccttttcactgtccagcagacgaccagagtaggggcccagtacggtaaacgccgtcagatcggtttttgcgtagattgtacgccccctgtatccgtcgctgtcatcaagagggatagacacggacatcattgcattcattcgcgcatcatggcttccttcattgtgcagaaaccagcgaatatcctggttaatcctggctttggtctgccggggtaa

SEQ ID NO: 392796 - DNA, 312 bp, Salmonella enterica
atggtattaacagtgaataaaagaggaagcattgaactgatagatgttcctggtgatggggactgtttatttcatgctgccgttaaaggtcagcagatagctaaaacacccacagttaattacagctatcaacagacaggaaatcataatgatgaacatattattttaaaggaatcgataaaaactcacttccagaataattttgatacatttattgatgatataaaaatgattctcaccacagaaaaatcaaaagtagctaagaatattttacatgacattaacacatacataaaactaataaatatctga

SEQ ID NO: 392797 - DNA, 558 bp, Salmonella enterica
atgaattttacgcctgttggctggctggtacaggccttcaaagcgggggctgacatacttaacaccatcaactggagcgactccggggctaaaattattgaaaccctgatcaccggtattaaatcgaaagccaatgctctggttgatgaggtgaagggtgtttttgcgaccgttcgtgagtacctgccattttctgacgcaaagcgcgggccattctctcaactgactaaatccggtggcgcaataatggccacgctggcatctggagttaacgggagtaacagcctccagactgcaatttcaggtaagttcgggcagacccgcttttctcctcatggaatatcagttgcaggaggcctgtcatctcgctcgggagcctccgggggcgccgtcataccgcctggtgggattacatacgcaccagtgattaatcttccccctggttcaccaaaggaaacagaagcggctgtacagagggcgctggacgcgggttactcagattttgagaagaaaatgagcgcccacctttttcagagtcggaggttaagctttggataa

SEQ ID NO: 392798 - DNA, 525 bp, Salmonella enterica
atgcacggcgttggttttggtgaaaaaggtgtaaatccgctaaccagaacatcatttattatcaccgaagatttaacgcccacaattagccttgaagactactgcgctgactgggctgttaatccaccggacgcgcaggtgaagcggatgatcattaagcgtgttgcgaccatggtgcgtaaaatgcacgccgggggaattaaccatcgcgactgttatatttgccactttcttctgcatttgcctttcactggtcgtgaagaggatttaaaaatctctgtaatcgacctgcatcgcgcgcagatacgtcagcgcgttccccttcgctggcgtgataaagatctcattgggctttatttctcttcaatgaacattggcctgactaagcgagatatattccggtttatgcgtgagtatttctctcttcccctgcgagagattttgcaaaaagaatcggggttgattcatcaggcagatattaaagccgctcgaatcaaagaaagaacaataagaaaacatctttaa

SEQ ID NO: 392799 - DNA, 306 bp, Salmonella enterica
atgctgcttatgactaattatcatgctgttttacccatgaaattatctgctctggcagcagctttaatgttgtgtagccccttttgtcttgcagaatccccgactgcaaatgatgaatttaatatcgatgctttaagctttgattcaccaataggcgattccgaggcgatacgtagttttttaaaggataatgctctggcgccgggtgtctatctcaccaccgtctattttaatagcctaatagcgcagcggggatcccgtcatcccactgcgagggatcgatatatccctgtacttgctggttaa

SEQ ID NO: 392800 - DNA, 225 bp, Salmonella enterica
atgacctttataatccgctacagagccttcacccgtcgcattatcaatacgcactttgtaattaccggcaacgtcgccattgactgccagatggccgtcagaattcaaaccaacgacgccataatcagcggcattatccgtaatgccattggtgtagcccgtattcaaatcgctgttcaggacataatcccggctggcaacatccagtgtaccgccggatgttaa

SEQ ID NO: 392801 - DNA, 180 bp, Salmonella enterica
atgcagaaatttaaagaaatactcataatattaagttttacattactggtatcattttcagcccccacattcgcttatttttgtgcaatgaatccagacgcaacggtcaaagaatgcgccagcaaaatatgtagtggtgcgggtataatgggtattataggttacctgacatgcctttaa

SEQ ID NO: 392802 - DNA, 447 bp, Salmonella enterica
atgcaggtgcagaactttgtccggccaatgatccagaactgggaagaataccgacggattaaggaaacctctcttggtgctggtggtgctgttgttgatcgcgattttgcgaatatcaccaaagataatgcggagcgtttaaagcagctccgcattcaggccagtaatgccgcactgagttttggccaggcactacaaccagcattaaacgcggcgcttggtgtcctggtgccattgcttactaaagtcagtgagtttgtcgcaaataaccccaatctggtatcgcagattgtattgacggccggggcgttactggcaatgagaaccgcggttattgcctgtcgtgtggcgatgctggcgctgtctgtagcaacaaaaatgactccttttggctggatacagctggctatatcagctctcgttgcgccaccggatttagtcagttga

SEQ ID NO: 392803 - DNA, 138 bp, Salmonella enterica
atgtacacctgccagctgtaccagaatgaacagcgggaagggcgctttcagaagctgagtggctacctggtacttgccagtaagatttttacgggcgataacaattctgggaataaagcgtttttgattgttatataa

SEQ ID NO: 392804 - DNA, 222 bp, Salmonella enterica
atggatgatgtttcctttgggcctcttacggagcagtatttttacagtaagtcactacgaccagcgactgagtggagttatcagaaggtcgttcgctcatttgaaggttttacaccgcataatcctgcgaatatcgatcatcttacagtgctgaaatggtggcacagggtgctgaatgaccaacacagggcaacccggaccacttacattatttgccattga

SEQ ID NO: 392805 - DNA, 231 bp, Salmonella enterica
atgtttcctcagttcggctttatgcctctcaacattcgcgcggttgtcctcggcatatccgcttatccaatactccagcgcctccctgacggttactggcttcagtgtttcgcttttggtgagcttcaactgaaatttgggatcgcgtccatcagccagccaggaacgacactggtcacgaagatccctggcctgcttcagactaatatcagggtacttacccaaagttag

SEQ ID NO: 392806 - DNA, 654 bp, Salmonella enterica
atgaccaatcgcatctatccaatggatgacgagttggatcaaggcgacaacacggcgacaaattcgtcaggaacgaatttgaacagccgaaggcagcctcgggacaaggctgcccctcattaccttccggagcgtacatccgtacgtgacggtgatgaaccgatgcagcctgaaagacaccgagtatatatcgcgcttggcagcaatctggcctcgccattggagcaggtcaatgcggcgctgaaggctatcgccgggattcccgatagccgcatcgtcgcggtctctgcgttttaccgtacgccgccgctgggtccgcaagatcagccggactatttaaacgccgccgtggcgctggacacgacgcttagcgcagaagccttgctcaaccatacccagcgcattgagctgcagcagggtcgcgtgcgtaaagccgaacgctgggggccacgcacgctggatctcgatattatgctgtttggcgatgacgtcattaacaccgaacggctaacggtgccgcattacgatatgaaaaaccgcggctttatgctgtggccgctgtttgagatcgcgccggaattgatttttcctgatgaccagcaaccgctttcccgactgattgcaactgtttcaccctgtccggcacgctggtag

SEQ ID NO: 392807 - DNA, 1254 bp, Salmonella enterica
atgatgattacaacaaataataatatgccgcgataccgccgtttttacgcgccatttctcgcgatagccatgctatttctctccagcccggcgcaggcgtattacagttatattgtcggtaacctaaacagtcaaacgaccgtcagcaaaaaccacggcccaaccagtgatgtcacctatacaatgcagcgcatcatgggcaaaacggtggcgtaccacaacgagtcagcgttgcgtgaacttgttgtttatgactggggaaatatggataccagcaccggcggcggctacgcctactgcatcgcacacgaatctttcgacgcgccgcttcgcatcatgcgagggtacggtacgcctgccgggcaaacgccggacgggcatgctatgtggaagaccaacatcaccggcctctactttgccgttgaagtctatgcgttatatgcggcaaactctaccctttcaacccaattgcccttctggatggatagttattatgttgaccttcacttcaccccgacaacgtcaggtaatctgaaggccaactgcgattcaaccatcgtcaatacctacgcgttggctggcggaattgggtttagcacacgcattcatctgtatgccgataacaccttcagaccggattcagacacaccaattactgatgtcgattttcccaaacctgacggcttcgacctccggttcgaaaatagcaccacgatggcagaggccagccataaaatagattttaatttcgacaccacggggtttaatgccgtctggccaagctgtcttgccaacacggtaagcggaaacaatgtgaacggttccacgctcaattttggtgcttatagccggaaagagatcatggatggactcggcgctgtacctttccagattaatttgaccaactgctcctatatcaaaaatattgaggtcaagctcgcgtctaactcaataggcaccgataatacgctattatccaacacgttaacggatagttcggcggcttcaggtattggcgtgcaaattgagggggtacaaaccaatctaagcagccagatggtattaattcctggcaacgccaactccgtatataaatactccccttatgcctcccaggataaatacattgatagtgcgaatgaatatccagccaacacgctcaattttctcgccacgctcaagcaggatagcaacaagactattaccgccggtgagttcaaagccaccgggacgttccagataacctatccttaa

SEQ ID NO: 392808 - DNA, 603 bp, Salmonella enterica
atgtcttttaaaaaatatagtgtagcagcagctattgctttagcgatgagcgcaggttctgctatggctgcaggttcggatacgggtactatcaccttccacggtctggtaaataacaatacctgtaagatctccatcgataataaaatcaatcagaacggtaatgacttcgacattaccctgggtaccgtgaatgtagcagacttcggcacgcagttaggggccgacagcaccctgggcgcaacaaacttcacgctgaacgtgtccgagtgctctgactctacactgaaagacgtaaatgcacagtttgactcctgggctggctccagctccacagagggtggcatgctggtaccgccgtcaaacctggagggcgccgctgccaacgtaaacctggtgctgtctaacaacggtaatggcaacaaagaccaggttatgattgaccaggtcaataacctccagaaagctgacatcaaaaacggcgcagctgacctgtactatcgcgtagcctatgtccagggtcagggctgggatgctacaagcaacccggtaagcgcaggtaccgttcaggcgcaggttgcctttaccgtcgcttataactaa

SEQ ID NO: 392809 - DNA, 744 bp, Salmonella enterica
atgatcaatacagtgttttataagggattaaaagccacctgctttgccgcggcggtttgcgcatcattccaggccagtgccgatattgtcatttccgggacgcgtattgtttacccgcaatcctccaaagacgtgattgttaacctcgacaaccggggcaataagccgctgttggtgcaaacctggctggatgatggacgtgacggcaccaatccacaagaactgaaactgccgtttgtcattacaccgccagtatcacgcgtcgatccgcaaaaaggccagtcggtacgcatcacctatctgggcggcgcgttgccgcaggatcgggagtctctgttctggtttaacgtgctggaaattccgccaaaatccaaagcgaaagaaggcgaaagccttaaccaactgcagcttgcgtttcgcacccgtatcaagctcttctttcgcccggacggcttaaaaggcaccccaggcgaggccgcgaaaaatctcaaatggtcgcaggtaaaagaaggcaatacgctttctctcgtcgcccaaaatgacgcgccttacaatgtttctatttcaactgtcacgctcaaagtgggtaataaaagctatgccgttgacagtaaatcgatcctgccttttagtaaggttactatgccggttaaaggtttaacgaataataccagcggcgatattttatattacaccattaatgataatggcggctctgaaaagcgcgaagccaaaaccaactga

SEQ ID NO: 392810 - DNA, 2598 bp, Salmonella enterica
atgccttttaaacgttcgctattatgtcttaccatcagcgccgcactccccttttccgtttgcgctgcagaaactacggccactaaagccgtaccggaaacagaagagacggtagagtttaacgatcaatttttatttaatagcggcgctaatatcgacgtcagtcgttttgcgaatggcaacccgatattagcgggcacatatcgggttaaagttaatctcaataataagttaaagatcacttccgaggtgacgtttaaagagaatggcacgcctcgcgccagcgcgtgtattacgccactgttattatcgcaggcaggcgttgatacaaaaacgattagcaatgactacgatgctgacgataatgcgtcttgtgtagatattaagaaatattatcctaccgcatccgcaaattatgacaccggtacgcaggcgctcgatctgagctttccgcagatttacattgtgaaacgccccgcgggttacgtcgatccctcactgtgggaaaatggcgtccccgccgcgcttgtttcttatgatatgaacgcctggcatagcgaaggtaacggcagcacatccgatacggcatacgccggcctgcgttatggcctgaatatggggccgtggcgcttacgctcgcgcggcaccctgaactggaataaagacagcggcagtacctactccagccaggatatctatctacaacgtgatattacgccgctcagcgcgcaaatggtgctgggcgactcttacacccgcggcgatgcgttcgactccttcagcctgcgcggggcgcggatgtataacgacgaccgtatgctgccgatgggctccagtagctatgcgccggtgattcgcggcgtggcgaatagcaacgccaaagttaccgtcacgcaaagcggcaataaaatctacgaaacgaccgtaccgcccggcgcctttgagattaacgatcttagtactaccggctacggtaacgatctgctggttaccgttgaagaagccgacggcagcaagcgcaccttcaccgttccgttctcttcagtgacgcaaatgctgcgcccgggcgcctcgcgctgggatatcggcgtcggtgaactcaataacgattcgcttatcgacaaaccgcaggttggctacgcccagtattactacggcctgaataatacctttaccggctatatcggcgcgcagtataccgatatggatttctacgccgggctgctggggttagcgatgaacacccgcatcggcgcctttgccttcgatattacgcaatcccacgcgaaaattgacgatctggggacattacgcgggcaaagctaccgcctgacctacagtaaaatggtcgaggcgacggacacctcctttaacgtggcggcctaccgtttttcaaccgaagattatctcagcctggacgacgccgcttcgctgcgtgataacgttaagcagcagaaatatgaacatcaggcttatagttccagcacggcgctttatgccgattaccagcgtaccaaaaaccaggtgcaggtcagtattaaccagccgctgcataccagcgacgccacctatggctcgctgtacgtcagcggcacctggcaggattactggaatggcgacagttctacctctgattacaaccttgggtataacaatagctttgcttacggcagctacagcatttccctgcaacgctcctacgatcagaacggcgctaaagatgacagcatctacctaagcgtcagcattccgctgagcgtcttctctaccgactattcgcaatcgggcggcttcagcaatatcaacatgggtctgcactccgatatgaagggcggcaccagctttaactcaacggccagcggcaataccaaaaataatgacatcagctattccgttagcgcctcctccagcggcggtaactacggcaaccttaaccaggtaagcggctttggctcgctgaacagcagctacggcccgctgggtgtgtccgcatcgttcggtgatgacaacagtaaacagtattccgccacctacagcggcggcctggtgctgcactccggcggcatcgcgttcgcgccgggcagtattggcgatgccgatgcgctggcgctggtcaaagccagcggcgcgaaaggcgccggcgtgggctacggcaacagtgaaatcggcagttccggctacggcatcatgccgtatatgtcagcctaccgtgaaaaccgcgtatcgctggatatcagcacgctggaaagcgacgttgaggtcaaaaataccagcgccgtgaccgtgccgcgcagcggggcggtcgtgctggtgaattttgaaaccgatgaaggccgctcgctgattctggaactacagcgcagcgataaaggttttattccgttgggcgccgatgtgctgaacgaaaaaaatgaaccgatcggcaccgtgggtcaggcaggacaagcctatgtccgcggcgttgaggaccagggcgtgctgcgagtggtgtggggcagcgggaaagaaagcgcctgtaccgttcactatcaggtcacggaaaacaccaccaaagcaggattaaccccggttctgagcaaccaggtatgtcagctgtaa

SEQ ID NO: 392811 - DNA, 612 bp, Salmonella enterica
atgagagtgaatatgaaaaaaaatctgttcagcctccctgttgctgctctcatcgcgatggcaagctcaggaacggcgctggcggcaggcagcaccaatctggatgtcaactttaccgccacggttaatgaaaccacctgcaacatgaagctcagcggcgggaccggctccgataccgatcagacgctaaaaattggtcctgacaccggcgtgcgtattgaagatttcgggacgtcgaccaacagagccggtaacgccggcgcacagggcaattttaaaatcatgattgtggagtgtccgccgacgctggcgtcattaaagaccacaatatccggcaccgcatctaatcttttgaaagcctcgattagtaactcgattaaaaaagagaatggcggggctgactatagctccgtctctatcgcgcgggcttcaaagcctaccgaactgttcttgatcaattctacaaatgatgccgaacgcctggtctggacaaaggatgaaattaaagccggggaagtgcctctggtcgccgtattgcaggctaccaaggatggcggcgtcactgccggcgcctttgaagccacggctacttttgaattcagctacgaataa

SEQ ID NO: 392812 - DNA, 543 bp, Salmonella enterica
atgaaatttaactcagtcttacttgcgttatccgtttctgccgttttctgttcaggaatggccagcgcggcgattagcggcaccaccagcgctacgatgacctttacctcgacagtggtcaccgggacctgcaccgcgcaggtggtggacagttccggcgccaacgccagcgaaataaaatatggcgacgtttatcggtcagatatcggcaagagcatcgtcccgctggccattaagttcagcaactgttctggcgtcaccaaagccatggtcgccgccaaaccgggttcgggcgggcaatgttcgggcgaatcctatgacgcaggcctggacacggcgtttgaaatctggggcggaacggtgagcagcggcgttcagctttcctgtaccacgccaccggcggagcaggacgtcactatcaccaacggcagcgggaattacgcgatggagtcgcgaattgtcgccgccgctggtaaaacggccgctgaagtaggtttgggcaacgtatcagcccccgttacctttgtggtgacctacccgtaa

SEQ ID NO: 392813 - DNA, 591 bp, Salmonella enterica
gtgaacataaaaaaaagctttagcaagctacccacaaccgcgctgttgcttatagccgcaggggccgtccatgcagaggacactaccctggacgctaccctgaccgctaccattcgtgaaaccacctgtgatatgaaactcagcgggggaataggcagcgacacccaacaaaagataaacgttacccttccaggtaacgaccatccatggatcccgctagcggatgggcaggcgggaaaaggcatcgcgacgtttaaactgcaaataatagaatgcccggcgtcattaagctcattaaaaaccacaataaaaggaaccgctgacgttacgttaaaaacggggctggccaaccaaatcgcgaaagccgacggcggcgcggaatatgccgcccttgagattgcgcgcacgacagcaacgacggcgccgtttaccatcaactcggaaacggatgccgggcgtctggtgtggacagacaccgagattgataaaaaagaagtgtcgctgacggccaccctgcgggagacccagcctggtttaatgagcctcggcaaatacacggcggtcgccacctttgaattcagctatgaataa

SEQ ID NO: 392814 - DNA, 552 bp, Salmonella enterica
atgaaaaagcatcacgttttaacggccctctccttttctgcggcttttttcttttcaacggcggctttcgccattaccggcaccaatagcgttgaaatgacgtttaacgctgaactcaccagcaccacctgtaacgcgcagattgtcgatgcggcaggcaccgcgaccgatatcattaactacggcgaggtgtttaaatcagaaattgcgaaaaaaacgcgggtggtaccgtttaaaattgtctacagcgactgttccggggttgatagcgtcgatttcaccgtgaagcccggcgccggcagcagttgctccggaagcgcctacgccgccacgacgaacagcgtggccttcgaactgtggtatggcgaggttgaccgggatactgaactctcctgtcagggcggctatatgctagtgcctctaagtcttacaaaaggttacggcgagaaccctatcaattcccgtatcgtggtggcgaacggcaaacagattaccgacgtggagacgggcatcgtccaggcccctatcacctttgttataacctatcaataa

SEQ ID NO: 392815 - DNA, 591 bp, Salmonella enterica
atgcaaccattatcgttttttctgcgtcagcctggcctggcgctactggcagggttgtgcggtctgcctggcataagccaggcagcagatctggatgcgaatctgaacgccacaattgttgacgccacctgtaagcttaccgttggaaacgggggcgacgtgtatttgccctcggtcatgcgtagctggttttacaacaccgacggcagcgatcgctatacgcccaccgatgacgcgggcggcacgccgtttaccatccacgtggatgattgctatttaagcggcgatattaaccaactgacattcagttttagcccgcaatccggcttctggaacaaccagaaccaggtgtttaaaaacgacgccacggcaaatgccgcggaaaatgtcggcgtggtaatcttctccagcgcctacaaaaccaacgttctgaacagcgatggcagctctgcggtaacctatgacactaccaacaaaagcagcgcacagtatttaacggattatcaattctacgcgcgctatcaaaacatcggcgcggttaccggcggcgttgtcaccagtaatgtgctcgtcgacgttaaatacgaataa

SEQ ID NO: 392816 - DNA, 1071 bp, Salmonella enterica
atgcagtttaatcgcttatggatagccacgcttttgctgagcacgtcgggcgtgacccatgcggcctatgagtgccactttagcagtaacgatccccggcaaattatgtcgccgggcgtgcagccggtgatcaccccgctcccacccggtacgattacggcgcctacgctaatcagcaccaccattctgatggagatgacgccaacgttgacatcaggctgtgaggccggcaacgacggcgataatttttattcgctgacggataacacgctgcgctgggggaacgtggacgataaagcgaccttcagaaccaatatcccagggatttattacactattgcgctttaccctgggaataaccgcctgaccgcctggtttccgccgaatgccggcgaatggtatgttaccggcaatatccatgaagatgaggggatcgtaaaggaccagacctggcacgcgcgtatggaaatttatcaatatcctgattttaccggcatccccagcgggacacagtttttaaccgccatcggcggaccgctggggcaggtgtcgataggcaatcctaaaacaggcacaagcagcgaccatcctcgcccgttgattaacatttcggaaatgtcgtttaatattcccttaaacgaaccaacctgtgcgctgcgcgcgccgaccaccgttgacctgggggactggttccgctccgatctggaaaccgacagcaccaaagaggtgccgtttcaaattaccggcacctgcgtcaataccaaggcggtctatgccacggtgacctcagcgaataccacggccgataaagggtattttaccaacgtgataaccggtaacgccgccgttgccgccgcgggcggggtcggagtaaaactcagctcccctgccagcagtcatatttttgccgatggctcgaagctgacgctggcgattggtgataacattggcgtggatccggttcactttgtcgattacacctttaacgccaaactggtgaaaacaggttctgaaccggtcaccgtcggcgttttcggtacctctgttactttccaggtgacctacgaataa

SEQ ID NO: 392817 - DNA, 291 bp, Salmonella enterica
atgtttaattttaaagaaaatgttgcagattataccgaaagagaatttattgagttactcgacgaattcagaacttctacgagaaaagataaattattagacggagatgaattagaggattatatcgatagactgaccgatcattttactgaaatcaccggacatccagcgcaaggcgatcttatcttttatcctgaatcagtagaagcacgtgcacctgaaaatattctgaaaatcgtcaaagaatggcgacgatctcaggggttgccgttgttcaaagattcagaatga

SEQ ID NO: 392818 - DNA, 291 bp, Salmonella enterica
atgtttaattttaaagaaaaaattgaagattatacagagaaggaattccttgaacttctcggagagttaattaatgcaacaagcaaggataaatcattaaaagggcagcaattagaaaaatatcttattgctttgttcaatcattttatccgtataacagagcatcctaaaaagggagatctcatttgctaccctgaaaacccaggagatgaggagccagaaaacattgtaaacatcgtcaaggaatggcggcgctctcaaggattaccgttgttcaaagattcaaagtaa

SEQ ID NO: 392819 - DNA, 291 bp, Salmonella enterica
atgtttaattttaaaggaaaaatagaaaattatacagagatggaatttttggagcttctcggagagattagaaatgacactcgtacagaaaaatcattgaaaggagatgagttagaaaactatattgtttctatagtaaatcattttattcatattacggaacatccggcaaagggcgatctcattttctaccctgaaaacccaggagatgaggaaccagaaaaaattttgcaaatcgtcaaggaatggcggcgctcccaaggattgccgttgttcaaagattcagaatga

SEQ ID NO: 392820 - DNA, 1719 bp, Salmonella enterica
atgagcataaatgcaaaaccctctttaacgatgcccgcgccaagagcgccgataaatcaaggtatcgataccaataacgcactggtgcaaagccataatgcgatatatcagcagttgctcgctcaaatcagcgaggaaaacacctacgataatgctattgttaccctcaatccttattctaccgcgccgctaagtctttatcttggtgtctgggttgaaaccagcgaagcggtttttattgaagtcatcgatagcgaaaaaaccacagttcctgtcctgtataaatatcaagttcatcttggtgctaatcttattccggtaagcggcctggtgtcaggcgttaataatgaagtcatgctgactcgcgcatccggagacgttaatcgctatgtgatgctggcagatccgctgccgccaaccgattccgcagacgtgacattaggttttccgattatcagcgtaactcaggcctcgacggaaccttcacgattagcggatgggctttatttttcgacctattttgatcgctacaacctcgcttttgaccgcaacggtattgtgcgctggtacgtcagccaggatattccctcgtataattttgtacgtatgaacaacagtcattttttggccacctcccaggctaaaaatcactgcaaggatatgtatgaatttgacattatgggacgcgtgcatacggtctggttgctggataaccagtgtcaccactctattttgccgatcgaaaacaaccttatcgtttgcccttcggaatacagcaacgggcgccctgatgattattcgacgggcaaagatggcgtttcgataatgaccctgacgacggggctggaggttgcctattacgatatgctgtacgtgatggactattcgcgcgcgccgcgtccttcaggcagcgcgccgggtcaggatgtcaccgtcgatgactggttgcatattaaccaaagctatattaatgaaaccaataacctgcttgtttgctctggtcgccatcaaagttcggtatttggcgttgatgttgatactggcgcgctgcgctttattatggcgacccatgaggactggtcggaatcgtttactgagtatcttcttactccggtcgatgacacgggaacaccgctttatgatttgacgaccgcagagggcattgaagacgcgaacaaaaacttctggacctggggccagcataatattgttgaaattgccaacaatgagcaggggatcgtagagttcctggtttttgacaacggtaattaccgttcccgtgacgatgataccagcctgctgccgccggataactttagtcgcgtggttcagttccgtgttgacctgaataccatgaccgtaacgcggccttatgaatacggcaaagaggaggtggggagtcggggatacagcagcttcgtcagcgccaagcatttattgagcaatggcaatctggtgattcacttcggcggtagtacggtggacgagtttgggcatccgatctcctgtcagccgggctacagcgatcttgttgatccaaatgaagggtcgcaggcgttaggtattcttgtcttacaggaaattaataaagagaccaaagaggtgctgtttgaggcgacggtaacgtcaggttactataaaaatcaggaaaccaatggcgataattatcgttatgatatttccgctttccgcgtgtataaactgccgttgtatgagtaa

SEQ ID NO: 392821 - DNA, 450 bp, Salmonella enterica
atgagacagcataaaataaataatcagtttatttacaatgaatcattaagagaaatcacttctttgcgcagcaatgcggtgatcaaaatgacatttatgcgcgcccggtgcctgagctatttaatagaaaacgcgcaccaggagttgattaccagggaaggcgttgcatacgccgtttggggggagcggggaaaatttatcagcgatgccaacctgacacagttattttatctattgcggcgtgacttaaaaaaaatcggtttacaggaattattcatgaccttgccgagacaaggtataaagataaatgaaaacatcattattgatacaagcgaccttccccagtccagtatctgtaaaaaaccgcactggcataaaaatataatcgcagtaattatttccattctgctggcgatgctcgccgtattttatcttccaatacgcctctag

SEQ ID NO: 392822 - DNA, 285 bp, Salmonella enterica
atggatgtcaggcactatgtgatccccgcgttgtggctaccgttcttttttatcggcacggcgcaggcggcaagccagctacggtttcagggaacggtcgttgaagccggatgctggaatgagacgggggtgctggaagtgcgttgccatcgccaggacggtattgagcgccatattatcgttgagaatatcgccacggcgattccctcgccccatgcggtggtggagtctcgctatctggatgaaaacaaacagctgacgctactgcgcattatttatgactga

SEQ ID NO: 392823 - DNA, 213 bp, Salmonella enterica
atgagaggtgttgttttctcttcgacagacggtgctgttaacctcatttttatgatttttatatcatctaaaaagatgatgttttgtgattggctattttttatgtctgtaacgattatggaccccgcagaacgagctgcgacaatttttaaacgtaaaaggaaatttgaaaatggctacaagcaaactgattcaagacgatacaattactga

SEQ ID NO: 392824 - DNA, 270 bp, Salmonella enterica
atgctccaggcgggagaagcacaggatgcccgcacattgttgtatgaaatggcgcagcgcgcgccgcagtatggagacgaactgatgacgttagcagaacaactgaagcaggaaggtcgtattgaagggatacaacaagggatgcaaactggcgaacgtgaagcctcacgtaaaattgcccgggcaatgctggaaaaaggcatcccggaggccgatattattgaaatgaccggcatcagcgcggaggaactcccttcactgcagcattaa

SEQ ID NO: 392825 - DNA, 504 bp, Salmonella enterica
atgagaatcctttatgttgttctcatggcgcttgccgttaccgcctgcagttctgggcgagataatccagaaaagcgtgtatcggatttctatatatactatctaaacgtctttgcaaacagtcaggggaaaataaaaccagcccctgcaataatgagtgattatatttcgcgtgacacgctaacccagcttaaaataatttctcatattcatgaacaagaaatcatcgacacggactactatacatatgcacaagactactcaacgaactggatccctcttctgaaagtgggtaaagctgaggattttttgggaggaaaatatgttgacgtatggctgggttgcgaaaaaaatcagacgtatcaaataggcgtctatatgaggaaagaggacagaaaatggaaaatatacagagttaaaaatataaccgatggttatgagcattatatatttaatacaccagccattgagaaggcaaaacaacacgccgcaggcataaaataa

SEQ ID NO: 392826 - DNA, 324 bp, Salmonella enterica
atgtttacagtcaggtatcacccggaggcagaagcggaagcgacggaactgcctataacaatcagggtgaagtatgacaagctagttaagaagttagaggctgacccgacacagctcagagagccacacacgaagccgttgggcggtggagtttttgaattgcggactatggggactgatatcgcccgcggactgtgggtataccagaaagcaaagacgatttatattttaagggtgtttgtgaaaaagactcccaagaccccacccggtgaaattgagttagcactcagcaggctggaggagatgatcaaaaatggcatataa

SEQ ID NO: 392827 - DNA, 279 bp, Salmonella enterica
atggcatataaaactcacaccgaattacatgatgagtggatgcgcgacccggaataccgggccgcgtacgaagcagaagaagcgcgcgagcgtctccaggctacgcttgaggcatggcgtaagaacgccgggctaacgtcgtcccaggttgccgagcgaatgggcgttaagccacctaccatttctaaaatggagcggaacgcaacaaaaatgagctatgaaacactgctgcgctatgccagcgcgtgcggcgtgcatttcgagctaaaacagatctaa

SEQ ID NO: 392828 - DNA, 366 bp, Salmonella enterica
atgagaaaaaacgtttttgatgaagggcttagcgatagctttattcagtacatcatagagttacaggcgctcgatacccgctcaactaaacagcccgtctatcgcgaaaagctggattttgtatttggtgttatgtctgacagatttctgtcgcggttgcgtgagaatgttggcgagctggacaccagcgcgctaacactggatcgggcgttgtcgtactacgtgcaggtcgtggcgggcgaactggcgcgccagtacaccgagccgccgtcggcgcgttcgattgaaacatggttaaaacaacgaggttataaaactaaccggcgcaacagtccatcaactcaaaaattttcttcgaaaaaatag

SEQ ID NO: 392829 - DNA, 267 bp, Salmonella enterica
atgtggttgttatcattcataatttttatatttttagcttatctattcataaaattatgcccctccaggaaagagcgcgaaatggccaatcacgcccaagccagagaggaggcaactcgccgcattatgctggatgagaaatactgcgaaagagtagatcatctccacctacccaagcgaacggatccggactcagtaatggtccccggttccgttcccgattggatattcaacgacggtgtaaaaaaacctctacaaccgtattga

SEQ ID NO: 392830 - DNA, 231 bp, Salmonella enterica
gtggacggggccagcagtggcggtgagcctcgcgtggttgagttcaccgcaaaagccgcgcctatgaatgcggcgaaaggttccgcaacggtacagagcaaaaaaacacgctcctggagtggtcacactgttggcgatacgcaaccggtgttttattttgacgaggcagcaaaccagttctactttctcaacgtgcacaaaaaatacacagttacgttaacaccagagtaa

SEQ ID NO: 392831 - DNA, 480 bp, Salmonella enterica
atggcaaatattatatatgcgactattatcggtgaaaggcagggcatgatttctgctgattgtggaacatttgcttcaattggtaataaatatcaaaaaaaccacgcaaatgaaattttcgtcctgcaattcgagcattccatgagtcgacaacataatgttttacatcatcctgtaaaattttataaaccgatagataagtcatcacccttgttaaatgccgcgatatctgaaaatgaaaaattgtcggttatatttgacttttacagaacagcttctggtggtggtattgaacgattttactctattgagttacaggaagcttatctgtctaatatttcatcctgctatcctcatgtgctaacacatgcaggtaatcagccagaggaagtcgttatgctgagctataaaaatatcacgtggaaacatcttatagccggtactgagtcatatagcctctgggaagagaggattttctaa

SEQ ID NO: 392832 - DNA, 711 bp, Salmonella enterica
atgaaaaacgatttcatgctgaggaaccgtttctgtaccattccacagacaaaatttcgaaaatgggatgaaattgatgttttgttttggaagttgggtagaaatgatgtccatgggcgttcaggagccttttatttgaatgcctataaagatgcatatgtacaatacaacagagataaaatcattaatcatgctaatgctgcggggatacgccccgatctgcttggtgcagtagcatggattgaatcagggggaatgcctgaaaattttaaatttcaggtttttgaagctaaaagaatgattggatggggaagcaaacctgcagataaaacatcatttggttctgtagctgcacagatacgcgtcgcggctgttacacttggtcttgatccttcggagcttactaccagagatcaattggagttagcaacttgcctcatggaggatgattttaacttgcgcgtaacagcaaattatttgagagatcttattctttatgattatcctgatgtagcaacactttatatgagtgatgagcaatacataatggcaggtgtgaggtataatcgaggcgttcaacggcgtttagaatatttcatccgattaataagaaacgtaccaaatcgaggtacagaagactataactatatatcctatggtatgagattgctggaaataagagaacatatcagaacattacttagagagtaa

SEQ ID NO: 392833 - DNA, 333 bp, Salmonella enterica
atgttaaaacaaaaaataatatccatacttgaagtgtctatatacatagtccttgcattttggttaaccgatacattccttgctttcaataaatatagttggatgtttgaggctaatgactcaatttgtagcatacctgtcgtgtcaaacgataatcgcggtttgcaggctgccgtcgcagccttttttctgctcacgccgcttatcattatcctcatcagaaaattctatgtccgaagaatgtttgagttctggttatattgtctcgcggtagccacctgtcttttctttggctggtggcttttttgggggcgttatttatattgccattga

SEQ ID NO: 392834 - DNA, 342 bp, Salmonella enterica
gtgatggtcgatgcggcgacagaagcaggtgcggtgttcgatgatattagccagatccctaaacaccgccttcctgatgaacttaagccgttctgtgaacacgcccgactgatgggcaaagcggctcgacaacatgtcgccgccaccggttttgcgcctgaagacataaatatcattgccgggaaatatattcattgctcagctcactggaacgcggtggaacttaagcaaagcggggagttacagggcggcgcttcagcgtcgaaaaccgtcagctttgtgaacaggccggacaaaaactggatacgaacaatttataacatggacggaaagaaacgatga

SEQ ID NO: 392835 - DNA, 276 bp, Salmonella enterica
atgatgaactgcgcctctagcgtaactgagaatggttccagtgaacacatgttagctaaaataaatccgcaaaataaaatttttattattattcaatatattaaccataaaaactcaactaacaagcgttcagttttatcaaatacatttaaaatcaattacataaaattgcgtctggttgggatagatttcagcaattacccgtttcagctcatcaagcgacatattttcctgttgcgcatgtttttcgttcagcgtatccagcgtcaccgttga

SEQ ID NO: 392836 - DNA, 492 bp, Salmonella enterica
atgataagactatttttattttttatagtatttttaattggctgtgattctcctacgaaaaaaataggaatctataccgtcgatatggagtatgcttgcgaaagtacaagttatagaatatttagatttactacgttgattgatggtgtaaaagacatagaatctactgatatctcaagcgtaaacgaagatatttccagagcttataatacagtcttgacaaggaaagatgattttttattatctgggaatcattcattgtccggagtcgaagtttctcttatttttcgaagtaaaaattcagaatccacttttgagaaaaacacgccttattataacaaatgttatgtttattattttgagggccaatttaaaaataagaggttaaggttcgacagagatggtgatcaggataacgaatttattgtcgacagttataaatactttcttaaatcaccagattgtataaaaaatgtatatttaaaccattaa

SEQ ID NO: 392837 - DNA, 744 bp, Salmonella enterica
atgacaaaggacataacatcagccgcgacaacaaagttcggtaattatatcgtaaaacaaaaaataacaagaagagttagacttatattttatggaggagcgaagagtccgaaagataattctgcatttgagtttgcagcaaaaaacatcagagaagattatcgtaagttataccctcatagtaatatcatatttatatttgttgattcagctaaagttatcgttgatacgataaatcagcaacagtctggaaaaattgactcgcttgatttactttttcatggaactgaaagagggctatatatgtataaaggggcatcgcttgctcctgatggtggattttctggtgaagatattaaagataatgacttaaatgcaagtctctacgctggacgtattcgaaaatggttgggggatgataagtgtgatgaagcaaggactattaatgatatcgactttactaaatttagttcagaagaccctatcattgagattcatgggtgtaaatccgggaatgatactgacccattgactgatagtattactaaaaatctttcagaggaattaccaaatggttatgtcattgggcacactaccaaggctaatccaatcatcaatggtgacggaaaaacatccaggaagcagcaggattatcgtcatggacaaagagttatatggaaaggtggaaaagtaataaaaatgataaataaaaaagggatgttaactgtgaaggactttgtatga

SEQ ID NO: 392838 - DNA, 432 bp, Salmonella enterica
atgaaaagaatatacttacgagtctgggtttttattgtgataatttccctaatcgctgtgctttatagtttattatttggcagaacaatgactgaatttttatcattaataaaaatggaaaatgttatctcttatgacaagacatgcgcactgataggttcaataccattaataggttatacagtaattgctctcgtcagagttttgcttagtcaaaatgtacagtaccgttcacttcccgatccttttgaaagtttagtcctcactactatcactgtttcctttgctattggccttattgcaaactgtattattcctttttttctactggcattttcatacacatcttgccctcagaagaaacttcatgatttctacgttacagatatcgaattgtgtaaaactgtcgtagataatcgcggcttgtggtaa

SEQ ID NO: 392839 - DNA, 549 bp, Salmonella enterica
atgatcatagaggaaaaaattaaatactttttattgctgttgatcatgttgataacagggtgcgatgattttcttgggcatcaagaacccccttttattgtttatggtgatgaatcagttctgaaagatacgataatcaatgtaaatatcattatgaacgaccggaatcatccgggtaatttgttgtataaaacgcggtctttattgtataaaggggatgtttatcccattagtttcagaagagatgatgatatcattcattatgtgatattttattctaacaataataaaataaacacgttaagcttcgatgccgttattccatggctaaaagtcaaaaaaagaaatgctcaagtgattgtcgtgaaaaaatatgggcaagatattggtattgaatattatggtgaaaaattcaatgcggataatggaaggcctgttttcgttggccaagtggtcattccccaaaaagaatttttcgaaaaaaacgagatgtatagatatggtgaaaaattttctttaaattatttttatggcttatttaaggagtaa

SEQ ID NO: 392840 - DNA, 786 bp, Salmonella enterica
atgactaataataaggtaacaacaggcgtaacatcaaaacagcagaataatattattgttcagaaaataactcgtcatgtggagatttttttgcttttttgggttaatgagagtaatccggcagtaaaaatgttttctgagtcagcccaaactagaatgaaaaatataaagaaggcatcatggtttgatgaaaaatttcataaagtacattgccctccaatacaatccattcaggagataaaaatagttgtttctgcatggattaataaatatggaggaaaagataaagctcaggtgaaagaggtcggtattttctctcatgctgcactggatggaccaatatccgtttataccgcgaatacgccatctgttcctgactgtagttgccaaatggccattacaggaggttgggatgatattgattttaattgggtgaggaaaggtgccttatgtgttttttatggttgtaattcaggtcataagaatggtttttctcaaaaaatatcagcgttggaaaattttaaagatgtaactgtatgggggcaatcgacatccactttcccatccttttatccggataaaagaaaaacaactttggatcgggcgtcgaatctagtgtgggatttagaaccaacatatatggtcggtgggaatgaaaacgaggggcatttagcaataatatcactgacaggtattgatataaatcctctgaattattttcttaatggagagtataaaggagcgagccaccaaggagtgtttaatgatcatagaggaaaaaattaa

SEQ ID NO: 392841 - DNA, 1512 bp, Salmonella enterica
atgaaaagattcatcgctctttcgcagtcattgtttatggctttcgttggcgttcccctgttagcgcactgtgttgcgttgtgtggtgggatcgcggcagctttcgtggggcttatcgcggacgcgttgggtattgatgggccgcttgaagaccatctttctacggcatggttagtccttatctgcctgatgatgtttgcctgtgggcgggtatgggcacgtgaaaatcagcccgaagccagcatcgaatggcgtcactgctttctgctattacccgccattctggggcttatctgctggatatttgttatgcagcaagccgggcttgattttatgaatatgaaattaaactggctggtttctgcgctcattatcccctggatggggatatttattgtcactctgcttgatcaatggtactggggtctgatcctcctgccgattggttcacaggtaagctttgcgctgggatacggtggcaaacaatggctttcatgccgcgtaaaatggcgttgcgttagtttagcgatactggcgctgtgcgcagcggtagcggcttttcaggcctggcaacatacccaaaaattcccaccaaccctctacgaagcgttgagtacccgtgattttgaacccagtaaatggcgcaataaaattacgccgatacggggtactcctgctatcagctttacgcaaaactggccgcgcatcgacggggcaacggcggccttgccgctctattcgtcggcattttatggcttgaacatactccctaaaaatatttccgccgggagctatctcgataactctggtactccgcaagcctataaaaaaattattgacggagagaccgatattatctttgccgcgcagccttcgctggcgcaaaaacagatggctgaagctgcgggcgtgaagctcgtttataccccgtttgctcgcgaagcatttgtttttattgttaataaagacaaccccattcaaaccctgaacgatgctcagatccgcgccatttacagtggcgcggtaacccaatggcgcgaggtaggcggtgacggcaacgccattcaggcctggcagcgtcccagggattcgggtagccagacggcgatgttggcaaacgttatgcaggaaacgccaatgattccagcgccggagacgcgaaccgccacggcaatgggggagatcattgatgtggttgccgaataccagaatacgcagggggctattggttacacgttccgctattacgccacgcagatgaaaatcaataatggcatcaaactattggcgattaacggcatctctccgacaatcgaaaatattcacaatggtacttatccgtatactgtggatgtttatatggtcacccgcgaacatccaacggcggaaacacaaaagctggtggactggtttttaagcccgcaggggcagcagttggtacaggatgtgggttatgtgccgctgtatccggcgttattaaaaagcattagtcattgtgaaattggttgttaa

SEQ ID NO: 392842 - DNA, 447 bp, Salmonella enterica
atgttaactctatcttcactgcttagggattgtagttcagcagaaatatcttccattgcttctacagcgcaatcaggatcaagcaagtcagagctagtaaactccaaaaatatagccagatcgacaattattttaacaagttttacttcactgttctttaacaattttcacctctatatttttgattcccaattcatcgaacatcttttgtgcacgatttgcttgagtttgatttggtacttcccaacgacctgtcattttgttatttttcagcgcgtcggactgtcttattgcttgatctttagctttttgagttgtaactacagatatcttccggtctatcattacatttccatcaaccccatcaaaacgtaccggtctattattattttttgtatcggttctatctatggttggtgcttgacctttttgggtatggatatttga

SEQ ID NO: 392843 - DNA, 270 bp, Salmonella enterica
atggtaaccaatactgaacttaacatcttgaaattattagcctccagacctgacgtaaattggacctggtataatcttgatcgcgcaatgactagcagaaaaatggatggagtcggtaacgtagtcagactcataaataacctatctaaagcgggtttagtcgatatagtagcaagaaccccctcaggaatggattattatcgcgtatctgcccagggtcataaattgttaaacgaaatgggcgagcaacatcaagacaatttaccataa

SEQ ID NO: 392844 - DNA, 1221 bp, Salmonella enterica
atgcgcttttctgataagcgttctgaaggatttttattatcgccaggagatcgaacaagttgtggcggctttataaaaaggagtaaggaatgccatactatcgaaggaatggaaatagtatatgaaatggatgaatatgtatgcggagttaatggtaaaatatataaaataagaggtggcgtaccgaaaggttcatggattgaaagagggaaaaatttatttcgtcgaacaagcgtaagttcctgggatagtgatattgactcggaggggagaaaagtagaatcaccatcatcaaggataaagcgactcaaagaagaaacatctttgtataagcgtcaacccgattatcttcggggggatgaaaaaataaatgaacattgtaggtttctcggaagtgcgggggggacgataaatctcaggaaaaaaataatcggtaacgatgaaaacgaagatatattttctcataggaattctaatttcctattccgggaaagaataagtaaagatttatacgatcattacttaataatgggacatgatatgtctcaatatgagactgaaattatctgtttactggctggttcagcacatagcagaggtacatgtccgtgccaatgtcgatttatacccaatttgaatattacatacagatatgataattatattttagcacgctatgaagcagcaaataggcctcaaaattccacacctctggctcacacaacaagacaaatttcagagtccagacaatcagttgaaccgggcttttgtgtagtaccagaattgacgacacctaaatcatatgaatgtgagttaatggttaatccaccatcaggagtaaaagagttatatcatcagttgaatccggaaaaaaagaaaaaaccaggttcaatcttagttgttgctgatccactatccaggtcacctgaaaaaattgcgcaaatacaaacagcaagggacaaaattgataaagcacttgaaccactgactaatgaggaagctaaattactatatgaaaacagaaccccaatagatatgttttcatctaatatatacagcgatgctttaggacaaagtggggatatttttggttatataaaagatgctggaggaggttattatgaagagataaataaagtactaaatgaatttcaggagctttataaaaaaacatatagccaaaattctggacgcatttctggagaggagttttttggttag

SEQ ID NO: 392845 - DNA, 138 bp, Salmonella enterica
atgcggttaaatgatagtgttattaaaaaccttaaactaccgaccaatcttactatgttttcagaaacgacggtactcgcggaaccgggcgaccagggagcaagatgtttccttctggtcgctatcggctccagctag

SEQ ID NO: 392846 - DNA, 807 bp, Salmonella enterica
atgaaaacgggtgaagaaataccgatgaccgtcaccattaaagatgaaagcggcatacccatggcaaatgcgccttttacgatttcgcgtggttatggcgtcaatcgcagcggggagacaaaagagagcggaaccagcgggacgacggacgatctcacgttacaggcgctgacgccgacggtaacgcctacggtgctggcgaacgacgctgacgtttatcacggccttaccggcgcgaacggatcggctaccttcagcctgcgacaggataccgggatggggcttaagacggcgatatcggcgaaaatgggggattatcccggtttaagcgcttcgcttaatgttatttttagcgtcattaccagcccggattccgctaaggcgcagtactggggccatatgacggaaacggtcactaccagtaccggcgtgacgtttcatcgcccgtttttggccgcagaagcgccttcaggcaacgattcttataaagtgaacaatgaagtctggtcaagcgtcaacgcgaagaatatgcaaatagcaggcgccacgggatgcgataaagacaagcagccgttatttagcgagcttcagacattgtataacgataacagcaacggcgcgcttggcaccaaatatggctggcctgtaggtggcagtgacaactactggtgggcgtccgatgctgatcctgaaacatccaccttccagaccattaacttaattaacggtgataaacacgactccacatcaatgtcgatttacttccggcaggtatgtctggatcaggcgcgggggacggcgccgtaa

SEQ ID NO: 392847 - DNA, 5586 bp, Salmonella enterica
atggatgggaaactgcataacatataccgttgtttactggcattattgctggttacgagcgtatgcgttactcctgcgttcgcgaatctcaagggcggaacctggcaggaactggagcagtcaacggacgctatcaacggcaccgtgcctgtggccgatggcgcgatgatacctgtttatcagggcagcgtgatgttggcgccggacaaaacccatcaggtggggtttaccgcgatgccgagagattttaccgtcgatgacgccagcagcgcgatgcaggttattaatccgcaggataccgaaggcgatattttcgccattccctccttgtcctgggaaaatcaacagccgccggcagttggcctgatatgggccgatgccgccacgccggatgagccgcttaacccgcagcccatcgccaaccaatcattttgcgcgcagaacatggcggggcgtcatcttgttgtctggccggaaattgacgtcagcgcctccgcgacggttccggcgctttatcttttaacctctaccggcgtccccgaccgtaataccctgccgctgttacagcaaaaggtggctattgatgtcgcgcctgcggcgagcgatcctatatcactcgtcgccagccattttgatgaaacgctgaaggccgcgaaggttaaagtgggggaaagtattacgctgacaattacctcccgtggctgtgacggtaagataaagcctaatatgccctttgttattgtgcgtagcgatgcgcttaaccgccagaacgcggtaaataacaccgcgccgttacatgttggcgataccgagctgacgacgaccgccacggaataccatggcaccaccgatgcgaacggcaatgcgacggtgaccattacccaggataatggccctggcgtgcgaacaacgttgacggtgaagccggctgatacaacgctttccgccagcattgacgtcattttcactacgccgaccagcccggatgtggcaaccgcgaatatgtacggccacatgcaaaatagcgcccccgctacgctggatggcgttacctatacgtttacccggcctaaactggcgaaggaaacgagcgatttcgctcacacgattaacgaaaataatgagacctgggcgcagttttcctggagcggggcggataatcattgcgatattttacccgctgccgatcagctggtcgcgctgagagacgcccatattgacctgccgcgccacaccgactggccgttggggagcaccagcgaatactggtcgtctaccagggatgtgatggattcataccactatgccaccaatatggcgacaggtaaggttgtacgggaaagcaacgcctccgctttcctggtgagctgcgttgacaaggctttacctgcggcgcatccgcaaatctcgctctctcccgccgcgccgtataaagcgcaggtgggcgacacgattgatatcgtgatgacggtgacggacagagatacgcagaaaccgctgccttaccgttatgtggagctgtttatcgatccggcgaaaaaccgcaaaggggagcataaagacgagtgggataacctgagagtggtggtgaacagcgatgatattcgcgcctcctcgccggaacactataccggcgtgaccgacgcgaacggtcaggcgcacctggtgttaagccatgactccggcgtcggcgtggagacgccgattcgtattgtgatggccgatgatgatggcaataccgtcacgcagccgtttagcgttatttttaccgtcgagaccagcccggacgttgacggggccaatatgtacgggcatatgcggggcgtcgtggatgccgggaatctgtataaacggccgctgctggcggtcgaggccagccacaaaaccggccagcagagcgaaaacaacgaagagtgggcgacgttcaattcagtagacgcggcaacgctacagtgtggtaccgggcaggtgccaggaacgtcttcgctgacccacctgtatagcgagaatccgggcaacgcgatggaaaccgatcacggttggccgacgcaaagccatgcttatattgcggcggaaacccgcgatacgcagatagcgcacgtcagcctggcaaccggcgacgaaggctatagcagcgaagcgaactatctcacctgttccgccaatgagatggtcgcgatacttgatgtctggttcaacgaggatccaacgcaacgtaatgcggtcgctcaggtggggcagcaggtgaaaatgaacgttcactcaagaaatgcccttaacggcgaggtgctaccgtataccgatttcactatcaccatgcaggcgggcaaacggcgtgatggcctgtcaactggctttaccgatcccagccagggcgagctaattatcggcggcgaagcccatgttagcgggcaagtggcctggcggggcgtgacggatgcgcagggacgtgcggaagtgattattgaacagccgcgcggcgtggggcttttaacgccgctggacgtggcgccggtagactcgctgattaaaaccccggcttcacgcagcgtgaagtttaccgttgtcaccagcccggatacgccggaggcgaaaatgtggggccatatgcccgacacggtgagcgtggggaatatcacctttgagcggccaaagctggcgtcagaggcatcgacaacctacacccatgatgaagccaacgaatcctgggcgcgcgtttctcatgctgacgccgtcagcaataccgcgaagggcggctgtgcggtgaaccggctgccgcggatagatcaactgaaggcattatacaatgccaacagcggtggggcgatgcatagcgtcaggggctggccggtaggctggcagtactggtcttccacgccggtcagcgcgacgtcatggaaatatctggcgctggacagcggcaaggaaagcgcgacgggcaataactccatctatgtcagctgcctggccagcgataatccgataccggcttcaattatcattgaaccggtggacgcctcgctgtggtatgacggcggcggcgtgcacgcggtgaaggtgaaaaagggcgacacgcttcagttgaaggtgacggtaaaagacgccggcggcaatcctctgccgaatgcgccgtttgtgctgaaccgcggcgacggctacacccgacagaatgagaagcatacggcgggcgagaccagcgatagcattgttacgccggtcgtgatcgacggtgaatcgctgaacgatacggcaaccaaaatcggtaagatgaccggcgcggatgggacgaaaattatcagcgttacccgcccggatactaacggcacccgaacggcaataacggctgcgttgtacgacaatgccagcgtaaacgccagtattgatactatctttaccgtgatcaccagcccggacagcgatgaagcccaaatgtgggggcatatgcaggagtcgctgacggcggcagacggcaccgtatttcagcggccgctactctatactgagcgcagcactaacattaatatgaccggatatacggaagataatgaaaactgggcggcctttttggggcctgccagcgccagaagcaatccggccaactgcgccgtcggctactacccgtccgtggagatgctggattcgctctacagcaagtacccgaaccgtacgataaaaaccgcccagggctggccgattgaccactcttactggagcgaaagcgctgcgccttcatttggtgtggagaaaccgtatctctattacgtcgtcgatctgggtgacgatagccgccgggcagcgagtaatagttatgtcaatgggatgcagtatcaggtttgcactaaggcgccgcagccacaggccacacagatcgtgctctcaactgcgcaggcgaaggatgccggttcgcaggcggtgaaggtaaaaaacagcgagacgattccgctgttggtcaccaccatcgatgcagccggtaagccgatagggaatacgccatttatgctgacgggcgacgtgggcagggcgcgcaatgtcagctataccgggtggtctgcgtctaatctgcaggtggcgtcatccggccaggcgccgcagttagtggtaagtggcagtgcgctgtacggcaccaccggggctgacggtacgctggcgttagatctcagcgcgcctggcgggccgggggttaaaaatacgctgaccaccagtctgatcgacacgtcgtcagcctcgtcgtcgctgccggtgattttcactaccataaccagcccggatagcgataaagctaacatgtggggccacatgccggaaaccttcagcgccagcaacggctcggagtttaaccgcccgctgctgtacagcgaactttcctccactacggacacctcaacctacacgacggccaatgaaacctggttcacggtgaacaactttgacaaggggcgcggcgcgtgttcagtcgcgcagatggcgacggcggccgattatcagtcactgtatggcgatcatccaggtggcgcgatagccgtcgatctcggtttacccactggcaaaagctggtggtcgggtgacaggatcctaacggggcagtcgctttactggcagtataccaaccttaaaaccggcaacgcgaacacgtctacgtccaacagcagcaattaccttcagctttgccgttcccgcttgcctgagatgaaagtctcgctctctttgatgccctgggacgcgcaaagagcggccgcggtagtgaaaaagggggagcagattgccgcgaccgttacggtgacaaacggcgccgggcagcctgttaacaacgcgctggtgaaactgacgcgcggcagtgcgctgacgcgcgcagggaatacatatacaacaaacagcgcagatgatattacgctaaacgatatacagccgtccgatacggcgacctacctgttggataccaccagtaaatacctgtatgtgcaaaccaatgaactggggcaagtgacgtttaccctttctcagaacaagggcgttggcctcaaaacgccagtcatcgcctcgctggtggatgacgcttcggtaacggacagtaaggacgctatttttaccgttgtttccagcccggacagcgataaagccgcgatgtggggccatatgccggaaacggtgaccaacagcgcaggcgtgaccttccgtcgtccgcttttggccgcagagatgacgccagcaagtgtggatcacacttataccgaagacaatgaagcctggccggaggtgtccaaaaatgatgcgcaaacgaccggcgtgaccggctgtgatgaggcgtatcagccgctgctggcggatctgaaaacgctgtacggtgaccatccaaaaggcgagcttgacacgctttacggctggcccgtgaaatccgcgggatactggtgggcgctggatcgactgccatccggcgcttaccagtatatgcgcctggataccggggagatttcgtcttactactcaccaatgatgagcgcggcacaggtttgcctgacggagcctcatgcgccgctaccagcggccattgagctaacgtccagccttcccgttgacgttagaagatga

SEQ ID NO: 392848 - DNA, 969 bp, Salmonella enterica
atgcaggcaatactaaaacggcgactgacaaaggtcgcgctcgcgctcgttgtcgccgggtactgttcagtccctgcggcaatcgctgcgccggaagggaacctgaaagcagggtcctggaaaagtgaaacgaaaacgacgggaaccattcaggggtcgattccctggattacccgtagtgagacggcaaacggcgaaacggataaagcccatgtgacggttgctattgaccgtaaggggcgggcgacggcatcggacggcgacaagcagttccatgttggcgataccgtaacagtaagctgggcgcttggcgatacggaaggcgacctggacgttgacaatgctaccacgaaaagcaccgtacaatggatgagctacagcgatcagaacggttctgaccccaaagagatcggtaccaaaggcagcgacagctataccattcaggcggcggatgcggaccgttacatcggcctgaaattaacgccgaccaccaccaccggcgatcccaatgtgggtacggaagtgattctgaaggacctgtcaaccaatgcgggcggcggtgcggatgatgatgatgtgccggaaggcccggtatttgatgattccgtacaggtcgttatttacgaagacaactctacgaccaacctgctgggtacggagaccaaactcaaaaccaacaccacctataaagtgctgctgtggagcgataaaaacagcaacggtaaatatgatggcggtgaagagaacgttaccgacaagtacgattaccgctggagattcaccggtagcagcctgcaattgcacaccgatggcggtattgttagcgaaacctacaataaccacgatctggttattccggttaccaacgcggaagcgaaatcggccttcgattatgcggctggcggtcttacccttggcaacgatggcgtccagggttacggcctgtccatcgactacaaacgcaaataa

SEQ ID NO: 392849 - DNA, 225 bp, Salmonella enterica
atggccgacctgcactgcccactatgtcaccaacctcttgaacagcgtaacgaccaggcgcattgcccgtcctgtcagcaggattttacgttaatgtctctgtgtcctgaatgccagcagccgctggaaatactgaaagcctgcggcgcagtggactatttttgccagcacggtcatggtttaatttcaaaaaaacgggttaatttcgtcatttccgatcaataa

SEQ ID NO: 392850 - DNA, 1083 bp, Salmonella enterica
gtgcagaccagtctgtatgaataccgcctgtacagggatgaaagcagcaatgactggtatctggcgtctaaagcgcaaggcgacgatggcggtgacgttacgccggttgacccggatgatggcggcgatgtgacgccgcagtaccgtgcggatatcggcgcgtatatgggcaaccagtggatggcgcgtaatctgcaaatgcagacgctgtatgaccgcgaaggcagccagtaccattctgctgatggtagcgtctgggcgcgctttaaagccggtaaggcggaatcggaagcggtcagcggcaatatcgacatggacagcaattactcgcagttccagttgggcggcgatgttctggcctggagcaatggcgctcaaagcgttagcgtcggcgtgatggccagctatatcaacgccgataccgacagcaccggcaatcgtggcgcagacggtagccaatttacggcgaaaggcagcgtcgacggatacaaccttggcgtatacgccacatggtttgccgatgcgcagacgcatagcggcgcttatatcgacagttggtatcaatacggtatctataacaacagcgtggaaaatggcgatgtaggttctgaatcttatgactcaaccgccaacgccgtctcgctggaaaccggctaccgttacgatattgcgctcagcaacggcaacagcgtcagtctgacgccgcaggcgcagcttgtctggcaaaactatgaggcggacagcgtgaaagataataacggcacccggatcgatgaccaggatggcgacagctggaccacgcggctggggctgcgcgttgacggtaagctgtataaaggcaaaaccaccgtgattcagccgtttgccgaagccaactggctgcacaccagcgatgatgtgacggtgtcgtttgatgacgcccgcgtagagcaggatattccggctaaccgcgcggagctgaaagtcggccttcaggcggatatcgacaagcagtggagtattcgcgctcaggttgccgggcagaccgggagcaatgactacggcgaccttaatggcagcctgaatctgcgctacacctggtaa

SEQ ID NO: 392851 - DNA, 3786 bp, Salmonella enterica
gtggaatataaagacgccgcgtctcacgttctggatgacgatacctctattacctactttgatgccaccgaaggttcggcgctgtatgtcgaagggttacgtagtaatgacaatggctggagaccgactatcgttactggtaaaggtattgtgatcgaggccagcgggggcggcgccgacgatcctgctaccggcgggaagcaaaaagctcacgggatcaccctgaactatggcgcggagcttacgctttccgactcgcaaatcaccgcgactggtccgtatacggcggctgttattctgggttaccagagcaagctgacattgacggatagtctggtacaaagcaatggcacctatagtatcttaagtgtcgaaggggggtcgcaagcgactttgtcgaacacccgcgttgaggaaacgaccgatgcgaatacggatgttgtcgcgcaaagcagtagtacattgaacgtattggacggtagcgaaatcgcgttgactttcgggcaggtgaggatcgttagcgacgcaacgttgaatatgcttagtagcatagccagttctgaaggcacggaaagcactatttacggctataaaggttcaatccttaacgtgacagattcgacgataacgcacaccaacgtcgatggcgccgcggttgaggtaaacagcgggtcaacgctggccttgtccggcggcgaattgagttctgccgggacaggggtttatggcgttgcgtcggcggtaagcattaacggtacgacaatcaatgccgacggcgacggtattatgttaaccagtcagaacagaagtggtttctatgatgatcttaatgggttgtccgtcgaaaaagccaacgtcacatcaaagcgcgctgcgttgcatatcgacagcaataccagcttaaactcacccgttatgttgaccgatagcactttcagcgcgccgaccgcccttaagctggaaagcaaaaccgcgattgaggctgacaacagccagtttactggcgatatgctggtttacgaggacgaaagcctcggcgcgtcatccatttccttaacaaatcaatcctccttaaccggcagtgcgcagggcaacgttgatatgtctctcgacgacaccagccattggacgatgaccggcgactctcatctgagtagcctgaccagcagcggcgaagtgacgctggtcggcgaaaacggggcagcaggcacgctggacgtaggcgccttatcgctgaaagatgagagccggttaactatcgggctgaaaaatgataccgacgcggccattaccagtgacagctacacggagctgggcggctcactggacgtctacgcgacggtcgacttcgacccgatcgggtccgatcgcaaccttcagtcgcagtcgataacgcttattgattcgcaggcggacattgtcggcgacttcgacagcgtgtcgttggataacgtcgatacttctatgctaccagattatctcactgttacagcaggcatcgacgccaatgacaagagcaactatgttctgggcgaaagtctgacctggtacgcaggcgccaaatctgcggacattgcccacggtacttttaccgtcgacgacaggtttgaggtcagcagcgagctggataaggtttccgctacctccctctgggatggcgaaacattgaccaaagaaggtaagggtgtactgatactcagcaatgagaacaatgactacggcgctaccaacgttaacggcggtacgctggccgccaaagacgccgccgttcttggcaccggagccgtcagcctcgccgcaaatactacgctggcgctgggcgatggtacgctggacaacgttgtgaccggcgtgggcaggatagttaaaggtggcgacagagagctcattgtaagcggtgataatgactacagcggcggcaccagtattatggccggtacgctcaccgccacccacgtcaatgcgctgggtagcggcgatatcgacaattccggcacgctggtgctggatggcaacggcaggttcgacctcgccgacgcctcaatcgttacccatgacgacgctaccttgtcgctggccgcggaaagttcgctgaatgcaaaacagctgactcaggaagacggcagcacactcagcattgcgctgggtgaaacagtcagcgagccggtaataaccgctgacaacgtcacgttggacggtacgctggatattaccggcataggtaatatcaaaccccaactgaccaccgatccatacacctttacgttaatcgacagcgtcaacgatattcagggcgactttgatgatctgacgattgcgggtatggagcagaaaactgtcgatttcatgaccgttgacggcaaaatcgacgatgaagaccgctccagatatgccctgacggcctctctctcctggtacgccgaccgcgacaacgccgccaccgatgctcacggtacctttaccctgagtaatcctgacggcagctttacgcttggaacggatctgacagacgttgatgattcgcttgatccggccagcaccaccggctgggatggaaaaaccctgaccaaagaaggcgaagggacgctgatccttaccggtaataacgactataccggcggaaccgtcattaatgaggggactctgacggcggccagtgaacatgcgctgggtaaaggtctggtggataactatgcttcgctgctgctggatgctgacggcgagataaacgcggaaggcggtataaccacccataccggcgctatgaccaccctggcgcagggaagcaccctggcgcttggcgacggtgcgctgacgcaggaaagcggcagtacgttaagcattgcgatcggcggtaattcggttcagccgctgattaccggtagcggcgcatcgctggacggtgaactgaaggtgagcgacgtcacgttgagttcgtacgcctcagatactgaactgcaatccttcacgctaatggatatggaaagcgacatcagcggcgatttcaccagcctgacgatggatattaccaacaagcctgattttctgaccataaacgggatgattaatcctgatgacaagtcagcatacctgcttactgaggtgttgagctggaatgcgaccgccgcgtcggcgacggcggcacagggtacctttaccctgggcgcgggcgacagctttgaagttacaaccgttctggccgataaaaccggcaatgccgactgggacggtaaaacgctgaccaaactgggggcaggaaaactgacgctcagcggcgcgaatacctacagcggggataccaacgtagaagaagggacgctgtggctgaccggtaccggcgttatcggcgcgcaggatagccagcaggcggtgaacgtcgcctccggcgcggccttcggcggagctaacggcgcggtagttaacggcaatgttaacaacgaagggacgcttacctttggcgacagcgaggaaaccggcgctgtattcacgctcaatggcgatctgatcaatatgggaacgcttgtcagcggcagcagcagtcatacgccgggcaacacgctctacgttgatggcgattacaccggcagcggcggttctctttatctgaatactgtgctgggtaacgatgattcggcgacggataaactggtgattacgggggatgcttccggcgaaacgggcctgtatatcaacggtatcggcgaaggcgcgcagaccgtcaacggtattgaagtggtggatgtcggcggcgtttcaaccagcaacgcttttgaacagaaaaattag

SEQ ID NO: 392852 - DNA, 390 bp, Salmonella enterica
atgggcttagtggataaactggcttcgcttctgattactgagtgcgctaatgacagccagcttaaagcgctgtttaattatctgctgatacagcacggtcataaaccgcgcttcggtatgtttatccgtaaagtggcccaccaggtccctcaacataaggaaagtttgatgaacatcgtggagaaaatccgtcgggcggcgcagaggaaagggaaacgggaaggaatgcaattgggtctggagaaaggcctggagcagggcgtacaggagggccgccgcgaggaggcgctgcgtattgccgctaccatgctagaagaggggcttgatcgggcgctgatcgcgaggtttaccgggctttcgggggatgaaattaactccctgacgcattaa

SEQ ID NO: 392853 - DNA, 555 bp, Salmonella enterica
atgactaaatcgccgacctccacgccgcatgatgcggtgttcaaagcttttttaaaatatcctgataccgcgcaggattttctgaaaattcatcttccacctgaattgcgtgaactgtgtgactggaatacgctggccttgcaatccaccagttttatcgaggaaagcttacgcgcatattattctgatatcctttggtcgttgaaaacgcgcgagggcgacggctatatttacgtcgtgatagaacaccagagtaagccgcacgctcatatggcgtttctcctgatgcgctatgcgatagccgctatgcagaatcatcttgacgccgggcatgaaaagctgccgttagtcatcccgatgctgttttatcacggcgttgacacgccttatcccttttcgctgtgctggttggatgagtttagcgatcctgcgttggctcgccggctgtattccgctgaatttcccttagtggatgtcactgttgtaccggatgaagagatcatgcagcaccgacgcatcgcgctgcttgaactgatacaaaagcatattcgttag

SEQ ID NO: 392854 - DNA, 1293 bp, Salmonella enterica
atgtggaacatattcagtaatataactgaagataatgaattagaacaatggaagataaggataaaaatagacaaaggaaaacagccgctgcctaacatcacagatatcggtactgaaaccttaataataggctattgcttgtggaatcagacggagtatgatgaaaaattatcagttgcaccaataatagatgatatcccttcattaaggaaaaataccattgtttttcctcgtgagggggcgtttgcatggtcaattcttaataatggctcatttttgtgggagtctaaaattactaaaaaagaatttgaaacagcttactgttttatggtttgggccgacccgattggtagcgcagcattctttgatgacagcaactactggaaaggtgtattaagaatagaggataactcattagttaagcatgatgaaaaaggtaatggttatataaatcatattattgagataaatctaaatatagcgcaaggagttatttcatactttattgatttagtggagaagtatagcacaggaagttttgatgagttaaaattaatacatgatgaagtgaagggtggaaacatagatgctttaggaaaactaggcgtgatggggccatctttgggagataatgatacatgtataatggctggtgcgattgatgcgtatgaatatggaaacagagtgactacaggaaggaaagaagatctctatgattttaattattataatgaacaacgtaagatagcatttaattctgaggatggctgcataaatgagcacccggattataataatcctgatcatacaacggtttttagcccttatgccgcaatgaaagttaaatggggacagtcaaatattagcatatatgactttaaaacaccaataaaacaattatatgctgaaatgatacgtattggtaatgatggccgtatttatagtaatgaaggtttctccaatattaattgggggattgtcggtcgacagcttgagcttgagaaaggtaaagcaaacttttatgccgcccttgatccaagatccagtaatgatgcgcatgatgaaaaagccacaaatactgggtatgaaatggtagaaaaagcagctctggataagaagtttcctgtaaaattagatagaaaaatattattctccctaacgctaaaagcacttcgtgaaaatgacttatttacttgcttaggggctgaaatgtataaagagaaacaactggcggagaaagctaaaaaaacgatagatgctcaaactgaatactattattcaaatccatattga

SEQ ID NO: 392855 - DNA, 357 bp, Salmonella enterica
atgcgttttatcatatggagaggtctcgatggtattattccttattcaaagaactataagttaaatataatggtatatgatcggattgaaactggttttatgggatgtgtagggcaccatgatgaaaattatcttaccatcccttatactatatggctagtgaaggatgtattgtatgccgatatcatttgtcgatacagaagtgaatatatgacaattcgtattcaaacaaacgatgattatagatctagtgtcaatagggtgtatataaactatcattggagttttagtcaatggagttttatcgacacatatcgtgaacaacaggataaaaaacatgtggaacatattcagtaa

SEQ ID NO: 392856 - DNA, 1038 bp, Salmonella enterica
atggacggagaaaaccgggcagttcccggtgatgtagaggacgcggaaacccggtttttacacaatgtctgccatggcaacttttaccgcgtcactgaactgctgtatcgccagcagcaggatgaactttccctgagaactgcgccggaacgggaaaccgtacgttttcgcgccagcgccagcaccgcatttcccctgcgtgacattgaatcgctggaaaaaaacgcggcaggacagtacatcatgaccaccacctttctgggactgtccggcagttcatccccgttgcccggttattatctggataacctggcctggcaacaggcgcagggcaacagcaccacggtggatttcctcggcatgtttactcaccgctggacgcagtttttgtaccatatccggcgtaaataccgctggtatacccgcttccgtccggatggcacagacactattacgcagcgtatgtacgcgcttatcgggctgggcaacccgcgagtacgtgagcggctgaatatctgccatacaaaactgctggcatacgccggaacgctggcgggcgcggggcgttcgccggatatcatctgcaatctggtttctcactgctttgatttaccgaaggtgacattacagccctggcagttccgccaggtggcgatcccggtggatcagcaaacccggctgggcgtgaccgaacccggccctgatggcactgtaagaggacgttcggtactggggaaaaatttcgtcctgggtgagcgcgtgccggatcgcgggggtaaatttatgctctgcattgataatctgcccctgacgcgctatctggcttttttgccggaaggtgaggaatatctgccgctgaccacgctggtgtcctttctgatgcgggatcaactggcatgggatttaaggctgggacttgagcctgatgccatcggcgggatgcggctgggagataaacggtgctcacaactgggacgaacctgttttatcggaaagccgccgaaagaggcttttgtgacaatcacggtcaggagatag

SEQ ID NO: 392857 - DNA, 543 bp, Salmonella enterica
ttgaacaacgcgacagcgttggcccgaagggcgagtctcaggatgagacgagtatacctgcagcaggttcgtgtcgaacgcagtgagacaacggagccgcctgcggcgacggcccgaagggcgagcgaagcgagtcatcctgcacgacccaccaatgtaaaaaggcgccctaaaggcgcctttttgctatgcacagaattcaatgattcgacagaattgtctggagcaattttgaacaacgcgacagcgttggcccgaagggcgagtctcaggatgagacgagtatacctgcagcaggttcgtgtcgaacgcagtgagacaacggagccgcctgcggcgacggcccgaagggcgaggcgaagccgagtcatcctgtacgacccatcaatattcattctcagggtgtttcaggacatccggggaagtaaagaaaaccgtatcactgtcaaagggatacggttttttttcgtctgtatgtgtttcccgaagtctcagggctccagagcaaatgggcctgcgcttctggtggtggaaatctcgtag

SEQ ID NO: 392858 - DNA, 1995 bp, Salmonella enterica
atgaacgcgcttaattgcctgccgctgtcggtggttaaactgctggccttttttcatgaagagctaagtgaacgtcgccccggcagattcgcccaaacggttcagctatgggtcggctgcctgctggtcgtgctcatctccatgacgtttgagattccgtttctggcgctctcgctggcggtattattttatggcatacaatccaatgccttttataccaaattcgtggcgatcctgtttgtggtcgccacggtactggaaatcggcagcctgtttttaatttacaaatgggcctatagctatccgctgatccgcatgcttatcgccagcgtggtcgtgctgttctgtatgtttatgatgcgcgcgcaccgtttggggctagtatttttcgctgtggcgattgttgccatgtacggccagagcttccccggcatgcttgactacccggaagtggtggtgcgcctcactctgtggtgtatcgtcgtcggactctaccccacgctgttgatggtgcttgtcggtgtcctgtggttccccagccgcgccgtaggccaaatgcggaaggcgttgtgcgacaggctggacgatgcgcttaaccatttgacgacaaatgccgcgccgttgccagaaaaacgtattgaaagagaagcgctggcgctgcaaaaactgaacgtattttgcctggccgatgacgctgactggcaggcgcgcagcgcctggtggcaaaactgcgtatctaccgtcacctatctgtacgccacgctcaaccgctactctgccaccgccgcttcgccgtccccggcgctggtgcaaacgttatgcaatgagatcgcgtcgctgcggcaggcgattgcacggggcgaggcctggcagagcgcatggacgcccagcgaggaagaacgcgccgacgctcgggcatgcggcctggaaaatatctgcgagccgctgcgtcagctagggcagatggcgccagactcgccgccagcgcctgtcgtcaaacccccgtcgatggcgccggatgccttcagcaacccggcctacatacgttacgcgctgaaaacgctgctggcctgcatgatttgctacgttttctactctggcgtcgactgggaaggcattcatacctgtatgctaacctgtatcatcgtggccaatcccagcatcggctcgtcctatcaaaaaatgtcgctacgttttggcggcgcgctttgcggcgcgattctggctctgctggtcactatttttatcatgccctggctggataatatcgtcgagctactgtgcctgctggcccccatctttctgctgggcgcctggatcgcgaccggttcggagcgctcctcttatatcggcacgcagatgatagtcacctttgcgctggcgacgctcgaaaacgtctttggcccggtttacgatctggtggagatccgcgatcgcgcggtcggtatcttgataggcactgcggtttcagccgtcatttatacgttcatctggccggaaagcgaagccggcgtcctgccgcaaaaactggctggcgcgttaggcatgctgggcaaactgctgcgcgtcccgcgccagtccgacccggcttcacagcgaacatacctgcaactgcgtataggctgccatgcggcatttaacgccagcgaagagatgtgcgaacgcatcgcgctggaataccaactgactgcggaagaacgcgcgcgtctgatcgccgatagccaggccgtcattaaacagggacgcgacattctctatcgctgggatacgatgccgtcagatacgcaggctgaacacatggcgcaagcattagagcagtatgccgccggtctcgcgaaccgtaccagccgctcgcctgcgctcgctttggcggcggcgtccgcattacctgaacaagaacgcgctatcgtacatctgctctcctgcttaccagactggacggccccggaacatacgccagccgaaaatccgcagcaaggaacaaccccattatga

SEQ ID NO: 392859 - DNA, 639 bp, Salmonella enterica
atgcaaggcgtcacccgtcaaacggggattatcagcgatatcgatgaggcggttgttcgcgtcagagtcaccctgccggagtgtgacaacctgcgcagcaactggcttcccgtgctccaacgcaatacgcagaacaacaaagactactggctgccggacattggcgaacaggtcgaagtgctgctcgacgataacggagaggatggcgtggtgttaggcgctgtctattccacggcagataccgcgccgttggcttcacgcgacaaacgttacgtgcagttttccgacggcgcggcctttgaatatgaccgtgcgttacaccagctcaccgtcaacggcggcatcgaaaaaatcgtcattgaggtgaaagagagtacgcaactcgcttcgccacgggtggaggtcagggcacaacacgtcacggtgacatcagaaaccgtggacgtggcggccacctccgtgggcgtcaaggcggtagatgtcaacgtggaagcgacccacacgggcattaaagcgctgaatgtcaccgtcgatgcgccgctcagtacctttaccggcgacgttaccgtgatgaaaaagctcacctggcttggcggtatggctggcagcggcggcaactccaaccaccactcccactaa

SEQ ID NO: 392860 - DNA, 516 bp, Salmonella enterica
atgaaattaaagagtgtaaaacgttactacccagatgacatgccatttggtgaaaatatccagtatttcatagatgagaatggagtggatttttacagcgcaatcgaacatttcaatctgaaatacaaattatgcatccaccctgaaacaaaagtcattcactcggtaagtgaagatatttctaaactatacccagccggtttcgatattgttgaaactgataatgtaccatatgacgacattatttcaggaaaatatcaatttgtagataatagaataataatgagaacatataatgaaatagaaattactcaaataaccaatatagaaaaatcagaaagactaaaactggccaataaaaacataatgccgttacaagatgctgtggaccttggaatagccactaccgaggagatgcaaaaattggatgcatggaagaagtatcgagttgaaatcaatagaactaacacaagtaattcactcaacattagctggcctttgccaccaaatgtataa

SEQ ID NO: 392861 - DNA, 3684 bp, Salmonella enterica
gtgagcagcaaagttgaacaactgcgtgcgcagttaaatgaacgtattctggtgctggacggcggtatgggcaccatgatccagagctatcgtctacatgaagaagatttccgcggggagcgctttgccgactggccctgcgacctgaaaggcaacaacgacctgctggtactcagcaagccggaggtgatcgccgctatccacaacgcctactttgaggctggcgcggatatcatcgaaaccaacacctttaactcgacaaccattgcgatggcggattaccggatggaatccctgtcggcggaaattaactatgcggcggccaaactagcgcgcgcctgcgccgatgaatggacggcgcgaacaccagaaaaaccgcgctttgttgcgggcgtacttggtccaactaaccgcacggcctctatttcaccggacgtcaacgacccggcgtttcgtaatatcaccttcgatcagctggtggcggcctatcgcgaatccaccaaagcgctggtggaaggcggcgcagacctgattctgattgagaccgtctttgacaccctgaatgcgaaagcggcggtctttgcggtgaaagaggagtttgaggcgttgggcgtagacttgccgatcatgatttccggcaccatcaccgacgcttccgggcgcacgctttccggccagactaccgaagcgttctataactcgctgcgccatgccgaggcgctcacttttggccttaactgcgcgctggggccagatgaactgcgccagtacgttcaggagctgtcgcgcattgccgaatgctacgttaccgcacacccgaacgctggcctgccaaatgcttttggcgaatacgatctggacgccgatacgatggcgaagcacattcgtgaatgggcgcaagcgggctttttgaatatcgttggcggctgctgcggtactacgccggaacatattgcggcgatgagccgcgcagtagaacacctgccgccgcgtaagctgccggaaattccggtcgcctgccgtctctctggcctggagccgctaaatattggcgatgacagcctgttcgtcaacgtcggcgaacgcaccaacgtcaccggttcggcgaaatttaaacgcctgatcaaagaagagaaatacagtgaagcgctggatgttgcccgtcagcaggtagaaagcggcgcgcagattattgatatcaacatggatgaggggatgcttgatgccgaagcggcgatggtgcgtttcctcagcctgattgccggtgagccggacattgcccgcgtgccaatcatgatcgactcctccaaatgggaggttatcgaaaaagggctgaagtgcatccagggtaaaggcatcgttaactccatctcgatgaaagagggtgtggaaacctttatccatcacgcgaagctgctgcgtcgctacggcgcggcagtggtggtcatggcctttgatgaacagggccaggccgatacccgcgagcgtaaaatcgaaatttgccgtcgcgcttacaaaattttgaccgaagaggttggtttcccgccggaagatatcatcttcgatccgaacatcttcgccgtagcgaccggtatcgatgagcataacaactacgcgcaggactttatcggcgcttgtgaagatattaaacgtgaactgccgcacgcgctaatctccggcggtgtttctaacgtgtcgttctcgttccgcggcaacgacccggtacgtgaagccattcacgcggtattcctctactacgccatccgtaacggcatggatatgggcatcgtcaacgccgggcaactggcgatttatgacgacctgcctgccgaactgcgcgatgcggttgaagatgtcattcttaatcgtcgcgatgacggcaccgagcgtttgctggatctggcggagaaatatcgcggcagtaaaaccgacgaggccgccaatgcccagcaagcggaatggcgctcctgggatgtcaaaaaacgcctcgaatactcgctggtgaaaggcattaccgagtttatcgagcaggataccgaagaagcccgccaacaggccgcccgcccgattgaggtgatagaagggccgctgatggacggtatgaacgtggtcggcgacctgttcggcgaagggaaaatgttcctgccgcaggtggtgaaatccgcccgcgtgatgaaacaagcggtggcttacctggagccgtttatcgaagccagcaaagagaaaggttccagtaacggcaagatggtgattgccaccgtgaagggcgatgtgcacgatattggtaaaaatatcgtcggcgtggtgctgcagtgcaacaactacgaaatcatcgatcttggcgtgatggtgccggcggataaaatccttaaaaccgctcgtgaagtgaacgcggacctgatcggcctctccgggctgattaccccgtcgctggatgagatggttaacgtggcgaaagagatggagcgacagggctttactattccgctgctgatcggcggcgcgaccacttcgaaagcgcatacggcggtaaaaatcgagcagaactacagcggtccgacggtttacgtacagaatgcttcgcgtaccgtgggcgtggtggcggcgctactctccgacacccagcgcgatgattttgtcgcccgtacccgcaaagagtatgaaacggtgcgtattcagcacgcccgcaaaaaaccgcgcacgccgccggtcacgctggaagcggcgcgcgataacgatctggcattcgattgggaacgctacaccccgccggtagcccaccgtctgggcgtgcaggaggtggaagcaagcatcgaaaccctgcgcaactacatcgactggacgccgttctttatgacctggtcgctggccggcaaatacccgcgcattctggaagatgaggtggtgggcgaggaggccaaacggctgtttaaagacgccaatgatatgctggataaactgagcgcggagaaactgttgaatccgcgtggcgtggtggggctatttccggcgaaccgcgtcggtgatgacatcgaaatttatcgcgacgaaacgcgcacccacgtgctgaccgtcagccgtcatctgcgccagcagaccgagaaagtaggttttgccaactactgtctggcggattttgtcgcgccgaaactgagtggaaaagcagactacatcggcgcgtttgcggtcaccggcggtcttgaagaagacgcccttgctgatgcttacgaggcgcaacacgacgactataacaagatcatggtgaaagcgattgccgaccgtctggcggaagcgtttgccgagtatctacatgagcgcgtgcgtaaggtttactggggttatgcgccaggcgagagcctcagtaatgaagagcttatccgcgaaaactaccaggggattcgcccggcgccgggttatcctgcctgcccggaacataccgaaaaaggcactatctggcagctactggatgtcgaaaaacacaccgggatgaagctcaccgaatctttcgccatgtggcctggcgcatcggtctccggctggtatttcagccatcctgagagcaaatacttcgcagtggcgcagatccaacgcgatcaggtgacagattatgctttccgtaaaggaatgagcgttgaggacgttgagcggtggctggcgccgaacctgggttacgatgcggactga

SEQ ID NO: 392862 - DNA, 186 bp, Salmonella enterica
atgccgcgtggcctggaattactgattgctcaaaccatcctgcaaggctttgacgcgcagtatggtcgatttctggaagtgacttccggcgcgcagcagcgttttgaacaggccgactggcacgccattcggcatggcgtgatgccggatgaggggaaaaaatgccgcgtggcctggaattactga

SEQ ID NO: 392863 - DNA, 186 bp, Salmonella enterica; identical to SEQ ID NO: 392862

SEQ ID NO: 392864 - DNA, 195 bp, Salmonella enterica
atgaagcttcgtcagcaaaaccccgctctcaaagttcttctttccgttggcgactggggcgtgcatggattctctggcgcggcagccagcaaagaagcccgcgcggtgtttattaaatcggcgcaggagattgtcgacaaatatggactcgatgggatcgatcttgactgggaatatccggttaacggcgcatga

SEQ ID NO: 392865 - DNA, 984 bp, Salmonella enterica
  misc_feature (955)..(964): n is a, c, g, or t
gtgacggttaaacttcatgatctcattaccaatagctatctacaattagatgatagtattcatgtatggctagatcagaacaaccacttattgccgttttcatacgcacctcaaaaaatacgtacacggttagaaaatgtaacgctgcatgacggatggcaacaaattcccggttttctgatattacgcacgactttgcatggacccggatggagtctggttactctgtacccatacggtaatctattgagtcgcttcttaaaaactatccttcaccaaatcccctttacattaacagcattggtgttgatgacgtcggctttttgttggttactgcatcgctcactggccaaaccgttatggcgttttgtcgatgtcattaataaaactgcaactgaaccgctgagcacacgtttaccagaacaacggcaggatgaatttggcagtattgcctgcgcttttaaccaactgcttgataccctacaagtacaatacgacaatctggaaaataaagtcgcagagcgcactcaggcgctaaatgaggaaaaaaaacgcgcagagcaagctaacaaacgtaaaagcattcatcttacggtaataagccatgagttacgtactccgatgaatggcgtactcggggcgattgaattattacaaaccacctctttaaacataaaacagcaaggattaacagatacggccaggcactgtacattgtctttgttagctattattaataatctgctggatttttcacgcatcgagtctggtcatttcacattgcatatggaagaaacagcattactaccgttactggaccagacaatgcaaaccatccaggggccagcgcaaagtaaaaagttgtcattacgtacttttgtcggtcaacatgtccctctctatttccataccgacagcatccgtttacgtcaaattttggttaatttactcggannnnnnnnnngggatacgtctgacggttaa

SEQ ID NO: 392866 - DNA, 522 bp, Salmonella enterica
gtgacgttctcgcaatatctgggcaacgcttttgcgctaatcgatgctaacggggcttctggcgtgaggatacaaaactatccgggcattgctaccgatccctttggctatgctgtggttccctatctcacgacttatcaggaaaaccgtctctcggtagatactacgcagctgcccgataacgtcgatcttgaacaaacaacacagtttgtggtgcccagcagaggtgcgatggtagctgcccgtttcaacgcaaatatcggttatcgcgtacttgttacagtcagcgatcgcaacggtaaaccgttaccctttggcgctcttgccagcaacgatgagacggggcaacaaagtatcgtcgatgagggcggcatactatatctctctggggtatcgagtaaatcacaaagctggactgtacgctggggaaatcaggcagctcaacaatgtcagtttgcttttagtacaccggattcagaaccaacggcctctgtactacaaggcactgcgcagtgccattaa

SEQ ID NO: 392867 - DNA, 1059 bp, Salmonella enterica
ttgatatccacttcctgcgcttatgcttcctcaggagggtgtggagccgacagcactagcggtgcgacaaattacgccagtgtggttgatgatgttacggtgaaccagacagataacgtgacaggaaaggagtttacttctacaacgctaagtagtactaactggcaatatgcctgtacctgctctgcaggtaaggcagttaaacttgtctatatggtcagccctgaactttccaccactggacacacaacgggttattacaaactcaatgacaacctggatattaaaaccaccttaaaggcgaatgacattccaggactcgtgactgaccaaatcgtttcggttaacacccgattcacacagataaaaaacaacacggtatattctgctgcaacccaaacgggtgtctgccagggtgacacgtctcgttatgggcctgttaatattggtgcgaataccacctttaccctgtatgtcaccaagccatttctcggctcgatgaccattccgaaaacggatattgccgtaattaaaggcgcgtgggttgatggaatgggaagcccgtctacaggtgacttccatgatttagtcaggttatcgattcagggtaatctcaccgccccacaatcgtgcaaaattaatcaaggcgatgttattaaggttaattttggatttatcaatggtcagaagtttaccacccgtaatgctatgccagacggttttactccagtggactttgatatcacttatgactgtggtgatacttcaacgattaaaaatactttgcaaatgcgcatcgacggtacaactggggtagtagaccaatacaacctggtcgccagacgaagaagttcagacaatgtgcccgatgtcggtattcgtattgaaaatctcggtggtggggttgcgaacatcccattccagaatggtatccttcccgttgatgcatccgggcatggcaccgtcaatatgcgtgcctggccagttaatctggtcggtggtgaactggaaacaggaaaatttcagggcacagccaccattaccgtcatcgtgcggtaa

SEQ ID NO: 392868 - DNA, 879 bp, Salmonella enterica
atgagttctgcacaatggatcggcgagtgcgtattaaaggctatattaatggaagcctgtacctggcctaaaccggggctggtaacgcccgtttcgcaaggcgcgcataccgatatggacatctggctatttattaccagttccgtcgccatcgcgccttgctttcacgcctgcgcgcaactgggcgagaatcaccagggaacgccgcaaaaactctttcacgccattcgaacaacgggcgtgcgctatgaacagcgcctgttgcagagcacgcgtcaggtcaatacccagcgtgggatcctgtttgccggttctctgcttgccgccgccgcggggtggttatccggacgccaggagacgctaagctaccctgcgctaagccggagcgtgatggctctctgtcatggactgtgccgcaacgatttcgccgcgcttgcccatcgcccgccgcaaacgaacggcgaaaaactgtatcttgaacatggcgttaccggcgttcgcggtgaggcggagaacggctttccgctggtgcgcgccgtcggtttacccgcgctgcatcaggcgtttaatgccggtcttagctggcgcgaagctctggtgcatacgctactggcgctgatggcgcagtgtgacgacaccaccgtgttatcgcgtggcggacctgcagcgttggcggaaatgcagcgtcgggcccagcagataataacgtccggcggcatgttgtcccctgatagcgaatccgcgctcaatgactttacggcgtggtgcctggaacactggctcagccctggcggctcagcggattcactggcgctatgtctggcgatgtattttctttgtcattcatcagatggagaagtcattaaggaaaaaatatga

SEQ ID NO: 392869 - DNA, 123 bp, Salmonella enterica
atgagtatctatttatacacattattaacttacggcctgacgattattatttcgtttgccgtggtcggcattattgttggcgtcaataagatgatgaacaaattaaacattactgacgattaa

SEQ ID NO: 392870 - DNA, 1209 bp, Salmonella enterica
atggatatctttgttcagctcttttcgggcatcggcaccttttttacggaagatccgaaaatagccattgcccgctttttattaattgtcctcggatttgttctggcgtggatgggttttcgccgcaaacttgagccactgattatggtgccgatgggcctggggatgatcgcggttaacgcgggcgtgctgttcctggccgggggccagaccggcacgctgatcctcgacccgatggtcagcgaccctgtcgaactcgttaatctgatgcagattaacttcctgcaaccggtctacaactttaccttcagcaacggtctgatcgcctgtatcgtcttcttcggcatcggcgcgatgagcgatatcagctttattctgctgcgcccgtgggccagcattattgtcgccctgttcgccgaagcgggcaccttcgccgcgctgctattggggatcgaagtgttcggcctgccggccaacgaagcggcctccatcgccaccatcggcggcgcggatggcccgatggtactgttcgcctcgctgatcctcgcgccgaacctgttcgtgccgatcgccattatcgcctacctgtatttgagcctgacctacgccggttatccgtacctggtgcgcctgctggtaccgaaaaaatatcgcggcatggaagtggatattgagtatccgaccgtctcgaaaaaggccaaatttatcttcaccatctgcgcctgtttgctgctgtgtctgctgctgccggtcgccgcgccgctgattctttccttcttcctgggcatcgccattaaagaggcggagatcgagccgttccagaagctgctggagtcgaccatgacctatatggcgacgctgtttctgggtctgctgctcggcaccctgtgcgaagcgcaaaccatcctcgacccgaaagtgggcatcattctgattttgggtatcggcgcgctggcaatttccgcggtcggcgcgctgctcggcggctggtttatctggcttgtctcaaaaggtcgttataacccggcgatcggtatcgcgggcgtctcctgcctgccaaccaccgccaaaatcgcccagaaagaggtgagccatgaaaacccttacgccgtggttctgccgctggcgatgggcgctggcgtcagcggcctgattgtgtcggccatcgccaccgggatctttatctccacgctattcctgctgaaataa

SEQ ID NO: 392871 - DNA, 1668 bp, Salmonella enterica
atgcttaacgagcacaactggcatcaactcaaggacgatacggagcagcggcttagcctgctggcgccgtatgttcatgatggaaaaattatcgacgccaaggataccgtcgccgcgctggaagcggtgattcgaagcggcgatcgcgtcaatattgaaggcaacaaccagaagcaggcagattttctcgccgagtgcctgtgcaaagtcgaccccggcaaaatcaacgggctgcatatggtgcagtcgtcagtcccactctgtacgcatctcgatctgttcgagaaaggcatcgccgggaagctcgatttcgcctacgccgggccgcaggatggccgtctggcgcagctgattcaggccggtaagatcaagctgggcgctatccatacctatctggagctgttcagccgctactttgtcgacctgaccccgcgcgtatcgctgattaccgcctttgaagccgataaagacggcaacctgtataccggctttaacactgaagacacgccagtgatcgccgaagcgacccacttccgccaggggatcattatcgtccaggtcaacaagatcgtcgataaagtcccgcgcgtcgatattcccggcgactgggtgaatgcggtgattgaggcgccgcgcccattttacgtcgaaccgctgtttacccgcgatccggcactgatcaccgacacccacgtactgatggcgatgatggcgctgaaaggcatctatgccgaatacggcgtggagcgcatcaaccacggcatcggtttcttcaccgccgctattgaactgctgctgcccacctacggcgaagagctggggctaaagggcaaagtgtgtacccatatggtgctgaacccgcatccgacgctgatcccggccatcgaaagcggctgggtacagtccgttcactgcttcggcggcgaactgggcatggaaaactatgtcgccgaacgtccggacgtattctacatcggccaggacggcacgctgcgctctaaccgcgccttcgcccaggcggctggtcactatgcgttggatatgtttatcggtggcacgttacagctcgataaatacggtaacagcagcactgccaccgccagtcgcgtttccggcttcggcggcgcaccgaatatgggctgcgacgccaaaggccgccgccacgctaccgattcctggctgaagtgcggcgaagagttcaacgccacccagcagcagctgatcggcgatatgccgcgcggtaaacgcctggtagtacagatgcaggaaaccttccgcgagaagcgtcagcccgcgtttgttgacaagctggacgcctggcaactggcggaaaaagccagtctcgccctgccgcctgtcatggtctacgccgacgacgttactcacgtattaacggaagaaggcatcgcctacctgcaccgctgcgatggtctggaacagcgcatggcggccatccgcgccgtggcgggctacaccgagatcggcctggccgccgatccggcgcaaacccaggcgctgcgtgaggccggcattgtaaaaaccccggaagacttaggtattgaccgtcgtcgcgccaaccgccagatgctggcggcgaagagtatccgcgatttagtcgactggtccggcggactgtacaacccgcctgcacgcttccgtaactggtaa

SEQ ID NO: 392872 - DNA, 333 bp, Salmonella enterica
atggctttacatcaactatcacatcaatttaacggcaacggcgcgcgcgctgcgttaccgaaaaccgtgtactgcggcgttgtcggctccggcgacctggaagtgctgctggaaccaaaagcgctggcgggcggcattgaagtcaacgtctgcaccccggtgaccggcttcgatcatatctggaacatcgtcctcacgcgttttcttgataacggcccgctgggcgatatgcaggtcagtatcaacgacaacaacgcgacgcctgcggtagtggcgctgcgtattcagcaagcattacaacaggctatgccgggagaaaaccaccatgagtga

SEQ ID NO: 392873 - DNA, 930 bp, Salmonella enterica
atgagtgatctgcgttttctggaagccagcgcccgcgagcgcgccgaagcgttggtggataaaggcacctttacggaactgattggcccggcggccaaacaaaccagcccgcatctgccggtgctgggcgaagccgtcgagtttgacgatggcgtcgtcaccggcatcggtctgctcggtcagcatccggccattgtcatttcccaggagggccgctttatcggcggttccgttggcgaagtgggcggcgcgaagatggtcggcgcgctgatgctcgccgacgagctggcggcgcaaaccaatgatccggcgcgtcgtcctatcgtgcttgtctcatttgaaaccggcggcgtgcgtctgcacgaagctaacgccgggctgctggcgcacgccgagtgtatggatctgttacagcttctgcgcggacgggtaccggtcgtcgcgctgatcggcagcaagatcggctgcttcggcggtatgggcttcgtcgccgccgctactgacatcatcgtgatgagcgagtcgggccgcctggggctaaccgggccggaagtgattgagcaggagatgggacgcagcgagtttgacgcttccgaccgcgcgctggtattccgcaccaccggcggtaagcacaaatacatcgtcggcgactgcaactacctgattgccgacacgctggcggccttccaccagcaggcgacgtccatcgccgacctgccgtggtcggacattgaagccatgcgtcgtatcggcagcgaagcgaaagtacgcgcgcagatggcgctgacgcaaaaaatcggcgaacaagagccaaccgacgcgcgcgacgtctgggctgcggcgggcaacgccgagccgcaatcgctggtggatatggatctggataccttcctgagcaaggtcaaacgtctgtccgtggaggaagcataa

SEQ ID NO: 392874 - DNA, 882 bp, Salmonella enterica
atggaaaatttactcggccagggccgcgcggcgctcgatcttatcgtcgatgaaggcagctttgaggaaaacgcgctggcagacctcaacctgccctgcgaagactacggccctggcgcggtggtcggcagcgcccgcattgacggcgaaatctgtacggttatcgccaacgatgccatgacctttaacccgcgctttccggtcgtttatgccggcgtcatcggccttgaagaaggctacaagatggcgctggcggtctaccgcacgctggcgatggataaagacaaaccggcggcggaaaaacgtccgctggtgctgatcgtcgacaccccagggaacggccccggcaaactggaagagattatcggcatgaataaggcgaccggcgcgtaccagctggcgctggcggaagcccgccacgccgggcatccgattatcgcgatggtaattgggcgcgccatcagcggcgcgttcctgtgtcacggactacaggcagatcatatcctcagcctgacgtcagagttcggcaccatgatccacgtcatgccactcagcagtatcgcgcgtattacccgtcaggacgtcgagcgtcttagcgaactgtcgcgcagcaacccggtgttcgcggcggggccggagttcttctggcagttgggcggcgtggaggagctggtgaaaactctgcctgatatgaaagaaactatcgtccgtcatatcaaggaagtgcgtgagcataaaggcgacgccggcattatggcgaccggcccgcaaggacgcggtgtctccggcgatcagcgcggcgggcgaaaaacacgccgcgtgattctggcacagatgcgccaggaatatcaggctgtggcagcgcgttatcaggctgtctga

SEQ ID NO: 392875 - DNA, 1101 bp, Salmonella enterica
atgaacgatcccatcgccacgctcgaatggctggtgcaggcgcaacagggcatcccctcgctggaggagatgccgcgccgtacgctggcggaaaaaggtattgccggcccgacggcggcacacgtcattgaagagatccatacgccgctgaatctggcgctggtcaccttcactaccggcagcagcgcgtttcagaatctcgtcggcgtgacccacagcgaactgccgctgcggatcgccgccggaaagcgcgcgctggcgggcagcggcgtcatcgcaggtcagcaattattaatcacctacgcgccgctggtcaacgtgtttacccgccaggcgctggatgagagcgctcttcgctggtcgttcttgtcccgctcctgccgggatgcgctgttaattgcgctgtgccgccagcagccggacgtggtggtgggagagtcgtcatttttacgcgccacgctggaacaggcgctgaaaatggatctggcagctcatctaccgaagaaactgacgttgattacggcaggtacgccgctggatgaaacgctggttccgcaggccgcgtcgctcggctatacgctacatgatctctacggctgccaggaattcggctggctcgcgcttgatggcgttccgctacgcgacgatatttcactggttcccacgccgcagggcggggagtggcgggaagttatcgtcggcggcctgcccaccggcgaccgctttcccgttgcggcaggcggccatctgtgtaatccacagggcgcgattcagacctggaagcgccggcgcgccacgccggagtatgacatggtggtcatggcgaccacggcgcagcaccgggagattgtcgagcgtacggcacgcaccattttgcggattaaagggcgcgtttgccgggtagcgccgcagctgcaaaccgcagccgccgtaacgcatattcgcctctcccccgtcacgctgccgggcgaagcattaacttgcgcccccgttgatattattggtccgcagggcaccgcgcaatttgacgccttacttcaggcgcagcgggaactccagcagcacgctaaaaacgatcccgcgtggagcaaattacgatga

SEQ ID NO: 392876 - DNA, 687 bp, Salmonella enterica
atgaagatattgcagcggcacacgctgtgctggctggccccttcagcgcttaacgccattgccgaacagatagatagcaagtttggccacctgcccgccgcgatgcgccgggaagcgcgcgactacctcctctccggcgcgctgccggggattgtgcgccgggggccgcgtaatggcgatgatataccgctagggttttgttttccgatgcgctggcacaggctgcgcttgcgtatggcggccagcgcgccgctcaaggcgatcgccagctattcaacgccggagcaaacggcccgtttaccggtcaccgacagcacctgcgcgacgcgcgcctttaacactctgcgtcaggcatggcgctggccggagctgcactttggcgtttggggttccgtcgcgctggagatcatgaccccctggcaatggaccgacagcgattccgatcttgatatccagtttacgccaacctcatttgatcagttagcgcagtgtcaggcgacgctaagccgtatcgaacagaagtttcaattacgtattgatggggagatctctttaccaaatggatacgccatcaacattaaggaatggttcagcggaagtcctactctgctggctaaaggcgaaaatgatgtgcaactaatttcgcgacagcacgtaacggaattatcagaaacatcgttctattaa

SEQ ID NO: 392877 - DNA, 219 bp, Salmonella enterica
atgtcagaagttaaatcaaaagtcccgggcgtggtggatgaagtgaaagccgccgtaggagataacgttgaaaaaggccaggtcgtcgtggtaatggaagcgatgaaaatgaaaatgccagtcgcctcaccggaaagcggcgtattaaaatcgttggcggtcaatcccggcgatcgtgtcaatccggggatggtgttgttcgatattactgcggaataa

SEQ ID NO: 392878 - DNA, 381 bp, Salmonella enterica
atgattatttacggattgatgttaatgggattatgcatgttcgccgggttaatcatcggcgacctgttagggctgctgctgggtatttcagccaatatcggcggtataggcttcgcaatgctgtttcttgtcgtcgcctcacaaaagctaacggaaaaaaggctgttatcaaaaccagcggaacagggcgtaggcttctggaatgccatgtatatccctattgtcgttgcaatgtcagcgaaccagaacgtcatcgccgcgctgaaaggcggaccggtggcgctaattgccggcctgggcgcggtatttattggttttctgctgatcaagccgctgagcaaagtcggcaacagaaaccttccgccacgcgccgcagactaa

SEQ ID NO: 392879 - DNA, 768 bp, Salmonella enterica
atggaccagattatcaagattcttagcaactttaccagcaacggtcttattaccgctttcgtcgtcgtcggcctcgtctgctggggcgcaagctggatctccacgcatctgttgcgcggcaaaattcacagctcggcgatcgccatcgtggcaggactgctgctcgcctgggtaggcggcgaactgaccggcggcaaaaaaggcatcgccgacattagcttgttcagcggtattgcgctgatgggcggcggcatgtttcgtgatttcgccataatcgcgacggcgtttggcgttaagcttgaagagctgaaaaaagccggactggctggacttctggcgcttattatttccaccgtactctctttctatctcggcgcgatcgtcgcctgggctttcggctataccgatgcggtaagtatggcgacgattggcgctggcgcgattacctttatcgtcggtccggtcaccggcgcagcgcttggcgcgacgtcggacgtgattgcgctaagtatcgccgccggggtaattaagtcgatcgccgtcatgatagtgacgccactggtcgccagagcggcagggctgacttcgcccgccgccgccattgtgtacggcgggttaatgggctcaaccagcggcgttgccgccgggctggccgcgaccgatcccaaactggtgccctacggcgcgatgaccgccacgttttacaccgggttgggctgtctgttggcaccctcggcgctgtacctctctttagcgcctttcttttaa

SEQ ID NO: 392880 - DNA, 432 bp, Salmonella enterica
atgtcctcatttcagcgaatgaaacccgggcaaatcgccctactcgcttcactgtgtactcaggaagaagaagaatctttccgccagcaactgctcgccgaaaagcctgagcaccgggttggatttgcctttatgacgggaacgtccggggaaataaagaataagcttcagcgctgcgtgattggctgcgcgcttaaaaatcacattaccccgcgccaggatagcgcaatttttacgctgtgccgcaccagccatctggcgttaacgaacgcgcttgccaataatattgctgacgatcgtctgcggataaaaatagcgctggtcagtaatggaagctggctcgccgtatcaatctacggcgaaaccctggtatatcaacggatgagccatgaaattatggggttttgtctgcatcgctactctccagcataa

SEQ ID NO: 392881 - DNA, 942 bp, Salmonella enterica
atgccagatcaagatattaccttacgcaagttggaaatatttcttgggtacatggataccatgaatatttcaaaagcggcggagacaatgaatatttctccggtgagcgtacatcgcgccctgcattctctggaagataatttacgttgcgctctctttacgcataatggccgtaatctgcatccgctccccagcgcatgggtaatgcaaaaacatgcccgcgaaattatgaacgcgatggaacgctgtatttatcttacgcgtgaggcctcgggttatcactcgtcagcgctccgcttaggtttactttattctctggtgttaagaacggctccgcaaatcgttcagggcttgaaaaatcgccgtcccgaactctctattgaatttattatgaattctaataaaaaattattagagatgcttaatgaagagaagcttgatgccgcattaatttccacgcccgatgactataatccgcaattatttgagacatggactatcttttccgatggcatctttctggcggttccggtacaagatgcagacagcctgtcagcgccggtggatttagctcagctacaaagcaaaaaatttattgcgctaagcgaggggtttgccacctggcgcgggttccagaaagcgttccgcattgccggttttgaaccggacatcgcggttcgggtacatgatattttctctttaatgagtatggttaatgccggcgtcggctataccctgattcccggtcgcatgcgggggctgtttcgtagcggcatacgcctgctgccgctaaaagaggcttaccgtatggaacaggagatctcgttggtttttccgcgtagccaggaaaatcatcccggcttgctttctttgcttgctgaatgtcggatgtatgccagacagcttatgctggagagtagcgatgcagacaaaaccccataa

SEQ ID NO: 392882 - DNA, 1938 bp, Salmonella enterica
atgaaatacggaaagaaaaatatcgttaagttacttttattgttctcggcattacccactatttcgatagcggcacagccattaaaattaaccaccagcgctgatgaatcagcctggtggactccttataaggagagcaaggcctttaatgaagcgcttgatgagtttggcatgacctatcaacagctggacgcttctcccgacaagacgctatcgcgctcagctgacgttaatgatgtccttttctggcaaaagcgcaccatggcgatttacgccgacgctaaagagaatacctatcatattccggtggtggaagagcatgataacgcccgccatcgcaccaccgttgatggccgcgcgcctggcttctttagctattattatgccagagttaatgacacgatgacgctgcgtaccgagaatcaacctgatgatgtaagatgtatgacctacatcgagaatgattatcagcaccccgggacagtcgatgaagtaaaattaacgcctaatggagaaacaacgtttacctttaaacataatggggttgtccttcttgaatgtcgcggagtcaatgaaagcgcgtcgctcaatcatatgaatacgctggtgactttgcatattgtttcaacctccgccgccgaacagccgctattcattctcggtattaatactctggaggaatggaaaagtattagccagcaagcaacgcccagcggccaaactttattatttgatggtcgttcacgttactatgcggcaaataaagtcgcaaaatcctccaaagatcataatatcgaacaaacgctgcgtgagcacctgctgaacacgttacgctacgataagctcaacggtattgacggcaagtcatcaatagatgaagcgctacgcgggatgaatattgccacttataacagctgctgctgggcgcagggcggtgacggtcgcatcggcatcggttttggcggcagcatccccactcaatccagctggggcgaatggcacgaattcggtcatgaaaatcaaatgcaatggtcctgggatggtttagatgaaacgacggtaaatatttattctattgccgcctgtcgcgcaacgcgcggtgaagtcaatgtcaaaacctgccatgaaaatctgcaatacaatggcttttcctgggatcagcaggccgtcggtaatttcctgaaatccggacagacctggaacctcgataaggaagacgatgtttttcgtaagctcatgatgtttgctgagttagaaacttcctggccggatatctatcccgccattggtaaagcctatcgggagattaacgactataacaacggctataacaaagtggactcgaaccaggaaaaaattgatttcttcgtggtgaatgccagcaagtattccggccatgatctgcgcgagttttttacccgttggggcgttgattactcgtccgatgccgatgatcaaattgctaagatgaaattgcctaaggttatccaaccctctggggcatccagtgttaatctcgaaaaagcggcaggcgcagcgaaagctgaagcacacatcacaatcccaaatgccgatactcactataatacagggtttgtcacgaatacgtcggcgattggtcctacctcgttggtatgggatggcggtctctatcaaagcacccccctgcatgttcaggttgttgactcaagaaaccgtcaatttaccgtgaagctttatgggcagagaacgggaggagcctgtgagccccacacgttgaatactgcaggagcatgcgattcaggatcctctaccaaagcgacgattcgctttgcctcaagtgataatcctgatctacctgctggtgagtatcatggcgttctgcacctgattgcgcttgactggcataataataattggtctgaaaacctggatttccacatccacattgttaattga

SEQ ID NO: 392883 - DNA, 558 bp, Salmonella enterica
atgaaaaaagaagcattagtacttatcttatctgcaggcatttttgccataaattctgcacaggcagataccaactcacttactgctggatactctcaaggtaaaatgaaagatggcggtaatatccgtggggtgaatgttaagtatcattatcagggggattttcctgtagggattatcacctctttaacttacatgtatgacaatgataggtcttctggaactgatgaggataccggagaaacctaccatgataagtcgaatgtaaaatatggctcgttaatggttggcccgacttatcaagtaactgactctttttctttatatgcactggtaggggctgcaatccttaaagcaagagataaagaaaacggtacttgggaggatggtagtccatacacgaattcagcgtcaatcaatgaaaaagcgctggcatggggggctggcgtacaaatgaatcccacaaagaattttgttattgatgtgggatatgaaggaagccgtgagctcttgacacaaattaatggatttaatattggtgttgggtatcgcttctga

SEQ ID NO: 392884 - DNA, 573 bp, Salmonella enterica
gtggctcgtttacagccggggaaattatatgttgtgggtgatgtactcgcgggtgacggtagaaaattatcactgacgagtgacaataactcctcgctgaattcgcgtttaaacttatggggaaattctgacagacccaatgtaattgaactggacgacgaccagggatggcatttatacagccagcgaaatcctgatggttcaattcgttttatggtcaatggtgagattttcactgccggttctattcatgtgggggccaatactatctccactgatggaaatatttacggttcgctatggggcggctggctgaatgactggattaataacaccattatcaatcgttttgtccaggatatcaggcttggtggaattgaatatgctcaggcatggaacggacctggatacaacgacacacctggttatgtcatcacaggtgtcacgaacggcaatagcgatgaattaattgatggggtacaccgactcccgttgcaaaaactcatggcggtgtctggtataatgttacgagtatttaaatatgatgcatttgaaaaatatttctgcgggtaa

SEQ ID NO: 392885 - DNA, 210 bp, Salmonella enterica
atgcgattaaattcagcgctagtggttaatattattaaatctattctcggggctgctttttgggggcccgatgttccgctgttggcattcgtactggatacattattagtggcaacatttcgtttggctgatattgatagtcacggcgtccatcgtctctttaccgtagtcggcgttgcggtaagcgctaacattgcggggggcttgtaa

SEQ ID NO: 392886 - DNA, 276 bp, Salmonella enterica
atggcccaaataaatcattccctcactcaagaagcggagctgcgggacgatattgcagaagcgcttgaaagagcggggttgtggcgacgagctgcaacacgctggctacacgtttttgattcgctcagttcagataaaggtcgtgaacgtattgcacagcgccgggaggtttgcctgctaatagccagtcgttacgcagacagaaattccggctcgaagcggcggaaagtttaccttaccctcagtaaactggaaatgtcccgcatacaatcataa

SEQ ID NO: 392887 - DNA, 162 bp, Salmonella enterica
atgatggcatggtgggttaacggactggcattattggtatccgtaacggtattttcctttataggatattttctttttgctgtattcatcaccccactgtcatatcttatcacccagtttgttgcgacatcgtggcgcaagatttgcagtcattatgattaa

SEQ ID NO: 392888 - DNA, 564 bp, Salmonella enterica
atgataaattttttctcctgctcccgggataaatatttagaatttggtatgaagcatattcttgagcctgtaataactaagcaaccacagagtagtgacgatacattactatttttggtcgatgagacaatgccgctggatagcttgttagcactcagaaggcgtaaagatattgaaatttacagcaagataattattttatctgactcactatcatgggaatgcgtcagacgttttatcccgggttcaacgcatttctatattgtacgatgcagcacggctattcactcctttctggggcagataaatgcgttactggcaaaagagcgattgatatcatcaggatactcaaaaaggttactgacgaataaagaaaagaacggcgtgtttgcgtttcatagcgccagtaaatttccagacagtctcagtgatgagtttctggcgagtaaaattaaaagtcattataagcagcgggcaatgaaaaaattaggtatcaagaataatcccggtttcagcgcgttgattaattcatgtaactttgagcggatcatgagtttcttgtaa

SEQ ID NO: 392889 - DNA, 2775 bp, Salmonella enterica
atgtgcgcgaattatgatattcggatggagagtttttcgttgaaaagcaatggtaagttttataaaacaaaaatcgcgttggcctgttctttagggttagcctttcaggcatcggcgacagatatttctaatggaacctgggataccttcacctacgatggctcaacggtgggcccagtgtatcaggggtatgctgactggaatgcggatgatgccgatgtttatccggtaatcaacaacgcggtagtcaatggcgttatttccacaaactaccttgatgcagatactgccaatccaaactcgctctcagttagcaataccactattcatggaatggtaacgtcagcttgcatgacagatggctgtattgataccgttcaaaattataatgatccgctgacattaacggtggataattctacaattgatgacagtttcgaacattttgattattacgatgctgacggcacggcagccgggactatcccaacttatgcgcttggtacagcaattacgttggatcaggaaagtaacatcgctattcagaataattcgcatgttgcgggtattaccttaggtcaggaagagcaggattatgctgacagcggtagtaccgatagcttcgttgataatattaccgtgacggattcaacggtgacgtcgggttcctggacggaactggacacgaccggtttttatggccagtctgaaaaaccgtcagattacagcggcgatgccactatggcggtaaattatgacgtcaacggcgatggcgctattaacagtaatgatcgtattgtcaatatgaacgacgttgcgcttgccgcgatcgacaattcagcttctgaagaatcgatgaaaaccaacgccacctttaataactctacgctgaccggcgatgtgttatttgtcagcacctttaactcaggttttgcgccgcagggagcagatactaacgcagatggcgttattgattctaatatgggctacagcgatgatagccttaaccaggatgagatgaacctgacgttagataatggcagcaaatgggttggcgccgcgatttcagaggttcaggcgacggccaatctgtacgatgttgccgctaacagcctgtggcctgcctctacttataacgccgatacggggtatgtcgatggcgctgacgtattccagagcggtgttttcaacgttacgctggatcatggttcggagtgggataccagcaaagcttccaccattgatacgttaaccgttaacaatggttctcaggtcaatgttgaaagttcttccctgctggccgataacatcaatctgaataccgcctcctccatgaatattggcgatgatggcagcgttgcggcgaatacgttaaatatcgacggttatagcgatgtggatttaaccgacgaaacggcggcgctgtacgcgaatactattaccgtaagtaataacgcggcgctggagctgggactggggcaggtcgacacccataatatggtgttaacatccggcggtacactggatgttgccagccgggattatgtcctgaacagcgatttgaatacgggctacaccaatggcattacggataatgccgctgattatggcgtcgttggtttgaattctgacggccatctggcagtcaatggtgacgttgccggtaattacaaagtgcgtattgataatgcgacgggtgaaggctctgtagcgaattataaaggtcatgagctgatccgcgtttatgatgacaatgccgataccagcgcatcgttcaccgcagcgaataaagcggatctgggtgcttatcaatatgaagcgcagcagcagggcgactccgtcgttctgaaacaagacggtctgacggattacgcgaatatcgcgctgagtattccttcagctaacaccaatatctggaacctggagcaggatgcgctggcaaatcgtttggataatgggcgtcaggcgcaaaatggcatggataccggcggcgcatggatctcgtacatcggcggccatttcaatgcggataccgatacgctgagctacgatcaggacgttagcggcgtgatggtcggtcttgataagtcgatcgacggcaactatgccaaatggatcgtcggggcggcggcaggctttgcgaaaggcgatatcgaccaggattccggtcatgtcgaccaggatagccagtctgcacgcatttatgcgtctgcgcagtttgataacaacgtcttcgttgacagttccttgagctataaccatttcgataatgacctgtcagcgtccatgagtaatggcagcgcggtaaacggcgacggcatctcatctgacgcctggggctttggtctgaaagcgggttataactggaaatataaccagagtggatatgttacgccttatgcaagcgtttccgggctattccaggatggagatagctatcagctcagcaacaatatgagcgtagacgatcagtcttatgacagtatgcgttatgaagccggtatcaatacgggttacaccttcacttttggcgatcagtcgtttacgccgtttgcgaaaattgcgtatgtatatgatgacgctgatagcaacagcgcaacggttaatggcgatgatatcgacaacggtgttgaaggatctgcggttcgcgccggtctgggtggacaattcaatttcaccaaaaacttcagcgcttacgccagtggcgattaccttggcggcggcgatgtagaccaggattggtcagctaacgctggcgtaaaatacacctggtaa

SEQ ID NO: 392890 - DNA, 207 bp, Salmonella enterica
atgaacaaggtggtagaatatctttatacaacgaattccactccgttcattggcaacgtagaatacggtccagaatcgctgacttttgctacgtataagtcgcaagaaagagaggaaaaagaaaggataagtaaggatatgagggggatgtattggggaaagcgtcggcaacgacgcgctacccctacccctgattcatttgtatga

SEQ ID NO: 392891 - DNA, 417 bp, Salmonella enterica
atgatgattgcaactgaagcactaaaagcaacgcaggcccttatcgcagctgtacccctgctgggggacagccccagcgagaaggactacaataacgcactggagctggtggaagagttattgattgaaaatccgtccagcccactacttgatattgtttgcgcccgcattactgagtacgaacgccagcaacctgatattcaggcgttacgtgacgaaatggcagcaattccggcaggtctggccgttctgcgtacactaatggatcaatacaacctgactatttccgattttgcagatgaaatcggaagcaaatcaatggtgtcccgcgtattgaagggtgaaagacagttaaacgttaatcacatcaaaaagctgtctgaccggtttaacatatcgccagctgcttttatttaa

SEQ ID NO: 392892 - DNA, 315 bp, Salmonella enterica
atgcacctgatttcaatgaaggcaatcacggaaggatgtgaacggtatccgcagcacagaaaagagattttgctctttggccgcaccatcgaaaaggccaactgtccaacaccagaagcactgaggcagttttacccgtcactggataactttaaataccttgataagcactatgtaattaacgtttcaaacaataacttacgcgtcattgctctgattttttttgaaagccagaagttctacattcgacacattttcaatcatacagagtatgacaagttcacggcgcagcatcggacaaaggggaaaaaatga

SEQ ID NO: 392893 - DNA, 681 bp, Salmonella enterica
atgatacagtacctgaacgtctttttttacgacatctacccctatatctgcgccacggtattcttcctcggcagttggctgcgctatgactacggacaatatacctggcgcgcgtcgtccagccagatgctggataagcgtgggatggtgatatggtcgaatctgttccatattggcattctggggatcttctttggccatctgtttggaatgctgacgccacactggatgtacgcctggttcctgccgattgcggtaaaacagcagatggcgatgatcctcggcggcgtttgcggcgtattaacgttgatcggcggcgcgggattactctggcgtcgtctgaccaatcagcgtgtgcgtgcgacgtccactacaccagatattatcatcatgagcattttgctgattcagtgcctgcttggcctgagcaccattccgttttcggcgcaatatccggatggcagcgaaatgatgaagttagtgggctgggcgcaaagtattgtcaccttccgcggcgggtcttcggaaatgttgagcggcgtggcgtttgtttttcgcgtccatctggtgctgggaatgactattttcctgctcttcccgttcacccgtctggttcatgtctggagcgcgccgtttgagtatttcacccgccgctaccagattgttcgtacccgccgctaa

SEQ ID NO: 392894 - DNA, 1563 bp, Salmonella enterica
atgtctcaggcaatgcagcagcacccagctatcgcaatgacccgccatcccttattcctggcgcgagccaacgcattaaaaccccatatttattcacaccctgtcgcgccgacaggaaaaattcagatcaccggcacgccgaatcactggcaggcaacgccatgcggtaatctcgaggcggtgtatgaacaagctctggatacgggcgactcgctgattctggattttggcacccattgtgttggttatctgcgttttatctgccgcgcagtaggtagtccgccggacgcccctgtccatcttacgctgacgtttggcgaaacgttgggcgaagtcgtagagcctttcagcgattatcagggctggctgtgtagtagctggctgcaacagcatcaccactatcttgatgttttgcctgcgcacattcagttaccacgccgctattgcttcagatatctgaaaatcgatgttaaggcggtgtcgcgcaagtttcatttgcagttcgacgacatcacgctcatgaccgtaacctcggcgccgccgacctgcccgccgtgtatgaccgacgatccgctattgcagaaaattgatgatgtctcggtactgacgttacgtaactgtatgcaggatgtttttgaagacggtccgaagcgcgatcgccgtctctggctgggcgatcttcgtcttcaggcgctggtgaacgatgttacctttcgccatcatgcgctggtacaacgctgcctgtatctttttgccggcaacacgcgtgaagacggaatggtgtcagccaatatatttgtccaaccggatgtgatcgcggatgacacctttctttttgattattcattattttttgttgatgtgctgtatcaatatgtacaaagtacaaacgatatcgagaccctgaacgcactatggccagtcgctaaaagacagatagacctcgcgcttgaacgctgtgatgcgcgttatattgtgcgcgatagcgatgactggtggtcatttatcgactggaacgatgcgttaaataaacaggccgcgtcgcaaggcgttctgatttactgtctgcaacgcgctatctggctggcgcaatggtgcgggccagattgtctcccctcattaaaacagtcgctgactatgctaaaaaacgcggcgctgtacgaattctggagtaaacaggacggtttttataccagcggcgctggcaaacaaatttcctgtgcgtcgcaaatctggctcgtactggctgatgtggggacaccagaacatcagaccgccataatgaaaaaactactccgccattcaccaaaaatagccatgaataccccctatatgcgtcaccattttatcgctgcgctgctccatgttggattacgcgaagaagcgacgacggaaattaaaaattattggggcgcgatgatccaccacggcgcagacactttctgggagatattcgatccggcgcatcctgattattccccgtatggcagtacattaattaacagctattgccatgcgtggagttgtaccccggcctggtttatccgccagttcggactttaa

SEQ ID NO: 392895 - DNA, 1371 bp, Salmonella enterica
atggctgaaacaacttttactttatggcgacaacgactgggctacggtattgccgatctttcctgtaatttaatctggcaattaatttccttatatttaatgtttttctataccgatgtgatggggctacccgcttattatgtcggtattatgttcctggtcactcgcctggttgatggcgtggcggatgtcttaatgggactggtgattgataatacgtccactcgttgggggcgttgtcgcccctggttactgattggcgcggtgcccttcggcgtgctgtgtattctggccttctatgtcccggaattggacgttaccggaaaattaatttatgcgtttttaacgtatttgtgtctgtcatttttatataccctcgtgaatatcccattttgtgcgatgctacccttcattaccagcgactcccgagagcgtactacgctctcctcggtacgtattttattagggtcgttgggatcgaccattgtcgccatcgctacgctaccgctggttgccgtactgggcaaaggaaatcaggcacaaggttttttttataccgccacgatttttggcgccatcgcgattttctttttactgctaagttttcgcaacgtggaagaaaagatcagtatcacccaggagcgtatgaccttaaaacgggcgtggtcaggattaaagcaaaaccagccgtggttcgtttttgcgattaatatctttttaatgtggggcgcctttttcttccagaccggcgcgttggtctattttttccattattatgttggcaatgtagaattaacggccatcgtagccggtatctccactttcgttccgctgattggcaccctgacggttccgttgctggctgtaagaatgaaaaaacgctatgtctatctggtcgccagcgccattaaccttattggcatgggaattatgatagtctccgacatacagactatcgggctgatcattggcgctattgtgatgtcactgggcgctggtcagcgtacggcgatctatttttcaatgcaggctgaccctgtcgattatggcgtctggaaaaccggtattaatactgccggcattttaacgtcgattaacggttttctgggcaaagtggcaatggcgggtgcaggcgcgattaccggttttctgctcaccactggcggttacgttgccaaccaatcgcaaacagcgacggccttgttatctatcaaagcctgttatctttatatcccggcggttttaattattgcttcgatggtatggatgggccgttattaccgtcttgatgatgactatgaaaaaatacgtgccgatcttgacgctggtaaaacagagaaaatagcgaatataaaatcacctgctttataa

SEQ ID NO: 392896 - DNA, 1581 bp, Salmonella enterica
atgcgtatctctgtgataagcgcagcggtgtgttgcgctgtttttagcgtaaatagtgttcatgccgccagcctgacgatagagcagcgactggcgatcctggaggcgaaagtcaataatgcagaacgcgaagccaaagaagcgaaactgcaaacgcagcgcgccgaagcgcgggctgcccatgcggaacaacagttacaacaacttaccgcgcgaacaacggcaagtgaacataaaatacaggaaacagcgcagttagcgaaaagcagccccctggacggggttgaatttaacgcctatgcgcgttctggcctgcttattaataatcatggcaaaggcggacgcggcggccccggcgtttcgcccgccagttcgttaaacggcgatgcgcatgttggccgcttaggtaatgaaaaagacaactatctggagttaagtctgggcaaaaaaatgactttcgacgatgggtcatgggcacattttaagacgatgattgccgatggcgcgaataatcccgatccctgggttcaggataacgacagccaccatatcaatgtgcgtcagttgtatgtcgaaatggggagtttcgttgattttactggtccgtttaagaatgcctcgctatgggcagggaaacggttcgatcgggataattttgatatacattttaccgacagtgacattatgttccttggtggtaccggcggcggaattaatgatgtgcaatggagcactaacttgcgcggagattattccgtatatggccgtaattttggcgatctgggcagcgatcattatgaagataatgatattcagaatgtgatgtttaccgctaaccatttttattataactggcaattaatgctcaccgggatgaccgcacaaggtaatgatcgtttaaaagatgatacgtctactaccggcagttacgccctgcgtagtgacaatacggcgaagaacggttattacgcaatgctggcgtatcacgataaggcgcgcttctatggtatcacccggggcgtgtcggaaacggcgctgcagttcggcggcggcttaggcgctgagaccagacaacccggcagcgatggcgatctcactgaagatgccctgtctttacgctttgcgtcgtatggtatcgttccgattgctaaaaactgggaattagccccctcggtgatcgcccagcacagtgaggatcgctatcgggatggcgatcgttacgactgggccacctttaaccttcgtgcctctcaggcgattacgcgaaattttgccttactctatgaagcttcctggcaatatatggatctgaatcccaatggcagaacctatcgtgataacggttcgttgaatacgtatcagagcgtgaagggtagcttttataagctgaccttcgccccaacgtttaaagtaggtaatgtttttgatatcaaagcgcgtccggaaatccgtttctttgccacctggatgaactgggataaagcgctggatcggtatgcgactaacgatgatttcggcagcgagggatttagcgctggaggtacgtggaattttggcgtacaaacggaaatctggttctga

SEQ ID NO: 392897 - DNA, 1413 bp, Salmonella enterica
atggaaaaattaacacgctctgacaaactcttgtacgctattggcggcggcttcgcctccaatctcagtttctacaccatgctggttttttttatcacttttgcctctgatatttatggtgtaaatcccgccacggttggcgccattacgctggcggccagaggattcgatgcgcttatcgatccgatcatgggcgccattggcgacagaacccgcactcgtctgggtaaataccgtttctggataattacttccgcaccgtttcttggcgtaattacctggatggtgttttcctcacccgaattatctgcgacaggtaaagtcatctatgtctccttcgtttatatgatgtattctattatctctaccgtatcaaatattccctatcattcccttaccgcctatatcactgacaaagtaagcgagcgcagcaatatcgtattattaaaacagtttactggtattattgcgcagtttattgtcagcgctggcggcatctatattctatcggcttttagccaaaccactaataatgcaggaaacgccgttgttgatgcttacagttatcaatatttaggaatattgttcggcattatcaccaccattggcttctggatttgcgcttacggcgccagaaagcaggataactggcagcgtattcagaatgatgaaattacccgaaacgctcaggaagaagataaccatgcgatcattggcgtatttaaacatatggcaaaagcgttccgcagtcgctccctgacttcgctggcttttgctgcggcggccaataccctgtcactcgccatcaccgcaggggttaccgtacagttttatacctgggtgttaaatgatgcaaaactggtcgcaactggcgcgctgctcaatgctttatttggagcggtcatgtatcttgttgtgaaatggttggtccattgcttcggtaataaatccgccttcgtcattatttgttgtatcgccatcctaccttctctggcgctttggttaacgtttacgccagaaagcctcacttacaccatcgtgatgctggcctgcattatggcattttgccaggcgggttcgctggtcacctggatgatggtgacagattgtgctgacgagttgcgctggaaaacaaagcaaaacgcggccggaatcgcctcttcaacgctcaccttcgcgaacaaatttggctccgctgttggtgccttcattctgggatggatactcactttcgtcgggtatgtccccgggacgctgacacaaagcgatcacgccctacaaggactgaccatgctgatggtcctcacccccgtttgcggccagttactgtcgttattagccatggctttttattcacttaacagagaaaaccataaagccatttgtatgaaattactcggctcaggagaataa

SEQ ID NO: 392898 - DNA, 1764 bp, Salmonella enterica
atgaaagttgtaatgctgatgtttgacacgcttcgccgcaataaattaccgccttataactcagatgcttttccgttaccaaattttgcacggctggagcaaaaaacagttcgctttgataatttttatgtgggttcgatgccttgtatgcctgccagacgtgatttacatactggacgactcaattttctgcatcgtagttgggggccactggaaccattcgatgattctattttcgatataatgaaaaaaaatggcgtctattctcatcttattaccgaccatcagcattattgggaagatggcggcgcaacctaccataatcgatacagcagctatgagtttgtccgggggcaagagggagatctgtggaaagcgagacttggcttcactggcgcagaaacgttggattcatggaaaaacgcagagccgctgcgtcgcaatatgattgaacatgaccagataaatcgtagctatatgcaaagagaagaggattatccgcaggctcgctgttaccagttgggattagaatttcttgccgaaaactatcgggaagataactggctattacaaatagagagctttgatcctcatgaaccttttgcggtacctgaccgatttaaacaaaaggttgatccgcaactggtcaataataaagatgactggccagaatacagttctacagagcgaattaataacccgcaaaaagttgcgaatggtgaaaaacactatcaggcattaatgctgatgtgcgacgagtaccttgggaaggttctcaattttttcgatgagcatgacatgtggaaagacaccatgttggtgattaataccgatcatggatttatgttcggtgaaaaagagtggtcagggaaaagcgttatgccagtgtataacgaaattgctcatgttcccttttttatctgggatccacgttcaggtctcgccggagagtctcgttctgaactggcgcaaatgcatgatctctcagtgtcattgcttgaatttttcggtcttgagaaacgcgagcatatgaccgggcaatctctttccacaatacttaacaaaggcgaagcaattaaatctgaggcaatttttgggtattttggcgctcatgcgtcaattactgacggacgatatgtttatatgcgaggcagtcagacaccggaaaatacgccgcttaatgaatacacgttaatgccgacgcgcatgagacgtttatttaatgcagatgaattgcgtgatgcgacattacatcccggattttcgtttaccaaaggaatgccggtactaaaagttcctggttctgctggattctacagttcatatgctcatggcaacatgctatttgatttagaaaatgatcctacccaagagcatccgatatgtgatgcaaaactggaagcggctttccttcgtaagctctcactggcgatgacggcggctgaagcgccaattgacgagtggctacgattgggtatccctctggagattgaaaagatagacgcagattttatcacgcaggagcacgcccagcgtactcacctattatgcgagcatctcggcccattgtcagccataactatgcacccggatacacggaccctaattctggagattgccgcatgtcctggcgggaaagcctttattgccgatctttcggcatcatggcgcagcgtatcgctgaaaaagcaggacatcatcgatttcttccaaaaaggggaatatgcgcaggagcttagccttctgtttaacaaaccgtattaa

SEQ ID NO: 392899 - DNA, 966 bp, Salmonella enterica
atgggaagattcgttttaacaggcgatgtgggcgggaccaatgcccgtttcgcattatgtgatattgatacgggtgagatttcgagaataaagacatacactggccatcaatattcaagtctggaaaacgttatccgttattatctggatgaacaagcatccgggatcgtgaatggctgcatcgcgattgccagccctgtcactggcgactggattacaatgaccaataaaagctgggcattttctgccagcgaactaaaaaaacagttgggcttttcacacctgaaaatcatcaatgactttaccgccgtatcaatggcgattcctgtacttaaacccgatgatatattgcaactgggtggtaaacagcctgaaaaaggtaagccaatcgcagtctatggcgctggaaccggccttggggtcgcacatcttatcccggtggataaacgctggcttagtctgcctggagaaggcggtcatgttgatttcgcaccgggaacggaatatgaagcgaatctattaaagatcctgtatgccgggcgaaatcatgtctcagcagaacgtattctttccggcccggggctggctaacctgtatcgttcagtggtcacagcggcagggagacaggtaaaagaattgcagccctatgagattactgaacgcgccttgtcaggcacttgtccggactgtcgcgatgcgctatccctattttgtgtcatgatgggtcgctttggcgggaatctggcgctgacgctgggcgcaacgggcggagtgtatattgctggcggtattgtgcctcgcttcctggatttttttaaacactccggctttcgcgatggtttcgaagataaaggtcgctttaaacgttatgtgcaggatatccccgcttatctgataacccatgacgcccctggattacttggcgctggcgcatattttcgtcaggaacagggaatgttgctgtga

SEQ ID NO: 392900 - DNA, 345 bp, Salmonella enterica
gtgaaatcagaaaaacacggaaagtttcccgattatcgttttacgctggcgaatgaacgtacttttctggcctggatacgtacagcgttagcttttatggctgcggcgatcggtattgatcaattagcgcccgaactggccccggcttttgttcgaggcagtctggtcatcatactgggcatgacggccgccggtctggcttattatgcctggcgacgctgggcaacaaatgaatccgctatgcggcatgatttagcattaccgttcccacgtgtgcttatctggctaagctcaggattatccgttggggtgacgctgacgctgatcgtgatgatcgcgctatga

SEQ ID NO: 392901 - DNA, 204 bp, Salmonella enterica
atggccacggcgttttcagaatatggtgatcagactatgcaacgcgatagcgaatgcgttaagccctggtgcgatacatatcagtcgtttagccagtatagtagggtgagaaatcaagggaatatccagaatcacactcttctgtctctgaagagagataatacacaaaaccaaagagataaatgtggacaatcctcctattga

SEQ ID NO: 392902 - DNA, 900 bp, Salmonella enterica
atgtacttacataaacttatcttccagttcaaaattctggtagatcaaaaaacttacaccgccgcggcagaaaaactgtgtatttcgcaaccaacgttaacacagaatataaaacgtctggaatcagcgatggaggtttctttactcatcagggggaataaaagcgtttcattaaccgtgtacggtgaaagtctctatcatcacgcctgccaactggagcgaagctacaggcaagcgctgcttgatattgacatcattaaacgtaaacatcggcaaaccctggttgtcgagtgcggacatgcctggagccatggcgtgctgtttgacttgatgaaaaattatatcagtcagcatcctgaagttcgaatggtcataaaaaacagcaatacgataatggggcaaagccatctattaagaggagactgtgatgttgctcttggcgcaattcctgaggtagaaaatcaaatctccggtatcaattatgttcccgtattcacgtcacagtttatgttgttttgctcagatgaacacccgtgggcccatgctgcaaatatcaacgcagcacaactggcccaatgcgactggattgtactgaaacatgaatcagacgagggagaatttgaggacccgcttctgtggcagataccgccagaaaatgttcgctttgaggtctactctgtctccaatgccattgcgctggctaaacatagccattgtatcattgctttagccaggcagctggaaaatgaggccatcgaacggggacttatcccattaagttcgtccattgtatttaccgaattccagacgggggtaatgtatattgatgatgtattaaaatatcagcataaaaaagcgtttattgatgcaattgttaattttaataataattatttataa

SEQ ID NO: 392903 - DNA, 1161 bp, Salmonella enterica
atggaggcccggccgaacacgaggaaaggttttatgtcagacattttcagcagttttaaagtaggcgacaccttattgtcgaaccgcatcgttatggcgccgatgacgcgatcacgcgcgccggaggacatcgcgaccgaacagacggcgctttattacagccagcgcgcaacggccggtctgattgtatcagaaggtacgccaatctctcgcgaggggcagggctatctgttcaaccccggtatctacaccaccgcgcagattgccggctggaagctcaccacggactctgttcacagtgttggcggtaaaatttatgcgcaactgtggcacgttggtcgcgtatcgcatacgtcaattcaatcggataatcagcaaccagtcagttcgacaacgaaacccgcatccggtgcgaaggcattcggttacacggacagcggtgagccgggattcgtggatacttcagttccccgggcgctgtctacagaagatgtggtgcgcgtgattaatgacttcgctcaggcggcagaaaatgccattaatgcaggatttgatggggtagaaattcatggagccaatggctatctggtagagcagttcctgaatccggctgttaacgatcgtactgaccattacggggcggacacgctggaaaatcgtcttcgcttcgtactggaagtgacagatgccatcatcgcgcgcattggtgctggccgcacggggatccgtatttcaccttacggccagctgtttgacatgccgcagtatccgcaagcagaggaaacctacaaggcgctctgcgcagcactgggtgagcgtggcattgcctatgttcatgtgatggaccagacaaactttttctttagtgcagacgattcccaggctgcggatgaagccattcgtaaactgctgaaaaactgccgcgagggtctgaagtccacggcgctgattctggcaggcgatcttaccctgggacgggcgcaggaatacatcagttccggattaatcgatctggccggatttggtcagccctttatctctaaccctgatcttgttgcccgcctaaaaaacggctggccgctggctgaaccagaccgtgatacctactacggcggcggtgcgaaaggttatatcgattaccctccgtttattaaagcctga

SEQ ID NO: 392904 - DNA, 924 bp, Salmonella enterica
atgtttttaccggacaggcttaagggcatcagcgtgtttgtagtggtcgctgattcaggcagctttattgctgccgctgaaaaactaaacctgacgggctctgccgtcagtaagagcgtggcgagactagaaagccggctgggaaaaaagctctttaatcggaccacccgctcgctctccctgactgaagccggatatcgctattactgcacctgcacgggcatcctgtctgagctggaggaaacagaactttcactcactcttgaagaacgtgagccttttggtaaggtcaggatcgatctgcccgcctcatacggacgtatgcacgtgttgcccgtgataatggcctttacccggcaatatccgctgcttcagccgcatattacgttcacggatcgcttcgtcgatccggtgcaggaaaacatcgacatcgtcgttcggattggcggaccggacgtatggcactctgcgctgggccatcgctatattggcgcacagcgactggtcttctgcgcctcaccggcgtatctgctacggcgtggtgtccctaagtctgcccgggagctggataagcacgactgtattggctatgcgatcggcgccgggatgatctctccctggtattttactggcagcgaaccgggagaaatggagcgcagggtcattcccgcacgaatagcgctgggtgacggcgagagcgagcttcaggcggctctcggggattacggcattgcccaactgccgctgtggctcgttgagcaacacctcgaaaacggcacgcttaaagaagtgatgccggaactgtcgaccgacgggatgccgatgaatatcgtctggctgaaaagtcgtgagtctctccccaagatccgtgccctgctcagtgaactcactgataaactgaccccaacgggcgtgatccgctaa

SEQ ID NO: 392905 - DNA, 963 bp, Salmonella enterica
atgaatgagcccgggaacattagcattcgcgccctgctgatttttatagacgtttatgaaacgcagaatttttcggttgtggcacggcgagaagggatatcagcctctcaggtatcgcgcgtcatccatcagatggaggatgcgctcgggcagcagctcttttaccgcaatacccgggcgatcatcccgacggaaagctgtcatctttttatccgctatgcgcgggccatgacaggctgtatggaggaggcgcggcgggaactcaacgagagaacgcttgagccttccggaatggttcgcataaacgcgccagtattctttggacagcgacatgtggcatccgcgttacccggcctgacggagcgatacccgaggctcagtattgaacttacgctgaccgatgattacatcgatccgcaccgggatccggctgatgtcatttttcggattggcgcgctgacggactcctcatttcatgcgcgcgtgtttggccagcagttctttcatcttgccgcgtcaccggattacatccgccggcacggcatgcctgagtcacctgaagagttcgctcatcataaatgcctggtctatcgcggctcatcgggaccaaaccgctggctgctgcgcaggcccggagaggagtgggtgcactattccgtttcgcccctgatgttatccaataatgctgaaacgctgctgattgccgcactcggggggatggggattgtgctgtttcctgactggttgattggagaacggctgaagagcggcgaacttgtcggcctgctgccagagttggacaagtccataaaaacggagccgcagcacatcgcggcgatctacccgaatgcccgccaccctccgctgaacgttcgggcgattattgattactaccttgacgccttcggctccccgctttactggcagtgtagtaatcaatctaaggtagatttacagcgttga

SEQ ID NO: 392906 - DNA, 429 bp, Salmonella enterica
atgcaactgatactgcttttaattgtaattgccggaggcatgggactgtccgtagaggcaggattgctcgggccactgggtggagaggtcggcagcctctgggccaccttcagcgtatttggcgtgggcgcggcgctgaccttcctgctgatgctgtttttcagcccgcgtaacagcccgtcgttctttgcgcagccttcctggcagttgcctggcggcgtacttgggccgatttacgtcaccatcctgaccgtggcaacgccagcaatcggcatcgccatgaccatgatcggcatcctggcaggccaggtcttcaagagcctgattattgaccacttcggcctgctcggcacgcctcacaggaaaattgacactaaacgcatcatcgcgctgattttcatcatcgcagcgctggttatggttgcatag

SEQ ID NO: 392907 - DNA, 492 bp, Salmonella enterica
atgactactatcatgattcttctcgccatcatcggtggagccatgctgagtatccaggcggctatcaacggccaactgggcagcaaggtcggcgtattcaaaagcgcgttcctgacattttcgattggcgcgctggtgacggggctgctgatcttcttcttcgaacccaaacacgccgtgaccctgatggacgtgcctaaatggcagctaatgggcgcaatgtttggcgtgccgtatatcgtcattatggtgttcgccgtccagcgcattggcgctgcagttgcgacggtcgccgtcatttttggccaactgaccatgagcatgctgatcgataacttcggctggctgggcaatgagtcgattccgttctcggtgagccgactcggtgccatcgtctgcctgggtatcgcactattcttcatttactccagcagcgaatcaaaagccgcaccagcgaaaaaacctctgcagcaggcagccgctaacaaataa

SEQ ID NO: 392908 - DNA, 1107 bp, Salmonella enterica
atgaatataaaagaaatatggaaagcagcaaaccctaaaggtcatctgctgactgccatctcattcttgattccgattgtctgtggtgctgggtttattattgccatcggtatgggttttggggggacggttcaggacactttagtatcgggtcaatttgatctgtggcaggccttcgctaccatgggggctaaggcgctcggactattacccgtcgttattgctatcgggatttccggttcgatcgcgggtaagcccggtattgccccaggttttgtggtaggtctggcagctaatgctattggtgcgggttttatcggtggtatgatcggcggctacatttccgggtatattgctcttgctatcattaaaaatgtgaaggttcctggctgggcccggggtttaatgcctacattgatcgtgccattttttgcatccgttctcagtgccttgatcatggtctatatcatcggtacgccaattggtatttttaccgatgctctcacatcgttcctgagaagtatgggaacttcatctaatttactattaggtgctgttattggggcattgtgtatcattgactttggcgggccgatcaataaaacctgcttcgcattcgtcttaactctccaggcgcaaggtataaatgagccgatcacggcccttcagttagttaatacagcaacacccatcggttttgggcttgcattttttatcgctaaacttcttcgcaaaaatatctataatcacgaagaaatcgaaatgttaaaatcggcggttcctatgggggtagtgaatattgttgaaggatctatacctatagtgatgaatgatatcgttcgcggtattgccgcagcggcaatcggcggtgcttgtggtggcgccatcaccatggtatatggcgcagatgcaacggtaccttttggtggtgtattgatgctcccaacaatgtcaaatcccatggcaggtattatggcgttaatagtcaatatattagtaacagcaaccatctacgctgtcatcaaaaaagatgttcctcgtgatgttgttgtaaacaatgaccatgaagaggaagagattaatctcgatgacattaagattagttaa

SEQ ID NO: 392909 - DNA, 312 bp, Salmonella enterica
atgaatattgttggaattacagcttgcactgtaggcattgcacacacctatattgcgcaaaagaaaattgaaatagcagcaaaaaaagccgggcataatgtcaaaattgaaacgcaaggtactataggtatcgagaatgccttaaccgctgaagaaattgcacaagccgacatcgtcctgttagccgccgatgttaaagtctccggtgaagaaaggttcgctggaaagaaagtcgtcaaagtaccaacagaaatggcggttaaatcaccaaataagcttatcgaaaaactcggtgaattagtaaattcataa

SEQ ID NO: 392910 - DNA, 465 bp, Salmonella enterica
atggacatttcgagtgtacttaatgtaaaaaacatcaaattgaacatgatggctaagagtaaagaagaagcaattgaagaattagctgacttattagtacttgatggagctattattaataaagatatttttctgaaagatgtctggttacgtgaggagcagggctccactggattcgaaaatcatattgcgatcccgcatggtaaatcctcgggagtagcccgtacggcattggccattggacgaacccaacatcaaatcccttgggaaacgatggatggtagcgatgttcgctgtattattttgtttgctgtatgcctggtggatcaaaatgccacccacatccggttattatcacaagtttcaggttcacttgccgatgaagagatagttgaaaaattactgaaggaagattcccctcagagtattattgatcttttgaacgctgaaggtgctagcgcttaa

SEQ ID NO: 392911 - DNA, 318 bp, Salmonella enterica
atgacgactcgtcgcacgctagcgaatgctttgcgcatgctttctattgatggtgtacaaaaatcgaattccggtcacccgggcgccccgatgggtatggctgacattgccgaagtcctgtggcgtgattttctgaaccataacccgcaaaatccgtcctgggctgaccgtgaccgctttgtgctgtctaacggccacgacgctgacgcgatcaaacgtgcggtagaagaagcgcgtaaagtgaccgacaagccgtctctgcgcgcgtggctatcgaagcgggcatcgcggactactggttcaaatacgtgggcctga

SEQ ID NO: 392912 - DNA, 678 bp, Salmonella enterica
atggcggctaaattttcgccctcgttaatgtgcatggatttaacacagttcagagagcaaattacggcaatgaacggtcgggctgatttttatcacgtcgatattatggatggcagctatgtgaagaacattacgctatcaccgttctttatcgaaaacctgaaaaaaatcaccgatgtgccgatcgatgtgcatctgatggtgaatcacccggaagatattattccaatgtgcattgatgcaggggccgatattatcagcttccatccggagacggcgaataacaaaatcttccgtctgttgaacctgattaaagatgcgggtcgtcgctgcggcgtggtattgaaccctgccactccggctgatgctattaaagagtacgcgcacctgctggataaagtgacggtcatgtcagttgaccctggctacgcaggccagaagtttatcccggaatcgctcaacaaaatcaaacaactgattgcgatgcgcgaagcgcatggttaccactacctgaccgaaattgacggctcctgcaacgagaaaaccttcaatgttatctcccggtcgggcgttgacgtctttattgtgggaacctcgggcctgttctcgctggcggataatgtcagcgatgcatgggataaaatggtcgatatctaccagcgcgaagtcgctgcctga

SEQ ID NO: 392913 - DNA, 1263 bp, Salmonella enterica
atgctgcagtttattattcatgatgtgttgggcacaccagcaatactggtcggtctgttttccctgattggcttattattgcagaaaaaagcagtttccgatgttatttccggaaccctcaaaaccataatgggttttgtgatattaacatccggggcggcgattatcgccacgacgttaacaacgtttagccagctttttgaacactcattccatattcagggagtcgtacccaatactgacgctatggcggcgctggcacagaaaaactacggtaccgcgacggcaatgatcatggtgctggggatgttatttaacattgtccttgcccgtattacgccgctgaaatacatcttcctgacggggcaccacacgttgtatatgtcggcgatgctggctgtcatcctctctgtcggcggtctgtcgccgttctgggtggtactggtaggagcggtgatcctcggcatcatgatggtggtttctccggctattctgcagccgtttacccgcaaaattacaggcactgatgacctggcgctgggccacttcggttcaactggctatctgctgtcagcgctggtggggaaagcgatcggtaaaggcagcccgtcgattgaagagcttaaggtgccgaaatcgctgaacttcctgcgtgactcctcggtcgccatctcgctgacgatgttgattctgttcttaattctggtactggtcgcaggcaaagagtttgttgagggcagcatcagcggtggtcagaactttatcattttcgccattatccagtcgctgacttttgcggcgggcgtgtggatcatccttgccggtgtgcgcatgattattgccgaaattgttccggcctttaaaggcatcgccgacaagctggtaaaagacgctaagccggcgctcgactgtccaaccgtctttccgttcgctccgaacgcagtgatcgtcggcttcctgtcaagctttgccgccggtttggtgagtatgttcctctgcccgttgtttggtctaagcgttattgttcctggcctggtgccgcacttcttctgcggcgcgacggcgggtgtttacggcaacatctgcggcggtcgtcgcggcgcggtggtgggggcattcgctcacggtctgttgatttcatttttacctgcgattttgctgcctctgatgggcgacctgggctttgcatccactacctttggcgatgcggacttcggcgtagttggcatcattcttgggcatgtcgtgacactgtttaactaa

SEQ ID NO: 392914 - DNA, 267 bp, Salmonella enterica
atgaaaaaggttctgattgtttgcggtaacggtttaggcagtagctttatcgttgaaatgaatgtaaaaaaaattattaaagagctgaataaagaagcagaggtttcccataccgatctgacttcggcaaaaagcgaaactgccgatattattcttagtgccagggatattgctgaacatttatccggccattctgcacaggtttttggtttatctaatttgttggacaacaataaaatcaaagaaattctttccgagaatctctga

SEQ ID NO: 392915 - DNA, 441 bp, Salmonella enterica
atgattacgacctggttaactgcagataatatccagattgtagattcagtcagtgactggaaacaggcaattacgttatcggcccaacccttattggcgaaagaggcgattactgaagactatattcatgccatttttaacagtcaccaaaaacttggcccttattatgttttagcacctggtctggcgatgcctcatgctcgcccggagcaaggcgcaattaaaaatgggttatcgcttttgcatatcaaaaaaggcgtttcttttgactcggaagataatgatcctatttacgtcgtgattatgctgtgcgcgctttcgggagatgagcacatcaatatgattacagcactggcggacatttttagcgatgatgaacgactctcagcactgctgaaagcatcatcaatggaaacaattcaaaccgttatcaacggatag

SEQ ID NO: 392916 - DNA, 1053 bp, Salmonella enterica
gtgcagacgttagaagcggacgataacgcgagagaaaaacgcaggaaaaacaccggtaaaattacgctcgctgaagtggcaaaactggtcggcgttagcacgatgaccgtgtcacgcgcgttacgtatgcctgaaaaagtgaatcctgaactgcgcacacgcattgaagcagcggtaagcgagctgggctatgtgccaaatctgcaggcccgcaaccttgcctctgctgactccagcctggtgatgggcgtggttccctctttttcctcaccgggctttctcgccgtctccgaaacactacagaccgtgctcacgacccaaggctacagcatgatgtttatcgagtccggtcagggtggacagagtgaagaaaaagcgtttgcgcaaatgctcgcttacaacccagccgcgattgttcaattcaatattgataacatcagcagttgttcgcaaatgataagtaacaccggcgtgccggtggttgagattggcgccatcaatcgcgatgcgagctgggtcagcattggtgttgactatgctgtagccatcaaaaaactggtcacatcgcttgtacaggccggatataaaaatatcggcctgctttgcacagcttccaataacattatgtttcgccaggtactgagcggctggaacagcgcgatgctctccgttaaccactctccgcatcgcgtggttacttctcacctggcggcagggattacgaccggcctgaacctgctcggcgatattcgtatcacctggcctgagctggatgcgctgatttgcacatccgatgaaatcgcctgcggttgcattatggcctgccatggtgtggggcaaaaagtgcccgactctctggcgctggcaagcctgagtggagggactcttgccgccgtttgctcaccggctctgactgccgtcgaattcccctggagtgaaacgggaaccctcgcaggacaaacattgcttgatctcctggcgggtaattcgacggataaattcattgaattaccctcagcgttacaagttcgcgccagcaccagaaagcaatag

SEQ ID NO: 392917 - DNA, 546 bp, Salmonella enterica
gtggatgtcggttttcgtatcagtgtttcgccgcaggaagggctgattgcccgtcgcttgttccccctacagttgatcatttgtgcttcgccagcctatttgcgtaaatatggcgtaccgaaaacgctgcacgatctcagtgcccaccggtgtagtgtgtttcgccatgcatcaaccgggcgcctgatcccctggacagtgaagtccggggacaacgcgcaggatcatcatgttaaccttgccatatcgatcaatgatgagatgctggagttacatgctgtattgatgggagaggtcattgcgcaaatggccggtccgacggcggcacaatatatccggacgggccagcttgttcctgtgttgcctgaggctatcaccgatattcatggcttgtttttatattacgggagtcgcgtcgcacaaccgctcagggttcgccgctttatcgaccttgcgattgaacgcttagccaacaggcaggacattgtgttatcagcagaggaaatcagccttgcgtatattcaggggacgtccagtgactcatag

SEQ ID NO: 392918 - DNA, 630 bp, Salmonella enterica
atgaggctggcattttttactatttttttgagctttagctcatttgcgtcagatacagtgccattgcatcaagataaggcgttttcagttatcagaacattgtcatcaaattccaatgctgatattttggcatcatcaagttttgatgcctgcaatgtgcatttcaaagactatatatttccttccctaacaaatgatgaatattacagaaaaaaatatcccgtttcagaatggatttgtctctattctggagaggcatttgaggcaggctatgacactcaacaaataaacaataatggcgcgaatgaaagcagcacggaaaataaaattgtatatgactacaaaaataaaatatggaaatccgtgccagataagaattacaaaaaaaatggtgaaatcaacgagttaaaattaataaaaattgagggtgaaaactctaatggctacatggctataaatagtatgaaaaaacttaaggatggtcgtattggtgaagggttttatttttgcctaatacataataacaatgcactttgtggctctggtgagaatgttaaaagcaatagtgcactcacctcttctcaggatgcattaaaattgttaaacagcattttgtttgacgacaactaa

SEQ ID NO: 392919 - DNA, 2262 bp, Salmonella enterica
gtgctaattagtccgccgtatctaattaataaaaataacaatgaaagtgatgcatcatggattaatcggatgatgcctgttaattctctcagcagaggatatcctctcaatgcggcggattcgtggcatggtggaattcatatattaaatacagattcaggtgaatcgactaaggaagtcagggcaatagctgacggaacagtcgtgtcgttccgaaccccctccgaaccctggaaaagagaacagtatccgctgaagtattcgtctataagaggaacggatgatggttatgttttactgaaacatgagactgaaatcggtaccggggaagatggaaaggttgttttttactctttgtatatgcatctgaaacatctggaagcagagattaaagctgacgctaaaatttatcgtaaaaccccgctgggatcttccggaatggttgatggacagaatgagttccattttcagattttttgtgatgaaggcaatatcaggaagctggccggcaggacgactggtgaactggatattaaggaaaatggtcggacagatattgtctatggcgatattcatttttatctgcctgcggggacgacattctatgaagcgcgacccgacgataatacagcctctacagagggcctgaacgaagtgcatacaagcgtcgtgcctttatatgcgagtatgactttctgcaagggggcatgtactatggttacacggcaggcgagtgcaaatagcgagggagcctttgagtttgtaggaacgcccctggtcaatgctgatggcgaggactatgaatataacctctataaaacagcgacctcacgctatgcacaaagcccaagcgctggttatgaactactccgctttggtcgaattatcaatactgagcatgaaaccttggtccctgctgatgcccccttatggatgacagtgaattatcctggtggaaaaggtgttgtaaacttggcagtagttacagtaaaaaagttcagcgatgcagattttcctcattgggcaggatggcaactggttgatgatgacaaagacgcttatagtcagtgcaattcagctacaataaggaaattgcaggcagagaacaaatatacagcacaaagcagcaggcttatctgttgttttccgtttgaatgggaaaaaagcactattgatgccaggtacacatggctaatgactggtctgccctgggagcagtgtacatcggaaaatacagccatatggcaggtgccgggaacaaaagaatcgaaagaccgtatcttgatgagtgaaaaggactatgacaggtttaaacagcatacagaagcattgtgttttgattcaggggacttgggtaaaggaaaagtatggcattttgacccgcgagggtttattgaacacttcagaaaatgtgggtggttgagcttatctgagatgacacaaacagttccaaataatgcattgagaaaaacaggcagggacagatatgcctgggaagcaataaatagtcggttgaacacaccgggatccgtactggttaatcatattaataatctgaacaacatgatgagaaaatactgcattaatactccttataggatctcatgttttttaggtaatgctgtacaagaaactcaatggctaagcacacttcatgaaagtggtggtagtaatttgtggtatgctccatggtatggacgtggattcctgcaactaactaatccagagaactatcttaactattttgaatatactgggacacctgtgcaagcatctctaaaaaatagtctggtagacgtatatgcttcaatagctgctcaacctcctgcacagaggactaatacaacattacaagaccgtcactttccaacactaccttctgagattattggatcgagagagagggttagtgagaacaactcatcgaacatatcggctgcagatagtgctggcttttattgggtgaaaaataagatggctaaatatgcagacatggaacatgtccttgaaagagtctcagttaattcaaatagtggagagaagtattattatagaagccctgcgttctggaaggctagtgcagcagttaatttacctggtaggataaacagcctttatagctcttcattaaatggatttgactcaagatgttgtgcatacggagttgcactggctattttaaccgaagataaatttccagatacttcagggaatttaactgttttatttcctgaagggtatacacagaggggaataatatga

SEQ ID NO: 392920 - DNA, 537 bp, Salmonella enterica
gtgtgcaacgaccagacggtgagggtgaagcatgaccggacggtgagcatcagccacgacgaggggctgtatgtcaaaaatgaccggaaggtgacggtggaagggaagcaggagcagagcacgaccggggaccatatcagcctggtgaaggggacgcacagcctggaggtgaagggggacctggcgcggaaggtgtcgggcgcgctggggataaaggtggaaggcgatatcgtgctggagagcagcagccggataagcctgaaggcgggcggttcgtttattgtcattcatgcaggcggggtggatatcatggggccgaaaatcagtctcaacagtggtggcagtccggggacaccggtaccgaccctgcaaccggcggtgctgagggagctggccgatgaagatgaagatgataatgcatcagagtcggataataacgaagactccggagatgttggtagtggtggagatggtgacttagaaaaacagtatgatcccgaaactgaagaccccatcataaagtttatgttttcataa

SEQ ID NO: 392921 - DNA, 882 bp, Salmonella enterica
atgcagcaatatatcggtattgatgtgggaggaactcacgtcaaatatggcgtgattaacagtgacggcgaagaattaacccatcatcaattcgatacgccagaggacgcctccacgtttacccgcaaatggcaggatgtggtggcgcgttgccaacaggactatgacattgcggcaatcggggtcagtttccccggccatattaatccccataacggtcatgcggcaaaagcgggcgcgttggcgtacctggatgacgtcaacctgatggagttgttcagcgggctgaccgatctgccgctggtcgtggagaacgacgcgaactgcgcggcgctgggcgaaatgtggcgaggcgccgggcagcattatgaaaatctggtctgtatcactattggaaccggcattggcggtgggattatcgtcggacgggaactgtaccgcggcgcgcatttccacgccggtgaattcggcgtcatgccggtcgggaacaatggcgaaagtatgcataaaatcgcgtcaaccagcggattaatggaatcatgccgccaggcgctggcgctgcctgccgaagagatgccgcctgcggatgtgatcttcgaacgaatggcgaccgatgttcatctgcgtgaggcagtcaatgactgggcgcgttatctgtcacgcggcgtttacagcgtgatctctatgtttgatcctggcgtggtgctgattggcggaggaataagcgaacaggaaaagctttacccgctcctgacgcggcatcttgaaacgtttgaaatgtgggaggcgctccaggtgccaattcagccctgccaactgggaaatcaggcgggcaggctgggcgccgtctggctggcgcaacaaaagctcaaccgaagctaa

SEQ ID NO: 392922 - DNA, 864 bp, Salmonella enterica
atggaatggtgcttagaaaatgcgcgctttcggatggtggtcagggagactggcgcggagctgtcgctgctttgggacaaacatcgccaacgtaactggatgtggcaaccccagcctggggtgtggaatagctcggcgacgcagttatttccggtggtagggcagttggttcacggcggattatggcaggatgcgcgctttttccctctttccgcgcacggttttctgcgccagcaaacgtttcgttgcctgtcgcatgatgccacccacctgcggcttgaggccagcgataacgatgccacgcgagaggtatggcctttcaaatggcggatttatcttgactggtcattagaggatgaggggctaaacgtggcctggacggtgtttaacgaagacgcgcaggcgtggggatactcgctgggctggcatccgggtttcgcgctgccggtagccagtgagcctggctggcaggtgcgattcaactctccttgccagggaccttttcccaccgttaaccgaacgctggagatccccaggacgcccgccacgttgacggtttttaagctccagccgcaggcgtttactgatggcgcggtctattttgcgccgggtgaggagagccaatgggcggtgtgttcgccccagggacacgagcagatcgtgttttccgccagctcgccctggctggcgctgtggggcgtgcctggcgcagatttgctgtgcgtcgaggcgttatccggaacgacggacgatccgcattttgatgggcaggtcgcccataaacgcggcattcaatggctgcgttcgggcgatcgccatcgccataggctctctgtcaggttcccggcagacaccggaccctaa

SEQ ID NO: 392923 - DNA, 1440 bp, Salmonella enterica
atgtctggctttaaaaaagactttctttgggggggcgctgtagccgcacatcaacttgagggaggctggaatgaaggaggtaaaggcgtcagtattgcagacgtaatgacagcgggcgcatatggcgttccgcgtgaggttaccgacggtattattgaggggcgtaactatccaaatcatgaggcgattgatttttatcattcttataaagaagatataaagttatttgcggagatgggttttaagtgttttcgtacttcaattgcctggacaaggattttcccgaatggggatgaaatagaacccaatgaggaagggttgcaattttatgatgatatgtttgacgaatgtctaaaatataatatcgagcctgtgattactttatctcattttgagatgccatatcaccttgtgacaaaatatggtgggtggcggaatcgtaaaatgatagagtttttttcgaggtttgcccgagtagtttttagtcgttaccgaactaaagtaaaatattggatgacttttaacgagattaataatcaagttaattttaatgaaagcttttgtccgtttactaattcaggtattatttattctgaacatgaagatcgctatgaacgtgagaaaatcatgtatcaggcggttcattatgaattagtcgccagcgcaatagcggtagatgttgggcatgctattaatcctgattttaaaattggttgtatgattgccatgtgccccatctatcctctgacgtgtgcccctgaagacatgatgatgtccgtcaaagcgatgcatcgtcgatattggttcactgatgtacatgctcgcggttattatcctgactatatgctaaattattttgataagcaaagatttaaccttgatataaccgagagcgatcttgatattcttcggttgggttgcgtggattatattgggttcagttactatatgtctttcgtcacaaaatacatggataataaccctgattataattatatcgaaccagaccatctggttaaaaacccatatattcaatcttctgattggggatggcaaatcgatgctccaggtctccgttattcacttaactggttctgggatcgttatcaattgcctatgttcatcgtagagaacggttttggtgccattgatactgttgaaagtgacggaaccattgatgaccaatatcgtatcgattatctttctgcgcatgtaggtgaaatgaaaaaagcagtcgttgaggatggtgtggatttaattggatacacgccatggggatgcattgaccttatttccgcaggaaccggggaaatgaagaaacggtatggtatgatttatgttgacaaagataatgacgggaatggcactcttaatcgcagccgtaaaaaatcattttattggtataaagaggtgatttctcaaaatgggaataatatttaa

SEQ ID NO: 392924 - DNA, 1530 bp, Salmonella enterica
ttgcagaaaacaaaaaatgagcttggtaaatataaatcaaagcttgcaaagctacaacagacccttaccagagataataattataataatatagctactactgcttcagattcatcacctattgccgaaaatataaaaaatgaaaatggtgagcgtagtcaatccacaaaaaatacacgggttaacggtacccagcaagttgctgtcatagagcatgatggaagcaataccaaagttgaaagtgtatctcttaaagatatcagtaagtttataaaagatgatatagggtttagttaccagggatacttccgtagtgggtggggaaccagcaatcaggggtcaccgaaaacctatgctgctggctcgttgggccgttttggtaatgaaatgagcggctggtttgatttaacgctaaatcaacgtgtctataatcaggatggtaaaacagcgaatgcgattgtgacttatgatggcaacgttggggaacagtataacgacgcatggtttggtgatagtgataatgaaaatattatgcagtttagcgatatttatctgacaacgcgtggctttttaccttttgctccggatgctgatttttgggttggtaaacataaactgccacagtatgaaattcagatgctggactggaaaacgttaactgcagatgttgctgctggggttggtatagaaaattgggcgttagggccaggtttgcttgatgcttcattaagtcgtgatgatgttgatgtatattctcgtgatttctcacacactactcaaatgaatacgaattctgttgatttacggtatcgtaatatccctttatgggaaaatggtacattgtcattaatggctaaatattcttcgccgaataagacagaccaacaagaggaaaatgagaataacgatagctattttgaaatgaaagacagctggatgttaacgtcaattcttcatcaaaatctggaaagggatgcgttcaatgagtttaccttgcaggttgcgaataactccttcgccagcagtttctccagtttctctgatgcgagcaataccatggcgcatgggcgttattattatggcgaccatacaaatggcattgcctggcgtttaatttcgcaaggcgaaatgtatcttagtgataacattattgtcgccaatgcgctggtatattctcacggtgaggatatatacagttatgaaagcggtgcacacaccgactttgatagtgtccgtaccgttatccgacccgcatggatttggaatacctggaaccaaacaggtgtggaaataggttggtttaagcaaaaaaataaaacgcaacaaggtattacgcttgaagagtcagcctataaaacaacgctctatcatgcttttaaagttggaaatagtatcttagggtcaaggccagaaatacgcttttatggcacctggattaatattctggataatgaactatccaattttaacttcaatgataacagcaaagatgagtttatggccggcgtacaggctgaagtctggtggtaa

SEQ ID NO: 392925 - DNA, 2052 bp, Salmonella enterica
atggtaactagtgtaggtaatccgactcccgtcataatatctaatctgcagacggaaaaccgagcgtcggcaacaaaattaggggctaatatatctgcagtaagtgagacttctgcaacattgctttcagatactgttaaaagtatgcaactggaggatttccctgggttgctcaggcagtcaagtatggaaaaattatttaattgtaataagaattctcaggcgctaaaggatattttttccaattcagaaaatgatggcgccaagcgcgcaatcgtaaggtttgctgaactttttaatacagcagcagaagcattcaatggatccccggtcgctactgaaatgctgaataaacttggcgaggaatataccgacaagattcttaaagacaaactgcaggcgaagtctacgtttgggccgtggacgcctgatacaggcaaagggaaggaaacgctcaaggcgatggaaaaaaagcttttaagcatcgtcaatgataattctggaaatgatcctgggtttttaatctcaacgtttattaataaacaggtaatgccctatatttcaaattgtattgaaagttattttaactgcgaactggacccttctactcgtaacgacctgacacaccttgtagataaagccgcaatgaaagcggtcgaggcacttaaagagtgccatataaagctgacagaagaacaaggtgcttgtataggaaaagaatcaaggcatattgaaactgccgctatgctgcctttgttgttgcgtaatattttcacacaaataccaaaagataaactgcccgatgctaaaattccggaacctgaggcggggccggtgcctgacggtgggaaaaagccagaaccagcgggtatcaacatcaatattaatattgatagcagtaaccgtagcgtggataacagtcagcatataaataatagccgcagccatgtcgataatagccagcataatatcgataatagcactaatgataatagccggaagacaactgataatagccgaacgtttattgataatagccagcagcactatgagtcacactatacgagtaccagcaataccgtaagtaatagccattcacatgtggactcgaatacgcatcaaacggagatgacgcacagcaaggggacgattgaccagggcgtcgcgggcaaaattgacgtcacggctcatgctaccgccgaggtgacgtccaatacgtcatcggaaagcaccggcggaaaaattgtcacgcctgaaaagggaataacgggtaagacggttgtttttgatcaagtcgatggcggaggcgataagatcattatcggcaagccggtgcaggccacggtacatgacgttgatgttaataaagagcaaagcctgacggcagagattgtgaatgtgaagccgcttgccagccaactagctggcgtcgagaatgttaaaaacaatacgttgcaatcagaaacggcggtcattacaggtaataaagccggtacgaccgataatgataatagccagacagataaggctggtccattttctggtttgaagtttaagcaaaatggtttcctctcagtaatgccaagcgttacgaatatgcattcaatgcatttcgacgctcgtgaggtgtttttgggagtggtacgtaaagccctggagccggatacctccacaccgtttcctgtacgcagagcatttgacggcttgcgtgcggaaatattgcccaatgactcaataaagagtgcagcgttgaaagcgcaatgcagcgatattaacagtcacccagaattgaaagcgaaaatggatacgcttaaagaggtcattactcatcatccacaaagagaaaaattggctgaggtggcgaagcagtttgccagagaggcgggtttgaccaggctgaaagcggaaactgattatgtgttaagtaatgtgctggacggcctcatcgaagacggcagctggcgtaaaggcccggcttttgagtcatacctgaataaaccaggcgtggaccaggttgtcactactgttgatggcctgcacatgcagcgttaa

SEQ ID NO: 392926 - DNA, 192 bp, Salmonella enterica
atgagacaacctctactattcgctataatccttgcagcgaacgtggtgttgagtaattatgcccacgtaaattatattgagaacgatattattattaaagatataggttatgacctgggcgcatttaccacttcatatactgcaggagacaatactggcgggtaccataataacgggtctatatggatataa

SEQ ID NO: 392927 - DNA, 261 bp, Salmonella enterica
atgtcccaagatagaacttttagttgcactttttgctttacaaatagaacctttggttttattgttagtttcatcgacaacaagcgcatcgttgtcaggtgtaaaacgttccgctggccggcgataaggcaaacgagggtgagaatgattgatttcgcacgtaaaccagctcgacagcaggccgtcccgctcaaccggattgaggttttaatccgccgcctctgctacctgctggcgcagaaaggagatccggatgcttaa

SEQ ID NO: 392928 - DNA, 726 bp, Salmonella enterica
atgaaagaagaactggactattcacgcggcgctaaaccattatatgcccagctacacgacattctgctggagaagttgaaaaccggcgaatacaaaaagaatgacgtactgcctaccgaagcggagtttgaagagatcttcggcgtcagccgcattacggcccgccgcgcgctggcggaactggccgcgaaagggctggtaaaacgccaggcggggattggcacgatggtgatcagcacttccgagaaacaggaagtcaaagctcgcgtgcggctggtggatgggcagcagcaacatccgattgaacgtaataacctgaagcttgagcaactattgccgccgcaggccgtgtccgaggcgtttggcgttgatgagtcgtgcccgctcacgctgctgacgcgcactatctatcgccagaatgagcagcccgcgcaggtgaactacatctggctgacgtcgcgcttacagccgctgacgctcgatgcgctgagcggcggtctgtacagcatgctggaacagaatgacgaaaatatcgatagcttccaggacgtgattaccgccgagttgccgacagaagaagattgccagattttgcacatttcgcccgccgaaccgctgctggtgaaaacgcgtaaaggctataatgaccgcggcgagctggttgagttcagcatcgccaaacatatcgccagctgttatcagtacattgttgagaacagccgctga

SEQ ID NO: 392929 - DNA, 1746 bp, Salmonella enterica
atgaaagcaattatgttgatgtttgattcgctcaacaaacgtctgttgtcagcttacgggagcgatcgcgccattacgccgaatttccagcgcttaaaagagcgcaccgtacggttcgataatttttatgtcggcagtatgccctgcatgcccgcccgccgtgagctgcataccgggcgctataactttcttcatcgcggctggtcgccgctggagccgttcgatgactccgtgccggaaatcctcaagaaaaacggaattcatacgcatctggtgaccgaccataaacactactggcgcgacggcggcgctacgtatcactcgcgttacagcacctatgagtttattcgtgggcaagaaggcgacgcgtggaaaggggtggttgataagccggaatatcgctatgagtccggcgagccggaggagatcaagcagcggcggatcgccagtcgggtgcagcaccagatcaacgtgcagtttatgcaaaatgaggacgatcaccatctggcgcggacgatcaacaaaggtctggaatttattgatattaaccacgccagcgataactggttcctacaactggagtgctttgatccgcatgaaccgttttttgtgccggaaaagtacctgaaaatgtacggtatcgacgacccgtcgcagtttgatggctggccgccgtactacttcgtgactgaaagcgcggaacgcaagagcgtgatccagaagtactacatggcgctgctgaccatggtggatgcccacgtgggcaaggtgcttgattacatggatcgctacgatctgtggcgcgatacgatgcttatcgtcaatacggatcacggttttctgcttggcgagcacgaatggtggggcaaaaatatcatgccgctgtataacgaagtggcgaataccccctgctttatctggcatccgcagtatggctgtgcgggcgaatcgcgccaggcgctggcgcagacgatcgatatcccggcaacgctgctcgacagctttggtctggacaagccgcaagatatgcagggtgtatcgctgctgccggtgctgcgtgacgatacgccagtacgcgaccatgtgctgtttggctatcatggctgccatatcaacattaccgatggccgctatgtttatatgcgcgcgccggttgagcagggcgttgacggcctgtatgaatatacgctaatgccgacgcgcattaaccgccgcttcacgccgcaggagcttcagggcataacgctgcatccgccgttcagtttcaccaaaggctgccaggtgctgaaagtgcccgccgagtcggtgatgacacgtgatgccgaccgttttggccaccgcttatacgatctgaccgacgacccgacgcagcaaacgcagtgtcacgatgaaaatgtagcgcggaagctgtgcgagcgcatgaaggcgatgatggcgcaaagcgacgcgcctgccgagctctatccgcgctatgcgctaaacgatgcccacgcgccgttactggggctggacccgcaccttctgccggagctggcggccttcacgccacaggttcgctatggcctctttgcactgctgcagcacctcgaaggaagcgggcaggttgagttggctactcggcttcagtccgcctgccgggcagactggacgaaagaaaatttgtgggcattcgtacagaatgagattcccgaggagcagcatcagagcgtgtattataagatggcgttagaaatgcgtcttgattaa

SEQ ID NO: 392930 - DNA, 1416 bp, Salmonella enterica
atgaactacaacatggtgggtgacgccatcgttaagcattgtggcgggctggcgaattttattcatgtgaccaactgtatgacccgcgtgcggatgacgatcgccgacccgtcgttggtcgatatgcccgcgctcaaaggtatcgaaggcatattgggcgtggtggaagatgacacgttgcaggtgattgtcgggccgggaaaatcatcgaaggtggcgacggtgatcaaccaacggctaaaaggcgcgcctgctgtggataccacattgagcggtgtcgagcaaaaggcgaaactggcgcgcgaaaaagcgaagaagcagacgcgtaccaaagttattctcaaacatattgcgaacatctttgtccccattttgcccgcacttattgcggccgggattctgatggggctgaacaacgtggtggtcaactcggcggcctcgtgggcaatgagccatcatattgccgccatcggcgatctgtcgccaacccaggtggtgctcgatcaacggcatctcttgggcgtcagccagttcctggacatcgtgtcaaaagcgctctttggctttctggctatttatgcgggcatcacctccgcgcgtgaatttgaaggtaacctgattctgggcggcctgctcggcgcgattaccattatgccgcaggtaacgacgctggggctgatccccggccagggtgggctgatcggcgtgatttttgccgtctggttgatgtgtctgctggaaaaacaggtgcggcgattcgtgccggatatcgtcgacgtggtggtgacgccaacggtcgtgctgctggtgatggctgctgcgcagctgtttatcatcatgcccgcggcgggcgtggtctccaacggtattctgcacgcacttaacggcctactggaacacggcggcattgcggcaggttttgtgctttcggcgctattcccgttcctgatttcgctgggactgcaccacggtctgttcccgattcaccttgagatgatcaacgccaccggtcacgcgccgctatttgctatccagattatgtctaacgccggcatggtaggagcggcgaccgcggttctgctgctgacccgcgacccggtgatgaaaaaaatcgccaagggtgcgatcccaacgtcgattctggcggtgggggaaccgacgattttcggcgtcaatattccggcggggtttgccttcatcacggggtcgatcggcgcggggtttggcggcgtgatgatcgtgctgctcggtgtctccaccaacggcgttggcgcggcggggctttcggcgctaccgctaattgccgacggcaaatatctgcaatatatcctggcatggctggtgggctgtgcggcggcctttgcgctgacgtatgtggtcggcaaggtacgtggttacgataaagaaatggcgtaa

SEQ ID NO: 392931 - DNA, 387 bp, Salmonella enterica
atgttaagtgtgtttattccttcatctgagagatgtgtttccagatgccgttatttattatcattcacgctaataaatttaatattttccattttaattgggattttagtgcagtttaactctgtaatactggcaattttattcacaattttattacattttctcgtaattaatttaagctgccagcgattcagagatagtggctttgaatatataaaattctatgtgtggggtacgcttgcaatctatattgcctccttcgtgataatggttgctgaagatttcgcttgcgatggctttggtatacctctttttctaatctggtattttgcaactttttctctgctacttctggcccccgcgaagtcgaattcactcaacaagtaa

SEQ ID NO: 392932 - DNA, 480 bp, Salmonella enterica
atgaaaaaattattactgttgatggcaattcctttttattctgtaggttcaataactccggatattgtaatacctgataattttagtaaaaatttatttaatcaaatcacaacaaataactatttagcggatacatcaggatgcaaggtaatttcattaaaaatgttttatcctcctgagcagaaacaatatccgcaatcggatgcttggctttgtttgtattctgttgatgttatccataacggatatgggccgggacaagccctgcctgaaaaggtctaccttgataaaaaaacaggtttatggaaaaagaaaaagtacactttaagcaaagaaagtacccagagttctctggaagtttatggcattaaaaacctgagcgagttgcagcctgtggaactgtataacattcagtccgtcaatgcccgtggctatgcggttatcgacaacaatattcccctgtgggaaagaaaggggtga

SEQ ID NO: 392933 - DNA, 822 bp, Salmonella enterica
atggccgggcggaatgattaccgctgggacgccatcatctaccgggacggcgccggtagcgtcgcggacaatatccgcacgcatatgaacaggactatgcagaaacacctgataactaccccgctgcgcattgcctgttttttggggaatggtattcaggaaacgacctggttggggacaatggaggaaggatactgctatacggaaacagacccgcgcacgcatcaggtcattcggtattacaatatctggtattacccgtggtacggacgcggcctgttacagctcactaatcctgaaaactacttcgagtatttcagtttcaggggaagatcctatcccgaaagtattaaaaacactctgcgcgatgaatacaatcgcctctattcacaccggaacctccgctacaccgacaatcatctgtcagatactgaaaaccacgtccctgaaaatattatccggtggcggaataacgtcagtagcgaccttcatgaggcggccagcagcgccggtttttactgggtggcaagggatatggcgccgtacgccgataatgaacatgaactggagcggtgcagcattaacaccaggggtaacgggataaagatttactatcgcagcctggccttctggcaggccagtgccgccgttaacctgccaggacagatccgcaacaggcggtatcagggcctgaatggttttgatgcacgctgctgtgtctatggcagtgcgatagccgtccttactgagcagaaattcctggacagcaataacacccctgtcaacgaaaaacccgaatcagaccagctaaggagaggatga

SEQ ID NO: 392934 - DNA, 282 bp, Salmonella enterica
atgataatcagtccaccgtttatccgtattcaaaacgccggagagcgtgacgcgtcatgggtgaacagaatgatgcccgtggacagtcggcgtggtttcccgctcaatgcgcgcgcctcctggcatggtggtgtacacgtcactcataccgatacgatcagccagcccgagatggttcgggcgattgctgatggtgaggtgatctcttttcgcgcaccgtcctccactgagcgtcgcgatgcctttccgctgaattgcgttaaggatggccgggcggaatga

SEQ ID NO: 392935 - DNA, 1104 bp, Salmonella enterica
atgaacagagttctattatttccaattttaattttctttattacacctccacttttcgctgatcaactacacagccagcatgatgtagagtctgacaattctgcattgacattacttcataataccctggcagagatgcttcaaaacgaaccagggcaagagctggaaaagatagcagataaatttccattaacaaactacactgactttacaatcaatactgaaacatcaataaaaacaatcaaaaagccttccgctaaaattagtaatgatgaatggcaggcttttatcaacacagccttcagtgctgactcggaaaatggagaggttaattgcaaacttgttgatcttgatggtgacggagagcgagatctcattattagtagctactcaggaggaactggattatttagttacacaggggtcctaaaacggattggtgacaaatttttcgatataaataacaatgctgaaaatgacactcagactataacaggtgctctatattcagaaaatggacgcggggccaatcagtgggggcagtgggttcgcattaatgaccaagtctatgcactttggtttaatggtgaatatgatgaagatactttttatttgttgcggccatttaatacagacaataaaataccgagtataaccatttattatcagtacgaatacgataactcctcgattgaaccgcaagacgaaggaaaacagttaaatccagcattaaacgatcgtgacaaaaaacagttaattaaatcgctcaattctaagaagtattacttcaataagcaaaaagaagaacaggaacaagagcctgtttgcccaatcccagcaggtacatcatctgaagatgcagcgcattatagaactgaaattgctggaagttatgtcactcaacctgtcgcagttatccctgtttggttgaacgggacgtgtttcattggttctgttgaaagctattttggtcgtggtgagctaatgactattagttcaccgaaagatttgaatatacttggcacttactcgattacggggttacgccatttaaaatcaataaaaagtggatggaaatccagagaggaaaacattcccttataa

SEQ ID NO: 392936 - DNA, 2199 bp, Salmonella enterica
atgataatcagtccaccgtttatccgtattcaaaacgccggagagcgtgacgcgtcatgggtgaacagaatgatgcccgtggacagtcggcgtagtttcccgctcaatgcgcgcgcctcctggcatggtggtgtacacgtcactcataccgatacgatcagccagcccgagatggttcgggcgattgctgatggtgaggtggtctcttttcgcgcaccgtcctccaccgagcgtcgcgatgcctttccgctgaattacaatggtagaaccgatgatgggtatgtattgctgaagcataagaccgatattggggaaaactgtaacgtcgtgtattactccctgtatatgcacctcatgggccagctggccccctccatcagggacggagccagaatttggcgcaaggaccccatcgggcagagcggtatggtggataacgtgaatgcctttcactttcaggtgttttgtgacaacgaaaacatgctgaaactgaccggacgcaccacgcccgaactcgatatatcccgtgacggcagaactgataccgtttacggcgatatccatttttatcttccccccggcacaggattttacgaatctgtacctgacgccacttcaccggatacggaccgcctgaatcccgttcataccagtaccgaaccactgttcgtcagcatggcctttgaaaaaggcgactgtatgatggtcacccgcagacagaacaccaccacagaggcacgtttcgacatggtgggggagccgctggtgaatgccgatgctgaccagcttgataatggccaagatactgtgctgaagtatgagtacaacctgtacaatacggctaaacgtctgtacccccagaacccatcagctgggtttgaattgcttcgtttcgggcgggtaattaataccgaatatgaaacccttgcgcctgctgatgccccgctgtggtgtactgtcagcttccccggcggaacgggtatggtcaatctggcttcttctgatatcaaaaaattcagcgatgccgactttccgcactggacgggctggcggatggtggacgatgacactgacaataacagccagtgtaattccccccttatcgccggattgcaggaaagcgaatgcttcggcgacctgagtagccgcctggtctgtcattttccgctcgaatggaatgccgccacttttgaccagcgctatgcctggctcaaaacgggctctgacgatgttccagccatgtcggaagaggactacgaacgactgaaaagtcatgcctcagcgctgtgttttgacacgggcgaacacggcaccggtcggttatggcatttccatccgacggcttttattgcccatttccgcaagtgctgttggataagtaagcaggagctaaaacaacttatccccctgaacgtgataagaatggctcgtcgtaatagttatctctgggaaccaatagcctatagagatgctactggaagtatggctgatagtattcgtattcatctgaataagggaatgcaaaaatatctgattaatacacctctgcgtattgcctgcttccttgggaatgccatacaggaaacgcagtggttatcccaaagagaagaggttggaagccggcaagtttggtattatccatggcatgggcgtgggttattgcaactaactagcccaagcaactactttgattactttagttttcgtggcctccaatacactaatgatataaaaaatagattatctgcagaatacaatcgtctgtatgcaaacagaaatatcagacaaacagacaatcatctgtcagatacagaaaatgatattccttatgatattatcacgtggagaagtaacgttagtggtaacgatcatgacgtcgttgacagtgccggtttttattggatttcggcttatatggcttatcattcagatgcagaacatgagcttgaaagatgtagcgtaaatacaaattccagagtaaaagtatactaccgcagtcctgccttctggaaggccagtgcttcagttaatctacccggcagaataaacactctatactcaactgccctcaatggattcaatgatcgctgctgcgtatacggcagtgctatttcagtactcactgagcaaaaattcccagataacaatggcaatgcaatagtcgaaaaacctgaatcaaaccagttaaggagagggtaa

SEQ ID NO: 392937 - DNA, 177 bp, Salmonella enterica
atgcccacagctgctcgacttaacgataaaggcactcagcacgacggttattgcgagaccgtgattattgcaggttctcccacggtatttattgacggcctgccagccgccagaaccggtgatgcggtggactgcggcggggtggttatcggcagcagtacggtgaatatcggctga

SEQ ID NO: 392938 - DNA, 1389 bp, Salmonella enterica
atgagtttcaactcaactccgaaggagctaattgaacaaaatatcaatggattgctatctatccatgatagttggcagcgtattcctatggatgcgatagccaaaatcactaatggctttgcatttaaatcatctgaattcaatacaaataaagatggcttaccgttaattagaatccgtgacgtgctaaagggtaatacatccacttattactctggcccagtaccagaaggatattgggtgaacccggaggatttaatcgtcggaatggatggcgattttaatacaacaatatggcgctcagaacctgctttattaaatcagcgggtatgcaaaatcgatatagatgaagataaatatagtaagagatttttcttccacaccttaccaggatatttatctgctattaatgaaaacacatcgtcagtaacagttaagcatctttcatccagaacactacaagagactttattccctttaccatcgcttgctgaacaaaaaatcatcgccgaaaaactcgatacgctgctggcgcaggtagacagcaccaaagcacgtcttgagcaaatcccgcaaatcctgaaacgttttcgtcaggcggtactggctgctgcggtaagcgggcgattaacaaaagagtggcgagaaaagaatcaagactcaatttcctcaggtgaatggcagctgtttgcattatccgaacttggggttttgtctagaggaagatcgaaacatcgccctcgaaatgatccccgtttatttggtgaaacatatccatttattcaaacaggtgaggttgcaaatagttcaggaaggataaaaacggccacaaaattttatagtgagtatggtttatctcagagtaaactatttcctcaaggaaccctttgcattactatcgcggccaatatagccgatacagccatactggacattgatgcttgtttcccagacagtgtagtcggatttattcctaaaaaaaacaaatctcatgttttatttattaaatatgtaattgatgctaataaagaagatcttgaagcatatgcaccagcaacggcgcaaaaaaatattaatttaaaggtgctcaacgatctaagatttcccatgccagatatcgaagaacaacacgaaatcgtccgccgcgtcgaacaactcttcgcctacgccgacaccatcgaaaaacatgtcaacaacgccctgacccgcgtcaacagcctcacccagtcaatcctggcgaaggccttccgcggcgagcttaccgcccagtggcgtgcggaaaacccggatctgatcagcggtgaaaacagcgctgccgcgctgctggaaaaaatcaaggccgaacgcgccgccagcgggggtaaaaaaacctcgcgtaaaaagtcctga

SEQ ID NO: 392939 - DNA, 609 bp, Salmonella enterica
atgcttaaacgtctggcttacctgatagcaggcagcgctctccttcttctggcggcggcgatgttctggtgcgtcaaccgcctgaataccctgacgctggcgcagcaacagacacaacaccagatagtggaatggcgcggccagtcacagcaaaacgacgattaccaccagctacaggccaccgtaaaaaatactaccaaccgcacagaagcccttgccagacagcttgccgatgccaccagcgctcaggccgaacgacttcaccccatcaacgaagagctcaaagaacttgcgggacaaatccagaccctgagcgccagttatcaacacctgcaacaacagaccgccacgcgcagccgcgcaaaggcaaaacaccccgtcccatctccgctttgggccgcaaaggcctctttttctcttatcagcagcgagtttcgcgccgggcggcagttcgccgtcatcgcgccatccggctatcgctcgctctcacagcttcaacttgtggctcccggcgacagcgtgcagggctggcaactgctgcaactggacggcagtcatgccactttccgtaaaggcgggcagcggctgacgctgaacgccggaggataa

SEQ ID NO: 392940 - DNA, 681 bp, Salmonella enterica
atgtccgaccatgcgccaaaacccgtgcgtcaccccggactgctcggctggctcgcattgttgcccggcgtgctggctggcttttgcctcagcgcatggatgctggcgatagcgctggagtggctgggcgacgcgtttttctggcggaacgcctgcgccagccacagtgaacagatattacaggcgacatggcagtggtggaaaagctctgctggcgcaccagtgtggttagtagaagatctggcgattgtcagcgatacattgcagcaagggattgcggcgctggttcattcgctaaacgggcaaagtgggttgttctggacggaaaccgtcacttcgatgatccgctgcgcattgctgtcttcggaaaatatcaccctcacctttctgctgcggctggcgattctgttgcaggcgctaccgctgtttgcgctgattatcgtcgtcgggcttattgacgggctggtaagacgcgacttacggcgattcggcgcaggccatgagtccgggtttgtttatcaccatgccaggcgtatgatcgcctccagcttggcggcaacggggttagtgtggctggcggtgccggtttttcttgaggcgggatacatattggttccaggagcattactcatcggattggcgatatctttgactcttggagagtttaaaaaatatttatga

SEQ ID NO: 392941 - DNA, 1779 bp, Salmonella enterica
atggccgatataattaaaattttagacgcattcctgcaatcagataataaagtattagtaattaaaggtgattggggtgtaggaaaaacctttctttggaataaatattataatgaaaacaaaaacaatttaaaccaagtagcttattcatacatatctttatttggaaaaaactctttacctgaccttaaaaaagatgtttttcattctgctacagctataaagaaggataaagtagagtcatcattcatccatcaaactgaagtagctagcggcatctactcgtatataccatggctgaatccaaaagaagaaaccgtacataaaattccatttctgaaaccatttatgaagtatgcggataacattccattattatttaaagcaacaaatgcaatagcgaacttggaatattcacttatcaacaactatctaatatgttttgatgatttagaaaggcgagggaatgttctttccataaaagaaatcatggggtttattgatgagctagctcagcgtaaaaactgcaagattgtattaatattcaatgaagagtctttagataatgaaagtgacaggcatacatttaattcctacagagaaaaaatcgttgattttgaattaaaatacaacccatctgtagagaaaaactttaaccacatatttttcaaaaatgatattgaatatgaacatatattatacctattaaataaattctcgatcaaaaacatcagattcttaaggaaacttaggcagcttttgctgacctttgacaaacatttaaaaggtgcagatacatacgtaaaaaacgagtttgtttcccatgcttttatattgtgttatggatattatctcaatatagatggattaccctatgaacaattaaaaattaatttacgtgatggaccatggttctctctttcaacgcaggaagatgaccaagatactacagcagataaggcatttcgcaatcttagaaatactatacccattcaaccttccgaacttgacgagaacatagacttttatatacaaaatggatatttgagtaatgagactgatttatctaacctaataaaaagaaaaaatcgtgaaattgaattacacagactaaatagaaaaatatcggatatctggagcatgtaccatgagtcacttaacgacaatgaagtgcaatttattgaaaaactgaagaacgtaattgaagatgaatcaaagaacatctcactaagcgaatttgatgagatcatatgtacactcaaagattttgaaattgattgcatctcatatattgatacatacttttcggaaatacataataagatcaactttacagataagagactcacatataggctacgaaaaattcgtgacaatgatattaaatctaggttaaatgaacagataaagttaatcagaagttctgaatgcaatatttcagcaatagccaaaaaactatctgagagtaattcatttaacccagaagatattcattacttaagttcattgtcagtaaatgactttgttatatggatgaagggacgaggtaatggtgtagttgacgagatccgagaagggttatttatgttacaaggaatacagggtgacaattcagtacatgaacagataatccagaaagttaaagaagcattaattatgattgcctcagaaagcaaaataaattaccttcgcgttaaaaatatttttaacattgatattcttgaatataacgatactaagaaaaatgctggaaatgttgatgacacaataaacaattaa

SEQ ID NO: 392942 - DNA, 318 bp, Salmonella enterica
atgatgaatagaatgttcctctttaacatcatattgttgtcactaccaacgtttaccttcgccgcccccctcaccgagcgcgaagagctaaccctgtccctcaaccagcttacccaaatcgaagcctcgcttcaccgcgcccagcaaagcgccagaactggcctcaacgagcgctactacttcgactacccacgcatccacggcgatatcaccacgctgcgtagtgggattgaacattacctcacccccgctcgcgcccagccgcgagatacggcaacgctggtcgggcagtaccgtgaggagaaaaccacgccatga

SEQ ID NO: 392943 - DNA, 696 bp, Salmonella enterica
atgtctagagaactaaaaaatgacttcgatgagttagttacttatttctctgaatataaattgaaaaacgtattcgagaatgaaaactcaagaggcaaaataagcatgatacataagagatattattcttttatgtgccttgtgtattgtttgtatcatttttccaaggagaaaatagactccagttcaatggagcgattgcaagaggcttcatctgaccttggtaccactatgtttatggttataaatggtgcatataaaccagcaaacctaatgatgcgtagttgtattgagaatttcttgaaatcaataggttgtttgctagacctctcaatacttgaagaaaaatccttgtataaggtaattgaacgtactggggagcatcctgtcttcaaaaaaaatccgttactatatgaagccttgaaagctgagtattcttcgttatgcagtcatgtacatacagctactgtaaaagaaatggctcatataaaagctttaaatgtttttcctgaaatcgacttggttaaaatagatagtctttcgaaggtgattgataaggtgattaagactatgatatcaattatcataatactgttttctgatattttcttttcctttgcgcctgagtatcgggaaaaaatcctccttagcttaactcctgcacaaagagcctcacttcattccttaagtgattaa

SEQ ID NO: 392944 - DNA, 195 bp, Salmonella enterica
atgatcggtattattgtgtgtgacgttcacgagaaaaactcatctgatttaggtaaagcctataatgttatcaactcaatgtcaaataaccctctagttttgagtagaataaaagagagaaagaacctttctagcgctcaaaatgagacatatgactggaatgaagttataaaagatatattcaataaggactaa

SEQ ID NO: 392945 - DNA, 150 bp, Salmonella enterica
atgacctttcaattcagtaaacgcagtgagaagagcctcgcaggcgtgaatgctgatctaatttcactggcacgcgtggcgctttcgctccggtcgaggctgcaaagttctgcggcgatgtggacgtgtctgatgctctggctaatgtag

SEQ ID NO: 392946 - DNA, 453 bp, Salmonella enterica
atgaaagccctaatcattttcggcctgttaatctgcccctccgcttttgcaggcgtgccccctgacggacccgaggtggccgccctcaaattcaatcactggtatatgtcccagctcgcacaggacaaaaaccctctggcagactatgaagggcttcgtccctacgtcacatcaaacacaatcaccgccctaaaaaaatcaaactcagcagaccctaacatcgaggacgcccctgacgccgatatgtttataaaagcgcagggttgggatgatgactggcagcagattgagatcgtgtcatcagactatgatccagtctgtatgcaaatctacgtttcgttcggtgtaaagcggaaacacaccgttattgactgcatggtgaaagaggacggggcctggaaggtccagtctgttgctggtcaggcgattctacggaacgtgagcctgaaataa

SEQ ID NO: 392947 - DNA, 474 bp, Salmonella enterica
ttgcgcccctccgaactgtgcgcgctgcgctggtcggatattgatttcgtcgacagcaccgcgcacatacagaccgccagtgtcgtaggtgtgataaaggggaccaagacaaaggccggcaccaggaaagtgaagctgaatagcgaggcgctgctggcgctggaagatcaaaagccgtttaccagcctgaaaagtgattttattttcagtgatccaaaaactggcggcccgtgggcaaacgctgatgctatacgtaaaaaggcgtgggtgccgacactgaaaaaggcgggggtgcgatatcgcaacccctaccagatacggcacaccttcgccacgcggcatattagccagggcgttaaccttttctggctggcgggccagatggggcataaggggccggaaatgctattcagatactacggatcatgcctcgctgagtacgactggaaaacagctattttgtcagcgcaatga

SEQ ID NO: 392948 - DNA, 630 bp, Salmonella enterica
atgccaacaaaagataatgatccactactgagtcagttggacaccattgcgaaagggctgagtgataccttttcacctttttgcgaagtagtggtgcatgacctgaaaaatccagaacatgcaatcctgtctattcacaataatctctcgggccgaaaacaaggccagccggcaaccgaactcggtctggccagaatagcatctccggattttccgaacatcattgccaattacggcaatcagtttgcggatggaaggccagtgaaaagcacctctattggtatcaaagacagcgatggtaattatgttgccgcattatgccttaatgtggacatgacactgttccgcgggatgcaaagcgcgctggctcggtttactgaaacagaaagttcatcggtacatgaacatattgatccaggaggaacagagaccattcgacagcgcatagatagtttcgccgctgctcgcgccactacggcccgggcgcttaaaacagctgacagaaaagaactgatcattgcgcttcgcaaagaaggtctgctgaatcttcgcaaatccatggatactgtggcccagcatcttggcgtttcacgggcaactgcttatctgtatgctcgacagcctgactaa

SEQ ID NO: 392949 - DNA, 966 bp, Salmonella enterica
atgtctgaattaatacttcctgagtacagtgatattgcggcagctgccgagcgtattgacggctatgcaaataagactccggtaatgacttcccgcaccatcaatgaggaattcggtgctgaagtttttttcaaatgtgaaaacttccagaggatgggcgcattcaaattcaggggagccatgaatgcgttgcgtcagttcacccctgaacagcgtgctgcgggcgtggttgcattctcttccggcaatcatgctcaggctatagcgctttcggcaaaactactgggtattccggccaccattgttatgccacatgatgcgccagctgccaaagttgcagcaacaaaaggttacggcggcaatgttgtggtttacgaccgttataccgaagaccgtgaacagattggacgcgatctggctgaaaagcacaatctgaccctgatcccaccttatgatcatccacacgtgattgctggtcaggggacggcggcgaaagaactgatcgaagaagttggttcacttgatgtgctcttcgtctgtctgggtggcggcggtctgctctccggctcagcgcttgctgtacgccatctctcgccagagtgcgtgatctatggcgtagaaccggaggcaggtaatgatggccagcaatcattccaaaaaggggaaattgtgcatattgatacccctaaaacaatcgcagacggcgcgcagacccagcatctggggcactatacctttccgctcattcagaagtatgtaaatgacattctcactgtttcggacagtgagttagtcgcgtcaatgaagtttatggctgaacggatgaaaatcgttgttgaaccgaccggctgtctgggctttgctgcagcccgggcgaggaagtctgagctagtcggtaagaaaatcggagttattatcagtggcggaaatgtcgatatcagtcgttacagcgagcttctggcttag

SEQ ID NO: 392950 - DNA, 390 bp, Salmonella enterica
atgcagccagaaattgtacttaattgcaggactgaaagttttccgccagccggtcattattcacatactgccaccgcaggaggatttgtgttcgtttcaggacagcttcctgtaaccataacgggtgaaaaaaaatctgacgcgccatttgaagagcaagctcgactagtacttgaaaatgttgacgcttgtcttgcgggggccggagtaagccgccagcaacttgtctccgttcgtgtttatgtaacggatatcagcctttggccagttttcaataaagtctatgccgagtggattggtgagttccgtccatcacgtgctgttgcaggtgtgtcagaactgcactacggatctgctgtagaggttgaagccatagcactggcgctctaa

SEQ ID NO: 392951 - DNA, 318 bp, Salmonella enterica
atgcctggatgtataagtgcctgttcgtgcgttgccagcccgacgcctcccgagcctcaggccccccccgcgcctaaatgggtagagttaaaaggttatcacatttcatgtactcatcagcctgatattcgtccactgaatgaaagggagggcagactacagagaaaagtgcaggcgattgaattttattggttgcgacggctcctcgataatttcgaaacacaagaaggtacttctcaaaacaccgatgtaaaatccaataactgtgggttgccatttttcccggtagaatcgggagaacgagaaaccgatgtttga

SEQ ID NO: 392952 - DNA, 1026 bp, Salmonella enterica
atgaaaaaattacctttcctgctcgccagcagtttgatgctgggcggaatgaccgccacaacttttgcaggcgaactacccggctataccgacggcgcacagttaatccgcgtagagaaaagccgcggacaaatcgatgcgattaacgatctggtttacagccagatcgcttccgccaccgccgttcggcaattacatatgtcacttctggtgccgcgcaacaacaacctgaaaccggcgatcgtctactttcccggcggcggctttaccagcgccgcatggaacaaatatatccagatgcgcatggcgttagcggatgcggggtttgtggtcgcagcggcggaatatcgtaccgttcctgataagttccccgcgctggtcattgacggcaaagccgccattcgctatctgcgcgaacatgcgcagcaatatggcatcgatccgcaacgtatcggcgttatgggagattcagccggtggttatatggcgcaaatgatggcattaaccaatggcgaacacgcatttgatcaggggagttttctttcccgttcctcggatgtccaggccgccgttactctgtatggaatttccgatctgcgcaatattggcgaaggttttcccactgcgattcagaaagtacatgcctcccctgccgtcaccgaagcgctgctggtacacggcagcgcttttcgcgactggcccggcgcaaccatcaccagtgacaatactaaagcgctggccgccagcccgatggggcatctgaaagggcaaaaaccgccgttcctgattatgcatggcagcgccgatacgctggtctcgcctgtacaaagtgagcagttatataaggcgttaaaaaaacagggtaatcaggtagattatctcttgctggaaggcgcagggcatggcgatatctactggtatcagaagccggtgatcgatcgtgtcgtgaactggtttaaagcgacgttagggacgccgcagaaagcaggcggcgacaccgtaaaagataaaaacgctaatctttaa

SEQ ID NO: 392953 - DNA, 486 bp, Salmonella enterica
atgtgtgaccttgttcctggtcagaaaaacggaaatagtttactccctgttacgctcgtgaaaatgtatgatgcgaaagttgctttaaataatacacgtaaaaatatgcaaagcgagcttaaactacccaatttgccagaaatcaacgaagatgaatcaattagacaaatactaaattattccacacagaataatctattgttcgttcagtctgaacatgacggaaaaatacatattcttagtttcaccgttggactcgatggcaaggcaaatcctaaagcaatggattgctatgtggaaaatcaaggtattttctctgaagataaaataatagcactaaaatatgccaagcccactgaaaatgaaatgaacataatatccgtagaagcaaaaatagttgctgaattacgctacgaatatgctttgaatttattaggtagactcggtgtatcaaaatctcgagtcggattagattttatcaactaa

SEQ ID NO: 392954 - DNA, 960 bp, Salmonella enterica
atgcccgttacgttaaactttggtaatcgtcatggttatgaagttaatcattcacggatagcccgtttaatgagttctgacaaacaagaagcgttatacatggggctatgggatagatttaaggactgcttcagaacacacaaaaaaaaagaggtgctggaggtattatatacactcatccatggatgtgaacgtgaaaatcaagctgaacttaatgttgatataaccggcatggagaagatacatgcctttgtacaattaaaagaatatgctaatccatcgcaacaagaccgctttgttatgcgttttgatctgagtcagacacaagttttatttgagattgatggcaaggttattgagaaatgtaatttgtatcgtctcctcaacgtttcagaaaactgtatttttaaagtgatggaagaagatgaagaagagttgttttttaaaatatgtattaagtatggagaaaaaattgctcgctatccagaactattacaagaccttgcttttaaacttagacaggaagttaatgaggatgatgaaattaaggatgaagtttataagcttatgcgatctggagaagatcgaaaaatggaatgtgttgaatggaatggtacgcttactgaggaggagataaataaactacgctgtcttcaaatggggtcttttaatattattacccaattttttaaaataggttactgggaattagagggtgaggtcctgtttgatatgttgcatccaacacttctctatctgctacaaggatatacaccgacattgtcatgtaattttacagaagctaacacaatactgttatctgatatattaaaaaaggatgatgatgattatcacaataataaaagagaaattgattctattctgagtagaatatatagatcacataataacactttatttataagtgaaaattctagttgtcgcaatatgcttatataa

SEQ ID NO: 392955 - DNA, 219 bp, Salmonella enterica
atggttacgattccattcgttaaaatattatatctcacaaaagaaaatttggcaccgttggcgcctgtccaaaaaaggataaataagcataacgctaaggaactataccagaatgaaagacgtacaaccgcagacaacgcaggcactcctcccgtcaccggccaatcaaggaatatccttttagggattatcaataataaaaagcaatataatttctga

SEQ ID NO: 392956 - DNA, 315 bp, Salmonella enterica
ttgctaatattgattagcaatgatgatcctgacggtgtttccgataccaaagttatttctaatggtaaaatatattttaaaggagaaaatattataaactttgatgtttcattcattatgacgttaaatggtggagtacatacggatactgtgacgtatatatcaaaagaaaataaaactgtcggagggtatttttataataatgagaatgacgccgataaacctaaagaagtttatatttcaacaacaggaagagtatttcacatagatcttgaaagtataaacaatgataaatgtcttgataaatttaagtaa

SEQ ID NO: 392957 - DNA, 642 bp, Salmonella enterica
atgtataatccgaaattatctgtatttaagactcgttgtgttcatataaatttatttacatacctggttatgtgtgcgctgatagtccccattatagcatcggcaaatacggaaacttatttttgtgatggcagtactaactccgagttaagatataatacagttattgtaaagaaatatgaaaatgggaatcttgcatcaatccaggaagttaagaataaaaaatttaatgggctatatgaatcttggtggaaaaatggtaatcgccgtgctcaggggaggtttaaaaatgggcgtgaggatggtgatttttttgcatggtatagaaacgggcgtaaatatttttcagggagcatgagggacggtaaaccggacgggacgttcaatacttggtttgccgatggtaaaatacgcaatcaaggaatctttcttagtggtaaacgtataggtcaatggaaatcatggtataattctggtcagcaatcatcgatagtaaattttgaagtggataaaattcttgaatgttcattctggaataatgcaggggaaatcgtttatcaagggaaagatacgaaacgatgtaatgatatatatactggctattacaacacttattctttagagtcagatgagccaggttaa

SEQ ID NO: 392958 - DNA, 231 bp, Salmonella enterica
atgtttggtgtgctgtacaccaaattatttattcaaaataacagacacataaatatgcctatcgcaggccgacttaacgataaaggcacccggcacgatggttactacgagaccgtgattcttgcgggttcgcccacggtatttatcgacggcctgcccgccgccagaaccggtgatgcggtggactgtggcggggtggttactggcagcggtacggtaaatacaggctga

SEQ ID NO: 392959 - DNA, 480 bp, Salmonella enterica
atgtccttaaaaggtttacgtttcacgctggaggttgacggtcaggagccggacacctttgcggtggtgagtttccggttaattcagcgccagtcgactccgtttgtactgagcgtgaacgtggccagcgactcgttcatgcagacggcagagatgctgctggagaaaaaggcggtgctgacatctggcaggggatattgcgcagcgttacgtgaccggcgtggtggcgggattcgggacgcaggagaacaacgggtggcagatgggctaccagatgcgtatccggccgccgctgtggcggtgcggcctgcgacagaatttccgcattttccagcagcaggacattcagacgatatcggcgacgttactgaacgagaacggggtggacgccgctgttttatgaagaccacccggcgcgtgagttctgcgtgcagtacggggagagtgacctggcgataccgcgggtgggtcaggaggtga

SEQ ID NO: 392960 - DNA, 1371 bp, Salmonella enterica
atgtgggacgtgaataaggccatcgaacatttaaatagtcatgcagagcaggaatctgttggatattgcgcgaggtatgttaaaaacgcaatcagtgccgggggagatatcagcccatggccttcggtacagggtgcaaaagattatggcgatgcattgctgcatagaggatttcaggttatctcgcttgagagtggttttatttctggtgatgtagtaattattcaagggattaggaaagctgattttccagcaggtgaaataacaagagatcacccttatggccatatggccatgtttaatgggcagcaatgggtttcagattttaaacaaaataatggttattaccctggtggtgattaccgaaaagcaaagcctgcatgtgtcttttatagacataaagatgccactggtgacggatcgcagagtaccaatgtaaccggtggaaaattgaaaatcagttaccccatcagggataaggacggaaaagagtttcgttccctggatgagataatgcgtctggttgatgcagaagcacacggcacctggctgctgggagggaacggactgtggcacggtgcagtgcatatcagtgaggtatctaatccgcgctcggccctcacgccggatacgctcagcgccggaaatccggtacctctccagtttatggccgatggcagcattgtggcgtaccggatcaacaatgactatctgacaggcccttataaagggcaggaactgcgttacagcagcacgtttgtgctggtgaaatcacggtgtcagcctgacccgcaaaaagaaaaaagctggctggaattttacagtctgtatatgcatctggcaccggtgaaagattatccggcttccccctgctataaggtcagggacggacacagcgggattcagctgcgtgaatacactgacggacagtatggccttccggacggtcaggagacgggggatacgcgacggtataaggccctacggagtaccggtaaaagtctcagcgagaaagcgcgctttgtgtcgtcacgtaccgggcgtttttacgtgataaaaaacggcgaggctaccctgaccacgttcgggctggtgcgtcagctggagggggaaacggcaggtaataagcagtactgggtgacgctggacccggcactgatggagccggacggtgaaatccaggcgctgatgcccgcatggatgcagaaagcgaaggaaaggggcgtttttaactcggtacaggcaggggggaaacagacgaatggaaggtcagtgccggaacacctgtcggatttatgggatatgaggaataccccggcagggagagcggccaggttgaggaggaatggtttgtccaccttgaggttctga

SEQ ID NO: 392961 - DNA, 465 bp, Salmonella enterica
  misc_feature (148)..(157): n is a, c, g, or t
atgatcctgacactttcaatgaagaggctggtaggcttatatatgaaaaattatttaatggaaaattttgaaaaaattaatgtaatcttaattacattacttatttttatacttttgattctaatttttatgtcatatgttattaacnnnnnnnnnncactatatgagaataaatttggttgtcttcctcaaacagcaagaatggcaaaaggagctagtttaatcggttcacctgctgtatatcatgcaaagatcggttttattatggggagcttaatttatccctataatagagttacaaatcatgatatgagtatcgaggcatataattttatcagaaacttaccgggggaattaacaataggttttaaagttgaagcggtattttggttgctaggttttatggtatttgcttgttttgtatttcttaatatattttggggtcctgatatttttagtttttaa

SEQ ID NO: 392962 - DNA, 177 bp, Salmonella enterica
atgaagcgtattgtgaagttttttctactcatgttgctgagcatcatagtgaatatggttgcagcgccagcgatggcatataactgtatttcgtctggagcgtcaggtgaggactatgaagtacaatgccatatgttttggttatgtggcgagtttgcttactggacatgtttttag

SEQ ID NO: 392963 - DNA, 192 bp, Salmonella enterica
atggaacgtaattggcattttttattcaacgaaaagttaaccattcttaataataatgcgttttatctggaaaaagactgttttatcgagtattcaatatttgcgtccgttattatttttctggaatgtaaattctctctcaacgccggtaatatttatgttggaattgtggtgttgattctattcttatga

SEQ ID NO: 392964 - DNA, 264 bp, Salmonella enterica
atgaaacatcatgcttttatgctctggtcattaattattttttcactccctgttttggccagttcagaccattttcctggtttacaacaggcatcatgggaaatttttatctacgattttggtagtaaaaccccgcaaccacctacaaataccgataaaaagcaagccaggcagattagttcaccgtcctgctcgacgacaaaacccatggtgcccgcaccaaccaacggcgctaaaaaagggaatactttttccagaacataa

SEQ ID NO: 392965 - DNA, 2079 bp, Salmonella enterica
atgcgggggatcggggcagtcattcattttcactcgccaacaggcagcagcgtaccttcctccgatttcagcgggatgtggaacagtatcagggactggttctccctgcccgctcaggatgaggccgcagaatgctttcgcgttttttatcaaccgcctgaaggatcgtcatcgccggacagactgaagtattttttaaaactgaaagcgctggcgtctccgggacggcaggctaactttaccgcagagcgaatactcggtaccggtgaaaccatctgcatgattgcctccggtaaaaacagtgattttccccccgtcacacttcacctgagcgaccaggaatggcattcaatacgacatcagaaagaagccgttgatagcccgctgtcgtcagaaagtgatgacagccatgcagctaccgtaacagaaacagaagagcgcgacgaagcccccctaaaaggttttcccataacccgtgttcagattaaggcatggcgtgatctgtcgccggaagcaaaacgcgagatcggcggctggaaagcatgggcgcaggcacaagggatagctatcagcagtgccgggaactatctttcagacaccggactgaaactacgcggcatggtgcggttgcagccgccaggggaaagaggctcttctattacgaatcaacaacttcaggcatggcgagatctgtcgccagaggcaaaacgcatggctggcggcgggatgacatgggtgcaggcacagggaatatctatcagtagtgccaggaactatctgtcaaacaccggactgacccctttaggtatagagcgtctacaatcgccaggagaaaggggcgccccgattacaaatacacagattcagacgtggctggcgctgtcgcaggaggcgaaacgcgaatcgggcggctggataaaatgggcgcaggcgcagggaatagccatcggcagtgccagcgcttgtctgacaaacacaggactgactcctggtggtgcagaacgactacagcccctcggaaagaagggcgatcccattacactggcgcaacttctggcatggtttaacatgtcatcggaggaacgccgcgcgtcaggcggatgggccacatgggcgcagacgcagggtatatcttatagaagcgccagaaagtatctggcaccaacagacagtgaaacgcccccctgtggaataccgcgatcgccgccgtccacaactgtcacgagcgccagtcccccggcatcggcatccacaggcgatgagatagccgtcagcgtgagtcccgccccggcaagcagcggggaaaaacggtcactccccctggccacagaggatatctctgccccgccggcaaaacagatcaaggaagaagaagaccccgtgacctggcggacacaccagataaacaataacctgcctattctgcagcactggcgtgacccgacgatatcggtgatggcccaggcggaaggcaggattgaatccctacaggttacccggtggggacctctttttaactggttaccccggcagaccagggtcaggattaatcaggatattcgctggtttctgcacaatgaaggaaaccatgatgcgcgaatgaatgcaatgatgtccgtgtctatcccgcttgatgacagcgacggatacaggggacgtacaatctacgcaaaaaccgatctgacggcgtttaccgtactgggcccctactctggtcgcctgctggacagtgaaaagatacgacgtgagtatgaaaaagaatatggaaaggaagccagtaattattattttgccacgcgaagccaggagcgtctggtgtccgcctggccgcagggaaatctcctcagcctgcttaacagtccggtatttacccgccggacagcggaggctgaagccagacagaatgtcagcgcggtgcttgtcgggaagaatatcaactttttcctcaccacacgcaacatcagcgccggggaagaactgtggtttgattacgggccggactaccagcattttgaatcgggagaagcgttacactcaacgcaggtaaaggaagagccgccttcttcggaaggagaataa

SEQ ID NO: 392966 - DNA, 546 bp, Salmonella enterica
atgaacgggaaaacgttgtacaccctggacaggctcggaacattatcagcaggagctcgcattgaacatcaaacagcttgttgttccatcgaacttcaggagcacgtcgcaaatcgtttttggtcacaagtatcaaggcacggcaataattatttcttcaaccacaatatcaaccttcttaaatccaaagaaaatatgagtgttttcatggaaatgcttcttgaagaaagaagaagagcaaactttccagataaaccatcccggtttcgttctctctttgcctgtgaaactatccatgatgcagccaggttcagattgttaagccatgtgcctttaaatacaactatctatgaagtccatcagaccgcaggttgccacagagctgatatgagtttactcaatgtaaactgtccccctccagaaatgtcacatagactggatctttactggcaaggtaaaacaaaagaattgtatcccggctatgaaccattttgggaagtacttgtaccgttgcctgcaatcattggtgggaggattcaggaataa

SEQ ID NO: 392967 - DNA, 483 bp, Salmonella enterica
atgaacattatcctaatttttttcttatttttatttactgatactacttacggtgatgatggtcataaaacaatttaccttagggaagggggtatcaacacccctgccaaatggaatgttaacaaagaaaatgattgtctgttcgttggtaaaccgcatataaataaggacgatcggctcaaaatatgcagatacatatcaagcgaagaaagtaattattttacaacaaatgaaagcggagaatgggaggccattactgatggcattccggtattagcggatgtgaataccacaccgaaatttactggtatgaacgcaattgtttcatgtaagtataaagatgatgcgggatatcatactggcttgtgttttcaagcagaaatacatttaccaaggaacatagtttttatttttaccgggagaggtgacttatctctatttgaagattacaagaaagtatatttttcgttcaagattaaataa

SEQ ID NO: 392968 - DNA, 2121 bp, Salmonella enterica
atgataatcagccctccatttttacatgaatattcagccacagaaaaagatgctgactgggtgaacagagtcatgccagtttatccacagagaaactttcctgtcaatgcaggccagtcctggcatggaggtattcatttgaccggaaacccagcagaaatagtacgatgcattgccgatggtaaagtcatgtcattgcgccaggcagaccagacaactcgtggtataccaccatttaattataatggcacaacggattccggttatgttcttctgaaacatgaaacggaaatcggtagaggagaaggaggtaaaattatttattactcactgtacatgcatctcaaaaatatcgacagtagcatacagcccggaaaaatattgtaccggaaagaccccattggtatggctggcatggtcgatggacagaatgcatgccatttccagattttttgtgatgacgaaaatatccagaaaattgcgggcagaatatctgcggagactgacctgacaaaaaacggacggactgacgtggtttacggtgacagtcatttttatctgcctgctggcactccggtttatgaagcaatgccagaaaacaattcactgatgaataatagtccgatgcagagaaccagtgtaccattgtatgtcacaatgagctttgataaaggcagttgtactatggtgacccgtcagcagaatgaagtgctgagcgatacttatactgaagtaggctcgccattaatcaacactgatggcgaaagttatgaatacaatctctattcactcgccctaaaactctacccggaaagcccaagtgctggttatgaaatgctgcgttttggtcgggttgttaatactgaacacgaaacattgatcccggaaaatgcgccgctgtggcgaacagtcaatacgccacagggtagaggtgttgttaacctgggagcgagagatatcagagtttatagcgacggcgattttccgcactggacaggctggaaactggtggatgatgatacggataccaacagtcagtgcaattccccaacaatactgcgcacaactaacaaagatttaagccggatgatttgtcattttccgctggaatgggacagtacaactgtagattcacggtttgaatggctgaaatttccgaatgaagttgtggggaagcccatggtacagtgtgatctggatttgttgacggagcatggtaaagcgctttgtctgacagagaatccactgcctgccggacgagtatggcattttgagcccagacagtttattacacatttcaggaagtgtgtatggttagataaaatagatttaagtaggatttactccaatacatcagagagtattagagaaaaatatcgtatttctttaaattctatattaattaagtatggtatgaatactccaatacgagccgctcattttttggggcagggagcgattgaatcacaaagtttaaatcttatggttgagggtagtgcgtcatttagtcgccatcctgagcatccatcatttgctgaagaaaccaatggttattatgctgaccctacagatacatatgggtattttcacaactacgaacgtgatggtaatgatttggggaatgtaaccaaaagtgatctgcgggattcaagaaataatcgcttaatggtagtaattggaagagactccagaaatagacctttgttaacttctcctcaaagaggagccattgattcaagtttatctagtgttggtgatgggatgaaattccgcggcagaggatttaaacagctaactggtttagcaaattacacgggatattggacttatagaggatggttacgtcgtactgattatgataatcgttggtggcaaaaccctagtcggttaagggttccggtaatcactaacccacaaaacatatcgacagtaccttataactgcattgattctggtggacagttcgcagcaaaaaatggaatcttaagaaaagctgatgaaggagtgactcgtgataactcaagatctgtcagcatgataataaacaggtgggatgagtcgtcttttgaacgccgattccaggccacgaaaagtgcatatattatcttgggagataattaa

SEQ ID NO: 392969 - DNA, 489 bp, Salmonella enterica
atggaccggatagcgagcatcagccacaacgatggcctgtacgtggcgaatgaccggaaagtcaccgtggggggaaagcaggagcagaaggccaccggagactatatcagcctggctgaaggcaaccacagtctggaggtgaaaggcgacctggcgcggaaggtgaccggggcgctggggataaaggtacagggcgatattgttctggagagcagtagcaaaataagcctgaaggtgggcggttcgtttgtggttattcatgcaggtggcgtggatatcgtcgggccgaaaatcaatctcaacggtggaggaagtccgggagcgccggtggggactcagcaacctggcgtgctgaaagcactggaggatgatgtcacatccaggaaggataattatgaagacaacaataattccgaaaaaaatgatgatacagaagaagagaataagtcaaaaactgaaataccttccgtaaagtttatattttcgtaa

SEQ ID NO: 392970 - DNA, 1764 bp, Salmonella enterica
atgtcacagcagagactacgcttcactctgaaagtggacgacattccggaggcggcgaccaccgttgtcagctttacccttcagcagcacctctccagaccctttttactccatatccatatcgccagcggcgtctcccgccccgccgacgccacggagttcctagaaaaaaacgccacgctgaccatctggcagggaaccgtgccgaagcgccatatcaccggcatcgtgaccggtgtggagaccggcgagaaaaaccacggacagcgaaacttttatctgaccctctcttccccgctctggcgcgccggtttgcggcaaaactttcgcatcttccagcagcaggatattcagaccatttccgccaccctgctcgcggaaaacggcgtcaccgactggacaacctttttttatgattcccatccggcacgggaattctgcgtgcagtacggcgagaccgacctcgctttcctgacccgccagtgggccgaggaaggcattttcttctttgacaagtttttcacctccggcccggaacagatgctggcactcagcgacgacgtggcaggtgtctccggattacacgattccctgccgtttaacccgaacccccgggaaacagccaccgaatgtatcagccagttccgctaccgggcgcagatacgcccctcctcagtggaaactcaggactacacctttaaatccccccactggtttggttacttcagccatcacccggcgaacttcaatggtcagcggaagcaatatgaaatcttcgactattcgggacgctttaaggactctcagcacgggcgggattttgcccgctatcaggccgaaggctggcgcaataatgcggaaaccgcctccggcgtcagcaactccgcatggctgtggcccggaaaacgcttcaccctgacggaccatccgtcgtccgccctcaaccggcagtggcaggtggtgggctgcattctgcgtggagaacagccgcaggcacagcacgggcggtcgggagccggcaccacgttgcgcaatgaattcaccgtgatacccgctgaccgcacgtggcacgccacgcccctgccgaaaccgattgacgacggcctgcagagcgctgtcgtcaccggcccgccgggtgaggaaatcttctgtgataaatacggccgcgtccgggtgattttccactgggaccgttatcacccggccagtgaggacgcctcctgccaggtacgggtgtcacaggcgtgggccggagcagattttggcaacctcgccatcccgcaggtgggtcaggaggtgatagtggacttccttaacggcgacccggaccagcccatcatcatggggcggacgtatcacgatattaaccgcgcgccgggtgccctgcctgacacgaaaacgcagatgaccattcgctcaaaaacctataaaggcagcgggtttaacgagctgcggttcgaggatatgacggaccgggagcaggtctatatccatgcgcagaaggatatggacacggaggtgctgaataaccgcaccaccgatgtgaaggtggaccatacggaaaccatcgggaataaccagcagattacggtggggctcggacaaaccatcacggtcgggaaggaaaataccggcgggcatgaccagaccattactgtagcccatgaccgccacataacggtacgcaatgaccagacgctgaaggtgaagcatggaccggatagcgagcatcagccacaacgatggcctgtacgtggcgaatga

SEQ ID NO: 392971 - DNA, 219 bp, Salmonella enterica
atgaaatctatcgtcattgccgcaatggctgcgctactggttagcgtcagcgcacaggccgccattaagatcgatggccgtcaggcacgtaacatggacgatgtacagagcccgggggttatctatatcaatcacaatatcgccactgagcaagaggccgagcaggcgctcagtcaggagagcgatgcccagggggcgaaatactttcagcccatctga

SEQ ID NO: 392972 - DNA, 1005 bp, Salmonella enterica
atgttgtctttgttaaaggggatggtgttgctattttgttggggatggttaactaccagctatgcggggtgtaagtttacttccgggggaacgtcaagctacacggtcaccgtgccaaagttaaacgtgcagcgggatatgccggcaggcgcgatgctttgggatagcggttatttaacagcccctgttataaacagtatccgctgtgattcagcgtcgcctatttaccgcggatatgacgattctacgctggtttcggtcaatgttctggataacgatggtatttatcagaccaataatccgggtgtcgccattcgcatatggtggctatcgtatatgaatgatgctaccagtactcagacgccagccgatgcgcgagtatttaaatctccaagaataacggagggaacgaaagcgtgcgcaaattgccagtttaaagatattaacggcatgtttgatgtgcaactgatcgctaccgggaaaccgataaccgatgaacctttgcaactgacccgattcaccggcgcccgaacgtacgatacgattgatcaactccgtatcaattttaccgatgctgatgtggtggtaaatagcgccagctgtgtgctgaacagtaagaatattgcggtcgacttaggtaagcatattgaaggtatccgcctggtacatcccggagatactagttcgccggtggggttcaatattcatttaacctgcgatgctaacacgaaggtcaatgtactcttttccgggacaacggtatccggggatgcgactacgctggcgttgaataatctctcctctccagcgtctgcacaaggtgtcggagtgcaaattttatatcatgataaacctattacttttggcgaggaggttccgacggttaaaagcgtcgctgaaggcgggcttattctgccttttaatgcgcagctcctgcgtttgaacgaggcgttaaaagcgggagacgttgaggcgacggcgacatttgatatgatttatcgctaa

SEQ ID NO: 392973 - DNA, 1704 bp, Salmonella enterica
atgcttccgtatagtcagcaaggatttgccccggttattcgaggaatagcgaaaagtgatgcccgggtgacggttaagcaaaacggttataccgtctatcaaacctatgtgagcgccggggcgtttgaaattaccgatattcctcaggtctcatcgggaagtgattttgacgtcaccattaccgaagccgatggtagcgaaagaagttttattcaaacgtcttcctcattgcccgttatgcagcgcgagggggcattacaatacagttttgccgcaggacactatcaaagtaacgataattccggtgagcctaatctggccgaggggcaacttatttatggattgccgtatggttttacggtctatggcggggtattggggagcaacttttatcgttctggcgcgctggggtttggcgttgatttacataatttgggcgcattctcctttgatgcgacgtcggcgagaagcgagattcaggatcagatatggcagggaatgtcttaccgggcgcaatatgccaagaatattgataccaccaatacgaatcttacgcttgccagctatcgctattcaacccgtaacttttatacctttaccgaggccttaaataaccgcacgtctgataacgatgatagtttttatgcgtaccgtaatagcaataatcgacgcagccgtttacaggtcaatataagccagaatttgaatacctggggttccttttatctttctggttaccagcaggattactggggactggagggttatgaacgtacattgactgtcggctataaccaaagctgggagaaggttcgttttatgctcaattattcattgacgcaaacgcctacctcgcagcgtgacgaacaggtctcattgacggtcagcattccactggacaaatggttacccagcgcctgggcgaattatacctggacggataaccgccatcataaccaacaacatcaggttggtctgagcggtacggcgttaaaggataataatcttaactatagcctccaacactcctggggtaaccagggggcgagagaaaacgggagcatgagtgcgacatatcagggctcattcggtaccgtttccggcgggtataattatgataaccatagtcagcagatgaattatcaactccagggtgggcttattggccatgcggggggaatcacactggcgcagaccctctctgaaaccatgacgctagttaatgcggaaaacgcggcggacattaaggttgaaaatggtaccggggtatataccgattcacgcggatatgccgtggcgccctattccagtccttatcgtactaatagcattttgctgaatacggcgactaatccgctggtggatattgcggaaccggtgaaggaggttattcctacgcgcggcgctgttgcattggctaccttttccacccgaaccggcggacgcgtgttgttgacgttgaaacgccatggcggcagcgttccttttggcgccgtggcgacccttgaggaggaaaatggaaagcgttatgccagtattgtgggtgataacgggcaggtgtatttaacgggtgtgaaaggcgacgaaaaagtcaccgtaaaatggggggagagcgtggcacaacaatgtactgcgacattgctattttcctccaatgaggcgcccaggagaacgctacgcgtattaagttcagagtgtaaataa

SEQ ID NO: 392974 - DNA, 303 bp, Salmonella enterica
atgaaatatattatttttatatttatttttttaattccgttaagatgtatgagtgaaaaagttgtttttttagatgaagtacaaacaaaaactatgaatgttgctttttcacattttaaagaacataccaactgggatttatttaataccataatacaggatgataatgaaaacattaaaattgcattctattgtaaatctcagctggaagaaacccgaggtggcggtatagagcaaattatttatatgatttcaaaaaaagattttagaattaaaaccataaacaaaagttatagcagataa

SEQ ID NO: 392975 - DNA, 648 bp, Salmonella enterica
atggtcatagctatcaatttgctatcactcatcagattgccggggcagcagtatgatgaagaatcggggctgcattacaacctgcaccggtattatgatccgggacagggacagtatatcacgcaggacccgatagggctaaagggtggatggaatctttatacgtaccccctgaatccgatagtaaatatagatccattaggtttaaccttatctgatataccaatctataaatttaatagccaagatgaagttgcgctttgtgccataaaaatgtgtaatagcacatcaattatagagaatagagagtatggtgggttagtttgtaaaacctataataataaatatattgcaactgaagctaagcaaggaagcttggctggtttttctccgtcaaatagctcttgtcctttaggctcgactaaggttggtgattatcacacacatggtttttactctgatataaaggggaatccagtatcacctcaaaatgatgcatatgactctttacatttttcaccacaagatatttctgggattgcaactgatggtataggtaatccagattatactggctatttagggaatccaaataataaatattataagtttacccctggaactggaaaaattgaggagatgaaatga

SEQ ID NO: 392976 - DNA, 483 bp, Salmonella enterica
atgcttcaaattattaagagaggactcgttgtttttttgtttgctattggtgtgctcagcatttatttcagatttaatgagaaatcaaaacctagcatcggattttatggaaataattcactaaagagtgttgaaatatatttgtttaaaaaaaatactcctttcaatataatttatgaccaagaaaacagcagaggtaatggtcattttttaactatcatagttaatgactacaagaccagttgtggtatggttaatataaagatgagttttttcaatgctattatttacagcatacgattaaaaaatgtcagcaaattagaaaatgtggaatcatgtactacagaacaacttcaatattttagttataaaaataggaaaatccattacagaataattaactatagtgattattatgacattgattattatgatagtaacttaaaagataaagttttcgattggattggaaaatggtcatag

SEQ ID NO: 392977 - DNA, 1311 bp, Salmonella enterica
atggctggagcaattatatccacattgagatttataggaataaatacttcattatcaaaattaatgtccctgctaggaattatactaatttcattatcaataatcatgatagatgagaagatgtcatttcctggatatatagcaataatcccagtagttggagcctctcttataatagcatctaatggtaatgacttaattgtgtcgaaattgcttagtgttaggcctgttgttttctttggtcttattagttatcctctttatttgtggcattggcctatttactcattctatcgttcaatatttgctgattcaccagactaccatgagttaattcttcttttattgttatctttctttttggcgacattaacttattatttaattgaaaaaccactgagaaatgctaaaaataaatatatcacagcaatattattagcatcatcagtatttgggacaggtttaattggcgcatttatttttaatataaacggagttaaggacagggaaattaataaatcagcaggtgaatatgcgtctgttactgacgtgtacaattattataaatatggagaactactccgtggaggggtgtgtcactcagtaaaacttagtgatgccatatccaacggatgtataaaaaatggcaagcataatatatttatcattggtgattcttatgcggcggcacttttcaatgggctttctcattatatagatagtaaagattctgattatataataagccaaatgacagatggtaatgctcctcctctgtttgttgatggtaaagatgatttacaaagaagcattatctctctaaacaataatagaattaatgaaattaaacgtgttcagcctgaggtggttttactgacatggtcagttcgcggaacaaatggcgtgcatgataaaaagttagctattgatgctttatcattaacaattaaaaaaattaaagaggcatcccataactcaaggattattttcattggaccagttccggaatggaatgcaaatttagttaaaataatatctaactacctgagcgagtttaaaaaaaacccaccattgtatatgacatatggattaaatagtgaaataagcgaatgggactcttactttagtaataatgttcccaaaatggggattgaatatatatcagcatacaaagcattatgtaacgaaagtggatgtcttacaagggttgataatggtcctgattttatcactgccgtcgattggggacatttaacaaagcctggttctgattttctttttgataaaattggaaataaaataatcaaatag

SEQ ID NO: 392978 - DNA, 234 bp, Salmonella enterica
atggacgaaaagaaactcaaagcgtttgctgctgaactggctaaaggccttaaaaccgaagctgacctcaatcagtttttccgtatgctgacgaagttgactgcagaaacggcgctcaatactgaactgactgatcatctcgggtatgagaaaaatgccccaaaaaaggctctaatacctgtaacggctactcgtcgaaaaccctgctttgtgatggcggcgagattgagctga

SEQ ID NO: 392979 - DNA, 2277 bp, Salmonella enterica
atgtggccagtcggtaattatccagggcgtattcacgccacggcgccagatacattatcagcagcggatattaactactatgccttatggcaaacatgggctggtgaagccgttgctggagaaggggaacaacgagatatagcggttgaaagattgtgcgcgtgcctggctgatcaggagagcatgctggatttaggaggtcttaatctgcgcaatttacctatattacccgcgtgtatttcaacgctgaatgtcagtaataataatttatccgcccttccagatctgcccgaaggaataagagatttaacctgcgctagcaatatgttgacttcgcttccctcgctcccatcaacgttggaaatgcttgattgttctcaaaacagattgcccgaactacaagacttaccgcccacgttaacggcgctcaattgctcaaaaaatatgctgatgagattgcctcatttacctgacacgctgcaatcattaaattgttcaggtaatgttatcaccgtactcccggaattatccgacaacttacaaatactcgtttgttcaggaaacaggcttgacgtcctgccggatcttcctgcttcattacaaacgctggattgtgctggcaatgatttaataggctttccatttatgcctggttctttgcaaacgctcaattgctccaacaatgaattaaccggattgccccctttccctgattcactactcaatcttgatatcgctcataatgaattatgttctctcccccctctcccttattccctggttacattcatatgtacaaataacccgcttcatgaattgccagtcttaccgccttcattacaaaggatggcttgcgccagcacgttgttaacgacgcttccgcctctgccacctgcgttgcaggagcttcattgtcagaataataacctactcttattacctgaattgcctgcttcgctgaccgatattgattgctcaaataatcatctgatgagcgtacctgcattacctgattcgctcatttcacttgagtgctcacataatcgtctggaaacaatgcctgctttacctcgttcacttcaatacctaatcaccattcataatccattaacgactcttcctccattccctgaatcactacgattccttaactgttcgaataataggcttacaacactcccggatttgccggatactttagacagtctttattgctacgccaacaggctggaaacgcttcctgctttgccagattccctgcaggaacttggctatagcggtaatccactgacaacgttacccgtattaccggcatcactcataagagtgaataacgatgcatctgccagtggcgcaatcgctcctcttccgctcatccaaagtattggatattggttccccgcgtctcagcgcgctgacattctcccgcgctttgaggccgtcgccagtgaagagaatgccgacatatttagcgattttcttaaccgactgagatatcgatacagagattcacaatatgaaagtttccgctctcaggttaaggagtgcctcatccgaatggctgacaaacctgaattgagagaaaaattatttttgtgtgcctatgactcaacactaaattgcgacgatcgtatttctctcacatggaatataatgcgagtcgctgaaatggcatttaccgtagagcaagagggccatgaaggcaaccttccggaaataattgatatcgcgcgccaggtattccgaataaaggagttagctgatatcgccgataaaaaaatcaagcagattcagagaaatgatgatgcatttcatgaagatttagaggtggttttaggcctgcaaacccagcttcgcgacgcgcttcaattaacgagaaccgcaccagatatgtatttcttccgtttttctcatcttactgaaatagacgtcaaatccgcagagcgtcaggtacggacagcggaaaatagacggtttgaatcatggctcaacaattgggaaccgtggcagatagtactgaaacgtatcgatccacagtggtatgaaacggctatagatgaaaaatacgcttttatagatagcccggaattcgaagcccgaatgcaagaaaaactcatcttacataaggttccgcctgagaaccatgaggctgccagcatcactttaggacccatcattaccgcagaaaagatacatgaaatttttgtcactcagacgcgcaaaattctggaagcaaaggggcatgcatctttgctgaagccagtatggcatgaataa

SEQ ID NO: 392980 - DNA, 351 bp, Salmonella enterica
atggaaacgtacagacatacaaaagattggctggctaatctagccagctcaacccaactttgcaagaaaaatatgcgaaaaaatcagccttggcgctgtttatgcttcggctcggcactgcaaatcacacggatgacaccatcacgcttaacgattttgcagttacggcataatttcttgacggaagcacgaactttcatttttactctccgtaacttctcgagcgacctgttagcggccgtagcctttcaggttcgccttcttcaatgcagactcatactgactggacatcatcagagtttgcacttgagccataaagtccataatcacgacaacaacgataagcagtga

SEQ ID NO: 392981 - DNA, 423 bp, Salmonella enterica
atgagccgggattcaggattgtcaggcagtctgtttgagcgcatcgcggaagcggcaaacccgtcttcataccagagccccaaagaagcgctgctgagatcgatcaggtgtaatctgcaccaaatcctgaatacccgctccggcagttgctacggctcaccagagctggggatcactgacctggataacattgcttcggtatccatgaatctcagggacaccacagcgcgggcaatagagagctgtattttgcgttacgaaccacgaatatccgacgtaaccgtcactacagtcgaacaggatgaaaatgcgccattagagctgcgttttcgtattgtggccgctgtcagcttcagtgagattaaggatttacttgagtttgacattgttctggatcaccaccagcaataccgtgtggagtaa

SEQ ID NO: 392982 - DNA, 1413 bp, Salmonella enterica
atggacttacgtaattccgatatctggtttgcacacctgctggaaaatctgccggaagaaaaactaaccgccgcactggacgacgaccatcctgaatgggagtttatcgacagcgaaatcgtcaaactcggttcactggcccacagccagcttaatgtgccggaactccagcgtcgggggctggcgcttctggcctcagagagcaaggactttcgcctgctggcgcacctactgcgtaccctgcagcataccggtgaaatgttactggcactgcgcctgctgacgcagtacacggaacattactggacagtggccgcgccgcagaatatggcgcacaaaaaacgttttgccctccaggtactgaaacgttttgaaaccggtgcggaaggctttgcgcaacaggcagctaccacacaacgcgatcggtccctgggcgaactggcaaagctggcgcaactgtggcagcaaaataacgcgccggacctggcgcaggcggcggacgatatcttcgcgctgtaccagcgaacattccgcgacagcgaaccggccgcagcggccccggccccgacacagccttccgctacagcaaccacagtacctgccgcgccagtcttaccggcagtgtctgccgtcccggccccggtggtcaatatcgatagccatgacgacaaagcctggcgcgacacactgctgaaagtcgccgctattctttgcgagcgccagccggactccccgcagggctaccgcttgcgccgccacgcgttatggcaggctatcacctccgcgccgcaggccgaaagcgacggtcgtacgccgctggccgccttccctgccgatatgatggacgattatctggcgcgattaaacactgccaatatggcgctgtggcagcaggtggaaaaaagcgtattactggcgccgtactggtttgacgggcattacctctcggcacagaccgcgcaacggctgggttacaccagggttgcagacgccattcgtgatgaaacagtacattttcttacccggctacctcaactgaacggcctgcagtttaacgaccggacgccgttcattgcagaaccgacgaagcagtggctggcctcctcttctgcgaataacagcacagcgcctgccgtgcagacgggggaggagttacaggcggttcgggcttgttttgaagaacaggggctggaagccgcgctgcgacatctggaaaacctgcccacaggcgatccccgcgaccagttttaccggcagtacctcggtgcacagttgctggaagaggccgggatggcgcagcttgcacatcagcagtatcgcctgctgttcactatgggactgcaaatgacgcttcccagctgggagccatccctgctaaacgcgctggaacagaaattcacggcagaaaaataa

SEQ ID NO: 392983 - DNA, 135 bp, Salmonella enterica
atgatgaagaaacagaacgtgattatgacaagtttcatcagttggatgtataaaaaacaaaagcagaatcaagagggctcttgttatccgctcatatcttttacaccccggtaccatggagacaagaatgtctga

SEQ ID NO: 392984 - DNA, 909 bp, Salmonella enterica
atgtctgaattcaataaccagaacccgtcatggtcagattaccttggtgacgccctgcgtggtaacgtgcccattaatcagctaatcccacagcattcttatattcttgatacgttggggctgggagaagtgtttgagaagtatactcagcatttaatgttaatgaccctggaggaagcccagggaattgtagatgacttatgtaacagtaagcctgtgagctatgccactacttatgcaggaaatatttatgacgtctccactgggggaaagaacatcagtaaacttatgagttataccgatgcgggtaaaataatttatcggttaaagggatttggtattaaagccattcagtatagttataatgggaaggtttatgtcaaaattactggctatgcgtcgctgcgccgcattcttcaggggacacgatataaaattaatcacccacaaatactggagttaggcattggtaaggcgggcattaatggaaacatcatctctggcgctaaattttgcgtctggttttcacttgcctggcatacggtagaactcatttttaaatcagatcatgacgtggcagcctttattggaaatattacgatggatgttgcaaaaattattgtcactatttttgtaacaaaaattttggtcatggctgggggagccttagtagcgggcgcagcatctgttggtttttcgattacactcccaattgcagcagggatattacttattattgcaataggcttggttattaccattgcactggcttatctggatagtaaataccatttatctgataaattgattgcggtaatcaaagaaggaatgaaggcccagcaggatattaataaatggaatcttgagcataccaatccgcttacgcatggtctaatgaatatacgatga

SEQ ID NO: 392985 - DNA, 525 bp, Salmonella enterica
atgcttaaaagacaagagttgaccccaaagaagctgtcattaaaagaaagagcaagactcattcttttattttcgcttgctattatagttctcacaggttcattaattttcttcgccaatgtcagtggcaatgcaataataggtattttccaaaaagcagacactgtatactataattggcgagatgcatttgcagtgttgtttattccagtcatgggatattatgatgtgttattttttctacttctatttatcccttttacttttcgtatagcaacgctatggaatagcttatccaatattgtttatatgtatatttatgctgcttttattctatcattcctcttagcgctatatattcaattatttcctctttccgactatcagtcatgtggtctgaaaggcccattctcaggtgcttattatgtaaaagatcgcaaaatgtgtaagcaatttgaatatcatcctgaaaatgagggggctgatatctctcccattcctgtaacatcttcggataaaaaataa

SEQ ID NO: 392986 - DNA, 1107 bp, Salmonella enterica
  misc_feature (1088)..(1097): n is a, c, g, or t
atgaacatgtcagtttatactcaaactattactacaggagcggacccacgtgacctgccggagttcagcgccattcgagaggaaattaataaggcaagtcatccgtcgcagccggaactaaactggaaactggtagaatcgctggcgctaactatttttaaggccaacggcgtggatttacataccgccacctactatacactagcacgtacccgcacgcaggggctgacaggcttttgtgaaggtgcggaactgctggcagcgatgataaatcatgaatgggataaattctggcctcaaagtggcccggcacgtaccgaaatgctggattggctcaatactcgtacgggcaatattctgcgccagcagctatcctttgcagaaaacgatctgccgctgctgtaccgtaccgaacgggccttacagcatatctgtgacaaacttcagcaggaggatctgaagcgtcagccgcgagtggagaatctgctgtacttcgtgcaaaacacacgcaaacggctggaaccgcaacccaaaaacaattccgatgctcccacacaaactaccgtcagaacactggtctatgcgccggaaggtgctcctccccatacagcggagagtgttgtgcctcccctaccagacttacctgaaatgagggtggaagtacgcagtgcaactgaaatcaaaacagcgaacacacaaagccagaacagcagtataaaaggttttatcatcggcgttgcctgcactgccatcgttgccgttgttctctggtggtggcaggtatacccggtacagaaacaacttgcgaaggtcagagataccgcgcagggagccgccgcagtctggctaaacgcaccagaacaggaaagttatgaacaaaatttacgatggcttctggaagaatcgccgttacgatcgctagatacaggcgtacaaatgacccgtaccgcgcaaacccgttggcctaaaagcctgcaacagcagcagatcacagctcagtggaacgacacactaaaaatccgcgcgcagaatagcccacaactacggggctggttgcagacccgcgaggatttacatgcctttgccgnnnnnnnnnngacctggtga

SEQ ID NO: 392987 - DNA, 261 bp, Salmonella enterica
atgcagagggagaaagaagggctgacactttcctatattaaaaacgttatctggcaggcggagcgggggatgagtcaggaaaccccactggaatctttactgacgcagtatcaggatatccaggcaaagagacaaaatactgaagagctggaaaaacagattaatgaacggttggacagcgtgctaagccgttggttattactgaaaaataatatgatgccggaagcggctacccccccaaaatctgggaataacaactaa

SEQ ID NO: 392988 - DNA, 480 bp, Salmonella enterica
atggcaaatcttgtttatctaacactgaacggtgacttacagggattgatctccgcagggtgctcatccatggcttctattggtaacaaagcgcaaattgcacatttagatcagatcatggtactcggcttgagccacggcctgagccggatacagaatgttaatcatcttgctcttaatattcagaagcccgtggataaatctacaccgttactcagtaaggctattaccgaaaacgaatgtctgacttgcgattttgagttttatcgtacaaaccgtttcggtgttaatgaaatttattacaaaataaagctcattaacgcacgaatttcagatatccatctgtccgttccgcataccatcacagatagtggcaatcagccagaggaaacggtgtcattcacctatgaaagtattaactgggagcactgtattgccggaaccagtgcatacagtctttgggaagaccgtttgttttaa

SEQ ID NO: 392989 - DNA, 702 bp, Salmonella enterica
gtggtattccaggatattgcaaaaaagataaaagacaaaataaatggatatttatatagcgttggcgaccctttacccactgaagtacagctcgctcaacattatagcgtttcccgtaacacaataaggaaagccctggcacttctggagcatgatggcatgattgaacgtaagcatggttccggaacttttgtgaaacagaaaaacttcatcgctcatgtaaatcatatgaatagtctaagtgaaattgctaaaaagagcggaaaagaggttaagagtcagatcataaaatttgaagtgcaggaggcaactcaacttatttcaacagagttaaaaataatgcctcaagatccggtttattatataaagcgattacgtcttatcgatgataagcccatccaattagaagaaacctggctgtctgtaaatcggtttcccgcgctaactatttctcatatgaaaaattctaagtttttttatattgaaaatgaatgtaatatcaaaataatagggactttcgaaacattttctcctgtcttcccaacgcctgaagtggcaagtattcttcataccagtattatcgatcctattttgaaaattcaaacacaagccgttgatgaaaaatatgagcctatagattattcaattttgtactcaaatatttttgaatttcaggttaaatatttcttaccaagacagtaa

SEQ ID NO: 392990 - DNA, 315 bp, Salmonella enterica
atgaaaaacatattattggtttgtgcaggagggatgtctactagcttactggtaaaaaggatgattgagtatgcagcaatgatagatgttagcgttaatatcttcgctttgggtattgccgaagcaaaaggccgtataaaaaataatgaagctgacatcgttttattaggccctcaagtccgctttcaaaaagatgaaattgaagctattgctcaagggaaaatccctgtcgctattatcaatatgaaagaatatggtgccatggatggtaaagccgtccttgaatttgcctttaatcttcttgagcaacagtaa

SEQ ID NO: 392991 - DNA, 1320 bp, Salmonella enterica
atgggattgatgagttcctttgaacgtgggatggaacgttttcttgttccaatagcaattaaattaaattcgcaaaagcatgtcgcggcagtaagggacggatttgtttatacttttccgatcattatggcgagttctttaattgttttaataaactttgctatactttcacccgatggttttattgcgaaattattacatcttactagcatatttcctaatctggaaaaagcacaagcgatatttacacctgtaatgaatggatctgtaaatattatgtccatcatgattgcttttcttgttgcaagaaatatcgctattagctataagcaagacgatcttttgtgtggactgacagcaataggtgcgttttttattgtttatactccgtatcaaatgattggcagtcagacctttttaaccacaaagtttttaggtgcgcaaggactatttgttgcagtcatcattgcattactgacaagtgaaattttttgccgaatggcaaggaatccgaagatagcaataacaatgccagcggcagttccaccggcagtcgctcgctcatttaaagtattattaccgattttctttgtaatggtattcttctctgtaatcaattatttattatcactggttactcctgatgggctcaatgatattatttataaagtaatccaggccccccttaaaaacatgggaacaaatatatttgccgtaataatcctgggcgctgttggctgcttcctttgggttctgggtatacatggccctaacacgacatcggcaattcgtgaaacggttttctccgaggccaatcttgaaaacctttcctgggcggcgcaacacggatcaacctggggggcgccttatcccataacctggacgtcgattaatgatgcgttcgctaactgcggcgggtctggtatgacgctggggttattgctcgctatttttattgcttcacgtcgtgctgagtatcgggatttggcaaaaatgtcgttcatcccgggtattttcaatattaatgaaccggtgatgttcgggttaccgatcgtattgaatccgatcatgatggtgccgtttattcttgtacctatcgttaactgtacgattggctacttctttgtatcaatggagatcatcccgcctgttgcttatgccgttccctggacaacgccaggaccattaatcgcctttcttggaacgggcggcagttggctggctttactggttgccttactgtgccttgctgtagcaacactgatttatctaccgttcgttattgcctctaataaagttaatgcagctatgactgaataa

SEQ ID NO: 392992 - DNA, 312 bp, Salmonella enterica
atgtttgcaaatgaagaagccgtcatggaattgttaatccatgcgggacaagcgcgttctgatgctatggaggctattcggtgcgcccgagagaaagactgggatgctactcaccggctgatgcaaagctcggaagaggcgagtcgggaagcccacaagatacaaactacgctgattggcgaggacgagggatgcggaaaaattagtgttaatttaatccttgtacatgcacaagaccatttaatgactgcaatgctatgccaggatttggcagaagaaataattttattaaggcaagacttgtcagtttaa

SEQ ID NO: 392993 - DNA, 126 bp, Salmonella enterica
atgggctctatcgtgctacaggttttgataaagaaacgtatggttactataaacagtcaggagatggcttttacagaaaacaagcctcatattcagcgctgtcaacggaagcgcctaatacgataa

SEQ ID NO: 392994 - DNA, 1296 bp, Salmonella enterica
atgtcagagagcctgcaatccagtatcacccaagccttacctcaagatcgggaagtgctttaccacctagtctggcgagagccagcagagcgtatcgcttctctctataacatcagcatagaagggctagttaagcgatgcgctgaattacagatacccaggccgcttgctggttactggaaagcgctggcgaaaggaactgcacctgcggtgccagctttgcccgccttaaaaaaaggtaaaatggtaaagatcccgaaggaagctagcgtaactgcaccgttaaccacagccgtattgccaaagccattacttccaaccacgcgaaagcaagccacgattacagggaatggttacgcgttaatcaatgatctcaaaacgtatctcctgaaatccagtgtgactgaagatggttactacaaacctgcgaaaaagaaactcttggatctcaatgtttcggatacggggtttgatagcgcaatagatttcttgagccggttctttgacgctctggggaaacagggctatcgggtaacactggatgttcctggagagcgatttcatcgtgcggatattgatatcaaggaagatcctaagggggaagggtatcgctgggacaatttatggcgaccttatacgccgagcatcatttgcatcggtgatatgcattttgcattcaatcttgccgaaatgacggaatatgttccggctaagaaagtcaaaaatcgctatgtccgtgacgaacagatggggagatggattcgtggaaaaaacagtgcgccttttcttcacgtttcgaagcatacgctgcctaccgggcggtttcttttgcagctctattcgccttatgagtcagcagactggcgagtgcagttccggcagacaaaacaatgtggtttgattagccagatcccgaagatgattgcagtgatgctggaagccattcctatcattaccagacaactagaagaagctcgaatcaaagccgaggaacggcgaattaaatacgagcgggaacatgctatctggctcgaaaaggaacgaatccgtcgagaagaagaagcacacaaagctagcattactgagctgaaattgattatggcccagtgggctgaagacaaacgtatggaacagtttttccgtgaagctgagttggatgcggttagttttgatgagcagcagaaggtgcaggttatggaacggctacaattggcccgccagtttttgtcagaggatacggcagttgagcgactactgaagtggaaaactccgcaggagcggttagttaaagcgtag

SEQ ID NO: 392995 - DNA, 3150 bp, Salmonella enterica
atgaaaaaaacaaccggatggctctctttactggcgctgtcaatttctctggtctgccaccaggcggcagcaaacagtcgcttatctgcgtcggcaattcgtgtgatggatgcgcaaggcaacaacgtcagtcagcctctgctggataataatccggcaacccaatggcagtcgaagctggattacaaccgctggctggagatggacttaaaaggtacgttccaaattagcgagctacagctcactaccccactcaacacactaacgcgcttcgacgtctacagcagcgatgatggcgtgacttaccgcaaaatagcctccgcaaagactggcaaaccgaacgaccgactgccgcttaacgttcgtgccagccgcctgcgcatcaatatcaccgactactcggcgggtacaaagggcgtggtcaacgatatctctctgacgggggataaaatcagcgataccgcgccgacgccacctgcaattcaggtcgccgattactcaaccaccgagtgggcaaaacgccatgagcgccgtcagaacacgacgtatcgccagcaggaaataatcagcgaagcgaaggcactggttgagcgggtgctcggcgcacagtaccagaaccgttttaccttcgcggtgaccccctcctccaccggcaaagacagtttcaccgtgaaggaagctgacggcaaaatcagcatcagcgggccaaacggtatttcattggcctccggactgaactggtatctgaaaaattatctgcacgtcaattacgacccgctgaacgtgtccaatctgacgctgcccgcaagctggccaatgccacagggcgtcacggaaaaggcgacgccgtatcagtacaaatatgcccttaacttctgcacgccgtcctacacgatggcattctggcgctggcacgattacgagcaattcctcgactgggcggcaatgaatggcgtcaaccttatgctggatgttgttggtcaggaagaggttcagcggcggatgctgcaccagttcggctacagcgataatgatgtgcgccagtatctgcctggtccggcctacttcggctggttttatatggcgaatatgcagagcttcggcggcccgctgccgcagagctggtttgcccagcgcaccgagctggcgcgtaaaatccacgacaggatggaagtgtacggcatcacgccggtcttccccggctttgccgggcaggtaccggatactttcgccgccaaaaacccgcaggcgcaggttatcgatcagggcgactgggttggctttgtccgcccgccaatgctgcgcacctacgttaagcagggagaggattacttcagcaaagtcgccgacgtttattaccagacgctgaaaaccaccttcggcgatatcagccactactacgccgtcgatccgttccatgaaggcggcaaccgcgccgatctggacatggtgaaagtggcgcagaccgtgcaaaacaagatgctggagcacgataaagatgcggtgtggattatccagaactggcaggaaaaccccaccgacgatttcctgaacggcctgaaaaaggagcacgcgctgatcctcgatctctacgccgataacaagcccaaccatgctattcgctacgagttcagcaacacgccgtggatctggaacatgctgcacgccttcggtggccgcatgggcttctccgggatgccggaagtgctggcacaggagatcccgcaatcgctggaggagtcgaagaacatgaaaggcgtgggcgtcaccgccgaatcgctcggcaccaacccgatgttgtacgaaatgctctatgacatggcgtgggaaaaatcacccatttcgtcaacggcctatattaaccgctggctgaccagccgctacggcgcgcagtcgccggaaattgagcaggcatgggatattatggtgaaaactgcgtatcaccgccgcaaagaccgccagcgggcggaagactcgatcatcgatgccaagcccggcttcggtgtcacccgcgcctgcacctactacaccgcgcttatcgactacgacaaggccgagtttgaaaaaatcctgccgctctacctgagcgtttacgaccgctttaaggataacccggcgtatcagcacgatctggtggatatcacccgtcaggtgctggctaacgcctcatatgagtattaccgcgccttcgaagatgcgtggatggcaaaggattacagcgccttcaatcagctttccggcaagttcctgcgccttatcaagcttcaggacaaggtactgagtacccgcccggaatttatgctcggtacctggatcaacagcgctcgcacgatgctggatggcatggacgactggacccgcgaccagttcgagtttaacgcgcgggcgatggtcacaacctggggaaccgagcaggccgctgacgccgggctgcgcgattactccaatcgccagtggcaggggctgaccggtgatttctactaccagcgctgggcgacctggattcaggcgctaaaaacggcggcgacgaccgggcagaagcaggatgccatcaaggttaactggttcccgctggagtatcgctgggttaaccagaacggcaacggctacccgacgcaaccttccgggcacgatatccgacgactggcgcagcaggcgctggcagagttctccgtcaccagcgaagacttacgcccgtaccgggaaagtaaggataagcgcaatctggcgctgaataagccggtctttacccatggcgatattatcaacgccgaattctcgaccgagcgtgtggtggacggacagtcctcaacgctgtggggcaataaaacctggcctgcggatctgattatcgatcttcagggcgtgcagaaggtagacggtatcgagctggagtttgagcagacagcggaggatatgcgaaatccggtagtctccggctggacggtagaaattcaggacgcccagggtaactggcgcaccattcaggataaatcaaaagacttctcgcaaaagcaggtcgtcaatgcggtgccgtacaaaggcgaagcgcagaaagtcagggtcacgctgaccggtgcagatttcaaactgcgcccggatctgaagccacagctggcagaaatccgagtcctggcggcaacccaataa

SEQ ID NO: 392996 - DNA, 1008 bp, Salmonella enterica
atgaacagaaataccctgctctgcgccctgccgttactggcttccggtatcggcctgcccgtcatggcggctgatattgataccgacgacattcagcaaaaagtggataccggcctcgaccaggctccggcatcaaagccctggaaagtccgcgcgggcctgctgatcgaaaccgaaaacaaagaaggacagtctttcgataaagacggcttttttgaacccaccctgtggatggatttttcccgcgatcgctggacgttttatggctcgtattatcaggaaacccacggcaccaattacagcgatggattcagccgcgacaactggtttaaccaatacgaatttgacgcccgctatctgatggtagaccaaaaagatctggcgctgggcatgaccttccacttcagaaattacaccttcatctatcaggataacccggaaaaaacgcagtccggcggctataactcccagcgctggtcgttccagcccgactggcgaattaatttcaccgataaattcaaatccaccggctgggtaacggtctacaactggtacaacaatctgcatgaaaacggtctggcgaatcgggaattaaaaggcgaaggcggcttcgaatatcgctttaacccgaccatcgcggtgcggctaaattactttatcgaccggggctggaataccaacagcgacgaccagaccggcgagttctgccgctcgcagctacgcccttatattcccatcaccttctcactgtttgacgcaggccccaccaccatcaccccttacgggcgctggacgttggatgtctggtcgcaaaatgcctcgcgtaatcagcggatgcacaccacggaaacccgtaccggcatctttatcgagcaaaagctgtcgccccatctctccatgacgctggattacgcctatgaagtgcaggcccggcatgatttatctcccggcgataagcctgttgtgaagttccacaaaaccggcctcggttttatctatagcttctga

SEQ ID NO: 392997 - DNA, 1377 bp, Salmonella enterica
atgagtacaccaatattaccgttcctgcccgataacgcagactggatctatcaacccgatctcagcgacgaatttaacggcccggacctcgacccgcgctggtgcccgtattatcaggcaagctggggcgatctggatgcctcccgcgcccgctaccgctttattaccgaatccgacggcaccgtcagcctggaactgtacgtcgataatgccgggcagggatactggcagccttggcgcgccagcaacaacacctacaaagtcgcgggtatcactggcggcacgcgggactatatgaatcagtggccgagtggcggttttcctatcaccaaccatatgccgtattacgatgcctttgccacccgctacggctattttgaaatccgcacccgctttctgagcggcagcgggctggccccggccttctggttcctgggaatgcaggatgcggcttacaccgaaaatatggaggtcgattcaccagaagtcttcactctcgaaaacgtcgtaaaatttaatctgctgccgcgacagggaatgcaacaagtctccattccgacaccttatggcgagggtactgaactcccggatctggaagacggctaccatatttacggcatggagtgggatccggaatatctgaagctctatatcgatgggcaactggtttcaaccattgatgcggcgattgattaccgcatgttcccgctgatctccctcaatcaccatgaaaccaataacaccgaagtcggcaatatctacgataacgatccacctctgcccaacgatgagacgtttaccatcgattattatcgggtctttaaaaaagcggatacgcccgccgacccatggccgaattatcagaacccgctgctgcccggatacaatattgccgaacgcgcctttattaatatctatggatttgacggcgataacgccacctcaagggaaggcaagctaaacgacggcgatcacttcagcgtcgcggacacctatcccaaaggtagcggcaccgaggaggagaatgagcgctggtacaacgaccagttccgctatatctatattgaatggcatcagccggtggatttcgacacgctggtcctctatgccacacaggcacgatccaccgctccgcagaatatccgtattgaggtatccgccgacggctacggcgactggaccgttgtgaagcctgatttcgatctggactggcagacggatgattcgggtattgccgaagggctgaaaatcacgctggatacgccattacagcagaatcaacacgcccgcatcgtcatcaataccgcgccggaaagctacgcgttgagcgaaattgaaatcggcacacagattaacgccactacccgctttaaataa

SEQ ID NO: 392998 - DNA, 189 bp, Salmonella enterica
atggctttcggctattcacggcaagagcgcgtattcgccggatggcggctgcgccttatccggcctacccgcggcatttataccgcagacccggtaagcgtcatcgtcaccgggcaaatggccgaattagtgatcggggttcagcacaaatttttcgatagcccaggcgacgccatcttccagatttga

SEQ ID NO: 392999 - DNA, 225 bp, Salmonella enterica
atggttgagattttgtgtctggaatcaatcttgctccagcggcagagcgatgacgtcttccagatgttgaacagggttgaggtatcagaggtgaggaccgcccggattgacaagcagatacagaccatgagaatcggtcagtttaacgggattctcagaaggcttgatactgtggattttcgcgtcggacagggacgtaaggtggtcactccattatcgaactga

SEQ ID NO: 393000 - DNA, 390 bp, Salmonella enterica
atgtatgatattcatgtcgttttaaacaacttgccgggcggcctggcgttgttaggttctacgcttggtcagcgtgggattgggcttgaaggtggcggagtctttgccacaggccaacaaagccacgcacattttctggttgaagatggtgagggggcttttaaggcgctgactaaggttggtttacaggttgaaaaagtcacgaaaccacttatcaggaagcttaagcaagaacgtcctggtgaattaggcgagatagctgatgtgctcgctcgccacaatatcaatatcattgtgcagtacagcgatcatagtaatcaattgattcttttaactgacaatgatgaactggcagctcaggtcacccacaaatgggatgtttccacataa

SEQ ID NO: 393001 - DNA, 528 bp, Salmonella enterica
atgtttttgagccttgagttccgggtcaatagccggtgtaagcgcggaagcctcagcggagaggaatatatttacctggataaaaccccggaagtgacatggtacggctgggacggcgacaggctgaccaccaccgaaacagccacacagcgcgtgcagacgatttacacaccgggcagcttcacgccgcttatccgtgtggaaacccagaccgcagagctggcaaaagcagtccgccgcacgctggcggagaaatttcagcaggaggcaaacgtcaccttcccgccggaactgatggcgctggtggatagtctggaagcggagctacagcgcggggaactcagcgaaaccagccgggtgtggctggcacagtgcggcctgacgtcggagcagatacagaaccagatggagccggaatacacgccgcagagaaaaatccatctgtaccactgcgaccaccggggcctgccgctggcgctggtcaacgcggagggaaatttagtctcaagacatccctgtgagtcttaa

SEQ ID NO: 393002 - DNA, 234 bp, Salmonella enterica
  misc_feature (210)..(219): n is a, c, g, or t
atggcatatctcatggctaatccaaagagttcctggaaaatacgttttttaggtcacgccttacaaggccgggaagtatggctgaatgaagggggcctgtcactgggggagaaggggtgtgatatttgtattccgcttactataaatgaaaaaattgtgctgagagaacaggcggataatttgtttgttgattccgggaaggccaaagtnnnnnnnnnnaggttgcgggagtga

SEQ ID NO: 393003 - DNA, 342 bp, Salmonella enterica
atgcatcaaaaatcaaaattatttctattgagattgattttactatgtgttgtaattttaacaagttctggctttgataataaaagaagtgaaaaattaatattacctattgattccactcggttcgcgcagttggcttgctattataaaggcatcaaaatcaatagtgatgtaacagaattgaaattgccggaaaaatataatgaggaaacaaggttatttaatcagcaagaagttaagattcctgtgaagggtgagaactttctttctccatatgtgggcggaaatgttcattattatgagcttggttattttgtgtataaaaaaatacttataaattaa

SEQ ID NO: 393004 - DNA, 582 bp, Salmonella enterica
atgatttatctcataaatataagtgataatgtaagtagctactcgagtggtgatgtgcagtttgaattagcaataaatacagagcgtccttatgccaatgacgttactacagcttctttgctaggggcgatgttaaatactggctataccgattttaactataatggtggcagtaacgagagaggtatatctccggctcctggttccagtcataaaaatggaatgaatttagatatgcgctatttaagaaaggataaatcaggtgatgggattcacctcgatttaaacggcgaaacaggaaatccttgtggctggaaagggttggatatcgaaagacaaaataaatttattgaggaattaaagcgatttggctggggtactattctggggtggaagtactgggatagtactaatagtcctaatactggccgcgcttgggatgaatggtatgctgtatggcaaagtgaacatcctggcgaaactcaaaggccagtgttaaaaaatatcatacatgctataaatcacaatcatcatactcattttcaaggatataatccgatattggagttaatgactgattaa

SEQ ID NO: 393005 - DNA, 204 bp, Salmonella enterica
atggtaagtgcattctcgaccgaaaatggcgttgtactggggcaggtgaaaacggaagctaaaagtaataagattacagccattccagaattacttaacttgctgggtttaaagaagtgtgtgataactattcacgcgatgggatgtcagaaagacattgcatctaaaatcaaagaaaaaagcggattatcttcttgcagttaa

SEQ ID NO: 393006 - DNA, 402 bp, Salmonella enterica
atgatgaaaaaattgatagttatatcttcatttatcatattaactgcttgtggagacagaaatgaatgttctttcgataaacttaccagttatggtgaaatagaagatcatgttactttacgactgcatgatatgcaatatgcttgtggtgattgtgtaagtttatatagagtagataaaataattcattctgaaaataatgagtataaattttatttcaacaaagaaattacgatatctttcttgaatgataatctggaaaagaaactggaagatgaattaaataaatcctcttgcgatcacggtaaatatagctacatcctctcaggagggtttagaaataaccttctgggtgtcggtcgattagatgtgactgaggggcacttagtgtgtgatgattaa

SEQ ID NO: 393007 - DNA, 735 bp, Salmonella enterica
atgaatgccaaaaccaaaacaacatctgcgaccacatccaagaatactgataatacaaaaatgcagaaaattaccagaaaaaaagtcaggttgtttttctatggaggggctagaaaagacacgcataataatacgtttttagatgcagctacgaacgtaaggaatgattataaaaaagataatcgtaaagatatagaaataaaaccactttatgagcataaaagtgcagaggatataattgagagaatagagatggaggctgataattcaatcgagtcgattgattttttttctcatggaacccctgcggctttacgcttccaacgttctacttttggttttggtcaagacttattcatgaatgccgaagtgcaagagaaagaagatacatttgatgggaatgctgctaatcttagtgaaattaattatagtaaattcactaacactgcgataattgaagtacatggttgcagagtaggttctgttgaaccagaacttaataatattaattgggcaatgatattttcaaaatatctatatgatgcagggaaaacaaagtcagttgtcattggacacataacaaaagcaaatccagatcagcataaaacattaaaagggagtgactacaggcatggaaacagaagaatatatcataatggaaaggagttggatatttatcgaaatgagggtagaataccacccgaatatattaataaaaaactattaggtaaataa

SEQ ID NO: 393008 - DNA, 1050 bp, Salmonella enterica
gtggacttcctgaacggggacccggaccagcccatcatcacggggaggacgtaccatgaggacaaccgttcgccgggaagcctgccggggacgaagacgcagatgaccatccggtcgaagacgtacaggggaagcgggttcaacgagctgcggttcgaggacgccaccgggaaggagcaggtgtatatccacgcgcagaagaacatggacacggaggtgctgaacaaccggacaacggacgtgaaggtggaccacacggagagcatcggcaacaaccagcgtgtcacggtgggcacgggccagacggtgaaggtggggagcaggaaggaagggggccacgaccagaccatcacggtggcgaacgaccggcgtgtcacggtgtgcaacgaccagacggtgagggtgaagcatgaccgtgtggtgaacatcagccacgacgaggggctgtatgtcaaaaatgaccggaaggtgagggtggaaggtaagcaggagcagagcacgaccggggaccatatcagtctggtgaaggggacgcacagcctggaggtgaagggggacctggcgcggaaggtgtcgggcgcgctggggataaaggtggaaggcgatatcgtgctggagagcagcagccggataagcctgaaggcgggcggttcatttagtgtcattcatgcgggcggggtggatatcatggggccgaagataaacctgaacggcgggggcagtgcgggagtgccggtatcaacgctgcaacccggggtactggaggctctggaggatgacgataaggatgatgacgcggaagacggaaaggataacggtgacggaggtgatgacgtggccggtggcggagacgatgagcaggacgacccggaaaaatattatctgcggttccattttattgatgatgacagtgttccgtatgcaaatactagatatgttgcacattttgcagatggtacacagagagaaggcgtgacggatgatgggggatatacagaagtatttattaaagataatgaggaagaaataagaattcatttgtttctttaa

SEQ ID NO: 393009 - DNA, 993 bp, Salmonella enterica
gtggacttcctgaacggggacccggaccagcccatcataatggggaggacgtaccatgaggacaaccgttcgccgggaagcctgccggggacgaagacgcagatgaccatccgttcgaagacgtacaggggaagcgggttcaacgagctgcggttcgaggacgccaccgggaaggagcaggtgtatatccacgcgcagaagaacatggacacggaggtgctgaacaaccggacaacggacgtgaaggtggaccacacggagagcatcggcaacaaccagcgtgtcacggtgggcacgggccagacggtgaaggtggggagcaggaaggaagggggccacgaccagcgcatcacggtggcgaatgacaggcgcatcacggtgggcaacgaccagacggtgagggtgaagcatgaccggacggtgaacatcagccacgacgaggggctgtatgtcaaaaatgaccggaaggtgagggtggaagggaagcaggagcagagcacgaccggggatcatatcagtctggtgaaggggacgcacagcctggaggtgaagggggacctggcgcggaaggtgtcgggcgcgctggggataaaggtggaaggcgatatcgtgctggagagcagcagccggataagcctgaaggcgggcggttcgtttattgtcattcatgcaggcggggtggatatcacggggccgaagataaacctgaacggcggggggagtccgggggatgtaatactgccaatgccaatgccaatgccaataactgaactagggttgtatagtattcacttctctcttattaatgaaaataatggcaaaccccttgttttttttccttacgaagtagaattgagtgatggtgttaaatatacaggggtaactgatgaagacggtaatgccgaactaattgtgtcggataaagaaaatacagcaaaaatatctatatatgaacctgaagtaacgccaattaatcatgaatgggattcgtaa

SEQ ID NO: 393010 - DNA, 573 bp, Salmonella enterica
atggcacaaaatgcactaaagaatcaatcgggaacgttatctaacgctaacgataaaaagaaagaagttgtttcagttgatgatgctaaaagattaaaagaaataagagcgattgtaaaaaacagtaacctatcttctcttgatgataatctgattatttgccaggtgtatatggaatccaggtttaatgagcgaagtggagagaacgagcatagtgctcgcggattgatgcaaatgcaacggaatgcagtcagacaggtttataaatatcgcgtgaagaaaaatacgggaaagtcggctagggataaagatttgccggatatttatgctaaagcggatgctttttataattccgagaagatatatgaggaaagtgataatattaagataggtacggaatatatgcagtattggattgatagaaacaaaaacgatattgttcaggcgtataaagattatagagggaaagagaatggtatatattacaataaaataaaagtgtgtgcagacaagttatctggagatcctaacaatatgcaactattgcgagatatggttgatgttaaaaaatag

SEQ ID NO: 393011 - DNA, 540 bp, Salmonella enterica
atgttaaaaaatagttactttttgtctttgatatttttctcttgttattgtttgcccgggggtatcgaaaatgtaaaaagttgtaagctggatagaggtaatgaagtcaaactgatttcattgtggactgttgatggcagtacgccatatttaatgtttgacaatattattgttagcgcatttcttgatgggagtatagtttcaggggatattgttctatcaaaatgtataaatcactccctcatttttgcgctgaattacggtcctccttatataaaagggtgcttgataacaggcctgagcgatgatgcagtaaaaaactatcgtcccaagggggtttgtttcgctgaaagaaacactccggagtctgtctggtttggtgaagatcacacgttgattattattaaaaatgataataataccggtgagtggaatggtaaatatattatctatgatagtcgtgaggaagatgctcaggcctttgataaattgcctgatgctaagaattataaaatttatcgattagatatgagtaaatga

SEQ ID NO: 393012 - DNA, 1050 bp, Salmonella enterica
atggcccgccagctgaaacctcacccccggccacagccgcggcgagttgctcacgcagaaggcctgctccgcactgttacgccacccttccacccggtagcgcgcaaaatcccgcccgtgctgctcatccttgaaccgtcccggatagtcgtatatcccgtactgcgtccgctgcccgttcagacgctccccgtcatggcggtaatgccccggccagcccggcgttttgaacgtatagtcctgtgtctccaccgacgagggccgtatctgcgcccggtagtgaaagtcgctgatgtactccgtgctgcccccggtggtggtgccggggttaaatgccagcgtgcccgcactggtcagccccgccacgtcatcacacaccgccagcctctgctccggcccttccctgccgcaccgctcaaagaagaacagcccctcctccgcccacagccgcgtcaggaagcccaggtcactctccccgtactgcacgcagaactcccgtaccgggtgcgcctcatagaacagcggcagccactccgtcaccccgttctcgttcagcagcgtcgccgatatcgtcctgatgtcctgctgctggaagatgcggtagttctgccgcagtcccgcacgccacagcggcgggctgatacccaggtggtagcgcatctgccacccgttgttcacgcccggagacacttcactcacgatgccgctgacgtggcgctgcgcggcatccccctgccagacggtcagcaccgcctccttctccaggaaatccgccgccgtcaggtcgaacagcccgctggcaatgtccacctccagcacaaacggcaccgaatgccgctgtaccagccggaaactcaccaccgccgtcgccatctcctggataccctccaccttcagcgtaaaccgaagcccttctgcggacacagtcacctccctgctccgttaacaagaaaacacactgtcagcctgtattcaccgtaccgccaccaattagcacaccaccacagcccaccgcatcccccgttctggcggctggcaggccgtcaataa

SEQ ID NO: 393013 - DNA, 987 bp, Salmonella enterica
atgacggcaacaaaatatccgctgaaggaggttccatattgtagcggttatgattatataactgttgttgcagccagaacgataccatggtcaacgaatgttactgccctttttcgtgatggtcccggaaaccaatatcgttttattaattgtggtataagacaattaggcgagtttccagatgcagatgataaaagttatactatacaacgtattatggttgtttttcaacatggctatacgacaagtgatattgaaagaattaatgagtatacggcatgcaaaaatgcccgcattatttatgtaaagaataaagatgagttcgttaattttcttaataaacgaaaagcgcttaaaaggcttattaaaaaaatggtttttttctgccatgggataattaatattgcgtctttccattattctgccgatcatgaagatgatgaaaaatcgggagagtttgacatcagctatattgaaaaagtacatgagtctatttttgattatgatgccgaagttataacgtatgcctgtcgggcgggaatttcagtggatgagcatgactttagtggtggaaaatatgcggggcaaatggaaagtcatgcacagaaaatggcagataaatgggatgtaaatgtaaaagcttttgagatgcgttctctttatgtaggagtttatgggacaaaggaagaactcgcacaagttgaaaaagagcgaaaaattgttgaggaatatcaaacagaacttgcaaggtataaaatggggaaacttacaggtgataatcgtgcacctaaaccaaagaaacctgatggttatgatgaaatggagaggcgagtaaatgaggttcgtgagcgagaatccaacgcaacagatggtggtgggcctattgctccaaatggttcatggtgttttccaacaacagcctctaccccaacaggattgagaagaggcttattgccatacaaaccaagtgaatggaaaatgtcataa

SEQ ID NO: 393014 - DNA, 231 bp, Salmonella enterica
atggtaaatcagttgaacttaaaggtgttccttggtcattcaatttcgattaagaaaaatataatgaaaaaggtaattctgatacgaatggtgaaacagttagagttgaaaccccaaatcctaaaaaattttttgtacttgtcgggaagttggcagagggatatcgtaggcgtgagaatagctttggttctttggataaaactgaagtggatgaaagaaaaatatctttga

SEQ ID NO: 393015 - DNA, 171 bp, Salmonella enterica
atgtcggggcaatcatcgttcgatcccactgctattcctaattgtactgatgatgtgggagagcctgcatctatatgtaaccaaatgttcactcataagattaaacttgtaccggttaatggtaaatcagttgaacttaaaggtgttccttggtcattcaatttcgattaa

SEQ ID NO: 393016 - DNA, 555 bp, Salmonella enterica
atggttgagcaacattatgcattccgggtattaatgagactggggaaaaaatctacaatgctgaggttatatgctttaatagatggtattcagtatgaccgcgcaataaaagaggagcttaacgaaggatgtgggaggtattctctttttagtttacctgaagataaacctcttgcttttgctgggccgtggttatttgatgtatcaaaattatctataaatcatttagcaaggattttggaaatggagaggaaatatccggcggtctcttggattatcagtgagcatccggctttattattggttcaacacttgcaatcttgtttgctggtgtcattcccttcagagcagaaagggattctttgcttttatgattgtcgagtattaaaatttcttccagagcttttatctcagaaacaaattgggcatttaatgacatacagccagcaatggcttttctattataatggtgagataaactgctataaatgtgatacaggaattctgaatgttaatatattagatgatgatatttatagctcggaggtattttaa

SEQ ID NO: 393017 - DNA, 939 bp, Salmonella enterica
gtggacttcctgaacggggacccggaccagccgataatcacggggaggacgtaccatgaggacaaccgttcgccggggagtctgccggggacgaagacgcagatgaccatccgttcgaagacgtacaggggaagcgggttcaacgagctgcggttcgaggacgccaccgggaaggagcaggtgtatatccacgcgcagaagaacatggacacggaggtgctgaacaaccggacaacggacgtgaaggtggaccacacggagagcatcggcaacaaccagcgtgtcacggtgggcacgggccagacggtgaaggtggggagcaggaaggaaggaggccacgaccagaccatcacggtggcgaacgaccggagtgtcacggtgtgcaacgaccagacggtgagggtgaagcatgaccggacggtgagcatcagccacgacgaggggctgtatgtcaaaaatgaccggaaggtgacggtggagggtaagcaggagcagagcacgaccggggaccatatcagcctggtgaaggggacgcacagcctggaggtgaagggagacctggcgcggaaggtggccggggcgctggggataaaggtggaaggcgatatcgtgctggaaagcagcagccggataagcctgaaggcgggcggttcgtttattgtcattcatgcaggcggggtggatatcatggggctgaagataaacctgaacggcgggggcagtgcgggagtgccggtatcaacgctgcaaccggcggtgctggaggcgctggaggatgacgataaggatgatgacgcggaagacggaaaggataacggcgacggaggtgatgaggggaccgggggcggcgatgaatctggaaataataaagcattatgtctgagctgtttgatggatgctgcgatgaatggaactcctgttgtgctgagaggaaattag

SEQ ID NO: 393018 - DNA, 1227 bp, Salmonella enterica
atgggagataaggtaataatgaaaatttattctcgttttactgtaaagccagttggactggatgattgttcatcaattgatttgactaaatatgcatacgtaattaaattctgtgatgcaagtggtcagcaaagtatattgcatgaggatgctaaaagccattttttgaaaagtggcgagtcaaaacttcattgctttgagtacaatgggaataaattagagttgccattggttcgttgtgatatatattttgaagaaattattacagataaaaatatattcgttaattcattttcaaacgataatgccactaataactggacggtctttaataaaaaattcagtaaaggcctgacaacaaatagtaataattttgataagatatgtaatatttcgaagcatcgagtgttcattgattcacaatttcctgttggcgatccttttgatccttttgaaaagagtaaaattgagagacagttaaaagcaagattagcacatgtatcatcgccacaggattacatgagtaaccaatatcctgaccaaaatagatccagtttatgtggtcccgcagcatttttatatgcgttattgatagataatccgcagttatatagtcaatatattaaagacttatggaatagtgggaaggctatgcttggttctttgaaagttactccttctcatggatgttgtcatccagttaaatatactaagacctcgggggaaacattggttcctgcgattgactggatttccatggccagtttacgtgataacgaaaaccattcatttgattatagctcgccaactgatacccttagtggtgcaacactgcctgatgctatagcaggttgggttaattctgttggtagtaaggtcgtttataacagtggaacatctttggtgttgtcatggcccatagagcaagtaatatggttaaataattatatttctcctgattatcatgttgcagtacttatcaatgacgggcttattagtgactcatggaacatgactccaacacactggataatgtggactggaaaagtaactactatgcagtcaaagcaacctgttgataaaaatacgccagataatacattggtagatttagaacttttttcatggggaaacattgcatatttgagccagtacggtaaaagccataccctcaaagacttttgtaagtatatttatggtgccgttatttttaaaaaaattccgtga

SEQ ID NO: 393019 - DNA, 588 bp, Salmonella enterica
gtgaaggggacgcacagtctggaggtgaagggagacctggcgcggaaggtggccggggcgctggggataaaggtggaaggcgatatcgttctggaaagcagcagccggataagcctgaaggcgggcggttcgtttattgtcattcatgcaggcggggtggatatcatggggccgaagataaacctgaacggcgggggcagtgcgggagtgccggtatcaacgctgcaacccggagtactgggggctctggaggatgacgataaggatgatgacgcggaagacggaaaggataacggtgacggaggtgatgacggggccggaagcgggagaggcgatgattcgggagactccggagaaaatgatgcttcagatgataatgaaaaaaagaaataccgtttacggtttgtgctaaaagacgacgaacaaaaaagttattctcagacagattacattgcgtttttaccggaaggcaaacaactatcggggaaaacagatgaatatggctatactgagatattttgtctcgataaaccggatggtatttatatcgatatactcctggataataaccaatgggagataaggtaa

SEQ ID NO: 393020 - DNA, 552 bp, Salmonella enterica
atgaaaaagaaggttattctttctgcctctctgttgtttgctgctatgttcggcgtggcgcacgcggctactgatgatcagggtaccgtaacgtttaatggcaccatcattaatccaccttgtgaaatcgatactaccagcaaggataccagagtgacatttaccccgctgggtactaatgccttttctggtataggttcagaggcttcacagacgcagccatttagtattaaattgatcaaatgtccaacaaatatcaacgttaacctgacatttgctggcgataccgccactgacaatacgcaattgaaagccagcactaacggcgatgatactggcgtgggtattgtggtatatggtactgacagcgcaaaaaccaaagtgacgtttgacgatgagcctgttgccgctcttcaacaaacttccggtggggatgagcaaaatgacataacctttaattatatctcgaaggttgtcgccaccgttgatccagcaagcatcaaaggcggtaattttaccgcaacctctaccttcaccatctattatccgtaa

SEQ ID NO: 393021 - DNA, 720 bp, Salmonella enterica
atgaatctcaaattgaccagaattttattttcagcagtattgtttttttggcaaagtattgctattgcgggaatacagattagtagtacgcgtattatatatccggagggcgcggacgaagttcaggagacggttaaaaataccggggaaagtaatcaacttgtccaggcatgggtcgataacattgataaaaacgatcaacgtaagccgcctttcgtcgtgacgccgccactctttaaactcaccggcggccagtctaacatagtgcactttatctccattgatgagacggcaactctgacaaaagatcgtgagcaaattttctgggcaaatatcaagtccattgaagccacgccgaaagcgctttcacaacaaagtaaactgcagttagcggccagaacgcgcatcaaactgatctggcgtccaaaaggactggataaaaattcagctgcagaagcgtataaacatttggttttttcgatttcaggcagccgtcttactgtagaaaatccaacggcgtattacgtctctttgcagacgtttaccgttgacggaaaagacatccttgcgccaaagaatacgattgcggcggtatcaatgatgatttcgcccttttcaaaaagggattatgcattgactcatggcagcgcgaaaaccgttcgttggaatgctatcgatgattatggtaacggtacgcctgttcaggaaaaaacattttaa

SEQ ID NO: 393022 - DNA, 288 bp, Salmonella enterica
atgttttatcgccccgcacacttgaagggactggtcaatgatgcgtggaaatcactggaatttaaacgtagtgatcattcactcaatatatataacccaactgaatattacgtcgtatttgccggactggcagtcgataaaaccgatctcacaagcaaaattgaatatatcgcgcccggagaacataaacagttaccacttcctgcatctggcggaaagaacgtgaaatgggctgcgatcaatgattatggcggcagttccgggacagaaactcgtccactgcaataa

SEQ ID NO: 393023 - DNA, 585 bp, Salmonella enterica
atgagtaaagttacaaaaacagctattgcgggattacttgcgcttttcgcaggtaatgccacggcaaccgatggtgaaatagtttttgatggcgagattttaaaatccgcttgtgaaatcaatgactctgatagaaaaattgaagttgctcttggtcactataatgccgaacagtttcgttctgttggcgatcgtagcccaaaaattccattcactattcctttagttaactgcccagtgactgggtgggagcacgataacggcaacgttgaagcgtcttttcgtttatggctggaaacgcgggataacggtaccgtcactaacttccctaatctggtaaaagtgggctcttttgctggcacagcggcaacaggtgtgggtatccgtattgacgatgcggaaagcggaaacattatgccactgaatgctatgggcgctgataacacagtttatcagatcccggcggaatccgctggcgttgtcaatgttgaccttatcgcttactacgtatcaaccgttgaagcatcagaaatcactccaggggaagcagacgctatcgttaacgtaacgctggattaccgttaa

SEQ ID NO: 393024 - DNA, 417 bp, Salmonella enterica
gtgcgggtcatcataataataacgggtcacatcgccgctacgggatttctcctgcgtcaggcgaccccgctcatcaaatgtctgctggctgcgcaggccgtcagggccggtggtggcgatgagctggcgctggtcgttataactgaagcgtacgctccttccatcaggcgtgacaatttccgtcacattcccggagccgggactcagccggtattcggttttacgtccggccgcatccgtcatcgccaccatgcggcccgcgttatcaaattcccgcgtaatcgtactgccgtcggcctgttcttccttaatcacccgtttcagcccgccttcgccttcggtgtgcagcacctcgcggcggttcaggctgtcggtaatgatgacggcatttttctcatagccgtaggtatagcttaa

SEQ ID NO: 393025 - DNA, 747 bp, Salmonella enterica
atgaaattcactgaagatcaagttacgtttttaaaaaaactatctcttaaaaattatattgatgaattaattgaccatattaaatatgtgtttccatcgttgcctttttcgtgtggtgcaaatgatctctactcttatattgaaatgaatattgttcgggcgaaaaatgcagggtatacacaaagaggggcagttcgtctttatattgatatgatgattattttcggggtgggatttgaacgagacccactgtttaaaaatatagtaacacgaaatataaatgaaaatttatcacagatagaaaaaaccatgaatttatattcatttttaaatagatatataaatgacgtctatggtgaaggtggtgttttttttatggaaagtttgaataaatttaaggatttcaacataaacggcatttctgttacttatgaaaataatttctataatattcatgccttattgaaatatatctatccacagaggtatgaatttattggttctaatgccattgaccatttgaatgcttttgcagaagagtatgttgaacgtaataaaatagtgcagattaatcaaaaaatatacttaatcatagttatgttcttattcggttgctcactcgaatacaatcctttttataataggttaaatataaacaatctaagtaattatcttatcaaagaagattcaataaatcatgattcgattgtgtcatgttattcctgccttcagattaattgcagttga

SEQ ID NO: 393026 - DNA, 192 bp, Salmonella enterica
atggcatatttgaacattttacttctgttgcaggagggcatcttgccgcaatactcaaacaacttggagaagaacaagaagcaaataattataaaagaggctatcatgaattacttgcattttctcaaaccgggcagtggacgcataatggaagaactattgctgctgaatatatgttcaaaggtcttttag

SEQ ID NO: 393027 - DNA, 393 bp, Salmonella enterica
atgcaaaatggcgccaattttggcccctggcgattacgcaactattccacgtggacacgcaacgatcaggcgtcgagctggaacaccatcagtagttatttacaacgtgatatctttactggcgtgcaactcgcttccgacgataatatgttgccaaacagccagcgcggatttgccccaacggtacgcggtatcgcaaacagtagtgcaatcgtgactatcaggcaaaatggttatgtgatctatcaaagcaacgtgccagcgggtgcctttgaaattaacgatctctacccctcttccaacagcggcgatttagaagtcacgattgaagaaagtgacggtacgcaacgtcactttatccagccttattcttcattacccataagcagctga

SEQ ID NO: 393028 - DNA, 219 bp, Salmonella enterica
atgtccagtgtactaatgtctatggtatctttacgttttcacctttcatggggtctctgtactcatatccaattgatatctcatagtatattcaatccctaccctttgattattactatcaaacccctgattaaattagttatgatcattttagccataatcgatggaatacataacgctgagtactttacgcctgcaactgtcaggctcacgccctaa

SEQ ID NO: 393029 - DNA, 126 bp, Salmonella enterica
gtgaaaaagtggcttataggagggatattgatcgcaagttttctgaccggttgtctgatgtggcacaacattgataaatggtttaataaagatatcgaatttttctatgccggagacgataactaa

SEQ ID NO: 393030 - DNA, 267 bp, Salmonella enterica
atgaaaatctctcttgtcgttccagtttttaacgaagaagacacgatgccgattttatataaaacggtacgtgagtttaatgaactaaaagaatatgaagtcgagattatttttattaataccagaagtaaagatgtgacagagtcaataattaacaaaatagcagtatctcatccactcgtcattccggtttcgtttacacgaaactttggtaatgattcaagatgcacaaccattttattaatcttttttattcaattgaggtag

SEQ ID NO: 393031 - DNA, 174 bp, Salmonella enterica
atggtcgccaaaaataaaattcacagtcgtcgtattcgtcaacctctacaacagttacatcatcgttgtctttttcagcaactggcggtaagcccaccaggaacaaaatatgtttcagtcacctctgacacaaaaaactggcttattcatcttgtgacttcagaggaccgttag

SEQ ID NO: 393032 - DNA, 213 bp, Salmonella enterica
atgatatcacctcatgacaatgttaatagcagtcgggtaacggattacccggacagaagttacctggtttcccgctcgttaattcatattgtccatcagaaagggagactatcctgggcgtataaaatcttttttatttcggtcaaaacgttaatcaacgagaatagtttgttttttgatttaaatcattttttagtgttcgcaggaaaataa

SEQ ID NO: 393033 - DNA, 423 bp, Salmonella enterica
gtgaccttcccgccggaactggtggcgatggtggatagtctggaagcggagctacagcgcggggaactcagcgccgcaaaccgggcgtggctggcgcagtgcggcctgacgccggagcagatacaaaaccagatggagccggtatacatgccacagagagaaatccatctgtaccactgcgaccaccggggcctgccgctggcgctggtcaaccaggaggggaaagcggactggtctgcggaatatgatgcctggggtaatgtgcagcgtgagaataatcctcacaatatagagcagcacattcgcctgccggggcagcggtatgatgaggagacagggctgtattataaccggtatcgctactatgatccgttgctgggaaggtatatcactcaggacccgattgggctggaggggggctaa

SEQ ID NO: 393034 - DNA, 690 bp, Salmonella enterica
atgtatataaaaaaaatatcgctagcttctctaaaaataggggccctattttttacactgttcattgtttcctgcgatgcatatgtggctgaaaaaaatctatccctgacatctgtggcaagttcacctatggcgattagtgagttaaaggagatgtggtttttttgtgaaaaatgcttgaaaaataatatgtgtaaacaaaaagagttcaaccaatgttcatcagtgacaatcaaagaaaaaaatgaagcgctaagtttagctgtaggaagcgcaaatattgaagcagtacactttttagttgaagtagctcaagcagatgtaaattctattactggcaggtataatgagacatctttaataattgccgcgtattatggaacagtgaaacatagagagatagctaactatttactatctcatggtgctgatattgatgcaatagcaaaatcaccaatagatactgcattaattactgccatttggaaaaataatattaattttgcaaaattattacttgaaaagggagctaatccttcactttctgatgttggattgaaagaagggtatgcctgtaaatatgctattcaaaaaaaacaagcagaaattgtgccatatataccaaattgttgttctttaatcgagcagaattcgcattgggttacggatgtaggttatttttgtccttag

SEQ ID NO: 393035 - DNA, 642 bp, Salmonella enterica
atgaaacagcacatccgtctgccggggcagcagtatgatgaggagacggggctttactataaccggcatcgttactacgatccgttacagggacggtatatcactcaggatccgattgggctgcggggaggatggaatttttatgtatatacgtccaatccaataatagaaattgaccctcttggattagcggggtgggattcattaggttcctatattaatcaacctgggtataaatcaaaagttacaaatgtagccccggagggggccgatactacaaaaccagtttcgttaaggcctgacggttacccttggggatatggttgcggagatgaaagtacagataaatttgttcctgatggtctgtatggtgttagttttatgcaagcttgtagaaatcatgatatctgctatggaacatcaggaagcagtaagcagtcatgtgatactcatcttggagacgacatagtgttggcatgtaacaggatctggaaggatacactgagctcagatgatatgctttataaatgctatactgctgctggtatttatcagttagcagtggaaaaaaaaggtggccccgctttcgaagcggctcaacgagaggcagcaaaaaaagtaacagagttcggtccaaaataa

SEQ ID NO: 393036 - DNA, 291 bp, Salmonella enterica
atgtttaattttaaagaaaaaattacagattatactgaaatggagtttatcgattttttgaaagagttttctaacccaactaagaacggtaaacccctaatagacaaggaatttgaaaaataccaagatgtcttatttaatcatttcatcaaaatcacagaacatccggcaatgggagaccttctgttttatccagagaatcctggtgatgatgaacctgagaaagtagttaaaatcgtcaaggaatggcggcgatctcaggggttgccgttgttcaaagattcaaaatga

SEQ ID NO: 393037 - DNA, 1113 bp, Salmonella enterica
gtgaaaaaaataaaacctttattactctttcccttagcatcatcagccttgctactgacctcgctctatcatcctgcatgggcggcagggtgcgggtttatgattagctcgaaaaccaacgatatcaactacaccaccgatgtcacgctaacgcccactgccgatgcgcaatcgtttcttcctgaccagaccaatctggtaccgaaaagccagggtcaagacgtgacctattggggaagaaaccaaaataacgtttcaaaagtcattatttttaaaccagaatctacggccttcacggtggatgccagtaatcccaaaggatggctggttgatagcaccgtccccggactctactttactttatccgttaatatgccgacaccgggtatacaatggggtgagttttcgcctgccatgcccatttatttatccaatgactccagcgtaaatcagtcgcagccgtctggcggctggggatgttccagttctaaaaacgatacctactttcaatctggcaatatgacgttttccctgagtttctatacgacctccgcatttaaccctgcccaggccgcaggcaaacagctcctcgtcaacaggaagcgggcaggaacgctggaaaactcacaggacagcggaggagagtttgatatttatctgcaaggcccactgaccattgcggccgccggctgtggcgcattcagcgccgagaaaaccgtcgatttaggcgaaatcccgcttaacaccctcaaatctaaaccggacgatgagcacaacaaaaccccgttcgagataacattaaaaaactgctacgccaaacccacgctgatcgttaatctcgccacaaacccatcgaccaacaatctgctgagccgcaatcagggcagcgccaaaggcgtaggcgtggggctgggatatttcacatccacctcagccagccagcgtctggacttaagcaatcccaacacgattagctcgagcgatctggagtatagcggtaacaccagcgacggggttttacatatgtacgcgatccttggcgtaacggataaatcagccttatcagcaggctcggtatccattccgacagtgattaccttgacccacccctga

SEQ ID NO: 393038 - DNA, 978 bp, Salmonella enterica
atgagaaaacctctaatattcgctataaccatcgcagtgaacatggtgatgattaattatgcccaggcaaattatattggggacgatattaatattaaagatatgggttatgacctggacgcatttacccttccggctactgtaggagacagtactggctaccatgataacagttcaataacgtatcatgaagcccaaaccggtagttctacaggttatgtaaatctctccattagcggtactctattaggggataatctgtgggcaaccagtaatccaggaataggcatccagtatcgtctggaatccgggagcgcagattttacccctcaaaattctgaaacttcaccagactatcgtgtaaacctgaccggttccggcgcgatacaaacaagttattttcatgtacgttatcgactagttcgattgctggataaaatccccccagggaaaataaccagtctgcccatcgtcacgttaaacgtgcataacccggaaggtgaaggcacaccgttaatttcaggaattgtgctttctaagattaccagtaatatcaaaacgactgcatgtaatatcgatgcaccaacggaaataaagctacctactttatacggcaatgagttaataaacggggcacaaaaaattaccgaagcgcctactattatgttgaaaaattgtcccggcgcaattaacggcatttcatataatttctctaccgtttacggaacacataacgctactaatggtgttctcaagacagttaccggtgacggctatgcaaaaaacgtttatgtacagatacaaaatgccgacggcactgcccatgaagtaaatagtgctattccattgagcaattacgacggttccggcgactatgctatacccgatttcaaagtggcctattttattgatgacgcgaataccgtaaccgccggtaaagtgaaaacggccattgagctgaaagtaacctataactaa

SEQ ID NO: 393039 - DNA, 198 bp, Salmonella enterica
atggcagatgatggttcagcacaatccgacaccgtatggccaatgccgaaattctatttcgaagtgaaatgggatggcggtgctggtgctgaaatggtgtccgcatttcaggaagtttcagggcttgattcagaagcccagcccatcgaatatcgcgcgggtaatagcaacattaggctcaaagacataggcttttga

SEQ ID NO: 393040 - DNA, 504 bp, Salmonella enterica
atgctcgacgaaatagccaagctcagcgctgagctctcacgaccggatgcggtgctgctgcacaagattctgtcgaatatgagtccgctataccaaaccattatggcggacattaaattccagcaaaatattctgccgccttcttcggcgatggctggtatttacaccatggtcgataattctcgcggggtgtggaaggcgcctgctaacgtcagtgttaatgccgtggtctccccgaccgtcaatatcagcgatgatgaacaagaagatctgaacgtcacgacccagggtaaatcaatcaacgccattcgaccatttatcggggaaggcacactcgtatggggagccagaacgcttgatggcaatagcgtagactggcgttatatcaacgtcagacgcacgatgattatgctagaagagtccattaagcttgcttcaaaagcctatgtctttgagcctaatgttgctattacccgcgcgatattcgatgggctgggcttctga

SEQ ID NO: 393041 - DNA, 417 bp, Salmonella enterica
  misc_feature (374)..(383): n is a, c, g, or t
atgctgcttatccctgaagccattcaactggccgaggacgactgtattaacgtcgagcaggcaatgcttggtcactgcggcggcaagatgaaaaaccgcgttgctatcctggatgtctggaacggttacaaagaccgccaacatcctgatggtgactgcgttgaaagcttccgctcaaaactcggcaccaactatctcgattacgccgcggcttactatccctggctcaatacctccatcgtgcaggacagcgatgtcagtttcctcaacatcagtaatatcgataagttagctgagctgctgaatggggaagttgcgctgatgttcagtgacttagaaggtctttccgaagaagaactcagcatgggtggtannnnnnnnnngccacgcgcaaacaggcaatgctcgacgaaatag

SEQ ID NO: 393042 - DNA, 783 bp, Salmonella enterica
atggcggactatcaaacaatcttaaccatcagcgtcctgcatgagtattacaatgccagcagcgataagttcgcgcccatagggctcgttgccgaccgggaaaccgtattgttactcaggcaatacggtattctgctaaaatcagcgcgaggttttacccggttgattgtcgatactgtacggtttagcgatctagcggatttgacagcagaattgacctttagattttaccttgtgagcacagatcccggattcagaaacatcacaaaaatgcctgatatgttcgatatctcaatattaaatgccgaatttacagatagctcagagctcgatatcaccgcagaacattgggtcgacataaaccagttaaacaccagtacagccattgatagtgcagttatccataacaaaaactttattggcctactcactatttcgctgcccaaatttcactgtaccttagagaaaaaaaacatcaccgttcgattcaacgctatctcagcttattggaaatactatatattctcgccaggaggtaaaaaaaacctcaacatcccccactcatttacagagcaagaacctgaacaggtagcaaataaaacggcaagaatttttatgtccgacaatccaatactcttaaggaaaatttatgcggagcctttttcactgttggatgctaacaacgtgatcattaagtctctgcctttgccaatgccagacaatatatcaacatccattgtcaaaggtttcaaaatcactattgcacatatttacatcaactga

SEQ ID NO: 393043 - DNA, 585 bp, Salmonella enterica
atgctagatctatgcttaaattacttaaaagaaaggatgaaccaatccgttaaaaatgtttttgatttagccgacgatctggtgattgtctccccgccaacagatctcgatggctcaaaatcgccaaagatacaaaacaagatcctgatttttattagcaatattgagaaggactcattttcaaaaagctaccgacaagatttcaaccataccagcaatagaacggcggtatcatcacaaccgctttttatcactatcacggtgaccgttgcagcaaactttagtaccaaccattactctgacgggctgaaggtcctttcccatttcctggcattcttcaaccgccacaacagtttcaaccgacaaaactcccctgacctgccgaaaaacattgaacaactcaacatggaactcgattccatacccggcgatcagcttaatcacctgtggggaatattcggttcgcactacctgccttcctgtacctatcgcgtaagagcgctgatgccggatagcgagtctattctgacgcaagtgggtaacatccatttgtcagataccactatggccaaaagagataattaa

SEQ ID NO: 393044 - DNA, 1182 bp, Salmonella enterica
atgtatgaacgagtaccgaaaaaaaacaataaaaacatggcggttgctaatgttattgttaaaaacaatagtaaagtgaagcaatgctttggatttgtggataatcggcctgagcctatttcatcttttatcatcaataaaaatagtaatgaaaaacaaccagatattattcagcgccaaattttatcggtcaagatcggtgatgagttaaaatggtttgatgatgaaagcttcaatccgaaattttttgccacggagaaggaagctgagaatgataggtttttaaggcgtgtgagccgccgacctgaaattaatccgggagtcgttcccatttttgatataaacagtgggcgtcatgattcaggattaagcaaagcaatgagatatgccttgggtgcagaggcacccgaatcgttagcgaaacaccgatttgaaagtgccaaggggcaacaggataaatttcaaaccttagatccaaagttgctttcagccgcactatatggccaaactgatggtgaaaagattgattttttgcttctggcttcagaaaatcctgtgaccacaaaggatattaaaagtgctccaaatattggtgaggcagaggctgtatttagtcagttacgtgataccgataaaagaaaagcaattgaagaagcattgactatgcgtgctctttctcagagaaatccatatataacaaatgttagaagaccgtcaagtgatatagctgggaaatatgattatttgatagacttaccagaattttcaggagtgcctgttgatcccaaaacggttgtaccttatatgaccaagcactggagcagcgggaagcaatcaaaagctcagcgcaagcaggaagagcatgacataaaaagaggtgttgatcctgatttacccataaaggttgcaagggaaattgcattaaccagggaagctgaaccatcagaaaattatgcaagatggttagttagcaatggaaatgctcaattacacgaattaggagaaattcatgaaagtggagagtataggtttaaggggattatcattactaacgttgcttatatagataaattacagcaacaagacttaaataaatacaagacagatcctagggtgttagaatactttaatttacaagagggcgatttagaaagaattattgaagtgtctcccgatatttaa

SEQ ID NO: 393045 - DNA, 717 bp, Salmonella enterica
atgaatgtaatggaagacgtgaaattgtacgtggagctggcgggcgttgatcccatcagcggcgctgatatttgtcttgcgcggcgtgaatccacggcttggcataaagatatcgtggcggagctcattaatcaggttctggacgaggccgaaaaattcgtgggcgcgccgggtctggaaagtctatacgcatatgattttatgttaggaattggcttaacatccagcggcatctggccggggttttctctggaccccgatacgattagccgcattagcgacagcggtgcggcgctggatttcgacccctatattgataatgttccgactcatgcctgcgacattgaaatttacgatgatttcatggtgacgttctccgcgctgggctttcatcatcagcggagtgttatcgcaaagcgtgggctgagagagtatgccagcgtggcggacgttttcatctttcaggtgtttaaagatgccttgaaataccataacgacaatagcctgcggttattcaggaataagcagtcggcgctaacgctatacgcccgttattatcaggcttcaggctgtggcgatgaaggttgtactacctgccgggagggatgtaccaggcctggctttcatttgctgcgtgacgtctttattcgcctcaatgccgccaatgcgtgctttcagtattggccgtttgagaaacggcggttgacggtgcgatga

SEQ ID NO: 393046 - DNA, 423 bp, Salmonella enterica
atgaggtgcggcgtagcgttgataatagtggccgcgctgaccgcctgcgacgatcgcgtggaaaaccgtttccccgactacgccgccatacccgtagaatccggggtctggagctggttacccgtatttttcccaacttcagccagcgaaatagagatcgcgattaacctggatatcaatcttttttatgctgattttagcgtgacggactctcaggatcgcgaccgttttgaagccgtattggatgaggctagcgaggttaattatgccgactttatccacagaagctggtgcaaaacagggaggactatctggaatagcgaagcgcaggccaggccgttctttatccagaaaataagcgctgagcgctaccgtatcaccaatgatgacgagggttttaaatgttacccagcgccgcgatga

SEQ ID NO: 393047 - DNA, 159 bp, Salmonella enterica
atgttacccagcgccgcgatgaatgtgctgattgaacaaggctatcatcttttccgccgctaccgtgtgccgtcacattttaacgtttgctgccattactgtttcagcacggaaattggcgtatcttctgtatatgcagcgcgacgatatgatcagtaa

SEQ ID NO: 393048 - DNA, 1611 bp, Salmonella enterica
atgcgcaaaacggtggcctttggttttgtcggtacggtactggattacgttggtcgcggtagccaacgttgggaaaagtggcgaccaaccttatgcctgtgccagcaggaaacgttagtcgttcatcgtcttgagttattgtacgatgcccgctcgcgggggctgtttgaaaccttaaagcaggatatcgccagcgtatcgccggaaacggaagtcgtcggcgtcgaaatcgctatccgtaatccgtgggatttcgaagaggtttacgcctgcctgcacgatttcgcccgtagccacaggtttcatcctgaagatgaagactatttgattcatatcaccaccggcactcatgtggcgcagatctgttggttcctgctggctgaagcgcgctatctcccggcacgcctggcgcaaacctcgccgccacggaagaaagataagccccacagccccggcggcgtgacgatcattgatctcgatctcagccgctataacgacattgccagccgcttcgcccaggaacgggaagagacgcttcattttctgaaatccggtatcgaaacccgtaatccgcatttcaaccgcatgattgagcaaatcgagcgcgtggcgatacgttcccgctcgccaatcctgcttaacggcccgaccggcgcgggtaaatcatttctggcccgccgcatctacgaactgaagctggcgcgccatcagtttaacggcccgtttgtcgaggtgaactgcgccaccctgcgcggggacgccgcaatgtcaacgctatttggccatgttaaaggcgcgtttaccggtgcgcgggaagagcgggccggtctgctgcgcagcgcgaacggcggaatgcttttcctcgacgagattggcgaactgggtgcagatgaacaagcgatgctgcttaaagcgattgaggaaaagcgcttttatcccttcggcagcgaccagcaggtcaacagcgatttccagcttatcgccggaaccgtgcgcgatttacgccagttggttgcgcagggtcagtttcgcgaagacctgtacgcgcgtatcaatctgtggacgtttgaactgccgggtctgcgccagcgccgggaagatatcgaaccgaatctcgactatgaaattgagcgtcacgccgcgctaaccggcgacagagtgcgcttcaataccgaagcgcgccgcgcctggctgacgttcgccacctcgccgcaggcggcgtggagcggcaacttccgcgagctttccgccagtgtcacccgtatggcaaccctggcggagaacggtcgcatcacggtgaatacagtagaggatgagatcgtccgcctgcgacacggctggtgcgatggcaatccttccagacttgatgtccttttaggtgaagaggtcgccacgctggatttgttcgatcgtctgcaactggaaaatgtcattaccgtttgctgtcaggcaaaaagcatttctgacgcaggacgacagctcttcaacgtttcccggcagggaaaaaccaccgtaaatgacgctgatcgcctacgtaaatacctggcgcgtttcggcctgacatgggaatcaatcagcacaattccagctgtatatggtggtcggcgatga

SEQ ID NO: 393049 - DNA, 708 bp, Salmonella enterica
atggataaagaatcacaatatttactctttgcgctttcctctccgatggaagcattgaatgagcactgtttgccttcgcattcgtcaccgaaaatgtatttagggataaaacgtttcgatcttgaatcttcgtgggggattaccagtcgagatgcattgctgaaaatgctgtaccgcatgacggacgatggtcatgccacacagctgcaatggctatactgccgctggtttatatccgcgccgcaggagtggcaggcatataccgatacgctggacgaggaagatcgcatctatgcccgattcgtcgccgataccgctatgtgttgcggagaaggggggatacgtagctgggactacgtgcgaatgagttttctctgccgtatgggtgtactcaatgaatggctgacggaagaagagagcctgtggttgcagtcgagaatacaggtccgtgcgctcgcccattattccggctggttgcaatatttcagcgcctattacactggacgcttgtactggcaattgcgtaacggcgataacctaccgctgctacgcgagacattcgcccgtaaggagtttgatgacgcggggagacgtatggtgaaccaactgatcgcagacaaagccagtttttatgcaacgctgccgtggcgctatctgacccattaccctgaatgcccggacacgcttaaagaagtgagcgatctatga

SEQ ID NO: 393050 - DNA, 1440 bp, Salmonella enterica
atgaaaacctgttggcaagtccttggcattgaggccaccacggatatcgacgccattcgtcaggcttatctggcgctgctgccgactttccccccggaaaccgatccccagggtttcaagcaattacgtgaagcctatgaaaccgcactgcaggggacgaaatcgcccgccattgcggtggttgaggaggatcccgataccccgtgggtgaattatctcggggaaattttccgcgatttgctggcggatgaagaacgacgctttcaaccgcaggcgtggcaggagtttatccaacagatcaataaattatcgattacacaggccgaaaaagtgcgctggctattgtgcgatatcgcgatgcagacgtttccagtctcctatagttgtatgaacctgttatcgcagcggttgagctgggagcaacgggactgcaatgaggagatggatcgcgaaaggctggacaattttttgtcctatgttgagcgcggcgatatgtttgactatgcgctactgctcaatttaccgccggaggtgcagaatcagactctggcgttttatgatgccctggacagcacctttttcgaacatcctctctatttcgcccaacttatggcccagcacggcccgtgggttgtcccggacgatctgcgctttcaacggagcttgttgcgctggttcagcaccctgcatctgggggttgcggagttgctgcccgttgccctggcgtggcagaaagccgaacccgataacggaacgccgggctattatcacttgtcccagcgcgtattttgcgacgagggcgacagtctgctgcctgagctttgtgcgcggtggcaagagcatccttctactcaccttgacgatctgctgctgcgctggtgccgtcagcatcagccggactattttccgctgctggtgatagttgttgaagcgcgcgagcaggtggatattcatggcgaaccgctgctctatattcccggaaccagtgcgcgtacctgcatgttatgggccgaggcgttgcacggcggtgcattatcgctactgagcgaaaattttattgcgcggcgtttgaattacggcgcgccagcaatcagcgaagagcacaaccagcatccctgctggccgctgtatcagacggcggaacggctggcatgtgccgaggagcctgaagacgcgctgctgcaccaattgataataaggcttgatacgccgaacgttcacccgctggaagccattattattcgcgggctgctggtacaggccgcagcgatgacggtgcgccatgagacggtgaccacggaggatggcaaggtgacgacggttgttacgcagaatgcggagacatccgatggcggtgttggttttggcctttggcaggtgattaaaattatcttttttattggcgttatcggccatttactgagtctgtttatgcattag

SEQ ID NO: 393051 - DNA, 696 bp, Salmonella enterica
atggataaggatgaacaatatttactttttgcactatctacgccgatggaggtgctttatagcggtaataagccttcacattcctctccggtaatgtataccggaattacccatgtcgatctttctgactcatgggatattaataatcgcgaagatcttattcaaaccatctatcggatgacggacgatggccatgcgacacatctggctccgctttatacccgctggtttacgttatctccccgtcaatggcgtgaatttaccgagcagcttagcgaacaaggccagatatatgcgcgatttgtcgccgaaaccgccgtgtgctgcggtcgcggcggcatcaaagcctgggactatgtacggatgggttttttatgccggatgggggtgttgaataaatggctgacggaagaagaaagcctgtggctgcaatcgcgagtctacgagcgggcgcactatttttataacggctggatgcagtatttcgccgcctattcgttggggaggctgtactggcaagctgatgacgaggatacacgggagcattttacgctgttgcaatacgatgcttcaggcgaacggatgtttaatgagctggtttccagtaccaaaggtttttatgcgcagttgccgtggcgggcgctggttgagcaacccgcttgcccggaaacgctcaaggaggtgagcgacttatga

SEQ ID NO: 393052 - DNA, 1239 bp, Salmonella enterica
atgttgtttcgtacaaaaaaacctgaagtcagtctgataaaaaataatacaacccgtgttgtcttttcagttcgaaatggtaaggcgctgcttcgtcccggtattatccacgatcccaattccgatgcggggattcataccctctcctggcatggctcgccgctgatgcgttttttctctgaatcctggtgcccgacctgcgcagaatttgtttatgccggttttagcaatgatgatgaaggcgccgcacagtttttatcctcacttgccgagtggaatcggccaggagtcgggttgaacgaagcattcaccgccctgacgccgctattttcactttgtgccgatggctattaccggctggaagaacgcgagctttatcccacggatggtaacgggcattttttctggtcggtggataatgaaaaacaactgaatccagctaccgcaggcctgtggcttgctgaatcagactatcactatcagtccggcattccctgttttttactgccaggccagccgccgtcacgatttaacccacagcgcgcggagtattatcgcgataagccagacgctcacgcgctggcctggtatatgaatgactcctggctttgcgtcctgcttgatggccaccataaagcgacggccgcggcgctggaaggccgaccgctgaaaacatgggtgattagccaaccggtagcggtctcatatgacgagaccgggcggcaatgcctgcggttctatgacgacgagtgcctggaaaaagcgatgtttcgacgacacatccccctgcaagtgcaatatgaaagattaccgccgcttctctgggatgagtacgccacgcgccgtgacgaacgctatgcacgcatccattggccagccacgctggcggactgcgcggcgcgttatcccaatcttgaggcttgcgctgccatcattgcggcaggcgatctcagtgaagccagcctcaataaaatgatggttcaaggaatagcagaggaaggatttcccgcgacggttttgcgggcactattttatacccattcccccttattgattgattttatccgttttctgacttatacccccggttattcttgccattgtccgctggcgtttcgtttactggctcagaaacgcacgccacaggccgatgcttttttcctcgactttgcaatcaatgatgacggcgagcgcccggagctgacgaaaattatggatgagtactttcgccaaacgtga

SEQ ID NO: 393053 - DNA, 681 bp, Salmonella enterica
atgatacagtacctgaacgtctttttttacgacatctacccctatatctgcgccacggtattcttcctcggcagttggctgcgctatgactacggacaatatacctggcgcgcgtcgtccagccagatgctggataagcgtgggatggtgatatggtcgaatctgttccatattggcattctggggatcttctttggccatctgtttgggatgctgacgccacactggatgtacgcctggttcctgccgattgcggtaaaacagcagatggcgatgatcctcggcggcgtttgcggcgtattaacgttgatcggcggcgcgggattactttggcgtcgtctgaccaatcagcgtgtgcgtgcgacgtccactacaccagatattatcatcatgagcattttgctgattcagtgcctgcttggcctgagcaccattccgttttcggcgcaatatccggatggcagcgaaatgatgaagttggtgggctgggcgcaaagtattgtcaccttccgcggcgggtcgtcggaaatgctgaccggcgtggcgtttgttttccgtgtccatctggtgctggggatgactattttcctgctcttcccgttcacccgtctggttcatgtctggagcgcgccgtttgagtatttcacccgccgctaccagattgttcgtacccgccgctaa

SEQ ID NO: 393054 - DNA, 966 bp, Salmonella enterica
atgccaattactatcgggagaggttttttaaaaagtgagatattttctcaaagtcccctctctcaacgctccttctttacgttactatgggaaaaaattaaggattttttttgcaacacgcgaaaagcagaggctgatcaatatataaatgagctatgtgatcttgcttctccacctgacgcacagcgtttgtttgatttattttgcgcgttatatggattatcatcaccatcatgcagagaaaaattccattttcagcactataaagatgctgagagtcaatatacaaatctctatatcaaagatggcgcagaaattccgttatgcattgtgatacgtcaggatcactattattataatataatgggtaaaacggtgatctgcattgatacttatcctgaacctctgaaaacctatcctgatattaatataaaaaccggcacttatgtttgtgaaccgctatgttgtttgttccctgagcggttgctactctcgctatccagcgacataacattttccattgatttaaaacagataaaagagaaactcatcgatatggcagagaatggaactttatgtaactggaaggaacaggaaagaaaagctgctatctcctccagaattaatacgggcataatacaagcaggtgtaacagctattgatgaagctaccaaaaatacaatagcctcaaaggttattgaggctactaacttaaagaatgcaacatttgatgcaaattacacgcaaagctcaattacgcaaatggtttattcatgtttgtttaagaatgacatattaatgaatatacttgatgaacaatcctgtcatgacctgctatgtttaaacgaccttactgaatatgtagcgctacaaattcataattgtcttttttctgaagacttatcttcactcgttaaaattacagaaaacgaggctcatctatactataaacatcatcatttatag

SEQ ID NO: 393055 - DNA, 240 bp, Salmonella enterica
atggctcgtcgaggtgatatcaagtcggcgtttcgtgcagcgatacagattagccccgagggctataaatttttatacacgcgtgattttacacgcgaactgcggttggttgggtggtatttctcagagagggaggccaacaactggatcgaacgttatcaaaacgattttcaggacaggaccgtgcagcacacggaaaaccggttctggatgctccgcaatatggggatagtccgctga

SEQ ID NO: 393056 - DNA, 270 bp, Salmonella enterica
atgacaaaaatttccggggtttatttaaacggtttcggcgaacctgtcgccggtgtccagctcgtactcaccgccagaacgaccagcgttgatgtaatgctggccacgacagcgcagcagattacaggggctgacggctcgtatagttttgacctgcttgccggcgtttacgtggtgacggccagcggtatatatctgggtgtgattacagttggcccagacagcccagacggaacgttaaacgagtatctcaacggggcaggtgcctga

SEQ ID NO: 393057 - DNA, 627 bp, Salmonella enterica
atgatcgaatcagtctcctgtgtgattccagaaatcaccgttcacaataatcgtcccgttaccacatcaatcgcggttgccaacttcttcggcaagctacataaagacgtactgaaaaaaatcagatcactggaatgctcacccgctttcacgacggcgaacttttgcgccgtcgtggtaactgcgcgagctggctttgatgaacgtgagatcgaggccttcgaaatgacgaaaaatggatttattttccttgtgatgggctttactggtaaaaaagcggcagcgttcaaagaagcttacatagctgagtttgaccggatggaggcggagttgctccaacaaaaaacgcaaccaccaaccccttcctttatgccggctttccccgtggaggcaaatttcgaataccttaccaccgtccgcgcagggcaaatagtcgatatccgcctcggtcggcagaatgaaatttttatctcactggagagctatcgggaactgtctatgagggagggttatatcgcgattcatcacgacgaattgcgcacgatgacctcgccggagattgtcgagatctgcaataaggcgactaaaatgcaggaaaaatggggcaggatttacgctcggtcctga

SEQ ID NO: 393058 - DNA, 210 bp, Salmonella enterica
atgctgtccggtttacagggcggcagtgagaaaaaagagttttcgtttacacacacgtccccggccacgccggacctggtcgccctgactgccgagtgcagaatcacgacgtctggttttggttcggtagaggaccaggattggacgatcaacaccctgaccatgacgctggccgaaaacgggttttcaatccgcatgagcctggagtaa

SEQ ID NO: 393059 - DNA, 531 bp, Salmonella enterica
atgcggattctacgctttatggcattgccgctattcgcgctctctctatcggttagcatgactggctgcgatcagaaaaatgatactctcaagggaacacaaaataacatgatagcgtttatcaagaagatagccgctaacgaagagccagaggaaacacaacgctatgtaggtaatatcaaaggtattgaaatcaagctaacctatcactacaaaggggatattattttacatcaaacatctgaaaataaaataccctataaaatcctaaaagccaacaataaagaagaagcacaaaaaatgcttaggcaaatcggcgaagcttatcagggtatacagggtatgactgaacgaatcgactattatgatagctatgcgacggaatatgtgaatattgattttacccaggcaaaaatgagcgacctctgtaaattaccaggatcatcaattgacaactgttccgcgccctatctgtcaatgattcgctcgcagaaactgttggaagagagcggatatcatagaatcaattag

SEQ ID NO: 393060 - DNA, 723 bp, Salmonella enterica
atgagcgaaaacaccatcaacaaagcgctgcgggtgatgggctacgacacccagaaagacgtctgcggccacggttttcgcactatggcctgtagcgcgctggtggagtcgggcctgtggtcaagcgacgcggtagagcgccagatgagccatcaggagcgtaagcgcgtgcgggcggcgtatatccataaggcgcagcatctcgaagaacgtcgggagatgatgcagtggtgggcggattatctggatgcaaaccggttcaggcatgttgtgccgtatggcttcaaaaagtcggcgggaggcgcactcgaccatatgagtttccaggaacgcaatgaccggcagctagaggagctgaaagccaaaatactggctgactcggaatggctgacggcgtctgaattatccgcaaaagcgggctttcgttccgccgatcctgatgctggtccgaaaggctggaaagccgccgggaagatattctcgctgaaggtcgatggtgaggatttgtacccggattatgttctggatgagaaaatgcgacctctcaaggttgtcaggctgattctctcgctgttcaaagaacgtaagaccccatgggggctagcaatctggttcggctcggcaaatcgcaggttgagaggagggaagccgaaagatttgttggtgtcaaagtcagagttagtactgatggcggcgcaggatgaggttgagtcgggggagtag

SEQ ID NO: 393061 - DNA, 897 bp, Salmonella enterica; identical to SEQ ID NO: 83032

SEQ ID NO: 393062 - DNA, 654 bp, Salmonella enterica
atggaaaaaataacaataaaatcaataacgtctaaaggaaccgtcgcccaaacattttcggcaacgttaaatcctaatagcattaagcataattttggcatttcctacacggataaaggaccccagcaacagggcgatatctcgcccacaacggtttttaaaggctatgaaagtgaaaagctggacttcgagctgttgttcgacggtaccggagtcacgggtagcacaagcacaaacaccgtacagaagcagcttgccacgctaaagaaagtgacctacgcctataatggtgaacagcatgaacctaatccggtagtgattgcgtggggttcatctgtgaattttcaggggcgtctgaccgctatcagtatcaactattctctcttcgattcctccggcaatccgctgcgcgctacggtatcgcttagttttgctaaatacctcacgcaacaagaaaaaagcgcgttaaaaaaacagtcctctcctgatctaacgcatatcattgagttcaaatcgggcgacacgctccccatgctttgccataagatctataacgacagcagttattatattgaagttgccagggctaataatctggtcagtgcccgacagatcacgccgggcacaaaaatttactttccacctttaatttaa

SEQ ID NO: 393063 - DNA, 1794 bp, Salmonella enterica
atggccatttctccattaagtaataatagtactggcgtaaccacctacaccattaaagtcggcggtaaagcgattgatagcgctataggcgttatcgctatccatattcattatcaagttaatcatattgccacagcagagataaccattagcgatggtgatatgccgacccaacgttttgatatcagcgatgccgatacctttaagccgggatcaactatttctatttctgctggctatgcaagtgatgaacagaccgttttcgacggcatcattattagtcatggaatagaaatcgcagcaaataacagctcatcactcagcgttgtttgtaaagatcaggctgttgcgatgacgattgctaagcatagtcaatgttttcttgggaaatccgacagcaaaatcatcagtacactgctcgcaaattaccccaatatcaccgcctccgtcggcagaattaccgaccctcactcggagttggtgcagtttaacagtacggattgggactttatccttacccgagcagaggcaaatggttttgttgtcaccaatcagtcgaataaggtgaccgttgataagccggcaataagcaatgcggcagctctggtcgtgacctacggaactgatttgatatcattttctgcaaaagtcgatgcacgaaaccaactaaaatcagtcactgccaccgcttgggatccggctaaacagagcatggtgacgggaaccgggccggctcaatcaatctcaggacaggggaatttaaccagcagtgaactggcaaaggtgttgggtattagcgactacacgcttcaaactgcttctaccctgagtaccgattcgttaactcgctgggcagatggacaacaggtcaaagcgatgctgagtaaagtacgcggaagcgtcactttccagggtaacgccagcgcgactatcaatagcctgattgaacttgctggtgttggagaacgctacaacggttcgcattatattagcggcgttcaccacagtattgaaaaaggccagtggattaccaccgctgaactcgggatgtccccaatgtggtcagcggatcaccgtgatattggcgcgccgcccgcttcaggttacctgccgccagtcgatgggctacaaatcggggtggtaaccaaattggatggcgatcctgagtcaaactatcgcatccagataaagataccgacgctaaatagcgaagctaatgtcatctgggcacggttggcctcttactatgcttcctcgggttttggcaattttttcattcctgaagtcggggacgaagtgatcgtaggctgcatcaatcaggaccccagcaaccccattattctgggctcgctgtatagcagcaaaaataaaatgccagaagagatgacatccgacaattatatcaagaccctcgtcaccaaaagtaaaatgaaaattatttttgacgatgagaatagcgtcatgactttaaaaacacccaacggcaatactgttgttattagtgataagaataaatcaatcacccttgccgaccaaaatagcaatacgatatgcatggataaaaacggcattgctatcaccagtagcaaagatgtcacgatttcagccaaagggggcgtcaatattagctccactcgcgatacaaccgttaaggccaccggtgacgcaaaaatttccgggttaaatgtttctgcgcaagccaacacggggttaacgctaaaaggcacggcaaccgcggaaatctcttgttcgggaataacgaccgtcaaaggcgccctggtcaaaattaattag

SEQ ID NO: 393064 - DNA, 300 bp, Salmonella enterica
atgccctttgcagcaagaattacagatctacagatgtgcccaatgtcgacccctggactcccccctattccgcatgtcggcggtccgattatcggtccaggcgtgccaacggttttaattggctctttgcctgccgcggttgttggggatagctgcgtctgcgttgggccgccatcaaccattgtgaaaggctcggccaccgttctcattggcggcaaaccggcggccagaatgggcgacaccaccagccacggagggagcatcacgattggatgccctacggtcattattggcggctaa

SEQ ID NO: 393065 - DNA, 459 bp, Salmonella enterica
gtgatatcgatggcaaacgacaacgcatttttagggacgggctgggcttttcccccccgttttaccggacccaatcatcaggtcgttatgagctctgatatgcaggatattgaacagagcttaaccattctcctctccacgacgccaggggagcggctaatgacgcctgatttcggctgccgaattaatcagtttgtctttgaagaactcacccagacggtattaacccaactgtcgtcagagattcgccatgctattttatttttcgagtcacgtattgatgttgaagatgttcattttttacccgagcctctctccgggaaattactcattcaaattgactacagtgttatcaccaccaatacgcgcagtaacatggtttatcccttctatttaaacgaaggcaccctgatctcacctcagttgctgccgttagctaacgagtgggatatcggataa

SEQ ID NO: 393066 - DNA, 3972 bp, Salmonella enterica
atgacctcaagacagcaacggcaggatgaggcgataaattcatctctatttcatccacatgagctcagttttgagcagttagtgggttgggcgcatcaatttgcccagcagttgcccttcagaaatctgcaggaccaggccgatggtcactgggggaatttatttcagaaaagcgagattgtcgtctgcgccgccattttaaccagtgacacaaaacatatccaaagccaatttaagcaaactcttgcgcacgacgagaacgtcaccgttgagtttttactgattctattaaaacgcttgcaggcctggtatcaacatcttcctggcgcacctgaaacggcttaccagtttaaatactacctgctgcatgaatatcagcgtcacctctccctaccgttgagtctggtcatctgccgtttacccgaacaatttcgccacagcgttcaggaactcgatccgctatggaatcttgatcagcatacacttgataccgcatcacccgtattgcagcacagcagttttacagaacaaatacgtcactgcttcgcgaagatagtttttgtcatagaacagataaaaaagcaaagccagcaggtgctgcaggccgctttgatgcaccaggaaaataacccgcagcaggcactttattttgcctttctgaaactgtttgaacgggcccagcaaagtcttaatcagttcacggaaaagcacctgcagttttattatcgtcaggttttgcagcaggagaaacaatccgcacccgagaacgccgtttacctaaaactctcattaaaccacccaaccagcagttcaattcaatttgagcaaggtgccgaatttagccctggcgatgatcctgactttaagccaattgcttatcgtagtcgttatcccattgaggttacagatgcagaggtgtcgcatgtattcaacctcacgctgcagcgcgaccctctggtttcacccgaaaaagaatctgggctcgtgtgcggggttagcggacagcgagttcagataacggctggcgctaccggcgatgattttccaaaagcccagcaattcaatatttttaataacaagtataaaaccgaagacagcacgcaaccaatggggctgattatctccgaccctctcttttctatgcagcagggtaaacgagtcattgaaattattgtgcatcttaaagaggtgcgctcgagcatcgttgctcaggaattactggtagtagatgataataataaaaccagcgccgcgctgactcacatatttgcgcagctactttccctgcatgttcatcttttcgaagactgggccgcccgcatcacggccagcggcctgaccaaacaaattagccaggaacaacttagccagtttcgtcagctcagaccgtcacagcgcgtgtgggtagcctataaattattttatctgcaaaccctgcagtacatctgctcaaccccggagaaagggatgcaatacggtttatcgaagatagaccttctctttcgtatcgttggtcagatggtaagccgacgttgcctttataccgccgcctggttaactaaaacagacatttcaacagcccttagcggtttaaaatctattcttgtcgctgagcctacggcttataccaccattgaagagcttctcagccactccacgacggccgctttttatcagatattccaggggggcttcgatattgaagctacaaccgaaaatggttgggaattaatagataacgtagagatttatccctgttccccccaagagtgccaaatcgggttcaaggtgaaatgtcatatagataccggctttgcacctattatcccgcgccttgcacatcttcctcatagcgcatcactaaaaataacgttgaagcggcaaagcaactgcttcccctatgcgattttccgtgatttcgagttatcaaaactggcgatgtcgactcaggtttgcggcgtaacccaactgcagttatttaaccctgaagggcaagttgattcctcgcagcccttcttcttatttagctctcagccttatctggatgcttacgtggtgatggctaacgaagagattgcccgaaaatccatcagccaactatcgctgcatcttgactggggaaatctaccgcggggttcagatggttttaaacagtattatgctgagtatcattacccatacaccaacgccagttttcaaatgcgagcagaagtgcttaataacgggcaatgggtggagttcggccccacaggcctctcgttatttacaccgtcgagcggtgcgcttcgtcatgacaggcatcttcattttttgaacatgcgaaatagctacacgccggtgaccctcccttggccgaagacgccctacagtaaccaatctggcttacgtaacgggctctttaagctgctgcttacaggcccggaaccggcatttggtcataaagactatgcgccattactgagcgacacgctaacctataacgtcaccaaaaaacataaaaagacgttgcccaatcagccctatacgccgttagtcacccatatttccatcgactattcggcggaatcaacaattgatttattaagcgtcgaccgtcgcagccagagtgagatcatccacctgcacccgttcggcgaaaatattatttatcctccaaaacaaaccagcccggttcacaggccgcgatttttcccaaattataaagaggatagccattgttttatcggtatcaccgcgagggaattgtcgggatatttaaatatattcttcgtatttgacggtagcgcccgactggtcatgccttatccatcaacctcataccgctggtattacctggtggataatgaatggcaggctctcaacccgcatcagattatccatgacacgaccctcaactttctcacgaccgggattgtcactttagatttaccgagtgaaatcaacacggaccacagcgtgatgccgtccggtctgttttggctacgagtgagtaccaacaaagggatcggccggtatcctgattgtctgcatgtctccacacacgtagtgaaagtcaccggcaaaggcgtcccccttgctgacgatggcattaccccactctcgttttcgtcctggcgaagcacgccgcgcaaagcaaatctggccgctattgcccagcttaatgccatgataagaatccccgacatcgagagcgaacaacacttccagatgcgagtaagtgaaaacttgcgccataaaggcaaggcgttaaccccctgggattatgaacacctgattctggaaaatttccccgaagtcggttccgtacactgtttcccaacacgcagctattactctctgaaccaggagccgggccgtgtcctgatcatcgtgacgccgctcaataccgactgcgaccactcactctgttcgccaaagcagttagattcttcatacctgcttgcgattcgtcgcttcctgctctccgtctcccgttctcacgtgcagatagaagttcgtaacccgggctacgaaaaaatccagatccggtgcaaagtcacgttaaaagagggagtgagccatggccctgcgttacgaagactggaatacgcaatcaaagcgcagttatgcccctgggaagcagatacactgaatacaggaccaggattctgcttatcacttgagaagctcagcgcctttattctcaaacaaaaaaacgtcgttaaggtcagtgcactctcggcgctgaaaatcagccttgatgaaaataccgaatacgccctccaggatagcgcggcgaccagccagccaatacgtgctgcctacccatggtttttgttgattccagaagatcatcagtacattcaaatttcacccgataatctttcccataaaccggtgaccgtcggtattggtgaattggtgatcggggagcaatttattgtcagcacatcaccaacgtctacccctaaaggcgctcaaaataatggctaa

SEQ ID NO: 393067 - DNA, 831 bp, Salmonella enterica
atggctaaacgtaatcgaagcacgcttaagaattattttcgtcatgggaccatgccgtcagcggaacatttttcagacttaattgattcatgcgtcaatcagagtgatgaaggttttaacaaacccccggaaacgggcctacagctaagagcattagatcaggaacaccttctgagcttttatcagcaaaatagccctgataccccgctgtggcacgttggatttgccccgcagggcgttaatttgcaggttttcgccaatccagcggcggatatcgctgaagaggctccggagggcgatggaacaatacaggccatcaatctctcgatgacgcctacaggacaggtaggcattaacacagccacgccacggcagaccctcgatgtcaatggaaccattgcctctcagggcagaatgggcagcgtgatcatggatacgcccgtccctgctgatggcgaatggcatgacatcaccccagagcttgaaggctgccatatgttcgaagtggtcgcagggattggcatccgttatagcggtcgctatgcgcttgtgcacgccatcgccattaatacctgcgcacccaataaacgctggtggcactggggggataagaaccccatccatatgactcaggccttctttcattcttcggccgataaaatccaactacgctggcgccagcataatcaccgaggtaccgtgcgtccttacgctttgcaaattcgcaccaacacgccatttggcgacgatcagattattcaataccatattacgcaattatggaatgacccctttatgcagcaatgccagcgcgcagcgattggggagtaa

SEQ ID NO: 393068 - DNA, 2379 bp, Salmonella enterica
atgtctaagactatttcgaaaaaagaccataacgataatccaaatagttttggacatctttaccagcttggcctgacgtatattcagcagctaagcggtcatctctggactgactacaatacccacgacccgggaatgactatcctggagcaggtgtgctatgccctgaccgaccttatctaccgttgcgagtttgaggtcaccgactaccttagcgggccctcggggaacattgattaccgggcgcatggtttggcgttggcagaggatatcatcccatcatacccacagcagcctaaagagtatgaagagtggttgctggcccgactcccagagctcgataaagtgtggttacgcaacagcgaaaacgactcacacctgggtatttacaccctcaatgcgcaactcaaccatttttacgcattaagtcagcaacgtgctgttaccggtaagcattccgtttatacacagcaatatgccgcccttcatcgtattcgtcacgagtattatcgggtacgcgcagtgggcgaggatttggccgccattgaattaaccgggcagcaccctctttcactcagcgccgtcatccatatcagtgacgatgttgctgatgtcacctggcttgccgcttgtatctatcatcggatccatctttggcttgaatcaaaccagcaaaacacacccgttaatgtcatcaaggaatcgctgctcgccgaagatgggatcctgcaaatcgacaggctggaatttatgcagcatagtgacaacgtcagccacgacgagcaaaaaactattgataatattgccccgttttcttatttgatgctgccggaagcttccgcacattccggtattgaaatcgttcagtttcaacatccggtcaacatcgactatgccgatctcgctattcaaatagagcagatccaataccagcagcgtaacgcccagcttaaaacgcccacccctcccgcactgcctgtgggccaatatgttgatttcacgcgctatgagtcgattcaaactctttttcccaggaactatcatttagcgcctggaacaccgattcaataccatgcgcaacagcaggcgcagcgccaccaacttcgcagctacctgctgttatttgatcagttaatggcgaatttttgtgatgatatcgcggggttaaatgcgctgttctcgctatcattaacgcctgaagttacctatcacgcgcatcgccttcaggatgatgaattttataatatcgaaaaacattatcctcgtgacgccaacgcaggtctggaacgcctgcgcgctcagctagataattatcctgaacgtaagaatcgtatttttaattacttgcttgccctttatagcgaacgttacccggattggttacaccgccagttcaatccctacttttctacccaaacattagaaaaagagatcctcaaatataaacaagcctttattctgaatatcgtcacgatgaccaatggtcgaggcattggtgataatttactccagcccgaacatcagggcgggtatcgccagcgtcttgcgttgctgctggggttattcccgtcggtcgacgccgcgaaggggaacgtgcgcacgtttgcccggtattcattaaacctggtgtcagaccaggactatttccatagcgacaccggcagaaaagcactgtggttaaccaccctcgaagcgcaaacgtctctccagcctatcgaggaaaacgccttaacgggatacccgaaagaaagtgatattcatgacacattgttaacggccccgcttttccgcgaaaaaaccttacctgatgccctgctgcagtttggtattgataaccaccgataccgcctgctttcacgtcagaatcatgatgttcatcagctattttttcacgttgatatcgacggtcacaagcggtggtttcatattgccagccattcagacaaacaggcgctcatcctgctttgtcaccaactgcaacgctggctggttcaacttaaccgtgacagtgaagagctttacgttgttgagccaattttactgcgcactgaggccacaagcgcatcgctaagcgactacgccaaccgggtcatcctggttttacctggctacaccgcacgctttagcaacctccgttttcgggagcaggtggaacaattaatcgttgaaaacagccccgcacaccttctgacacagtgcctatggcttgatttcgcgatgtttaaccagtttgaaacgctgtatacccaatggcggcaagcaaaatccaacgcgttacagcacaaagaacgccagccagagtgcgatgccactgctcagcggctttacctctttttgcaacgcgcaagtacaggggcagacggagtggagagccaatga

SEQ ID NO: 393069 - DNA, 4032 bp, Salmonella enterica
atgagccaataccacaaaatcaatcatctcaatcttgagtttgatttcaccgggtttgctgatgcggaaaacttcgagtcacgcgcagcacagtgggtcatccagcagtttctcccggtgatggaaacggtatttgacgagatctgtcctgaagatcaaatcctggttctcgacaccctgactctcgacctcggccggtttaacgccaaaacgttttatcaggacgcaccagaaaagctcaggcaagcgttgcagacaacgctgcgctcacagctacgcaccgccagagaagcctcacagtccgttcaaccgtctggcatacaggtgctgaatcagcagcaacagcgctggaatgtgctctggcaattcctcaacactggcacacttccgtggtctgtttccggcgagcagtcgctggaggcgctcggcctatctaacatactggtcgaacattccaaccgattgatcaacgagctcaatcatgcgcatcagcctgagcgcctattacggcgcatcgtcgaacaattttccggcgaggctatttcgacgttattcccatcgttagcgcccgcgcagcaattggtaaccatgtcgctgttattagcgcatcctaaaagtcggcaagatgaattagccgaccgcctggcgctggcgtggtttacccgcttcacacaattactcgcacagcacaacttagcgccgctgcgtgccgattgggaaaaactgcttcaccagttttcgccacagctgattaaggcactatatcagaggcatagtgataaccagctcccccggattctggtacgtgatttaatggaaaccgagcgtttgcagctacttgccgcgttaacgccgcaagaatacccatttttgcgggcgatgttgcatatgccagagtggtggtcggtaaaacgccgtaccgaggcaaccccccttcttcagaccgagcaggtattacccccgtcacaaatccaccagcaactgtggctgtttacctttcaatacctgcttatcgatcgcggcagcgccttcaaccgccaaagctatatgtctggcctggtggtgcagatggcccgctcgcaaaaccaaaaagccgatgtcctgctggcgtccctgatttcaacacttaacagcacgaccattgacagcgcactacgcgggcaattgttagatttactccacaccatcgcgcccattattgcgacgtcgtctttaaaagcgccggagagcaacgaaacacacgtgtccgatgtcgcgatacatcaaggggaagataaggcaacaccgttagccaatattaacgaactgctgttggcgctcagttcaggacaggagtaccagctcctgcgctattggccgcccctttcaccatcgtttgtctccctgttacgctggtgtggtcagttagactatattcgccgtcattgggccgagcgctactctgataaaaccttactgttgctggttgatgtgcttgagccgcttgctacccctttattacgccgcctgatggcggaacatcgtctgtttgccccccaggagtctgcgtccacggaacgcacgacggtggtcatgttatggcaattcaccttcgcctttctcattgtggaaagcaaccgcgcttttacgccacatcgcttccttcgctacttaatccagcggttagcgacctggcgtaatattacgtttaccgatcagcttgcagcgctgcagggtaacgtgatgaatatcggcgaccgctcgctggcagattcgacgttgagccgcctgctggagatattcatctcggacaaattgttgagaaaatcgactcaatgtactgagacgtcgccgtctcgctatcagttagcactctccccctcgctgataagcggcctctcgttggcgcaacgggttgaccttgaagagatcgtcaccacgttagaacgcgccaggcagacccagtggaaccgccagattcaacgatggcagcgggattatgggcaacgactggctcagatcattctcagcattgggctttccgtttccacgctaaagcgttgggtagcgcatttcgacgattctgcgttattcacattaaccgccattgtgaattcgcccgccaccgaagccgtacgcaccattattcacgagagccaaaccatcggcaccgccattagccacgcgtcaaatccgctcaacgcgagtaataccagaaacgcgctatgggagttgtctctgcactacgtaataagccgcagaggaagtgaatttaatcaataccaatatctgttgaatatcactgaacaactttccgcacgctaccaggttaaggtagaggtgttgattcacgagtggttaagcctgagcgatagtcgatttttatggcgtcagcagttgattgatcttgtcagtcactatcagcgaccttcggtgacacctccccagttgctggcacatattcagtctgatgatcacatgctgattatcagtcagccgcaacgcagacttttgcagcagtacgccaccatcaatgcctcggcggtgacaacacagcttcagacgtggaatatctcccagttaacgcgcctggttcgcatcatgcagccgccgttcgctgagcacactatcgcgttgctcccccttctgcttgcgatggcccagcggttcacctcatctcttgattggttctatatccttctgttcagcaatggctgccccacgacaccagaacaatggcttcaacggttgttacgcgagatgggcaggcacaatgcatcatcgaacggtgcacactaccagcaactgcaacaggttatcctcagcagtaacgcaattcctcagcctctgacggaacgcaggcagtggttagacagcctcctccctgaggaggcgttgcgcgaagggttacagctctggtttgacggtaaagcgccagccccacaacaaggctggttaataagtctgtcacagcgctcaatgcagcatcctgtgaggcaatggttacagcgtactctggccaatccgcgtcatatgcggcgctggctggaagagatacccatgcaagcacatcatgcgatgctattccctacgctcaccagcgcaacgctcaccctactggcgttacgtcaggcgttcgcccagctctttgcctcaccgcaacagggcgagaatctgttctggcaaacgctttatcgccagcactggctcaaaggaaccgccatcaccgccgacacgttcctgcctcacgttctcagcgaattaaaccagcagtggcaggctcatccccatcagcacaacatgaaagacgacacatcggttgctgtgctggttgatcgattgctgccacatatccgctcaccatcacagcaaaaaacattagtccgcattgcccgccgcagtgaacagaaaccgcaggacaacacgacgtgggcagtgcacctgaatcaccaacaaaccgaaattaaacagcttattgaggccattgatatgacagacaaggacgtaaagaacagcgtgggaaccccttgggataaaccgcaagagaacgctgaacccgttaccgttcacaatgcgggattagttatcgcttcggtctatattcccgctttatttcagcggctagggatgacagatgggcgtaagtttgtggatagccagtcacaactgcaagcgctgttttgtctgcaatggatgacgaataacaccaacaacgcacctgaatatcaactgctactgaacaaaatactctgcggcgttgcgccctctacagctatccctcagcaagttgcattgccggcagaggccaaaaagcttatcgaatcgttgctcaccgccattattgcccgctggcaagtcttaggaaacacctctattggcgggttgcaatccaccttcattcaacgtgaaggtgtgctcagcgttaccccaaaacactggcaactgaatatcattcccagaccctttgacatgctgctcgataaactgccgtggagctttcagaccatcaaatatccctggatggatctccctcttttcgtgcaatggcgctaa

SEQ ID NO: 393070 - DNA, 2607 bp, Salmonella enterica
atgataaatcctggttttagcctgttatctcttattagtcagccagcgtcgcgccttatcaggcgcgttatctgcgggctgctatgtggtggtctgttgtgcacgttgccggcgataggctacgctgcgcaaaacggtttggtcgagagcgcccagccgtataaaccatgcagcaagcaactcacggcaaccgataagcgcaatttgggaaaagcgatacaaacacagcttgccgatttttatcagaatagcagtgatttccaggcgcaactaaaaagaggccagcggcttaacgatggcatcgttgggcccaccacgcgctactggctggactatttctgcggtgaatttgcgttcaccgttcccgagtcatctaacgatcagcaccaggtttttgtggagtcgctgatgattgccttaaaccgcgccgccgagcgaaatgcactctatccaacgtggcgcacggcgataacgcctccgcagttgcttaatttaacgcccactgaaatagagataaaactgggccttcggagcgcaggttccggtaaaaatgctgacacgctaaaacctgccgaaccgtctgttccagaaaaactcgacagcgatacggccccttattattaccaactgacagagaaagatttcgccagcctggcgcagcgccaggccgtactggccacctttgcgaagttagagaaacaacagtttgaccaacgtagccagctgtataaccagcttagcgagctgttcgcgcaactgaatattgccgctacgccaggaccgaatattaacaacctaattaaatctagcagtattgagattccacatcccagtaagagcaccacgaccagcaccagcaccagcaccagcaccagcatcaataccaccccgcccgccagcagtgagagggttgaaaacacttctgagaatcaaagtatcggtgataccactaccagtccccccgtcccatcaacgcaggtaattaataccagtacacaaagcgatactcaaatgacagcgccacaactcgtgtggcaactggaccctgatgcattaaacaaaactatcaaacaatttaagataaccgtcctaccggaagaggatttaaaagcccttaccccgcttcagagtgaagtctttcccagcctctatttatttaagatggcgataaatgaatcgggcgttatacccgacagcctacagagctatggcatcttcaaattagccaggaaaaacggtctaagccctattcacgccgaccctgtgcgttggatagccccgccggactgcgggtgccaggactccgtcaaatcaatattcacaatgggaactttttatggtttctacccatactggcagcatctcgaagaaggacaagcgattgattttagtcgtttagatcgcattggctacgtgggtgcggtgatgaaaccggaaggaaacggcaataccttagcgctgccgcaaaactggtccgccgagaaagaattcagtcagtttattcagacaacccaccgttatcgcactaagctcgatctggtagtgacgacgccgcgagatttgtcccgcgatcagctaaccgggctgtttaccgatgatatggtgaaacagctggttgaggctgtgacgatgccaatggataaatatgtcatcaataatctgaagccgtggataagctttgggctccagggcgtgccgtcaatggccgatgggattaccctggatatcgacctttccgtcttagatacccctgaaagccaacaggctttcttctcgttcctggacagacttaagattgcgctccgccagagtgatttccgccaatccagcgccgaagaattaaatggccccctcaccagtgacgataaatattttctgagcgtcattgtccccgtgagtgatgtcgttgagcgtaaaaatcgtttttataacttccataatttcaatgcgctctcaaaacgaaccaatctgctgattatgcgtccaggttcaccggcgacacgcgagaaagcggctgacgaactggaccaaattaaagggttacaacgatggctaagcaaacagcccgatcagctggacgtccagcaggtgtataagcacctggttcctatgcttatcagtgaagataactgcaaccaaacgacggccctgacccaactggtcaatctttccagctggagttttttgggcgcaggctactggccattgccgctaagcgataccaatgagaagctgattgataaaaccttcttcccggaagcccagcaatatccgcagccgatcaatcaggtactgaatagcgtcacccggttgttaaactggatctgtatccatcgctgggagctccgtaccggcctgtttgtctcgttcttctttattttattgttcctgataatttgtatctggtcatacccactgagaaaacacctgagccgcttcccgtttgtggcgctgaccgcactatccattagcggattgatgctggtgtttgtcgccgacccggcgtttcaggcttatcaggggccgattttaattatctttatgatcgtgattggctggatattgtttgcggtaaggatggtgaggaaggagggggataagccttga

SEQ ID NO: 393071 - DNA, 738 bp, Salmonella enterica
atgtataaacaagcgggaaaaattaaagagagtaaaagtagggcgattggtaattctgttgctcagaagagtggtgacgggaagcgaggttttgggtttacagataatcgatctgagagcatttttcaattaaagattgaacctgaaaagattcgggggttttctcaagtgttgagtttgccagaagagaaaataatggttgtcgatattccaaagaataaccctccaaatatcactactaaatttaaagattatccggttgatcatactttcaatttgactgacgaattaaagggaaaaagttgtaaagatgtcaccggtaccctttatcctgatgaaacatctgctagaatgccaatagctgatgccgggggcgctgcatatataaaaaatagtaagttatccatgattaacgaggggattgaaaagtatgatagatatttacttcatgaaataggacacgcggcacagcatgagaatatgggggctactggaggccatgaaggaaatactacagtgatgttattagaatggcataatatattattccatgagaatttgtttgaccctgatgacccaagaattgcctatattgaagatggaaggatttcccgtaattatgaagaggaagacaaaaaagcaaaatctgaaaataatacagagaaaagatgtgatattcagaggaaaatgcagaagttaattgattctaaatatactcgtttagataaaagtgtataa

SEQ ID NO: 393072 - DNA, 435 bp, Salmonella enterica
atgtttacaaagcagagaccacagcatcaatcaacccgtcaggcggtgtcgcagcgtaaagagagccatgcttcggttgctctggaagacaagcgcgcaccgaccgtgcaaagacaacccaataaaaccgggctgcccgataacctgaaaagcgggatggaaaatctcagcggcatgagcctggacaatgtccgggtgcattataactcagcaaaaccggccgccgtgcaggcgcatgcctacgcgcagggcagtgatattcacctcgcttccgggcaagaaaaacatctgccgcatgagttggggcacgtggtgcagcaggcgcaggggcgagtttctgcgacgacttcagttgccggaatggcggtgaatgatagtccggcgctagagcatgaggcggatgtgctggggggtaaggcgttacaaaatgtttag

SEQ ID NO: 393073 - DNA, 1374 bp, Salmonella enterica
atgtatccacaaaccaatgtcgaaaatcgtcaacaagcaaacaatattattgtgctctatcgcgagatagcgtggctgttacaggtcatcaatcaggttatttgcagctatttaaagcaagaagggcatgaacgccactgggtggatattcctcctcctgagttagtgcaaggcacaccctatgccgatctgattattgactggcaactctctctttttgaccgccttgccctggcgcttgccatggcgccgagcgtgaaaccggacaccctcgatatcttctttggacttaacagccttatcgatcgtccctttacggaatttggcggcgtcagcgataaagccttcagcggctttattcccaccgggcagacgctcaactttcttatcagcgctaatgacccagaatggcgcgtttatgttcatgctattttctcgaataagcatcgcctgatggcggaacaggttacccaactgctgtcggttgatgatggtgtgcccaaatgggccggtatttatcgattaaatgaagagtggctgcattattttacgaccggtgaacgcctgcgtccggaattaagcgccagtttcccggcccatttactggagtcgccactagattggaacgatctggtgctggatggtgaagtgatggcgcagattgaggagttgcatgcgtggctcaaacatggtcatacgttgatgaacgagtggcaactggtgaaaaaggtgaaaccgggttatcgggcggtgttctttggaccgccgggcaccggtaaaacgctgaccgccgcgctgctcggcaaggctacagggcgggatgtttatcgtgtcgacctctccatggtggtatccaaatacattggtgaaaccgagaaaaacttatcccgcgtgtttgatgccgccagctataaagagtggatcctgttttttgacgaaggggatgccctgtttggcaaacgctcggaggtcagttcgtccaacgaccggcatgccaaccagctaacgggctatttactgcagaaaatagaggattttcccggtacggtgattatcgccaccaacctgaaaaccaatatggatgaggcgtttacccgccgcttccagagcatggtacagtttacgattccgggcccgaaagaacgcctgctgttatggcaaaaggcgtttcacggggcgtgcgatcttgccgaagatgttaatttacccgccattgccgatcgctatgaaatggctggcgggcaaattatcaacgtgctgcgccagtgcgcattaaccgccattcagcgcggggaacgcaaggtttcgcaagacgatattgttgccagcattcgtcaggaattcaggaaagataacaaaatattctttgaatga

SEQ ID NO: 393074 - DNA, 156 bp, Salmonella enterica
atgcagtacctgccggtgggattatcgctggggatgttctacctgttgttgctggcgttatcggaacatattggctttacggcagccaggataaccgtaagcctgatgggcacgctgatgaacgtgatttgcaacgtaaggcgatgccgccagtaa

SEQ ID NO: 393075 - DNA, 687 bp, Salmonella enterica
atgaaaaaaatattcattgcaaccgcggttgcattgtctttgtctgcggctgcgcaagcggctgaatctaccgccgtgttaaaagtgaccggcgttctgaccaacgatgcctgcactccggaactggacggcggcggcgtggttgattttggcaccaaatatatcagtgacctgtcggcaacagagacaaaccagttaggccacaaagacctctctttcagaatttcctgcactgccccaaccaaagttggctttcaaatcagcgacgatcgtgctgactccccagcaagtatcactattgaacaaaccagctttaccgatcctgacgagaccgcctggaattcggctgcgcgtttcggtgccggtcaaacggcaggcggcgtcaatattggcgcctactccattgcgttaaaccggagcgcgctcaccgcagacggtcaaccacaaacggcgctgcggctcccaagcggcattaccgtttgggaggtgtggggcggaaccagcgatattctgaatcaggcaggcattagctactccttaggcgatgcaaaaggcataccggttgcctttaccaacgcagaatttcctttacgcatcgccctggcggttcaaaaaacggatgcgctggctattaccgacaatacgacaattgatggccaggccaccattaccctgatttatctgtaa

SEQ ID NO: 393076 - DNA, 288 bp, Salmonella enterica
atggaaacttttctcgacagcatgattatcccactttcccgtccgtataccattgatggcgtggaatatagcgaaataacaatgtatgaacccaaattgcgggataaaattttattcagcaaagataaaggcgatattgaagaaaaaagcgcccgcatgatggcgcgattacttaatgtcagcgagcaagcactttacgatctcccggcgtgtgattattcgcgaattgaagaggcgtttaatgaactggtaaagacgccgaccgaacggaagccgatattctcctga

SEQ ID NO: 393077 - DNA, 1584 bp, Salmonella enterica
atggctatttctcaaaactttaaaacgcaggttgtatttgggggtcgcatagacccctcttttaagcgcagcagcgaagatttgaaagacgcggtgaggcagacgagccaggttgtcggccagttaacaaagcgccaggaaaaattaaagggccagatcgcagcggcaaaacttgcagggcgtgatgtttccagcctgacaaaacaatatcaaaaattagatcgacaaattaaggaggtaactgccgatcaggaaaagttaaacaaacaaatggcgcgccagcagcggctggataaatgggccgggcgcgccaagggtgcggtaacagggtccgccaggtggggggcgggtaaggcgattggcggcgttggttcatcgttaaaatggggtatggcgggcgctgtgggggctgctatcggtattccggcggcagcactggcaatgaatgcccagacggctgaaaaattaagcctggcgcgatcctacggtgtggggatcgaaaaatacgccgcgtgggataatattggaaaaatggccggactcaacggcgaaaacgtcggggatttaaccgaggagctcacaaacaaaataggcgaggcagggaacgagcaaaccgttaacccgatgcttcttcaaattggcctcagtaaaaaaatgatgcgcggatggagccgtgaaaaacaatttgacgaggtaatgaaccgtctttctaaaatgaaagacgacaaagttgcggccagcctcgcggatcagctcatggggggcgaggccaataaaatcatgacatacatgcgcgttaccgggaaaacctgggaagaaacgatgacggaggcgcagaaatctaatctgttgacgaaagagggagctgagggggctgctcgcgcgcattttgccgtaacgaatttatggagcgctttaacatcgggtctggctgatactctcggtaaggttagcaatgatttggcaccgacatttgacacaatgcgcgatgatgcgatcgcctggtttaaggacaatcagggcgcactggttgacagcattaaagcgtggctgaatccggaaaatctgaaaaaactttgggacggggtgatttcatttggtgaggggtgtgtaaaattcggcaaaataatctgggaaattgttaaaaagctggagtggatccttccggatgaaaattcggaagcggaagaaaagatttacaatgacgcctatagtgctgcattagatgagggaatgaaaaacggctatggtgttggcgatcctaccggaatggccgtggtaaattacgcaaagctaaaagccgaaaaggcggtggaggatgcaagagaacaaaggaaacaagaagaacaagccaaagaaaacgaaaaactagccagcgccggtgaaatagccgatgtttatggtcgatatacaataacgccatctcaaaataataaatttgaaattaatattaatgccggaccgggaacagatccgcaggcaatagggaaaatggcatatgagggcgcgcaacaggcgatgcgtgagtctcaatataacttgggttccggggctatgtgggataccccgttaaccgtggggtaa

SEQ ID NO: 393078 - DNA, 387 bp, Salmonella enterica
atggggattggcgagtcatttatattctctatctctacggctgcatataatcagttgcagcgttcggacgagtggcgctgggctgaacagacgcgattcgggcaaaacgacgcgttacagctaactggtcgccccaatccgacaatttccgtaaccgggaaaatccatgccttatttctcgacggttgcgggattgggcagttagataaactacgctctctcggtaatactggcgaccctcaacaggtggtaatggggacgggggaggttatggggtactgggtaataaaggcgctcgatgataaccagaccaagtttttgaccgggggagcgcctaaatctcaagattttacgttgaggctaacatactacggcgaatcgctttga

SEQ ID NO: 393079 - DNA, 240 bp, Salmonella enterica
atggaaatatttgcatggatagttgcgctttatatatggttattggctaacccgctaatatcaatatttatatatgttattccgttagtgattgcgttaatacgcggacataacagtactatcatgatagtaattattaatattctcttcggctggatttttttattatggattatactgctgatatgggcagcttttggagaaagaaaacccgccccggttcaaagcgattcgccgtag

SEQ ID NO: 393080 - DNA, 1047 bp, Salmonella enterica
atgggattagtgaataaatcatattcagatacaggtgatcaggcttggtttccgaacttttatatttctgtggacaatactgatataacggaaagagtcagaagaggactcattagtatcactctcactgactacggcggctccaacaaacagaccgacgagatccgggtggctatcgtctccgaaactctccagatcccggcgcgcggggtgacagtgtcgctggggttggggttcggtacgaatattattgataagggcgtttttgttgtggacggctccagtagcggtggcgaaccgagagttgtggaattcacggcgaaggcggccccgttgaacgccgcaaaaggcggcgccacggcgcagagtaaaaaaacacgctcctggacggatcgcactattggcgatattgtcgcaaaaattgccagtgagaacggactgacgccgcgtgtatccacccggtttgccgacagggtaattgaacagattgaccaggtgagcgagtctgacctgaatttactgtcccgcctggcgaaccgttacgacgccgtcagcaaaatttcgggaggctactggatttttctcccccgtggcgcgggcgaatccgtcagtggtaaacctctcaaacaacacaccctcacacgtaccggtagttcgagctggggttattcccggaacgggcgcagcggggacagcggagaatcggcagggccaacctacgtcatcaaatatcacgatacagcgaacggcgagatcaaagaactgagggcgggcagcggaggcgatccgattatcgagtcgcctggagtggctccgtcgctggacaccgcaaaagagatggttgccggtttgcagggcggcagtgagaaaaaagaattttcttttacacatacgtccccggccacgccggacctggtcgccctgactgccgagtgcagaatctcgacgtctggttttggttcggtagaggaccgggactggacgatcaacaccctgaccatgacgctggccgaaaacgggttttcaatccgcatgagcctggagtaa

SEQ ID NO: 393081 - DNA, 810 bp, Salmonella enterica
atgactaaccaaatcatcatctccgacattgccattcatcaagacgaagaaggtcgatactcagtaaatgatcttcataaagcatccggaaacgaacgccgccacgaaccaagcctatggctgaacttgcagcaaactaaagaattaattgaagaaattttaaatacagggaatcctgtatttatcccagcagtaacccgccgtggccgcgctggcggcacttacgtctgcaaagagctggtctattcatacgcaatgtggattagcgctgcgttcgctctcaaggtgatccgcgcctatgacgcaatggtagcgaccacgctgacacctaaaaccaccgttgatgaaagaacgccactccgcgacgccgtaaatctgctagttagcaagcgcgccctcccctatgacgaggcctatacgtttgttcaccagcgtttcggcgtccggtcgattgaggagctggagccgggaacactgcccgccgcaattgaatatgtccaccgcctggcgcttgaaggtgagttactggtgcgccaacaaacaacgccggtgatcccagctttccccgtggaggcaaatttcgaatacctgaccaccgtccgcgcagggcaaatagtcgatatccgcctcggtcggcagaatgaaatttttatctcactggagagctatcgggaactgtctatgagggagggttatatcgcgattcaccacgacgaattgcgcacaatgacctcgacggagattgtcgagatctgcaataaagcgactaaaatgcaggaaaaatggggcaggatttacgcacgatcctga

SEQ ID NO: 393082 - DNA, 270 bp, Salmonella enterica
atggctaaaattgcaggaatctacgccaacggattcggcgcgcccgttcccggcgttcaactcgttttgaccgcgcgtgtaaccagtgcgggtgtcatgatgggaacggcagcagagcaaatcactggcgctgacggctcgtatagttttgacctgctcgccggcgtttacgtggtgacggccagcggtatatatctgggtgtgattacagttggcccagacagccaggacggaacgttaaacgagtatctcaacggggcaggtgcctga

SEQ ID NO: 393083 - DNA, 240 bp, Salmonella enterica
atggctcgtcgaggggatatcaagtcggcgtttcgtgcagcgatacagattagccccgagggctataaatttttatacacgcgtgattttacacgcgaactgcggttggttgggtggtatttctcagagagggaggccaacaactggatcgaacgctatcaaaacgattttcaggacaggaccgtgcagcacacggaaaaccggttctgggtgctccgcaatatggggatagtccgctga

SEQ ID NO: 393084 - DNA, 693 bp, Salmonella enterica
atgttcttaacctttcctaatgtggcaataactccagataacaggatagacaaattatctgaaaatgatttaaatctcattcgtgacacagctatacagaatggcggaagaaaagtacaggtacaaatacgcgattcattatatgaagtaagtaatcgccctgtagaaggtaattctaatatattcaaggttagagcagaccgagacatatcccgggcgcgtgatattgcattaacaggaaacgccgtaaggttagaaagacaattaaacaacgaacaaaacatttcgcatagaaatttatcaaatgtgtcgaccacgtcgatttcaaatagcaggcaggtgttagttgcccaaagttcaccaagaacacctgctatttttgatgcctctaataaacaacaattagtggataagattgatttatgcagtttctcaccaaatgttgatgaactttcatgttcggaagccgatttaacatgccctgtaatgttagctgttcctgaaaaaggcgtttttgtaaaaactagcccagagtcagatatatgccaattgtttgatgaaatagcatgtatccaacttattattgacggtgccgtgcatcctattagcagggttccactatcagccgatatgataataaataaaaatgaatgttattttgatacgaccaaaggtaattttataatcccataa

SEQ ID NO: 393085 - DNA, 408 bp, Salmonella enterica
atgcgcaaggtgacgatatctatcttactccagccagtttcactgacctggggggctacatggctagctatgcgaattaccgctgaagctatcccttcactgtttgcaaccggaatgaggtttatgtttgcagccccctttttaatcaccattgcatggttaaggaaaataccgcttttgtttcctcccggacaacgtttattccagtttataatttgtactttctacttttctattcctttctcactaatgatttatggtgagacttatgttagatctgggcttgccgctattatatttacgaatatgtccgtggtcgttttgatagcatcagtattgtttctgaatgaaaagacgaaactaatgcatgaaggaggttttttatgttcatgtttctgccttttttga

SEQ ID NO: 393086 - DNA, 549 bp, Salmonella enterica
atgaaaaagaaggttattctttctacctctttattgtttgctgctgcgatcggcgttgcacatgcggccactgatgatcagggtaccgtgacgtttaatggacttatcatcaacccgccttgcgaaatcactgatggcagcaaggatgctcaagtgacatttaccccgctgggtactaacgcctttgctggtttgggttctgaagcttctcaaacccagcctgttagcattacattgagcaactgtccgaaagacaccaacgttaacctgacgtttgctggcgatactgctgctgataatacgcaattgaaagcgactaccggcagcgaggataccggcgtagctattgtgatgtatggcacggatggcacaaccaaagtcacctttaacgatgagcctgttgccgcgcttcagcaaacgaccggcgctgacgaaaaaaatgaaatgacctttaactataactcgaaggttgtagcaaccgttgatccagcaaatatcaaagggggcgattttattgcaaccactacctacaccatctactatccgtaa

SEQ ID NO: 393087 - DNA, 1011 bp, Salmonella enterica
atggccggaaaacgcaaaaatcctgctgacaatattttgcctccccgcgtttacaggggtaaaagtaaatatgaatttcaccccgcaaccggaggttctaaaaatctatgctctcttgattctcctgtatcgttagtgtgggtaaaatatgaagaggcattaaaagactctcaagataaactaaatctatcagggttaattcatgagtttttcgaaggtgctgactttaataaacttgggaaagaaacccaaaaggattacaggaaatattctaataaactcatccctgtattcggtaaaatgctgcccgataacattaaaccacttcatatcagaaaatatatggacgcacgcggcgtgtctgcgccagttcaggcaaacagggaaaaggcatttttaagtcgggtttttagttgggcgtatgagcgggggaaagtggaagcgaacccatgtaaaggcgttcgccagttcaaagaggaggaacgggacaggtacattactgacgaagaatacaacgcactatatagcgtagcgccgccggtggttagaattgctatggagttggcgtatctgtgtctcgccaggcagggtgatgtgctggcacttaaaaaagcgcaactcatgcgtgaggggatctatattcggcaggggaagaccgtggtgaagcagatcaaggcgtggtcggatcgtttgtctgccgttatcgaaatggcaaagaatttacccgttaaacctggcgtaaccagcatttatgtcatccatcagatgaacggacatcgttatacgcgtgacggttttaatagtcgctggcaacaggcgcgggaagaggcgcaaaagagctaccctcacctgctgtttgattttacttttcacgatctgaaggctaaaggcgtgtctgatctggagggaagcctgcaagaaaaacaaaaaatatccggccacaaaacaatttcacagacggccagatacgacagaaaagttaaaattgtgccagttgttggcggccaataa

SEQ ID NO: 393088 - DNA, 177 bp, Salmonella enterica
atgcggggaaacccaatgtccatagatgtagtcagtcacttcagaaataaccgcctcctggaagatatctttaaccgttcgtctggcttcggccaacttaattacggcgatgttctgatgctcagtgagacgggctttacgtatagagattccttcgtcagcagatcgattacataa

SEQ ID NO: 393089 - DNA, 909 bp, Salmonella enterica
atggcgctggaaaaaggtattgcgcaacaggtggaggcgtttattgcatctggacgcccctctgttcgtcatcagaatattgatgaccggagagcggcatatgttgccagtacagtacttgccggagagaaagaaagtcgcgtagacgttaatgacatcgaactggaaggaataacatttcgcatagtatcgccacgcaacgcttccggagcgcttccctgtgttatttactatcatggcggttgtttcgttagcggggggtttgccacccacgacaatcaactgcggcaactggcttacatcagcggatgtcgggttattgccgtacagtaccgcctcgcgccggagcacacctttccggcggcgcatgacgatgccgcgctcggagcgaatctcgttcataaatatgcagaacagttagatatcaatcgccgccgtataacgctggcaggcgatagcgcgggcgggcatctggcgctggtcacagcgctgcgtctgaaagcggcgaagcaatggcttcccgcccaactgatgcttatctaccccatgcttgatgctacggcgcattttgaaagctatacccgaaatgggctggattacattatcacccgcgatacactgctaaccggctatgagatgtacttaccgcataccgaccgccagcatccagaagccagccccctctggagagatgactttaatggcctgcctcccactcacattattagcgcggagtttgatccgttgtgcgatgaaggtgaggcgctgtacgaccgccttacggctcagggtgtcaattgcacctgccaacgttatctcggcgtcattcatggatttttccagcttggcgggatcagccaggccgcgcgcagcgcgatacaggatattgcgtggcgagttgggcggtag

SEQ ID NO: 393090 - DNA, 1890 bp, Salmonella enterica
atgaagaaagtgctcactctctcactgctggctctctgtgtttcgcatggtgcagtggcagcaaactatgcgctcaataacgacaatattgccctctcgtttgatgatacaaactcaacggtcgtggtgaaggacaacagggctaatcatccgctcacgccgcaggagttgttctttctgacgctaccggatgagaccaaaatccacaccgcagatttcaaaatcaagcacgtcgaaaagcagggcaatgcgatagtcatcgactttacgcacccgaattttaacgtaacggtgaagctaaacctggtgaagggaaaatatgccaacatcggctacaccattgccgccgttgggcaaccgcgagacgtcgctaaaattaccttcttcccgaccaaaaaacagtctcaggctccttacgtagacggcgcaatcaatagctcaccgatcgtcgcggactcgttctttatcctgccggataaaccgatcatgaatacctacgcctatgaagcgacaaccaatctcaacgtagaactgaaaacaccgattcaaccagagacgccggtcagctttaccacctggttcggcactttcccggagatcagccagctgcgacgtagcgtgaaccagttcattaatgccgtacgtccacggtcgtacaagccttatctgcactacaacagctggatggatatcggctttttcactccgtacaccgaacaggatgtgctggggcgtatggacgaatggaacaaggaattcattaccggccgcggcgtggcgttagacgctttcctgctggacgacggctgggacgaccttaccgggcgctggctatttggcccggcattcagcaacggttttagcaaagtacgagagaaagccgacagcctgcacagctccgttgggctatggctttcaccgtggggcggctacaacaagccgcgcgacgttcgcgtttcgcatgcaaaagagtatgggttcgaaaccgtggacggaaagctggcgctgtcggggtcgaactactttaaaaacttcaatgagcagatcattaagcttatcaaaaatgagcacattacctcgtttaagctcgacgggatgggtaacgccagttcgcatatcaagggcagcccgttcgcctcggattttgatgcttcaatcgccctgctgcacaatatgcgcagcgcaaacccgaatctgtttatcaacctgaccaccggcaccgatgccagtccgtcctggctgttctacgctgattctatctggcgtcagggagatgacatcaacctgtatggtcccggcacgccagtgcagcaatggatgacctaccgcgatgccgagacgtaccgctccattgtccgtaaaggcccgctgttcccactgaactcgctgatgtaccacgggatagtcagcgccgagaatgcctattacgggctagagaaagtgcaaacggacagcgattttgccgatcaggtctggagctacttcgcgaccggcacccagttgcaggagctgtatattaccccgtccatgctgaacaaggtgaagtgggatacgctggccaaggcagcaaaatggtcgaaggaaaacgccagcgtgctggttgatacccactggattggcggcgacccgacggcgcttgccgtgtacggctgggcatcctggagcaaagacaaagccatactcggtttgcgcaacccgtcggataagccacaaacctactatctggatttggcgaaggatttcgaaataccaacaggatacgcggcgcagtttagtctgaaagcggtatacggcagtaataaaaccgtgcccgttgagtataaaaacgcgacggtgattacgttgcagccgctggaaacgctggtgtttgaggcgatgcccgttaactaa

SEQ ID NO: 393091 - DNA, 1176 bp, Salmonella enterica
atgttcgatttcgataaaattatcgagcgtaaaagtgataagtgccgcaaatggaatcatcaatttgtctgctcacgcttcggcgcggttccacaagatttcattccactttggattgcggatatggatttcacctcgccgcaaacggtaattgaagggtttcagcgcattgttgaacatggaacctttggctacacctattgttttgatgaattttacaatgcggttatcggattccagcgcgagcgccatcatgttgatgtccatcgcgactggatcacccttacttatggcaccgtctccacgctgcactacacggttcaggcgttctgcaaaccgggtgacagcgtgatgatgaacacgccagtctacgatccttttgcgatggcggcacagcgccagggcatgcatgtacttgctaacccgctgcgcgtggaggaaaaccgctatcagcttgattttaatttgatagaagaacagctcaaaacccaccgtccaacgctatggttcttctgctcaccgcataacccgtccggcaggatctggcgcgcggaagagataagccaggtgtccgatctctgtcaacgctacggcacgattctggtggtcgatgaggttcacgctgagcacattctggatggcaaattcgtcagctgtctggattctggctgtgccgcacaggacaacctgatcgtgctcacgtcacccaacaaagcgttcaatctgggcgggctgaaaacctcctactcaatcattccgaacgactcgctgcgccagcgcttccgccagcagcttgagaagaactccattacctcgcccaatatgttcggggtatggggggttattctggcctatcaacacggtctgccatggctcgacgcgttgaacggttatttgcaaggcaacgcccggtatctggcggatgccattacgacccactttccggcgtggaagatgatgaacccggaatcgtcatatctggcatggatagacgttagcgcggatgaccgtagcgcaacgcagctaacccaacatttcgcacggcaggcgggcgtagtcatagaagacggcagtcactacgtccaaaacggcgaaaactatctgcggattaattttggcacccagcgctactggctggagcggtccatcaaccgaatgctgaaacattacagataa

SEQ ID NO: 393092 - DNA, 1572 bp, Salmonella enterica
atgacacaggaaaagtcttttaagtcacgagtatgggaattttttcaaagcctgggaaaaacttttatgttccccgtttccttgctggcttttatggggcttttactagggattggtagttcaattactagcccatccacaattaaaaactttccctttctggggggagaattaacacaacttacctttggttttatcgccacagtaggaggctttgcatttacctatttacctgttatgtttgccatcgccattccattaggcatggcaaaaagaaacaaagcggtaggtgcttattctggttttattggctatatgctgatgaatctgggtatcaattattatctgacagtcactcatcaacttgccgatgccaccacaatgaaacaggtaggacaatcggttgtattaggtatacaaacactagaaatgggggttctgggcggaattattgctggagtaattacctacttcttgcacgaacgttttcaggacactgttttacatgatgctttcgctttctttagcggcatccgttttgtgcctatcatcacctctttaacgctatctatcgtcggcctggtaattccgctgctctggacttatgtcgcaatgggcatcgcgggcatcgggcatattattcagagcaccagcgtatttggacccttcctctacggtgttggcgttctgttgctcaagcctttcggactccaccacattctgctggcaatggttcgttttacaccggctggcggaacagaaatcgttaatggccatgaaattgctggtgcgctgaatattttctatgccgaactcaaagcgggtctgccttttagccctcatgtgactgcatttttatcacaaggctttatgccaacatttatttttggcttgccggctgtcgcttacgccatttaccggacggcaaaaccagaaaacagaccgattattaaagggttattactttctggagtattagtttccgttattacaggcatttccgaacctattgagtttttattcctgtttatcgctccagtattgtatgccttccatattgtaatgtctggtttagcattaatggtaatggcaatgctaggagtcaccatcggtaataccgacggcggtattttagacctgctgatatttggtgttatgcagggtacttcaaccaagtggtatttgttattcccggtcggtattgtctggtttgccgtctacttctttgttttccgctggtacattcttaaacatgatattaaaactccaggtcgcgaggactcagcggatagcgcagaacaatccgtcgctgcgaatactaaagcgcgcggtaaagctaagtacgatcacagtgtgattttgaaggctcttggtggaaaggaaaatatcgaatctctggataactgcattacccgtctacgtctggtcgtaaaagatatgaacaaagttgatcagcagaccttaaagagtgccggtgcgctttctgtcgtcgtacttgatgcacatagcgtacaggtaattattggcccacaggtacaaagcgtaaaaacaggtattgaagccttaatttaa

SEQ ID NO: 393093 - DNA, 1155 bp, Salmonella enterica
atgccagaaacctatactcctgctgccgcgacaaccggcacctggacagaagaagaaattcgccagcaaccgcgcagctggctccgctcgcttagccatatcgctaatatccgaaccgcgatcgatgattttctcgcgccgctactatgcaaagacgatctgcgaatcgtattgactggtgcaggcacttccgcctttatcggcgatatcatcgccccttggctctccagccataccgggaaaaatatcagcgctgtaccaaccaccgatttggtcacgaatccgatggactatctggaccctgcgcatccattactgttggtctcttttgctcgctccggcaacagtcctgaaagcgttgccgctgttgaactggcaaaccagtttgtaccggcgtgttatcatctttcgatcacctgtaatgaagcaggcagcctgtatcaaaacgccgttgatagcgataatgctttcgctttgctaatgccagccgaaacccacgatcgcggttttgccatgaccagcagtattaccactatgatggtcagttgcctcgcagtttttgctccggaaacgtttaatggccagacgttccgagatgtagccgatcggtgccataccatcctttcttcatttggcgatttcagtaatggcgttttcggcaatgcgtcctggaaacgaatcgtttatctcggtagcggcggattacagggcgttgcccgtgaatctgcgctaaaagtactggaattaacggctggtaaactggcagcgttttatgactccccaacgggttttcgccacggaccaaaatcactggtggataatgaaacactggtcgtggtgtttatctccagccatccctacacgcgacaatacgatctcgatttactggcagaattacgccgagatcgtcaggcgatgcgtgtcatcgcgattgcagcagaaacagatgacgtcatcgaaatgggtccgcacttcttgctgccgccttcacgttactttaacgatattgagcaagcgttctgtttcctgatgtacgcgcaggttttcgcgcttatccaatctattcatgtcggtaatacgccggatacgccttcagccagcggcaccgtaaaccgcgtggtacagggcgtagttattcacccttggctggcttaa

SEQ ID NO: 393094 - DNA, 579 bp, Salmonella enterica
atggtgttttcggaaaatccattaatttttaaggcggggaatatagtattgccgtgctttcacgctatcccatcagtaaaaaaaatgctccccttaccctcaccaaaagttgaacagagcgtaattctggcgacagaaattaagagatcgggattcaattcccccattatttttattgccaatcatatggactggcacgaagatcctacggttagaatgatgcaacttcatgcgatgaatggctttgcgacaggtaatacggaatctaaatttccccatattgagtcattaatcaaaatcctcgcggacgatttcaatgatgttccgggcagcgccatcatgaacagttttcagcgttactggaacaatccgcttcctgaattaacggatagtcgaagttggcctgcaattaatcccgcaatggccctcgaccatatcttgacctttaaggggcaacgctggcaaacgaagaaaatttatctgcctgtagaccaacagccacggttacaaacgatcaactggccacaggtcagtgaccacctgccgttactgatgcaactcaaacttctggagcagtaa

SEQ ID NO: 393095 - DNA, 168 bp, Salmonella enterica
atgaagtgctcttttttaactattacgatctgcctggcctcactggcaaccattaatacagttcgtgctcaagaaaacacatcagctgccgcaagcgaaaaggacctggtcgttcttacaccggtaaaaggtggaaccgttaataaaatttacgatgaaaatcattag

SEQ ID NO: 393096 - DNA, 1134 bp, Salmonella enterica
atgacacaaattctacgcgccagacgtctgctgacagaacagggctggctggacgatcaccagttgcatattgaagaaggcattatcaccgcaatagaagttattccggctggtattacgtcacgcgatgccgagtggctttgcccggcctatattgacatccacgtccacggcggcgcgggggtggatgtgatggacgatgcgccggatacgctcgacaagctggcgatgcataaagcgcgtgaaggggtagccagttggctacctactaccgtcaccgcgccgctgatgcagattcacggcgcactggaacgcatagcgcaacgctgctattccggcggacctggcgcacaggtgttgggaagctatctggaaggaccgtatttcaccccacagaacaaaggcgcgcatccccctgaactgttcagggaactggaacagactgaactggatgaactaatagctgtctcccggcataccctgcgtgtggttgcgctggcaccggaaaaaccgggggcattgcaggctattcaacatctgaaacagcaaggtgtacgggtcatgctgggccatagcgcggcaacctgggagcaaacacgcgccgcctttaatgctggcgcggacgggctggtacactgctataacggcatgactggtttacatcaccgggagccaggaatggtcggcgcaggattaattgacccgctcgcatggctggagattattgctgacggccaccacgtccatccggcggcaatgaaattatgttgctgttgcgccaaagatcgggtggtgctgatcaccgatgcgatgcaggctgcaggccagcccgatgggcgctatacgctctgcggtgaagaagtggaaatgcatggcggtattgtgcgaactgcttccggtagtctggcgggcagtactctgtcgattgatgcagcggttcgcaatatggtcgagttcacgaagatctctccggaggatgcaatccatatggcctcgctacatcccgcccgactgctagggatcgaccatcagttgggttcgttaaaagtcggtaaacgcgccaacattatcgctctcaatgacacgctgcagttgcaacagatctggattcagggccagactctctctctgtag

SEQ ID NO: 393097 - DNA, 435 bp, Salmonella enterica
atgttaggtattattttgacggggcacggcggttttgccagcggcatggaaaaagcgatgaagcagatcctcggcgagcagtcgcagtttatcgctatcgattttcctgaaacctcgaccactgcattgcttacctcgcagcttgagcaggcgattgataagctaggcggcgcggaggagatcgtttttctgaccgatctactcggtggtacaccattccgcgtggcatcaacgctggcgatgcaaaaaccaggtcgcgaagtgataaccggcaccaacctgcagctactgctggaaatggtactggagcgagaagaattaagtagcgaagcgttccgtttacaggcgctggaatgtggtcatcgcggcctgactagtctgaccgatgagctgggccgctaccgcgaagataaccctgttgaggaagggatatga

SEQ ID NO: 393098 - DNA, 879 bp, Salmonella enterica
atggcatctaatcaaacggctctgccgaacgtttccgaaaccgaagaaacgctgctgtccggcactaatgaaaacgtctacgaagaccagaatatcggtgccgagctgacgaaaaaagatatcaaccgtgttgcctggcgttccatgttattacaggcttcttttaactacgaacgtatgcaggcatcaggatggttgtacggcctgttgcctgcactgaaaaagatccataccaacaaacgtgacctggcgcgctcaatgaaaggccatatgggcttcttcaacacgcacccgttcctggtcacatttgttatcgggattatcctggcgatggaacgctccaagcaggatgtgaacagtattcagagcaccaaaatcgcagtcggcgcgccgctcggcgggattggcgatgcgatgttctggctgacgctactgcccatttgcggcggtattggagccagtcttgcgctacaggggtccatccttggcgccgtggtgtttatcgtgctattcaatgtcgtgcatctcggcctgcgcttcggactggcgcactacgcctatcgcatgggcgttgccgccatcccgcttatcaaggcgaacactaaaaaagtgggtcacgcggcgtctatcgtcgggatgacggtgattggcgcgctggtcgcgacctatgtgcggctgaacaccacgctggaaatcaaagccggtgacgccgtagtcaagctccaggctgacgttatcgacaagctgatgcccgcctttttaccgttggtctataccctgaccatgttctggttggtccgccgcggctggagcccgctgcgtcttatcgccattaccgtggtgctcggcgtggtcggtaaattctgtcacttcctgtaa

SEQ ID NO: 393099 - DNA, 780 bp, Salmonella enterica
atggaaatcagtctgttgcaggcttttgctttaggcgtcctcgcctttatcgctggcctggatatgttcaacggcttaacacacatgcaccgcccggtggtacttgggccgctggtcggcctgattctgggcgatctgcataccggtattttaaccggcggtacgctggaactggtgtggatgggtctggctccgctggcgggcgcacagccaccaaacgtcatcatcggcaccatcgtggggacgactttcgccatcaccactggcgtaaaaccggaagtggctgtcggtgtcgctgttccattcgcggtggcggtacaaatgggtattaccttcctcttctccgtgatgtccggagtgatggcgcgctgcgatcgcatggcagcgaatgccgatacagacggaattgagcgggtcaactatctagcgttactggcgctggggacgttctacttcttatgcgctttcctgccgatttactttggcgcagaacatgccaaaaccgctatagatgttctgccgactcgtctgattgacggcctcggcgtggcaggaggcatcatgccagctatcggcttcgccgtactgctgaaaatcatgatgaaaaacgtctatatcccttacttcatcctgggttttgtcgccgccgcctggctcaaactccctgtgctggcgattgccgcagcagcactggcaatggcgctgatcgattttctgcgtaaatcacccgaacctacagctcccgcagcacaaaaagaggaattcgaagatggcatctaa

SEQ ID NO: 393100 - DNA, 474 bp, Salmonella enterica
atgccaaatattgttcttagccgtattgatgagcgcctgattcacggtcaggttggcgtgcagtgggtcgggtttgcgggggcaaatctggtgctggtcgccaacgatgaagtcgccgaagacaccgtacagcagaacctgatggaaatggtactggccgaaggcattgccgtgcgcttctggtctctgcaaaaagtgatcgacaacatccaccgcgccgccgaccggcagaaaatcttgctggtgtgcagaaccccagccgatttcctcaagctggttgaaggcggcgtgcccatcacgcgtatcaatgtaggcaacatgcactacgccgaaggtaaacaacaaattgccaaaacggtttccgttgacgccaacgacatcaacgcttttaacggcctgaaggccgctggcgtggagtgtttcgtccagggtgtaccgacagaaccggctttggatctctttaaactactttga

SEQ ID NO: 393101 - DNA, 1599 bp, Salmonella enterica
atgcgggggatcggggcagtcattcattttcactcgccaacaggcagcagcgtaccttcctccgatttcagcgggatgtggaacagtatcagggactggttctccctgcccgctcaggatgaggccgcagaatgctttcgcgctttttatcagccagatgaaggaacgtcatcgccggacaggctgaagtattttttaaaactgaaggcgctggcgtctccgggacggcaggctaactttaccgcagagcgaatactcggtaccggtgaaaccatctgcatgattgcctccggtaaaaacagtgattttccccccgtcacacttcacctgagcgaccaggaatggcattcaatacgacatcagaaagaagccgttgatagcccgctgtcgtcagaaagtgatgacagccatgcagctaccgtaacagaaacagaagagcgcgacgaagcccccctaaaaggttttcccataacccgtgctcagattaaggcatggcgtgatctgtcgccggaagcaaaacgcgaggctggcggctggaaagcatgggcgcaggcacaagggatagctatcagcagtgccgggaactatctttcagacaccggactgaaactacgcggcatggtgcggttgcagccgccaggggaaagaggctcttctattacgaatcaacaacttcaggcatggcgagatctgtcgccagaggcaaaacgcatggctggcggcgggatgacatgggtgcaggcacagggaatatctatcagtagtgccaggaactatctgtcaaacaccggactgacccctttaggtatagagcgtctacaatcgccaggagaaaggggcgcaccgattacaaatacacagattcagacgtggctggcgctgtcgcaggaggcgaaacgcgaatcgggcggctggataaaatgggcgcaggcgcagggaatagccatcggcagtgccagcgcttgtctgaccaacacaggcctgactcctggtggtgcagaacgactacagcccctcggaaagaagggcgatcccattacactggcgcaacttctggcatggtttaacatgtcatcggaggaacgccgcgcgtcaggcggatgggccacatgggcgcagacgcagggtatatcttatagaagcgccagaaagtatctggcaccaacagacagtgaaacgcccccctgtggaatatcgcaatcgccgccgtccacaactgtcacgggcgccagtcccccggcatcggcatccgcaggcgatgagatagccgtcagcgtgagtcccgccccggcaagcagcggggaaaaacggtcactccccctggccacagaggatatctctgccccgccggcaaaacagatcaaggaagaagaagaccccgtgacctggcggacacaccagataaacaataacctgcctattctgcagcactggcgtgacccgacgatatcggtgatggcccaggcggaaggcaggattgaatccctacaggttacccggtggggacctctttttaattaccccggcagaccagggccaggattaatcaggatattcgctggtttctgcacaatgaaggaagccatgatgcgcgaatga

SEQ ID NO: 393102 - DNA, 3147 bp, Salmonella enterica
atgcgggggatcggggcagtcattcattttcactcgccaacaggcagcagcgtactctcccccgatttcagcgggatgtggaacagtatcagggactggttctccctgcccgcccaggatgaggctgcacagtgctttcgcattttttatcagccggatgaaggaacgtcatcgccggagaggctgaagtgttttttaaaactgaaggcgctggcgtctccgggacggcaggctaactttaccgcagagcgaatatgcggtaccggtgaaaccatctgtatgatcgcctccggtaaaaacagcgaccttccccccgtcacacttcacctgaacgaccaggagtggcctgcggcgcaaccccaggaatccgccccaacaacagagacaagaggaggccctggctcaaaaggcatccccattacaagtgcgcagatgcagacatggctggatttatcgccggaagcaaaacgcagcgcaggcggctggagaaaatgggcccaggcgcagggggtaactctcgggagtgccagcctgtgcctgacaaacaccggactaaccccctatggcagggaacgattgcatcctctcaaagagagaggtatgcccatcgctgtcgaccagatccaggcgtggcgtgatctctctgcggaagcgcgcagtgcggcaggcggttgggtagcatgggcgcaatcccaggggatcgctatcaccagcgccagaaagcatctgacaaacacgggactgacgctctatggcatggagcggctacagcatcctgaagcgagaggctctgccatcactaaggcgcagctcctgacgtggcttaatatgtcaccggaagaacacagcaaggctggcggctggataacgtgggcgcaggcgcagggaatagcaaccaacaatgccaggatgtatttgtcaaacacgggattgactgcccgcggcatggagcgaattcaacgccctgaagagaggggctttcccatcacggaccggcagattcagacatggcgggagttgccgcaggcgacgaaacgcgaggcaggcggctgggctaaatgggtacaggcgcgagggatatctatcgccagcgccaaaaaatacctgacaaataccggactgacccctcgtggcatggaattgttacggtcacccgaagataagggcgctcccatcagtgattcgcaactcctgacgtggcttaacatgtcaccggaagaacacagcgaggcaggcggctggaaagtatgggtgcagacacaagggatagccatcaatagcgccagaaaacatctgaccaatgtcggactgaccccccttggcatggaacgactgcagcacgccgaaaagagaggtctccccatcacggacagacagattcaggcatggcgagacctgccgcaggcgacgaaacgtgaggtcggcggctggaaaacatgggcgcaggcacagggaatctccttcaacagcgccggacactttctgacaaacaccgggctgactccctttggtatagagcgtctgcagccgccagcagaaaggggcgagcctattacaaatgcacaaattcaggcctggcgggatctgccgcaggaggaaaaacgcgaggcaggcggccgaataaagtgggcgcagacgcagggaatagccatcaaaagtgccgaaaactttctgacaaacaccgggctgaccccctttggtatagagcgcctgctaccgccagaagaaagaggcgcccctattacaaacacacagattcgggcgtggcagtcattgtcgcaggaggcgaaacgcgcaacgggcggctgcataaagtgggcacaggcgcaggggatagccatcagcagtgctatcgcctgtctgacaaataccggactgacccccaatggcaggaaacggctgctaccacctgaagagagggggtctaccatcatccagacgcaactcctggagtggtttaatatgtcaccggagaagcgcagcgaggcaggcggctggagagcatgggcgctggcaaagggcatatccatcagaagtgccggaacctttctgactaacagcgggctgaccccctttggtatagagcgcctacaaccgccagaagaaagagcccctccaattacaaatgcacaaatccgggcatggcgggacatgtcgcagaaggcaaaacgcgaatcgggcggctggataaaatgggctcaggcgcaggggatagccatcggcagcgccagcggttatctgacaaacacaggactgaagtataatggcatggtgcgactgcaacacgccacgagcgccagtctactggcgtcggcatccacaggcgatgagatagccgtcagcatgggtacgcccccggagagcagcggagaaaaacgatcactccccctggctacagaggatatctctgccccgccggcaaaacagatcaaggaagaagaagaccccgtgacatggcggacacaccagataaacaataacctgcctattctgcagcactggcgtgacccgacgatatcggtgatggcccgggcggaaggcaggattgaatccctacaggttacccggtggggatctctttttaatccaataccccggcagaccaaagccaggattcaccaggatattcgctggtttctgcacaatgaaggaagccatgatgcgcgaatgaatgcaatgatgtccgtgtctatccctcttgatgacagcgacggatacagggggcgtacaatctacgcaaaaaccgatctgacggcgtttaccgtactgggcccctactctggtcgtctgctggacagtgaacaggcgtggcgtgagtatgaaaaagaatatggaaaggaagccagtaactattattttgccacgcgaagccaggagcggctggtgtccgcctggccgcagggaaatctcctcagtctgcttaacagcccggtatttacccaccggacagcggaggctgaagccagacagaatgtcagcacggtgcttgtcgggaagaatatcaactttttcctcaccacacgcaacatcagcgccggggaagaactgtggtttgattacgggccggactaccagcattttgagccgggagaagcgttacgcccaacgcaggtaaaggaagagccgccttcttcggaaggagaataa

SEQ ID NO: 393103 - DNA, 147 bp, Salmonella enterica
atgccggatgacgaaagacgcgccgggtatggcgggggaagctttccgctccgggcgctgattttactgctgctgaccagcgctttcatctccggcttccttgccggagtcctggccatgatctggtttgtcattgactgcatgtaa

SEQ ID NO: 393104 - DNA, 321 bp, Salmonella enterica
atgtcaggacaggacagttatttacttttgaccaggagttccgggaaatccctcattccgggagaaatgccggaaattcatttctggttactggtggaagtatcgcccattcacagtgaaaaagtgattcactcgcttaaagaccatcttgtgctgggatatacccgcgtggaagcctgtgaacggcatcatgtttctcccggctatttttcaggggcgctgaaacggctccagcgtgttaaccagactgtatcccggcttatgccatattacattccgcagggggagtttacaggacagacaattccggctattcgctga

SEQ ID NO: 393105 - DNA, 189 bp, Salmonella enterica
atgaagcgccagatagtccagtatatgcgcggtaaaagcgaggggtgtggtacagcggaaattgcttatgctctgaaattaagctcttaccaggcccgttattatcttcagcaactggaaaaggaaaaaaaagtaacccgcacacccctgcgtcgcggggccagaacgatatggacagtgtcaaactaa

SEQ ID NO: 393106 - DNA, 675 bp, Salmonella enterica
atggtcgggctagatgctggtgtggctaaactcgccacactgtcagacggcacagtctttgagcctgtaaacagttttcagaaaaaacagaaaaagctggcgagacttcagcgccagttaagtcacaaagttaaattcagcaacaactggcagaagcagaaacgcaaaatacagcgcctgcattcccgtatcgccaacatccgcagggactacctacacaaagtcacaacgacaatcagcaaaaaccacgcaatgatcgtcattgaggatttgaaggttaaaaatatgtcaaagtcagcgacgggtacggtcagccagccggggcgcaatgtccgggcaaaatcaggcttaaaccgttcggtactggatcagggctggtatgaaatgcgccgccagcttgagtacaagcaactctggcgtggaggtcaggtgctggcggttccgccagcgtacacaagccagcgttgtgcgtgctgtggtcatacggcgaaagaaaaccgcctgtcacaaagtaaattcgtgtgtcaggcgtgtaggtatacagcgaatgccgatgtaaacggcgctcgtaacattttagcggcggggcacgccgttcttgcctgtggagggctggtgcagtcaggccgcccgctgaagcaggaacccaccgaaatgattcaggcgacagcctga

SEQ ID NO: 393107 - DNA, 186 bp, Salmonella enterica
atggttataacattagatgaacatcgtagagatacagctccggcgggcgatcgctctaacgagagtaatgctgataacgaaatcgctatggttctcacctttacccccaagaaaaggattgaaaatgttgatgatgatcaagctattgctgctattcttgccagggcaaaagcactgaagtggtga

SEQ ID NO: 393108 - DNA, 1584 bp, Salmonella enterica
atgggaactaatactgcacaaaaacttcctcctgtttcttctgaccaaggttcctcctcccaaaattcaattgaaattataaaaaacaggcaatcaaacgaattgattttggctttctgtggaccaattggatctggaataaaagcaattagattagcatttgaaaacaatctggaaaatcttggttataaggttcatcatattcacataagttctttaatggataaagttaaaaatacttctgtaaatactgacccctataatcgatatatagaaaagcaaaatcaaggtaatgccctaagggaaacttatggccctcagattatggctgaggccgctattgccagtattgctgaaataaaacaaaaatcaagaacttcgataaatgctgaagcacgttttaatgaaaagtttgtgtatattatcgatcagttaaaaaatcctgctgaagttgagttattaagacttgtttatcaacataacttctacttaataggggttgtaagaaacgaatctgaaagaaaaagaaacttaagagatgaagggatttctcctcagcatatagatgaactcatacatttagatcgtaaaagtggcggaagcaaagggcagcaagttgaaaaaactattcttgatgccgatttctttataagaaataatcaaagccattcaactcaactaaataataaagtagaacgattcttgggcttaattcatggaaaaaatggactcaccccatcgctgcatgagaaaggtatgttcaatgcctttagcgcttctcttcaatcagcatgtttgtctcggcaggttggagcagctattgttgaccatgaagggaatattttatcaaccggaagaaatgatgtgcccagacctggcggagggctgtatacatttgaagatgaaaataaagacttcagatgtattcataagggaggtaaatgttataatgacatgcataaagctaaaattaaagatagcataactaaacaaatcaatctaagtttagataatgtgctcacgcaaagttcatcaagacctttattagaaaaagctattcggagtatatttgttgatactgaatttgtagaaaagcttgcatctaatatttataacaactccccaataaaatctttgattgaatattcgagagcgatacatgctgaaatggatgccattacaacgttagcacgtacaggagaggcatccactaaaaataagattatgttcactactacatatccttgccataattgtgctcgtcatattgttgctgcaggtattgttagtgtttactatatagagccttatgaaaaaagccttgccttagatctccatgacgatgccattaatgatacaaacattaatgatacccagaaagtgaattttattcagtttgagggcgtatcaccacgccggtatgctaagtttttctttactacgtcagatagaaaaaattcacaaggttatgcgtatccttatgctacgaaatataataaccatgttgattatcaatttattgatagctaccaggaaatggaagataaaattacgcagatatataccagtaagataagcgcttaa

SEQ ID NO: 393109 - DNA, 252 bp, Salmonella enterica
atgaacgttacttcacccaaaatgctggctcaggcagtgaggaatgctcgcaagcaatgtaagctgactcaacgcgaaactgcagaaagtataggcatgaaacaatcaacggtttcagagtttgtgaatcatcctgaggggatccgcatagatacgctctttatgctgcttgccgctctggaccttaagcttcaggtcgtaagccgtaggggcgaacataaatcgtctgatagctgggaccagcagtggtga

SEQ ID NO: 393110 - DNA, 1077 bp, Salmonella enterica
atgaactggaatcccgaagccccttacaacgctctgccaaagctgccgcctgatctgcagcagatagaaacacgtaatgtactaaaagcgtgtataaatgcgcgcgcggcaattgcagagctgaaaacggcgggtgagttgatccccgatcagggattgttgattaacattctcccgatgctggaagcgaaagattcctcacgcattgagaacatcgtaacgaccagcgatcagctctttcagtatgctgatcgtgcagacggagcagatccagcaaccaaagaagcattgctctatcgtacggcactttatgatggttatacccatcttgagacctatccactttgcacaaacaccgcaatcgctatctgtaccaaattacgcgcagttcagaccgatataagaaaaacaccgggcacggtactgcgcgatcagaataacagcgtggtgtatacgcccccggtgggtgaagatactattcgtaacttattggcgaactgggaacagttcatacatggcgatgatgatttagatccattagtgaaaatggctattgcgcactatcagtttgagtgcatccacccttttccggatgggaatgggcgaacaggccgtatcctgaatattctttacttgattcaaaatgaattgctttcactgcctatcctgtacctgtcacgctttatcctggagagacgtagtgattactacacgctattgcgtagggtaacagaggaaggagactgggaatcgtggatattatttatgctggaggccgtagaaaacacgtctcgatggacgactgacaagattgcggtcgttcgggcattgatggcagaaacgaccgagtatgtacgtgagaagctgccaaaaatttatacctatgaactcatccaagtgctctatgcgcaaccgtattgccggatcgataaccttgttgaacgaggtatcgctaaacgccagacggcatcagcatacctcaaacagttggtagatataggcatgctggaagaaatgagcgttggtcgcgaaaagctgtatatcaatactaggttggtgcaggaattgaatcagtaa

SEQ ID NO: 393111 - DNA, 654 bp, Salmonella enterica; identical to SEQ ID NO: 93211

SEQ ID NO: 393112 - DNA, 1503 bp, Salmonella enterica
atgaccgccaacagctatttcgagtatgtgctcaccctgctcggctggctggtgaacaacggcgtgtggcagacgctgaccgccaccgggctgttcgccctgccccttctggcaaaactggtcgccctgtggctgaaggcgcgcggccagggggcggatgaaggcaacgtcgcccgcctgctggtcgtctgggtggagcactcgctctacagcgccctgctggtgatcctctttgcgggtgtgccgttcctcaatgttgatatcaataccctcacctacgacagccagcgcaccaagcagtgcggctggtcggtggtacagcccggtgattccggctatgcgccgctcatcaacgaactcagcggcaagagcgcttccgttccggtgtggtggtacttcacgcatgcactgggtaaaggcatcaccagcgccgccgtcgcggttctgccctgcaagccggacctgcgccagttgcgctttgaagtgcagcacacccggattgccgatccggcgctggcgcaggagctacaggatttcgttaacgactgctatggaccgtcgcgcgcacggctgaaaaagctcggcagcgatatcagtgaggagcaaagccgggaagtggactgggtgggatcgtctttttacctctccacgccgggctattacgaccacgatcattcccgttcaccgcgcgccgcctggccatatgacgccagccgcgacgacggtctgagcgatacgggtggcggaggctatccagcatgtaaggagtggtggtccgatggtgaggcggggctgaaaaatcggctgctgaagcaggtcgataccacgctctggcaacggctgcaaaaactggggcagtcgaaagacgagtacgaagaagcggtattgcgctcgctggtgagcccgcgcaatatgcaggtgtcacagggcgggctggtgtataacggatttggtgggagtgcgggagataacctcagccagacgcagttgctaagtcgcgtcggtgggatcatcggcgcggggctttcgagctacgctctttttccggcgtttgataacgtccgccaggcgctgccgatggtgcaggcgttcctcgaaatggcgctggtgatttgtattccgataattctgttattctcggcatgggatcttaaaacggtcatcacgctgagctttgtgcagttcgccctgttctttctcaccttctggtgggaactggcgcgctggctggataactggctgatgcagatgatgtacgacagcgacacccactcgtacttcaacctctggggcctgcaaaacacctccgacgatctgattgtgaatattattatgggcgtgatgttcctggtgttacccgcattctggctgggcgcactgacgtgggcaggcgtcaggatcggcgcagcagtcgccggggtgatgggcagcgcggtcggcgatatccgcagcgctggcgaacaggtcgggaagatgatcgtcagtaaaacacgcattccctga

SEQ ID NO: 393113 - DNA, 513 bp, Salmonella enterica; identical to SEQ ID NO: 93221

SEQ ID NO: 393114 - DNA, 681 bp, Salmonella enterica
atgaacaggtatgcagacattttgctggcgctattgctggccgtatttaccgtgcaggcacaggccgggattgtcattggcgggacacggatcatttataacggcgacaaaaaagagacctccgcttctatacgcaaccccgacagaaccggcgtctggctggtgcagagctgggtggacagtggcgtgaaaggcagcaaaacaccgtttatcgtcacgccgccgttgtttcgcattaatccaggcgaagagaacatcctgcgcattgtgcgcaccggagggagcctgcctgaagaccgggaatcggtgttctggctgaacgtgaagtccattcccgccaccgacgacagcgtgccgcataacaacgttctgcaggtggtggtgaaatcccgcctgaaactcttttaccgcccggcggggctggaaggacagccggagacggcttaccaccatctgtcggtctcccgtagcggcaatcgtcttacggtcagcaatcccacgtcttactacgtcactttgttcaccttaaaggtggacgggcaggagatcaaagaggccgatatggtgccgccgaaaggcagcgtcagcttcacgctgccatcggccacggcgtccatggtgagctggcagtcgatcagtgattacggcggcgtcagtcagaccgaaagccgtaagctctga

SEQ ID NO: 393115 - DNA, 2508 bp, Salmonella enterica
atgaataactcgaattcccgactgatgatcttcctgctggcgctgttgctgattatggtgctgctattgggttatctgcgtcatgcggaagcccgcgagaccttcaatacccacgcgctggagctggacagtccgggccagccagttgtggacttatctgcctttgccgaagccgatggccagctaccgggtacttaccgggtgacggtgtatgtgaacggcgagcagcagggcgaagcgcaggacattgcctttgttgccgggccggataaaaaactcagcgcgcagttaacccctgcgatgctgaaagactggggcgtgaataccgccgcgtttcctgcgcttgccgcactgcctgcggacaaaccgctggaggatattggccgctatatcccgatggcttccagcgaactgcgtttcagtaaactgcaactgaatctcagtatcccgcaggcggcgatgagcgccaccgcgcgcggctgggtggatccgtccgaatgggacgagggcgtacctgccgcactgctgaactataacctcagcggcagcaatacctggcgcgacggagaaaatggctccgatgataactactacgctaacctgcagagcgggctgaacctcggcgcgtggcggctgcgcaactattccacctggaattacgacgaggataacggcagccactgggattcagtgaacacgtatcttcagcgggatatccagcgcctgcaggggcagctcacgctcggcgacagctataccccgtcggacatcttcgacagcgtgcagtttcgcggcgcgcaactggcgtcggatgacaatatgctgccggacagcctgcgcgggtttgccccgatcatccgcggtattgcccagtcgaatgcccaggtcactattaagcagaacggctacaccatctatcagagctacgtcgcaccgggggccttcgccatcagcgatctctacccgacatcgggcagcggcgatctggaggtaacgattaaagaagccgacggcagcgagcgaacctttattcagccattctctgcggtaccgattatgcagcgtgaaggccgcctgaagtatgccctcacagccgggaaataccgcagcggcaacagcgacagcgatgagcctgagtttggccagataacggcaatttacggcctgccgcatgccatcacgatttatggcggcacgctgtactcggaggactatcagtccggggcggcgggtctggggtttggtctcggcgagctgggttcggtttccgccgatatcaccgctgcacacaccacccttaataacgatgaaactcacgacggccagtcgtaccgggtgcagtactcaaaagattttcaggccaccgataccagcttcaccctggcggcgtaccgctattccacggaagggttctataccttccaggaagcgaacgacttacgctcggacagcgatgatggctggcggctgacgtacaacaaacggcagaaactgcagctcgatctcacccagagtatcggcagctacggttcgttctttgtttccggctaccagcaggattactggcatgaggacggttacgagcgcaccctcagcaccggctggaacggcaacatcaacggtatcagctacagcgtttcctacagttacagtgattatccggacagcacccagccagccgaccagcagctggcgttcagcatccaggtacctctcagccgctttatgccgaacgcgtgggccagctacagcgtcaacaccgcgaagcacggcgacacccgccagcaggtgggcctcaatgggacggcgcttgccgataacaacctcagctacagcctccagcagagctacaccaaccacggtacgggtggctccgggaatatcaacgccgactacaaaggcgggcagggggaaatcaccggcggctacaactatgacgacgatatgcagcaggtgaactatggcctgaaaggggggattgtcgtccatccacatggcgtcaccctttcccagccgcttggtgactcacttgccatcgtgaaagcgcccggggcggatgacgcgaaggtgcagaataataccggggtctataccgactggcgcggctatgcagtcgtgccgtacgtcaacgcttaccggaaaaaccgcatcgcactggacaccagcacgctcggtgatggagtcgatatcgacaccgccgtgcagacggtgacaccaacgcagggcgcagtggtaatggcggacttcaacacccgcgtcggacggcgcgtactgatgacgctgctttaccgtgggttgccggtgccgttcggcgctcaggcgaaaatgaaggaaggcggcagcggcatcgttggcgatgacggacaggtatacctgacgggcgtcccggatgaaggtgatatcacggtgaactggaacggaaagcagcagtgcgtggtgcattatcggctaccggagagtgccgcaaacgcgccggtaacggaaactgagcaggagtgtcgggaatga

SEQ ID NO: 393116 - DNA, 954 bp, Salmonella enterica; identical to SEQ ID NO: 93224

SEQ ID NO: 393117 - DNA, 861 bp, Salmonella enterica
atgactaagcataaacaatttgaagagtatctttttcatgatacttattatttttgccattgtgtgaaaaatatactttgtgatcaaacttcatatatcggaggtttgaatgattttcatggcgatggaagggtaacatccttttcaatagcatttccaaaatattcacatttccatgcgtttatagaatttatagtatctaatatatattatgaagaattggaatggagcaatatccaaaagctacataaaagattcaaagagcttacccagtttgaactcgcaatgttatctaacagtgaaaatggtggtgtgttttctttctttaataagtatcaggaatatatggcttttttgtctggtgaaggtgttgctttaagccaaagcgatgagtattcattgcaagcattcttagagcatttcatgtcaaatgaggtttttgttaatcatttagaaaagactgtagatgaagtgttttatgtcttattcgctaatagattagtcgtccagctgttcaatgaaatgattgccagcgttagggaatatgataaagatgtatttgaagatgatagttgctgtaagcctaatggggtattgaaaaggaaaaatataccatcatgggtgaagaatgctgtttttcatagggataaaggagtttgtgttatatgtaaaaaagatttaacccatctaataaataattttaatgaagctaattatgatcatatcgttcctttatcaaaatatggaataaatgatatatccaatattcaactgttatgtaaggagtgcaatcagattgataaaaattcaaaaggaaatgatagctcgtatgattatttcccttggtatcgcatgaattga

SEQ ID NO: 393118 - DNA, 255 bp, Salmonella enterica
atgaaatacctcttctttgctttgttattcagtctcccggccttcgccacggaagtggtacagtgggaaaacatcccgctacccatcgcgctgcatgtcgggcaggagcgtattgtcgacgtgggtaaagcagtgcgcatcggttatcccgccacgctggaaggcaaagtgcgggcggcaaggtcttcctgctggcgaatacggcgttcccgtccacccgaatccagctacgtgataccggcagcggcgagctga

SEQ ID NO: 393119 - DNA, 354 bp, Salmonella enterica
atgacgacaatccctttcctacccgaccgcctcaaccgtgaaccggtggtctggcgcggcctgaccaccagagagttgtttctggcgctggcaagcggtcttggtggtggttgcatatccggcattctgctggccctgctcaccggttactggccgttgatccccggttcggcgctggcaggcgcggcgttgctgattcagggcggtgggcgcatcctggcccacgccaaacgtggcaagcccgacagctggctaccgcaggcgattcttgcctggctggaacgtcatcatcttcgcggcgcacaactggtgcagcacagtaccgtatgggtagtgcgcaggagtccgcgatga

SEQ ID NO: 393120 - DNA, 309 bp, Salmonella enterica
atgcgcagccgttcattatatgcgttactgataatgctcatagaatctcaggcctacgcctccccggaatccacccagctcgccctcgcgctgaagcaacttgacggcgtaaaaacctcgctggagcgcgcccaaacccgcgccagcaccgatccacagtcgcgctacatcttcgactacttacaggcgcagcaggacatctccaccgttgaacagggcattcgccgctaccttaccccggcaagagcgcagccacgcaccgtccagcccctgagcaccagctaccagcgggagaaccctgatgactga

SEQ ID NO: 393121 - DNA, 1875 bp, Salmonella enterica
atggaattagctagatctgtacatcctaatttttctatttctttatttcggaaacaattatatatagccaaacaacttagaaaatatttaatagcagcttcttttggatgcctatcttcaagtgaagagctccctaaagactgcaaggaagtactgtcattagcattatcaaatattgaacctgacacgtcacataatgagattgagtatcgtaattttattcattgtgataatgataatattaatgcagaaagatactggattttcttacttttaaaaaggcttgaatccaccccctcagtttctttgataaatatgcttcactgctatttaatattacaaaatctttactataaattgcttgtacaaaatgaagagcaatatggttttgatcaatttcagaaattaacttggactgacttacgagagcctattgaaaaagattattttgaccgtttccaaaatatgcatggtcctttacctacccacagtagagtcgtttatttggaaggtcggtttgcccctaaagaccttgaggaaaaaaatatatcgatactatacaatattttaagtggatattggagatatttatataaaaccaatccagaaagtgatcttacacggttacttggtgagtttgaaaagaatattatcaatacaacactcataaatggtcgttttttgaagctagcacttgttgctcattttgttaaactccccgaaaataaccttgatacaccctacagacactatactttgcggactaaacttagtaaacaagcccatgtccttaaaaacacactttatcattatccaaccttaaagcgatggtttagggggattgatgctgctgcaaatgaacttgacgctccacctgaggtttttgcaagcgtttaccgcatgtgccgttactctgggattacacatcgtagttatcatgctggagaggattttcatcatatattatcaggcatccgggctatgtttgatgctatagaattacttgatttgtgtgaaggcgaccgtattggccatggtactgcaatgggtatatccccagaactatggttaaaaagaatgcctggaggcgtttatattcataaagatgactggttacttgatttactttctacttggcgccttttaaaaatgataggagagaccgagttagcgtataaactggagagtaaattgactgaactaggctcttatttatttgattttcaagtaaatagtataacgttagaacgagtaatgaaactcaggggactcaatattgagttccttgccaagatttttactggtattaatgagaatactaaaaagtctgaaataataaaatgtgtagatgttgtcacaccacttagtgatatagaaagggcagaagcgataaaggtagacgaagctatcagctccaatttcaatgattgtaaacttttatggaaatggcttagtgatcaagatattcgctcgaggggaagtgagctagtatttgttgactctgaatatttgtctgcagaggaatatataaaaatacaacaagcactcatgcacgtagttaaagataaaagaattcttatagaaacattaccttctagcaatgttcgtattagccaatatgaaagtttcgatgagcatcatgtgtttagatggatgggcttaccaagttatgcaaaacctggagatccagaaataatggttacactaggctcagatgatccaggaattttcgctggtgacctagcctgtgagttttatcaattatacgctgttttgcaaggtttagggttaagcgataagaaagcattacattacatttcagagcttaatgaacgaggtagagaatatcgctttcatgactttggaataggctaa

SEQ ID NO: 393122 - DNA, 201 bp, Salmonella enterica
atgagtcatatccctaaaaatgcagaccgtattgctcgtatgatggcagagtctcgccagagaggaaccgttccaatacaaggtgaaaccgttgaagaactccgtgtcaacttgttgcgtaccatttggggtcttgatgaggatagttgtgttgtagagggatctaatgaccgtcaccataagaaagatttcgcaggttaa

SEQ ID NO: 393123 - DNA, 465 bp, Salmonella enterica
atgaccgtcaccataagaaagatttcgcaggttaaactatctaccgtttttgcagtaaacagcgcttattataattatggtgctgataaagcaaaagaactatctatcccgttagctcagcttattaataagtggcaaacggatggtctggtagagatttacggaacaaagagcgaacgtacttggggacgaattaaatcttcttatcgggatgcccttggttgtgagatatctcaatatgagacgctttatcatgggcgagtcagtccctcgactggtgatccgctggttgttattacttttaaggataacccaatttctcctgatccgattcttgtgattgagttcctgattgagcatgaccaaatgtttggtcgcgaagatactggtgctaagatgaatgaaaagataatgaagatgattcgggatggagtagagagaagagctaaattaagtaataaataa

SEQ ID NO: 393124 - DNA, 453 bp, Salmonella enterica
atgtggttaaaatttttgcaattttccctatttgttttttttgtttatcaggtaaatggcgaagatatgaaaaatgatcatattgagaagaaggatgaagaaatggtgggatctactgcgatgacctatgatttaagtaaaaaagaattattagatataaaatacaaatcagaacacggtaatgctgaagcatcttttagactatatcaatattatttttttacattggatgatatagataatcaaatgtactacctatatagagccgctgttcaaggacatccaataggacaatataattatgcgcttgttctatcatataatatccctttttatagcaaatattatgatttagataaagctatatattggatggagttagctgctaaaaatggtagtgctgatgctgtaaataaattgcgagaactctatagcatcaaaaataaaaaataa

SEQ ID NO: 393125 - DNA, 225 bp, Salmonella enterica
atgaagtatttaattttttttgcatcggctttatgttttcttttgtcgattgagtccatgtggatattttatatcatagcgaaaggtttttttggggtacatattgaacagccggttcatttttttgttaaattattaatacgttttttaatgagttgttttttcatgtttatggcctattttttatttaaaaaagttaagggttctgtttattatactaaatag

SEQ ID NO: 393126 - DNA, 837 bp, Salmonella enterica
atggagattattggcgttgtttgcataatgcggcctaacgccggagcagatacaaaaccagatggagccggagtatatgccgcagagaaaattcatctgtaccactacgacctgccgctggcgctgataagtccggacaacacggtggcgtggcgcgcggagtatgacgattggggaaacctgctgagtgaggagaaccctgagcacctggagcagctgatacggctgccggggcagcagtatgatgaggaatcggggctgcattacaaccggcaccgttactataatccggggcaggggcggtatatcacgcaggaccctatcggattagccgggggatggaatctttatacgtaccccctgaacccgatagtaaatatagatccattaggtttaaccttatctgatataccaaactataaatttaatagtcaagatgaagctgcgctttttgccataaaaatgtgtaatagcacatcaattgcagagagtagagaatatggcgggttagtgtgtaaaacctctaataataaatatattgcaactgaagctaagcagggaagcttggctggtttttctccgtcaaatagctcttgtccttttggcgcgactaaggttggtgattatcacacacatggtttttactctgatctaaaggggaatccagtatcacctcaaaatgatgcatatgactctttacatttttcaccgcaagatatttctgggattacaagtgatgggataggtaatcctgattatactggctatctgggaactccagataataaatattataagtttacccctggaactggaaaaactgaggaaatgaaatga

SEQ ID NO: 393127 - DNA, 270 bp, Salmonella enterica
atgaaatatgttattcttacatttatttttctaattccgttaagatgtatgagtgaaaaacttgtttttttagatgaagtacaaacaaaaaccatgaatgttgctttttcacattttagagagcatacaaactggagtttatttaataccatgatacaggatgataatgaaaatattaaaatcgcattctattgtaaatctcatccagaagaaacccgtggtggcggtatggagcaaattatttatataatttcaaaaaaaagattttaa

SEQ ID NO: 393128 - DNA, 609 bp, Salmonella enterica
atgagcggaaaaccagcggcacggcagggtgacatgacccaggtgggcggtccgatagtccaggggtcggcgggcgtgctgattggcgcgccgacgggcgtggcctgttcggtgtgcccgggcggcatcacctacggttcgccggtgaacccgctgtcgggggccaaggtgctgccgggtgagacggattttgcgctgcccggcccgctgccgtttgtgctttcccgcgcctacagcagctaccggaccaggacgcccgcgccgtcaggactgttcggccccggctggaagatgctggccgatatccgtctgcagcttcgcgagcgggagctgatactgaacgacagcggcgggcggagcattcacttcgaaccgctgtcaccgggcgggacggcgttcagccgcagcgagtcgttctggctggcgcggtgcgggacgcttcacgccgcttctccgggtggaaacagaaaatacggaactggcgaaaacacgccaccgcagcctggcggagaagctggagcaggaggggagcggggacggcgaggcggtgcagttcccggcggcgctgcgggcgatgctggactggctggaggacgagctgaggcgtga

SEQ ID NO: 393129 - DNA, 420 bp, Salmonella enterica
gtggcaaaactggcaactgaagtccgccagaatagcagcgtcataaacaaatctgtcttcctggcgctgggtatcaacaccgaggccagaaagcgctgccggatagaaaatgaaggcgcaaagttctggctgaatgtgctgacagagctgaaaaatcgtagtcttaaggacaccctgattgcctgcgtggacggcctgaggggcttcccgagtaatctgaaggctgtttatcacgccccgaccagagaggcggcactgatggcgctagaagtgttcgcggaagtctgggacgacaaatacccgcagtgcgcactgggaaaacctgaacacgttcttcggctacccgccggatatccgcaaggcgatctacaccacaaacactatcgaatcgctgaacagcgtcatccgggccgcgattaa

SEQ ID NO: 393130 - DNA, 174 bp, Salmonella enterica
atggacgaatataaactcaaagcgcccgcaactgaactggttataagccttaaaaccgaagccgatctcaaccaatttttccggacgctgacgaagcttactgtcgaaacagcacttaatttagaactgaccgaccatcccaaacgcacccaaaaaaggctcaaacacccgtaa

SEQ ID NO: 393131 - DNA, 675 bp, Salmonella enterica
atgccagagcgtggtcaggtctgcttcttcgtggcagacaacctgcccggtggcgctgtagcggtaacgctgcgtcctgccgtcaaagccggtttcctgcgtcaggcggtccagcacatcgtaagtgaataccgtgtggctgccgttttcactggtcagttttgttacacggcctgcggcgtcatattccatccggcgcgtcagccccccctgcatggcgctgatgatattcccccgggcatcacgggcggtttcgcggcggctgccgtccggggaggttaccgccgtcaggtcgcccgccatgctgtattcatagcgcgtttccctgccctgcgcgtctttccggctgaccagcctgccacggctgtcataaacctggtacaggcttattccttcctcctggtgaacggcggtcagttgcccgaaacggtcatattcatagcgggtttcatacccggagcagtcggtgaaggtcagcagctgcccgtagcggctccggaccatctgtttgcggctgccggtggcgtcttcggtggccgcagggtattcactgtacgggctgtcataaaaatagcgtgtcgtgctgccgtcgcgcagggtgtcggctgtgagcctgccccgggcatcatattcccgccggctttgcagcccgtccgggtacacggtaccggttaa

SEQ ID NO: 393132 - DNA, 924 bp, Salmonella enterica
atggcaagtttaagagataccggaaaaacacagaatgcacaatggcctgactatgtaggcagtatattgcgggggacacagccaataaaccggcctgtccctcaacatccctacctcaatgatatccctattctggatgaaatgatgagacaaaatactcatcatgtcgttcttttaacgcttaatgatgctaaaaacattctcaatgcaattaaaaactttgattacattaattttttcaccacacatgcctctggtataaaagacacttttgcctggctgaaaaccggcaagaatttaatgaccgactttgatgagacaggtaaacttgtttttggattcaggtcattgctacatacaaaagctcgttacattgaaatgctcggggttaaatatattagaataataacctccaacacctggcttatagataaactcgggaaatatatttttaattcacgcgcacctcaaattctggaattagctcttggctggcgaggtgctgtatcagaggcaataaaaggcattaaattctgtatctggttttcggtaggctggaggctcatacaatttttcatgagttcagaacacaacattattaatttactcactgatattgcaatggatgctgccaaagcgctgatagtcggtggtatggcagcagttgtcggaagtctggtttctcttgtttgcctctcgcttggatggccagttgttcttgttactggtgcaattatagcaacaggaataatcggaacggtattgatgaatacgattgacgatcatttatatttatcagagaaattaaaagttgcaataaaggatggattaaaaaaacaacaagaaataaatgagcacaaaatgaaaaacctgtctccttttatgtatgtactcaccagtacacctacgatgggtatagagtaa

SEQ ID NO: 393133 - DNA, 4470 bp, Salmonella enterica
atgagcggaaaaccagcggcacgtcagggagacatgacccaggtcggcggtccgatagtccagggttcggcgggggtaatgattggcgccccgacgggagtggcatgttcagtatgcccgacaggaaaggcttcgccgaagtacggtgaaccggtaaacgcggtgctgggtgcaaaagtgctgccgggagagactgatgtggcgctgcctgggccgttatcttttgtggtcagccgcgcttacagtagctaccggacgaagacacctgcgccggtggggctgtatggccccggttggaaaatgccgtcagaccttcacttacagatacgcgatgatgaactgatactgaacgataccggcggccgcagcattcattttgaactgctggcgccgggagagacagcgtacagccgcagcgagtccttctggctggtgcgtggcggtgcggaggcacaggataaagggcacccgctggcggtactgtggggcacgctgccgaaagtgctgcggttatctccgcatgtctacctggcgacgaacagtcctcaggggccgtggtgggtgctgggggggcatcagcgtttgccggaatcggatgaaatcctgcctgcaccgctaccgccgtatcgggtgctgacagaggtagtggatggctatgggcatcggctggtgtatcaccgtgacagtgtgggagcggtggcaggcgtgacggacggcgccggaaggcgttaccgtctggtgctgacgacacaggcacagcgtgcagcgcaggcaccttcctcgccgctcgcgccccgctggccggagacgctgcccactacggcatacgggaaagacaacggcatcagactgtcagaggtgtggctggtggaggacccggtatacccggaaagcctgccggaggagccactggtcaggtacgggtacacggcgttcggggagctggaagcggtgtatgaccggagcggcatggaggtaaggcgctttgagtatgacgcggggcatccgggaaggatgacggcgcaccgttacgcgggaagaccggcgagccgctaccggtacgacgaggcggggcgggtcacggagcaggtaaacccgctggggctgggttattcgttcgcgtatgagaagaacaaagtaacggtaacggacagcctggggtgtcgggaagtgctgcacacagagggcgaagacggtcttaagcgtgtggtgatgaaagagcaagcggacgggagcgtcatccgcagcgggtacgatgcatcgggaaggttggtgtggcgcacagacgctgcggggagaaagacgacgtacagcccggatgtagcgacaggaaagctgacagcggtgacggggccggacgggagaaagacaaagtacagttataacgaccagcagcaactgttaacaacggtttatccggacaggttgcgcagccagcgagagtatgacaggcagggtcggcttgtgaaaacggtctcgcgtgagggctgggcgacagagtttgtctatggcagcatgcatgacagccagccatcggtggtgaaggacagtaccgggagtcgccggataaagcgtggacgttacggagaaattttgtcacgaacggactgctcgggatatgagacgcgatatgcgtataaccggttcgggcagattaccgccgttcaccgtgaagaagggatgagcgagtaccggcgctatgatcgtcgcggcaggttatcttcagtgaaggacgctcagggccgcaaaacggagtacgaatacaacgacgctggcgacctgacgatggttatccactcggacgggcagcgacgagaagctgagtatgacgcgcgcgggcggatcatcagagtaacggaaggcgggctgacgcgtcgtgcagtatatgatgcggcgggacgtgtggtgcgactggtgaacgagaacggcgcggagatgcactttacgtatgatgcgctgaaccgggtgacggaggagacgggctttgacggaaggattaaagcatatcactacagtagtacggggctgctggaacgcagccgggatgaggatctgacaacagcctggtactacgatgacgccgaccggctgacacagcgtacggtgaacggtgaaccggcagagcagtggcaatatgacgaacatggatggctgacgtcactgagacacatcagtgaaggatatcgggtggatattcattatgaatatgaccggaacgggcggctggtgtcagagcggcagacggtgcatggcgcggagaatggcggcgaaccgctgtgggagcacagtgtggcgcacggttataacgaccaggggctggcaacgcgggaagtgtatgacagattgccggtggcggagtggctgacgtatggctctgggcacctggcgggtctgaagctgggaagccagccgctggtggaatacatgcgtgaccggctgcatcgcgagacagagcggtggttcggcgcatggcgaatggcgacgggatacaacgcaagcggcgaggtgcagtaccggcacctgtcagacccggcgctgagcagggagtaccgacatgacgtgttgggatttctgacagatattgagggcggggaggaaacctgccgctacggttatgatggctcgggaagactgacggaagtaagcctgacgaccagagagatgagcgtggacatcccgtacgagacggacgctgcgggaaaccgtttggaggccgtagcggaacggcgggaagcgaacgggctgccgggtgtcttcgcagacaaccgggtgacggaggacgggcagtatacgtaccgttacgacaggtacggtaatctggtggagaagggcgcgcgcctcccggcgggaacgatacgcagcggggatgaacgaacgcactattacagctatgaccaacaacaccgtctggtgagctaccagtgtacggaaggctacagcagccggagtatcacggaaagtcggtacgtgtacgatgcggcaggacgtcgggtatgtaagcaggtatggcggcgggagcgttacgggacgggacgtcaccacgactacacggcgctaccggaaaaaccggaagtgacgtggtacggctgggacggagacaggctggtgacggcgcagacggagcagagccgaatccagacgatttatgagccgggcgggttcacgccgctggtccgtgtggagacgggaacagaagcactggcaacgacccggccgcagagaagtctggcggagaaactccggcaggaagggaatgaagacggcacggagatggcatttccggcggagctggtgcggcaccttgatcgtctggagaatgaactgcgacgtaatgcggtaagcgaagagagccggaaatggcttgcgcaatgcggactgacagcggaacagatggcggggcagctggaagaacagacggagccggagaggacagtgcacctgtatcactgcgaccatcgcgggctgccggtagcgctgataaacagcgaaggagcgcgggactggagcgcggaatatgatgtctggggaaaccggctgaaggaagacaatccgcaaaagcttgagcagcttatccgcctgccgggacagcagtatgatgatgagacgggtctgtattataaccggtatcgttactataatccggagcagggaaggtatatcagtcaggacccgatagggctgtggggtggctggaacctgtatacgtatccgctgaacccggtgagcgggactgacccgctggggctgaatgcagcgttacttgcagcagggctggctactatgggcactggtgctgagacgggaagcggcatcggttcagtaggtggtccgccgggggctgtagttggggcggtcgtaggagcggttagtgtcggtggagtattactgtataacaaccgtgaagccgttggtgatgcgcttgataaagggatgacatcgcttggcgaagccgaaatattaaaagccgaaagcgagatggctttctggaacgatccgtgcggtgcttttgccagtgtgtttggtggggatgattcagggaacccaaatgttggtaaggacctgacagatgaagagaagaatgaactgggcggtgctggttctggttcgccaaatggttggggtcctgaagatgaacaagatgcgagacatcgtgaacaacatgagcgatataaagatgaactgcgtcaacaaatggaaaaaccaacggtagaagatgcggaattaaaaaatattattgatgatctctatcgcccgaatgcaaaagttggtagcggaagcactgcggatgcggtgcgttatgaattgtcaactggtgagaaagtcggcggtagagggcatattcagaaagccgagcaatattccgaatcgttacaacgttggttaaataaaaatccgtcagcctctccaggtgatcgggctgcggcagagaatgtattgagagacctacagcgagctttaaggggagagtaa

SEQ ID NO: 393134 - DNA, 378 bp, Salmonella enterica
atggataaaattattgttgattatgtggataaattgagtgctttctcagactttatatcaaaaacaattagctcggttaatgagtattgggtgcctgatgaaccaccgttgattatgctattttcgcagattggtaagtctctagtaacgatatttccggaacttgactatgttaagaaagagttattattcaaatatattgaagatggtatgacttccaataatgaagaattagccactgccgtagcaacaggccttgttgaagcaatagttacatcgacggattccaatcaacatttatgggaagaaatagaaggattattggggagaaactctaaggaacacgctctggcttggagaaactttgggcagtcatga

SEQ ID NO: 393135 - DNA, 387 bp, Salmonella enterica
atgattgaaactttggttgacataacaccccaaaatatatctttcagagggagccaagttattgattttcactataaagcaggtagccttgagataattattagtcttgatggagtgagtccagattttcgggttttttttgactggtctcattcattccgcgtgaccgatgaaggtgacttgttaaaaatgttgggtgagcaaagtgggaaaatgctggtaggtatttataaagttgaaaaatcatcctacctggaatggtttaatgaccagagtgttaatatacatagtaaagataatgttgctcattatttgattgtgacagtaaatgatgtcgttgatgttttgtcatcagagcctccaattataaccaactattctaaatag

SEQ ID NO: 393136 - DNA, 180 bp, Salmonella enterica
gtggtacggctggtgacggtgcagacagagcagagccgtattcagacgatttatgagccgggcgggttcacgccgctggtccgtgtggagacgggaacagaagcgctggcaacgacccggccacaagcgcatcgcaggccacatgtgcagtcatccgtgatgacattgaccagccgataa

SEQ ID NO: 393137 - DNA, 144 bp, Salmonella enterica
atgattcataccactaatctcgtcactacagagccaggcaagctaagcaaaggccagcaatatcgggttacttacaatccccctgcgctctttaaggtgctgcgccttatggatatatgcggccctttaccacactcaaaataa

SEQ ID NO: 393138 - DNA, 264 bp, Salmonella enterica; identical to SEQ ID NO: 83048

SEQ ID NO: 393139 - DNA, 897 bp, Salmonella enterica
atgatcatatcactctttaataatactcaggaagacaaaaaagctacacatttatgcattacaattgagcctgtaatcatgattcaacgaatgcttgctaagtccttggaaattcacaacaataaaataaatgttatagagtacacaacgaaacagggactagtggcaaaagttacatctatggcggtagttgattatatagagtcaatactaggttccgaagatagtggttatagtattacaaaaggtgtcttgtcagctacacatttcggtgtgccgcaaaaacgaatgcgctttgtaattatgggtgtaaagaaagaaattgctgaaaatattacattacccgtgggggattttactgaggatagttttagaacagttgaagatgctatcaaagatatagaaaatctcaaagtcgcaactacagttagcgaaggcagtattggtattcctatttctaagcagccagattctattagcgaattaggtcaacagcttcgcaattcgaaggtgctttataaccatattgctactgatactacgtctcacgcattagaacggtttaaagtcattcagcaaggttgcaatttccatgatttaccctctgagcttaagacgacatactcagatagctctcgcacacaaaatacaatttatctaaggttgaaatataatgaaccttcaggaacagtcgtaaatgtaagaaagtctatgtggatacatccgactcttgatcgtgcattgagtatacgcgaagctgctcgattacaaacttttcctgatagttttatattttgtggtgtaaaggattctcaatatcaacaaattggtaatgccgttccacctatgttagcaaaagctcttgctagacatttatgcgactatttagataagtaa

SEQ ID NO: 393140 - DNA, 729 bp, Salmonella enterica
atggactcaaaaatgagcgaacaagttaagttaaaatcgaaatatagtatagtagatttgttcgctggtgccggtgggctcagctacggcttccttcaaacggatagaatttcgatcaaagctgcttttgaattgaatcctaatgctcggcagacatatcaacgaaatcacggcgagcatgtggctatgtatagcgacgtggaaaatgcactctctgagtcaatcagagcagaacttggacagattgatgttgttattggtggaccaccttgccaaggattctcaagtgctaaccgccaaaaaaatcatgcgatcagtcaaaataactcacttgtcaaaaagtttgtccaggccgttcttaatttaactcctaaagcatttgtaatggagaatgttagtttacttcaatccaaagttcaccgtttttatgtagatgagaatgatcaacatataattaaaaagtacaatatatcaactgaagatacggaaatccaacttcttgacaagcaattcctgtttgaagactctattaatatagttaatgacccaattaaaataaaaaaatatttatgggctgagaaagactatttttctctgaatgttgtttacaaagctcgcaagaatgaacataagctaaaagccacactagagaaacataaaaaaaacttactatctcttgcggaaaaattaatcatcaaggacgatataaatgatcatatcactctttaa

SEQ ID NO: 393141 - DNA, 327 bp, Salmonella enterica
atgacttttaaaatgagcagcaaagcgcagactattaaaattttcaatctgcgttcagagacaaacgaatttattggggcaggtgatgcgtatattccgccgcatacagagttaccctcccaaagtactgatagtgaaccaccggaaattccttccgggcagattgcagcttttgagtttgaaaaagctgtatggagtctcaccgaaaaccaccggagccagacggtatacagaacggataccagagaggcattttatatccaggaactgggtccgttgcccgaaaatgccatattagtttcaccagatggtgaataccagaaatag

SEQ ID NO: 393142 - DNA, 771 bp, Salmonella enterica
atgtactcgattgattataatagctatcgctcggtaaaaggtttcaatcgtcgtgttcgcttccttgttatgcactatactgctcttgattttaaggcgtcaattaccgctttgaccgggccttcggtaagcgctcactatctcattcctgatcctttagaaaaaacgtatattgatgcaggttttaaggatatgcgtatattcaacctggttgatgaaaatgagcgagcctggcatgctggagtaagttcatgggccggacgcagcaacctgaatgatactgccattgggattgagacggttaacctggccagtgataacaacggcgtgtttgtctttcctccctataacccggtccagattgatgcaatcaaggagctggccgccaatattctgcaacgatatcctgatattacgcctgtgaatgttgtcggacacagcgatattgccccgggaagaaaaagtgatcctggagcggctttcccgtggaaagaactttacgacgctggtatcggtgcatggtatgaggaatcgatcatgcaacactatctgacgcagttcagcaagtctttaccatctaaagcagatattgttgctaagttaaaagcgtacggatacgacatctcagatgctggaacagaaatcggatacaagaatttgatccgtacatttcagcttcacttccgacaaaagaattatgatggtgtcgctgatgctgaaacaacggcaattctttatgcgttagtggataaatattttccggaaaaataa

SEQ ID NO: 393143 - DNA, 726 bp, Salmonella enterica
gtgcctattaatagacccagtctaacattagatctctcacttttgaatgtgggtccaacgtctcataatcctcagatgatatctacgaatgagcacctcaagaataatttcaacaccctgtacaaccaaatgcgacagatgccaatactccagttcaaagaagctgtggatgtaccggattactcagagatgcgtcagtgcggattctttgctatgaggcaaggttttcaactggcgaaccgtgatgaagacgtttttattcatgcacgtcgagaaaatgctcattgcaaaggcaacttttccggagacaagttccatatcagtgtactgaaggagcagatgccgcaagcatttaatgcactgtcaggattactgttttcagagaacagtccagtagataaatggaaggtaatcgatacggagctcgtggatcaccaattccgtctgggtataggagctcagttcacgttatatataaaaccggatcaggaaaattcgcaatacagtgtattcttacttcacaaaacacgacaatttatagagtatctggaatccaggctagctgaaaaggggattattcctggacaatatcctgcgtcagacgttcatcctgaaaattggaaatacctcagttatcgtaatgaactacggagcgggcgtgatggcgacgaaatgcagttacaggctttacgagaggaaccgttttatcgtttgatgacactgtga

SEQ ID NO: 393144 - DNA, 615 bp, Salmonella enterica
atggcggtgagggggggattgactcgctgcgctcgccctgcgggcagcctcctcgcaggctcgtcgtctgtccaactggctgcgccgctactcagcccatccctgggcctcgccccttcggggccagagcaagctctgttcaaaaacgctcccggcgtttttgtgtcgaaccccggtcgggtgctctcatccccccggtcaggtggcttaatgcgaaaaaaaagcccgtactttcgtacgagctctttcttgaagatggcggtgagggggggattgactcgctgcgctcgccctgcgggcagcctcctcgcaggctcgtcgtctgtccaactggctgcgccagttgtcgaaccccggtcgggtgttctcatcccccctgtagggtggctttatgtgaaaaaaaagcccgtactttcgtacgagctctttcttgaagatggcggtgagggggggattgactcgctgcgctcgccctgcgggcagcctcctcgcaggctcgtcgtctgtccaactggctgcgccagttgtcgaaccccggtcgggtgttctcatcccccctgtagggtggctttatgtgaaaaaaaagcccgtactttcgtacgagctctttcttga

SEQ ID NO: 393145 - DNA, 264 bp, Salmonella enterica
atgactattcgaacattatcaacctcggcaaagttagggtgtgatttgctctcaagccatcgaatgcttactcttattgaggataattcatttcacattccattaagtgaaaacaaaattagggaagagttatatcttacccatcaaccttgggcagcaagagaacccgatcatgtttttagtcgagctctggatgcactaaaaatacactataaacctacggattgttcgctactacaatcagccatgcgtatacggcattaa

SEQ ID NO: 393146 - DNA, 2634 bp, Salmonella enterica
atgagtactcaagacaacgagatagtaattaacattgatgaatgtaatagctatatgaaaatggggccaaacgaattaattcatcaaaatgtttataaaaatcttatcctagatattaaaaattccatattacaaaccaaaaataaagtcccactcagtgattttcaactaacctcaaccgataatattgattatgctcctggtagcggattggtttatttcattgatggatcacgaggtgcaggtaaaacaacatttttacgtagtgtttatgaacatatatcaaatgatctcattaaaccagataaaaacaataacatcgtaaatatatccaagcttgattatattgatccaacccgtttggaagtttgcgaaaatatattattaaacgtgttgagagcccttaagggtatcgtcgaaaatcgtcatatttcattaaataatgaatcactaaaaactagtttccgtcaagcctttaaaaaactttccggtggccttagcttattccgtaatgggcatgatcagttagcacatattgatccagagctattttttgatagaggtctaactcgagcagaggatagtcgttctttaagaaagaatttacaccaggccatcgacattgcctgccatttattgaatacagatacattgatgcttgcatttgatgatgcagatactaacgcacaacacgctttcccattattagaatgtataagaaactatttagatagtcctcgcctcctcatactggttaccggagacatggagttatattctctattgattagggataatttttctcgacgactgccttcaactgaaaagaaaaataatgatttcagaatagagcaatgcttaagaatgcttgatcatttagaagatcagtatgttttaaagttatttccattatcacgacgccaacatttaaaaacacttaatcgactctttgacaaagagtctaccgcacatacatcatcaaattataaaatcatttcatccaaatggaataataaaaaacgagaccctatcaacgtcatagatgaaattataagccgtggattacgtatatcctctcaatctgatattgaattattcagaacacatttattaaaacaaccacttcgttcagtattacaagtattacaggggtgcgcaccttatctatcacaatctgatgataatataagtatggaatggaatagtgagctctctgatgccttaagagaatctttaagagcgatggctcaaggtagtttatacaaacacggggtggtcgttgatgaactaacagctaattatcttcccacactatcaaaggcggttttcgacttgtgttaccaagacggagatgttgatactgcagcctatttaagaccacaagctagtaacgatgacctcaacaattgttatttggctttggctgcggaagttgcagggcaatgtgcagggtctgcatctgcgtcattaaagtatatgttatcaggaccaggcaatgttacgttatggggtaaagaaaaacgtcgtatggcaaataatattaaccccgacttgctttatagacagtttagtcagtatatggctataggtagaaacgaagatgcactgaactgggccagacgtgcgaccgcagtactagcagcaaggcatccgtcccaagtaaaagcccctgtaatagattttggtatcattggactgaataagagagcgcctgatgaggcaagagggaaaagtgaaggcttcaagacgatagatagtatattgaattccatttacggtactgatagcaaaggttacccgactcttgcatatagtcttttagacgtatctagtcagagtagtcgttgctattcttctatatacaatgtgctaggattggttgaacgtctttttgagtctcgttccaaagaagaaatattacgccgtctaaaaagcacctatccacaacttagtatcagcagtccagattggggggggagcattgacacaatgccttcagaagaaagcctacaaagcgatagtgacgatacggaaagacatataataacttcagatgcagagagcttgttaattaatgccgtatacgcatggcaggagttaaacagaaattcatttaaatcattttcaccctcctctgttttgctcggtaaaatctggataaggatttattttagccttgaaaaatcctcggatcaaattcgcccaggttcattgggaaagggaaaaaacattgatgacattatggaaattaatgctgcttgtttaatcaatgcctttcttgttgaagaagctgatcacaacttacaaaattacgatgtatcaccggatcgtacaaacccactaacttctgcccttgatatcttaaaaaagaaaaaagaattcctaaaaagcaataaagatagccttcctctcacgactctaatagcaagctgccctattgtgctcggtcttttaaaagaggaatcaagaacaataattaaagaggctttatccctagatgagacaatagtcaatattcaaaatgctgaactacctgttaaagcatttattgctggtcgctggcgtaaaacagaaacagaaactaaatctagaaaaggagcgaaatccactaccaataccgaggaagataaatga

SEQ ID NO: 393147 - DNA, 633 bp, Salmonella enterica; identical to SEQ ID NO: 83041

SEQ ID NO: 393148 - DNA, 1827 bp, Salmonella enterica
atgcaactttacctgtgcgaaaaaccctctcaggcgcgcgatatcgcccgcgttcttgacgcccataaccgcagcgacggctacctgcataacgccaccgtgaccatcacctggtgcttcggccatctactgagcatggccgcaccggaagattacgatccggcgctgaaacactggcgggcagagcatctgccgtttattcccccggcatggcggctggtgatccgcccggaggtacgcaagcagttccgtatcatcgaaaagctgctgaaacaggcagatgcagtggtgattgccaccgacgccgaccgcgaaggcgaaaccatcgcccgcgaaattctggaacaatgccactggcgcggtccggttcaacggctgtggctgtcggcgctggatgaggccagtatccacaaggcgcttgctgcgatgcgacccggtgacagtacgtatccgctgtaccaggctggactggcgcgcgcccgcgccgactggctggtcggcatcaacatgacccgcgcctgcacgctgatgaaccggcggcacaaaggcgtgctctccgtgggtcgagtgcagacgccgaccctgcgtctggtggtggaacgcgaccgggagatcgcgcgcttcacgccccgcccctggtggcgggtggatgcccgcttgcatgctgagggcacttcctttctggcacagtggcagccggatagtgcgtactgcgacgacgaaggccgctgtatccgcgaatccgccgcccgtgaggccacagcacgcctacaacaggccgaaaccgcgctggtgatggatgtcaccacccgacgggagaaaacgccgccaccgcaggccttcaccctcagcgccctgcagcaggtctgctcaaaacagtggggcatgggtgcacaggaggtactggatatcgcccagcgcctgtatgaaacccataaggccaccacctatccgcgcaccgactgcggctatctgccgctttccatgcacgctgaagcgccgcaggtgctggccgcgctggttgccagcgacgcctctctccaccccctcgccacgcagctaaatttacagcaacgctcccggctgtgggacgacagcaaaatcaccgcccaccacggcatcatcccgacccgtaaaacggtagatctgacgcagctaaacgacagtgagcgcaaggtctacggtctggtgcgcagccattttctggcgcagtttctgccagaccatgaggtggataaaacggagctgcgcctgaattgcgccggggaaacgctggcggcccgtggctcagtagtcattgtcagcggctggcggcagctgtttttgcgcgagatggcaacacactcaccggaagaaacgcaggcacttcccgccctgcaacagggacaaacctgccaggtggaacaggtggacgttcgcgcccgccagacccaaccgccggagcactataccgaagggacgctgattgccgcgatgaaaaacaccgcccgttttgtcagcgatgagcgcctgaaacagcggctgaaagagaacgccggtattggcaccgaagccacccgcgcggggattatccagacgctgcttaagcgcggctatctgattaagcagcgtcgtttcctgctggcaacggatatcgccagcgtgctgattgacgccctgccggaaacgctgaaagatccaggcaccactgcgctatgggagcagatgctggatgacatcgcgacggggaaaatggggctggaggcgttcctggtgcagcagcaagaggccgtcacagcgctcacggctcaaatagtcagaagccagaaaagcgccccatcaggttag

SEQ ID NO: 393149 - DNA, 342 bp, Salmonella enterica
atgaagcgtacacagcagaatttattaccttctgatttaagccgccagctatctgacctgggctatgttctggcgcaaagtcgtattgcgcgaaaaattccacagtcagaagtcgcggtgcgcgccaatatcagtcgtaacaccgttagtcggatagagaatggtgatgcaggtgtcgctatcggtcagattctgcgttatctcagtgttgttcggcctggcgcaacacttgccgatgtcatggtgaaggaggatcttgttgtgctggctgggcaacgtacccgccgtccacagcgtgcccggcctttaagcgataaggcgctagaagaatatgatttttga

SEQ ID NO: 393150 - DNA, 1470 bp, Salmonella enterica; identical to SEQ ID NO: 83043

SEQ ID NO: 393151 - DNA, 525 bp, Salmonella enterica
  misc_feature (503)..(512): n is a, c, g, or t
atgacaacaactaatatggaacagctagaagggatcatttccaccagcatcaatagaggtttcccggaagagccgccaactgaatctgagttcgaagaaaaagctttagaattgaggcagtctcttcagaatgtatttaatgtaagtgatcttgaatttgaagcgataaaacgtaggctgaaggcaaaaattgttatacaaatggatgttggtgtagcgattttggataacaaaaagcctcatcagtcatggcttccagcaagacgcgctgagttagatttctttttctggcaaagatataaaagatacctagaagaagttaaaggctggaatccacgtgtaacaggcaatctggaacgtgtatcggatgaaattgttgacttgcttggtaatcccaaaagcgaaatgccctttcagcgcagagggttggtactaggtgatgtacaatcaggaaaaacagcaaactatactgcaatatgtaacaaagccgctgatactggatnnnnnnnnnncaagagcgtttag

SEQ ID NO: 393152 - DNA, 861 bp, Salmonella enterica
gtgcaaaaaacactgctggcaaaagcaatcctccgcacgctggcggagaaatttcagcaggaagcgaacgtgactttcccgccggaactggtggcgatggtggatagtctggaagcggagcttcagcgcggggaactcagcgccacaaaccggacgtggctggcgcagtgcggcctgacgccggagcagatacaaaaccagatggggccggaatacacgccgcagagaacaatccacctgtaccactgcgaccaccggggcctgccgctggcgctgataaaccgggaaggaaaaacagactggtcagcggaatatgatgcgtggggtaatgtactcagtgaaaataaccctcacaacatgaaacagctcatccgtctgctgggacagcagtatgatgaggagacagagctgtactataaccgccatcgttactacgatccgttacagggaaggtatatcactcaggacccgatagggctgcggggaggatggaatttttatgtatatacgtccaatccaatatttttatgtatatatgtatatacgtccaatccaataatagaaattgaccctcttggattagcggagtggaattcattaggttcctatattaaccaacctgggtataaatcaaaagttacaaatgcagccccggagggaaccgataccacaaaaccagtttcgttaaggcctgacggttacccatgggatagggttgcagagatgaaagtacagataaatttgttccagatagactgtatggtgttagttttatgcaagcttgtagaaatcatgatatctgctatggaacatcgggaagcagtaagcagtcatgtgatactcatcctggagacgacatag

SEQ ID NO: 393153 - DNA, 840 bp, Salmonella enterica
gtgctggcatgtaacaaggtatggaaggatacactgagctcagatgatatgctttataaatgctatactgctgcaggtatttatcagttagcagtcgaaaaaaaaggtggccccgctttcgaagcagctcaacgagaggcagcaaaaaaaatagggatcgatataaaatatgtatataaaaaaatagcgttagcttccctaaaaatagtaatcctaattgttacattgttacattgttacattgttacattgttacattgttacattgtttcctgcgatgcttatgaatctgaaaaaaatctatccctgacatctgtggcaagttcaccactggcaattagtgagttaaaggagaggtggtctttttgtgaaagatgcttgaaaaataatatgtgtaaacaaaaagagttccaccaatgttcatcagtgacaatcaaagaaagaaatgaagcgctaagtttagctgtaggaagcgcaaatattgaagcagtacactttttagtcgaagtgactcaagcagatgtaaattctattactggcagatataatgaaacacctttaataatcgcggcatattatggaacagcgaaacacagggagatagctaactatttgctatctcatggcgctgatattgatgcaatagcaaaatcaccaatagatactgcattaattactgccatttggaaaaataatattaaatttgcaaaactattacttgaaaaaggagctaattctttactttctggtgttggattgaaagaaggatatgcctgtaaatatgctattcaaaaaaacaagcggaaattgtgccatttataccaaattattgttctttaa

SEQ ID NO: 393154 - DNA, 921 bp, Salmonella enterica
gtgatcacatcaactgttcaaaactcgatagtgaaaactatcgacatgagtatgctcccgccgcctgattttgtggaaacaccggtattttccgacgtgaaaaccgagttaatcgctgaattacaggcactcaatccggcatttaacgcactgcttgagtcagacccggccatgaagttgctggaaatcgttgcgtatcaaaaaataatcatcacggcgcgcgtgaaccaggggcaactggcggtcctgctggcgttcgcaaaaaataacgacctgacgcagctcggcgcgaacctcgattgtgaacgcctgctgattacccccgctgatcccgacgcgatcccgccagttgaggcggtttacgagagcgacgacgaataccggcaccgtatacagttgtcctggtacgcgcgcaatactgccggcagcacgaacgcctataactatttcgcgttgtcgagtgattcagacgtgttatcggcgcaggcgtacggaccgccagtgacgcagccgggttacgttgacgtgtacgtattatccagaaccggagacggcacgccgccgcagtcgctgctggataccgtaaacgcggcgttgtcgccggacgatacccgaccgctaacggattttgtcacggtaaaacctgcctcaaacctgaattacaccgttgaggccgtgatagtggctggtctgggtccggatcagaacgtgttactcgatggcgcgcaggcggaccttgaaacctacgtcgccagccagcacaaaatcggcgctacggcggcgctatccggtatttacgacgcaatccaccgtgacggcaccgagcgcgtgattctggtatcacccacggaggatattattgccggcgtcgggcaggcgccgtactgcaccgatattaaattatccgtccagatggggtga

SEQ ID NO: 393155 - DNA, 342 bp, Salmonella enterica
atgcagggaatgaaccgcagcacaggtaaaccgctggcggggaccgatcacattcgccagtcaatcgtcgatattctgactactccactcggaacccgcgttatgctcccggaatacgggagcaacctgtttaacctcgtcgataatcccaccgatcccggcctggccatgaaaatcatcatggccagcgccggcgcactcgcgaaatgggagccgcgaatacgtgtagacagcgtaaacgtcacggcgatcgacgtgggaaaaatcacaatctcaattattgccaccgacgtcgaggcgcgccggcggctggaactgcaaaacatggagctgattttttag

SEQ ID NO: 393156 - DNA, 912 bp, Salmonella enterica
ttggaccaatcccgcgatccggagagtgaatataccctggcggactcatttcgccggttacacgatctcgtcaggcgcgggctggtggctgaggtgcagatgagcccgccgcgctgccgggtgtcgttcggtggcgagcacaaatccggctggctccagtggttcaccctggcaacctccgagcgagtagactggagcgctccgaaaatcggcgacccggtcaccgtaatttccgagggtggtgatctgcgaaacggggtcgttctgccggggctactcgttgacgaccggggtgcgccgtcggataaacctaacgagcacgttaccgcgtattgtgacggtgccacgctgacctacgacaccgccagtcacgtcttcacctggcagggcgtacctgacggtgttgtgcgcatcctcggtgagtcaaaaatagaaatactggggcgcgcagacgtcacgataaccagtgaaaacgtggtgaatattcacggcggaaaactgatcaacgcggacgccgaggtgataaacgttaccgccaccgacacgatcaacgctcacgcgacgacaatcaacgccactgcgaccgactcagtaaacgtaattgcggccaacgccgtcgattttacgtcaaccacgtttacggccacggcccccggcgggattacgttaaacggaccaaccaggattactcagacgctcgtcacggtcgggaacgccacgttcctctccgatctgagcgtgaccggcgaggagggcggttcgggcaatatcagaacaaacggcagcgtgtttgctggtcaggaggttcaggaccgccagggaacgatgagcgctatccgcgtcacgtacaacggccacaaacacaattgtccggacggtggcactgatatcccctcaattttaatggtgtaa

SEQ ID NO: 393157 - DNA, 570 bp, Salmonella enterica
atgaggggggtgagctggattagtgaatatcagaatttagtggtggcgcagctcgctcaaatgacctgggcggaaacaatcggcgtttatccggacctccctggcggctttccgacgccagcaatatttattgacgtcgcgcgctgggaaaaatcagacatgtcgatcggcggcggcataaccctggatttgacctgtaatatttatttattgcgccattttaccgctggcgagggggaggacgaaacggagcagggcggcgcagaaatgcgcgtccggaacgccgccggtattatttccgagtggattgatggtcgccagtttggcggcgttaccggtcctgccgtgtttgagtcggcggacccaatgcagtggcaggcgggcgatgtgtcgcctgagtacgcgatctggtgcgtcacgtatacgcagccgctggtcgtggggatagacccgtttgatccgcccgctgacgcggcaccgctcaaacaaatttttgttggtttcgcgcccgatgttggcgccgcgcacgaggaggattattttggaccaatcccgcgatccggagagtga

SEQ ID NO: 393158 - DNA, 621 bp, Salmonella enterica
atgagcggttttcaaatcaatttttcagaactggataacctgcgtcaggccgctggtgcaacaaaatcgcagatgatcggcgcatttaatcgggcgcttaaacggaccgccgcaaaattacagcgcgaatccgttgcgatgatgatcgccgaaactggcgcgaaggggaaacccaaaaaacgcgttaaaacgtttgtggaaaacgcaggaaaagaggatagcgatccggggtcgggtaaaatctggtttggtcttaatgacgtgcaggttagcggcctgaagggccgtatgaaatcccctaaaggcattgctatcgccgatcgtaagcgagacgcgcacgggcggtttgaaaaagagagcggctcccgtggcgccacgttcaccccagcgaataaaaatttacaccccacaactttcttaaactcttttgtcggaacggttcgcggcaggaaatcaatctggatcagggggagcagcggcaggcatgtaaacgaggctaaattgcccgtctacaaaccaatgctggctggggtgcaggttatttctactgaggctggagaattattgatgaagtattacgagcaggatttgcgcgcgcgcgtggctggtggtgtcaaatga

SEQ ID NO: 393159 - DNA, 357 bp, Salmonella enterica
atggcggccccgtcctgggaggatctcggcgtattttttgatactgacgatcagggcggttttgcaaccgtcgcggagctcgcgctctgtgacggttcaaagcgcaatattactgttatttatgatgatccctttctacgtaccgaaattcctgacggtggtggcattcgtggcgctgaacgctcatttctggcgaaagacactgatctggtaaatctcattaaaaattgcattgtcaccgtgtccggattaacgctctatgtgcgtgatctggatgcagacggcacagggctaacaaccgtttatctttccagatacaaaaaatccgcaaatgaccgtccagggagtctgttatga

SEQ ID NO: 393160 - DNA, 168 bp, Salmonella enterica
atggcaaaacaaattacggcgaccgtggtggaaccgttcatggtcgctggtgaattggctaacgtgggggattcggtcgtactgaatgcgactgatgcggaaaatttaaaatatcgcgggaaaattgcgtttcccggcgatgaaagcgacgacgaagaggctgcataa

SEQ ID NO: 393161 - DNA, 2094 bp, Salmonella enterica
atgaacaaaaaaaagaggacgacaaaaccactgaatagcgtagtaacgccccgtcaattcccgccaattatcaaccgatattttacccgtagcgcagaacgagcgatgcccgattttaaccgggacgggatgctcacgcgcatggcggaagttgcagccattgatgtggaagcgagaactgtagagctcgcgttttcgtcggagattgaggtggcccggtggtacggggtggagattctcgaccactctccagcaagcgttcggcttgagcggctgaatgatggcggggcgctgcttacggaccactcctggagtgatcagataggtgtggttgagtgggcgcgcgttgacccggaccggcgagggcgggcgctggtccgttttagtcgcaaccctgccgcagatgaaatttttcaggacgtaatagacaagatccgccgccacgtttcagtcggttaccgcgttttgggcgcgaaactggaggaaacgcgcggggatttggatatttaccgcgttaccgattgggagccgtacgaaatttctttcgttagcgtacccgcagacaacagcgtgggtgttggtcgttcggctgacccgctgccagttaattcaaataagccggaaatcggcgagagacaacaaggggttattaaagtggaaaagattttacgtgatacagccggtaacctggtgcgcgcgctggtggatgaaagcggcaacattaccgaggttctcgaggtgctggaaaaagcgggagatgatactcgcggagctgagaagcgcggcgaacagcgcgaaaaaaatcgcgtgcgcattatcagtgaaatgggggatacgtataacgcacgcgatctggcgctaacagcgattagagacggcattactgccgaggcgtttcagcgcagcttgctcgatcacctcaatacacccctggaagaacgcgcgcaggcaaatccggctgcgcaacctgccggtaattctcgttccggcaatcgcccgctggatgaaatgccgtcgccgatcattggtatgacagacgccgaaatccgccgatattcaatttttaacgttgtgcgcgcgctggctaatcccggcgatcgtaaattgcaggaggcggcggcgttcgaatacgagtgcagccgggcagcgcaggatcagtacgaacgcgaggctcagggtattttgattcctgacgatgttttgtgccgtttcctccaggggcgcgcttttaacgcgggcggcggagttaacaccccaacgggggcaactaccggaacaaacctcgttgcgacagattttctggccggctcgtttattgatttactccgcccacgcactacgattatgcggctagcgaattcgatgggcgggctggtcggtaatgtagatattcctaaacaaacagggggtgcgacagcgtactgggttggtgaggggtcatcggcgaaagaggccactcctaccattgggcaggtcgctatgtctccgaaaaccgtgggtgcatacaccgacattacgcggcgtttgttgaaacagtctactcccgacgcagaaatgattgtccgtaacgatctggttgcggctattgctcaggctattgatttgggcggctactacggaacaggagcggatcatcaacctctgggactggtgaattataccggtgtaaatggcgtggccttcgctgcaacgaatccgacccatgccgaaatcgtgcagatggagacagaaatcgcgtccgacaatgccgacatcaacagcatggcttacgtgtgtaacgctaaactacgcggctacgctaaaaccacccctaaattctccagcggttcgtctgtagctgccgccggtacaatttgggaaccaggtaacacaatgaatggctatagcgccgaggtgactaatcagatcgctactggtgacgtgattttcggtaattttgctgatctgattgtggggctgtgggggggattggatctgactgttgacccgtacacgatgagcacgtccggcgggctgcgcattgttgcgttccaggacgttgattttgttttgcgtcgaaccgaatcgttctgtgttggccgcaaagccgcgtga

SEQ ID NO: 393162 - DNA, 1605 bp, Salmonella enterica
gtgagtctttggaaaaacccatttaaacgcagcgcagcgttaacccccggcccagtaacggcagaagttacgccgcccgccaggcggcatcggagggggaattcggcgaggcagttattcgccgctgcaaagaccgatcgtttcaccacggcctggccgactcagcccatgagcgctgatgaaattatcgagaaatatcagcgtgttctggtggcacgctcacgcgaacaggcgacaaataacaactacgcaaaaaaattccttcggttgtgtgtgaataatatcgtggggccgcgtggcgtgatgttgcaggccaaatcgagggatggccggggaaaactggataccgccgcaaatactgctattgaactggcgtttgctgcatgggggcatcgtgatcactgcgatataaccggtcgcaaaacatggcgagctattcaggccgcctgcattaacagcgtggcaaaagacggcgaattttttgcgcggatcatttacggccccgacgcaggaaaatggggtatatcactccagatgattgatccgcaacgatgccctgtcgatttgaaacaagatcgattatcacatggtggttttattcggcagggtattgaatttaatcgttacgggcgtccgttagcgtattttttcagtacgcttgacgccagcgaaaccagctatcgctggggtgggcgcgattacgttcgggtgccggccagcgagattttgcacggctttttagaggaaatgacaggacaaaaacgcggcgtaccctggatgggggttagtttacgtgagatgaggcacctaaacgaaatggaggtagccgcattaattaactcccgcgccggtgccagtaaaatgggatttattgagtgggatgaggataccggcccggacgcagacgatcccgaggagttttatgttgatgctaatcccggcgaattccaaattttaccaacgggcgcgcacctaaaggagtggaatcctcaatacccaaacggtgagtttgccggattcgcaaaacactcgttgcgcggcatggcgtctggtacaggcgtcacctacaacacactggccaatgatcttgagggcgtgaattttagctcaatccgccagggcacgcttgatgagcgcgagaactggaaggagttgcaggagtggtttattgaatgcctgcaccgccctgtgtacgaggcatggctcccacgcgcactcctgttggccagcatcaaagtaaaaaacactccgttacgtcccgaacggctcgaacgttattcgatcgtcgagtggcaggcgcggcgctgggcgtggattgacccctccgctgacgctacagccgctgagaaagcaaaaaacaacatgttacaagctcccgggcaaattattcgcgagagcggacgcgatccggatacggtctggagggagtctgccagcgacgtgcgccgcatgattgattcatacattgagcaagggataacgctggaaacagccgaaaaacttgtgctgcaaagcatggggcttaaagacgcgccgccggcaggcggctttaactcaggtaacaacaatgaacaaaaaaaagaggacgacaaaaccactgaatag

SEQ ID NO: 393163 - DNA, 540 bp, Salmonella enterica
atgatcattcgtcaattaccgctgcaaataacggcgggtttaacgctggatttacggctgagttttcgggcgtattccgctgccagttggtctggttcgctgttattacgtggtccggcatcaattgatctggcggcaagcgctgatggcgccgtgtttgcattccacgctgacgcagcaactacagctgcgtgggcgccgggggattactggtgctcggtacgcgtgaccagtggcgacgaggtgaaagaggcgcagaacggtaaaattaggattttgcctgatatagctaacctaccggcgggatacgacggcagcacatacgccgaacgggtactggcggcgattgaggcggtgatcgagcgccgcgcctcgctcgatcaggaaagttacaaaatcaacaaccgcgaattaagccgcacgccgataagcgatctcctgacgctccgcgaccagttcaggcgggaggttggtaaggagcgcgccgcgaaggcgggcagaaatccatttaaccgacgcgtgaaggtggtcctcaagtga

SEQ ID NO: 393164 - DNA, 2043 bp, Salmonella enterica
atgatgatgagggggattcagtttgacagcgttgacagcatcgcccgcgccattaagtcgaaacaaaagcatttaagcccgccgccctcccttctcccgtccgagtgggctgaggcaaatatcaagatccccgccgggaacgccgtgccggggcgcttgcgactcgataacgcgccatatcagcgcgaacccatgaacatggccgtaaaccctgattgctaccgcataacgttaatgtggggggctcaggtaggtaaaacacagcttgcgttatgtattcagggctaccacattgcggcagaacctgctaaccaaatgatgatgcagcccagccaggacgatttacgcacctggctggaaaccaaatttaaccccatggccgaagaatgcggcgccatatccggcgttatggcaaagccgcgcggacgtgatggggtgaataaccagaaaatgaagtcgtatcccggcggtttcatgatgtttgcctggtctggctcgccaaagaccatgcgcgggcgatcggcgccaaaaatcgtgtgcgatgaggtggatgggtatctccggtctgtggagggccatcctgtcggtctgctctggcagcgctcggcgacattcggcgaccaacgtttactggtggaaatcagcacaccaacaatcaagggcgcctcttatattgagaatgcctatgaaatgggcgaccagcgacatttttatgttccgtgtccgcactgtggcgatcacgtaacgattgagtggataaacgtccgatgggatggtcagcgcgaaacgcacgccgacacgctcgcagcaattgatgaacaacggcccctcacagcccatctatattgcccgtcatgcggtagtcaatggagcgagggagagcgaatcgcagccattcgcggtgctgaggcggcgggggctggctggaaatcaagccgaccatttgacggacatgcaagttatcacctgaacgagttatatagcgttttccgtacgattccggcaattgtccgcgattacctggacaaactgaaaaccgacgaccttcagacgttcacgaacgttagccttgcgcaaacgtgggaggaagagggagagaaagtcgatcctgacagcctgatggcccgccgcgaagaatacgccgccgccgcgccgatgggtgtgctgtatgtaaccgccggtatcgatatgcagatcgaccgactggaggttgaggtggttggctggggtgtcggtgaggaatcgtggtccctcggttatttcgttttatggggtgacccgctaacgcaggatccgtgggatgcgctggatgacctgctcctggatacgtggcaacacgaaagcggcgcggcgttacctattagcgccgcgtgccttgatactggtggtacgaaaggctatacccaggccgcgtatgattacgccgaaggccgaaccggtcgccgcctgtttgctattaaaggtgttggcggttgggggcgagctgttattgaaaaaccgcagcggaagaaatcagggaaaaaagccagaaaagtggatctttggctggtcggtactgatgaggcaaaattgatattatcgcgccgcctcagcaaatccacacccggtcctggttattgtcactttccagaagatcgggacgaagagtggtttcagcagctcaccgcagaaaaactaactattcactatgtaaagggccatccggtccgggaatggcgcaaaccagatcacgcccgaaacgaggcgatggattgtcgaaactacgcctacgccgctctaaaaatcatgaagccctcatttaagcgactggcgcaaaagctgggcgttaaaagcgatcaagaaattaaggagaggagggtacgtatgccggcagcaaaaatcaccccagcccctacagatgaccctgatcttcagtcggcggctcagtctgctgaggaagcacaaagaaaaccccgtcaattctcagccgttgataaaccaggtccgaaagtcacctacatgactaccaaaaaaccaggcattattcggcgcaaaaacaggtaa

SEQ ID NO: 393165 - DNA, 534 bp, Salmonella enterica
gtggctgaaaagattaaggggcgtgaggttaatcgctcagggctcgccgatgttttcggcgtatctctccctaccgtcgataactggcgccgcgccggttgccctgtcctggcgaacggtggctccggcaaatcctacagttttgacacggcagtggttgccgactggctgagagagagggcggtgcgttcggcgacgggtgaggccgcacagactgaggatgatttaaaactcagaaaactggaggccgaaacggtgatggcagaacttgaactggcaaaggcccggggagaggtggcgccagtagatcaaatggagcgcatgattgcacatgcgttttcggaagttcgcgcggggatgaggaacattccggggcgcgttgtgtcgttactgattggcgagagcgaccagcgacggtttaaacgggttttactggaagagatagatcaggtgcttaccgcgctggctaatgccgatttgctcgacgggtattcagagggcggcaataatgatgatgagggggattcagtttga

SEQ ID NO: 393166 - DNA, 510 bp, Salmonella enterica
atgcgtcacgctgaccgtaacgctaacggcgtcatcgtcaatatgctgcaggttaaatgtcggccgggtgtgattggtcatgttatcgctctgaacgccgctgtcgtccgcgctgtccagtacgataaccggcgtcgacagcgtggtatcgatagtgaagttgagcgtcttcgttaccgtattacctgctttgtcagtcgcttccacggtcagcgtatagtcaccatccttcacagtgtctggccaggtataatcccagacgcccggtgtcgagctttgtgtcgccttaacccaggacacgccgccgttaatgctcagacgtacctcgttgacatcctcgggcaccgtcacgcggaaatgcggacggtcgtcattggtcgtgtagtcacccttgacaccgctgtcgttaaccagttccaccttatcaatggtgatttgggtatccaccgtgaccgtcagtggcgcggagtgttttacgttccccgcctcatcttccaccttcaccgttag

SEQ ID NO: 393167 - DNA, 741 bp, Salmonella enterica
atgctccacgctgaccgtaacgcgaacggcgtcatcatcaatatgctgcaggttaaatgtcggctgggcgcgattcgtcatgttatcgccctggacaccactgtcgtccacgctatccagtacgataaccggcgtcgacagcgtggtatcgatagtgaagttgagcgtcttcgttaccgtattacctgctttgtcagtcgcttccacggtcagcgtatagtcaccatccttcacagtgtctggccaggtataatcccagacgcccggtgtcgagctttgtgtcgccttaacccaggacacgccgccgttaatgctcagacgtacctcgttgacatcctcgggcaccgtcacacggaaatgcggacggtcgtcattggtcgtgtagtcacccttgacaccgctgtcgttaaccagttccaccttatcaatggtgatatgggtatccaccgtgacagtcagcggcgcggagtattttacgttccccgcatcatcttccaccttcaccgtcagcgtataactgccatccgtccacgtgccggttggtataacgctccagatgccggtcgcgcctttagtcgccgtcagcgtctctttagtgccgccatgctgtacctcaaccgtgacaaaccgggcgtccgcgtcaatattgcccagtataaacgtcggcttattttctttggtcagattatcgtcttttgttccactgtcatctgcgctgtccagtgcgatagtcggctctga

SEQ ID NO: 393168 - DNA, 735 bp, Salmonella enterica
atgcgtgacgcttactgtaacgttaataacatccggatcgatattctgcagaataaaggtcggccgggtgcgattggtcatatcatcgccaggcgtaccggtatcatccacgctgtccagcgcaatggtcggcatcgacaattgggtatcgatggtaaactcaagcgtttgcgtcgccttattgcccgccgcgtcggtgaccatcacggtcagggtatgtttcccatcgcccatctccgtcggccaggcataactccacacgcctttgacaccctgcgtcgcactgacccagtttacgccgccatcaatgctcagttgcacggagttcacatctaccggtactgtgatctcaaactgcggacgggtgtcgttagtcagattgtcatcaggctcgccattgtcattgaccaacttaatattggtaatgctggtttgcgtatccactgtcactaccagaggcgtggactgacgaacatttcctgcgttatccgttacctctaccgtcagcgtatagctaccatccgcccagtcagcatctggcgtaaagcgccacagacctccgacctgggccagtttcacttcctgactttttccttcatacgtaatccgcagaacaaccgaactcgcatcggcgtcaatattgccaatggtaaagcctggcgttttaacgctagtaatatgatcgcccagggcacccgtatcatccccacgatccatcatgatggttggtattga

SEQ ID NO: 393169 - DNA, 1383 bp, Salmonella enterica
atgggctttgattttcagttattagaaaatgctgggattcaattaattgatggtgacagaggcaaaaactatcctaaacataatgattttatggagaatggatattgtctttttttatcagctaaaaatgtaaccaaatctggttttcagtttcaagaaacagcatttatcaatgaaactaaggattgtgagttaaaagcaggtaaactcaagtatggcgacattgttcttactactcgtggcacagtaggtaatgttgcatactatgatagtaacaatccatataaacacattagaatcaactcaggaatgattatcattcgttccgatagtaaattatggaatccaaaattcctatatttcatattaacttcagcctttttacaagaacaaatagtcaaccttatctctggctcagctgtaccgcaactacccgccagagatattaaaaaatttattcttccagttattagtaaaaacatccaggataaaatatctaatgtcatatcagcattaaatgataaaataagtgtaaacattgatacgaaccaaaccctggaacaaatgtcccaaaccattttcaaatcctggtttgtggatttcgatccggtgattgataacgcgctggatgcgggaaactcaatcccggaagcgctgcaatctcgcgccgaactgcgtcaaaaagtacgcaatagtgcagatttcaaaccacttccggcggatattcgtgcactgttccctgctgaatttgaagaaacagagttgggcttgataccgaaaaactggcatattagagatttttcagacattgcagttttaataaaaaataatatcaaatcagatgatatttgcgacgatattcattatattggattagaacatttagaacgtaaacatatttttatcactagctatgggaatggcagcgatgtatccagtaataaatcggctttcaataaaggcgatttgctattcggtaaattgcgaccttattttcacaaagtagcaataactccgttctcaggaatatgctcaactgatattttagttttccgtgcaaaagagaaattttataaatctttaatggcaatgtatgcttttaccgatgagtttgtagcatatgcaaatttacgctctacaggaacaagaatgcccagagcagaggccaaagatctgcttaaatataaaatcatcttacctaataaagatatattagaaaaatttgaattgctattagaaggttattggacaaaaggacaacttaacaataacgaaaatgaacagttaaccgccctccgagacaccctgctccccaaactcatctccggcgagctgtccctggaggatctgccaaacttagtagatcaaaccgaacccgcataa

SEQ ID NO: 393170 - DNA, 456 bp, Salmonella enterica
atgaattttaccaataagacaaagaaaaaatggtctttgctttttctgttcttaatatttttctctttgatgttttcattaataagattcgcgggtgctgatacttacttactaatgaaaaatgcagacagaatttactatgatagcaaaggaattttaggcttatcaggtgtgcctttccttttctttttctatgtttatatttttataaactttataattacagacacaaacattttagcacgaaccaaaaaggacaagaagaaaacttatgacattgcgatgaaatacctcgggccagttatcatcttaagtatattgcttttcctcgccgggttaatattatcattctttgttactaattatgtacatagtcattatacttcctgcgatggcatttcaggaatttactccggaaggtattatgttaaaggtgatgctgtatgtcatgactga

SEQ ID NO: 393171 - DNA, 276 bp, Salmonella enterica
atgataatgctggctgccatgaatggcagtacttctagtacaaatgcgaggcagtcggaatacgaagcgtataaaaatcgttgtaaccaatcccctccacccaaccttgatttttgtagccttgccaaatggaaattgagcaggaataaagattgtcgagacatgcgacaatcttgggataataaatggctaccggggagacatgcaaaaaatattgccgaattggatgtcggcattaataagttggcaaaaacaattgcggataaatgcccttag

SEQ ID NO: 393172 - DNA, 375 bp, Salmonella enterica
atgaaattaagtgctgatgtggtattaaggcgctatcacgaagaggatttgccagagttcagcgggatagatttaatatcagtagaacagataggtaactttgggaacaggcctatccatgttgcgtgtattagaggtgatatagatgagattaatgcacttattggtggaggtgcagatatacacgctttgggtgagcttggaaacacgccgctgcatgaagcagttggacaaaataatttcgaaatagtgaagttaattctttgccttggtggagacttaacagtaaaaaacgattttggcgatacagcattagatattgctataaataataatcgacaagatataatagaattattatctttatataaataa

SEQ ID NO: 393173 - DNA, 207 bp, Salmonella enterica
atgcccgtcaagatccgggtcatgcgcgactgcatcgtgatcacgccgcagcatacccacgaactctttggctgcgttgaagggatgagcgttacccgtattaataaacggaatgtagaacagtggttaaagacatttccgggagcgctgaatgataccggggatattccggtgattaaacgcgggaggattgaggacaggatttag

SEQ ID NO: 393174 - DNA, 1257 bp, Salmonella enterica
gtgcgcacgcagtacggggagacgcaggcggaggggcggtatatctacgacccgacgggccgccgggtgggtaagcgggtatggaagcgcgagccggtccactggagcgaaacgcggacggagctgtcgcgcaggccgtatgagacgtggtacggctgggagggggacaggctggcaaccatccggacacagcagcgccgcgttcagaccgtgtacgcgccggggagcttcacgccgcttctccgggtggaaacagaaaatacggaactggcgaaaacacgccaccgcagcctggcggagaagctggagcaggaagggagcggggacggcgaggcggtgcagttcccggcggcgctgcgggcgatgctggacaggctggaggatgagctgaggcgtgacgcggtcagtgaggaaagccgggcatggcttacgcagtgcgggctgacggcggagcagatgaaaaatcagctggagccgcgccctgagccggagaggaagctgcatctttaccactgcgaccaccgcgggctgccgctggcgctgataagcccggccaacacggtggcgtggcgtgcggagtatgacgagtggggaaacctgctgggtgaggagaaccctgagcacctggagcagctgatacggctgccggggcagcagtatgatgaggaatcggggctgcattacaaccggcaccgttactacagtccgggactgggacggtatatcacgcaggacccgatagggctggcggggggatggaatccttatatttatccattaaacccagtatcatttgttgattttttgggcttacaaagcaatccattagatcaagatgaagagttaaacaaccgagagtatggagggtatcaggagaaccaatgttgctcttttttatctctacacgatagagacataaatgtcaaaatatatgacttaatgccattcccaggggttgcgatgaaaggaccaagaaccgaatggcttgatcgtaaattaccttcggataaatatggtaacattattcctgataaagatataccacatacgcaattaggcatgaggatcggtaggcgtaaaacctatatgcaagcacgtgaatggggatatgatgaacagggtaaattaatacccaaaagactcattgattttacagatcatgggagaaatgatcatactaatcctcatcaacatacttatgaacctaactccacaggtggtacgtggagacatggaaaacaatgtgaggtggagtaa

SEQ ID NO: 393175 - DNA, 369 bp, Salmonella enterica
atgcaaatacttaaaggtgatatgtggtctgatggaaaaaaaataatgttgtcagatttgttgaaaaaaataccttttaatcaatgggactggtatatgtatgaaattgatgcaactggaatcgcccctcatgggtttactatgtcggattttgaagatttcgtatcatcaaaagatgaaggagtaaaattttcatggcacgaaataaaaacattctccgactcattgaatgatatacatcattgttttttggctgcattatcatcacctaaaaactatgatagtttaataaaaggtgactattcatcttgccaggcattaattcagatttttgacagtaccgaatgggaattacgaatatttgattag

SEQ ID NO: 393176 - DNA, 690 bp, Salmonella enterica
atgcatctgggtggaaggataatatatccacgaccagactacgtatacaccggggactgtcgcgggcgcttgaatgctgacggagccatcgcgtggcgcggggagtatgatgaatggggcaacctgctgaatgaggaaaacccggcgcacctggagcagctgatacggctgccgggccagcagtatgatgaggagtcggggttgtactataaccggcaccgttactataatccgggacagggaaggtatatcacgcaggacccggtggggctgaaaggcgggttgaatttttacacatacccattgaatccagtaatggaagttgatccgttaggacaagcaacaataaaaatagatggtaagaagatcaccgtacataataacgacgttgatccctggccaagtaaccctcatggccacatgtatgatacaaatgaagtaattgataaagacggtcgaatttacgataaatcatcaggaaaagagaggtgctcattgccaaaaaaatctttaacaaagtggtcagacttcctgaagaaaatagggaaactatcaatagttggagatgcatttatgcttcatgatttacttgttgaggaagcaacggaagcttgtgcccgtggtgataatggaatgtgtggcgttttggaaatactaaatgggaaaaacgataacccttatgaagcatag

SEQ ID NO: 393177 - DNA, 393 bp, Salmonella enterica
atggaaaatatagtcatcacccctaacattagcatagatgattatcttatacatagcattacatgggataaatcagagaacgctcttatagatacttccaagttggaaactatagatgatatagtatattgtgcaaaattagcattatccatgccggatataaaattctctctagctgtgctggaacaactttcagaaataaaaataatgccaatgaatgtattggaagaaataattttaacaggtgaccccgggtgttgtgagagtatttgcatgcgtacagatctaaattctaatttgagacgtatgtgtagcggtctggagttaactcacaaaaaaactgagataattagtaggtcggcccatagcaatcaggtgaattttccaacataa

SEQ ID NO: 393178 - DNA, 192 bp, Salmonella enterica
atgctaagtctctcaaataaaaacaaattattcttattgttttctaaaaataatatttataaattcgatattataattattcaggacacgctaccgcccctggctcatcagctaccagtgcactgcgtacatatcgacttgttacaaacctcgcccacctgggaacaaagctcgctaaaacttaaacgctaa

SEQ ID NO: 393179 - DNA, 819 bp, Salmonella enterica
atgcacgttttggtgcgagtacgggctgactccggcgcagatacagggtcagatggagccggaatacacaccggagaggacatccacttgtaccaccggggcctgccgctggcgctgataagccaggatggtgacatcagctggtacgcagagtatgacgaatggggtaacgtgctgcgggaagataatccgtcgcagctggaacagctaatccggctgccggggcagcagtatgatgaggaatcggggctgcattacaaccggcaccgttactataatccgggacagggacggtatatcacgcaggacccggtggggctggcggggggatggaatttatataaatatccattgaatccagtatcaggaatagatcctttaggcttaaaaaatatgcgatctgatgggcacccttggaggtatggctgcggggatgagagtacagataggtttgttcctgattctttgggggctgccaatttcttacctgcctgcggaaatcacgatacatgttacggaactctgggaagtgataaggctacttgtgacgcgaatcttggtgctgatatgaaacttgcatgcaaaaatgatttgacaggactacataaattgtatcgtcccgtttgtaacggtatggcaattggatatgagtttgcggtaagtagttttggcgattcagcatttacatccgcacaaaaaggggctttatataattatagagagctggagatgttagatttcttaaagtttgaactgggagaggatattgatcctgattatcatagtaaagcctattatagagttgctaatcccagatga

SEQ ID NO: 393180 - DNA, 267 bp, Salmonella enterica
atgaaaaataacaatcgtcttcacacagccggtcaaagtcgaaatgtgccgaagctgatggtattgctgtgtgggctggaaaaggagctatggcacgcggagcatgatgaatggggcaacgtgctgcgggaagataatccgcacaatctgcaacagctgatacacctgccgggccagcagtatgacgacgaaaatccggactgcactacaatcgccaccggtactacaatccgggacagggacggtatatcacccaggatccgatag

SEQ ID NO: 393181 - DNA, 765 bp, Salmonella enterica
atgaaaaatcagctggagccgcgccctgagccggagaggaagctgcatctttaccactgcgaccaccgcgggctgccgctggcgctgataagcccggacaacacggtggcgtggcgcgcggagtatgacgagtggggcaatcagctcagtgaggataatccggcacagctggagcagctgatacggctgccgggacagcagtacgacgatgaatcagggctgtattacaaccggcaccggtactacagtccgggacagggacggtatatcacgcaggacccgattgggctggcggggggatggaatctttattcatatccactaaatccggtaacaggtatggatcctctaggattaataaatataagtaaaggaatagaaggagcttctggagatacatctgttcatgcgaatccaggtcctgaggccacaagttttcgcccagaccactcaccagaccatattcatctaggtaaaaatgatgggccgcggttgagtaccgataattggaaacctctatcacaagcggatgcagcaaagatgtctaaagaacagaaatctttttgtaagaaactaaccgatgaggctaaaaaaatattatctgaaagacaaaagcagatatttaaatatggtaaattactgggagtgcttggtgattatatgtcggttcgagacgtagcaggtgaaatgtgtcaacgtggagaattagtatcatgtcaaatttatgagaacatggggggagatttgaccccgccagccatataa

SEQ ID NO: 393182 - DNA, 219 bp, Salmonella enterica
atgacgccagcgcaggaaaacgctgtacgcaatcagggtcgtgaatgcgttaaagagatacagcaggcactgaatgccagacctaaaccggcgtggaattccgtcactccgccaatccttcgtaaacaccatgagaaggttaaagcgctgggggtcagtcttgaaaaattcatcagcattattggaagaatgaacggaagatatggagtacaggaatga

SEQ ID NO: 393183 - DNA, 594 bp, Salmonella enterica
atgaaaaaatacactctgatttatgccgatccgccctggtcatacagggacaaagccgctgacggcaaccgcggcgtcgggttcaaatatccggtaatgagcgtgctggatatctgtcgtttgccagtgtgggagatggccgctgaaaattgcctgctggctatgtggtgggtgccaactcagccagcagaggcgctggaggtagtcaaggcatgggggttcaggctgatgacaatgaaggggtttacatggcacaaaacgaataagcgcaaaggcaacagcgcgatcggtatgggtcacatgacccgggcgaacagtgaagactgcctatttgcggtgcgtgggaaacttccgctacgtaaaaatgcctcaatatgccagcacgttacagcgccgcgcctggaaaactcgcgtaagcctgacatcatccgagaaaaactggtgcaactgctaggcgacgtttcacgcattgaattattcgcccgccagtcgtctcacgggttcgacgtgtggggcaatcaatgcgtcgatccggcggtaaagatgatccctggcacagtggaatatattgggaggcgttcgcaatctatatga

SEQ ID NO: 393184 - DNA, 1086 bp, Salmonella enterica
atggccctattccaacgagccaccaacacccaggcatttttaaaggcggggattatggggtttgccggcgatggcaagacctataccgccagcgaactggctattggtctggtagttctcatgcgtcagcgtggcattgaggctggggatcgccctgtcatgttcctggacactgagaccggatctgattgggttaaacctcgtttcgatgctgaaaatattgagctgtttaccgcaaaaacccgcgccttcgttgatcttcttgcggcggtaaatgaggcggaagcaaatggctccgtgatgatcattgactcaataagtcacttctggacggggctgtgtgacgaatacgcgcggcggcgcaacagaaagcgaggtcttgaattttccgactgggcgtggcttaaacaggagtggcggaaatttacggatcgtttcgttaacagtcaggcgcacataattatgtgtggccgagccgggtatgaatatgatttttttgaaggcgatgatgggaaaaaacaacttgccaaaaccggaataaaaatgaaggcagaaacagaaaccggatatgagccatccattttaatccagatggaaaaacaaatgaatattgagaccggacaggtatggcgaactgcacgtattttgaaagacagatcaacaaggattgatggtcaggtattttcaaatccaacatttaaaaattttcaacctcatattgaatttttaaatcttggagggacacatgtcggcgtggacacgtcacgcgacaacggggagttatttgcagacgacggtgtgccaacatggcaaaaagaaaagcgagcaaaagaaattgcactcgatgaaatcgtcgagctactgaataagcaccactgcgggacgtcagcagacgttaagcggaaaaaaggcgacatactggaaaaaatattcgcctctcgctcatgggagcgaattaaggggatggactggcccgcaattaaaagtggtcgcgccgcaatgtggctggagcttgagggtactgaatatgcattccccaaaccaaaaacagaggcccaggcatttgatgaggagataccgctttaa

SEQ ID NO: 393185 - DNA, 300 bp, Salmonella enterica
atgaacgcttacgctatttacgacgctattgagcaacgccgggagtgcgacgacgtactccgcatattgcgcgaagaggaagaattcgagctggctaataaccttgagagaggcttatcgcttcacatgctggagtcggtgtgcattgacaatttacagcgccacggtgccaacaaaaaggcgatcggtcgtgcatttgatgacgacgttgagttccaggagcgcgccgccgagtttattcggtacatggccgagacattttcccggcatcaaattgatattgaattagaggataaatga

SEQ ID NO: 393186 - DNA, 207 bp, Salmonella enterica
atgaaacaccaacattacggcacgcaagaggtaatacgccagtgcgcccttcccggcacaatggttaaatataaagaccgcgtttataaaacaacggtcaatactcgcgggaaaatagttttaaccaacacgcgtgaaaatataattgttcgtgatttatttataaatatattgctggatggtaaaggcaacccattaattaattaa

SEQ ID NO: 393187 - DNA, 534 bp, Salmonella enterica
atgattaaaacgctgtcctgcaacaatcgctcctacaaatgcttttttacttccggcatgacaagaccagttatcaccatgatcactgcgaatggtgttactcgcagcgtcaaaaaccccgtaacaattgctaaagttttggcggcgatagcggaagaggaccacgccgaagcgctggaaatgaacgccagccttgatgcggagtttgccaggatcgacgaactggcaccagatgaagacgcaaaagcaatatttaaggcgatagcctcgaaatatgaggttggatgcgtgatgggggtaggtgccgcgcacgctgaagcgctggaaatagacgaagtgataaacaccgcggtagatgtcattaaagcgatggctggccatgacattgaaacggtattagcaggtgtacgtagcatgatgcatcactacggtgtaataacggaggtttgcgcggcagcatacacagcgctacgcgttgcggtagaagatagctacaccgaagcgctggaaatgaataaggcgcactccctatga

SEQ ID NO: 393188 - DNA, 465 bp, Salmonella enterica
atgaaaatcagccctccaattgatgcggttgccaccgagctggagctgtgggcgctggcggcagggtggaaaaccgtcggcgcgctggtggcgggagagtatcacgcctgcggcggcggccagttattaccggtccctgacaattctgacgggttacgtaacgcagtacagcgactacagcgtgttttccgtggctttgacggcccgcgctactcactggaggctgaggcgcttaaaccatttgtgctggcagccatgcccgctgagatgcgcgttcgcctggaatctcccggcaatccgatcttgttggctgcggtagcggcgaaagagggtatcgaggcggtaaacgcggtaaatctgggcgcggcgacagcctgtctactgaaagagtgcgacgaggcgatcgccgcgttcacaagcctaaaaaaatcattgtcactcagtgaactggggttgtgcgcatga

SEQ ID NO: 393189 - DNA, 1080 bp, Salmonella enterica
atggttcgggttatgaaagttaaagttggtgacccgctgagtaagctagccctgcttaagctggctgacaacgccagcgataagggcgagtgctggccgagctatcagcatattgcagatcagtgcgagatcagcaaacgcaccgcggtaaatcacgtcgccaagctctgcgcctgcggttttctccgaaaagagctgcgcaaaggcccgaacggcaacaccagcaatatttattttatcacgcctgagaacggcaacgctgcgatgctggcgaaattcaaaacgcctaaaaagccccgcgctcagggtagtgcaccagattcactaccccctagtgcaccagatgcaacaggggtggtgcaccagattcaccagggtagtgcaccagattcactaccccctagtgcaccagatgcacccgaatcagtcactcttttgaaccagtcattgaatcagtcaataaagatctcttcgtcggagaattctgtcgaatcccccgaccaggagaaaactaaaaaatttatctctcgtcaccctgacgctgtggtttacacccctggcggcaaatcctggggaacgcagggcgatctcgactgtgcagcctggatttacgaacgagtaaaaattattaaccccacccagcgccagcctaactggaccgagtgggcgaacgacgtacgcctgatacgccagattgacggattcacacacaaagaaatctgcaaattattcaaacgcgccaaccaggacagtttctggcgcacaaacatcctatgcccgtcaaaactccgcgagaagtgggacaccctgacggcgaaattccagactggagaaccacagcatgtacagaacaccggagaatccaacgcaacacgccagatccgcgaagccctcgaccgctgggagcagggcgacagccaggaggctatgggaggtgatggcgaaaatctacggccagcagtggattgcgaagaatggagccgtgccggacgagttgtggatggcgcagattggaactttgaccagcgaccagatgacgaacgtctgcaactccctggtgaagcggtgcagcagtggtaa

SEQ ID NO: 393190 - DNA, 222 bp, Salmonella enterica
atgaaaaaaaaagaaacagatgatattcataataaaggagtcattaaccctccccattccatttcaatatcgaaaaaatcaacaataatattagggttagcggctttattagtttacataaatgaaaagaaaggatcgcctatcaagaaagtcattcttgaagaagataaaaatgacaataaccgttgtgataaaaaaaatatcgcacaatatgacaaatga

SEQ ID NO: 393191 - DNA, 945 bp, Salmonella enterica
atggctttgtcgttaccaagtatgaaacaactaaagcaattcaataaatttgtggatgactgcattaatcatcttggtgaaatatctgacgatgacgctaggaagatttattttgaaaatgaaaacatcaatatcattaattttaaaaatgcaataaaagagcttttaagaaatgttcttaccgaaccaaaaataattactaaaggtactgatttttatagggttaggattttagatgatggagtgcaatattattataggattaaagattttatttaccctccaattgaaaatgcgaagcttggtaggttgaactttattggcacacaattactttatctgtcaagtcacgagctgacggcgatacaagaatcaagactgcaagggatttgtaaaaatgaaaaggaagaaattcgttttcagttgacacgttttcagatcactgaagatattaaagtaatagagattggcggttttttagaaccttatctgtcacttccaagagatggtgaagccatcaaaaaacattttcaggattacatcggttcagactatatggattccagtctaaggattatatctgcttgtgaatacatacttttgaaagtgcttaataattgcaagaaaaactcatattatctatcatcgcttctttccgaagctatttttgaaataaataatgaatttaaacttggaattgaaggtgttaaatatcaatctacaatagaccagtcttcagttggcacaggcatgaatatagcttttcaaaaagaggctgtacgaaagatggatataagaatgacatgtgttaatcggccgagtcaattttattttggtccttttatggattatgaatcagagtattataatgatggcccagaagatgatgatggtaattttaaaatgaaaaaaaacgatggcttcttcaaggaaagaatacgataa

SEQ ID NO: 393192 - DNA, 765 bp, Salmonella enterica
atggcaatatacctacctattgttgagcaattttcgaccagatttgagatatgggaacaacgaaatgctacaaacgaagagatgatacaattttataaaaaaaacaaatattttccatcaactaaagtaaatgtaaaattgatagactacgtcgataacatgcatgatgccgcaagattagttatagcatgcagagcttctaatgatttaggcaaccatattgatgataatttagtgaattctagtgaatacaaaaaatggcgagagttaatgccgtcaaaaacaccaaagtcgttggcgttttatcaaaaaaaatattctcagggcatgagctttgatgatgtagataaagagataatttcttgtggaaagctacttacccaaaaacaacaacttgttcatggtggaaatttttttaacggaaaacctataggaacaattttaaaaacagaaaggccactatctacatctttatgccccttagtcgctcaatctaatgcactttggaggggtaaagcgtatgatgaaaatgcactaactctagtagttctaaatgttatttggcctcaaacaaaagtgtttgttttccgacatagtggaactaatctgggccatgagaaagaagttctttttgcatctggggctacattaactttacgaggtagaactgaaatgggtggttatataaatgtcagtaaattctctgataacattcgttatgaaaaagcggtaccacgatatgttttaaaagttgatatttcctaa

SEQ ID NO: 393193 - DNA, 144 bp, Salmonella enterica
atgcctcagaccggaacccgttttaccgttgaaacggatggatttgacgcgcagatacgtggggaatatcactgccataagatgaactgttatctgtgtcctgagcctgagcgtgggggaaagcgtcagtttcacggcaggtaa

SEQ ID NO: 393194 - DNA, 255 bp, Salmonella enterica
gtgggggaaagcgtcagtttcacggcaggtaaaacccggacggaaagtgccggaaaggtggcggtctgcaacagtgtcggggagtatcctgagctggtttgtggtcaggtccggctggtgctgacgcaggccggcagcatcttcctgaacggcacggcgattaatcctcagggcgcacaggccatcagcgacgacgggccggtgattagccgggactgcggggcggcaaaaaatccgcctgacgcaccagagtaa

SEQ ID NO: 393195 - DNA, 288 bp, Salmonella enterica
atggaaactttcctcgacagtatgattattccgctttcccgtccgtataccattgatggcgtggaatatagcgaactaacaatgtatgagcctaaattgcgggataaaatcttattcagcaaagataaaggcgatactgaagaaaaaagtgcccgtatgatggcgcgattactgaatgtcagcgtgcaggcgctttacgatctcccggcgtgtgattattcgcgaattgaagatgcatttaatgaactggtaaagatgccgaccgaacggaagccaatatcctcctga

SEQ ID NO: 393196 - DNA, 1575 bp, Salmonella enterica
atggctatttctcaaaactttaaaacacaggttgtatttgggggtcgaatagacccctctttttcaaagagtgcggatgggctgaaacaagctataaataatacatccaagacactgagcaagctaacaaaggaacaggagaaattaactgacgaaatagagaaagcaaaaaaatccggtggtgatataacagagttaactaaaaaatatgaaaagttaggcgatgaaattaagcaggcaacgaccgaacaggaaagactaaactggcagttaaaacaagaaaataaatggagcgctaaaaaagcatggatgaagtcaggcgtttcatttggcgcagggaaagcggcttctgctattaaatctggcctgatgtggggtgccacaggtgccgctggttttgctgttggtgcgcctgcagcggcgctgtcaatgaatgccgatactgctgaaaaggtggcatttgcccgtcattatggcgttggagtggaaaagtacgccgcctgggataatcttggaaaaatggcaggtctcaatggtgagaatgttggcgatatgacggaggaattgacgaataaaataggcgaggcggggaatgaaaacacgcttaatccgatgttgctccagcttggcctgagtaaaaaaatgatggccaactggagtcgcgaaaaacagtttgatgtggttatgactcgtctttctaaaatgaaagatgataaggttgcggccagtcttggggatcagctcatgggcggcgaagccaacaagcttttgacctatatgaagtttacaggtaaagagtggcaagaggcgatgaaagaagctgcagagtctaatctgttaacccaaaaaaatgcggagagtgcgacgcgggcacactttgccacgcagaatctgtggaacattgcgcggtctggtatggccgacatgcttggagagataagcgaagggctggcgccagaaatgaaacgatggcaaacagatcttaaggggtggtttgagaaaacagggccggaaattacaaaagggattatcgagtggacgaagccggacgaaaaaggcaaatcaggtctaacgcggtttaaggaggccgctaaagagtttggagaggggctttataaactgggccgcatagcctgggctgttgccgatacacttagttttttgttaccggatagcgacgaagagattcagaaaaagataaaagacggtctgtcgaacggttcactaccgatcgctgcgggacaggctatggcaaagaatgccgggctggataagtggtggaatgagcaaggttttaccgatgaaaaggtgaagcggatgcgcgaagatcaaagcaaggggcgaggaggatttgacggacttgtagagctggcggagatgatgggtctcaaggacaaaacctcccagccgacacaggttaataatagcggtcctgtaaacattgtagtaaatgctgcccctggacaaagcgctgaagagattggcggatctgtttataaaaaattcgacgagaatagggcaaaaaacaattatgggttaggggctatgtacgataaaccaataccactggggtaa

SEQ ID NO: 393197 - DNA, 390 bp, Salmonella enterica
atggggattggtgagtcatttgtgttctcaatttctacgtctgcatataatcagttacagcgttctgaggagtggcgatgggctgaacaggtacgatttggacaaaatgacgcgttacagttaaccggtcgccccaatccgacaataacggttacgggtaaaatccacgccctgtttatggatggttgcgggctcgggcaactcgataaattgcgttctctcggtaataccggtgatcctcagcaggtggtgctgggtacgggagaggtattgggattttgggcgataacggcgctcactgacaatcagactagttttctgatcggtggagcgccgaaatcacaggaatttacgcttactcttaaatactacggagaaacgattaattaa

SEQ ID NO: 393198 - DNA, 663 bp, Salmonella enterica
atggaaaaattaacaaaaaatgacaagataaaactaaccacaatattgtgcattattgctggatttttattattcatgctgataaatatatcgtccgaacaagagaaaaaaacaccttttgattataaccaagattcaagcaacgaaagtgtctttttaggtatgattcaagatgctaaagaaaggtatattgaaaatacctcgcaagatgtgcgcgttattgctaaccatagagactcattaattgctgaaaaaatggagtccgataattatgaagttaagaattggactggattagttcatgaaataaataaagacaataattcattcgcgatatccatatcactaggttatatcccaggttcaagaaatccagttgtggttaaaaatgccatgagttccttaatgtttaaaaacacggtttttcaaaacaaccaagtttttcgagatgcttatgaaagaaatataattttagctgacagccaactctacaatgaagtatcgaaattaaaaactggtgatcgcgttagcttttctggtaatttcacccaaacagtataccaacgcgaaaagagattagaagaaacaagcttcacgggttcaggtaaattagattcgccagagtacatgtttgttttcacacatatcatacccatgcattaa

SEQ ID NO: 393199 - DNA, 213 bp, Salmonella enterica
atgccgcaggtcgtatttaatgaggaatggatagtagaaaggaagctgtcagaaaaaacaggtttgagtgagcgccagataaaagaaatgcgcaccggaatttttattgaaggggtgcattttaagcgcctgtctatgaatggcaaagaaacgcagcgcggcctgacctggtacaactatcctcgcataaatcagttagtccaggagtcatga

SEQ ID NO: 393200 - DNA, 1275 bp, Salmonella enterica
atgtcttatccaactggcgtcgagttgcacaacgggaagatccgtatcacatttacctaccgtgaatcccggtgtcgggaagttctcaaggggtggattgttaacgctgccaatatcaagaaagccggaaatctccgcgccctgatagtcagtgaaattcaactcggacaattcgactatgcgttgagattcccggaatcaaaagccattaagaaattcacatccacccgagtggcgcatacgtggggggaactggtggaaatgtggctgaatgccaaagaagaggatatttcaaaaaacactatggtgcgtgttaaagcgcaattgaaaacaattaaccggattatcggggaaatgaccccgatatccgatatcacacacagcgatctgatgaactatcggaaagagttgctgaaggggaatacattctacgcagcgggaaacaaacgtaataaagccgggagaagcataaacaccgtcaacgactatatctccctgacgtgtcagattttgcgtttcgcacaccgtagccgatttataaacgacaagccgtttgaatacgttccgaaattacataaggaccgcacaaagccggatcccctcttccgcgatgagtacgcaaagttgattttgtcgaacagtgggcaggaccgcaatatgtggcaattcgcaatcaataccggcctgcgccatggtgagttagcggcactgacgtgggatgacgtggatctggtttccggtacggttcacgtccagcgaaacctgactaagctcggggatttcgtgccacccaaaactctcgcgggagatcgggagatcaccctgctcgctccggccctcgacgcgttacgtgcgcagtacctcatcacaggccatcgcgaaggaacggatattatccagcatttcagggaatacggcagcagcgaaacgcagcatcacaaatttgtattcctgccaggactaaaacaaaaagtgccgggtaaatatttttctaatcagtcgataagtgatcgatgggatgctgccgttaagaaggccggaattcgccgcagagcaccctatcagacgcgtcacacgtacgcgtgctgggcattatccgcaggcgctaacccgtcatttatcgccagccagttggggcatgaggatgcccaaatggtttaccgggtgtactcgtcgtggattaaagaatttaacggcgatcaggtgagtatgctcaatgataaatacggcactgcccccatcgcgcccctgaaggcaataaataacaaaaaataa

SEQ ID NO: 393201 - DNA, 462 bp, Salmonella enterica
atggcaccacaatttccccgtgacggcattcgcctgcacaaatcaaatttcgctgcgatagggcagcaattaacgccgttgctggagtctggcgagtgttatcgtctgataataaagccctggcgcgaaaagcgcagcctgtcgcaaaattcactttttcatttgtggatgtgcgaactgagtgaatacctgatcggtcgcggcaaaccgtttgcaacaccggactggtgcaaagatgccctcaaacacacgtatctcggctacgaatcggttgaacgcatcgacgtaatcagcggagaggcaaccacggttcaaaatctgcgccatacgtctgacctggacactggtgatatgcacgattttatgtgccgtgtcgaggcgtgggccttgaatataggctgccgtttaccgaccccccgtgattctgaatttatgcgcctgcgcgaacagcaggaggcgtaa

SEQ ID NO: 393202 - DNA, 606 bp, Salmonella enterica
atgagaaaaccaacccgccgaacctgcaaaatctgcaaagagaagtttgtcccaaaatatccaaatatctggtggtgctgccctgaacacggcgctgaactggctgtgaaaatgcgcgcccgtcagcgtgagaaacaggccgcaaaagaaaagcgggagcgcgcgcagcagcagaaagcgcaacgcaaggcgtggagggagcgtaaagcccgcattaagccgctgacgcactggatcaacctgactcaacgcacggttaatgacctgcggcgcgaaacctgcctagcgaacggcgacggctgtatagcgtgcgggacgcacgccgcgacagcctggcacgccgggcactaccggacaacggcggctgccggccagttgcgttttgaggcagataatatctggctgtcatgcgacgtgtgcaatgtccacaagtcggggaatatcgagcgctatcgggtaagccttgtaaaaaaaatcggtgaggcccgcgtgctggagttggagaacaacaacacgccgcaccgctggacagtcgaagaactggcagaaatcagggctgctgcacgcgccgggttacgtgaactgaaaaaggcggtagcgacatga

SEQ ID NO: 393203 - DNA, 612 bp, Salmonella enterica
atgaccccacgacagaagagggcgcataacgcagcgctgcaaaaggccgcatcggcaccaagcaagcgctggctaggaaaatccgtattgctcaccggtacacagtcggcctggatcagttctctcctgagtgtgtggggagagtgcgaacgtggggaggcagctccgcgagcgccacgtacccacacctgttggcaatcactgagaggcgggcgctggtctgataaagcgctggcgcggtttaccgaggcgttgacgcaggctcgcgaagagggattcaggggcgagcgggcgttaaagcgcgcccgggcgattctctggcccgttgcgccggtcagcgtgatagatgaggcgatcacaaacgacgacgccgattttattgaatcctgcgtgctggaggcgttcgacgttaacgatccggtttatatcgtcggggtgagctattacacgacacgaaaaaaaatatctgacctgacgcgggatattcagcaaatagcgccctggctgacaccgaacgaggcaagaaagcgcgttcgctggtgtgtggagatattccgggcgcgggtttttttgagcgcccgccgccagttgagagaggcggcagggggttaa

SEQ ID NO: 393204 - DNA, 576 bp, Salmonella enterica
atgaaaacagcgatcgctatttccactgaatccccgaaagtatttttcaaagatggccgctttgttactaccactcgcgatgtcgccgattattttgataaacagcatccgcacgtaactcagaaagttgaatcccttgattgctcagaacaatttttaaccagcaacttttcgctggttcactatcagcacaatggcaacacgtacaagatgtatgagttgaccaaagacggcttcatgtttctggtgatgggttttacaggcaaaaaggcggcacgcctgaaagaggcgtacattgctaaattcaacaagatggaagccgaactttctaaaccggtaacacaagctggttgcggtgaagtggtgataattttccagaacggacagccagcttacactcgcgtagctcaaccaggcgaattcatgtcgacgatggagggacacaccgaaatgctcaggcgtgccggatacgtgataactcattgtgatgatctggaactgttgacggtggctgatttggcaaagagggcggatgaagcgcggcggctcatgaataaatggcttgccgttaagtga

SEQ ID NO: 393205 - DNA, 594 bp, Salmonella enterica
gtggcacaaatccaactaatcaagatcaacgctgatactctcgcaccggctaatgtcgaggcgcgtgaatatcttgcgcgtgttaaatccggtgtctggctgaattgcgacgttaaacaggttcgcaattatcttttccttaagcgtttcttcgctcttctcaacctcggttttgagtactggacgccagcaggcggggctattactcctgccgaaaaatcctatcttgctggcttcatcaaatatcaaatcgtcattgtcggaaacgccgagactctattcgagctggaaagggcatacaacgagaatacggcacaacaccgggtgaacggtgtagcagttgtgaaatcattcgaagcgttccgtaagtgggcaactattgaagctggtttctacgatgagtttattcttcctgacaatacccgccgccgcgaagcgcgttctatatcgttcgccaaaatgagcgagggagaattccacgaagtttataaggcggtttttaacgtcctgtggaatacgattcttttccgctccttctcgtcacagcgggaagctgaaaacgtggcaatgcagctactggagcttgccgcatga

SEQ ID NO: 393206 - DNA, 297 bp, Salmonella enterica
atgaaaaaggtcgatctccgaaaacaagcgcgagggcgtgagtgtaccgtccgcatacccggaatatgtagttttgatcctgataccagcgtactggcgcattaccggctcgctggtacctgcggaaccgcttgcaagcctgatgatctgcaaggagcaattgcctgtaatgcctgccacgacctgatcgacggcaggacaaaaaccaccgaatacacctacgaggaattacgcctcatgcacgctgaaggcgtattcagaacacttgagatatggcgcagggagggctttatctga

SEQ ID NO: 393207 - DNA, 606 bp, Salmonella enterica
atgagcacattacgccagcgaagggcgcacaaatcagcgttagaacaggccgccgccgcaccgaataagcgctggctcggaaaatcaattttactcaccggcattcagtccgcgtggatcgcctccctgctcacaacgtggggagagtgcaaccgcggcgccgcagcaccacgccccccacacactcataaatgctggcagggactgaggggcgggcgctggtctgataaagcgctggcgcggtttactgaggcgttgacgcaggctcgcgaagagggattcaggggcgagcgggcgttaaagcgcgcccgggcgattctctggcccgttgcgccggtcagcgtgatagatgaggcgatcacaaacgacgacgccgattttattgaatcctgcgtgctggaggcgttcgacgttaacgatccggtttatatcgtcggggtgagctattacacgacacgaaaaaaaatatctgacctgacgcgggatattcagcaaatagcgccctggttgacaccgaacgaggcaagaaagcgcgttcgctggtgcgtggagatattccgggctaaagtttttttgagtgctcgcaggaatttacgtgccgattga

SEQ ID NO: 393208 - DNA, 498 bp, Salmonella enterica
atgattagaaaattattatttattttttgtatggtattcagtctctctggctttgctgaagacaatccattactagtaaatataacccctcagcaatttattaagatttataataaaaatatagggacatttgggaaagagttcagatcagccagaattaaaagcactgaaaagtcagatgacaaatccatgattcagtttaatgttctccctcaaattgcaggcatgggctgggtcaactcatcgggcaaactcacatctgtgatgtggttagtcggtggggagggactggacgcgagcgccgcattagtgtcgttatgctccatgatcgattcattggatgacagcctgattctcaaggatactggtccattattgtctaattatatcaatgatgaactagactcaaccccggttgagtttcaaacggaaaagaataagtatgagataagcaaatctgacgcttatggattaatgctgaaggtatcttctttatga

SEQ ID NO: 393209 - DNA, 591 bp, Salmonella enterica
atgtccaacccactcgcggcggcaatccccgaaatcaccattcataacaatcgcgccatcaccacctctatagccgttgctaactatttcgaaaagtcacatgacaacgtattgaagaagattcgcgccgtggtgcttaattgcccgcaatcttaccatgtcgtcaattttaatgaggtggttcgagaggtacctggtggtgatggggcggtgcgaaaaatgccaatgtttgaactcactcgcgacgccttcgcgcttatcgtgatggggttcactgggaagaaagccctaagatggaaaatcgactacatcaacgcattcaataaaatggaagccgagctctctaaacccgttgcccaacccggatacagcgaactggtgataaccctccagaacgggcagccggtttgcagtagagtaggtcagcctggcgaattcatgtcgacgctggaggggcacaccgaaatgctcaggcgtgccggatacgtgataactcactgtgatgatctggagctgttgacggtggctgatttggcaaagaaggcgggcgaggcgcggcagctaatgaataaatggcttgccattaagtga

SEQ ID NO: 393210 - DNA, 192 bp, Salmonella enterica
atgactactatcactatcaacacctacgacgctgctggccgtttcgatatgaacgacgcacaggcaaaagaattcttctccttcgttgaaaaacaggccatcgatgccggttacactgttgagtttgtcgaggccatcagcgttgatgaagaaagcgagcgtttcgtagaaaactgcttcgccagctactaa

SEQ ID NO: 393211 - DNA, 399 bp, Salmonella enterica
atgcatggcatgaccgctgcggaatacagggaaattcacaatctacccgcagaaacaccgctggccggcactgtatacagacagatgcacagggacaagatgaaccgcctgattaaagacggcgtagtaactcactggcacctggcggccgccacagagaaagctaggacatcaggtcgcggagaacgccgggagttcgacctgtcagagcaaaaagagcgcatgaaacgcaacgctcactaccaggaaaggacgctcccgccagggagcaggcgcgctgacggacgtgacgcggacagattcagggaatatcaaaaagccaacagggcgcaaaagaagggcgataattcactgatgatcagatatctggagaggtaccccaaggggacgccgtggtaa

SEQ ID NO: 393212 - DNA, 675 bp, Salmonella enterica
atgagtaatttagacctgtttacacggctatcagatcgggcaatgcagccagaggatgtaacggtgtgcctgaaaatgccacagcatgaatttttgaacatgctggccgacggggtcagctttgcgctggagcgtagtatcagtcgcgcagaactggctgcaatcactgaaaccacgcccaagtccatgtattcatatttcgcctctcccagcgcaagggattaccggtcattatcagatgagatgcggatcgctatgatatggcgaactgtaaaaaaacaccctctctcagatttgcaaaaaaataagaaaattaaggcccaaaaaccagggactaaaaaaagactggcaaacctctttttagttaacggaaagcctctgactctgagagaggccgcgccgttgctaggatattccggtttcgctacgttatacaagaggatatcaaaagaaaatatcccccctggtggcgatataagccattgtcgcgttaaaaaagctgaggccctttatattatcaatggcacgaaagtatccatgcctcaagcggccagccacctaggatacagtcatgccggattgtttcgtagattacaaaaagatggtattcccgcaggggctgatattactcacctaaccagaataaataaaatatacaaaaaaaaagagcaataa

SEQ ID NO: 393213 - DNA, 387 bp, Salmonella enterica
atgaacaatatagagaaactggaaaaagtcgggctcgaactgtttggcccgaactggattaccccgacggcgcgcattattggcgttaatgagctgactatccgccgctggttaactggcaaatctcgcgtatcaaccactattgccagtgagttacctgacgccctgacccgtaaattccagaccgttctggatattgccaattccgacaaggtgcgcggtgacgacgttactatcgaaatgatcgcggaaatcgccgatcgttacaagttttcagacgagcggtaccgcaaagctgctatagatgaaatgaataatgcggtttacaacgtaacctatctgtcgaatcttgagtcaatcgcggaaaaatattcgaggctgcgataa

SEQ ID NO: 393214 - DNA, 306 bp, Salmonella enterica
atgactacgttctaccacggcacttccgaagattccgctgatttaatcaaagagaatggtttttctactgaactggttttcgttaccccgcgcaaagatatcgcagaggaatacggcgaagaggtaatcaaagtaagcattgataacgatgatctgttagttgatctggatatggctggagctgttggcatgtccgttgaggaggccaacgcgtacctgagcaatgatgactgggagatctcagattatatcaatcaaggttacagtctttgtgcaaaagtaggatctgttaaggtggtaaaataa

SEQ ID NO: 393215 - DNA, 156 bp, Salmonella enterica
atgaccaataacaaactaacagacgaacaattagacgagatgatcgcgtcggcggttaattccgctggaccactaccgccagataaaaaatttgcgctgctgattgctgcgttgcgtgagctacaggaacgccgcaaggtggaagcgccagaatag

SEQ ID NO: 393216 - DNA, 993 bp, Salmonella enterica
atgacagaagcattatcgatgttaccccaggagaccttgacgggtttacacaatgccacttctttgcaggtattgggggctggtcatacgccttgcgcctcgcagggattccagactctttcccgtgctggacgggtagtccgccgtgccagcctttcagtgtggctggcgcaggtcgcgggacagacgattcacgtcacctggctccggcctttctcgatctcgtcagtgaatgtcgcccttcagtcatctttggagagcaagttgcaaatgcagttaaaaaagataactgggttgacgctttactcattgaaatgtcagaggaaggttacgccagcgggtttgccgtactaccagcggcaagcgtcggcgccccgcacaaaagggaccggctttttttcggagcgcaccttctggaatacacctgcggcgtcggacggtacgaggggcggcagtgggataacgccgggtatgaccggcagcagcttgccgcagctggcaaaaatggcagcttggccgacaccgtgcgcaaacaacaacgacaggaaagcaagcgaaaatgcagccttgaacatgtacaggtccgacggaacgaagattcagcggcgactacaggatgttgcggcgattgcagcttggcccacagcaacggcgcaggcatggaagcaggcagggaaccagggcagacagggaggggaaaacctgcaaacagcggttcaagctgcggcatggcctacaccgacagcaaacgaccacaagggaagtggcccgactgtaattcgtcaggatggaaaggacaggacttacgaccggctggactacgcatcggagcagggaataaagacggctacgcgcatcacagccactggtcaggtgctgactggcttggatgcagggatggaaaattcaggccagttgaatccggcacattcccgttggctaatgggattcccgccagagtgggacgactgcgcggttacggtaacgcgatag

SEQ ID NO: 393217 - DNA, 207 bp, Salmonella enterica
atggctaaccaagaggcttgttgggatatcaatctgtacaccgagtgtcctgaatgcggagagtatttcgacatcattcgttaccaggatgatttctggactgatgccagattcggtgtctgcgaacacgacacctcagcaactactggctatgaggttgaatgccctgaatgcaaacatgaattcaagtgcgattttgcgtactaa

SEQ ID NO: 393218 - DNA, 519 bp, Salmonella enterica
atgacaatagacaagcaggcgctgcgcgaagaattccgcaacatgcaggacaactacagcgatccggcagaccgtgagagacaggaaatatatatcgccgctgaagcggcgctggatgagctggagaaagcgcagcgcgccaacgccgcccaagatgaccatatcaaccagcagcaggccagaatcgacgtgctggagaaacgtaacgcggagttgggaaaatatgccggggagatggagtggtactgcattgcctacatggagtggagcagcaaaacggactgggtgcagggcgataaacggtttgatgtggtcaagccgcttggcaaacaccgcgcggacgtgctgcgggaatatgttaaccatctggagtcccgcaccgtcaccgtgaaactgtacgacgattgtcagttgtgccactacggaactaccgaggactacgcgaagggctatatcgacagccagaacaatttcatcaaatggctggccgccgctggcatcaaggttaagggggagtga

SEQ ID NO: 393219 - DNA, 219 bp, Salmonella enterica
gtgaaacagaacgatttacccaaatgccccacctgcgggcagacagttgaatattttgcgaaagaggggcgctgggcgggaacgactgaaattcgctgtgttggacaccaccggatcggcgctcattttgcggcaggagacagacgcggcgtcagggagcgcctgatcagggagtggcacgaaatgacggaaaacgtgaaccgggagaaaaactcatga

SEQ ID NO: 393220 - DNA, 609 bp, Salmonella enterica
atgaaagagcgtggaatgatttttaacgctgagatggtaagggcaattatcgacgggcggaaaacgcagacgcggcgtcctatcaaatggaaacagacgcggttcactgaaatggccgagcgtgatgatggttcgctgtggccgtgggcggaggattgcgaacgcggcggtgatatctggtttgcgtgtccatacggtgaggtcggcgatcgcatctgggtgcgggaaacatgggctgaggctggagccagcgcgcctgacctgaaactctatcgcgctaattaccccgatcacgtcccagcgcattacgagaatgtgcctccggctgaagaaattcgctggactccatccatccacatgccgcgctgggccagccgcataacgctggaaatcaccgccgtgcgtgtggagcggctgaacgctatcagcgaagaggatgcgcaagcggaaggtgtgcagccagcctgttacgaaatcacgccgccggaggccgcttatcgtgtcagctttggtgaggtgtggcggggcatctacggcgaagagtcctgggcagctaatccgtgggtgtgggtgattaaatttaaacgcgttgaaggcggtgcagcatga

SEQ ID NO: 393221 - DNA, 609 bp, Salmonella enterica
atgacaatagacaagcaggcgctgcgggaagcggcggagaaggctacgccggggaattggcgccgcacctcatcactgttcaatggcatcacggtaacgcagttttctctctgcggtgaagaagtgacgttggcccatactgttgagaaacgtgacgcggaattcatcgccgccgctaaccccgccaccgtgctggcgatgctggatgagctggagaaagcgcagcgcgccaacgccgcccaagatgaccacatcaatcagcagcaggacagaatcgacgtgctggagaaacgtaacgccgagctgggaaaatacgccggggagatggagcggtactgcattgcctacatggagtggagcagcaaaacggactgggtgcagggcgataaacggtttgatgtggtcaaaccgcttggcaaacaccgcgctgacgtgctgcgggaatatgttaaccatctggagtcccgcaccgtcaccgtgaagctgtacgacgattttcagttgtgccactacggaactaccgaggactacgcgaagggctatatcgacagccagaacaatttcatcaaatggctggccgccgctggcatcaaggttaagggggagtga

SEQ ID NO: 393222 - DNA, 513 bp, Salmonella enterica
atggcactgacacacgatgaactttgccagatagcctgccgctttctacaaaataacggttttaaagtggcatttcacgacaggttccgagcatggaccccttacggagaacaggccgacgccattggatttcgcaacggcgcatcctgcctcattgaggcgaaatgttcccgttctgacctgcttgctgaccgaaagaaaccattccgcattaatcctgaaaaaggtatgggcgactggcgattcatgatgagcgagccgggtatcgtaaatgttgaagacttgccgctgggttggggattacttcacgttgtcagaggccgggttaagaaagtgcatggttggcctggtaactgggagtgggtaaaccgtgacagcaagccatttcaggccaataaacaagctgaatgcgattacatgtttagtgcgctcaggcgcatggatttacgtggtcacctgaaagaggtttatgacggcgtaattgtgagtaaagcagaaggaagcgcggcatga

SEQ ID NO: 393223 - DNA, 342 bp, Salmonella enterica
atgaccactattaccacattcacaaaagagcagttgatcgaaaaggcaaaagaaaatgtggagttttttcgcgacaggctagaccttatgccccaatcgcaacccatggcgttatctttgtgcctagctgaaatcacactggcagcgctaaccgcagaacctgctatgtactgcatgaaaaaaggtgaggcactggatattgatgccacctcaacatgcaaatcggtgattgatgcgtgggtagatgagtggaacgacatgcagtgcgaacacggtgatgattttagtgctgtgtcgctttatcgtctgccgatggttgaggacttaaataatgaccaataa

SEQ ID NO: 393224 - DNA, 168 bp, Salmonella enterica
atgaccaataacaaactaacaaacagacgcactatcagcgcacgtattacggatattctggttgctgattcagtaccactgtctgacgcgtggaagcggctgatcgatgatgcaggggaagtggagttagagctacaggaacgccgcaaggtggaagcgccagaatag

SEQ ID NO: 393225 - DNA, 1497 bp, Salmonella enterica
atgagtactactgattttttacatggtgtccgcacgctggaatacgatgacggcacaaaagaaatttctacagttgatatttcggttatcgggattgtcgggacagcaccaaacgcgttcggttattcgagcgcgtcgctcatgacggggagcgaattattaaaaaaccgcctccagttttttgcgtcagacgacaccggagtgggtaacgattatcacgttgaaattaaacaatcgtcaacaacggacgaggaaatttctgttaattgtggttttgacgtgagcggcgggtattctgtgactataacaataccccagtcccccgtaacacctctacagattgaggacgcgctgcgatcggctagtcagccaacagggaaacgcctgacggcggaggcaatagataccggtgacgacgctggcggcgtgttaccactggccgatacgtatttaaccggcggcgtaaacgaaccgtttccggtaaatactccggcaattatttccgggagcacaaagaaagcggcgtatctggggccggacggcacgctgccagccgacgtggcggatattttaaaccagactgacgcaatgatcgtggtcgttcgtgttgatcaggggagtgacgctgctgaaacgcaaaaaaacgttataaacgggctgaatcagttgctaaatgcaaaacagctactcgatatcaccccgcgaattattatcgcgcccgatttcagcgctactgaccccgtagcagcacagatcgaggttgtcgctaataaactgcgtggcgtgggctatatcgactctccggtgggggccgcggctgcggacgttgtgaaacgccgccagaactacggcgcacgtattgagattctacgcccgcgcgtgtatacaacgagtgacacgtcaggaacgccgcgcccgtattcagcgattgccgccggacaccgttgccgaatcgataacgataaggggttctggtggagtaaatcaaaccagccgatttacggcgttaccggtctggaacaaatcgacgatttcgaaatcgacagcacgacgtgtacagtaaaccagctcaataaaaaccaggtcagtacaattattcgttacaacggtttccggcactggggtaactacctgtgcggcaccgacccgcagtgggcgtttgagtgcgttcgtcgtaccgctgacgatatcgaggattcgatcgctagtgcaatgatgagcgattttattgatcgcccaaacgacgcgcacctcggtagtgatattatcgaaacaattaacggttatattcgtcagctatacgaactgggcgcaattaacggcggcaaagcctggctggatagcgaactcaacacgaaagaaagcctcgcggcgggtaaactgtatattaacgttgagtttgcgcctaaatcgccgtgtcagacaattacaatcacctaccgcattaataacgactacaccgttgaagaattcgcatcgctgctcaaggcagcataa

SEQ ID NO: 393226 - DNA, 1227 bp, Salmonella enterica
atgccattgagtgttgggcagggttatttcacatcgtctatcagttctgaaaaatttaatactataaaagaaagcacacgccttccagaattgagtttatgggagaaaatcaaagcatattttttcaccacctaccactcagaggcgctcgaatgtatctttcaactttaccactatcaggaactgaatttaacaccgatacaggttcgcggagcctacatcaaacttcaagccttagcttctcagggatgtaaagagcagtttattatagaatcacaggagcacgccgatgtgttgattatcaaaggtgataatggtgaaattattttatctattgaggttgaatgtcatccggaagcttttggtcttgccaaagaaatcaataaattataccccaagcaaaaaaacactcctttgggtgatattaccagactagtattttttggcgacagtttatctgactccatggggcgtatgtttgaaaaaacacatcatatcttaccctcctatggtcaatactttgacggaaggttcactaatggatttacctggactgagtttttatcatctccacaattcttaaataaagagatgcttaattttgccgaagggggaagcacatcggcaagctattcctgctttaattgcatcggcgactttgtatcaaatacggacaggcaagtcgcatcttacatcccttcccaccaggacatgactatatttttattgggggctaatgactatatgacactacacaaagataatgtaacaatggtcgttgagcaacagattgatgatattgaaaaagtaatttccggtggcgttaataatgttctggtcatggggattcccaatttatctttgacaccctatggcaaacattctgatgaaaaaagaaaacttaaggatgaaagcatcgctcacaatgccctgctaaaaaatagtgttgaagaattaaaagaaaaatatccccagcataaaatatgctatttcgagacttccgatgcatttaaggtgataatggaggtggccagtaatattggttatgatacggaaaacccttatactcatcatggctatgtacatgttcccgggactaaagatcctcagctagatatatgtccgcaatacgtcttcaatgactatgtccatccaacccaggaagtccatcattgttttgccacaatgttagaaagttttatagctaatcattatgctactgaataa

SEQ ID NO: 393227 - DNA, 252 bp, Salmonella enterica
atgttgctcgcagttattggcgtaataggccgggcgttctataccggcgcaccgtggcgccagaccgttggcgatttaattctttgcccgacgtttacgtttgcggtcacgccgctgataccagacaaaattcacggagttagtgttacccctgaactggtggcgctgttaattggtattgcaggcgtacacggtgtccgctggctcgtatcccgcaggggcaaattaaccggcggcacggataaaccgtga

SEQ ID NO: 393228 - DNA, 942 bp, Salmonella enterica; identical to SEQ ID NO: 83045

SEQ ID NO: 393229 - DNA, 291 bp, Salmonella enterica
gtggacgacccgtatacgttcaaaattaaaatttacctcattaaaaatatggggttggacctcgatttatttaatacgtttattgcccagatatttgatgcgaaaaattgccgctcgttattaaaggaagttaatttcgaggctgaattagacggcgagttttttatcgcgggagcacctgcggcaaatataggcgtcaatattccggcagacggtgagggcggtataaaaattcgtggtgctcaaaattttggtggcgcaacaataatcaatataactgtagaggtttaa

SEQ ID NO: 393230 - DNA, 1080 bp, Salmonella enterica
gtggctgaatcacagttttatgcaatattaacagaccagggggcggcgctggaggcgacagcgctggcaacaggaacccctgttacgctggacaaatttgtaattggtgacggcggcggcaacgccgtaacgcccgacccgacgcgcacaacgctggttaacgaggtatatcgcgggacgattaaaaaggcggagtctcaggataatcaggttacgtttacgttatacgtgcctccggaggcaggcggatacacgatccgcgaggcgggtattttaacggcagacggtacactgtattccctgagtaactcgccggatattctcaaaccaacggagagtaacggggctgtaatatcaattacgttcagatatacgctggcggtttctagtacatccacggttaacgttattgtttatgaggattatttaacaccagaagcagcggatggcaaatatttacagattaaaaataatttatccgagataaaagaaaatggcgcgaatgcccaaaaagcggcgcgccaaaatataaatgccgttgccagcgtcaatggggggcagcctgacgctgacggtaatattactattaatatcccatctgttgacggattcatcacgggggatgaggcaaataatgaatttttacggatagataaaaatttatccgagataaaggaaaatggcgcgaatgcccaaaaagcggcgcgtcaaaatataaatgccgttgccagcgtcaatggagctcagcctgatgccaacggaaatgtgacaatttcaacaggtagcactgttgacctgagtaattactacacaaaatcggaagtaaatgccctgataagcgctggtgattacgcgagtgcaacgccgggagcggttaaaagctatggattgtttacatcaccctacccaataaaagagggagatacggccaccggatcgtcaatatactttaccgcgctttctctaggtggagaaacttttgttgacttttcaaaaggcagccagccagccggaatatggaaatcactgggatatatgtattcttcggggggggcttttttggctgtaaggatatcataa

SEQ ID NO: 393231 - DNA, 375 bp, Salmonella enterica
atgaataacgtcatatatactactaactgggggccaggttcaggctcgaaaaatggcggcgatggaggtgatgggatgtatgaagcacgcatcgcaaaacttgagtcagatgtagagagtatcaaaaaggacgtttcggatatcagaagtgacattcgttctgtgagttctgacatatcagcaatcggcagagatactgcggtaatgttgcaaaaacttgtcgacattgactctaagctttcaaccaagcccagcattgatagtgtggaggctaagattgctagttcaacgaacaaacaaattatttggaccataggatcgataatcacagcgataggcgttgccacaagtctaatcatcaaactgatgccttaa

SEQ ID NO: 393232 - DNA, 321 bp, Salmonella enterica
ttgattatttctcatgaggattttattaattttttaaccgcagtgggcgcaaaggtagagtgccctgtttgtgggcgtgtcggctgggatgtgggtgcaacatggcagatggatacaaccgaaaaaaaagatgaccttattgtgaatcacctgccctatgccagattacttccaggtgcaacaaccacaggtatgtcaggtgggctgccggttttggtggctagttgcaatcattgtggatttatgagattacatcattataaaattgttaaagacacgctaaagaatgttatatctaaagcggaagataacaatgaataa

SEQ ID NO: 393233 - DNA, 411 bp, Salmonella enterica
atggatacgacgaagctgacaatcggcgagcgcatacgggcgcgccgcaaagagttgaaattaactcaaaaatcattggcaaaagcccttggcttatctgacgtttctgtttctcagtgggagagagatgacagcgaacccacggggaagaatttgtttgccttaagcaaagcacttcagtgctcacctacctggattttatatggtgatgaagagcaagccccagcggaaccgaccaatgaacctcagccacttgatgaccgacaacaagaatggcttgatttgtttaatgctcttccagagtctgagcagaacgctcaactcgaaagcatgagattgagagttgacaatttcaatcgcctttttgaagagttattgcaagccagaaaaagaaataaaaaagaaggttga

SEQ ID NO: 393234 - DNA, 231 bp, Salmonella enterica
atgtttactaaggatgcagttactttttttggaagcaaaagccgcttggccgccgctgcgggcgttcgacttccgtcactgtataaatggggcgaacttgtacccgaaggacgcgccatgcggctacagaccgcttccggcggcgcgctcatctacgaccccgctgtatatgaccagcataaacaaacccgtaaagaggcgctgaatcatgaaaatcagccctccaattga

SEQ ID NO: 393235 - DNA, 291 bp, Salmonella enterica
gtggacgacccgtatacgttcaaaattaaaatttacctcattaaaaatatggggctggacctcgatttatttaatacgtttattgcccaaatatttgatgcgaaaaattgccgctcgttattaaaggaaattaattttgagactgaattaggcggcgagttttttatcgctggcgcacctgcggcaaatataggcgtcaatattccggcagacggtgagggcggtataaaaattcgtggtgctcaaaattttggtggcgcaacaataatcaatataactgtagaggtttaa

SEQ ID NO: 393236 - DNA, 933 bp, Salmonella enterica
gtggctgaatcacagttttatgcaatattaacagaccagggagcagcgctcgaggcgacggcgctggcgacaggaatccctgttacgctggataaattcgtgattggtgacggcggcggcaacgccgtaacgcccgacccgacgcgcacaacgctggttaacgaggtatatcgtgggacgattaaaaaggcggagtctcaggataatcaggttacgtttactttatacgtgcctccggaggttggcggatacactatccgcgaggcgggtattttaacggcagacggtacactgtattccctgagtaactcgccggatattctcaaaccaacggagagtaacggggccgtaatatctattacgtttaaatatattctggctgtttcgagtacgtccacagtcagcgttaacgtagtgaataatgacggaatgagccagggagatgcagataatcgttactaccaaaaaagcaagcacctttccgaggtaaaagaggagggggcggaagctcaaaaagaaacgcagttgaatattggcataaatcttgatgattattatacaaaaagtgatacatatagtaaaactgaaattgatgaaaaaattagcaatgataatgttataaatcaatttgatgccgttgggaaaactgtttctgctggctttgtttataataatacgaccgtaatgcactatagtcctggtgataatgttgaaggggcctcattattcccggcgtatttatataatgaaattgactccggaaccgctgtgctggagaccggaacccctgtaaaaatcgttttgtcatcaactccactttctggagtctggatgttgagcgggtatatgccagaaagctacgagccacccagcggatctggggaagaaatatttctggcgcattttgtaacaaatttcacaagggtcgcgtga

SEQ ID NO: 393237 - DNA, 582 bp, Salmonella enterica
atgttattaaaattgacgatgttatccgcaataatatttatgccgattatcgcgggatgcggtacgtttgataatttatttgaaaaaaactattcattggattcagttgctagttttgatggtgatatcactgagttaaaaaaaatatggtttttttgtgaaaaatgtctaaataatgaattgtgcgaaagctatgatgttaaacaatgcaaggacgtgactattccgagtcgaagcgaggcactgagtaaagcggttggtagggctaataccgaggctgtttattttcttgttgatgtggcagaaactgatgtaaatgaagttacaggcgaatataaggaaacaccattaattattgctgcttattatgggaccaaaaaacaccaggatatagctgagtttctactttcacgcggggctgatattaatcaagcatacccagcagtggggcgtaatgccctgggagttgctaactggaaacataatatagattttgcggaatttctacttaagcatggtgctgagccctcagcagtgattcatagggaagaatcgttgtctctgtaccacaatgaccactag

SEQ ID NO: 393238 - DNA, 423 bp, Salmonella enterica
atgcgctctgatggacacccgtgggggtatggttgtggagatgagagtacagactggattgttccagattctttaggctccgctgattttttacctgcctgtagaaagcatgacatctgttatggaacattagatagtcataaatatacttgtgatcaaaatttgggcaaaaatatgaaactagcatgtcaaagtgatttaaaaggatttcataaattataccgccctctttgcaatggaatggcggacggatataaagttgcagtaagtaaatttggtcagtcagcatatgatgccgcacaagaaaaggcattaaatgattataaagaacttgaaatgttagacctgttacaagagttaggagaacctgtcaattctgatgattataataaagtatatgatagagttaccaaccctgggtaa

SEQ ID NO: 393239 - DNA, 759 bp, Salmonella enterica
atgaatgcgctgaagcgagtggacaggcatgccggactgaaagacaaaatcagagagatttaccactatcacaaagggcgttatggctaccgcaggatcacgctctcactgagaaaacaaggggtgttggtaaaccataaaacagtgcagcggctgatggcagagctgtcgctccgctctgtgataagggtgaagaaatatcgttcctggaaaggggaagtgggcaaggctgcgcccaatatcctgagccggaactttggtgcaacgaaagccaacgaaaaatgggtgacggatgttacagagttctcggtgcagggtaaaaagctgtacctgtcgccagttctcgatctgtttaaccgggagattatctcctacagcctgtcagaaaggccggtgatggaaatggttaatacgatgctgcacgatgcattctcagtgctcggaccggaggatgcaccgttgctacatacggatcagggctggcaatatcgaatggcaggctatcaggcaaagttaaaggctaagggaatgatgcaaagcatgtcgcgcaagggaaactgcctggataacgcagtgatggagaacttcttcggtaccctgaaatcggagtgtttttacctgaacaggttcagcgatctggatgaactgaggaaggcgatagaggactatatccattattataacaacgagcggatcagcctgaaattaaaaggcctgagtccggtagaataccgaacccaggcactgaaagccgcttaa

SEQ ID NO: 393240 - DNA, 525 bp, Salmonella enterica
atggcaaagccaaaatattctctcgaaaccagattagctgtagttaatcattatcttgccggacacgatggcgcacgtcgtaccgctgaacgttttggtgttgaagaaacatcagtgcgacgctgggtaagagcctggcaactccacggtattgatggtattacatggaaaaatgaccgtcactctcctgagtttcgactgacggttgtcctgagggctctgagtgaagaacttaccatgcgcgaggccgctgcacggtttaatatctcaaatgaatccgttgtccgacactgggtaaaggtttacaaagacactggtgaagaaggacttctgaacataaaaccaggccggagcaaggacatgacaaaacctcaaaaaacacctccacttaccgatgctgaactggaaaagttatctcctgaagaactgcgggctgaactccgttaccttcgtgcagagaatgcctatctaaaaaagctgaaggccttagttcaaagcgagaaaaacggcagaaagcccggataa

SEQ ID NO: 393241 - DNA, 339 bp, Salmonella enterica
atgagatttaattatagtatcgatgatgagcatgcggaaaaatttataagtttattggtcttgggagctttatatgccattaaggaaaaagcaatgtcaatagatgaggctgaagtattcgtttttacgccatcaacttcgcgtatattaagtgaggcaggttattctagtgcccttgttgatataatagattatggttgtgaacttgaggatgtgtctgatttaattccagaacgcttaactgataacgtgaaggatttaatatctcagactttgtctttaattagctccagggactatgttgccggaacgatagataaaaaaatcagcattaagtga

SEQ ID NO: 393242 - DNA, 531 bp, Salmonella enterica
atgggcttaaataagaaccacttattagaagttttgaatcatgtttttaatgaaagcataatgcatgattttaattatggtggcatggattattttgatgaaaaaatcatatataacttttttcacaataagacttggcaagagcttgttgtaaatctggacatcaaaagcgcagcatatcctttggaactagccacatattattttaatgaaaaaaattttaaatattacattccattatatatatatgcttctcttttgaatgaaaaagggtgggtttttgatagttgctttattgatagatatttatcgcctgattatcaagagatagaatcttttttatcattatttgacacttttagtaatccacaattaaatgtgatatctcagtatatgcattatgcaggttataacattggttatctatccgccagaactgcattcgaaattttttgggaaatattttataacccaagaataaatggtgaatctatattttttggatatgaaaatatggatatctcagaataa

SEQ ID NO: 393243 - DNA, 201 bp, Salmonella enterica
gtgaaaattttaaataatctggtgccgggttcggcagaccacaccggacccgtattggtctatttagtggacggacgtatacagggtggatttgtattacgccctgacgaattcgtcacctcgctaaccgcgctggacgaggcgagaaaactggccggattgcccgcagcctcttttagccgaacgcaaactgatttataa

SEQ ID NO: 393244 - DNA, 630 bp, Salmonella enterica
atgaaaaatttttacagcaactgggatcgtaaattcatcgacaaactcgaagaattacagaaaattgacggcaaatcactggagctgtcattgtacgtggagcgccgcgcgcaggtttacgcggacgttatcgggtggctgacggcggaactggaatccagggggttattcgatcccggtctggacgtgccagccaccgcgaacgcctgtatttgtggtgatcccgcggcgccgtattgtgattatcgaaacctcgctgctgaggggtgccgagggatgaaactggctccggaaatttttctgattccctggattcattttactgtccggatagccgcgggcaggcctgacgccgccgatccgtattttgatcacctgctgcggcctgctgtgtgggcgtacaggttgcaggaactgccgagagcaaccgggcgccgtggtggacacccgacaaaccgccacaaagaggaggtcgtggagctggcaaaaaaactccgagccgaaaatcccggtattgttaaaacacggttggtccagttaattgttagtgaaatgcgggctaaatatagcgatctgcctcataactcaactgtaagacgatggttaacagatatatataatatgaattaa

SEQ ID NO: 393245 - DNA, 426 bp, Salmonella enterica
atgaaaaccagcgataacgggcgggcgtttatacgtgcccgcgagggtgtaaaactggcggcctatcaggacggtggtggagtctggacaattggctacggacacacgcgcggcgttaaacaggggcaggtaatcaaccacgaacaggctgatgaattcctcgctgacgatctgcaacaggttgaatcctgcatcagtgagcgtgtgaccgtggcgctcaatcaaaaccagttcgacgcactggcatcgtttgttttcaacgtcggcaggcgggcattttcagattcaacgttgctcaaaaaactgaacgagggtagctaccgtgctgctgccgatcagtttacccgttgggtgtacgacaacgatcggtttgtacaggggctgtataaccgccgcgtcgccgagcgcgatctgttcctctcctga

SEQ ID NO: 393246 - DNA, 399 bp, Salmonella enterica
atgagcgagacaaccctcggacagaggatccgcgaaaggcggaaacaattgaagatgagccaaaacgcgctgagtaaagtcgcgggggtgtcttattcttcaatttcattgtgggaaaatgacaataccgctccgcgcggtgaaaacctccataagcttgcaatggcgctccaatgctcccctacttgggtattatacggagacgatgaaaaagcaccggaaccgccccgccccccttcagaattagactcgttatcggatgaagagagggagctgctcaacatgtacagatacctgtccgcatcggaacaacaatccttttttaactccctaaaagcacgcctgagaaactttagtcgtaacctcactgcacatctagaatccagaaacgaaaaataa

SEQ ID NO: 393247 - DNA, 231 bp, Salmonella enterica
gtgttaaagactgaagcaataaaattttttgggactcgcataaaactggctaaggccgcatccgttgatccttctgctgtatctcaatggggggagttggtgccggaaggccgtgcggcaaggctacaaactgcttccggcggcgcgctcatctacgaccccgctgtatatgaccaacataaacaaacccgcaaagaggcactgaatcatgaaaatcagccctccaattga

SEQ ID NO: 393248 - DNA, 750 bp, Salmonella enterica
gtggcgtgttttcgccagttccgtattttctgtttccacccggagaagcggcgtgaagcttcccggctcatacaccgtctgaacgcggcgctgctgtgtccggatggttgccagcctgtccccctcccagccgtaccacgtctcatacggcctgcgcgacagctccgtccgcgtctcgctccagtggaccggctcgcgtttccatacccgcttacccacccggcggcccgtcgggtcgtagatataccgcccctccgcctgcgtctccccgtactgcgtgcgcacataacggaccagccggtgctggttatcgtagtcgtaccggtgcgtccgctcgtcgtacatccggatgaccccctccgggatacggtccgtcttctccgtcagcctcccgtaacggtcataccggtaccggtactgcatatcctccgtgatgcggttatccgcccataccgtgctgctgctctgcggataaaactccgggtccggcagccggttccctgccgggtccgtggcgtacggcagggtgatgtccagattcgcggcggtggtgtgcaccccggtcaggcgcccggcttcgctgtagcggtactccctcgtctgctgcggcccgctgatgcgcaccagcctgccaccctcatcgtaaccgtactcccggtcaagctgcggcagtgtcagatgctgttgctgaagctgaccgcccggcgtgtaagtggtcgtcagttcgtaactctccgggaggctgtctga

SEQ ID NO: 393249 - DNA, 750 bp, Salmonella enterica
gtggcgtgttttcgccagttccgtattttctgtttccacccggagaagcggcgtgaagcttcccggctcatacaccgtctgaacgcggcgctgctgtgtccggatggttgtcagcctgtccccctcccagccgtaccacgtctcatacggcctcgccgacagctccgtctgcgtctcgctccagtggaccggctcgcgtttccatacccgcttacccacccggcggcccgtcgggtcgtagatataccgtccctccgcctgcgtctccccgtactgcgtgcgcacataacggaccaggcggtgctggttatcgtagtcgtaccggtgcgtccgctcgtcgtgcatccggatgcccccctccgggatacggtcggtcttctccgtcagcctcccgtaacggtcataccggtaccggtactgcatatcctccgtgatgcggttatccgcccataccatgctgctgctctcagggtaaaactccgggtccggcagccggttccccgccgggtccgtggcgtacggcagggtgatgtccaggttcgcggcggtggtgtgcaccccggtcaggcgtccggcctcgctgtagcggtactccctcgtctgctgcggcccgctgatgcgcaccagcctgccgccctcgtcgtaaccgtattcccggttaagctgcgggtggttcaggtgctgctgctcaggctggccgcccggtgtgtatgtggtggtcagttcataactgtccgggaggctgtctga

SEQ ID NO: 393250 - DNA, 537 bp, Salmonella enterica
atgaaatatcccacagtatcagtaaacggcgtttccgttcgtgttgacgaggaggggcgctacagtttgaacgatttacacgcggcagccgtagccaacggcgaggcaacagagtcacaaagaccaagcgtgtttctccgtagcgcccaaataaaacggttcgttaaagcactaaaagccaaagcactaaaaagtgcttcggaagaaaatcaaccacttagagtaataaagggcggagaggaaagcggcgcctggggcgtcgagttgcttgctatccgctatgctgcctggattaaacctgaatttgaaattgaggtttacgaggtgttcagaaccgtggttcgcctcggcgtcagcgccatgtcccgcctgaacaaaatcgaccacgttattaatactgaaaccaggcagatcagccagtgcgccagccagatggctaaatggggcgtcggcgggcggaagcaccttcttcttgccgctcgcgaacgcgctgcggacgaggttcaaatgtacctgcccggactggagagcaggtaa

SEQ ID NO: 393251 - DNA, 132 bp, Salmonella enterica
atggagtttaaccaattgtcctacgcccgtggcacagccagaggtactcagtcagcagcttgtaggcggtatgggccggatacaaagcatattgcgctgttacataagctgcaaactgagctgagcgtataa

SEQ ID NO: 393252 - DNA, 162 bp, Salmonella enterica
atggaaaagagaaatctaccatttcaagttgtcaaagatatgagtgaattattgattcttaggaagaatgaatttttacgttcttattatgatctcattgattttttgagaaataattataaagaggtagatctagacgcatttccacacaatatgtcgtga

SEQ ID NO: 393253 - DNA, 489 bp, Salmonella enterica
gtggacaccattacgcggagcctggcccggcacagtatccgtcccgacttattgattctggaaatcaccgaaaccacggcgatgaataagccggagcaaagcgtcgctatactaaccagattaacggaaatgggggttaaggcctctattgacgactttggtaccggttattccagccttctctatctgaaacgtcttccggcatgcgaactaaaaattgatcgcgctttcgtacatgaactcagcgaggcaggcgacggcgcgaccattgttgcggctattgtcgcgctggcgaaagcgttaaatctgcaaattgtggcagaaggcgtagaaaatgaaacacagcaacaatttctgacacagttgggatgccatacgcttcaggggttcctgcctggcaagccgcgtactgcggaggaaattgctcgcgatattcgagaccccgccaatatattcacaaggtcaatatataatgccaacccaaaatag

SEQ ID NO: 393254 - DNA, 2325 bp, Salmonella enterica
atggagtattcattcatatcgttgattgtatcagtattatcaatactgttagcgatgctgatttataaatataaggggtatgtgtcgatatatttcacctcacttattctgtttgttgaggctatttttttaatattaacatttttttggcttggctgttattatatcactggtgaaggggtaaatgacgcagttatttatacgataacgcgttcgctgtatggcgcagatatttctggttttgtattaccagtagttatttcaattttgctaatctgtatatttcttttcgtttctggtaagttgtttataactacgcagcttcaacgaaagaagatgcggtgctggtcaatgttatccatgttgatggcggttttgtctattggcgtttcgcctgcattatcacaattacttacctataataaaccgccagaagaagtagatggatctgattttcagcgttactatattacacctcataataaaatagataatccaaattttaatttagtctatatttatggtgaaagtcttgaacgaacctttttcgatgaaaatacttttcccgagttgcttcccgagcttacattgctaaaaaacaacgcggttgattttagtggcactgaacaatatccggctactgattttacgattgctggcatcgtggcgtcgcagtgtggtcttccgcttttcgcgcctaccgatttaagcggtaaaaaagcgagtcagggatttttttcatcatcaatttgtctcggcgatattctcaaaaattcagggtatgaaacctggtttatgcagggcgccaatctacgctttgccgataaggatatttttttcaaaactcatgggattgaccatgcctggggattagttgagtctggattagataagaacttcgccgttcaaaatggctggggattatatgacgatatcctgttggataaggtatggcagaaatttgaagatttatctaaaaaggaaaaacctttcgctttatttacattaacactggatactcatcctcccaaaggatttatcccttcctcatgtagtatgagatacgaaaaagacggacaggaggtaagcgccctgtcagcagtactatgcagccagaaggaagtggcaaagtttatcaagcgtatccaatcttcaccctgggcgaagaataccatcatcgtattatcgtccgatcacctgcttatgcagaatattactgtctccgtcgattttttaaataaaatgacccggcgtgatctctttgttatctttaaagacggtttagccccaggaattattgctgataaacgcagcacgctggataatggcgccacggtactggagcttatgggagggggtaacgcaataggtttagggcgtagttctcttagtcagccttcgctggcctcaaagtttgataattttaaaaataagttgttagcgtgggggccgagcattcgttcgctctggggtaatcctgaatatattaaagcgttcagcattgatcttaacaaaaacgcgctacaatttgaccattatacgtacagtcttcctcttttactgaaggtgactcctgaagaggtcttgccaattattgacagaggtaacgaatcgttcatgtctcttcggcgcacgttaggttttttgccggaagggcagaaatttatctgggtcgatcagtgtatgaaaatggagcctgtgtggcaaccggacgctttcataaccaagggctggtgtgtggctatgggaaaagcaggcaaaactacgcgtatagaaaaaattaagaatggatcttactcaggcgtgctggaagaattttcaggcataacggatcatcaacgctatcagcagatccagagccgtttactacttgcgtcagagaatatgcgttatcagtctgaccgactgatgttcgctgcagaaggattacctgtattcataaagtcgataacggggcttagccatcctgaattatggggccgttggtcggatgcatttttatcgcctgatgttgcgattacgtttaatcaccctctgccaaaggcatttaaggttgagttgacaggaaaggcctatggcaaaaatatcggccagcctgtccttataaaggtcggtgcatacgcgcaaaattttacgctcaaaggtgaaaaccaaacagtgatactcgatatgattaacgcagagaaaggggacacgataacaataacgccaccgcatcctgaaatgagtaacgaggacaataatgtgggtccgcatattagtgcgcctgcaagaaaactggggatagggctggcagaactcagaatcattcctgttaaaccttaa

SEQ ID NO: 393255 - DNA, 708 bp, Salmonella enterica
atgagtgctttaacattagatctaaaaggaaatgtcgctagcaaggtggcaaaatttaaagaaatgagaaaacagcgcggtgttacgctgctggaaatcattatcgttctggggattatcggtgttattgcagcaggcgtggttattctggcgcagcgtgcgttcacttcgcaggatctgtctgatattcagaacaatgccaacagcatccgtacttccatggttgaagcgtttaaagatgaaggttcatatccggcttctgatactattaaaggcctgactaaatcaacgattgccgattccgattctgaagcgccgattgttactctggttaaactgggtaaaatctctccggaagaagcctttaacggtatgtctaacgatgccttccagattggcaacgcaataacagacacaacttcatcccagaagaaaggctttgtgttcctggttaacggtctggaaacagaagagtgccgtaacctggtctctgagatggggaaccagtgggattatgttgaaaccgttgaagatgctaacgcaggtaaagatttcgctagccttgatggcaaagatatcagcgtagcgaaaagtggtactatcctgaaaactttgatctctggcgatatcgcagcgagtgacatcgttgcaaccaatgtttgtggtggtgaaggcgcaaccaacggcgttatcttcggcagtaaataa

SEQ ID NO: 393256 - DNA, 1932 bp, Salmonella enterica
atgcgtagcagaaaggattcaggctttagcttgctggaaatcatcattgtgctggctattattggcggcgttatggtgagttacgcctattatgcgcgcaaaaaagcggaaaatattgctcagcaaaatacagcgaatgcgttagttgctgagatgaaaggggtcattaattttgtcagagatgacaagatcgcactggtaaaaggggctccccttgctgataaagctgatgaaaacagcgagatcgtaaaccctctttatgatgactcgggcagcgcagatgccgggtacggatggcgtattgaaaatgaaatcgatacggtcgataccggcagcattgataagtatttcctgtggggaaacaacaacaataaggccaatcagcaacggtattacttcctgagtagtaattgtaaggttgacctgaaatctgagtatcccttcgataaagagtaccttccctgttttatgtctacccgagcgacgaactctgcggcagtgattgagcgtattggtttagctggcggaaccagtgacagtaataaacgtaatgtcaatcgcattgatgtcattgtaaaatttaagagaaatgaaaaaaacgataattatcagttttctgactatgagccccatttttcgcaggcattatcagccgccggaattagcgcctctcatgcgatggtgcttcaccgtaataccagcggtgaaaactggaaactggtagtacagaaaaaagataacaaaacccccgttgagtttggcaccattgccaacaatatggatgcgttaactcaatatacgcagggggattttggcgtccgctttacatttgatatgaatgataactcaaatggcggcagcggtggcggcggttcagataagtgctggattacaaaagatgccgacgataaagaaactaagctctgttataacagtacagaagggcaaggggagcatggtgaagacatcgtactttctcttgatctgacagatacaaagaatgaaaacggcaaccagatggcagggacgctgaaagcgaacgtggtaatggaaaacacgtcgcgccgtgtttatatgtttaagcgtcgcagcggcgggtctttagagcttgacggcgacggtaaacctgaacgctacacctatactgatagcgaaggtaatccttatgaaggcgactttgtcatgaacgatgaggttgcgagagatgactctgttcccggtgatacctatagtgggcctaattacgatgtttatacaacaagaacctacgatgcgtttgagctattgaccccagtgaccagtgaatatcactctttcaaagagataggtaaagatgtcactggtgaaacagattattatcccacttacgacgatagtgacgcttcgaacaaaacgacggattatggaccgatacgtattcccgtacaaagttgcccgcaaattaagcaaaatatcgccttgagagaccataacggcgaacttattaaagacggagatggaaatacgcaaacgacagaggttatccgtaaattgtatccacatctgagcgcagccatatcttcagtcaatgcttataacatgaacggttatactgatggactagtggatccttcgcaaacgcgtaaccgactcgatagctccaaagtgatcagtcagcttgccggtgtgacaacacagatagaattcactaaaaacaacgaacaatatcgccctggatcatcaggtatcaatacgggtgaaacggtggtttacgaagatagtaagtatctctggattattagcgcctcagtaggattatacgacggagacacgggcaagggagcgacgctagtcaatccaccggatattgcctatacggtttcccggtggtgtagttctgttccgcaaaaaggtacgcctgctgatttgctagaaagttatcaatataaatag

SEQ ID NO: 393257 - DNA, 432 bp, Salmonella enterica
atgataatgaataaatattgtttattgtatatatggctgtttacgctcatgggggttgccacggctcaagcgacagtttcaacctcgcaggagatcgcgccagcacccgttcagagtgttaaaccgtcaaccaatgtaccgagaaacccatttagcggaagtaaaacgacagcaacgatagcggccagaacattagtgctaagcgaaaatcagttattaagccagggtattaaaagctgggttgtcgggaatggttataagctctactggaacagtaaaaaagattatcttatttataacaccatcagtctctcaggaagaaccgatgatgagatactacaagcgcttggcgacttgtttgcctccgagaattatgggctggttgtaaaaaaatatgaaaaaaaccatgtcatcgtaattgatgaaatgtaa

SEQ ID NO: 393258 - DNA, 1461 bp, Salmonella enterica
atgaaactgaaaacaggtgtattgttgctggcgtttttattgcaaggatgtgtgagtaaatttgaagaaaagtatgatgttgagaagaaagttgagcaacactctacggatgcaacaaaaatagattcagcgaaaaccaagccatttactaaatacgattcagccttccttggcaagaaagtacagtacagcgttgagcaacaaaaagtaatgggtaaacatgtgaagatcgcttcttatgagccaacttcactgacgaccattatggacgcggtctctgcgcagacaggtattagctttcgtataaattcgtccgctattagtaagagtagtaaaggggctgcggatgattcatgggataagcctcattctgttcgttttgatggttcctttgaagagttcatgaattatattgcatcactttacgatgtcagcgtgacgctggataaaagtaacattctcaaaatcaatgtatttgaaacatatgtcctgcggctggatttctatggcgaaaataatacatcagaaacaacgcttgatttatccggtaatgaagcgacctccagcggcgggttgacaggtaagacagagacgaaatttgaatcatcgttttgggatgacgtagaggatatggctgaaaactatgtgacatcaggtaactataatatttttaaggattcatcaatcctgatggttaactctcgtccttctgaatacgaggcgctaagccgggcgctggaaaaatataaagcggataatagccgacagtttattgttacctatcgtatatatatccttgataaagccaaagaaaaacagcttggcggtggcctggatttcagttttgccgatcctcacaacacgatcaatatttccagtagcctgctacaaaacctgacgggcggaatctccgcaggatggaaaaatagccacattgatatcaacaccggtctggacgcgctttataagctgacgggaagcgaatcactgcaaagcggttcatttattacgcgtaacaatatgtctgtgccgctaaacatgacgcaatcacagttttacgtctcaagcagaacacgtacaacggatgataacggcgaagtaaatgttgatgtagagacctcagagatcgttacgggcaccagttttattattacgcctcgcgtgctttcagatggacgtattgaggtggtgagtggctttacgaaacgttttcttaactccattgatgaatatgacgatgtccagttacctaatgtaagcactacagagtcttttaactcctccattattaaacctggcgatctgctggtggtggggaaatttgatgtgaagagtgttaaagatggtctgcagtatcaaattttaggcgcgagcgatgataccaatgaagggacctctacggtattaatggttgttggggtggattattatcgtcaacccattacatctcgtgatgactaa

SEQ ID NO: 393259 - DNA, 543 bp, Salmonella enterica
atgaataaaattctgctaaagaataatatattaacggggctctactgggagccgcaggagttaagcgctttacaaccggcagagcaggcgtcatttcgcggaatgatgaaagctaaccgacgtttgatctatagcgatgcttccggaacccctgcgctaggttacagcactaaaatttcaacgctctacgaacctttcgcgctatacgttaaggatctgtttggcgacgggatttattttttccatgatgataattgcttcacctattttttaatcatcaatgaagggcgaatagtcagtggaacggattgtttcgttagtaaaacgctctttgacgaactcatgaaacaaccggccggttatgaacatctggaggttacccctctggaagatgtgcaaataaatgcggttgtcgaacgctgtgttgcccgacaacttgccttgaaacgacgccgccacttcattatcgcctcaatattcctggggggagtatcactcctgctcttactggcgctaattcttcatttttttgtgacaggataa

SEQ ID NO: 393260 - DNA, 915 bp, Salmonella enterica
atgctggatagtctctatttctggaaaaacaaagggggcggtacatctggttaccgctttttaccgtatatcattatcctgtttgttctctgtgcgggtggggcgggagcctggtactattttgtcatactgccggagcaaaaagcgcgtgaggaagctttagcgagacagcaagcggccgcgcagaaattgaaaaatgatattgcttcggttaatgatttctatgctaagtccctggaaggggctggtattaaggaaactatcagatttctctcagagatccgtataagttcacagaaacttagcgttcttaatttagagagtgaagcatttaaatgtaatacgaagagctgttcttttagttacgagtttcggcctggcaatgtgttgatactgccgcaaaagattttttggggtaaaaattataacgcctctgtcccagcggcaaaaggtaaaggtaaaggtaaaagtaagagtgcaagtgattttgagtataaaaatattgagtcaaggttgaacatcaacgatattcaaaaaaactataagaataagaaattcctcaatttgccgccttgcggcgagttggtgtcttatattttaacctataactcttttgttaaaagtaaagctcctaaaagtaacagcaataacgataaaattgtcattaaaaagatgcctggcagttcagtaaaagatcttgaatctcaactcgttggtaaagtgaaagcatacggactgatggcaggatcatgggaactgaccgtcaataataaaagcgacttgattgccgaaagtataatggatttgcagcttgtgctttataagcaggcatatcgcgatgcctttattgttaaaggaattgaaacgtcaaagaaaggaattaaggtctcaggaggtctggtatgcaaggtctaa

SEQ ID NO: 393261 - DNA, 528 bp, Salmonella enterica
atgcaaggtctaaaaataatcgttatggcaggcgtgttgacatttgcggtagggacggccgttgcggcatcaacaactccggcaacgaaaaacgacgataagaaatcggaagcagaagccctggcgcgtgagttggctgataaagagagccagatagttcaggatcgtctggcaagtatcgctgaagatgattacaccttcgaaatggcccgccgaaaactgcaaaatgaggtggagcttgaaaaaatgcgtagtgaaatccgtaagctacgcggcgaagataaagcgcggccggctccggcccccgtatctgccgctaccgaacctaaggagcccattcagactgctgcggcgattgtcatgcctcgcgttgttcttcaggctgacattggcggttcacagcgcgtcgcggtaacaaatggcgatacgctgcgctacgtgcgtgctggtgaagttttctctatgggaggacacgattttaaacttgcgggagataagaaatctgttgtcctgatagaggcaaagtaa

SEQ ID NO: 393262 - DNA, 1539 bp, Salmonella enterica
gtgagtctggcattcgtacgtatatcgtctgatgatctgctcgcaggaaagtggacctatcaggaattcgacggaattggctttatagccatggtcgaagagacggagtatctgctcatttcacgtcttgaaatcggcagcctttttgctttccagatccagatatcacgtcttaattctcagcataaacgtcaggttattggcctggcgttagtggctgaggaagactattaccgggttatcgagcatgtttcgcttaagcaaatcagtgacgctaaccagaatattaacatcaccgacacgcagaaacagttggcggcgattttacaacgtgctgtcaacatgggagcaagtgacctgcatattacgcgaaatgatgtgctggcacaatttgaagcccgcgtgaacggcgtactgatgccctttatgcaaataaagtctcatctctgtgatgagctggtattcgtgctgtataacgtggaggcgacgacgcgcgatacaacctggaaccgcgcaataccgcagagtgcgaacattctttatagccttagcggtaaaccttaccgtttccgctatgcgcacttccccatttttggcgaaacgccagactgctaccacgcggtgttgcgtattattccatctggtctgcaaaaggaaaatattggctcgctggataaaatcggcatctcacccgaagagatcgatgatctgaaaaagatcctcagtaatccctatggcgcctatgttattgccggaacgaccggttcagggaaatccaccacgctgaagaacttaatggaatggctacaaatcaaccgttacgatgatcgcggatgctttctgacggttgaggatcctgtggaataccagatttacggcgctaagcagagttctgtggtgggcgttgagggcggtggttttcacgcagcgattaaatcggcgttgcgccgcgacccggatgtgctcatggtcggggagatccgtgacaatatctccgctaacgcgcttgctggcgcggttgagagtggtcactactgcttcacaacggttcacgccggtaacattgtttcgttgttgcagcgtatgtcggcattaggcattggcagcgataaactttctacgccgggttttattgcgggattacagtgccagaagcttgttccggtcctctgcaacaactgcaaaaccgagctggacgtctggactatctccgggcgtcaattcaccgtctataccgcaggggaaggggggtgtcctcagtgtaaacacagcggtattaaaggccgacagttggcgatggaatattttttgccaacgtatgaagaactggcgactatttcaaagcaggaatggttgaataccttcaccttgtggcgcaacaagcgaaagacagcgtcggggctgacggaaggatttgagattcgcgaaaaggtcatggcgcacgtattgcgggggcgtattgacgctaaatggtatgccatggagtttggtaccatggcacaagaagatctggagatgatcgttggcaaaattcagtaa

SEQ ID NO: 393263 - DNA, 1029 bp, Salmonella enterica
ttggcaaaattcagtaaaaaacagcggctatatatataccagttctgcgccgatatgatcaaagcgggtttgcccctttttgactccttacagaaattacaggtggagggacgttctcttcttggacgttcttttagtaataaactaaacggcgtcttaatgaagatgaagcaggagacctccgtcgcgtcagtcttttccggtttggtgcctgattctgaattaagcgtgatcaccgcagcggaaaaaagtgggagtctggccgatgggtatcttacgctcgtttcagttattcattataatgatgaattacgtaaaaaaattatcggcgcgcttgtttttccactcattatgatttcattatctctggtggtgattgccggctattcacaaaaagtattcccggcattcgcctcagttgttcctgttgaaaaatggcctggcgttacgcaaaatttatataattttgggacagccttatacggcggcttatggcttaaaatacttattggtttcatcgttgcggttattcttatcagatttatgatggcgaattttagcggggtgctaagaaataaaatggtagacaaaattctgccattttcaacgtatcggcagctaacgtcatcaatatttttgaataacctttcgttgatgttgagtaacaacataccgcttaccgatgcgttatcgataattcgcctcaatgccagccgctggctccgctggcatcttgacgtgatgatagacaacatggcaaaaggtacgcattacagcaaagcgttagattccgggctaatgggaacggaagaattattaaatattagcctgtatgcagaattaccctcttttaatgatgtgttacgttcagtatccgagcgctcaagagagcgtatacaggagtatattaaaaagctttctgggctattaaagaatctggcaacagtgattctggggggatgcgttatttgggtgtttaccgcccttttcgctctaatggatactttatcaaagatgacgaatggatga

SEQ ID NO: 393264 - DNA, 804 bp, Salmonella enterica
atgtttaaaatatattctttaagaacatgtgcattatttattatcgctactgtattatgcgtatccacaaatgcgttggcgcaatcgacctatggttttggttcggcaaagggccagtgcagtctctggaccatgctttttcccatctcattgcaacagcctgacgatgagccgatggattataaagtcaatatattctggattggcgctgattccattgtcggcatggataattactatgacttttatgaaacgccctataatcaattagcctggccctcaggcgccgctgcgggcaccagtacacctgtatgtaccgggcaggcagagtgtgttactgctggcataggtagcgttggtcgcggaatttccgcctatgacagtattaaaaaggaattccccaacgaaaccgtaaaagtgtatagcggcaagccggatggttcaggaaagctgacgtgggtttatctgccggtacgtaagatgaaattactccgcattgaagtttttaccccctataccgacaaggtcgcggcgcatgtaggttttgtagaaccactctggtttgaatatcgcgcgacgggcagcggtagccagttaaaattaaaaggatggggatcaacggcggccaaggagcaccagggggaaatcgtgttacccgatacatttgatccggtaaccaccatagatattcaggcctggtttggccgctgggatagcgcagcttaccagggcgttacgcctaaagcgcatatagacccggcgagcagcgctcaaattgaccgtattcctgcaagctgtaagtaa

SEQ ID NO: 393265 - DNA, 831 bp, Salmonella enterica
atgcgcatggaagcattgttcgctccgtattttccctggtttgcgctgggattaggattgctgattggtagctttctcaacgtagtcatttaccgcctgccggtaatgatgctccaggaaatggcggatgacgatacgccagatagccagtcaaagattaatctctggtggccgccatcacattgcccggtttgcaaaagcaatatcaagccctgggataatattccggtcatcagctggctattactgcgtggaaaatgccgaaactgcgcgtgtcatatcccatttcaatacccgttaagcgaagcattgattggcatcggcttctttttgctggcctgggtttattacccacactatagccttctacagattggttttctggcgctcttttttagcctcctctatacgctggcgatgatcgatttcaaaacctttttattgccggatagcctggtctttttgttgctgtgggcagggcttatcgcgtcagtaagaagtattatcccggtctcgccacgcgatagcgtaatgggcgctgcgtttatctggggctttacctggttaatggcgcagggatatgcctggatttcgggccgtgaagggtttggcaacggtgatgtgaaactctttgccgcctgcgcggtatgggtgggtaatgaaaacattgcgtatttgatgttggggtcggcagcattaggggcgattttctttttattgcgcaaaatgcgtcccgcacaggatgatcatgcgttcgccgcttacatcccctttgggccggcgattgctatcacagccttggtaattttgcacatggaggtgcttaattaa

SEQ ID NO: 393266 - DNA, 1320 bp, Salmonella enterica
atgtcatttttactcttgtcaggggcgctattaacgttacagccggtttgccctgttcaaccggagagccattttcccgtctatattgcgctaaaagagtctgttaaaagagatgatctgggctccagcgtggggctattgcaccccgtttcttcaaatatatgtagtgcagcgcaagggattactctatcttcgcttctggattaccagactttttttgatcgttacgtcgcgccgccagcgcatcgcctgatcgttccggacctggcgcatcgtttttgtttttcccaggatactatccgccagcggctttcagtgtggaattatacccgagcactgaatgttttcggtgatattcactgtagcgtgtcggaggatgcgttccaggcgcaggaatatgccgaggctcatgctttcagcgcttcttcactggttatagaagcaaaacaacctgtcgtttctgatgtgcaaaaaccatcagaaacagagacgccggcgcagtttgcagagctcaccgaagaggaaaaggtattgcagacagacgatgcggacatcggcagcagcatttttagcgtgatgaatgcgacggttcccacctcgagcgaaccgccgccgaagtggcgccctgtatttagccagaaatcgcacgccagccattttctcttccctttgactaaatcaatgtatgtgacatcaccatttggtctgcgttatcacccgattcttcactcgtttatacgtcatgagggaaccgatttccgtgcgccaaataatagcgaggtgatggcgattgccgatggcgaagtgacagaaaccggctatggtccggttaccggtttctatgtcacccttcgtcatgctgatggctggagtagccgttatctgcatttgaaccagactggggtgtcgaaaaaccagtatgtgtacaaagggaatgttattgggctttcaggtgataccggccgtgcaaatgggccgcatctgcacctggaagttagccataacaaccagatgatggatcccatgaaattgacctatgagcagcgttacacgagcgttccgatgggagagacgccgcctgtagaaaacacggccgctacgcctgcggctgaacctgttgatatgacgcccactattgcggtagtcgtcggggaagggaaagatcaacagtttggcgtgcgtatcggccataagatggagatgtatcatctccaggagcccatcgagacagaagaggggatatggcgcattgtgaacaaattcggtaaattcaaattacgtaaagtagaagataacaagataaaagccgatacgaagtaa

SEQ ID NO: 393267 - DNA, 1008 bp, Salmonella enterica
atgaaaaagatattttgcggtgttgttttatacattttttgcaactttagttatgcggccttgattgaggtaaacctggggggaacaatagtatttagcaatcgtagctatggtttacggtttccctgttccgccgtttgcagcctggcacctatagagtcaaattatacatatactggtaccggagactactatactattacgtcgacccttagtattcctgcaggattagaaattgcccgaatagggggggattatagtgtttcagttagccaagacattaatgtcacaagcgtaagtacttgtgatagcaagcccagaataccgagcgtattccctgtcccgtgtcaaagtaacaatccaatcgatgtagctattcccttaactattgataaaggcgcagtaatcacacataacactattagaataagagatacaagacaaagttggttgaatgcgagtagcagtgtaggttccatacaattaactggtgatatcactgcaagcaatattacttatgcaggcgcaatacgcgcttcactaaacaccactataggcggttatattaactcttccatatcgattaatggtcccactacaacaagtctttatggaacagccacctataacactggcattgaaacagcatcaacaatggacagtaaattaatacccactgcgcttgatgcttcctttgacggagatattattactcataacatagaaaaaaagtatattggaagcgctgaaaaactaaagattacatctatttatatttttagcgatgggaatcgatgcgatagttatgaatgcatgtataccagagaaaatgccaaagtaaatgttcaatgccctgataaacaagcagctttagagtttgaaccatcgccgtatgcaggtgattatattatgggtcgtgatggtcttataggcgctctgattggctcatggggaaatgtaaatatcgatacaacttgtgcaattaccgttttgataccctacgaataa

SEQ ID NO: 393268 - DNA, 342 bp, Salmonella enterica
atgtgggacgtagaaacaacggatgttttcgatgagtggtttgcagcgcaagccgatgttctaaaagaagatctgcttgcggcgatgatcattttatccgagcaaggcccgcagttggggaggccgtatgcagacacagtgaacggttccagcttttcgaacatgaaagaattacgcatacaacatcatggtaacccagtccgcgccttctttgcgtttgacccttctcgccatggcatcgtgttatgtgccggagataaaacagggttgaacgaaaagagattttatagagatatgatcaagctcgcggatgccgaataccgcaagcatctgaacaagtaa

SEQ ID NO: 393269 - DNA, 705 bp, Salmonella enterica
atgtatctttctcgtattcaactccggtttaataatttgcgaccggagatgttggaaaagtggaattcagccaggccttatgccagccaccagtggttatggcaactctttccggaacaggaatcgcgtcagtttttatttcgtgaggaggcgcagggcggtttttttatgctctcggccatcccgccgctggctcagcatcccttgtttcttgtcgaaaccaaaccatttaatccgcaactgacaaacggtgttgtgcttgattttcaactgcgcgctaacccggtgataacccgcaacggcaaacgcagtgacgtgatgatggacgcgaaatatcaggccaaagcgaagggcgtagtgcaagaaggatggtgggagttacagcagcaatccgcacagatttggctggaaaaacaagggcagcagcatggtttccgtttacttacggaagtgactgatgatttcgccctgtgggctggcgcagaatatagcgaaaggcaggcgcgttgtggatgcgtacaagcatatcaacaacatcgttttgtccgtaacgatcaggaaaagccgattgttttcagtagcgttgattttagtggaacgctttgtattaccgatgccccacagtttgaaaaggctttgttttctggattaggaaaaagtaaagcgctgggctgcggaatgctgatggtaaaaaggaaacgctga

SEQ ID NO: 393270 - DNA, 654 bp, Salmonella enterica
atgttccattatggaaaatgtgttgttcgtgcgttatgtgcttcactggtttgctgttcgctgtcgggctgtatttcatttgggctgatgcttgccaccaataaaagcgataattttcatgagcctacctggaagtcggatatcgttaccgcgctttccttaggtaaagatagcaacgggaaaacgggctgggtgttcgttggcaaacattttgactacctactgacccagggtggcgacaatgtggtgaagctgttaaaagatgcgactattcgccgggataaaatgcgggtgcaggatggtgttaagttcctgattgatacagacaagaaggagtttacaggggaagtcgatttgacttacgcctgggtggatgagaaagacaaactggcggcgttaggttatggatttacttgtgcagatagcgcggtaaattgcatgctatcagtcacgggcctgaaggggacgatccatcagaaaaataaagatcagagtgctgcacagcagctatcgttctaccatcctttcaccgttgagttctatcagtatcagcacagtatgtccggggcaaaattaggcagagtgttgctgccggtaaccctggcgctggatattgtcactatgccgctacagctgctgatattcagtgattaa

SEQ ID NO: 393271 - DNA, 246 bp, Salmonella enterica
atgcttagggtcaccaccatagtaggtggcgcgtcattcacagcgctcatacccggcggcgacctgcgccttagccagacgactcccgcatcttttcctccatgcggcgctacggcgtgccatgttcttcccccagataaaacagtaatcacaggcaatattgcgctgataaataacagtttttctatccaacaaaaagagtgccgcatgcaactctccgttatgacgcctgaaaatatttggtga

SEQ ID NO: 393272 - DNA, 1992 bp, Salmonella enterica
atgcagataataagtggcgaaactaatataaatgatgttggcataaaaaagagatttaaaaattgcgagccatttcagtgtattgttgagctagcatggaatggatttgatgccaaagctcggaatgtcactattgaggtgcgtagaactgatttaggcggcctgtcatcagtttatattcttgatgatggtgatggtatagattttaataactttgatttgaactttaatagatttgatgattcactaaaaaaagataatattgaattacatggttcacaaggaagaggaaggcttgcatttcataagctcagtcgtcaagctatatggtttactaaatataacgatataaatgctaaaatagaaattgatgatgctgatcttaaaaattatcaagcttatattaatattccgtatcaagagcagcatacaacattaattggacaaaaaagtggcacatgtgtcatgttgaatcattttcataatgatttaccaagtgataatgaaataataaaaagattacagagtgagttttgctgtcacttagcactgaacgagcagataacgttatcttataatggggttgttataacggcaccagaacatgattctcactcattagaaaaagaatttgatggaagtccattttcaatcaaggctctccgatgggatgaaaaaccatctaaagaaagatcgtatgtatatttggtaaattcgcagggtaaaaaagttcacgaagttccaagtaaatttaatcagaaaaaagatttctacctttctatattcgtcagttctgactgggctgataattttagtaataaaggcgatgatatattttcagatgctaagtataatgctgactcaaaagtttggaaagatgtcataaaatttgtttggggattatcaaaaaagatatatgatgatttccttcaaaagaaaattgacgaaactttagagcgttatcaacaagagggagtattcccttcttatagcgaatactcagatcctaaatatgctgagtggcgcttgaataatatcaaggctatcgttcgtgatatatatatagccgagccagccatgctcgataatttgaatacaaaacaaagaaaggtttttgtaaggctattagataaactatcttcatcaaataataatgaggatttatttaatatacttgaaagcgttttagatttgagtaaagagggtttatcaaaactttctaatcaattaagaattacaaaactcgataatataattagcgcgattgaagaactacaaaaaagaaggcttgtagtggacaagcttcgttatttaatggatcatcattataaggaaataagagagactccagatcttcaaaaaataattgaaaacaatacatggttgttcggtgaacgctatgaaactatcggggctgaggaagatacatttaccaaaatagcattagaattaaggaatagtgttaaacatatcaacgatattgatgaagatgatgttgagaatgaggcagaattagctggttcaaaacggcagacagatctatttttagccagaaagtacccagcccttgattccaatggtaacccatattacaaatgcattatcattgagataaaaagaccaagtatttcattaaatataaaacatctaagacagcttgatgattatgcggcaataattcaaagacatccggggtttagtagtcaaaatttgcattttgaactcatacttataggtcgtaaaatatctaaagatagtttcgaaatagaaagtagattgaattcacatatacaaaaaggtgatatgggattagttggggatgatcctaggatgaagcgctacgttaaaaactggtataccatttttgatggcttcgagctcactaatagatttatgcttgataaattgaaattagaaagagatagcttagaacttggtgaaatatgttcgaaagaaattgtttcagaattacaaggtaacttaagtaaataa

SEQ ID NO: 393273 - DNA, 1140 bp, Salmonella enterica
atgtacaatatagttttagacacaaatattcttcatcaagaaggtttacactccaatgacatgagtattttgaaaaatcttgttgatgctaaattagtttgtgttcatataccatctatcatcgctcaagaatttattacaaaaagaatcacttctgtaaaggaagaaaatctaaaaataataaaagcccttgaagcaatagagaaagaaggtcgcagaatcaatacagtattgtacggtgagcgtcagaattttatagatcaaattgggataattaatgaaagcatagaagaaagagccaatctttcttttgaaaaatgggttaaagactttaaagttaatatacttcaccctcaacaagaaagcttttcacaagtgtttaatgattatttttctggagagggtgtgtttaggcaagtcaaggctagggatgatattccagatgcttttatcaacatttgtctagagtcgctaatcgaatctgtaggtcgtttaatcgttataattaaagatgagagattaaaaaagcacttagataaaaacacagaaattaaaacattaacaggtttaagagagttctttaacgaaaatggtttagagaaaacattagcgaacgatagaattactaagtttattctttcagaagaatttagccataatttagttgcgtttttagatgctgaacctcactactttgactattttaatgaagaaagcgattctgttcacggcgatactctaattggagtcagggcctataacattaatattgaaatcgaatcatacgattcgattgaaaacctacaattatcggacgtacgagaaatatccccgaataaattttctgctatctgttcattcacagtagattcaagtataggatatgttactgattacgggagttatttggatgtcaccaaaatgcctgaccgaaatccagattgttggagtgttaatggtgatggatggtgtgatattatagaagcagcacgactcaaatttcttggcgatttaacaattgaattttccaaagagtatgatcagattgataaaattaatatcattaatgaattatttgaaaaaggtattattatgagcatgaatatttttaattcacaaatcgaagaaatgatacagtaa

SEQ ID NO: 393274 - DNA, 162 bp, Salmonella enterica
atgctgccagcaagtctctctgagagaaagattcgtgttatacgctcagctcagtttgcagtttatgtaacagcgcaatatgctttgtatccggcccatgccgcctacaagctgctgactgagtgcctctggctgtgccacgggcgtaggacaattggttaa

SEQ ID NO: 393275 - DNA, 885 bp, Salmonella enterica
atggcgaaacgggaaaactataacgatctctatctgtttatgcaggtcgtgcgagaagggagttttaccgccgccgcgcagaggcttggcctggcgcagtcaggaattagccgtgcagtgcgcgagctggaagaacgactgggcgtgcagcttctggtgcgcaccacacgcaagttatcgctcactcatgccggcgagttgctctatcgaaccgtcgaatctggatttgacgccttagatatggggcttgccacgctggcccattatcgccatacaccatcgggtacggtccgtattaatgccagccagcacgccattgataaagtgctcctgcctaagctggcggtgtttaaacaacgctacccagatattcggctggagctcatcagcgaaagccggtttgtcgatattattgctgagcgcttcgatgccggtatacgtctgggctcggaagtgggtagcggtatggtcgcggtgcgcatttcgcccgatatggagatggccgttgtcggcacgcccgagcactttcgtcgctatggatttccgcaaacccccaccgatttagtggttcatccctgcatcgcttaccagttcggcgacggcagcctatatgcatgggaactcaatcaggacggtaaaaagatcacccatcaacctcagggacaatgggcctttgctgatagctatatggaagccaaagccgccaggctaggtctgggactagcttatgttccggaggaattggtgtctgatgatatagaacagggggcgctgatcagagttttgcaatgctacagccagcgcctggaggggtcatatatctattatccgcaccgcaatgtgtcacccgctctacgagcggttatcgatacattgagaatttaa

SEQ ID NO: 393276 - DNA, 1059 bp, Salmonella enterica
atgagttacgctgatacaaccaatccgaacgcgcccgtttcgctggtcgagaaatgggataaaacttttgctgagagcacgaaagttgatcatcgtaaggtgacctttccgaaccgctacgggatcaccttagtcggggatctctacatcccgaaggatcgtggtgatcgcaagctggcagctattgctgttagcggccccttcggggcggtgaaagagcaatccagcggcctgtatgcgcagacgctggctgaacagggatttatcactctggctttcgacccttcatacacgggcgaaagcggcggttacccgcgcaacgtcgcatctccggatatcaacaccgaggatttcagtgcggcggttgatttcttaggcctgcaaaaagaggtggatcgcaaccgtatcgggctgctcggtatctgcggatggggcggcatggccttaaacgacgccgcgatggatacgcgtgtcagggcggtggcgaccagcgtgatgtatgacatgagccgtgcgatggggcatggcgtgggcgatggcaaagaccgctataccactgccaatcgtcgtgccgtattgcagtatctgaacacgcagcgctggaaggatgcggaaaatggcgctttcgcgccaggcgggcatgacatttatgttgatgagaagggcaacgtcaccgcttccgatcgtattctgccggaaactctgcccgcaaatcctaatccggtattgaaagagttctttgattattaccgcatgccgcgtggtttccatgcgcgttcggtcaactcaactggtgcatggaatgcaaccatgccgctgtcatttatgaatatgccgctgctgagttacgccaatgaagttactatccctacactcatcgtgaccggcgaaaaagcccattcacgctattttgctgaagatgcctttaaggcgatcggcagcaaagcgaaagagttagtgattgtccccggggcaaaccatgttgatctgtacgacaacgttgcgggtaagatcccatttgccaaatttgagcaatttttcaaggcaagcttaagataa

SEQ ID NO: 393277 - DNA, 1194 bp, Salmonella enterica
atgtccactgtaagtctaaaaccatcatacgaaaaaacgcatgcatactggagcggcgtatttgccatgacgctttgcgtgtttgtgctgatcgcttctgagtttatgccagtcagcctgcttacgctcattgcccgtgatttgcacgttaccgaagggctggcaggacaaggaattgccgtctctggtacgctggcggtgctgaccagtttgactatctcccatattgtcggagacctgaatcgtaaatatcttctgctggggctgacggtcttaatggccatatcgggaatagttatcgccatagcgcctgactatccggtttatatgctggggagggctctgattggcgtcgtcatcggagggttctggtcaatgtcggctgcaaccgccattcggctcgtgccgccgcaccaggttccccgcgcactggcaatttttaacggcggcaacgcgctggctaccgttgtggctgcgccgcttggtagctatctggggacaaccatcggttggcgtggggcctttttatgtctagtcccccttgcgatagctgcgttcatctggcaatgggtcagcctgcctccgatggaaaacgataaaacacaaaaaccacagggatctgtgcttcgtctgttcagcgtcgccatcgtaccaacgggactgctggcctgcgggctcttctttatgggacagtttgctttatttacctacgtgcgcccctttcaggagagcgtcaccagagtgggaccttctgatctttctctgattttgctcgcaataggcgtagcaggttttgtcggcacaatgatcgtctcaacattcctgaacgccatattttataagaccttaatcatgatcccgttgcttatggcagcgattaccggtgcgttactgctggtcgggtaccacatctgggctgttgccgttttacttagcctgtgggggctacttgcgacggctgcgccaacggggtggtggacatggatagcacgcgcgttacccgaagatgcagagacgggggggggcctcatggttgcggtgattcagctatctattgcacttggttcaacggctggaggtctggtattcgacagtctgggatggagaagtgcttttggtttaagtggtttgttacttctgggggcggtagcgatgacatatgccacatcccgtcaagacaggaagacgccgtag

SEQ ID NO: 393278 - DNA, 990 bp, Salmonella enterica
atgttatttaaaaaactaattgtctattcgtttttaattaccccggttattgcttccgccagtagtatcactgaaacccaggaacggatggcaattgaacaacaagctattggctatacggtaagcggagactgggcaaaactggatgccatgattcaggaatataataacgatttccccaccaccagcggcggtacgcataaactgattgttgcatggggagggatttatgggctctattcgggagacgtttctgataaaggcattagcgatgtcgcaaaacagtggcttaaagtaagaccaaactccacaggcgcaagaatgctgcaagccaccgtgtttaatgctaaagcgagtcatttgcgcggtgagggcgcagccagcacggtcgcctccgatgtctggccaaaatataccaggctgatggagcaggaaaaagcatttctgctgaagaacaaagacattgctgacaaggatgcaacctggtatcaggaaatggaagttgtcgcacgtaatctcggcgataaagaactgctctatagtactctggaagaaggtagtaaaaaatatcccacctaccagaatatttatttacaggcaatggaaggacgcttgcctaaatggggcggttcgcctgaagaggtcgaaaagattgcccgtatggcggctgagaaaaataaagcacagtcaggtctctcttattactcttatatctggtacaacgcgttcaatttccaacccgagttgatgagcctactatataatcgtaaaatagtgtcatgggatgatatgctacaaggcttacgcgatcgctacaaacagttcccttcgtcacgcacgcttaataacatattaatctcaacctgtattgctcatgacaaaaaagcctttatgaaggcggacagtatgattcagggagcaattgaacccgatatctggccgcaaggagtggaatatcaacagtgcaaaaaatttgttaataataactaa

SEQ ID NO: 393279 - DNA, 405 bp, Salmonella enterica
atggcactcactgataccgctatccgcaagctcagacccactgacaaacccttcaaactcggcgacagtgccagactgtacctgctgatcaaacccaacgactcaaaactctggtacatgaagtaccgcattgacgggaaagagaagaagcaggcctttggcccctacccggatgtctctctgtttaaggcgcgtcagcaagaaaaaggagaaaaagatcgataccgagggggcatgacgccccggagaattcctgctctggcaggcagcccgtaccgcgtactggctgaaactccctatacctcaacaaactgccactccggcgtgaaggtatcgttctggcgcagccaaaaagcatacgccggagactgtgtgtttttcaatatcaggggggtgtatgagtaa

SEQ ID NO: 393280 - DNA, 984 bp, Salmonella enterica
atgagtgataacagtgcattaccagatattgacaataacgcgcttgccgaactggacaaagtcaaaattatgggccgggtggcggtggaggcccgtattgcactgggggtagaactctttattgcccctccggggcaagagaaaacgccaaagatgtatcaggatatgctcacctcactggaagcctactaccagcactttaaaccgcatctgaactgttatctgccgcccaacagccgcagtaaccggatgattaaaggcgatccggtacctgtctggcgcaaagcgctggaaaatgtcgatgtggattatggatttagcttcgaacttttttacgatgacacttgcgaacggcagtccttcaacgcctctccctggaggatgggttttttgggagacatccctgaacattcagaactatcctttattcagggctccatgccggtttgtaatgatgagggggaaaaccacttttccaccctgtttgccatgacgctggcctggtgtgaacgccatcagccggttcatggatcagccggattctgctatgccctctgcacaggaattgagccacaagctcgctacacctgggcctccatgcagcgttttcctggtattgatttttttgacccgatcaatttttcacttgaagttgaagaaaattataaccggataaaaggggtaaactggctgacgatattaggagatgtgctggtagcggaactgggtggagtggaaacactaacttgtgcgctggagccggaatgtcgcgttcatccttatcgtggcggggtcatcattatcgccgggccggtaccgcagaccggtgatctctataccgggtttacccctcagcgttacaagaaagtagccgcagtgacgcgccctatacgttttgataattaccgcagaccttttctggagctaccagaacagttcgattccatggaggctacgttgaaatggataagacgctttgattaa

SEQ ID NO: 393281 - DNA, 1065 bp, Salmonella enterica
atgctgacaatcaatatcaatggattaaccctgtgccacaaaggcagtaacggcatcagtcataatacgttgccggatgtgtgcaaaacaccgcctttcggtgtgccagtggcatatgaaaatgaagcctgttcggctgacctggtgaaaggcacggtcagtgtgtttgccgacggaggcaacatgatagccaatatgggttcgcagtttgcccgtagtgttttcgatgagcccggcagtatggggggcgtgctttccgggacaaacaaagcagaaacagactggatatctcattcgtttgatgtgttctttgagaaaaaaccagcctgtcgattaacagataaactgtttatgaatcatcgcaatacagtgaatatggcaggattatgccaggaaagcctgagtggtgaggaactggatgacataatctgtaaacatgcgctggattgttacactacacaccgcaataacctgaagtcccagaatccggagggagaattttttacctatcaaaaatgcctggaggacaagcttcgggaagaagcctataacggcaggtatcccagtgatgaatgtaaaatctggacagaagtgcattttgataaagcccttgacctgatttattcagggactcaggaaggtgcccccagcgcaaggtattacactcccaaagggggccggaggatggacattattcagcttaaccgggacggcaaaccaagacgtctgattgatgttaagtttccgactgaccgggaattaacgaatgaccgtgccagagattacaggaagatggcaaaaaaactcgactcagaatatgacacgtttaacgtaaagaaacggtgccccggctggccaaaaacctgcccgaatgaaaaaccccaggagcagccgcagacagagacgcagccggaagagaaaagcgcttctgccgctcagtatgccatcctcggtggactggtggtggtggctgttattgccacgctgtgcccgtttgacggtccggcaggagatattgtgacctggggagcagtcagcgcccaggcgggcagcatgacattttaa

SEQ ID NO: 393282 - DNA, 387 bp, Salmonella enterica
atggcggcaaggatgattcaggcaggttataaggtcgcctactgtgctgaagcggtggtaagacactcccataattataccccgcgagaagagtttcaacgatattttgatactggtgtattccatgcttgtaccccgtggattcagcgtgactttggcggagcaagtggtgagggtttccgttttgtaaaatcagagattcagttcctgcttaaaaatgcaccgttctggattccaagagctttgttaacaacgtttgctaaatttctgggttacaaattaggcaagcaatggcaatgtttaccgttgtccatatgtcgctatttaagcatgtacaagagttattggaataatatccaacgttcttcgtcgaaagagataaaataa

SEQ ID NO: 393283 - DNA, 411 bp, Salmonella enterica
gtgccccatgctgatgtagcgctcatctgtgaactcgacgatcaatggagttttattggcagcaaggcccgccagcactggctctggtacacgtacaacacgaaaacgggaggggggctggcctatacgtttgggccacgtaccgatgaaacctgtcgtgaattgcaggcactgctcaccccctttaagatcggaatgctgaccacagatgattgggggagctatgccagagagcttccgaaagagaagtacctgaccgacaagatttttactcagcgcattgagcgcaataatctgacattgagaacccgtatcaaacggttagcccgcaaaacgctctgcttttcacgctctgttgagtttcatgaaaaagtcatcgaagccttcatcgaaaaatatatgttctactaa

SEQ ID NO: 393284 - DNA, 189 bp, Salmonella enterica
atggagtggggctgggaatacacctcctggaattcagttgatggttctgagcattggttaatctatgcacataagcccaactggcaaaacattcccaataaaatccctgaagttaaaaactataccggctgggatcatatgttctgtgatctggaggtggggatgccgatatccgggaaaagtaagtaa

SEQ ID NO: 393285 - DNA, 1371 bp, Salmonella enterica
atgctgcttacgactaattctcatgtatttttaccagtgaaattatctactcttgcggcagcattaatgttgtgtagccccttttcttttgcagaagcccacgttgcggatgatgaattcaatattgatgcgttacgttttgactcaccgatagaaaattcggatgtgatccgtacatttttacaggataatgcgctgatacctggggtttatcttacaacggtatatttcaacaataattttgttgaaaaaaagaatatcacctatgtatttaataaaacccatagcactttagttccggtattaaataaatcggaattagaggcctatggagtaaatgtcgccaaattaccgttgatgaaaaatgttgcgaatgatgccaccatcgaagacattggacattacattgaaaacgcgtcatggacattttcgacgcaacaacagcgtttggatattcgtgtaccccaaattgcggttaaccctaaaattcaagggtatattgcgccttcacgttgggatgacgggattcccgcggcattgttgggatattactatagcggctcaaaaacgcattatcagttttcggggacaacaaaccaaaattatctgaatttaaacagcggccttaattggggaccatggcgtatacgaaataatggtaactaccagagtgggcaagggtgggagaatatctccagctatattcagcgtgatattaaaactttacgcagccaactgacgctcggtgacagctttaccgctggcgatatttttgacagcctacaatttcgtggcgttcgcctgcaaacggacacggctatgttgccatatagtcagcagggatttgctccggttattcgcggaatcgctcaaagcgatgccaaagtgacgatcaagcaaaacggttataccgtctatcaaacctatgtgagtgccggggcgtttgaaattactgatattccccaggtctcatcgggaagtgattttgatgtcaccattactgaagccgatggtagcgaaagaagttttgtccaaacgtcttcctcattgcccgttatgcagcgtgaggggcattacaatacagtgtcgccgcaggacactatcaaagtaacgataattccgatgagcctaatctggccgaggggcaacttatttatggattgccgtatggttttacggtttatggcggggtactggggagcgacttttaccgttctggcgcgctggggtttggcgttgatttacataatttgggcgcattctcatttgatgcaacgtcggcgagaagcgagatccaggataaagtatggcaaggcatgtcttatcgggcgcaatatgcaaagaatattgattccaccaatacgaatctga

SEQ ID NO: 393286 - DNA, 1020 bp, Salmonella enterica
atgaaagcgataacgctgcctttgataaaatcaattctgatattatttattttaatatggtcgcatacgagcaaggctggatgttggtattctcagggcagtgtatccagctataccgtgaccgtcccaacgctgaatgtccaacgggatgtgccggcaggcgccatactatgggatagcggttatttaacggctcccgtctctaatagtatttattgtgatgtcgtggccccgatttggcgtggctattatgactctacgctggttccggtcaacgtgctggataatcacggtatctaccaaaccagtaacccaggtatcgcaatacgcatctggtggctgtcatattgggatgactctcccggcgctctggggcccagcgatgcgcgtatatttgagtccccaaaaactcaggagggaagctcaacctgtaataaatgtgagtaccggcatattagcggcaggtttgatgtccagcttattgctaccggtaaaccaataaccgatgagccattacagcttgcgcgattcaccgctgcccgaacttatgatacggttgatcaaattcgcattaattttaccgatgccgatgtagtggtaaatagcgccagctgtgtattgaacagtaaaaatatttcggtcgatttagggaagcatatcgaaggttttcatttggtgcatcctggggataccagcgcgccggtggggttcaatattaatttaacctgtgatgccaacacgaatgtcaatgtgttattttctggaacaacggtatcaggagacgcaaccactctggcgttgaataatctttctgctccaacgtccgcacaaggcgttggtgtacaaattttatatcgtgatcaaccgattacttttggcgaattagtgcccaccgtcaaaagttctgcggagagcggcggacttgttctgccctttactgcgcagatcctgcgtttgaacgaggcgttaaaagcgggagacgttgaggcgacggcgacgtttgagatgatttatcgctaa

SEQ ID NO: 393287 - DNA, 249 bp, Salmonella enterica
atgggcagcattgtcgtcaaagtccgtcagaatggcagcgtaatcaataaggccgtcttcctggtgctgggtatcaacatcgaaggccagaaagaattactgggtatatggctggtcgaaaatgaaggcgcaaagttctggctgagtgtgttgacgaagctgaaaaagtgtagccttcagggcatcctgaacgcttgtgtgtacggtctgaagggtttcccggatgcgataaatagtgtttacccgtag

SEQ ID NO: 393288 - DNA, 363 bp, Salmonella enterica
atggcgtgtaacagcctgaaatacatgtcctggaaggactacaaagtcgtcgccagcggactgaagactctttatcaggccccgaccgaagaggcgacactgctggcgttggatgcgttcgcaaaagtacaaatcatcaaaagctggcctacgcacttggaaaacctgaatgcgctcttcagttatccaccggacatcggcaaggccatcatttggctgggatcccaaaaaatgccgggaactaaaacgggtctatttacagtccgacacgcttcctctgtggcattcttctttggcaatgatggtaagttacgtcttttttctaataaacctgaagagatatatataatatatgcgctttag

SEQ ID NO: 393289 - DNA, 252 bp, Salmonella enterica
atgcgtacaattagttacagcgaagcccgacaaaacctgtctgcgacaatggtcaaagcggttgaagaccatgcgcctattcttattacccggcaaaatggcgaggcctgcgttcttatgtcattggaggagtataattctctggaagaaaccgcctatcttctacgttccccggcgaatgcaagaaggctgatggactcaatcgaaagcctgaagtcaggacggggcgttgagaaggacatcattgagtga

SEQ ID NO: 393290 - DNA, 255 bp, Salmonella enterica
gtgaaactcccctggtctgaagaagcatgggaggattatctgtactggcaggaaacagataagcgtatggtaaaaaaaatcaatgaattaattaaagatatccgcagaacgccttttgaaggcaaagggaaacctgagccgttaaaatacaatctctccggattttggtcacggcgtataacagaagagcatcgtctggtctatgcgttaaccgacgatgcgcttcttattgcagcctgccgatatcattattga

SEQ ID NO: 393291 - DNA, 285 bp, Salmonella enterica
atgcccacagcagccagactcggcgataagggaacccagcacgacggttattgcgagaccgtgattattgcgggttctcccacggtatttattgacggattacccgccgcccggatgggggacccgctgacaccccacgacaaacctgaacacccgccccatccgcgtaagatagcgggcggttccgccacggtatttattgacggcctgccagccgccagaaccggtgatgcggtggactgcggcggtgtggttatcggcagtggtacggtgaatacaggctga

SEQ ID NO: 393292 - DNA, 480 bp, Salmonella enterica
atgacgatcgcgtatattgcgcttggcagtaatctggcctctccgctggagcaggtcaatgccgccctgaaggctatcgccgatattcccgatagccgtatcgtcgcggtttcttcgttttaccgaacgccgccgcttggtccacaggatcagcctgactacctgaacgccgccgtggcgctggataccgctctcgcccccgaagaattgcttaatcatacccagcgtattgaacgacagcagggccgcgagcgcaaagcggaacgctggggaccgcgcacgctggatctcgatatcatgctgtttggcgatagcatcataaacagcgagcgcctgaccgttccccactacgatatgaaaaaccgcggctttatgctgtggccgctgtttgagattgccccggatctgatttttcctgatgacaaaaaatcactcgctggtcttatcactaccgtctcaccctgtcctgcacgctggtag

SEQ ID NO: 393293 - DNA, 855 bp, Salmonella enterica
gtgttgattatcgaaactctgccgctgctacgtcagcacatgcgtcgcctgcggcaggaaggaaaacgcgttgcgctggttccgacgatgggcaacctacacgatggccacatgaagctggtagatgaggcaaaagccagcgcagacgtcgtggccgtcagtattttcgtcaacccaatgcagttcgaccgcccggacgatctggcgcgctacccgcgcacgctgcaagaggattgcgaaaaattgaataaacgcaaagtggattttgtctttgcgccagcgccggatcaaatttacccgcatggtaccgaagggcacacctacgttgatgtacccgggctttccaccatgctcgaaggcgccagccgcccgggccacttccgtggtgtctcaaccatcgtcagcaaactgttcaaccttgtacagcccgacgtcgcctgcttcggtgagaaagatttccagcaactggcgctgatccgcaaaatggtcgccgatatggggtatgacatcgaaattattggcgtaccgattattcgtgccaaagacggtctggctcttagctcacgcaacggatacctgacggcagagcagcgtaaaatcgcccccggtctctacagcgtgttgagcagcgttggtgagaaattacaggctggcgagcgtaatctcgaagagattatcaccctggccgaaaatgcgttgaatgaaaaaggcttccgcgccgatgatattcaaattcgcgatgctgacacattgcacgaactcacagataccagccagcgggcggttatcctgatggcggcatggctcggacaggcgcgtctgattgacaataagattgttacattaacgcagtag

SEQ ID NO: 393294 - DNA, 618 bp, Salmonella enterica
atgtcttttaaaaaatatagtcttgctgcggctgtcgttttggcaatgaccgcaggttctgcgatggcggacgataccgctgcggcccttccagatacaggtactattaccttccacggtctggtcactaataacacctgtaaaatctccctcgataataaaatcgatcaggacggtaatgacttcgacgttaccctgggcaccgtcgaagtgaaagatttcgcaactcagttggataccgcgagtacgctgggtgagaagaactttactctgaacctgaccgaatgcgcaggcgatacgctgactgctgcaactgcgcagtttgactcctgggctggctccagctccacgtccaatggcatgctggtaccgccgtcaaacgtagaaggcgcggctgccaacgtaaacctggtactgtctaacaacggcaatggcaacactgaccaggtaaaaattgaccaggtcaataacctccaggttgccacgatcaaaaatggcgcggccgatctgttctaccgtgtagcctatatccagggccagggctgggatgctacgaccaatccggtaagcgcaggtgtcgttcaggcgcaggttgcttttaccattgcttatcagtaa

SEQ ID NO: 393295 - DNA, 744 bp, Salmonella enterica
atgaccaatacagtgttttataagggattaaaagctacctgctttgccgcagcgttttgcgcatcgttccaggccagcgccgatatcgttatttcagggacgcgtattgtctatccgcaatcctccaaagacgtgattgttaacctcgacaaccggggtaataaaccgctgctggtgcaaacctggttggatgatggacgtgacggcaccaatccacaagaactgaagctgccgtttgtcatcacgccgccagtttcacgcattgacccacagaaaggccagtcggtacgcataacgtatatgggcagcgcattgccgcaggatcgtgaatcgctgttctggtttaacgttttggaaattccaccaaaagccaaagccaaagagggtgaaagccttaaccaacttcagcttgcattccgcacccgcatcaagctttttttccgcccggatggcttaaaaggcacgcctggcaatgcggctaagcaggttaaatggtcacagaaaaaagagggcaatacgctttctctggtcgcccaaaatgacgcgccttacaatgtttctatttccagcgtcacgtttaccgccagcggtaaaacttatcaagtagaaagtaaatcaattcagccatttagcaatatcagcatgccggttaagggattaacaaataccactagcggtaccgtattgtattacaccattaatgataatggcggcacagaaaaacgcgaagccaaaattaactaa

SEQ ID NO: 393296 - DNA, 2598 bp, Salmonella enterica
atgttttttaaacgttcgttattatatcttgctatcagtgccgcgctccccttctctgtttacgccgcaggaaccgcgacgacggaagccgtgccagaaacggaagagcccgtagagtttaacgatcaatttttattcaatagcggcacaagtattgacgtcagccgttttgcgaatggcaacccaatattagctggcacctggcgggttaaggttaatcttaataataatttaaaaataacgtccgaagtaacatttaaagaaaatggcactcctcgcgccagcgcctgcattacgccattattattagcgcagacaggcgtcaatactgaaaccattaatgacgattacgaaatcgacgacaatacatcttgcgtcgatatcaagaaatattatgctggtgcgtccgcaaattatgacacgggcaaacagacgctcgaactgaactttccacaaatttatatcctgaaacgccccgcaggttacgttgatccctcgctgtgggaagatggcgtcccggccgcgcttatttcttatgatataaacgcctggcatagcgaaaatgctggcagcacttcggacaccggctatatcggattacgctacggcttaaacctgggaccgtggcgtttacgctcgcgcggcaacctgaactgggataaagacagcggcagtgattacaacagtcaggatatttatttacaacgtgatattacctcgctgagcgcacagatggtgctgggcgacacctacacccgaggcgatgcattcgactcctttagcctgcgcggcgcacgaatctataatgacgatcgcatgctgccgatgggctccagtaactatgcgccggtgatccgtggcgtggcgaatagcaacgctaaagtcagcgtcatgcaaagcggcaataaaatctacgaaaccaccgtaccgcctggcgcctttgagattaacgatcttagcaccaccggctacggcaacgatctgctggtcaccgttgaagaggccgacggcagcaagcgcacattcaccgtgccgttttcttctgtcacccaaatgctgcgaccgggcgccacgcgctgggacatcggcgcgggtgaacttaataacgattcgcttatcgacaaaccgcaggtgggctacgcccagttttattacggcctgaataatacctttaccggctatattggcgcgcaatataccgatatgaatttctacgctgggctgcttgggctggcgatgaatacccgcatcggcgcatttgcgttcgacattacccagtctcatgccaatgtcgacgacctgggtacgctcacgggtcaaagctatcgactgacctacagcaaagtcgtagaggcgacggacacgtcctttaacgtggcggcctatcgcttttcaaccgaggattatctgagcctcaatgacgccgcctcattgcaggacggtatcaagcatcggaagtacgagaacaagtcttatgactccagtgccgatctttatgatgattaccagcgcaccaaaaaccaggtgcagatcagtattaaccagcccatagagacgagcgaggcctcttacggttctctttatattagcggtacctggcaagactactggaacggcgaaagctctacctccgattacagtatgggatataacaacagctttacctatggcagttacagcctgtcgctgcaacgctcctatgaccagaacggcacgaaagatgacagcatctatttgagcgtcagcattccgctcagcgtcttttctaatagcgatacgaaatcaggcggtttcaacaatatcaatatgggcctgcgctccgatatgaagggcggcaccagctttaactccacggcaagcggcaacacccagaataacgacatgagttattccgttagcgcctcatccagcggcggcaattacggcaatcttaatcaaataagcggatttggctctctgaacagcagctacggcccgctgggggtttccgcttctttcggcgacgacaacagtaagcaatattccgcgacttacagcggcgggatggtgctgcattccggcggcatcgctttcgcgccggggagtatcggcgataccgatgcgctggcgctaatcaaagccagcggcgcgaaaggcgcgggggtcggttatggcaacagtgaaatcggcagttccggctacggcatcatgccgtacatgtcggcctaccgtgaaaaccgggtatcgctggatatcagtaccctggaaaatgatgttgaagttaaaaacaccagcgcggttaccgttccacgcagcggcgcggtggtgctggtgaactttgaaaccgatgaaggacgggcactcattctggaattacaacgtagcgataaaggctttattccgttaggcgccgatgtattgaatgaaaaaaatgagtctatcggcaccgtaggacaagcggggcaggcttatgtccgcggggttaacgatgaaggcgtgctacgcgttgtctggggaagcgggaaagaaagtacctgtaccgttcactataaagtcaccgacaacgtcactaaagcgggattaatccaggtactgagtaaccaggtatgccagctgtaa

SEQ ID NO: 393297 - DNA, 591 bp, Salmonella enterica
atgaaaaaaaatatgttcagtctgccgattgccgctctcatagcgatggcaagttcagggacggcattcgctaccaatctggacgtccgttttaccgctaacgtgagagaaaccacctgcgatatgaaactggtgggcggtacgggttcggacaccagccaaacgctccagattggcgctgacagaggcgtgcgcatagaagacttcggcacctcgaaaaatcgggccgggaacgctggcgcaagagccagtttccagttgaaaattgtcgagtgtccgccctcgcttcagtcgttaaaaaccacgatatccggcacgccctccggttatttaaaagatgcgttaattaacagcattaaaaaagaaaacggcggcgcggacttctctgcggtgtccatcgctcgcgcgtcaaaacccgatgagccgttcctgatcggctcgacggatgacagcaagcgtctggtctggtcacaagaggaaatcagtgttggcgaagtccctttggtcgctattttacaggcaactcaggatggactggtgacgacaggaacgtttgaagcgacagctacctttaacttctactacgaataa

SEQ ID NO: 393298 - DNA, 576 bp, Salmonella enterica
atgaaatttatccctgttttattcgccttatccgtttctgccattttattttcaggaacggccagcgccatcaccgggacagaatctgtgcagatgaagttcacttctaccgtagtgaccggaacctgcaccgcgaaactcgttaatagcgcgggtgccgaagcctcagaaatcccttttggcgatgtcttccgttccgatttgaccaggaaaagccgcgtcgaaccgctgaaaattatattcagtaattgttcgggggtcaccacggcaaaaatcttcgcgcaacccggtgctggcaacaattgctcaggtagtggtagcgatgacgctgctttttctggtggacacggcagcggcgtcggttttgaagtctggtcaggcagcgttgataccggcgttctgctcaattgcggtagcgcgggaaatccagccaccaccgaggatgtgacgattaccaacggtacgggggaattaccgatgaactcccgcatcgttctcgcgtccgggaaaaccgctacagatgctaaatcaggcatagtctccgccccggtcacctttgtggtgacgtatccataa

SEQ ID NO: 393299 - DNA, 597 bp, Salmonella enterica
atgaagaaaacgcttttgagcctgcctatcgccgctgcggtggcgatggcggccataccagagagcgcccttgcaggcgacgccactctggacgccaccctgaccgccacgatagtggataccacctgtgatatgaaactgtccggcgggattggcggcgatgcgaccgaacaaacgataaacattattgtgccaggtcgcgttaatacctatgttccggttacggatgcgcaagccggtaaagccgcgtcaacgtttaaaataaagattgtcgaatgcccgccgtcaatgacgtcattaaaaaccaccattaaaggcaccgtctccgacacgtcaaataccgctctggccaaccagatagcagaaaccgacggcggtgcgaagggcgctgcccttgagattgcccgctctacgacaaccacggcaccgttcgtcatcaactcgacagtcgatgacgaacggctggtctggacagaagacgagataaagaaggccaaagaagtgtcgctgaccgcgacgctgcgcgaaaccaaagcgggtgaaatgaccattgggcatttcaaaacggtcgtcacatttgaatttagctatgaataa

SEQ ID NO: 393300 - DNA, 579 bp, Salmonella enterica
atgaaattttctactctcttaactgtcctgccgatttctgcggtctttttctgcgccgcggcgtctgcggccattaccggtactgacagcgtgcaaatgacctttcaggccgaactcaccaacactacctgtaacgcacgaattgccgatgagcaaggcgtgtcaaccaacatcattaactacggcgaggtgtataaatcggagattgccgccaaatcgcgcgttgtaccgtttagggttttgttcagcgagtgttcaggcgtcacctctgtaaacttcgacatagtccctggcgccggcggttcctgttccgggggggcttccggtgatacctacaccgccgccaccgccgatggtagtgacagcaattccgcctttgagctatggatttatggcgtggatcagggcgttatgctgacctgcggttcgccgttttcgtttatgaatatgtcggttacggggggtaaagtggaatatgacattgattcccgtctcgtccttgccagcgggaaaaccgtttccgatgtcatcaatggcgatgtctcggcccccatcacttttgttttgtcatacgaataa

SEQ ID NO: 393301 - DNA, 591 bp, Salmonella enterica
atgccatcattaccgttttttctgcgccagcctggcctgacgttactggtagggctgtgttgcttgcctggtttaggccaggcagcagatctggatgccaacctgaacgccacgattgtggatactacctgtaagctcactgtgggaaatggtggtaacgtttatctgccaacggtaatgcgcagctggttttataacgccgacggcagcgatcgctacacccccaccgatgaggcggggggtacgccatttacgatccacgttgatgattgcccgttaagcagcggactcaaacagctgacgtttcgttttagcccgcagtccgggttctggagcaaccaaaaccaggtgtttaaaaatgacgccgaggcgggcgcggcggaaaacgtcggcgtggttatcttttccagcgattataaaaccaacgtcctgaacagtgatggcagttcagcggtcgcttacgatgtcattgacaaaagcagcgccgagtatttaaccgactatcagttctacgcgcgttatcagaatattggtgcggtgagtagcggcatcgtcaccagcaacgtgctggtcgacgtcacctacaaataa

SEQ ID NO: 393302 - DNA, 297 bp, Salmonella enterica
atgtttaattttaaagaaaaaattgaagactatacagaagaggaatttattgaatttcttggagagtttataaaaccaacggcgatgaaaaatggcaaggcattgaagggaaaggaattagataaatattgggatatcgtactcgatcatttcatcaaaattacagaacatccggtaataggagaccttctgttttatccagagaatcctggtgatgatgaacctgagaaagtagttaaaatcgtcaaggaatggcggcgctcccagggattgccgttgttcaaagattcaaagtaa

SEQ ID NO: 393303 - DNA, 159 bp, Salmonella enterica
atgctggccctctttttttatcaacagttcatctggggcaggcaagccggtggaacgggcgcgcacaggccaggcagtaagccccttgtaagtaaagtggttttgcaggcgtttatctccgtagcccaggaggcggcggaaaatagcgcgaacaaataa

SEQ ID NO: 393304 - DNA, 834 bp, Salmonella enterica
gtgcgcatgtcgaaacataatcttattatctatagcttacttttggcggctatgccgataagcgtctcggcggattcgtcgacgacgtccgcagcaaccgtcggggtgttttctcctcctacggcgccgagcgttgggcacagaccaggaacacctcgtgatgtctacgaattgaagtttaatggacttgacttttctattgaaaagtatacaccttttccgggaatgactattgcgagggattctagaaatgtaggcatcagcgatccggataataactatcagtctgcggaaacgtttactacagtatgtacgtattatcagatcaataaagataattctcagcatatacttaaacgtgaaaagccatgtgagcataaatttaatatccaaaaggaacatcggggttcaaagattaaactagaaatttataatgaaacggatatggcttcagcgtcagggtacacgcctgtgccatcggtatctgaatttcagtatattgaaacagaaactatatctaatacgccaagcccagatttaacagttatgagtatagataaacctgtattgtcaccaggtgaaagtgcaaccataacaactattgttaaggatattgatgggaatcctataaatgatgcaatgattcaatcatatacagcatatgagaatggtgatggcctatggaacatgggacctattaagaaagaaagtaaccctggtgaatataagcaaattataacttatcttggaagccgtagtgaaagaatcgatgttaactataagtatcatggagatttttttagaaataggctctctatcagggggcggctgtga

SEQ ID NO: 393305 - DNA, 324 bp, Salmonella enterica
atgaagattaatttattagacaatatccatgcgacgttacctgtagagctaatacagagcatacttgtaggggataatggatttcgtatggaacgaatagtatccagaggacattacacatcttctggcttctggtatgatcagaatgaaaatgaatggataatgttggtatctggatctgccattatagaatatgaagaaaataagaaattgatcgaaatgtatcccggggacactataataattcccgcccattgccgccatcgtgtagtctggacggatccattacaatatagtatatggcttgttattttttataattga

SEQ ID NO: 393306 - DNA, 750 bp, Salmonella enterica
gtggcacattcaaaaagcagacggataaaaatactggagctggttaaccaagcggggaaaatatcattcgacgaactccttaaacagctgctggtgtcagaggcgacgctgcgtcgggatctcagcgagcttgaggagcagaaattgctggtcaggtttcgcggcggggcgaggaaaatccgtaatacggtagaaagctccatgcagatgaagcagacgctgaacgtgcttgaaaaagagcgtatcggcaaatatgcggctgggttaattgaacctaacgaactggtgtttattggctccggcaccaccacgcttgccctcgcgcatgcgctgaacgacacctcgatgacggttatcaccaacggcattgttcacgccgaaatcctgcataataaaaaaattaatacctttctgctgtgcggttttatccgccagcatacgcgttcactctccggcaaagagatgctgcaactgctcgccagctaccattttgaccgcgctttcgtcggcgctaacggcattaacgtcgagctggatattctctcggccgatgaaaatgagcatcaaattaagcagcttatcgccagacagagtaaggcgatgtttgtgctggccgataactctaaatttggcaaaacggcaatgtacctcgtccccaaagcattatcacagaacatcagtattattaccgacagcggcgtcatcggttatgaaaatcagccccgcctgattacgctaccgaatgaataa

SEQ ID NO: 393307 - DNA, 1461 bp, Salmonella enterica
atgagagctatcgtcgtactaatggacacgctacggcgcgatcatctgtccgcttatcatccgcaaacgccggttaaaaccgacaatattgcggcgtttgcccgtgattcgatcgtttttgataaccattttgtcgggtctatgccctgtatgcccgcccgccgggatctcttcactggccgcttaaatttcctggagcggtcgtgggggcctattgagatcttcgataagacgctgcccgccgaactgcgtaaaaataaaattgcctcgcacatgataaccgatcatgcgcactactttcgcatcggcggagaaaattactgccagcagtttgatacctatgaatttttccggggtcaggaaagcgatccgtggatttcaatggttgacgatcctgtgatgccggagacctggtttggcgaggtcaaaaggcagtatcagtgtaaccggacaatgttcaaaaccgaggccgattaccccagcgccaaatgtttctcctcggcctgcgactggctggagcgcaacaaaaacgccgacgatttccttttgatggttgaaacctttgatcctcacgagccgttcgatattccgcaagaataccttgacctctaccaggatgattatcaggggccacacttcgacctgccgaaatatcacgcgcgggacgaagaaaccgacgaggcgatggcgcatatccataatcgctactccgcgttgattaccatgaccgacaaccacttcggtaagcttatcgataaactcaaagcgctggatatgtacgatgacacactgatcattttaaccaccgatcacggatactgcttcggcgagcgcgagtttatcggcaaaagctatatgcacagctttaatgaattagcgaacattccgttaatcgttcatcttccccaacatcgccttgcaggcacgcgttatcaggcactgacgcaaaatatcgatattatgcccacactgctgagccattttggcatcgagacaccgccggaagtcagcggaaaatcgctatttaatattatcgataacggccagcccaaccatccgttcgttatctacggtacccacggcgcaacggtaaatatctgcgatggtcgctatacctatttccgtgcgccgcgcgacaatagccagtgctatgaatataccacctcgctaacaaccatccgcgactggctgggcaaaacgatccccgaaaaaattgaggtagggcatttcttgccgcgccagcccttcccggtttataaagtgccagtggtatttaatcctattgttcaggatcagcgctatctccagcacgatgcgctttttgacattcaacaagattatgaacaactagagaatattactgatcctgtattaaccgagcagatggttaccttattaaaaaccgccttacagcagcacgacgcaccaccggaacagcggttacggctcggattatattaa

SEQ ID NO: 393308 - DNA, 405 bp, Salmonella enterica
atgagaaaatttattattgcttcccactaccgtttcgcttccggtcttaaagacaccgttgaattcgtcaccggatttaaaccgatttacgatctcagcgcctatattgatgacgaagatatcggcagccagattaatcacattatgagccatatttcggccaacgatgaggtgtttatttttaccgatatggccggcggcagcgtgacgcaaaaattctggccgtatattgccgaacatgtccatcttatttgcgggatgaatcttccgctgattatggcctgcgccctgctggatgaaacgccgctcagcgcgcaagaggtcgctgacctggtttcggagtcgcgcgagcagattatttacctcaatcaggtagagattgaagacggttgcgatgatgaataa

SEQ ID NO: 393309 - DNA, 804 bp, Salmonella enterica
atgaatgaagacaccgccgtattgacgcaaaaagatctccgccaggtcgcacgtcgctggatgtgcatggcagttaatacctacaactatgagtcgcagatggcaggctcgattatctacgccacctcggatgcgctacgtaaaatctatccggatgataacgagtataaagccgcgctcaataaccactataaatacttcaatacccacccgtggatcgccccggtcgtattcggcgtcacgctcgctatcgaaagcaaggaagggattgccagtaaagacatggttcagaacctgaagaccagcattatggggccgatggctggcgtcggcgataccattatctgggtgctgatcccgacgattttaggctccatctccagctatatggcgctggacggcaacccgctgggcgcgattttatggatggtactgaacctgtttttcattatggtgcgctatcgctgcgtggagattggctacaaaaacggcatcaggcttatcggcgcgtttaatgacaagctgacgaaatttaccgaagcggcgtcgattctgggcttagtggtcgtcggctcgttgatcccctcggtgataaaagtcaccacgccgctcaatattcacgtgggtgaagtggcaatgaaaatccagccgatgctcgataaaattttaccgggtatgttgcccgttttatttacctggggaatttatcgcctcattaaaaataacacgctgaaaattattccgattatcttcctgaccattgctgtctgtatggcgggcgcggcctttaatattttgtcctga

SEQ ID NO: 393310 - DNA, 771 bp, Salmonella enterica
atgttagaaatatggcaaatagcggccgtcacgctattggcatttctggtgccaatagataaatatggcctgaccattggtttgcgctggcccattattacgggattaattttaggttttattctcggtgatatgaaaacagcgttatttattggcggcaccctggaattaatggcgctgggagtaaccagtattgccggttcatcggtgccggaatattccaccgcggcgattatcgccatcgtcattgcctcgcaaacgggacaaagcatggaagccgggctggctctggggctgccggtcgccatgctcggcgtccagtttgatgtggtcgccaaaatcattaacggttttattgtccgcaaatcgcagatttacgccaacgccggccagttcgccagaatgaagcgcattctgctgctggggccggtcatcatggggctgaccgccgcgattccggtactgctggcgattaccctgggcgcggccgccattaaagaggtgctcgccgtcatgccagcgtggtttagcaacggactgaccattgccgggcgcgtgttacccgccgtcgggatcgccctgttactcaactatatgccggttaagcgctactttcagtatctgctggcggggttctttttcgtcgcctggcttaacgtcccgatcctcggcgtaacggtcgtgggcctgatcgcggccattcactactacagcaaaaacgacgcggcgcccgcctccgcgaccactaatgagatacttgatgatgaatga

SEQ ID NO: 393311 - DNA, 474 bp, Salmonella enterica
atgagtattgtacttgcacgcattgataacagattgttacatgggattgtggcctcacaatggagtccggcgacggaagccgtgagattaatgattattaatgacaacgccgcgaataatgaaatcattaaaaacagtatgaagctggcaaaaccggttggcatggcgctttctatcatttcagaagagacggcgctggcaaattttcaacagaataaatacggcgagcagacgatttttctggttgtcgacgatccggctattttggtgaatctggcgaaacacaacgtggcgctgccgaaggtcaacattggcggcaccgtttcgcgcaataaccaatacgtcctttccagtcgcgccagcgcgaccgaagaagagtatcaatgttatcgctatcttgccgaccacggctccaatgtattcatacaatatatgttagccgaccgggcagtcgattttaataccgtaaaataa

SEQ ID NO: 393312 - DNA, 276 bp, Salmonella enterica
atgaaatacatcatcattgccgcaatgactgcgctattgtttagcgtcagcgcacaggccgccattaagatcaatagtcatcaggcgcgtaacatggacgatgtgcagagcctgggggttatttatatcaaccataatatcgccactgagcaagaggccgaacgggcgctcagtcaggaaagcgatgcccagggggcaagatatttccagcccatcctgatccatgagccgggcagcaacggtttaatccacgccagcgcagcgctgtaccgctaa

SEQ ID NO: 393313 - DNA, 975 bp, Salmonella enterica
atgatgactaaagacataatttcagccattactgaaacgttaaaagataaagggggaatcgggcaggtattcctggtggcctgtggcggatcgctggtcgatatgtatccggcaaagtacttcctggaaagcgaggccacgcagttacatgtgggtatgtacacagccaatgaatttgtctatgccacgccaaaaacgctgggcgttaattcgctggttatcgtttgctcacacggcggtaacacgccggaatccgttgccgccgctaaacttgcgcagcagcgtcacgcccatacgattacgctcacgcataatgaaaatgcgcaactgattgactatgccactcataatattctttatgcctggggcaatgacagcaatgtcgtcgataaccctatggcgatcattctgaacctttgcgtggagacgttgcagcaggtcgaaggctacgatcggtatgccgattttcagcaggggatgacgcagataaacggtgtgatcgcccgcgcccgcagcctggtcgccgatcgctgtcagcatttcgcccggcgttatcagcatgaaaaattgttttatatcctctccagcggcgcatcttatggtcacgcgtatggttttgctatttgttctctgatggaaatgcagtggctgcatgcggcgccgattcattccggcgaatattttcatggtccgtttgaagtcaccgataaagaaacgccgtttattttgctgatgaatgaagggcggactcgggcaatggacgagcgggcgcggtcttttctctcaacctatggcgaaaagattgaagtcgtggatgccaaagagttaggaataggcgtgctgccgtcttccgtggtggagtttttcaacccggttctgttttacagcatcatgtgcgaataccgcgccgcgctggcggatattcgacagcatccgctggagactcgtcgttatatggggctggtagcttattaa

SEQ ID NO: 393314 - DNA, 831 bp, Salmonella enterica
atgaacgtcattggtattggcgataacgtcgtggacaaatacgcgcatacgcaaaccatgtatcccggtggcaacgcccttaactttgccgcgtatgcggcaatgttaggccataatgcggcttatttggggattttcggcgatgatgctgccgcctcgcatgtgatgagcgtactggatgatatcggcgtgaaatggccgcactgcctgcaggtgccgggcgaaaacggctgcgctcaactcaaaattgacgcgggcgagcgtatctttctcgggtcgaatgctggcggcattcgcaaaacgacctcaatggactttatttttcagcatgaacattatctgcgcggcttcgatctgatccacagcggctgctatagctatatcgacgcgcaacttcccgcgttacgccagctcaatattcctctttcttatgacttctccgatgacttcgtactggaagaggcgctgccgctatgtcgctacgctgacttcgccttcttctcctgtgcggattatagcctgtcgcaaacgcgtgaaatcgttcaacgggcgcacgccagcggcagccgcatggtttgcgctacgcgcggcgacgaaggcgccattttgtttgatggacaggcgtggtaccaacaggcgcctgattatgttacgccggtagataccatgggcgcaggcgacgcctttattaccgcttttgtttgccactatctttcccggcaggggcgcgacagccgaagcgtcattagtgatagcctgcaacaggcagccgcattttccgcgcaaatctgcctgaaagagggcgcgtttggctacggagcccgctactaa

SEQ ID NO: 393315 - DNA, 1566 bp, Salmonella enterica
atgaatactgatgctgctgatttaattttacattcggaggcgatttttactgccgccagcgaggaactgttttccggttatattgcgattaaaaatggcgcaatcgcggcgatggtggcggatggcgaagatattcgcgcctggcgtggcgagcgtacccgctttcttgaacttggcgaacgtctggtttgccctggtttttgtgataaccatacctttttcactggctatatgagtatgcgccgcggcgtcgatttacgcgccgcgcgtaatagcgccgaggcgctaacctggttacaggacgccgagcaaacgttacccgccgggcaaaacctctatggttggggatggtcgacttctcgctggggggcattgcctgaagccgaatggcttgataacgcttttccccaacgcccagtcatcgctatcaacgatgataaaagctattgctggatgaatcgcgccgccgtgaaacgctatggctttaccgctacggaatgcagtgccgaggcgaggatcgtgttgctcaatgacatgttatccgatagcgcccggctaaaagatgagctgcgggcatttatggcgcgtctggcgcagcagggcgtgacggcgattaaagatgtgtgctttaacgatgcgccgccgttgatgaatgcctgggctgaactggaacaggaaggcgcgttgtcgctgcgtgtaagcgtagtttcgcagccggtcggcgcgccggtgaagttgtccttcggccaccaggcgcggcggcggtttacctctccgcggctgcgttttcacggctttaagttcatggtggacggcgttatcgccgatcataccggcgatatgctttctccttatgccgatcgccctgccacgcataatgaacgtccggtggattatcacgcgttgcgccagcaggctctggccgcggcggaacagggatttagctgctgcctgaatgcggaaggcgatgcggcgatacgtcactgtgtcgatattctcgccgaatgccgcgaacgtaatccggacaaggcgctccgtcattcgcttagcgatctggaatgcccgcatccggatgacattccccggatggcggcgcttggcttatttgccgaggtttacgcgcaaattctgctgctgaacgacagcgaggccgatgcgtacatgcgccagcgttacggcgaagcgcgggaggcgcagttctacgattatgccgcgttatttgaggcaggcgtgacggtcaccattggcaccgatcttccgttgttcatcccttcagtccccgacgccatgtatgccgcctgctgccgccattttcctgacggttctccggcgggcggctggcatcgtgaacgagggatgacgcgccggcaattactgacggcatggacgttgaatagcgcccgtcaccacggtatggacgcgttgaccggcagtcttgagcccggtaagcgcgcagatatcgccgtttttgatcgaaacatattgacctgtccggcgcagacgctacgcgcggcgcatgtggtgctgacgctggcggacggacgtgtcacccacaatcttctgtga

SEQ ID NO: 393316 - DNA, 1419 bp, Salmonella enterica
atgcgtattgcaaaaataaaatgggcgatgccgcactgctacgctctgattttcttcattattgttgttgtcgcgctactcacgtggtggattcccagcggcagctttaactaccatacggtcacattacccggcggcgaaaccaaaacggtgattatccccggctcttaccatttactggaaaaagtcagcgtcaacggcgacttgcgccagggcgttgccgccgtattagcggcgccgatggaaggcgtaattaaagcggttgatgtcgttgcgtttgtcctgattgtcggcggcgcgtttggcattattttgcgtaccggcgctattgaacgcggcctgctggcgttagcaggccgcctggctgggaaaggacttttggttatcccgctgtcgatgaccttgtttagtctgggcggcgcgacctttggtatgagcgaggaggtgatcccgctttatgcgatatttatctctttgatgtttgcgcttggctatgattcgatgaccgcgatcctgattttatttctggggacgcaaatcggctacgtcggtgcgatgaccaatcccttttcggtactgatagcccagggcgtggccggtattcagggaaatccccagctctggctgcgcgctatcgcctggctggtttttaccgttctcgctatcggctacaccatgtggtatgcccatcgggtcaaacgctatccgcataagtcgccggtatatgaaaacgatcggcagacccggacgcgatttttatccacacagcgggcagaggtacgtttcacgttggccgatcgactgattatccttgcctttgtgctggcgctggcggcgatttcctggggattgattacacgcggctggtatatggtcgaaattggcgccgtctttctggcgctggggcttttttccggcattgtcgggcgcatgagcgttagcggaatggcggacagttttgttgatggatgcaaagagtttgtttatgccgccgtagtgattggtctggcgcgcggtatcctggtggtggcggagaacgggcgtattatcgacacgatgctctatagcttgtctgaaatgctggatggattgccgcaatacgccttcaccacgctgatgctgttgggacacaatgtgatcacattctttgtaccctcttcatccggagaggcggcgttaaccatgccggtcctggctccgctaggcgatctggtcggtatcaataaagaggcgatggtgatggcttatcagttcggcaatggcctgacgaatttgatttcgcccaccggcggcgtgctgctggccgggctatcgattgcccgcattggttttgggcagtggctaaaagctattgcgccgctgtttccgctgctatggataatgagcgccgtattcgccgcgatttcggcgtcggtctaa

SEQ ID NO: 393317 - DNA, 726 bp, Salmonella enterica
atggcgaattccggattacaaccgagctcttccgttccactgtacagacagcttaaagataaaatactgagtgaaatttcgtccggcaagctgactgaaggcgcaaaaattccgaccgaagtcgaacttagcgataggtatgcgattagccgtattacggtacgtaatgcgattaaggagctggtcgaggaaggatatttaatcaaaaaacagggcaaagggacgtttgtttgccgccctaaaattgaacgcaaggtggtgcatctgcttagctttaccgatgcctgcaaagcgaatcatctcccggtgcaaagccgtgtgatacgccgcgaaatcctgtctgattatcgccatgtgcgccaacggcttgatctgaaaaacgacgattctctgttatatatccaacggctacgcatggcgggcgacgcgccgctaatgctggaaaataactattactcgttgaaccgatttggatttttacagcaggaggatcttagcggatcgctgtaccagcttctacgcgaaaaatatgccattgcgccaacctacgccggcgagacgacggtggatatggttcgcgcacatgacgataacgcgtcattgctacaacaaccgcccggcgaaccgctctttctgctgaaaacgctaatactggatagccatcaacagccgatacattacggagagcagtttatcgtcgccgagcgttatacctttagtttttga

SEQ ID NO: 393318 - DNA, 645 bp, Salmonella enterica
atgcctgttccagaacgccctaaaatttatcatattttgcatattgatcggttgcgttctgtgattgcagacgggctactttgcgatgagcaaatttcgcagcgtaacaacgctggtactgtaattggtatgaatagcattaagcagcgacgtcttacggagttaacgcttgattgttatccggacttgtatattggacaatgcgtgccgttctacttctgtcctcgttcggttatgttgtacttgattcatcgcggcaatcatcctgatctcggttatcatggtgggcaggatcctgttctgcatttggaagctgatttgtttacggttatggattgggctgaacgaaatcagcagcgttgggcgtttacgttgtctaacgccggggcactttatgtcgagtcacgttgtcaaagagatcaactaagcgagttaaactggcaagcaatcaatgcatcgcagtggagtggcaacggtctgaaggagtcgaagcaggcggagtttctggttgaacagcatttcccatggcaactggttgaacgcattggcgtacattcacgatccattcaccaacaggtagctgatattcttcccgctgatgggcatcgcccgccgattgagatacaggaagcctggtattactga

SEQ ID NO: 393319 - DNA, 1035 bp, Salmonella enterica; identical to SEQ ID NO: 85803

SEQ ID NO: 393320 - DNA, 528 bp, Salmonella enterica
atggcagctcggggttcaaagaatcaagatattagcacaatggctaaaaagacagctcctttacttccggtgacttaccagctgcttgctgaacttggcgagcggcttaagctggcgcgactgcgacgtaagctaacagcaaagcaggttgcagagcgggctggtatgtcaccgaggaccctccgttctcttgagtcaggcgaggctggtgtaacaattggcgcctacttgtccgttatgcaaatattaggacttgaaagagatctgaataaaattgccgccgaggatgagttgggacagcatcttcaggattcccggttaataaataaatcgcatctttcccattcttctgtttcctctcgtgcaaaaatacataccggaaacgagataaaacacgatgcattcggcaagcaaataacggcatcacaagacaaatcagtaaagactgaagtaaaagcaccagtcgtgacatcggcatctcttgctgcactgttaaaaccaatcaagaaacccactaagagtagctga

SEQ ID NO: 393321 - DNA, 279 bp, Salmonella enterica
atgccaaaaatatctgtcataggggataacatgaacgtaacctcactcaaaatgctggctcaggcagtgaggaatgctcgcaagcaacgtaagctaacccaacgtgaaactgcagaaagaatggacatgaaacaatcaacggtttcagagtttgagaaccatcctgaggggacccgcctgggtacgctctttaagatgcttgccgctctggaccttaagcttcaggtagtaaaccggaggggtgaaaacaaatcgtctgatagctgggaccaggagtga

SEQ ID NO: 393322 - DNA, 846 bp, Salmonella enterica
atggacgagagtacgttagataaagtagcagagtttatttgcgggaatggtgaacaatatcctgagtaccgttccagttctaggttgacagctttttttgctcgggcagggcttcctcattttattcacgatggttctactcgacaaaagtgggtactggaatgtctcaaagcttgcagtcgtgaggagctggcatctgtgctaaaacgcctggcatccccaaaagaatatgcaggcgaacggttaaaagttaaaaatgcattggatctgctgaatgaaattacgtatgtcgaagggttcagaattaagctggctgggctggagtcaacatttgaaaaaatagcgatagattactctgacaataatgatgaaagagcgctgacccctcaacctgtaccggatttcttgtcccttggtcttgagagtggtgtcggagaaatacttataaatagatgggaagaagtgcagaaatgtgttgatgctggggctcatttgtccgcaattattattatgggcagcatgctggaaggattattactaggagtatgtcagcgaaaccctgctgtagttaaccgatgtccatcagcgcctaagcataaagataacggcaaggtgaagcattttgccgaatggaaactatcagaacttattgatgttgctcatcaggtagggtggctagacatggatgtcagaaaattttcgcattctttaagagacttccggaatttgatccatccctatgagcagatggtaacaaaagtttatccagatgaagatacttgcagtatctcatggctagttgttcaggctgcaattaatgatttagccagagtgataaaagcatag

SEQ ID NO: 393323 - DNA, 591 bp, Salmonella enterica
atgcctgtaaaacgaaaacatcttacccgctatgaggtagggcttatattgcgcgcagcggaccggggaattcattttgaacgcgactactgcatgatccagatgtgctttctgcatggcctgcgggtcagcgaactgtgccggttacagttgtcggacctcgatctgggcgggcagtcggtctatgtgcacaggctgaaaaacagcctttccacccagcacccgctgtttgatgaggagcttccggcgctgatgcgctggctgaatgtgcgtagccgctggcgggatgcggattccggctggctgtttttgtcacagaaaggcgggccgctgtcgcgccaccaggtcaggctgctgctgaaacgctatggcgaaatcgcggaggtgagtattccggcgcacccgcatatgctgcgtcacggctgtggttatgcgctggcggatttgggtaaggatacacggctgatacaggattatcttgggcaccgtaacattcagcacacggtgatttatacggccacaaacacgctgaggttcgtcaatatgtggggaaatatgagggaaaaccacacaattcgtaccagaatgtaa

SEQ ID NO: 393324 - DNA, 525 bp, Salmonella enterica
atgaaaaaaatgatgttaagcgcgttttttatggcagcagccggtgtggcgggtagcgcacaggcttctgacgggactattcattttaccggcaatattaccgaccagacctgtaccgtggacggtgcatcacaggctctggaagtccccatgggcaatgttggcgcttccgcgctggcgggcggggcggggacggtcgcctcgcccacccgttttacccttgtattaaccggctgcccggagacggtaaccagcgccaggataaagtttgatggggatacggataactctgccgcaggttccgggatcctcaaacttgacggcgacagctccgccacgggggtggggattgttatttctgataatgccggtatcccgatcgccatgcacaccgattctccggcttatgccctgacaacgggtgaaaacgacctgttgttcacggcccgctatatcgctaccggcgataccgtcaccaccggctccgccaacgccacctcgcagttcaccattaattacaaatag

SEQ ID NO: 393325 - DNA, 675 bp, Salmonella enterica
atgaacaggtatgcagttatggcgctggctttggtgctggcctcttgcgccgcacaggccggaattgtgattggcgggacgcggatcatttatgacggggataaaaaggaaacctctgcttccatccgcaaccctgaaagatcgggtgtgtacctggttcaaagctgggtggatagcggtgcgcagggcggcaaggtcccgtttattgttaccccgccattatttcgtatcaaccccggtgaagagaacatgctgcgcattgtgcgcaccggtggcaagctgccgcaggaccgcgaatccgttttctggctgaatgtgaaatccattcctgcgacggaggacagtgcgccacataataatgtccttcaggtggtcgtgaaatcgaggatcaagctattttaccgcccggcgggtctggagggacacccggagacggcatatcacaaactgtcggtcgcccgcagcggtaaccggttgaccgtcagcaatccgacgccttactacgtcacgttttttaccctcagggtggacgggcaggagataaaggacgctgatatggtgccgccgaagggcagcgtaagtttcacgctggcttcggtcgcggcgtccaccgtgacctggcaggccatcagtgactatggcggcgtcagccagcccgaaagccgcaaactctga

SEQ ID NO: 393326 - DNA, 963 bp, Salmonella enterica
atgagaacgttactgaaatcaggttgtgtattgctggcgttatggctggcttccttcggcgtacaggcctcgtgtggttttgcttctggtgtgagcagtgaaatcccgggttatgtcagctttggcaatgttgctgtccagcgcgatgttgcagtgggtagtgttatcgccacggcaaccacgggcgcttataacaacggaaatacgattgcaggatgtaatgaggcatggacatttcgttgggaattaagcaaatgggggacattgagttcgctgggggggaaggtctacaacaccaatgttccaggcgtggggatcaggatgaccacggtggcatccggccatgtgctgccctacgatgcctcgatgtcggcaaataactacgttgtttttccgggggatggcattaaagctgaactcatcaaaaccggcgatattacgggcggaacccttgatgccggtatgctggcgcgggcatcggtggcgaaccagttttacttcgcgaacgtcacattaaatggcaacaccaccattaccccggaatcctgcgccgtcaccactaacccggttaatgtgtcgctggatgaccatgagaagaatgagttcaccggtgtgggctccactacggcctggaagacgttcgatattggtctcaattgcaatcagggggcgaagatcaacgtgcgcatcgatccggctgcgggcgcggtggacaacatgacggatgtgatgaagctcgataatgcgggaagcagttcgacggccagcggcgtcggcgttcagctctggttccggccgaacggcggcagcgcggtgaagtttggccaggagacgtattactggacctcaggctatggcgggccggaaaccgtccagcttcaggcgcgctattaccagaccgggcagacgatcacgccgggggccgccaatgctacggcgacgtttacgctgacgtataaataa

SEQ ID NO: 393327 - DNA, 1539 bp, Salmonella enterica
atgtctataacagagcctgaagccggtggtaaaactgccgcgcaatatttaagaatgtccacggaacatcaaaaatattctcctgaaaaccagcgggaatatattgagcggtatgcaaaggaacacggaattactattttgcatacttatgatgatgccggaaggagtggcctcagcctggataaccgtccgggcttgcgttccctgctgcatgatgtggaaaacggaataatcacgatttcattaattcttgtttatgatgtcagccgctttggccgattccaggatattgaggaagccgcacattattcctggctgctgaaaagtcatggcgtccgtattatttattgtgcagaaccgttctcggaagaacagacggaactgtttatgctggggttatcttattcccgctatggcgcagccacctacagtaaaaatctctcggaaaaggttttcctcgggcaggcaaaccttgtccggcggggatatcatcaggggggaatgccgggatatggtatacggaggctgctcatcgatgagcatgccaaaccaaaaggactccttcattccgggcaaaggaaaagcctgcaaaccgaccgggtgatattgatcccaggccctgatgaagaagtcctgatcgtgaaccggatatatgacatgttcattgatgatggcaaacctgagtttgttattgcctcagaactgaaccggaataatatccccgcagaaaatgggcaaccatggacccggtgcaaaatccatcagatactgaccaatgaaaaatatatcggtaacaatgtttataaccggacctctggccgcctgaaaacccgcagcgtcaggaacccgcaggaaaagtgggtgcgctgtgatggggcatgggaaccggtggtatcaatagcgaagtttgaggcggccaaaagcattattgaggccagggctgtacagcacagcgatgatgaattgctggataagttacgtcatcttcttaagctgcggggcaggctttccggcattattatcgatgaagaggaactctttccatcaagcagtatcttccgctcacggtttggcggcctggtgagggcctacagtcttatcggctataaccctcagcatgactactcttaccttgaaataaaaaaacagatcgccgaatacaacctctcttttattgataatctggtgcaggatatttaccgctatggcggctggggctcggtacaggaagagggttctttgtatgttaatgatgaattttttatctccactcatctgatccgctgccagcgcctgtcatcaggcaagctgcgctggaaaattaaattcaatgtattgcaccgttgtgatgtcatgatatttcctcggctggacagtaccaataataacgtggtcgattattttattttcccagccatagatattctgcagagtgatttaacgcttcatgagagcaatggttttattctcgaactgtaccggtttgacgatttgtcatgtctggaacgtcttgttaaacgaaccaaactggagtcgtaa

SEQ ID NO: 393328 - DNA, 891 bp, Salmonella enterica
atgatgaaatcttttgatgaacagatagagcttatcgatatcagtgatatttatatcgctaatccgcgtaaacggaataaatttatacacaatgagattaaagaaaatataaagacaatcggcctgaaacgccctgtcagcgtccggcccgtcaacgatggtaactataaatatgccctgatttgcgggcaagggcggcttgaggcctacattgagtacggcgaaacgaaaatcccggccatcatcaaacatgttgacgaggagacggctcacctgatgagcctggctgagaatatcgccaggcgaacgccccgtgcggctgaactgatggaagatatccggagaatgaaaaccagcgggctaacggacagggagattggtttgcgcctgggttataactccagttgggtaaacggcgtgattaccctgctctcatcgggggagaaacatcttttacgggcgtttgagacgggagatataccgttgtatctggctgtggaaatttcccgctccggtgacgatgaaacccaggcgttactgaccaccgccctgaaagaggggcatatccggggagggcaaattaataagatcaggcgcattctggtacaacgaaaaaaaggggataaaggcacgatcagtacggcattctttccgggtaagaagcagaaaaaactcacgccggaagagctggccagtgtttatcaggaaaacattaatgagcaaaaagccattcttcttaagtccacgatggttaaggaaaaattactggcagtgaaacagatctttggtcacctgctaaaaaatgatgaatttgttacgttgctgcaccgtaataacatccatgatgttccttcattgctggacgaaaatgaagttcaggaggtaaattaa

SEQ ID NO: 393329 - DNA, 891 bp, Salmonella enterica
atgatctcacaatgctttgattcccgtttctataccttcaaagtggattcaccggtttactcaagagcattaccggtaaatgtcaaattcagtaataagtataaacagattaaagcctcggttgatgaatttgggttgattgaaccgattatggtttatatgaatgataccagtgaaaaaatcatccttgatggtcatctgcgcgttgaaattttaaaggagctgggcattgaaaccgcccactgcctgatatctcccgttgaggacacctactcatataataaacgggtcagccgccttactgttgttcagacccagaatatgctgcttaaggccgttgagtccggcgttccggttgagaaattgtgtgcggtgctgggaattacgccggataccctgattggtaaactgaaaatctccgatgggattgccccggaagtgatggcgttactggcagaaaaaaatgtgccgcagaccattttttcggtgctgaaaaaactgaagccttataagcagattgaaatggttaatacgatgattagtattaataattttacgcgtaagttcgcgatgtcgatgctgcatgctgttgcgcccgaacatctggttgaaccgaaaaaagatgccagaagggagacggatatcaggaaaaatcttgagcgactggaaaaagagatggcttctgtgcaggttgaaacacaacaccttcaggatgaatatacggagaacaacctccggctggtcattatcaagaaccatattgagcgcctgctggcgaatggccagatagttaactggctttatgataaccaccaggaatacctttctttactcaaacaaatatcggggctggatgatttgaataaactgagccagaaggccggtgaatag

SEQ ID NO: 393330 - DNA, 804 bp, Salmonella enterica
atgaaaaaagtcatgctgaatgaattaaccggccgcgaaatccgcgagctgctacagtccggccaggaactcaccgccatcgtcagtttcggcagttgcgagaaccatgccgatcacctgccgctcggccccgatatgtttgttccggaaacggtcgcctgccgggtggcgcagcgggtggacaacacccttgtactgccctgcacaccgttcggcacttccgttcactacaacgcccatccgctggcggtcaccctgcgttatgaaaccaatattgcgctggcggaagatatcttcaccagcctgctgcaccacggcatccgccggatgctggtgattaacggccacgatggcaatatcccggcgattgagatcgccgcccgcaacgtgaaatcccgccacccgcaggcggcgatcgtggtgattccggcgtggtgggatctggtggggcaccatctcgggaagggattttttgactcatgggataacagcgggctcggacacggcggcgagggggaaacgtccgtcatgatggcgctgctcccggaactggtggaactgaaatatgcgcagaagcaaatcccggcggaggtgttcagcgattacggtgttaaccggatctgggacatcggggagatcagtgccacaggggcgaccggcgatccgcgctgcgcctcggcggaaaaaggcgagcggatcctcgcctgcctggcggatgtactgtgcgcgttgctggcaaaactgaatgcaacgaactggcagtatggtttagccaaagaaacggataaatcatccggcaggtag

SEQ ID NO: 393331 - DNA, 1359 bp, Salmonella enterica
atggaactcgacagaagcctgaaagcccgccacctgacgatgatttccgtgggtggcgtgattggcgccggatttttcctcggcgcaggtgcggccatcgcccgtaccggcccgtcggtggtgctggcctaccttatcggcggcgtcattaccctgttcattatgctgctgctcgctgaaatggccgtctcccgcccggtctccggttcgtttgaatcctatgcccgcaccgcctttggcccgtggtgcggctttatcaccggctggacctactggctggccttcctgattggcccggcgtcagaagccatcgccgcaggcaccttcctcaacctgtggtttcccggcgtcccggtctggctgttctgcctggttatcgcctcgtcgctcaccgccatcaatatggtcggcgtccatttcttcggtgaggtggagttctggctgagtctggtcaaagtggtggcgctgctggcctttatcgtcgcgggctgttacagcctcgggctggatgagtcttcccccgccagcgtagcgaacgtcaccagcaatggtgacttttttgccaatgggctgcccggttttcttggcgcgatgctgatcgtcattttctccttcggcgggacggaggcgatcggcaccgccgcaggcgaaagcgagaacccgcagcgcgatattccccgcaccctgcgcggcaccgtggtgcgtatcctgctgctgtatgtcggttcgctgaccgtcctgttgctggtgatgccctggcaacagtctggcgtcagcagcagcccgtatgtggaggcgtccggcatcctcggcggtgatatggcgcggcatattatgaattttgtggtgctgaccgccgcgctctcctgcattgataccggggtttacgccacctcgcggatgctgcacgccatggcgtctgacggctatttcccggactggtttgcccgcctgcacccaacgcacaggacaccggataacgccattctcgccagcagcctggtgctgtttaccggcgtcatcatcgccattctctcaccggacgcgtatgtcatcctggcggggatttccggcttcggcttcctgttcacctggctgatgattgcgctgagccagccgacgttgcaccggatcgccctgcacgacgggacgctgaaataccggactccggcagcccggcacatccagccgctcaccgtgggactgattgtgctggtgatggccgggcagttctttgccgacggcggcggcatcaccctggtcaccgttctggcctggctggcgatagccagcacgtactacttctttgtcgtccgtaaaaacaggagactgtccgatgaaaaaagtcatgctgaatga

SEQ ID NO: 393332 - DNA, 375 bp, Salmonella enterica
atgatgacttactgcgctcgcattgccgctattggactgttcgtcgccgacggactggcagacagaacgctgatcactttcgacaacaatgggccgaaagactgcctcgactactccctgtcgctggagccctcattccgcgaagaaaacctgctgatattgcccggcgatcgactgatgctggcaacccacaactacctgatcaccgcagtgggcaaagaggcgcagcgatcgctgtttgaactcggccacctgaccatggtgtttaacggcagcctgcatacctgtcacgccagggcgattcatctctccggcccggttccgaagctccgcgatttatacggcaacctgctgattgaggaagggcggccataa

SEQ ID NO: 393333 - DNA, 231 bp, Salmonella enterica
atgtcatctatttattctgatgaatatcagttagttataaagttactgcgctctgcaaggattgagcgtgggattactcagtctcaactggcggaatcgctcggcaaaccccagtcattcgttgctaaggtggagaatggtgagcgccgtctggatgtgattgaatttgctactattgctcgtctgctttcacttgctcccgcagaaatactgaacgtagttatgaagtga

SEQ ID NO: 393334 - DNA, 225 bp, Salmonella enterica
atgacttctatctactcaaatgactaccaaatggtgattaaagctctccgggatgcgcggatagcctgtggcatcactcaacaggaggttgccagtgctttcggaagaccacagtcatttattgcaaaggtagaaagtggtgaaaggcggctggatgttgtcgagtttgtacgtttttgtcgtgctgtgaatgttgatcctgtcagtattttggataagttgtga

SEQ ID NO: 393335 - DNA, 330 bp, Salmonella enterica
atgaataaccgtaaagttagattgctctcattttttatttttattgggtgtttttttatatttcgtgggagaatgattttcgaacaatataacatttctgcattttctattcttatgacttttgttatatccttgtatggttatatatcgttgtcgaagcatgttgataaattgagttcgactaatagagtgattgtttttttggggttgaataaattaatttctttttttaaaaaaggtaatcaacttactttccttgaaagaaatattatttttttctctgtctatattccttgcatttttcttatgtacttacattcaataatatga

SEQ ID NO: 393336 - DNA, 354 bp, Salmonella enterica
atggcgaccattccctttctccccgaccgcctcaaccgtgagcccgtggtctggcgcggcctgaccaccagtgagctgtttctggcgctggctctcggtcttggcggcggctgtgcgttcggtattgtgctggccctgataacccattactggccgttgatccccggttccgcgctggcaggcgcagcattactgattcagggcggcggacgcatcctggcccgcgccaagcgtggcaagcccgatagctggctaccgcaggcgatccttgcctggctggagcgccatcatcttcggggtacgcaactggtccagcacagtaccgtatgggtagtgcgcaggagtccgcgatga

SEQ ID NO: 393337 - DNA, 759 bp, Salmonella enterica
atgagcttgcatcctgaaatattatttcattttacagataaagacgggttgttaaatatacttgaacacacatttaaaatatcatacgcgagagaaaggatacaaggtaagaatgaaataagggaatttggtattcctatggtttctttttgtgatatcaagctttccgatctaaaggatcacattgataaatatggggattatggcattggtttaaataaagcatgggcaaattcaaaagggctgaatccagtttggtatgtaagtaaaaatagcgaattccccgatgcatttacctctgcattaaactctttatatcgacaaatggattctatattagacaataaagagtataaagaatttaatgaaacttacatgaaattcatggatatatatagatatcttaaaaattatgagggggaactaaaaagatccaaagaagtaattgaaaactatagatttgcggatgaaaaagaatggagattcgttccaagtatcagcgaggaagacatattaccattcgtacctattactaaaataaaaacaaaaaaccagaaaatgaaatataataataagatcagtcatcttcgcttgagctttgagccaaaagatataaaatatatcattgtcaaagatgatcatgaaattattgatattgttaatcatcttaaaatggttaaagatagattctcttctcttgatataacgcaactacaaacgcgcatattgactactgagcaaataaaaactgacatgtga

SEQ ID NO: 393338 - DNA, 648 bp, Salmonella enterica
atgagtgaacagcgaccgcctccgtcacgcccggcacaggggccaatcggctggctgctgtcattgctcggtcggattatcggactggttattggtgcgctggtgctgcgggtggcgctggaactggcggggctctatttctggtggccgcaggaggggagcaggcatgtttttcaggtgatgaaacaggagcaggtggagctggttattgcgttacagccacatccgcagggggataaaatggtgatactgctggagagcgggacaacatacatacttacgcccgtgcatcagacagaaaacctgttcttccggattcccgtcactgtcctagcttacacactggtcagctttatgctgcgcctgacatggcttgccgccatgctccccctgctctgcttgtgtgttgtaatcgggctgacagaaggtctggtacaacgggatttacggcggtttggctccgggctggaatccatttttctccaccgctatgtcatcaggtcaggcagttcagttgccaccacgctctggatgttttatctggcgcagccgctgtttctgcctgtaacgctggtttttctgcctgccgccttatggtttgggataacggtatggatggcggcagggagctttaagcgctggttataa

SEQ ID NO: 393339 - DNA, 1041 bp, Salmonella enterica
atgacaaatggagtcaggacagggctattggctctgacgatactaagcgctcctctgatggcgcaggaaagtggcgcgtccttcagccataaggactgggaagtggtgtgtgataacacgctgacctgccgggcggcaggatacagccctgaagaaggaaaagggggatcggtactgctaactcgcctcgccggggcgggtactcctgttatgggagaagtgatgctggcaggggttgaggctgacgacgatactccggttgcaagactgatgctctgggttaatgaccagccagtcggcgaactgaagcccggtaaggagggcgactggttgctgtcggacaaacagactagtgacattattgcggcagtcaaaggcaacggaaaagttgagtttaaaggcgggcctgatccgtttgttctctccggtgaaggggcttatgcggtgttgctgaaaatggatgatgttcagggacgcatcggaacgcctggtgcgctgaccaaaaaaggcgacaagccggaaagtagcgttaaggctgccgttccggcaccagttattcatcaggttaaaactgataaagcgcaggaaaggcccctcacagcgcctgaactggcggtactgaaaccaaagcttctcgagactctgagtgaggatgattggtgtgatctcatccaaccgtcggatgagcaggaagctgagacgatcagcctgacgccgctggataatgcccattccctgatttctgcgctttgctggcgggcggcgtataacacgggagacggctactgggttattgacagcaaacttgcgggtaaaccgaaactgatcactatttctggctctggttatgaaaacggtgaaatttttctgggccagaaaggtcgtggtctcggagattgctggggatcggcaagctgggtttgggatggtgagacattccgcaaaagccgcgaagcgacgaccgggatgtgccgttatctccgcctcggcggcacctgggatctccccacctgggtgacggatgttaaaccggcaaagtaa

SEQ ID NO: 393340 - DNA, 183 bp, Salmonella enterica
atggccaggaataccggagacggttatcgcaagggctctgttacagaccgcacacaggttcagaatccgcagaatggtaactacaccaaacgcgatacaacgacaggtcgctttatcgaccagaagcaggacggcactccctttaaaggtgtcgctaaagaagtcgatgaccgccggaaataa

SEQ ID NO: 393341 - DNA, 507 bp, Salmonella enterica
atgcaactttacctgtgcgaaaaaccctctcaggcgcgcgatatcgcccgcgtgcttgacgcccgtaaccgcagcgacggctacctgcataacgctaccgtgactatcacctggtgcttcggccatctgctgagcatggccgcgccggaggattatgatccggcgctgaaacactggcgggcagagcacctgccatttattcccccggcatggcggctggtgatccgcccggaggtacgcaagcagttccgtatcatcgaaaagctgctgaaacaggcggatgcagtggtgattgccaccgacgctgatcgcgaaggcgaaaccatcgcccgcgaaattctggaacaatgccgctggcgcggtccggtccaacggctgtggctgtcggcgctggatgaggccagtatccacaaggcgctcgctgcgcctggtggtggagcgcgaccgggagatcacccgtttcacgccccacccctggtggcgggtggacgcccgactgcatgctga

SEQ ID NO: 393342 - DNA, 3228 bp, Salmonella enterica
atgaccacttttacaaccgaagcgcaatttgagcaggcctttattgaggtactcaccaacaaaggttgggagccggagatactcaaaaacaaaaccgaagcggatttactacaaaactgggcaaacattttgtttgaaaataatcgccagcgggatcgcttaaacgatgtcccgcttaccgcgactgaaatgcagcaaattattgagcaaatcaaagagcttaaaaccccgctcaagctgaacggtttaattaacggcaaaaccgtggccattaagcgcgataacccagccgatactttgcatatgggtaaagaagtcagcttaaaaatatacgatcgccaggaaattgccgcaggtcaaagtcgttaccaaattgtacagcagcctaaatttgaacgcggcagccctttgcgtaacgacagacgaggtgacgtgttgctactgattaacggtatgccggtgatccatgtagagttaaagcgtagcgggatcccggttagccaggccgtaaaccaaattgaaaagtacagtacagaaggcttatttaacggcctgttttcgctcatccaggtgtttgtagctatggagccaaacgagaccaaatactttgccaaccccggactagacggcaagtttaaccccgattatcagtttaactgggccgattttaataacgaacccatgaactactggaaagacatcgcctctaccttgctttctatccctatggcgcatcagttgattggcttttataccgtcgccgacgataccgacggcgtgcttaaggtaatgcgcagttatcagtattacgccgccaatgcgatatcagacaaagtcgccaaaaccaactggcaacaactgggtagcgctaataaccctgatcgactcgggggttatgtgtggcatactaccggttcgggaaaaaccatgaccagtttcaaatcggcacagttaattgcacaatcgaaagatgccgataaagtgatttttttaatggacaggattgagctgggtacccaatctctgacggaatatcgcaattttgctagcgatggtgaaaccgttcaagctacagagaatactcatgtactcattaccaaattaaaaagcagtgcaacttccgatacgttaattgttagctccattcaaaagatgagtaatatttttgaagaagctgatgatgagggaacagcgaccaattcagctgatatagaaaaaatccgtgctaagcgcctggtatttattattgatgaagcacatcgctcaacgatgagtggaggcaaagaaaataaactaggcatgctggtaagcattaaaaaaacattccctaaggcactcttttttggttttaccggcacgccgattcatgatgaaaataaaatcaatagcaatactactgctgatgtatttggtaacgagttacatcgctatagcatagcagatggtatacgtgatggtaacgttttgggatttgatccttacaaagtacctacttttagagatagtgatctaaggaaagaagttgcattagaacaagccagggctgaatcggttgctgatgcgatggctgatccagccaaaaagaaaaagtttaatcactttatgaaagatgtgcctatggcaggctacaaagatggcactggcaaatatcacaaaggcattgaagactatatacctaaaagccaatatttaactaatgcccaccaggagaaggtggtcagtgatatcttagataaatgggatgtactcagccaaaataataaattccatgcgattttagccacgaatagtatcgctgaagcgattgactattaccggcgtttaaaagcggctaaacccgaacttaaaatatcagctttatttgatcctaatattgataacgacggcagtggtgaccgtgacccaacctttaaaggtgatggtctgaatgaaattatggatgactacaataagcgctatggtcacgattttgattttgcccgccacgccgcttttaaaaaggatttagcggcacgtcttgcccataaaaaaccctacgaacgtattcataccgagccttcgaagcaattagatttattgattgtagtggatcaaatgcttactggttttgattctaaatggcttaatactttgtatttagacaaggtaattaaataccaaaatataattcaagcgttctcacgcaccaatcgcttgtttggtcccgacaaaccccacggtatcatccgttattatcgctatccgcatacaatggagcagcacattaatgctgcagtaaaactctattccggcgataagcctatcggtttgtttgttgacaagttagaaagcaatcttaaagccatgaatgaattagtagctgaaattaccgagctgtttgttaccgctggcgtagagaattttgaaaaactgccagacgatatagaagcctgtgcccaatttgccaagttgtttaatacctttagccagcacctggaagcggctaaagtacaaggcttccattgggaacagtcggtctattcctttactgaaaataatgcagaacatgaagtaacgctagctatagacgaacaaacttacctgagtctggtcctgcgctataaagaattaacagccaaaggtgagcacgatggtgcaggtggtggcgatgtgccttttgatatcagtggttatttaactgaaatagataccggcaaaatcgatgccgactatatgaacagccgctttgataaatacttaaaagagctgaacaaacaccaggacccagcgagcattgaaactacattaaatgagttgcacaagtcgtttgcatcgctcacccaaatcgagcaaaagtatgccaaactcttcttgcacgacttacagcgcggtgatgcacagttaattgaaggccatactttcagagactacatcaacatctacaaagataacgctgaaaatgcgcaaataaacgccgttgttaatgctcttggtttagataaaagattactcacagcattaatggctgataatgttaatgataagaatctcaatgattttggtcgcttcgacgcattaaaagaatcggtagataaggaaaaagcaaaagcctattttgaaaaacaagatggcgtaagtttacttccatttaagctgaatatacgcattgaacagtttttaaaacagtttatttttgcacaaaaaaatgattttttaagtgacaccgatgttgttggtgatgggatgtga

SEQ ID NO: 393343 - DNA, 1152 bp, Salmonella enterica
atgagtgtggataacaaagtgccagaaattcgcatcaaaaattttagtgggaagtggtatgaggtcgctttatccagtgttattgatgttcgaagcggaaaagactacaagcatttaggcaaaggcaacatacctgtttatggaacaggcggctatatgcttagtgtagatagtgcgttgtcaaatgatgaagatgctatcggaattggtagaaaaggaactattgataaaccttgtattttacgcgcccccttttggaccgtagatactcttttttatgcagtgccttttcctggtttcaatctggaatttatattttgtctttttcaaaaaattgagtggaaaaaacatgatgaatctacaggggtaccaagcctatcgaagatcgcaattaataatgtgccagtttatgcaaccaatgaattagaacaaactgccatcggcaactacttccaaaagctcgacacgctgatcaaccaacaccaacaaaagcatgacaagctcagtaacattaaaaaatccatgctggaaaagatgttccccaaacaaggcaaaaccacaccagaaatccgctttaaagggtttactggggagtgggaagagaaaattctaaacaacgaagtgggattttttagtggcctaacatattcgccgagtgatattagaaaatcaggtacactagtgcttcgttcatccaatgtaaaaaatggccaacttattgaagctgataacatatacgttaatcctgaagtagttaattgcagcaatgtggtggagggagacattattgttgtagtccgtaacggctcaagatctttaattggcaaacatgcacaagtaacttcacgtatgaataatactgttattggtgcttttatgactggcatcagaagtaagcagcctgcatttataaatgcattattggatacaaacatgtttacatctgaagttgagaaaaatctaggtgcgacaattaaccagattaccaatggctcttttaagagtatgttttttatgtttccaacagaagatgaacaacaagaaatcggcaactacttccaaaagctcgacgcattgatcaatcagcaccaacagcaaatcaacaaactcaataacattaagcaggcctgcttaagtaaaatgtttgtctaa

SEQ ID NO: 393344 - DNA, 2592 bp, Salmonella enterica
gtgaataaacaacagcttgcggcgaaaatctgggaatctgccaaccagatgcggtctaaaattgaagccaacgaatacaaagactacatactcggctttatcttctacaagtacctaagcgaccagttggtgcagtttgtcaccagacagggcatgacgcccgaagacatcaaagccctcaatgaagaagacgccgacaccgttgaatacgtgcaaagcaacctgggctactttattgcctacgataatctgttttctacatggattgatccaacatccgaatttgatgaatctaacgtacgtgatgcgctctcggcctttagtcgtttgatttcgccaacatacaaaaaactgtttgaaggcatttttaccaccttagaaacaggtttaagcaaactgggtgaaagtgcgggcaaacgcaccaaagccatcagcgacttactacatctgatcaaaagcatccccatgaatggcaatctagggtatgacgtactgggctatatttacgaatacctgattgaaaaatttgccgccaatgctggtaaaaaagcgggtgaattttatacgcctcatgaagtttctgtattgatgtcgaatatcatcgcccatgagttaaaacacaaagataccatcaaaatttacgaccctacttccggctctggttcgttgctgatcaatatcggtgaagcattcgagaaatacgcgaaaaataaagacagcattacctattacgcacaagagttaaaagccaatacctacaacctaacccgtatgaatctcatcatgcgcggtattaaagccagcaacattaaaacccgtaatggcgacaccctggaagaggattggccgtattttgatgacagcgatcctcaaggctcatactacgccttacatgtcgatgcagtggtgtccaaccctccttactcacaaaactgggaccccagctttaaagagagcgatccacgctattcacggtttggcctggcacctaaaaccaaagcggattttgcttttttactgcacgacctctatcacctaaaaccggatggtattatggctatcgtgctacctcatggtgtcttgttccgtggcggtgaagaaggtgaaattcgcaagcaactcattgaacagaatcatattgatactgttatcgggctaccggccaatatcttttttggtaccggcattcccacggtaattttgatactcaaacaaaaacgcccaaacaccgatgtgttggtggtcgatgcctccaaacattttatgaaagaaggcaaaaacaacaaactgcaagccagtgatatcaagcgcatcactgatgcggtgattacacgaaaaagtatcgacaagttctcgcaactagtgagcaaacaaaccctgcgcgacaacggttacaaccttaacataccgcgctatgtggattcctctgcgacgacagaaagctgggatttacacgccaccatgctcggcggtattcccaatagcgaaatcgccgagttagacaacttttggcaagccttcccacaattgcgcagtactttgtttacgccaaaatccgccgcttacagtgagctgaccattgacaaacaagacgtcaatgccagcattagtgggcacccgcaagtattagagtttatcagctcctataaccaggcctttaatgggtttgatgaccagctaaaagcccagttaatacaaaactggcaaagcgtaaagcgtaaccagcaagaggcggtattaagtgccgagctattttctcgcctagcccccattgccttaatcgacaaataccaagcctaccaatatctaaataaccaatggcaactcatcagcgccgatttagaaatgatgcaaaccgaaggctttgctgccaccaaacaaattgaccccaatattgttataaagaaaaaaaacggccaggacaccgaagtacaagacggttggaaaggccacatactgccctttgatttagtgcagaaaacctacttaagtgatgacttaaaagccctggcagataaagaaacccgcctggcggaaatcgccagcacgctggaaggaattttagaatctctaaccgaagaagaaaaagaacaagatacggtcaaagaaaacaaagacggctttgccaatgccgaattaagcaaggccgctaaagccttcttgaaagaacaaaaagacagcaaagttaaattcgcagaagaaagctatgaagccaaaatcattcgcgcgaacaaactcatcgatgaagaaaaagccctgaagaaaacggtcaaagatgccgccacagccctgcacttaaaaaccaaaacgaccatcgaaacattaactgatgagcaagttaacaatctgctgcaccttaaatggattgcaccattgagcacagaacttgccgccatgccaaacgcagttattagccaacttactagccaggtgcaagcccttgccgataaatacgccgtcacttacccgcaagtagcgaatgagataaaaaccacagagcttgaactggcagatatgatgggcaagctcacaggtaatgagtttgatatgcagggcttggcagaactcaccaacttattgaaaggtaaataa

SEQ ID NO: 393345 - DNA, 1017 bp, Salmonella enterica
atgattggctcatccggcagccttaacgtcgcgccggagcttaacattacgcctgctgctgcgggaacccaggctctgctgcctaatcaaaatgatttgtttcccagtacaatgagctatccggtctcctactggtctcgcaaccagggaacagtctctaaaacgattatatttgaccccaaattaagtgagttcaccgccgaccctaacaatcctaagggctggttagtggacagcgccgttccggggctctattttacgctctccgtcaatctgcctaacccagccagcaacaaatggggaagcttttcacccgcgatgcccatctggctgtcaaatgacgccactatcaatcagtcagcgccccagaccgggtggggatgcgccagcgataaaaatgatacccacactgaagatacgaatatgacgttctccctgaacttttataccacagcggatttcgatcccgctaaggcggcggggaaacagctactggcatccagaaaacgtgctggcactgtagacaacaccaagctgagcggtggggaatttgatatttttttacaagggcctatcaccatcgcctctgccagctgcgctgcctttaatgcggatgacaatattgatttaggggagttatacgcctcagatcttcgggcgaatccttccggtgagtttaataaaacccctttccagattacgctcagcaactgttatgcacagcccgatctgatagtgaacttatcaaccaatcaggtaaaaaataatttactggtgaatacgaacggaaaagcagctggtataggcgtcggcctgggatatacagcaggaacaaccaatgagcgtcttgatatgacgcaagccgtgacaattgattccaataatctgcattataccggcgataacggcaacggcaccctggatatgtatgcttttctgagcgcgaccgacggcaagtccgccataaccgctggttctgtcgacatcagcgctgtcataaccttatcccatccctag

SEQ ID NO: 393346 - DNA, 993 bp, Salmonella enterica
atgttcagatttaaacgggggttattcaccgctctgttcatgacttttattgttatcgcatctgccgctgcaatcctgtaccagccctgggtgacacctttgccagtcaacaaacagcatgccgatccacaacggctggagaaagacgttcgctatttctccgaaacgctttatccacgcagcgccgatcgccgcgagcatctggacgccgcggcaaagtatattacgcaggtgtttgagcaacacggcgcgcaggtcagtgaacaggccgtgccgataacgggaggccctttccgtaatatcatcgcccgctatggcccacagcaaggcccggtgatgatcatcggtgcgcattatgacgccgtggccggagatgatggtaaggctatgcactacacgcccggcgcggacgacaatgccagtggcgtcgctggtctgctggagctggctcgcctgctgcaacacgcgccgctaaaaaccggcgtcgaactggtcgcctacgcttcggaggaaccgccctttttccgcagcgatgaaatgggcagcgcggtccacgccagcactgtgcagcgtccggtaaaactgatggtagcgctggaaatgatcggctattacgattcacagcccggcagtcagcgctatcccttttccgcactcagcgcgttatatccagatcgcggagattttattgccgtaattgggcggctgaacgatatcagcgcggtgcgccaggtgaaagcggcgttgctgggtgccgaaggcttaaccgtctactccatcaacgccccggaatgggtgcctggtatcgacttttccgatcatatgaattactggcgtcagggcatcagcgcggtgatggttacggatacggcgttttatcgcaatacggaatatcaccagccgggagatacggcggatcggctggattatgagaaaatggcaaaagtggtggatggggtttttatattattgatgaatgataaaaatgaataa

SEQ ID NO: 393347 - DNA, 174 bp, Salmonella enterica
atgttgctgcgtccttgcacccgtaagtccagactatctttgatggtagggaatttcttattaaaagtaatagcttctaaagctttttattatcaacaaattattttaactgaatttatttattgttttattaatgtcaatgaaatatatctgagcagagtgaataaaccgtga

SEQ ID NO: 393348 - DNA, 516 bp, Salmonella enterica
atgaatgtaaaaagtagttggtgtttattcttgagttttcttttgtttttgatcgtttatctggtaaatataaatacgaacgaaaataaaaatataattaaaaagatggagcagctatgtcaaaaaaaacagaaaattttaattatttcagatttaactgattttgactgggatactgtatatatagtagagtatggatttaaaccatctgagtacatttataatgaatttcatctgacaggaaaagataacatcactgatgatcttgatcttacgctatatttttcacttaacaataaagtcgtttacatcgaaaacaaagatagatatatggataaaatgtatagatatgaggataactatatacaatttatagataaaaaaatgaatgggcatacaacaaaaagtggcgtttcggccatctatacaaataaatcagtattacaagttggcatgagaaagaaaattaaccccggtgaaactgagaaatgcatcgttactcaacaagatgagtaa

SEQ ID NO: 393349 - DNA, 1023 bp, Salmonella enterica
atgtcttatggtccgtataaggaattcgttattgatggtgctaatataatttgcccgttatgtatgcaaatgaatgataatgtaacgagtatacctattaggagtgcgctgacgctcaaatctacagattgtgtaagcgttaatattcagcatcaacgggtatgcactgaatatgataagatgattatagttagctctccgtgtatatgtactaaagataatttaccatgtaaacctatagtaacagactggattaatcggcgcggtagcattgcaaatgttaaagcaaataagcatataatgttactggatgacgctacaataaaatgctcaagaggaaatgctatgctctctttcgttaactcagggcaaaaatcgtcggtgcctgttcctgatgatggatttatttccatgccatcaacaatgcgggaaagcggtttttttatcaggcacccatggaatgctgggcatatcgctgcttataacaaaggtgatgataacatatccaccattgcagtgttatttgctaatgggcttggatggagtgaagaagcatcgacagtgggcactttaacaaatgctttcaggcatgcaatatggcaggctatgataagtaatgaatatggtgaaaagatagctattgaggtaggtaattctcatgaagagcatccacttgctcttcagcaaattgatgctgcaaaaaaaggtggtttagttgttaaccacttactaaacgcagttgaagctgatgagcttgttgacctgtataataatattataggaagagaaacaggattaaagaatccagataaaaataatagcgaattggccaaattgcttttgaatatttttcttcatgatgggttgtatttctctatgaaatatggtgaaagcgatttttatactattgtcaggaaaaaaataactacagacatattcaataaatctatagagaatattgataatggtttggatgtgaaagataaagaaaggcaaaataaaagaggaatcgtatatttctaa

SEQ ID NO: 393350 - DNA, 222 bp, Salmonella enterica
gtgtggaacagccagtcagcacgctggccagaggggggcgcagcctgcgcctggctgatgccgctggcggaattgctgcaaacggaactgttaagccgcccggtgcttcatgcggatgaaacgccgctgcaaatcctgaacacgaaaaaggacgggaaggcgcagaacggttacctgtggtcatatgtcagcgtcgtcaatgtgagttcaccggaacgttaa

SEQ ID NO: 393351 - DNA, 270 bp, Salmonella enterica
atgtccacaagtggctgcgcctgcccggactgcggccagccgctgcaccatattcttgatgaaatcagtgagcggctggaatacatcccggcgcagttcgtggtgaaacgttacgtccgcccgcagtacagttgcgatgactgccagcgcgtggtctcaggccgtctgcccgcacagattatcccgaagagtatcctggagccgggactggtggcgcaggtgctggtcagcaagttctgcgaccgccagccgttgtatcaccagcagtag

SEQ ID NO: 393352 - DNA, 528 bp, Salmonella enterica
atgaaacgttcacttatttctgcttctgtattgtctgctgtatttatgagcgctggggtttttgctgcggagtatgactcaggcgttctgaatattaacggaaaggttgtgggtactacctgtcagtttgtggatacaaataccgctgaaattagattgaatgaaatcggtgcggataaagtatccagtttagacccaggtcagatttatgatgcagtaactaatcaaacccaggtcccgttgaagataaaatgtcaaccggatgtaacgccgcgtattaccttctcttcaacgcaatttgacagcaacgatatcacatttaataacgggtctgccaaaggtgtcggttttgcggtttactacggaaacacgaataatcagattgatccgcagacgggggtgacattagatccaaatagcaaaggtgagtatgatctgacatttttagcacgctatgcgcgtttagaaggtagtgttgcttctggtgatgttagctcaacgctgacattaacggtggttactgactaa

SEQ ID NO: 393353 - DNA, 597 bp, Salmonella enterica
gtggaaataaaaagaggcaggaagcgcgatgacagcgtacggttgtctatcctgaaggcaatgcttgaactgattgaagaagggaatagttttgcccgggtttccgtcgagcagcttgctcgcaaggcaggcgtcagcaaaaccacaatttataagtggtggccgggcaaagaggaaattttttgcgaagcctttttgcttcatgccagcgagacgcttcccgtactggaatatgacgctggaaaccaacgtgatttctatgcgcaattcattatccgcaccattgaaatgcgtaaattccatcgtgcccccgcagccagagtaatgattggcctggcgcttgagcatcctgccattgcaaaacagctttacgagagacatcagcagccacgttttcacgcgatgcagaaaattttcgctgactggtttacagaccatgcggcgccagaagatatcactttctttctgaagatgagtttttcactcatctacaatttttcagcggccaattctgatgacgaggtcgttatgcttattcgtcgtctgttccgcacaatatttccatactatgcggaactcgacttaaatcacccgtga

SEQ ID NO: 393354 - DNA, 939 bp, Salmonella enterica
atgaaaaccaatgaaaatatcgcgctcatttttgatattcagggattttccgtacatgacggccctggaggaaggacactgattttttttaagggctgccccttacactgcacctggtgcagcaatccggaaggcgaatacccaaccagagaagtcatgttccgcgaagatagctgccagcaatgctataactgtgtggaacagtgcccggaaaaagccattacggtattggccgacggtaaaatcgcatttgatcgtacacgctgccagcagtgcgaatcactgacgtgtgtggagtattgctatgactccgcgctcggtattgccggaaaatattacacgcaagaggaactcattaagaaaattgagcgcgaccgacgtttctggggaagcggcggcggcatcacattgggcggcggcgaaatgatgagccaatataagtttgccgcccggttcctggagcaatgccatcgcaactatattcatacggcgatagaaacctccggctatgcctcatggagccattatcaggaagtcctcaggcataccgactgggtctttgtcgatattaagcatatggatgatgcgcggcaccgcgaagggacgggcgtatccaataagctgatcctcgaaaatatccagaagatggcgcaacagcgtgacgcgtttcggctcattccgcgtatcccggtcatccctggcttcaatgacgatagccataatctgcgcgaaacggccagtttcctgaatcagattggcttacgggaagtgaatttgctcccgtttcaccggctggggtcgtcaaaatatggtcagttaagccgtgagtacgaatttgccgaaaccgcttcattaacccaggaacaactttccgcgatgaaagatcatttcgaaacgctgaatatccactgttatatcggtagcgatacgcctttctga

SEQ ID NO: 393355 - DNA, 255 bp, Salmonella enterica
atgactacggaatatacctgcaacgactgccagaaatgcgcgcctttcgatgtgtttaaaggcacctgtgaacattcgcaacaacgtgtgctgctggaatcgacggctcaaaactgcgccgcgttcgtgcgtaaaaaccaatgtaaattttgtcagcaatattgtgtgaaatccggtacggaatttgtcggcctctgtcaggagaaaatggtttatcccaccatgatcgcctgcaaaaaattccagccattgtga

SEQ ID NO: 393356 - DNA, 2646 bp, Salmonella enterica
atgttgaatacagaacaacaaaatgaaagttcccttcccctgagttttcaatacggtaaagcgcctgacgaagtcatggatcgtgaaatcaaagtcaccggttcgccgcgcgcgcaaaaattactcaatgattattatgaagccaaagtctcgctggataccgagtttacttactggtatacgcagaaatggattgaagctgaaggccaccaccctatgctgcgccgctcaatggcgctgaaatgtggttttgaacatctgacgccaatgatcacccgcggcgagttactggcgatgcagaaaacccgctatgttcgcggcgcctatatcatgccatggacgtcgaaccggtttccgctcaatagcgaagagcaaatggaaaccgagtccgccaaagcagcgacgaaaagccttgaagatgtcaccattgtcgcagaaggcggcggtaatgtgacggaaagtgtcggtaacgttctgtccatttcaaaacgttttggcgtccgccgcgaagaatatcccgtcattgttgagctgtgtcgctactggaagaataaatccgtagaagactcctcgtttatgtgggctgcgatgcatccgcgtttcgggcagttcctgaacatgaaaaaagcggtactaatgtgctcagatctggaaacctccgttcgccatggccgtaacgtcgttaacttccagtatccgctgcaaatcggctttaaaggcatgctggaaaaatgccgccgtaaaatcgctgaaaataccggcggttcgccggatagcctcgctttctggcaggggacaatcctcgtaatcgaaggcgtacaggcgtggattagcaattacgctaaagaagccaaacgcatggcggatattgaacgcgacccggtagtgaagcaggaactgtcggagatggcggatcgcctgacatggattatcgataatccccctcgcaccttcctcgaagccagtcagttgatgtggacctgtcatatcgccgtactgaacgaaatccagggttccggcatttctccggggcgtatcggtcaggtgctctatccattctgggagaaagacatcaaagagggccgtatcagccgcgaagagacgctggaaatccttgaatgtatgcgcgtcaaattcaccgggattgatctcgcgatggccgttggcaccattggtctactggcgggcagtaccttcaataacgtcggtattggcggtctgaaggcgaacggagcatccgctgaaaacgaactcgaagagctgattatggaagcggctatacgttgctccacgccgcaacccacgctttcaatgctctacgatagcaaactcagcgataagttcgtgctgaaggccgtcgagtgcaataaaacaggctccggcttcccggcctgggtcaacaaccgcgtagcgattgaatatttaatgaagaccttcggcgaagagaaaatttcgctggaggatgcgcgctcctggactatcggcggttgcctggaaattcagcccggcgcgctggtcaacggcgagatcggcgcaggctcttacagttctaccggcgttggctttatcaatatgccaaaaatccttgaactggtgctgtgggatggcgtcgatccgcgtaccggaacgcgcgtttttgagtcgcacggcctgccgctcgacagcttcgagcaggtaatgagccagtttaagcactatttccgcgaagtcgtggtgctgtttgaagagatgttcaacatcaagtcggcctccaccctggaagttgataaccccatcttctattcagcgctcatggccgactgcattgattccggtctggatatcgaccgtggcggcagccgttacaaccgctgcttcaccacctggatctccgggcaggtcaacctgactaactctctggcgtcgatcaagaaaaacgttttcgaggaacagaaattctccctcaacgatctcaaggccgcgctggaaaataacttcggctatcagaatgtgtctgaaaccggcaattactccatgttcgaccagaaacgcgtaaccaaccattgggcgaggatccattcgcagtgcctgaacgcgcctaagtttggtaacgatgatccttatgtcgatgatatctacagagatgttgttgagtacttccgcgatatcgtgcctgaagtcaacgatgtgtttggtcgcccctgggtaccttgcatgttgtcggtgacgacacacggcccgctgggacaagcttgcgtggcctcagcggatggccgcctgacggggctgaccctggcagatggcgcgcagtcgccttatccgggtactgatgtaagcggcccttatgccgtctttaactcggcgacctgcatcgatcactccgactttatgaatacgcagctgaataccaaaattcacccgtctgcaattaaaggcgtccaggggtcgaaaaaactccaggaactgattcgcgcctatatggataaaggcggctatcacattcaattcaacatcgtcgattcacgcatgttgaaagacgcgcaggaaaaccccggcaactatcgcgacctgatggttcgcgtcgccgggttcacacagtactgggttgaattatccaaaccgattcaggatgaaattatttcccgcacagaatatgaggaaatctaa

SEQ ID NO: 393357 - DNA, 747 bp, Salmonella enterica
atgaacacagtaacgatcaacaacaaacaacttccggcagtcgaatatcacggtcagcgcgttgtgacgctggcgatgattgatgaagtccaccagcgaccggaaggcactgcaagcgctgcttacctacgtaacaaagagcgttttgttgaaggggttgacacgtatcttattgaatattcagaaaacaacgtattacgtcctttcaatgttgatgtgccttttcgcggcctgagagtatttacggaaaccggatacttgatgcttaccaagccattcaacgacgatttggcctggaaggttcagcgcgacttagttaatgcctatttccgcactcgcgcgccgctgacggaaatcgaaatgatcgcagcaatggccgccgacgccgttcgccagcagaaacgcctgaatcaagtcgaattacggatcgagacagtaaccgaagccgtcgagaacatcaaacgcggaaatatgcgcgccggatatgtcggctatcgccaggtggtcgccaaaagcggaatgactgacgcgaagtgtcggaatctggttaacgcttaccgcatccccaccgatacgcatgaatttatgacacctgacggccttttgtcccgccggactatcgttgaacttgagccgttcatggaagccttttatcagatgatgtcagaagctgaaccacgcggcacacgctggtatcacccgaagatggggctgtttcaggctatcggctgggagggcaaagcatga

SEQ ID NO: 393358 - DNA, 225 bp, Salmonella enterica
atgaaaatcgaataccaagactatggcgccgtggcgaacatcgttatcaccagcacggtgtttgagttccgtaaacataaccgtgtggtagacgccacgctgctctgtacacaaggaatagttgcaaaccgcagtggcatgttcttcatgaagacggttttttccggtaaatctcgcgacatgctgcgggcctacaaaacaatccagctagaggtgacaagatga

SEQ ID NO: 393359 - DNA, 372 bp, Salmonella enterica
atgcaaaaggtttatatcgatacggaaaacttaaacacaattacccactgtctgaagcaactggcgaaggctgaggaggcacaattatctattgagatccaattggataattcgaactgcagcagtgaatggagcacttggcgaaaaaacgcagaaaaagccctgcgcattgtcaaagcaaagcgccgcatcattaccgcgcgcctgtctgttctgcgccaggaggaaaaagagcgaaatatgcaactccaccagcagcacaatgattttctggttcaagccctgcgtgaaattgtgacgccctcttcgtttgagcgctgtgtacgcatggctaacaagaaaatggaggaattacatgcaaaccagtgctga

SEQ ID NO: 393360 - DNA, 303 bp, Salmonella enterica
atgcaaaccagtgctgacatcgttcttctggtgccgaatgattgggttagcgaaaaggttctgattgcggttaccgggctcaagcccggaacaatcacccgggccagaaaagaatcctggctgctggggcgggagtacctgcacatttcaccagatggcaatcccaagccttccagcgaatgcatgtacaacaggaaagctgttgatcagtggatcgaagctcagaaaaaaaatcaaccaggtacgcagaaagcattaaaagcagtacactcgtccatgctcctggacgtcaggagggattaa

SEQ ID NO: 393361 - DNA, 6402 bp, Salmonella enterica
atggacgggaaactgcattgtaaactataccgcttattgctgacgttgctgctggctatcggcgtatgcataatgccggcatctgcaaatctcaagggcggaacctggcaagagctggatacctcgacgggcgccatcgatggcaccgtgcctgtggccgatggcgcgataatccctgtttatcagggcagcgtgatgttgacgccggacaaaacccatcaggtgggatttgccgccatgccgaaagatttttccgttgatgacgccagcagcgccatgcaggtcatcaacccgctggatgccgaaggcgatattttcgccatcccttcattattttgggaaaaccaacagtcgccagccgctggcctgatatgggccgatgccgccacgccggatgaaccgcttaatccccagcccgtcgctaatcaaacgttttgcgcgcagaacatggcgggacgtcatttagtggtctggccggaaatcgacaccagcgcctcggcgacgattccggcgctgtatcttttaacctctaccggcgttcccgatcgtaatatcctgccgctgttacagcaaaagatcgcgattgatatcgcgcctgcggtgagcgatcccgtgtcggtcagcgccagccattttgatgaaacgctgaaggctgcgaaggttaaagtgggagaaagtattacgctgacgattacctcccgcggctgtgacggtgagataaagcctaatatgccctttgttattgtgcgtagcgatgcgcttaaccgccagaacgcggtaaacaacaccgcgccgctacacgttggcgataccgagctgacaacgaccgccacggaataccacggcactacggatgcgaacggcaatgcgacggtaaccattacccaggataatggccccggcgtgcgaacaacgctgacggtgaagccggctgatacaacgctttcctccagcattgacgtgattttcactacgccgaccagcccggatgtggcaaccgcgaatatgtacggccacatgcaagatagcgcccccgctacgctggatggcgttacctacacctttacccggcccagactggcgatggaaaccagcggttttgcgcatacgattaacgaaaataacgaaacctgggcgcagtttacctggagtggggccgatagccactgcgacattttacccgccgcagaacaactggtggcgctgaaaaatgcccatattgacctgccgcgccataccgactggccgttggggagcaccagcgaatactggtcgtctacccgcgatcagctggattcttaccactatgccaccaatatggcgacaggcaaggtggtgcgggaaagcagttcttccgcttttctggtgagctgtgttgataaagcattgccgacagcgcacccgcagatatcgctctcgcccgaggggccctataaggcaaaagtgggcgaagagattgatatcgttatgacggtggtggataaggatacgcaaaaacctctgccatatcgctatgtagagctgtttatcgaccaggcgaagaaccgtcaggggatacataaagacgagtgggataatcagcgggttgttattttgtccgatgatatgcgcgcctcctcgccggaacactataccggcgtgaccgatgcgaacggccagactcacctggtgctaaagcatgacgctggcgtcggcgtggagacgccgatacgcattgtgatgaacgatgacgatggcaacgccgtcacgcagccgtttagcgttatttttaccgtcgaaaccagcccggacgtcgatggcgccaatatgtacggccatatgcggggtgtcgtggatgccgggaatctgtataaacggccgctgctggcggtcgaggccagccataaaaccggccagcagagcgaaaataacgaagagtgggcgacgttcaactcgctggaggccgcaacgcaacagtgcggcaccgggcaggtgccgggaacgtcttcactgacgcacctgtatagcgagaatccgggcaacgcgatggaaaccgatcacggttggccgacgcaaagccatgcttatattgcggcggaaacccgcgatacgcagatggcgcacgtcagcctggcaaccggcgacgaaggctatagcagcgaagcgaactatctgacctgttccgctaatgaaatggtcgcgatacttgatgtctggttcaacgatgatacaacgctacgtaatgcggttgctcaggtgggccagcaggtgaaaatgaacgttcactcaaggaatgccctcaacaacgaggtgctaccgtataccgatttcactatcaccatgcaggcgggcaaacggcgtgatggcctgtcgaccggctttaccgatcccagtcagggcgagttgattatcggcggcgaagcccatgttagcgggcaagcggcctggcggggcgtaacggatgcgcagggtaacgcggaggtaatgattgagcagccgcggggtgtggggcttttgacgccgctggacgtagcgccggtagactcgctgattaaaaccccgctctcacgtagcgtgaagtttaccgttgtcaccagcccggatacgccggatgcgaacatgtggggccatatgcccgacacggtgagcgtggggaatatcacctttgagcggccaaagctggcgtcagaggcatcgacaacctacacccatgatgaagccaacgaatcatgggcgcgcgttcctcatgctgacgccgccggcaataccgcgaaggggggctgcgcggtgaaccggctgccgcggatagaccaactggaggcgttatacaatgccaacagcggcggagcgatgcacagcaccaaaggttggccggtggcctggcagtactggtcttccacgcaggccagcgcgacgtcgtggaaatatctggcgctggacagcggcaaggaaagcgcgacgggcaataactctatctatgtcagttgcctggccagcgataacccgatacctgcctctatcaccattgaacccgtggatgcctcgctgtggtatgacggcagcggcgtacatgcggcgaaggtgaaaaaaggcgatacgctccagttgaaggtgacggtgaaagacgccagcggcaatccggtgccgaatgcgccgtttgtgctgaatcgcggcgatggctatacccggcagaatgtaaaacatattgcaggcaccaccggcgacagtattgtttcatcgatggtgatcgacggtgaatcactgaacgatacggcaaccaaaatcgggaagatgaccgacgcggacggcacgaaaatcatcagcgttacccgcccggatactcacggcacccgcaccgccattaccgctacgctgtacgataacgccagcgtgagcgccagcatcgacactatttttaccgttatcaccagcccggacagcgataaagcgaacatgtgggggcacatgctggcgtcgctgacggcggcggacggcaccgtgtatcagcggccggtgctctacactgagcttagcagtaccagtaacgtcgcccaatatgtggaagataacgaattctgggcgggctttttcgggccgaactacggtgaaaacaatccggcgaactgcgcctccggctattatccgtctgtggccatgttggattcgctctatagcaaatatcctaaccggacgataaaaaccgcacagggctggccgattgaccactcttactggagtggggacatcgtgtcttcatttggcactacgcaaccgactaactattacatcgttgatctggatgacgacagccggcaggcgatgagcagtggttatagaaacggcatgcagtatcagatttgtactacgacgccgcagccgcaggccgcgcaaatcgtgctctccagtgcgcaggcaaaagacgccggttcgcaggcggtgaaggtgaaaaacagcgagacgctacctctggtcgtcaccactaccgatgcggcgggtcatcctgttggcaatacgccgtttgcgctcaagagcgatgcgggggtggcgcgtaatgccagttatagcaaatggtcatcggcggccatgcaggttacgcaacctggtcagtcgccgcagtcgttggccgccgacattgtgctgtatggcgtcaccggcgctgacggtacgctggcgtttgaccttggcgaagccaacgggccggggattaaaaatacgctgactgccagcctgaccaggctgccgtcggagacctcggcgctgtcggtcattttcactgcggcaaccagcccggatagcgctaaagccaacatgtggggtcacatgccggaaaccttcagcgccagcaacggctcggagtttaatcgcccgctgctgtacagtgaactctcctccaccacggacacatcaacctacacgacggctaatgaaacctggtttacggtgaaaaactttgaccaggggcgcggcgcgtgttcagtcgagcagatggcgacggcggccgattatcattcactgtatgccgatcatccaggtggcgcgataaccaccgatctcggtttacccactggcaaaagctggtggtcgggcgatcgtgttctgaaggggcagtcgctttactggcagtatactaaccttaaaaacggtagcacgaacacgtcaacgtccaccagtagcagttacctgcagctttgccgttcccgctcgtcggagatgcacgttacgctcgctttgacgccctgggacgcgcaaagagcggccgcggtggtgaaaaaaggcgaacaggttaccgcgaccgttacggtgaccgacagcgccgggaatcccgttagcaacgcgccagtgaaactgacgcgcggcaatgcgctgacgcgtgcggggagcgtatatacgacaaacagggcagatgatattacgctaaatgatatacagccgtccgatacggcgaccttcctgatggataccaccagtaaatacctgtatgtgcaaactaacgaactggggcaagtgacgtttacgctttctcagaacaatagcgccggccttaaaacgccgatcagcgcctcgctggtgaacgacgcttcggtaacggacagcaaagacgctatctttaccgttatttccagcccggacagcgacaaagccgcgatgtggggccatatgccggaaacggtgaccaacagcgcgggcgtgaccttccgtcgtccgcttttggccgcagagatgactccagcaagtgtggatcacacttataccgaagacaatgaagcctggccggaggtgtccaaaaatgatgcgcaaacgaccggcgtgaccggctgtgatgaggcgtatcagccgctgctggcggatctggaaacgctgtacggcgaccatccaaaaggcgagcttgccacgctttacggctggcccgtgaaatccgcgggatactggtgggcgctggatcgactgccatccggcgcttaccagtatatgcgcctggataccggggagatttcgtcttactactcaccaatgatgagcgcggcgcaggtttgcctgacggatcctcatgcgccgctaccggcggccattgaactgacttccagcgcttatgatccgacaagccaggcggcgaaggtgaaaaaaggtgaagagatcccgatgaccgtgacggtaaaaagcgtcgacggtcagcccgtgcgggatgccccgtttacgatttctcgcggtgatggcctgtcccgcagtggcgcagtcaaaacaactgacggcatggggaacactgacgatctgacgctccaggagttggcgccagtagcggcgacagtggtaatggacaacaacaccagtacctttaaaggcgtcacaggcgcggacggtatggcgacgttcagcctgcgtcaggacgcggcgatggggctgaaaacaaagataaccgcgacgctgaattacttccctaatccggcttccggggttgacgcaatatttaccgtcattaccagcccggattccgctaaggcgcagtactggggccatatgccggaaacggtcactaccagtaccggcgtgacgtttcatcgcccgtttttagccgcagaagtgccttcaggcaatgattcttatcaagtgaacaatgaaacctggtcaagcgtaaacgcaaagaatatgcagatagcaggcgcaacggggtgtaatacagaaaaacagcctctgtttagcgaacttcagacattgtataacgataacagcaacggcgcgcttggcacaaaatatggctggcctgtggaaggcaacagcaactattggtgggcgtctgatattgattctgaaacaaatacctatcagaccattaacttaaccaatggcgaccaacatgattccacctcaacatcgttatacttccggcaggtatgtctggatcaggcgcgggggacggtgtcgtaa

SEQ ID NO: 393362 - DNA, 201 bp, Salmonella enterica
atgatgaacaatgatcaggacatgcttatgcctgtagctctggatcggttgcgggcattttatttaaatccccggattacccgtaactatgatgaacttaaagaattgattcgataccactctttcttgaaaaattattatatttatatgtgcaactatcatgagttcccggtatggacatataagctaaagaaattttag

SEQ ID NO: 393363 - DNA, 864 bp, Salmonella enterica
atgacagttttcaaacatctagcgctgcagtgggggcttccccttgccgagcttatcgcaatcttctggctgagtctgttttactactcggccattcgcgctctgctgccgggccatacaccaacgcttgcgcaagcgctggtgcaaaaccttcgtctgctacgaagcctagtcgccattctgatcggcgcaagcctagctctcgcgggaacgctgctgcagaccctgacgcataattcaatggcctccccttcgctgctcggcattaacagcggtgcggcgttggcgatggcacccaccagcgccatcagccctgtgcccataacgggttactccatcgcttttatcgccgcctgtggcggcggcgtaagttggctgctggtgatgaccgcaggcggtggattccgccatccccaggacagaaacaaacggatcctcgcaggtatcgcgttctcggatttttgtatggccctgacccgcatcaccatgctgctgacagaaaatcacgcttacggcattttttactggctagcgggaggcgtatcccacgcacgctggcaggagttctggcagcttttcctgatggtggcggtcgctgtaccggtggtattgctgctggctaatcagctgaacctgctgaacgtcagcgacagcactgcccgcacgctgggggtgaatctgccgaagctacgtttaatcatcaatattctggtgctgcttctggtcggtgcctgcgtcagcgtggctggcccggtggcgtttatcggcctaccgcctgccgcgactgctgctttctgtagttgttttttctatctccgatggataacacatcgctgtatacacaacaagcaacaggctggatga

SEQ ID NO: 393364 - DNA, 1302 bp, Salmonella enterica
atgaccagacaagagacgaacaccgctgacgctgcggtcttatcccttaaacaacttgtggaattcgcccgtcgacactcttcttattacgcccgactttaccagcagattccgcaaactggctggcagctatgcgacttgccgctggtagatccccgtgattattgggaaggaagtagcgaactaactcattggccggttttaaccgggtccgttaccgactgtatcctatttaaaaccggtggcactaccggtgccagcaaactgtccgtttatacccgcagcgaatggattgcatttgtcaccagttttggccgtagtctggcaaaccatctgcatcccggcgaccgcgttgcgaacctgtttttcgccggggatctttactccagctttttatttattcatggtgcccttactcatatgggtacgccggtatgcgaatatcctttcagcggcatgatggagccgcaggcattatttgaccagctcaaccagcatgagatcaacgtcctcgcaggcgttcctgctaagttattacaatttgcggcgagaacagtggcacaacagcagcagttacctggtattacgctgattctctttggcagtgagagcatatttgcagaacaattgtcgctgcttaaacaagccttccctaatgctcgcattgcttctgtcggatgcgccagcgttgactcgagtttgattggtgccagtactccggagtgtcttgccggagaacatcgggtctttgaacccgaaactatcgtcgaaatcattgatgaagtgaccggagaatccatccttgaggaggggcgcaccggcatgctggtcgtcactaatctgacgcgtaagctcatgccgctgattcgttatccggttggcgatcttgctgcctggcgtgaaccaccggggaaaccagagcgtaagttcgttctacaaggacgaagcagtctcgggcaccgtattcgcgtagcctgttcttctatttttcctgatgagttcgacactctcatcaccgaaatgttcggcagacagcagtggcagatgatcctggatcaccataataattgcgattggctgactctgtgcattgccttcaccggtagtgatagccatgtggatgctctgtatcattctctccaggaaagagatcactcattcgccgctctactcgaaacaggccagctgcgaatagtcattgagtggtgcagacaggatgagcttatctgcaactcccgtaccggaaagttgcagcgggtgatagaccgccgtccgtatgtaacaggggaagagggaacatga

SEQ ID NO: 393365 - DNA, 255 bp, Salmonella enterica
atgtcaggaagctatatctcagtaaaaagtataccgtttttacttattctgacgatttgttcatgcgcacagtatgatgcaaaaaaagataactgtcagtacattaacgggacatgctatacgcacgattataatgctataactaatggtgagggggtggatatgaccaccccaatgacaaagccttatcagtcagatacactgcacgccatcaagccaaataatccggagcataaagaaaagaaattgttttga

SEQ ID NO: 393366 - DNA, 252 bp, Salmonella enterica
atgctggaaatggacggggaagcggatcacgttcacgtactgatggcgtacccgccgaatctgtctatcagtgtgctggtgaataatttgaagtcgatcagtagccgccgtgtgcgcatcctgaacacaaatttacgcaaggcgagtaatagcggggtgctctggtcacgctcctatttcgcctgtagtgctggcggtacaacagtcgaaacatcgaaggcttacgtagcctcacagcccccccctgattag

SEQ ID NO: 393367 - DNA, 213 bp, Salmonella enterica
atgccgtcgaaaatcttgcggcgatatttcgtcttgacatcctcccgccctaaaggacggggaggatgtcaagaggcctgtcaggcgctgcatgccgatgaatgggatgccgggtttatgtcccaggactgggaaggtatcccgtcgcagttcgtctctgaatgctccattgactgggattttatcgccgcttacaaacgcgccgaagaatag

SEQ ID NO: 393368 - DNA, 303 bp, Salmonella enterica
atgtttgatgatgcgtaccacggcgaggcggaaagcgaggaagactgcgcacaggagatggtggaggacaacggcctgttaaatgaggtgccggagtcgctgcgcagctatttctattttgaagcctgggtgcgtgagctgtcagcccgcgcgaaaacccgggcaggctgcgctgtctctgcccggcccctccggggcagcgggtttccatcccaggctgtcgcaacatcaaaatcccgcttgctgcatcctgtaaggatgcgccgcatgaaccgtggcggtaataaattcccgccactttaa

SEQ ID NO: 393369 - DNA, 540 bp, Salmonella enterica
gtggctgaacacctatcacaatatctccaggtgcaaaaccttgatccggtgtttaatgtcccggagggaaaagagacctcgtcattctgtaaaaaattgatgcagaaaacggacggtttcactgaaggatttgcattcgacatcgcctctgcgttttcgtgtgccagtggtaaacgtaaacgcaaacctcctgtactccggcgtagagctatatctgctttgctgaaggccatgtgcttctattatgatccgctatcaaatacagtgattcgttcagtgactgagctggcacttgaaggcggattagccagaaagtcggctagcggtcatttgtccattgagcgtgctgttcgtgccattaagtcacttgaggaagattttgggtttatagtctgtctcgcgccgtcagagtttaataatactcagtatgttcactctataataacctttacaccacgcttatttgagtttttgggggtgtctccgctggcgctgattgaagccagactggtatcgaatgctgggggagatagtgagtaa

SEQ ID NO: 393370 - DNA, 231 bp, Salmonella enterica
atgctgggggagatagtgagtaaaaatactaacccactccactggagtcagcttgatacggaagaccaaatccgtttctggcaggacgttgatgacggacacgttgattcttttctggtagccccggaaaagaagcgtacacgtcgtcgtcgcggcgagcattccaccaaacccaaatgcgaaaatccgtcctggttccgtcctgcgcactataaagcgctgggggggtag

SEQ ID NO: 393371 - DNA, 774 bp, Salmonella enterica
gtgaagaaagatccagtgacggggcagtacagtctgcgcatgcatatgtctctgcaccctttttatgtccgcgaacggcagcgtgccgggcgtaagtacgcctttcgtccggagaagcaacgactgctcgatgccctgtggccagtgctgatcagtttttgcgatgccggcaaacataccgtgggcatgtgtatttcccggctggcaaaggagctgagtgctaaagatgctaaaggtaatgtgattccggaaaccgaagtgacagtgtcacgcctttcacgacttatcgaggaacaggtacggtttggcgttctgggcctcgcggaagaacgtacctgggatcgtgaatcccgctcctggttgccgacctacgtttatatcactcccgtgggattccagatgctaggcgttgatatggacaagctgtttagagagcaggagaaaaaactccgtcagagcgccgagcgcgagcagctgatccgggaaggtgtgatgagcgaacatgatgatgtccagccccactccgcgcgtaaatgctggtctgaccgtaagcgccgtgaagcactgctttaccgccgcaaaaaaggcgctgagcgcaaacgtgccaacaatctgattaagctgtcggcagatgaacggctccatgctgtgtctgaatggatttaccgtgccctgccgcctgacgaagcgtactggtgcacgtctgaacgccttaaagctctggccttccagcatctttaccagctggagcgtgcgctttctccaccggactag

SEQ ID NO: 393372 - DNA, 348 bp, Salmonella enterica
gtgctgcgcctgcaaatatcgcggccactgcctgctaacgcggatatgccccagctccggcaggctggcggggttaatcaggtcataactgtggcgcagcagccggataaccgccccgcgccaaatttcttccacggggtgctttttaaagaagatgttcttccagatgccgtgtttaatatcgggcccgccgcgggtgacggacaggtgaatgggcgggtgctggttgagccggcgaccgcaggtgtgcagggcgctctccacgccctgccagcgggcccaccggagcatggcttgggtaaaataaatgttatcaatctgtgtaagatgtttatttatgccgcgtaa

SEQ ID NO: 393373 - DNA, 315 bp, Salmonella enterica
atgtttatgttacccaaaccgcttcctgatgcaggcacaacattttcgtggctgctagtaggatgtttttcagcatggggcggtattgtccggtatttaatggaaaacaaggcatccgggaaaaatttttcatggcatgaggtattaaggcaggtcgtgatttccggatttactggttttttagcggggatatatagctatgagcatggatacagtaacttgatgaccatggtttactccggtcttggaggggcgctgggcggttatctactggacttgttatggaaacggtttactgattcattagaaaaataa

SEQ ID NO: 393374 - DNA, 699 bp, Salmonella enterica
atgcacccgcgcgatcccagagatctctccgaaccaaatcaatcactagatgatattgtgaagcgttttgatgcgctttataagtactcgcccttgcctttttgcattcgcaatcaatccagaaaccccatatataaaaatgatgcatatttagatttcttccacccattatctaagtatttttcggggggcagttttgattctgatgaagttgagcttgatttgtcgacaattgagttggaggcctttgttatggggccagatacagctatttgtagaacttttaatttgaatggtgaattttatcagttacgtgttgaagttcgtatggtaaataaagaattatatgctttctggtttgttaattacttcccggattatcaagctttattcaatacaacgaataggataaaaagtaatgagtttgattttgatatttttctatcagggttgacgaataaaaagatgattacgttgtgtttttcaattcttggttttcaacttcatgcgatagcgcaatatttaggcgtctctgaaaaagcaatttcaagcagactttctagtgtgaagaatgagcttgcgaaatattttactgattatgatgacttcagattctactgcatgaaaatggatgtatatagaaaggtgagaatggttgttcttaaagtcttgaatgttaaatttatgttaaaaatgtag

SEQ ID NO: 393375 - DNA, 195 bp, Salmonella enterica
atgattagacgtcacaggcttcgtggcacaacggtaactatgtcgatctacctggacccacaaactaatcttcttattttgaaagcgaaggacagaagtggtcgttctaaatcagctgaagcgctggttcggctacgtgaccacctggaaaaattccctgatttctataactctgaaatggcggaggtgatataa

SEQ ID NO: 393376 - DNA, 171 bp, Salmonella enterica
atgcgcatggtatttttttgtgtattgccttcgttattgtcgttttttcctggtcagctcgatattactatctgtagaccaccaaatggcaggaaaatgcagaaagaagccaatgcgtcagtcaggcaatatgaagttcatacgtatatgttaaataaaaatttgaaataa

SEQ ID NO: 393377 - DNA, 426 bp, Salmonella enterica
atgaaaatcggtattaatggtcttaatctcatcaaagagtttgaggggctaaggcttcaggcctataaatgcccgtcggatatatggactattggttatgggcataccgccggcatcggtccggatgatgttatcaccgaagcgcaggctatttccttattgtgtcaggatgtcgcggcgagtgaacgggcggtcaatcagtatacgcatgttccgcttacgcaaaatcagtttgatgctctggtttcctttgttttcaacctcggcgttgggagttttcgcacctcaacgctcctgaaaaaactcaatgccggtgattatgacggcgcagccagggaatttgggcgttggatccatgccggcggtaaagcgctgcccggcctggtacgcagaagagaggccgaacgcgcactctttctgaagtaa

SEQ ID NO: 393378 - DNA, 450 bp, Salmonella enterica
atggctgttaccactgaagacattgcagtgcaatatcccattcctacctatcgctttattgtaaccctgggcgatgagcaggtgccgtttaccagtgcttccggtctggacattaattttgacaccattgaataccgggacgggaccggtaactggtacaaaatgcccggccagcgacaggtgcctaatattacgctgagtaaaggggtctttccgggcaaaaatgcgatgtatgagtggattaattccattcagcttaatcaggttgaaaagaaagacatcatgatcagcctgaccaatgaagcctgcacggaagtgctggtcagttggaatgtgagcaacgccttcccgacctccctgacctccccgtcatttgatgcgaccagtaacgaaatcgcggtacagcaaatcacgctcatggccgatcgcgtgaccattcagactgcctaa

SEQ ID NO: 393379 - DNA, 1059 bp, Salmonella enterica
atgacagtgacaaccacttaccccggcgtttatctcagtgaagatgctgtatcgagcttttcggtcaacagtgccgctaccgcggtgcccctgtttgcgtatgacagtaaaagagccgtcaacacgaataacccgattcaggttttcagcaactgggcggaatttaccgccgtttaccctacgccgctgaacgatgctttttataccagtctccaggtgtggtttatgcacggtggcggtaaatgttatctggtgagcgagaccagtattcccgacgcggtggcgcaatacgatgatattacgctgattgttgccgcaggggtggataccacgacggagttcaccacggtagtgggtcagggctaccgtatttttggcctgtttgacggcccgaaagcgaaaattgccggcacggaaaagccggatgatgtcatgaccgcgtatccggcctccccgtttggcgcggtgttttacccttggtgcaccctggcatcgggtgaggcggtgccgccgagcgccatcgccgcggccgccattgcccagaccgaccgtgcgcgcggcgtgtggaaagcgccggccaaccaggccgtgaatggcgttaccccgatgttcgccgtcagtgatgattttcagggacagtataaccagggcaaggcgctgaacatgatccgcacgttcccgggccagggcaccgtggtgtggggagcccgcacgctggaggacagcgataactggcgctatatcccggtacgccgcctgttcaacgccgttgagcgggatatccaaaaagccctgaataagctggtgtttgaacccaacagccagccgacctggcagcgcgtcagggccgccgtagacagctatttgcacggcctgtggcagcagggggcgctggccggtaatagccccgcagaggcctggtttgtacaggttggcaaagatctcaccatgacccaggaagagattaatcaggggaagatgatcatcaaaatcggcctggctgcagttcgcccggcagaattcatcatcctgcagttcagccaggatatcgcgcaataa

SEQ ID NO: 393380 - DNA, 1335 bp, Salmonella enterica
atggctacagatacagctgtaccgggtgtttatattgaagaagacgcctcgccggcgatgtcggtgagcgcgggagcgaccgccgtgccgttatttatcgcgcgttttaccccgcttaagccagaactgaaaggcgtgattacccgaatcggcagctggctggactacaccaccctgtttgacagcaacgagccttctaccgcaactgtcaccgtgaggtcaacgccgtctgaagcgacagagcacaacggtgaggggacgaaacggtacacctacaattatgagattgagctcgtggaccctcctaccgcctccgtcgccctgcgactttatttccagaacggcggtggcccttgctacctctatccgctggaaacatcagacgataagaacagattggccgcgctgccgggtctcatcgacgaggtgggggagattacgctgctggcctgtccggagcccgatgaagcataccgtactgcggtatatggcgcactggccaactctctggataagcacaaagggtacttcctgctggccgacagcgccaatggcgacgtgcccagttcagtgagtaattctgcccaggtggcggcgtattacccgaacctggtgatgccttacacccggacgctggatggcaaccaggttgctgttaccggctataccgacgggagtgacacgacgattgccacgctggccgaccttcttaaagcgaacgctgactttgccggtaagattgataaagccctggccgaaaaacgaaatgtcccgctgtcgcttccgccttccgctttgatggcgggggtgtacaacaagacagacggtgaacgcggggtgtggaaagcgccggcgaacgtggtgctcagtggcgccagcgatgtcagcgtccgggtcaccaatgagcaacaggcgaagctgaaccaaaaaggcatcaatgttattcgtcacttcagcgatcgcgggctggtcgtgtgggggagtcgcacgcagaaagatgatgatgactggcggtatattccggttcgccgtctgttcgatgcagcagagcgcgacatcaaaaaggccctgcagccgatggtgtttgaacccaacagccagccgacctggaaacgggtgcaggcagcgattgataactaccttcaccgcctctggcaacagggcgccctggccggcaataaggcggaggaagcgtattttgtgcgcgtcggtaaaggcatcaccatgacgcaggacgagattaaccaggggcaaatgatcgttcaggtggggatggccgccgtacgcccggctgaattcatcatccttaagtttactcagaacatgtctcagtaa

SEQ ID NO: 393381 - DNA, 1236 bp, Salmonella enterica
atggcaatggttcttcccggggtttcgtacgataaaacacggttaacgcaggcgtcaggcgacgatccggtaacgatgcccctgtttataggttatacccttgctgatgtggcgataacggtcaaggcgatacagcccgtcagagtaagctcgctgacgcaggcgatcgaccactttgggcaacgtgggacgctggcgtactccctgcgccacttctttgagaacggtgggcggcagtgccacgtactgtccctcgggccagggctgggagaaccggccgcgcgtctgcacgcgctgattgccgcattacaggcgccgcagatgcgggagacgctgttagcggatgacaaaaccggcttggtcctggtaccggagctgagcgagctcaatgagattaacacgctcgggggagcggatacggctgaggttgacgtcgatgtcctgtggtatcagggctggcaggcattactcacattgtgtcatcaggcaccgcagcgctttgcgctgctggagttaccggactccccggcacgcgccgtgacgctgaccagacagcctttttccgcagatctgtgccagcgcggggcggcctggtggccacggctggaaaccagttacgaagatgaggcgtcggcccccgtggtgttgtcctccctgccggccgtcgcggcagccattcagcgcagcgcccacgataacggagtctggaaggcgccggccaatatccctctggccaaaaccctacggccgacccgaagtatcctgacgtctcaggcactgctgaataatcagggggtgtcctgcaacctgatccgcagttttgtcgggaaaggcgtgcgcctgtggggatgccggaccctgctcaatgaggagaacacggcctggcgctacatccagatccgtttgctggtcagcagcgtggagcactacctgaacaaactggcgcgtgcttacctgtttgagccgaatacggccccgacctggatgaaattaaagggccaggtctggacgtggttgcgtcagcaatggctggccggcgcctttttcggcacggtggaggatgaggccttttcgctcagtatcgggctggatgaaaccatgacggaagacgatattcgccagggaaagatgatcctgcaggtacgtctggcgctgctggctcccgcggaatttattgacataagcctgacactggatttgcgagctggtacggccagtgcgcaaaccggaggataa

SEQ ID NO: 393382 - DNA, 453 bp, Salmonella enterica
atgatgaatacacccgcggtatcccatcgttttctcgtcaattttttatttaacaacattcccagtccgtttgatatcgcgttccagcgtgtctccggcctgtcgcggacgctggcagtgagccaacaccgggaagggggcgaaaatgcccgcaacctctggctggccgaacaggtagatcacggcagcctggtactggagcgaggcgtgatgaacgcctcccccctgacgctgcagtttgaccgcgtcctgcgccgggaaagcacgcagtgggccaacgtggtgatcatgttgctgaacgagctttcattaccggtgaccacctggacgctgagccatgccctgccggtgcgctggcagatgggcgacctggatgccggcagtaacacggtgctcatcaacacacttgagttgcgctaccaggatatgcgcatgctgggggtaaaactatga

SEQ ID NO: 393383 - DNA, 168 bp, Salmonella enterica
atgaccgtagaaattcgtgagttgatcgtccaggttgaggtcaccgagcctgcaccgtctgacccgtccctgccgtttgcgcagcaccgtgagtgggacgaccagcggtgggtggagatgattaaacaagaggtactggaacagttacttgaaagggggcgtcagtga

SEQ ID NO: 393384 - DNA, 690 bp, Salmonella enterica
gtgagcttacttgaacgggggctgtcaaagctgaccctcaacgcctggaaagatcgtgaagggaaaatcccggcgggcagcatgagcgcgatgtataacccggagacgattcagctggattatcagacgcggtttgacaccgaagacaccattaacaccgcgtcgcaaagcaaccgctatgtgatttccgagccggtcggccttaacctgaccctgttgttcgacagtcagatgcccgggaatacccccccaatagagacgcagctggcgatgctgaaatccctttgcgccgtggatgcggccaccgggtcaccttactttttgcgcatcacctggggaaaaatgcgctgggagaataaagggtggtttgccggccgcgcccgcgatttatcggtcacctacacgctgtttgaccgtgacgccacgccgctgcgggccaccgtgcggttaagcctggtggcggatgagagctttgttattcagcaatcccttaaggcgcaaagcgtccccgaccgtgcactgattagcgtaccggatctggcctcgttgccgcagctggcgctcagcgccggcggggcactggccggcagcgtcgatccgttatcactggcctgggataacgacctggataatctggataattttcagtccggagacctgctacaggcgatgaaagagggggaggcatga

SEQ ID NO: 393385 - DNA, 1569 bp, Salmonella enterica
atgagccacatcaccctggacattgcgggcaagccgagcacattgggaatccgtcgtttgcgggtacagcagctgatcaatgagatcccgctggcgcagctggagctgcgtattcccacggataaccatggcgcagcggataatgcggtacaacgcgaagtcagtcgttttagcctgggtgcccgcgtggtgattacccaggataacaagccgcttttcgacggttatctggtgcaaaagaagatgcagctgaaggggaaagactggtccgtgcggctcgaggcccgccacgcgttgcagaaactgacgtttttgccccatagccgggtattccgtcagcaggatgacagcaccgtcctgaaggagttgctgcagtctgcgggggtgaagctgacacaaaaagcggcggcgcagctgagcagcaagcacgatcagctgatccagtttcgtctcagtgactggcagtttattcgcagccggctgctgtccaccaattgctggctgctgccagatgccgccagcgacgcggtggtgatccgcccgctgtccgactcggcaacggcctcccggcggctgactcgcgacagtcgcgactacacgctgtatgaaatcagtctgaattttgataaccgctttacgccggacagcctggcactgcagggatgggatattgccgcacaaaagctcacgccggcgcaaaaaagcgcggccgacgcgtttcgtccctggaagcctgagggggaggtcggtcagttttccgccgggcggcaagactacgccctggcgttcagcatgctgcctgaagcgacgctgcaggctatgtcgagctcctggctgaaccatcaacaaatgaccggcgtacagggccacattgtgctggcggggacccggagctttgccgcgggcgagagtatcaccctgagcggctttggggcagggctggacggtacggcaatcctgagcggggtcaatcagctgtttgatacgcagcacggctggcgtagcgagctggtgattgggctgccggcgtccatgctggagcccgcgccaccggtgcggtcgctgcatattggcactgtcgcgggttttaccgccgatctccagcatctggatcggatcgccctgcatctgccggccctgaatctgcccgactcgctgatttttgcccgtctgagtaagccctgggccagccacgcgagtggattctgtttttacccggagcccggtgatgaagtggtggtcgggtttatcgacagcgatccgcgttacccgatcatcctgggggcgatgcacaacccgaaaaatactgcgccgttcccaccggatgaaaagaacaaccttaaggggctggtcgtcagtcaggccgaccagacacaggccctgatgatcgacaccggggagaaaacggtgacgctgatggccggtgacaatgcgctcatcttaagcggcgagggggacattgccctgcatacgccgaacgctctgcaactgcaggctgacggtaacctgtctatcgacggtaaacagcaggtggagatcaccagcgcgaaaattaacatgaaaaaataa

SEQ ID NO: 393386 - DNA, 423 bp, Salmonella enterica
atgagtaacgacattttgacagcgaccctggggcaatgctgggcatttccaccgcggtttgctcccgatacgggcgtgtccctgacggcgggcgttgaggcggtgatgcagagtctgcgcgtgctgtttatgactgaacacggcgaacgcattatgcgtgagagctatggcgggggcatgcatgactttatctttgagaatatcaccgatgaactgctggccaacatccacaaccgcatcgaagaaagcattctgcgccatgagccccgagcgctgctcagggacgtcattatccagccgggcacacagaacgcgagccgtctgcgggtgcagatcaccgtgtatctgtcgggcacggatctggtcgagacggtggacgggacgctgaacatccatgacggccagacgctgaggttactatga

SEQ ID NO: 393387 - DNA, 420 bp, Salmonella enterica
atgagcaatctggtggtcatcgacggtgacgcgctgaaatttgaaaccaattttggtgccaatatcgttacgccagccgcgccctgcctgattcagggcagtggggaggctgatattatgaataaaaaaatctgtgtgctcggcgacgagggcaaggtgtctattgccgctacgtataccaggtccacacaccccacaccgggaacgggaaccatcaccattgtcgcgttggccgccgatcaacaggcttcgttcgtcacggcaggaacggccgtcattgtggtcggcagccaatttaatgcgcgctttacacccagttccccggcgatggatccgcaaggaaaaacggacccgaatatggagcctgtgcaaggaaccggcacatttatcaacagtcagtcgtttgtcactgccgggtga

SEQ ID NO: 393388 - DNA, 1824 bp, Salmonella enterica
atgtctgacctggagcaactgaaacagagagtgggcagcggattaaccgaccagaccttcctgctggagccacggacagggaaggacctgctcaatctggtagcaaaatataccgaagcggtgccgtttgccggctatgccgacgctgactggaaccgcttctggatggccggtcgcacaccggacgcgctgaatgacatctgtcagtcccccgagctggcagagaaaacgctgccggtacagcaggcgtttctgctggcgctgctgcatctgcttgagatacccagaaccctgctgaacacggtgccggcacggcaccgttcactttactaccgggatttactggggtttgtcccccgcgctccgcagccggacagcgtggcggtgagctttacgctgcaaaaaaatgcgtcaccgtatgcgttacccgccggcagcctgctggatggcggtcaggacagcgccgggaacagcatcacctatcagactgacgacagtctgctgatcaccggccagcagctggaacagctgtgctggacagcccagaatgaggatacgtggaaacggtataccgtcatcgacagcgcgacgggcgttgcgctaccggctgagggggtgcggctttttagcgaagtcggggaagggacagccactcaggagcgggctcccgtgctctatctggggttcagcgggacgtcggcgcaggacaccctgtcggtttactggtctgtgcgcgcctcatcggcgctggatctggcatggtgttattacaacggtaaaaactgggcctcgctggatgcggagctgcaggacgatacggcgggcctgtccgtcagcaacctgtggcgggcgcgactgccggcggacagtcagccggggagcagtcagctacaggacgaagagccgctggaggccgggtattgctggatcaaaggcacgctgaaagaaaagaaagcggccaaggacgagaacgcgcccttcggaaccatgccgaaactgcaggccgtgctggccagtgcgatgaccgcgaccctgaatatggcgcaggcgcttgacgacagccacttttcccagcccttgccagccaataccgtcagccggctggtgacgccggttgccgccatcagcgacgttcgccagcccctgccttctgtcggcgggcaaccacgggaaacggaggcggcgatgttacagcgcgcagcgccccggatagcccaccggcagcgggcgatcacctggaacaatatgcgcagcctgctgatggagcactacccggagatttttgatgttcgttttcccgatgtggacaaactgagtcgtctgccggcgcctgaggtgcaatcactgatggttatccctgacggtcgttatggtgacaacgatgacgcgttgcgcccggcactcagtgacggaaggttgacccggatggcgcagtggctggcgcagtacacctcgctgtgggcggcgccgacgctcagaaacccgaaatatatcgatgtgacggcccgctactgggtgacgttcgtggcgggtattcgccctgattatggttatcgccagctcgcggcgcagttgcaacacgactatatgccctgggcgaccgatcgacgccaggcggtcacgccgggcaatcaggtggactactaccggctgctggccacgctgcaacagtcaccgctggtgcagtccgtgaacgcgctggtccttatccacgacgttattgatgaagcgggcacccccacttcggtgaaaactcaaagcaccgtcaccgcaggggatgatgaggttctgattttgtgcccgaaaggagagactgatgtctaa

SEQ ID NO: 393389 - DNA, 2892 bp, Salmonella enterica
atgtctaaagaaaacgccctgttcccggtggtgaaggacgagattgcgtttgatgcgctgtggcaacaggctatcgagaaggtcactgcacttagtggtgaagtctggacggataccggcgatcacgatccgggcatcaccctgttacagtcggcgacctggaactgttccgatctcagttaccgcgcgtcgttgtcgctgaatgacctgctgaccaatcaagaccggacccccttgttcccggaagagttcggtcctgaacaggtgctcacctgcaatacggtgacggcagaggattatcgccgggccttactggacgtgcacagcagcgatattgacaccctggacacccccgggcaggattttttattcagcgatgtcagcctgattaaagagcctgaagggcgccgttttcactggtggtataacgcggaaaaacgcgaatacagcttcacggagccgacggacaccgctcctgaagacaagacgaggctgaccctgcgggggaatctgtggctgtcgctggtcccgacccgctatacccagtcgctgtcgcccgggaaccgggcggcagtggagcaatatctggctgcctttctcgcggcgcaccgtaatctcggcgaagcggtgtcgcgcattatctggctgcagccggcgaccttcagcccacggataacgattgaactggccgataacatcagcgatatcaatcaggtggcggcgcagatttatcaggtcaccgacgcgtttttacgcccgacggtcgcccgttataccaccgaacaacgacgtgcgctcggtgacgccgatgacgccatctttgaagggccaatgctgaaacacggctggcagcaaacggcatcctcacagatcacctcagggggatacgtcctcaacctcggcccgctggtgaacctgttgctggctatccccggcgtggccagcctgagcaccctgtcggtcgataccgacgacgggcacattacggccgttgaaggtggcaattggcgctggcaggtggcagacggttattaccctctgttgtggggaaccgcgccgctggagcagctggccacggccagcggcccgttaaccctggtgtcgaaaggcggtattcgcaacaagctggacagtgaggcgatggcgggctacctgccacaggaagacctgattgtcactatgcccacggtgttacccgccggccgctttcgtgatcagacgctttatattcccgtcgggcagcgcctgcccgaatgctatgccctgcagcagcccgatgccgtgattgacgacaagacgcgcgcggtgcatcagttcctgctgcctgtcgaccagctgctggccgacggagcggcagagctggcgctgctgccgaaattactggcatttaaagaccggggcgattccattcgggggacccgctggccctatacgaatgcgatggtgcaacaggctattcatcagccctacacgaaaacgctggaagcgattgagcagcaggatgcggctattttcacgcagggtaagcagcctgttgaatctaattatgcccgcgaactggattttcttcagtatctgctggggtatttcagcacccagcgggctgccctgccactgacgctggatttgccggattttctggcgacgcagcgggcgtatctggcacagcaacccgccctgggctatgaccgcatcaatatccgtattgaccgggtgtccgccctgcaaaagcgcattgcggcgcatatcggcttgggcagtacctgctttgctgaaaaaccggatctgagtcagctgccgttttatctgattgagcatcgccagttgctgccccaaaaaccggacagtcactttgacgataaacagacaccaacggcgtttatgaaaaacgatacctgcgtcaccctgacgcagccgggaagcgctggtaagattgtccggggacagcttattgacctgattaatgaggttaatcaatttcgggtgaatcagttactggtcatcgagacacacaaggacagctttaccatcagcacgaaaaacagccagcagttacgcaataaccttgaacgcctggcacaggccgcatcggatggtaatttacgctggcagaatagcaggatctggctgcaggatatggattatcggctgaattatgccaaagaggtaatgcagccgccagataaacggcagcgtttactggcgagcaatgcgcagagtccctatcccgcgattgtcagtgttgatgatgtcattgttatacgacccgcaggtctgcggttttccacccccggggcagaagaataccgggctgccgctgtgaatgcagactggcggcttgaggcaaccgttaaagcgatcgatccgattgcgggcacattacttatcgaaaaatcgccctccagcacggtggattttccaacggaagagaagagttttcgtttccagtgggctttcagtcgctcaaactatgcagcgacagaccggttttcatttgtggtcagtgctgtgttcaatcgcagcttgctggaaagccctaatattgaacctaacaggctggttacctgggtaaaggaaaccattatggcagagtttccggctcacatttccctaatcagccactggcttgatgactcaacctttaaaaactttggtgcgttatataagcgctggcagaacaacggtataccgctgggtgatgatgcctttgccattatgcagatgctgaccttaggccatctgccgatgatccaaccgggcatcggcctgatgcgcatcgccacggaggcgcagcgcattaaggttgttggtgacggcagcgagtggaatgaaggagtcatcctgcaagaagagctgttctacgtaccgaaagacgagccaaccaccctttaa

SEQ ID NO: 393390 - DNA, 705 bp, Salmonella enterica
atgacggataaaacccctaagaaagcggcagaaaacctggtgaatacccaggatgcattagcaaaaataacggacacagcgcgtgacagcgagccaaagagtaaagtcctgcctcaggccgatgcgctgaaggcccgctttaaggcgggcagtattccactgcagacggattttggggatttgattgatctggccaatattgggcgtaaggcagtggggggggcagaaggccagacagggccggctcagggttttacactctcagaaagcggctgtctggaattaaaactcaacgataaaatggggatgaccgttgatggaaacggtgtgggattaaataatgacgcctggataaaaatcatgtgtgaccttcatggcaccagggcctatataaaaggagaaggaattgccgcattctttgctacaggtggcaaatttggaggtggtattgatattattgcctatgtatacaatcgaagcggaaaatacatgttagccagtaaaagcgatattatgttgggtacttatcatcccgatgagatatttacaatagaagataaaatttctggtaattcagcggcagttatgattatttggaaaggtaagaagataaataatgtgagcggattctcctgtaaaataattaccccttatagtgggagaggtaaagctgaaagcgttgattttgagataaaatggctctaa

SEQ ID NO: 393391 - DNA, 1440 bp, Salmonella enterica
atgattaatagcaccttactctatagcgctggtgtcattatacaaacctgccgtattaacatgattgctctgacttcggagcaacaccaacgcaacgctgatttattaaccagcaaaaatatcagtgaaatatttcggctggcgttaaacaataaatggccagctggaagttttcgcattaacagattggtgcttaacttaggtgttattccggcagtgcatttttcggtatattttaaccaacgactggctcaagcgttagtgctgtgtttggaaaagttaatcgcacaggctgatactcaaaacacactgcctgttcacatcagaccagccggatttctggcaagtgcagaaaacaatcctgcgatgctcaggcaattggccattcgttgcttgcaaaataagaccttgctggaattgttacagaacaggcaaccgcagtatttacggacattattaaaacagctattacaaggcgttgataagcactcatctgcattagcggatagcacttatagtcgggtgacagccagccgactggggatagcagcgttgggctatttgctacatcaggcacaggggcgtgactggctgagccagcacactccctctgtcagtcagatgaccgactgggcagaggcagttgcccgaggcgaaattccgccagaacagatagcacagctactgactaacaatcggccttccggcactctattgcctgggcagcctgtctgttccctgttactggtaaaacactggttgttgccattatggcaacagtccgccatgcgccaggtaattcgtcgtctgaaaggagagcggggagtgcggcaggttgatgcttatctgcaccacgctttacagcgacaggaggttgatgccatgcgggacgaaatccaaacgcaggataaaccggatccattgagccagagtattggcaacgcaggtttactccttttgtggccactttttcctcagttgttctcgcagttgaatctgtgggaggaggggcagtttatcagcgacgctgtacggtggcaggctgtgtactgtcttgaccgtctggtctggggagaagctgacccggaagatgagcggttaacgctgaaccggctgttatgtaatatttcccccttcacctccataccggcgcactccccactgagcgtgttgcaacagcaacagactgacgactggctgactgcggtcggtcagcgacttgccggctggcagaaactgagcctgacggatattcggcagttgtttctgcaacgggtgggtgaaatcagcacagaagggacactcctccggattagtgtgaaaccgaaaccttatgatttcttactcagagactggccgtggccgatgacgctggcgtcttttccctgggctgaacagccactgaccatcgtctggccgctaacgggtctgactgggtaa

SEQ ID NO: 393392 - DNA, 2094 bp, Salmonella enterica
atgactatttcttcagactatcagcctgcattaattgtacaggacgactgccagttatcgctgttatacagcgagctggagcgtattgacctgctattacagctttattgctatagcctcagtaaaccgcgtgacgatgtgtttaatacgtttctgctcagcgaaggggaggttgaggcgcgaatgcaataccctgttggcaggcctcactgggcggcagacgcgcagtcgttatgtctgccgacaggggggcagccattgttagcagaaggcttaacggagctgattaatcgttttgaactcactgattttgaacgggacacgcttttactggggttactgccccattttgacagccgttattatgcgctgttttcctgggttcagcagggaaagcaaagtcagttacctgatttttcactggcattaacgcttttttgttattcagaaatggaaaggtgggcgcatcaggcgagttttctgcaccgtgcaccgttaatcaactgtcagctattatccgttgagcagcctaaaaaagatctcgcatggagccagacccgttttattacggacagtagcgtgtaccattttttactcgggcatcattatctggcaccggcgctggcatcctgggctgagtggtcaacacctgcggtattaccttattatccggccagcttaaaacagaggctggccggggtgttactgactgacggtattgaaccccgcccggtcgtgttactgcgaggtatgccagggagcgccagatgccatgcggtggcgaatatttttgcctctgaaaaacgagagacgctgtgtgttgatatcgataaatataccgggcgtgatgacgatgctttgttaatacatttaacctgtctgttacgggaaacccggatgcgtggtgcgggcatgattattcgcaacctgcacgcacggatcgaaaaaaataattcattgccggagagattatctgagctgctaaaccagccggaattaagggtggtatgcctcgtcgaaccctatgccgcgcctttggggctgaaaaagacacccacactgcagatggaaatgccgatgttgacacaggaggaaaaaacgcagctgctcatgacttgtttgcctgagcgctgtgccgtagatattgactttgccagcttaagtcagcgctatacctttaacccggaaagtctgccgctgattttgcaggaggctgaactgtatcggcaacagcgtgacccggcggacagactgcaacaggatgatattcgtcaggctctcaatttacgtacccggcagaattttggccaactggcacaacgaatcacaccgaagcggtcattaaatgacctactggtatcagatactctccggcaacaactccaggaaattctgacggccatccgctatcgggaaaaggttctcatcggcggttttaaagataaggtgggctacggcctgggggtcagtgcgctgttctacggcgattccggaacggggaaaaccatggcggcggaagtactcgcccataccctgggggtggatttaatcagggttgacctctccatggtgattaacaaatacattggtgaaaccgagaaaaatctctcccggctctttgacctggcagaacaggatgccggtatcctgttttttgatgaagccgatgccttattcggcaaacgcagtgaaaccaaagatgcccatgaccggcatgccaatattgaggtgtcttacctgttacagcggctggagaattttccggggctggttattttatccaccaataaccgcagccatctcgacagcgcatttaaccggcgctttacctttattacccgtttcacttatccggatgaagcgctgcaatataaaatgtggcaaaaaatttggcctgaaaatattaagctctcctctgaagttgatcttgaaaaattagctaaacgagtagaagtcactggtgcaaatatcagaaacattgccctcttagccgcttttttcgctgaagagagtgacaatcaggaagtcagtcagtgtcatatcgaagcggccttagcccgtgaactggccaaaacaggacgactcgctatctaa

SEQ ID NO: 393393 - DNA, 612 bp, Salmonella enterica
atgtcagcatatgaaaccatggttgatgtgaataccgcaataaaaaagatgttatacgaatatctggataaaaacgtcgcgatccgttttgatttacctgatgcggatgctacaccgtccgctccggaagtaagcgtatttctttatgatatccacgaagacctgcagctacgcaccgctgagtctcgcgtgtttaagggcggtatgttattacccggacgggtcaacgtgaaatgcaattaccttattacgtactgggaatcagccagagccaccacggatgctggcaaccctagcagccagccaagaaaccaggcaataagggtgatgtcccaggttctggatgccctgattaatcatcgtcagttaacggatatccccggcgcttacacgcagattataccgcctaaagagaatctaaatagtctgggtaacttctggcagtcactgggcaatcgcccgcgtctttcgctcaactattgtgtcaccgtgccgatttgtctgagtgatgaaggagaaaatgtgaacccggttgattccctgtctgtcactatcgaacaaaaagctcccgtttcttcacaggctaatactgacgtactgcggaaagattag

SEQ ID NO: 393394 - DNA, 8904 bp, Salmonella enterica
atgccttattccagtgagtcgaagttaaaagatacacatttaaaagaagccgaaagtgataacgttgacgaggtatcccaatggtttgatatcgataacgtcagtgcctcgtcgtcttatgagggggaggctctctctgtacgacagaactatgcaaacatcactgacaacccattctattttattagtgaagagcatctccatgaagcccaagaattcaggcgtaaggggtataacagccaaatacccgaggttgacccagaactgttgacacagttgcgtgaggctgtggccgctgccagagccaacatagctacccagaaaataattagaggatcgcttagttctcaatggcaaataaagcagatagataaaatagaaaaattcaccgaaagtctttcagaagatagtatacaggactggatcagcaatgaagtggcgagtaaaagcagggggggaacaggggagatttcactgggaagccgaagcgcggctcagtcgctggccagacggctggagtcagtcttacagacgctgatacgtgttgttcaaatcctgtctgctattgatagctacagctcgccggaaaaactgcatgacatgcttgtcactgagcttaccgatgcgctctctttcagcgatgaaaacacagtgatgcaagccatggaaagtatcagggtagaggctgaaggtcataatgatggctggtcttcccttatgcaaactcgggcagcgacgtgggaagctaataagtcggctaccttcgctgcgatgagtgaggctacaaagttcgaagcaaaaaaagccaatgaaaaagcccgggatttgcatactgatcctcagtatttctttagagatgttgcagattatctccagtcactatccaaagatttactaaaagcatctgtcaatgtaagtcagagcgagactccccggatcatacagacagtgaataatgatgaagtggctgtacctttgtcacgctcaaactcacatctgcagagtatcagaagtttttttgcgaagacaaaattacaaatacaaaccgtgacggcagtaggggagaaacaggcgtataggcttaaacgagttcttcgatatggtcaattaactgcgactccatcaaaaaaattagaaaaagtcgtcgttgattccatcgtcagaagcattttatggcagtggcaacagccggtaataaaaatccagtacgccagtcatgcgctactaacaaaagtgattgagctgcaaaaaatagaagaaatacttttatctcacgcagtagcacatgataagggaaatgaacaaaaaggcagtgatatttcagacagccacctgagtggagataacatagatacgcagatcaagacatgggtagataatcgcattgaggaggaaaaccctgaaaaccaacgagctgtaaaagtggcggtactggagcagttactgagcgctgatatcgccagtgcccgccaactggttgtgcgtttgggggaaacagaggaaagtatttcgacgatgcttgtgcggcagcggcatcctgttttgaaactagttttaagtcacttatctacagccagccctttcctgaaggaagtagataaagaacggccggttttttccaagggtatcaaaaagagtattgatgccctgaaaaaagccctgcaggcagttgaagctgaatcttcttcacgcgattttgccagtgctaaagaatgggctgaatgtgcgcaaagggaggcgacaaaggttaaggaaaatatatcagcagcctccgcacgacttactgaaaggccgcttgatgaattttcacggggatcgcgtctcgccaaacactgggcgaatcttgcaaaagaacagaacctgaacgattttccaccacttgatgcggaacaggtgtttttattactggaaaaaaataattactttaatggtattctttcaagcggagacccaaagggatatctctttgccacccggcttgccggtgagtatgaaaatgtccgcaatgatgaattaatactaccgatgagtccggagcaatacacagcattagaaaagagccttatagaatatattgtaaaatgggggcaaaaaaaagtctcgcacggggtcgttaaaattattattgaactttccttcgaacaggcactggatacggtaactatcagtctgtctaacttcctccgggtgccatataaaatcgttaaggcatcaataataataccctacaaagtccataaagtgaaccaatacatcatgccaggtcaggacaaaccctacaaagctatttatggcttgttggggaaaaaactaaagcaacttggctttaatttaattaccgcacctttacctggcgtggtcaaactcgcggccggttccggagtaactgcgggtgcgactttatataatttaaatattgagaaaagcgagaaaaaattttatgcggtttatgaacgagtggcgcaaggtaaaaaaagtgacaaaataaagacggactctctggcagggatgatatttgattcagcgattgatggctcttctatggctgtcacgacaggaatacgctcagcctggcagtcaaaaaaagggagagttgctgaaactcagtccccgaaattatcacataactatgaagataatagtggccataatagctttattccttccggggcagcaggttcagacgttgatccttatcgaaaagggtttgatcaaagtcaacgcttaaggcgtttaaaaagagatttatcagagtatgaatactccgatgatctatacggcacaattggcacaaaagaaactatgacaacgccaacaaaaagagacattcttttaaaagaaatggctgatgcattagctgattttgagcgtgataacgaaaaccagcctgttggtgacattagcaggattattttccttgatcaatacttatataataaaagtcagtctgctgaggtgaatagaactgagtacaagaaagaatggctaaaaattcggcatgacctaggcctcattagcaataaaatagtaagagaatacctaaatttccgcctaattattgaaacctatgatttatatcgcggaaggattttaagagaagatatgcctcattcgagaaataaattaatctatcgtctgcttaaaaaataccacaaattagaatcgaaaaaaaacacatttaatctaggcgacgcgataaatctttttatggttaaggatgatttttaccttaaaaaagggaagagagcaagaggtagaacccttgatattgcgtctatttattatttccttaatgaggaaaaagacagagatgaactatctcgattttattttaaaataatcaatagctatctggtcaataatgaagaaaaccacaataacacggttcagtccgatgtggatataattagagttattagtgcgctgggagatattaaagaaaaacatcacgaagcagttgcattagttaatcagtatgaagatattgttaatatcctttccattaaaggtaaaactagtgaagagctgtttttagatgccagaattatggcagcgcaaatttatgatggcgtcagccatttaacactaaccaacgacagagaaatgtggcttcagagatatggtaatatcaagattaaatcatttaatgctgcgtggaaattattgcacatagaagctattatagccagaatacaggcaaataatacggtagatgagtttgaacatagtataccgcttgatgataaatcaattaatctcgtgtggaaatcattacataaaaatgacactttatccacgacagattcagatgatacagtagcatatcataagcgcaatggggttgaagatagcataagcaaatttgacttactacatgatcgaacagagaaggaattacggaaattattttttattaaaaataatgagaaatttacttcccacacagaattcaaaagcagaaaagaattatattatgatgatgttaaatattattcgcagtttgataaatatatagagaatcaggatgcagaaaaagaggccaagcgctcattgttgaatattgctacaattcttcagttatcagttgaagatctttttgagaaggttgaaaatgtcaaggttttatcttatgtttatgatgatcagcatggggggctttcgacagttgcccccggcagagtcactattattaagctgaaaagagacgatgcgggtgccattgttatttcgaatatttttttgatggattatataaacagaataagtaatgaggagtataaccagcttagctatttattaagcactggcaaagtcaataataagattagccgtctcctaaagggtccatattattaccggggagttgcaaaaaaacatcaagattttcatcaaatgttgacaggaatgactcatcaacagctacacgcgcatcttttaggtacctcttttcgtgttggtggctatcctgttttttcgcatgaatatcctgatcaggagaatgttcagcacctgtttgatacaacacttaggaacgctatcgtcggtgccagagttattgaaaacaaagcagctgcaagttatctgagatctgcactgtattcactgacggatttggaagaaattgcttatcgccatattccattctatgaaataatacacaggagtgtaaccgacaaagattatgaaatagacacagagcaatttacattagaacttatctctgttgctacgattgtttatccagccgtaaaaggtatggctacaatgattcgaaattcagcaattccctcaattctcaagtcaggattaaaaggtactgtactattaaaatcaataagcaaggagctaggtaaattaggcttaaacgcgggtaaagtttttggtacagcagtctatgaacttgttgagccttatccaatgaacacgcattttaatataacgacgatttttgaccattccagtaatctaataaaaacaactggttttcgatctaactgggcagttaacattccagaactgaatgttgccaagcctaataagcaaggcgtatataaagtcgaaaaacaagaaccgggaaatatgcgaaacatcgatttctatattaaaagagatggcaaattttatcctgtaaaatatgacctagataatagaacctggcgacttatccccccggcgaactccgggaaaagtggatatcaggctcctgtaagacgaaacagaaatggcgaatggaaattgcactcggatgtcgggttaaaaggaggggcattaaaggaccggctcaatgagataagagcagcccgacgcaaaggctcccctttatctccgccgacaccttcggcagtgaacacacagcccggaccttctgtcccggctgtgggagcgggggcaacactcgtgaagatggatacttcatctgcatcgcaaggttataaggctgcaaagaaaatgagtcatgcaactcagtatgaccactatgacactttatcacttgatgaaaaacttgatttatttattaacgccaataacgatgcgaaaaccagagggattttagcaggaaagacagctcaatttggcagcaacagaaatttatataaagcagcaaaaaaagctgatcaatggaaatcgtcagcaaaaaaagcgacgaatattgttctggctccgcaagatatttttttaaaagggaaacctggcaaaagcctgtcggagtccatattgatggggtgggctttacagagtgctcaggatgcaaatttagtaaaaaaactaaagggtattttttcatcgcctgatatcttagaaaatcctttatataagtcgcttgttgaattaaatacggagggaaatgcgctcagatttactggtgcagagataactgatgttaagaagacattgcaaaaatccgaatcaaaactattcccaacggaaaattcttccgttagagtggatatcggtcaacatactatactgctatctaaagtgaataaatcaggtaaaataacttatgtcttctatgatcctaattatggactggcttatttcgaaaactataaagacataagtaagtttgttaataaaaaaatcaagacatacaaaacacctgaaaacttaattatattttatcaattagactactcaagtcttgcagaagttaaaataaaagggaagaatctgaatgaaattatgaattttgaaatcccacacttatacaggcaagagggggtgcatttagagaatattatacctcaggatggcctctacaggctgccggggacgcatcaacaagcagataaggcctatataaaagttaatagagatgtttatctggttgagtgggatcaagcgaccaatacgtggagagtatttgaccccgcaaatacccatctgaacagggtaaccatcccggtgaaaagagatgctgacggggaatggttctggcatacagatgccgggcttagtggaggaagtttttttgatgagataaaaaataactggcttaagcgtaaaaggtttaaaaattttcgagatttcaccgaaattttgaccattgaagcgaataaatggcctcctgagcccatcaagaaaaatattcacatgatatggattggtacaaaaaacctctccagaaaaaacatcgctttgtctctcgacacagcgcaaaagaaccctgattataatacgaaaatcatttatgacagtaatattccaggatatgaatccgctaaggattttatggttcagaaatttgaagggagtcaagttatgcttgttgatctccgagagaaaagttactttcctcaacttcagcacgagccttcttttccttattatgaacaggctattcgtgacggaaaatatgcgcaggctagcgacatcttgagattattaattttaaaatatgaaggtggtatatataaagacattgatgatatgcaggtgaagggatttgggtctttagcctttccaaaaggaattggcattatgcgggagtatgctccagaagcgcgtaagtcctctgctgttcctaacaccccaatagcagcaacaaaaaacaacccaataattaataaaacattagaacttgctgtggaaaattatcgtcgtggagagaaaagaatattgaaattagctgggccagatgtttttaccgaggcactgtatcaagagatccccggactgcatcctcgagttgcagtcgaacaattagatcagtttgaactggcaaaacgacaagcgtcaggaatggcattagaaaaacctaaaagctttctggatgaacaactgacacgggaagaaaaaatattgattagtcgcccttatgaagcgatacgtgggctttccggatatattgacagtggagcagatcactcttggaagaatgtgcctgatagcccccattcatctcgtgtccgacgcatatatgataaaccccgccagataatgggagaaacggataatgagtttaaggttatatcagctgaaaatgaacctacaaaaggatcgttacttttcgatttagcgccgcagcctggtatttcagagacaccaaagacctcttccgcggtacaacacgaaagtagccataaacgctatcctctcggtagtgcggtagagaggaatcgttcccccgcgcttcagcaggatggcttttacgaacccttcggtaaagacagttatatcgatatggagcccggtaacggggctgtgattgttcgggctcacggctaccccggggatacgggtcattataaagctgaatatgttgccgtggtgattcgtgattatctggattcccggggtataaaattgcaggatatcagacatatcgaactacaatcctgttacagcaacgcgggtggaccattttcgcaggctcagtcgatagccaatatattgcaggtgagggttaaggggtactcgggaaaattctcccatggaagagacaccgatcctgatgcgggctcgttttccagaccgtacgtcaatccggtcgcaaaagtagtatccagtaaagggaatactgccgcatttcatgtctccgaagcagtgctttcgatcagacgaagattgcgtgccggcaattcttcatcaacgcctactgttaatagcggaacctatgtcctgacacctgcacctgatactgcaggttatcgtgccagtggaagaaggaggtacaggggacgtacagtgatcccgaatgggttcgatgtgatgacgttagggcgaagccatatacaagatataacgcaggaaggtaatgcagtaacccgttacattgatggtttcagaggagcaggatttaattctgcgaccacgatgccagtgtaccccactgatcgcagtacatttatgccagggcggccagagcgagatccgcacggccccctgtttaggggtgacgatctgaccagtacccgtcctcccaccgacgctttcggtcaaatatttattagacttttgcaagaaataccgccgtattcagcagtaaaagccagtctgctaattggaggcatgttggtagcaggtggagtgggtatctacgcgtggaaaaaggacgatgaggctgatgaagcccggagcgcacttaagatcgcagaaaagaatctgtctgacctcaaaaatctcatggactcaggtgagaagacagcggaactggagaaagttcggcagcattactttggtaatgaaaatctgacttcagaggatgttcaggagctgattgattttatccgcaaattaagaacaactgcaactaacggagaactgaggaaattagcttcgggtgaactgccggaaaatttctcctatgacgtacctgaagtcttttcccgtctttcacaacggtggattctgggtttttatttacatattttcggagaaaatgaagctgatgaggtgggttag

SEQ ID NO: 393395 - DNA, 213 bp, Salmonella enterica
gtgaagaaaatgtatatgctcgacatgaacatctgctcgttcatcatgcgcgagcagcccgaagcggtgctgcgcggctaccgtatcgtggtctcggccatcacctggtccgagatgcgcttcggcgccaccggtccgaaggcctcgccgcgtcacattgaactggttgacgcgttctgcgcccgcctcgatgctatcctgccctgggactga

SEQ ID NO: 393396 - DNA, 207 bp, Salmonella enterica
atggtttcagggtgcctgttcaatctgctccggcgtcattcccatattccggagctgtcgtgcaatagcctgtgctttttcagcagcaccctcctgatggccttccttgcgacctttctgctcaagacgttcagcaatagccttgacatcctccccaccccccccctgaaggacggggattcctgctatgttcaggctgtcgcctga

SEQ ID NO: 393397 - DNA, 1446 bp, Salmonella enterica
atgaatgacttatctcacgtattatctttttatttcggcgggctctgcacaacatctcactcatttgcatcacaacttttaaatgacaagaaggtatcaggaaatgcaaatcgtgattttatttatcgtttctttgatgatagggttttagtcaggaaggagcagatttctgagtttcaatcattttttagcaaactagtaaactcacctagaaaacattacgaaaaagcaatacaagcaattcggcgttttgttactgcatcgatcagaatatccgatgatttggatgctgcttatactctatttgttgcatcaattgaatcgttagcgcaggatcaaaatgatagcgaagtaggctggggagacgtagatctaaggaaaaggcaagggttagataaaattttaagaactttagatgagcatacagcccacttaattagaaccgaaatcataaatcacgaacacttagctctaagtcgcaaatttcttacaacagcaatgaattctctggatagagatttttacaacaacaaaggtaaaagttttagattggctggtgaaaatgagattagaattgcaataaaaaacgcttacaaccttcgttctaaatatgtccacgcattaaaacctctaccatctgaaatatcaacaccacatactcttagctattgtactgacgttgacaacaagcctcacctaaccttcaatggattatcagcagttaatagaaaggttattctgaagtatatagatgatatgcctcattgtgataaagaatccttagataccatgagattcactccgggtgtggtctacgcgcagatgtcagaaatatattggatgcatgatgttagagttttaatgaaaaataattacctgtcgcttttcgatgcagtgttgtcccgcattgagcatggaattatcgcacaaaagcatgaaataccagatatgcaaccgatggttaatgaaatcggaaaaaaactttcaagtgaaaacaacagagacaacataatattattgatggcaatgttatttttactatcatttttttatggttttacattagatgaaaagtatgaaaagacaataaaaaaacacgagcacatttatagtgacaaagggattataatgttacttataaataccctttgcctaaataaacttgataatattagcgaataccacacatcatttaaaagatacattgagacaaaatatcaaaagggaaagcttaggctatcagagttctttgagtctctaatttgcgctaacttaatcaatcactttattgaaagtggcaactctgatgcagagcaggaacttttaaattacatagattttaacactccgaactcgcctataaaaacacatgatcttgatcgaagtgagtgcaggaagtttgacataccaagctatttgaaaatgaataaaaaagacgactcctag

SEQ ID NO: 393398 - DNA, 447 bp, Salmonella enterica
gtggctgaactgcagaaagtggacgactggctgagtgctttgctggcgaatctggaaccagccgcaagaagccgcatgatgcgccagctggcgcagggactgcgccggacgcagcagcagaatatcaggatgcagcgcaaccctgacggcagtggatacgaaccgcgtaaagtctcggtccgaaccaaaaaggggcgcatcaagcgtcagatgttttcaaagctgcgcacagcgaaatacctgaaaactgcagccagtgccgactctgcctgtgtggagtttgctgggcaggtgcagcgcattgcccgtgttcaccattacggcctgcgtgatcgcgtcagccgaaaaggcccggaggtccgttatgaagagcgccacctgctgggtatcagcgatgaagtggaagtgtcgacccgagatttaatactaagatggcttaccaaataa

SEQ ID NO: 393399 - DNA, 858 bp, Salmonella enterica
atgtttagtgataaacaaaagcaacaaataggtaataattcgtatgcaattcaagctggaaataatgtaaatgtttcagggatgtcgttttccgaggttagagaactattcaacattctcttcgaaaatcagttcccaaaattaaaagatgttgcttatgctgcagctcaagagaatgcaaaagattttgaagagcgtgtcgtttcggatttaacaaaaaacgttgatagattgattattgataaattttgcgatccggacgttcaggctacattgactgaggcattaaagtcatcagctaggaagggaaagaaagctaatatggatgtgctttctcagttgttagttgaacgagtctccaataacaatgacgattttagagatatagttttaacggaggcagttactgtcgttcccaagttaacacagcaacaaatatcacttataacgatagtttttcttctcaagaacgttgagatcaaagatcctgttaatggtgttcgattggatttgttggagcgcaattttagaagttttgaatcaatgtatactgatgggtttaatttgtctcaagcccagatatatcacattcaatatgcaggggcttgttcatggaatacttttttagggataaatgttgaagactatttcatgaataaatacccgactgatataaaagataagagtgcgtatatttcaaatcttaagttagttgcccctcatgtgtctgcatttttagaaaaattttcaaagagcaactatcaaggaattgaactaacaagtgtagggcaagcaattgctctagccgttatttcaagatacgtaggaagattggattataatatttggttaaaatag

SEQ ID NO: 393400 - DNA, 246 bp, Salmonella enterica
atgaaaatttttgcaatagtcattacatgtatactggcattgattgcaggattatggctttatatggatcctggttttgattctattgttgcatttttggctgcagttagcgctttagctggattacttatcactacaaaaaataaatataattctatgagtcaatcagttggtgataattcaattggtgtccaggctggcggtgatattaaaattgattgtataaatacaagtgataaaaaataa

SEQ ID NO: 393401 - DNA, 633 bp, Salmonella enterica
atgattaacatacacgcaggtcccaattcgggaggaagagaagcaattgaaagattgctgaaagcgtatggatttaccactaagcaagccttggctgatcacttaaaaatatctaaaagtacaatggcaaacaggaacttacgcgatagcttccctgcagaatgggtaattcaatgtgctttagaaacaggcgcgtcattgctatggctagcaacagggcaaggagaaatgttcgcctcacaagaccgtgaaaaaaatcccgtaaacgaatcatcgatcacacttcgtccgctttcgaagattgtggctccaagtcttaagcaagcagagctgaagaatggcgaattgaaagcagaaggtgagattttgctggataggagcttggtggatggagaaccaaatgattcattattcattaaaacgcaagccgattggtttgttgtagatacatctgtgaaacaaattagcaacggctactggcttgttgatatggatggggttaaaagcatcgtcaagattgctcgcgttccaggcaataagattgtggttcaccaagatgaaacatcctttgagtgctccgtggatgatattgaagccatcggtcgcgcagttaaagtgatcaagaacctttaa

SEQ ID NO: 393402 - DNA, 738 bp, Salmonella enterica
gtgtatatccacgcgcagaagaacatggacacggaggtactgaacaaccggacgacggacgtgaaggtggaccacacggaaaccatcggcaacaaccagcgtgtcacggtgggcacgggccagacggtgaaggtggggagcaaaaaggaagggggccacgaccagcgcatcacggtggcgaacgaccggagtgtcacggtgtgcaacgaccagacggtgagggtgaagcatgaccgtgtggtgaacatcagccacgacgaggggctgtatgtcaaaaatgaccggaaggtgacggtggagggtaagcaggagcagagcacgacgggggaccatatcagcctggtgaaggggacgcacagcctggaggtgaagggcgacctggcgcggaaggtatcgggtgcgctgggaatgaaggtacggaatgaaatcgtcctggagagcggcggtaaaaccaccctgaaagtgggagactcgttcgtggttatccattcggggggagtggatatcgtggggccaaaaatcagcctcaacagcggaggcagtgcggggacaccggtaccgaccctgcaaccggcggtgctgagggcgctggccgatgaaagtgatgatggttccagtgcgaatgatgtggatgatgcgggtaattcagagacaccacggaaaaacgtccaagatacatttaatagtccccgggaggacctggtaccgccgcaactccggagaatattttcacgataa

SEQ ID NO: 393403 - DNA, 2760 bp, Salmonella enterica
atgtgggacgtgaataaggccatcgaacatttaaatagccatgcagagcaggaatctgttggatattgcgcgaggtatgttaaaaacgcaatcagtgccgggggagatatcagcccatggccttcgatacagggtgcaaaagattatggcgatgcattgctgcatagaggatttcaggttatctcgcttgagagtggttttatttctggtgatgtagtaattattcaagggattaggaaagctgattttccagcaggtgaaataacaagagatcacccttatggccatatggccatgtttaatgggcagcaatgggtttcagattttaaacaaaataatggttattaccctggtggtgattaccgaaaagcaaagcctgcatgtgttttttatcgacataaagatgccactggtgacggatcgcagagtaccaatgtaaccggtggaaaattgaaaatcagttaccccatcagggataaggacggaaaagagtttcgttccctggaggagataatgcggctgattgacgcagaaccacacggcacctggctgctgggagggaacggactgtggcacggcgcagtccatatcagtgaggtatctaatccgcgctcggccctcacgccggatacgctcagcgccggaaatccggtacctctccagtttatggccgatggcagcattgtggcgtaccggatcaacaatgactatctgacaggcccttataaagggcaggaactgcgttacagcagcacgtttgtgctggtgaaatcactgtgtcagcctgacccgcaaaaagaaaaaagctggctggaattttacagtctgtatatgcatctggcaccggtgaaagattatccggcttccccctgctataaagtcagggacggtcacagcgggattcagctgcgtgaatatactgatgggcagtatggccttccggacggtcaggagacgggggatacgcgacggtataaggccccacggagtaccggtaaaagtctcagcgagaaagcgcgctttgtgtcgtcacgtaccgggcgtttttacgtgataaaaaacggcgaggctaccctgaccacgttcgggctggtgcgtcagctggagggggaaacggcaggtaataagcagtactgggtgacgctggacccggcactgatggagccggacggagaaatccgggcgctgatgcccgcatggatgcagaaagcgaaggaaaagggcgtttttaactcggtacaaacggtggaagaaacagacgaatggaaggtcagtgccggaacacctgtcggatttatgggatatgaggaataccccggcagggagagcggccaggttgagggggaatggtttgtccaccttgaggtcctgagcgcagacccgggaatgccggcatttttaggcaacccggaaggcgtgaagggggaaaaacggacggtcctggcaccaaaaggaaggctattatacacccgccagacgacagcaggacaggagacatttaccgccacgtcagccactctgggtgcgcagtgcgttcgcccgcggaacgccaccacgccagtcagggacgagtcacagacattatggtacaacataacaggaagcgggtggctgccggagaaggatgtggaagaagccgggcagtacgattttctgaagctgggttttcagccgctggaggaaaacagcagtggtgatatgacgaagagtccatatgaagggtgggtaccggaagccttcggctcagtaagccttgcggcagagcagggcgatgaatggtatgaacaggtgccgcccttttaccgtgagctgatggtcagaatggacggcgatcgtgatggaaaagtgacggaagaggaaatcaggcaggcgctggtggtgcgtgatccgctggtgaggaatgtggtgagccgcctggtggtaaagcaccacagtgagtggtgcagaggtcgctcgacaggaaggtgggaagggttctataaggatcttgacactgatgaagtggcctactgtgagaagtggcagacagatctggagtggatgagtaaggtgccgccgtttgataagggtgaggcggtgtggcattttcatccggtggtgtttttagatgttattgctgataaatccacagatgttattgaatttgaaacaactcttggaatatatagaatatctagaaaatcagcaaatttcatattgcaggaagaggggtataaggaatatccctatgttcctgagaatagtagcgctagtggggttactctgggatatgggtatgatttaggccaacaaacggtaggaagcatgagagctacaatttcagatttttatacagagcagcaactctcgcggttagagttagttgttggtttatctggtcaggcagcacggaactccctgtctggaattattgatatcacgataaacaaagacgatgcaactattttagcaatgaaaatgaaatccacatatgcccaaactgttgtaaatacataccccgaagtattaaatacacatccccattgccagggggcgctgctttcattagtgattaatagaggtacatcatttactataccatctccagaagcaagaatagagatgaaaaacatacagatagatttttcccaaggcgaacttaatgacattcctacgcaaattagagcaatgaagagactttgggaaggaagaggtctgaatggtcttattaaacgaagagaaggagaggcaaaactttttgaagaagggttagcacaatga

SEQ ID NO: 393404 - DNA, 477 bp, Salmonella enterica
atgaaagctcttattttacttgtttttataagtttttctgctctttcgtttgaaaattgtacaagcgaaaacataaagattatggaaaaatgctcttttgataattataaaaaagaagatgcttatcttaattatctatataaaagcattattgattcgtaccctaatttaaacgaagatttaaagatcactcagagggcatggcttaaagccagagataatatatgcacatataaatcaacagatggcgatgaatttcaagtttataaaaattcatgtttgtatgaacaaacatatgagcgtaatagagaacttaaagcgatcattacaagacaatcagccataattaaacgcaatgatatatctttaaaatcattatggatgaaatatgtaaaactacattgtaattttatgcaaaagaactattctgatagcgaatgtgaaaaaagaaataattttcttcataatcaagaatag

SEQ ID NO: 393405 - DNA, 396 bp, Salmonella enterica
atgatattatttctttcaaaatcagataagcagcactgggtaacgctggacccggcgctgatggagccggacggtgaaatccaggcgctgatgcccgcatggatgcagaaagcgaaggaaaagggagtttttaactcggtacaaacggtggaagaaacagacgaatggaaagtcagcgccggaacgccggtcggatttatgggatgcgaggagtatcccggagaggagagcggtcagattcagcgcgaatggtttgtccatctggaggtactgagcgcagacccgaagatgccggcgtttttatccaacccggaaggcgtgaagggggaaaaacgaacggttctggccccaaaaggaaaaatattatacacccgtcagacgacagaggggcagtag

SEQ ID NO: 393406 - DNA, 678 bp, Salmonella enterica
atggacggtgatcgtgatggaaaagtgacggaagaggaaatcaggcaggcgctggtggtgcgtgatccgctggtgaggcatgtggtgaaccgcctggtggtaaagcaccacagtgagtggtgcagaggtcgctcgacaggaaggtgggaagggttctacaaggatcttgacactgatgaagtggcctactgtgagaagtggcagacagatcaggagtggatgagtaaggtgtcaccctttaataaggatgagccggtgtggcattttcatccggttgtgtttttagagactataattaaagaaaaatcaaaaataacacgacaaatgctccggagaatttggattaatccagccaatgtttctgacacagtccttgatattatagccgaagagttttccaataagtttgatatatgccatataaatactaaaaatagattgtatcattttttctctcaaatatatcaagaagtaggttctggttttaatttaaatgagggctttaactatcggccacaagttttgatagataaattttcatattatcgcaaccatcctcaagatgcacaaatggatggttatattcctggaaggcaagtggcaaataaacaaaatattgctaataaagcatatggtgggcgagaaggaaataatgatgtcacaagcggagatggatag

SEQ ID NO: 393407 - DNA, 861 bp, Salmonella enterica
atgaaatactataaaataactatattgatgttgctatttttttgtgactattcatattcaatggcatttaaagtaactccatctgataacattgatgggataatgtattttacattacatatagatggtgttaataaattcagggatattgatgtggccctagaaggtaactctaaaaatgtcactataaggcagtattataatttttcctgcaattggggtgaaggttatggcattagattaagtatggactctgccacaacagagggaggggggggatttgataatatatatgtggtagataatcaattaaatatagttttcgctaaatcatacagtcgcatgaggaataaatggactgatcctgttaatctaaatagcgccgtatgtaatcgtatgagtaatggtataaaaaaagatcctttaactaataaagactatgttgttgattttgagtccattgaacatggtccattttatttaaaaggtattgataatattgcgattaaatatattagagatgatttcttaaagcttatacgtgatgatgttaatggtgaggtcgttattgattcaattaaaaataatgataataaggcaccttttgtctgtactgttttttttatgaaaataaaatccaaaatgaacatcgtcagtttaatctcttggggcaaaatgacagatggagatgattattataaagtatatgcatatatatatgataaaaatggcattgtacacactaatgaaatactgaatgaagatcctaatctatcaggctatgattcagcaaaagaaccctttaaatataaaagctcaagctctataaaaaaatatataattaaaaattatggtttttaa

SEQ ID NO: 393408 - DNA, 729 bp, Salmonella enterica
atgaacagatatgaacagaaagagaccgcgcgcaggatgtcacatcacattgttattgttgaggatgaacctgttactcaggccagattacaggcctattttgagcaggaggggtatcgcgtttcggtgactgacagcggcgcgggcctgcgcgacatcatggagcatgagcacgtttcgctgatcctgctggatatcaatctccccgatgaaaacgggttgatgctgaccagggcgctacgcgaacgctccacggtgggcattattctggtgacggggcgttgcgaccaaatcgaccgcatcgtcgggctggagatgggcgcggacgactacgtcaccaagccgctggaactgcgcgagctggtagtgcgggtgaaaaatcttttgtggcgcatcgatctggcccgccccacgccgcaaaatgccaatgaaaactgctacctgttttccggctactgcctgaacgtgatgaatcacacgctggagcacaatggtgaagccattaagcttacgcgcgcggagtacgagttactgctggcctttgtgaccaacccaggcaaagtgctgcatcgtgaacgcctgctgcgaatgctttccgcccgtcgcgtagagaccccggatctccgcacgattgatgtcctggttcgccgcttacgccataaaattacgccggaactgctggtcacacagcatggcgaaggctactttttagcctcggaggtgtattga

SEQ ID NO: 393409 - DNA, 1695 bp, Salmonella enterica
gtgttcagattaccaaccccccgactgttcagcagtctgcgatccgctctccggccagccatgccccggttcaaggtttccgctgcctggctgctggcgctggcgtggatttttctgctggtatggatctggtggaaagggccgaaatggtcgctctatgaacagcactggttggccccgctgacgaaccgttggctggctaccgccacctgggcgcttatcgccctggtttggctaacctggcgggtgatgaagcgcctgcaaacgctggaaaagcagcagaaacagcagcgcgaagaagaaaaagatccgctgaccgtggaaatccaccgccagcagcagtatctggatcactggctgctgcgcctgcgccgccatctggataaccgccgttatctgtggcaactgccgtggtatatggttgtcggccctgtcggaagcggtaaaagcgcctttctgcgcgaaggttttccgtctgatatcatctacataccggaaagtatcagaggggtagagtaccggccattgatcacaccgcgcgtgggcaaccaggcggttatttttgatgttgacggcctgttgaccgccccctccgccgacgatttgcttcaccgccgcctgcgtgaacactggctggactggctgacgcggacacgggtacgccagccgctcaatggcctgatcctgacgctagatctgcccgatctactgacggcggacaagacacgccgtgaatccctgctacagagcctgcgccaacagctacaagagatccgccagtgtctgcactgccgcctgccggtctatgtggtgctgacccggctggatctgctgaccggttttgcggcgctgttccataccctggacagaaaagaccgtgaagcgatcctcggcgtaacgtttacccggaatgcccatgaaagcgataactggcgcagtgaacttgaggctttctggctgacgtggggacagcagatgaatctggcgctggctgatctgatgctgacgcaggggaatgccgcacagcgcagcgcactgttcagcttctcccgccagatgcagggaacgggagatattgtcgcatccttactcaccgccctgctggatggtgaaaacatggacgtgatgctgcgcggcgtgtacctcacctcctcgctccagcgcggccaggtggatgatattttcactcagtctgccgcccgccagtacgggctgggcagcagttcgctggcctcctggccgctagtggaaactgtgccttatttcacccgacgcctgttcccggaagtgctgctggccgagccgaatctggccagtgaaaacaacatctggctgggcagctcacggcgcaggctgataacagcctccgtctgtagtgccgcggctgtgattttgctggctggcggctggcatcactattacaaccagaactggcagtcgggcgtcgatgtgcttacacaggccaaagcctttatgaatgtgccgccgccgcagggcaccgatgaatacggcaacctgcaactgccgctgctcaacccggtacgcgatgctaccctcgcctacggcgactaccgcgaccacaattttctggcggatatggggctgtatcagggtgcccgcgtgggccgtatgtggagcagacctacattcagctactggagcagcgctatctgccttccctgcttaacggcctga

SEQ ID NO: 393410 - DNA, 135 bp, Salmonella enterica
atgatgaagaaacagaacgtgattatgacaagtttcatcagttggatgtacaaagggcataagcagaatcaggaggcatcttgctatctgttcatatcttttccccctcgactctacggaggcaagaatgtctga

SEQ ID NO: 393411 - DNA, 903 bp, Salmonella enterica
atggataattcatcttatattaaaatggtattaaaaagtaataggcagcttgctattgccgtagataaaggaattgatgctttcattcaagggggcaaaaaaagtactcatcaaatcccattaggtgtggagagattgtcatggtacacatcttgtgggctcacaaattatcagaatgaatgtcgacaccccgaacatgaagacctacgaatgggatattgtactgttgagttttttttgaggaaagcccctattgctgacataattttaatctgtgtcaagtacctcttaaatttttacagcagaaaagagagaatacgaatactggcggaagtatacaatgtgttttccatgctacaagatggaaatatcagttatcaatatcccactaataatatgcaatataatagcataaacgattgtgatgatattttgaatattcacactgactcaccggaaagcagacaacttctggaatctttggtctatgtatgtaatttaacagctgtagatttaataaaagactcatttctaagtactgacgaaattatcagcccggccaaaatatcgactgacatggtagccagaaaaacactggcttacacctttgccaagactgccgccgagtcaatgtcattgacactttctcttaggacaaaactgaataatagaatgatgtattttgtcaccagtgcttattattatggaatagtacaaaaagtagcaaactcggccaagaagttaaaacttctgaatccagggcattatgctattttatataataacaaattagagatgtttttctttctaatagagccttatattccaccggagttttatcatccatcatttttcattgacaaccctgaggctgcaactggtctttttaaagaaattacttaa

SEQ ID NO: 393412 - DNA, 744 bp, Salmonella enterica
atggcttcatggctcattgagtggaagtctgctcccgacactcagtggcttaaggaatctccgtcccagccattacagcagtcactgaaggatctggaacagggctacaagaactttttccagaaacgagcggcatccccgcgtttcaaaaagcgtggtcaaaacgatgcatttcgttacccgcaaggcgtgaagctcgatcaagtcaacagccggatattcttgccaaagttgggatggatacgctatcgaaacagccgtgaagtgattagcgaaatgaaaaacgtcacgatcagccagtcctgcggtaaatggtacgtcagtatccagactgaattcgaagtggctgctccggttcacgacgcacagtcaatggtcggactggatgccgggatcacgaaactcgctacgctttcagatggtacggtatatcagcccgtaaatagttttaaagcaagccagcgcaagctggcaatgctccagcgccagttaagccgcagggttaaattcagcaacaactggcagaaacagaagcgaaaaatccagcgtcttcactcgcacattgccaatatccggcgcaactatcttcacaaagtcaccagtgaaatcagcaaaaaccacgcgatgatcgtcattgaggccttgaaggttagtaacatgtcgaaatcggctaaaggtacatcagcgcagcacggacgaaacgtcagagcgaaatcaggtctgaactggtcgatactggcttag

SEQ ID NO: 393413 - DNA, 1008 bp, Salmonella enterica
atgctgcgttctcctgtttttcgcctctccatgctgtttccggccctgatgctggcgttttgcattgccattatgtatggcccggtgaccttttctatgaaggacgtggcaaatgccatactggcaggctactggcatagcgatacagcgggaacgcttcatcagcggatcgtatggtctctgcgtatgccacgcaccctgcttgctgcgctggcgggtgccgcattagcgctggcaggaacggtgctccagtcgttgacacgtaatcctcttgccgacccctgggtgttggggatctcatccggcgcagggtttggtgcggtactggtcattgcgcttggtctcagtgcgggctgggccactgtacctgccggggcgttctgcggcgcgatgctggctttcgcgctggtgcttttcatggcgcggaaatcgctatccggccagtccagccgttttatcctgaccggcgttgccgtgacacagcttctctcggcagccacatcattaaccacactctggaaaacggatgcagacaccacgcgaggggtgatgttctggctgctagggagctttgcacaggcaacctggcttcaggtactgctttgtgcactggtgctgctgccgatatttctgctctgctggtggcgggcaatagagctggatgtgctcacattcggcaatgtgacggctgcgtcgcttggtgtggacgttagcgcaatcaggctcgccctgtattgtttgttgaccttattgactgcggtcattgtggcatgttgcggagcaataggttttattgggctgaccgtgcctcatatcgcccgtatattcattggtcatcgccatcgatcgctactgccagcatccatgctgtgcggcgctacttttaccgttctggctgatacgcttgcccgaacgctgttttctccccgtgaattacccgtcggcatcctgacggcgatgctcggggttccggtatttctgttcctgatttcacggacttcccgataa

SEQ ID NO: 393414 - DNA, 645 bp, Salmonella enterica
atgctatatggcgaagaattccatgtggtggatctggcctgtggtcccggctcattcagcatgcgtcttctgaatcgctttccggcgataagagtaacggctattgacctcgacccgcttctgcttacgctggccaaagaagccttgtctgaatacaatgaccgtattcagttcttctgcggcgatattgcaacagcggattgctttgccgctattaccgacaaaccgcaggccgttgtttccagcacggccatccactggctgctgccggaacagcaggtcgcgctttatcgcaacatctttaacctgctggatgaacatggcttattcatgaacgccgatcatcagcgatttgataatcgcaatccatgccagaaacggattgcccggcttcatgacgaagatacgcagaaaaaagcctggacagcgggagtgcaggactgggatagctggtttgcatcggccacccgtcatcatgagctggctgatttgatggacgcgcgcaccgctatctttaaagaccgcccgacaccattgcccaccacggtcgaatttcagctcgccgccctgcgccaggcgggttttagcgaaacgggtactctctggcaattcctggatgattatgtgatcgctggctggaaataa

SEQ ID NO: 393415 - DNA, 1014 bp, Salmonella enterica
atgaaacgcttggcttccctcgcattgctggcgaccttcgccagctttgcgcatcccgttacgttgcagaattgcggaagatcctggacgtttgagcatgtaccacagcggacaatcgtttatatgccgaccgcaatggaaaacatactcgcattacgtctgggagattccgtgatcagtgctgtcggttatcggccagatgaagatactgctccctccccctggtacaaaccgctaaaagcacgtatcgatagttcgccctggtcggtagaggctttgctgagttcccggccagattttatctattccggcagctactactggtttaacagccctgagaccgccggtcgtgaaaggatggctgaatggggaattggaagctggctcattgaagggatgtgcaatggcctgcaaagtggaactcctgagcctgtaaccttcgacagcatctacgacgagttgcgtaatattgcgcgcatatatggcgtggagccgcgcgcagaggcgcttatcaatgaactgaagcaacaggtcgctgctgacagtcgcataaaactgccacgtagaacactcatgtggtggtattccggtacggcaacaccttatgtggcaggcggttatggcgcttctgagctgttaaccaaaaccatcggcagtaaaaacatctttgataacagtgctgaactgtggcccgccatgagctgggaggtcattgccgaacgagaccctgactacctgatcctgggcgatctgcaaagaggtggagatggcgacagcgctcggagcaaaatcgattttcttgaacgtaatcccctcaccgcaggcatgaaggcggttaaagcaaaacgttacatcattttacctggctatgacatggacgcatctgcgcgctcagttctggcccttcaccgacttgtcacacaaatacacactaaggaacaacatgacctttccagcccgcgaattactgaaaaactgggacgaacaacaaagcgcctacatcgctcaccgtga

SEQ ID NO: 393416 - DNA, 2088 bp, Salmonella enterica
atgaaacttaagccttctttgatagctctcgcagtagcagtaaatacttcgcctctgacctatgcagcagatgaaaccatcgtcgtcgctggcagtgacgtatctgactactccgccgaatccgactcgggacgtctttcatccggttcagcctcacgtctcggtctgaccgataagcaaacaccacgccatactgaaaccatcagcgccagaaccattacggctaagggcaaacgcacgctcaccgaagtcgttgagaccgccccgggcatgtccggcaccagctcacctacgctctcaaacagcgtttcactgcgcggcttctccggcgtttcctggctgctaaatggcgtggccgtacccggtagcaccattcaaattgccgacccggttcattatgaaaacgtggatatcctgtacggcacaggctccgttttaaatggcctgagttctgccggtggcagcgtcaacctgatatcacgtaaagcaacctttggtcgacagccagtggaagctgactatagctggtcaagctataacagccatcgcgcccacatcggcgcgggcggtgcgcttgttgagggtatagctgctggccgcgtggatgtaagcgcatcaaataccggcactcaggttgataaagatcgcagtcgcccaaagcgcatcagcgcacagctcctgctgacgccgaccgataacacacaggttacttttgacatcgaccgtagcttaacggatatgcgcaatccctatttcgggacgccggttatcaacggcaaagttgatcgcgacttgcgccatgtaaactacaacaacattcagaatgcgcatatccgcagccaggcaacctcattccagtcgacccagtcctggtatgcaacgcctgatttaacctttgataaccagttctactattacaaaggtttccgcgaatggcagaatgttgaacgctattaccagtcaaacaaagcgggctatgttacccgtgattcttatggcgatattgctcatgatgacaagctgactggcaaccgtactatggtcacctgggaccacccgattgcatcattcgccaaccgcgtgactgcgggtgtcgatttttcaaaactcgaattccagtactattctaacggcttcccgggcgccgaagaggttctgctgaccaaccccgcctccaatgacttccgcactggtgcgggtggcaagatgcgctcacctgttcgtcacatcactcagagccagtatgcattgctgctggaagacaatctgaatatcactgatgctgtcgccctgttaagccagttgcgctataccaacctcgacatgcactggaattaccagcaggacaataaaaccatcaatcatcgctatagctttatgagcgttggtattgggccgagctgggccattaacgaaaactggacggtgtatgccaactattccacaggtaaagagcccggcggcgatatcttctttatcagccctgaacaaacttctctgccgcttacaggagttcagcaatatgaagccggtgtaaaaggtacattcggccacggcgaaatgaagctagccgtttacgatctccagaaaaaaaatctttatcagcaatcggctgtccaggccggtgtatggaatgcggttggcaagcagacttcgcgcggcatcgaattcagcggattaattaaaccgctggataacgtcgcgctggcggggaatgtggcttatacccatgcacgctttgacaatttcaaacaaggtacgctggacctttccggcaatcagccgcgctatatcccgaagtggtcggctaacctttctggccgttatatgccgattagcaaactgaggttgggcacgcagctccactatgttggcagtagctataacgatgatgccaataaaaacaaaatgggcaattacacgactgtcgacctgaacgccgattatgaagtgattaaggacgttaccgtaggcacccgcgtgcgtaacctgacagatcgtttctacacctggcagcgtacttatacagggcaagaaatgattgcgccaggtcgaacttacgaagcctatgtcaacatgcgcttctga

SEQ ID NO: 393417 - DNA, 972 bp, Salmonella enterica
atgaagcgtgcacctgttatttcgaaacacacgatgaaaaccacacagacagatgctgtacagtctcctgctccagccgcaccaatggtggactcactgattgcacgagtgggcgcaatggctcgtggtaatacgatttcgcttccggtctgtggtcgtgaggtcaaattcaccctcgaatctattccgggaaatgccgttgaagaaatgtcgcgggtctggtcaggtaatgaacgcgaccaggaactgctgacagaggatgccctcgatgacttaataccctcttttcttctggcagggcagcagactcctgccttcgggcgccgggtatcaggtgtgattgaggttgccgacgggagccggcgcaggaaagcggcgatcctgacttccagtgattatcgtatcctgattggtgagcttgatgatgagcaaatgtcggccttgtcacggctgggtaacgactatcgtcctaccagtgcttacgagcgtggtcaacgctatgcacatcgtctcgaaacagaatttgcaggcaacatctctgctcttgctaatgcggaaaatatttcccggaaaattatttccagatgtttaaacacggcccggcttccgagaactgttgttgcccttttctctcacccgggagaactgtcggcccgtgccggagaatcgcttcttaaggcttttgcaggtaaagagaatctgcttgagcgacaggccgctgagcttcatgagcagaagaaagtcggtgtcatttttgaagcggatgaattgatctcactgctgacttctgtactgaaaaaaacgactacagcctgtgaaaatctgagctcacgccatcagtatgctccgggagcaactgccctttataaaggggataaagtgatccttaatctcgatagaggtaggttacctgttgaatgtatagagaagattgaggcaatattgaaagagctagaagcccagacgtcctga

SEQ ID NO: 393418 - DNA, 222 bp, Salmonella enterica
gtggtggattttcgccagaacgttctccgtcaaaccggttattttaatgacggtactgcggtcgatatccggattccagctttagtgtgctgtacgcagctctgctggcagatgctgctccatagaatcccgggcaatgtcaggttgtgtcagaaactgccggaacgtagcgtcgtggggaatcggcgtagtatttttatttttcatcagtccacgctctga

SEQ ID NO: 393419 - DNA, 252 bp, Salmonella enterica
atgatcctgcgtacaaatcacaccgcaacacgggtccggggcaccggagcgctgtggaacgagtggggcagcctgatgcgttataccggctcgggtttcttcggtggtagctactggttgtcggagaaggagcacttgttgtcggagcagtcgagattcagctcccattacttcgtcgtcctgggtaatggcgtcgtctccggcatctacgacgacgtcacgttctacgtggtgtgtcgtcatggtctttaa

SEQ ID NO: 393420 - DNA, 795 bp, Salmonella enterica
atggcaaccacaaaaaatattcagtcgattgaacgggctttcgccattttagaactctttcagaaaaaccgagaagagttaggcatcaaggaaatctcacaaatgctagatcttaataaaagtaccgctttcggctttgtgaatacgctattctcccttggctacctccaccaaaatgagcaaacccaacgctattctttgggacctaaagttcttggcttatcgaatgcagcacagatacacaacattattatccgctcagcccacccctacctggagatgctttctgatcaattcggcgaaaccgcgcactgtgccgttgaagctcatgggagtgtcatctatctcgataaagtagaagcacaaggcgccatttacatcaatacacaaataggggcaaaaaactacatccactgtacgggtgtaggaaaatgtatcctggcttacatgcctcccgaacggaaagaggccattttaagtcgtaaattaacgacaatgacctacaacaccttaagcaaagccgatcaattaagagaaaatttatccctggttgtccaacgcggctacgctatcgacaatgaagagattgagatcggactttcctgtattgccgtgcctgtattcaacgctcccaataaagtcgcatgcgctatcagtatctctggcttcacccccagaatgcaggaaagcgataaacaagagaaaatgatcaaaacactgcaacaatattcacaagaactttctgttaaactatatcagtatcatccgcacgaagagtttaaacaaagtcgttaa

SEQ ID NO: 393421 - DNA, 873 bp, Salmonella enterica
atggggaaagtaaaggttggcattattgggcctgggaatataggtactgatttaatgtataaaataatgcgtagcaaatatatagatataaaatgtatggcggggatttatgcgtctgagggtattaaacgtgcggccagacatggcgtaaatacatctataaacggtgtgcacgcaatagcagatgatccggaaataaaaattgtatttgatgcgacaagtgctactgcgcatataaataacgcccctatattaaaagatgcaggcaaaatagtatttgatatgactcccgctgcaattgggccttttgttgtgccttgtgttaatttagagcatttactggagcagaaaacagatagctataatatggtgacatgtggtggacaagcgacgattcctatagcatatgcaattaatcgtgtagcagattcagaatatacggaaatagtctcttgcatttcttctaaatccgcagggccgggtacgagagcaaatattgatgaattcactgaaacgacagcaaaagcacttgttgaagtagggggggcagatagaggcaaagctctgattatattaaatcctgctgaaccacctcttatgatgtcgaatacgatttattctatcgtaagaaaacctgataagaaggcgatagaagagtctgtaaatcagatcgtcgcggatgtacaaaaatatgttccaggatatagcctgagggtacctccgattatagatggcaatatggtgacggttattgttcaggtagagggggctggagatttcttacctaaatactcgggtaatctggatattattaatgcagcggcgatctcggctgcggaagaagtggctaagcgaataagcaaggaagcataa

SEQ ID NO: 393422 - DNA, 1011 bp, Salmonella enterica
atgttaaataagaaaaaaatacacattgtcgatacaacattgcgggatggaagccatgcgatgatgcatcgctataccgaagcgcaagttactgctattgctgcgggccttgagcgtgttggtgttgattttattgaactctctcatggcgatggtatttctggatcctctattaattacggcttttcagcagtatcggaattagatttgctcaaagccgcatctacggttgtcaagaatgcaatacttactgttctattgattcctggtattggtacgattgatgatttgaagaaagcgcaggaatgtggcgcaaaagcggtacgtgtagcaacacatgtaacagaagcagatgttgcgattcaacatatcaaggcggcaagatcgttgggcatgatgcctattggttttcttatgatggcgcatatggcttcgccagagaagatactggagcaagcaaaaatatttgtcgatgcaggcgctcagtatgtgaatcttgctgattcggctggctacatgttggcagatgatgttaaagctcgcgtgggcttacttgttgaaaaattgggggtacctgtaggtttccactcacacaacaatttaggcttagcggtgtctaattctatcgcagcagtagaatatggtgctgaatatattgatgtgacttgccgtggacttggcgctggagccggtaatacacaagctgaggtatttgcggcagtaattgacaggatggggttaaaaaataacctcgacctatatgagtatatggatttagctcaggatgtggtagcgccaatgatgctgcgcgaacaatatattgacagtgcagcattaacacttggatatgctggcgtctattctagtttcttgttacatacttacaatgctgcgaaaaaatttgatctaaatcctcgtgatattttggtagaactgggaaaacggcgtatggttggtggtcaggaagatatgattattgatgtgtcgcatgctttaaaatatgggagctag

SEQ ID NO: 393423 - DNA, 267 bp, Salmonella enterica
atgaaaagaggactaaagcttgattcaagagataatgttgcagtcgttattgataatattaaagcaggtgaggagatattagttgacacagaggtaatagttgtaattaatgatgtggaaatgccacataaaatcgcgcttagtgacattaaaactggtgagccaacaattaagtatggtgcatcatttggctatgcaactaaagatatagttaaaggtgagcatgtacatgtacataatgtcgactctgagaagatgatgaaatag

SEQ ID NO: 393424 - DNA, 1176 bp, Salmonella enterica
atgaaaacatttaaaggatatgttcgtccagatggccaggttggtatccgtaaccatgttgttgtcatggcaaatgcggcttgttcaaccggtgttgtagatcagatagccaaaaaactaccagaagttgtccctttgttacatacctatggttgtaactatgtcggtgaaaggaaaagatggaagactgttcagaatggtattctgtctaatcctaatatttatggtgctattttgattggtgttggttgtgaggactttgatgccagagaagtcgcagctgagctgcgccaatgtaatggaaaacccattgtggcgcttattgtccaaaacgatggtggtggtcaggctgttatcacaaaagcggtagaagaagccagaaaaatgctggcagatgcagccatgcaagaacgccaggaggtaccgctcaataaacttgtttttggcactgaatgcggtgggtcagattccttatctggtgtgacagcaaaccccgtaattggctatgtatcagactgggttgttagaaatggcggtacttccattttaagcgaaaatgcagagttgataggtacagaagattcgcttgccgaacgttcagtaagtaaattagtcgctgataaaatatatgacttaatttatggcgaggaaattaaactaagaaaattgttaggtgaagaaagttctcgtaccttagcgaaaggtaatattgatggtggccttaccacgatccaggaaaaagcattaggatgtgtaagaaagggcggcagtgcgccaattcaagatgtgattggctatggtgaacctgtcggcgatcgtaaagggctacttatcatggatggaccgggtaatgatcccatttctttgacgggtttattttcagctggagcccaggtagcaatttactctactggccgcggtaccccaatggcgcatccgatttgtccagtcatcaagctttcatctaataccagaacctatgaaatggtgggcggggaaaatggtgatatggatttgaacgcaggtgaaatcataaccaaaggtatctctttagaagagatgggtgaaaaagcaatagattatttgctcgaagtattaaatggtatggaaaccaaaccagaaaaatatgggtatggtggcacatttaatgtttataccgattctcccgtattttaa

SEQ ID NO: 393425 - DNA, 975 bp, Salmonella enterica
atgcaaataccaattaagaaaacgctcgacagaataccaggcggtatgatggtagttcctttatttcttgggtgcttactgaaaaccttttttcctgatgcattagctatgggagggtttgtaacagcgttgacgcaagcaagccctatcatggccgtcttttttgtgattgtcggtgcgcagatgtctttcaaagaggctccgaaagccatttggcgtggcggtgttctgacagtagtgaaacttgtaacaggtattttgatcggcctgtttgttgcccattttttgggggataacctcttcagtattagttcactggcaattattgcggccatgacaaactcaaatggtggtctgtatcttgctttaaccggtcagtatgggactaaaacggatactggcgcttatgtagttacagcacttaatgatggtccgttttttactatgattgcgcttggtactgctggccttgtcagtgtcccattcaccgctttactctctgtcatcattcctattgtctttggtatgattattggcaacttagatgaaaacatgcgtgaatttttgtccgcgggatcgtctaaatttataccattcttctcattcgctcttggcactggtcttaccctggaaatgctaatctctggtggtgtttctggtatattactgggggttattaccactttcattggcggcgcaatacttattgtttcggataaactaagcggtggttctggtgttgctggcgcggctttggctagtaccgctggtaatgctgttgctacgcctgccgccattgctgaaattgataaaagcattgctgcttctgctaccatagcgatgccacagattgcggcttctaccattacgactgcaattttgacgccaattttagtcaatttctgggtgaagcgattgcagaaaaaagggattgacccggctatcgaaaagggaaatgggcaatgtgtaaaataa

SEQ ID NO: 393426 - DNA, 906 bp, Salmonella enterica
atgtgtaaaataattaccccatcggttactatttttgatgaaaatggtcatatcgatatagatgggaaccaaaaggtaatagattttcttattgccggcggtgtggatggcatactggttttaggttctacgggcgaattcaccaatatgtctttggcggagcgtaaagcattgctcagtatgtacgtaaaacatacaaatggtagagtagagctttatgctggtaccggttgcttagatgttgctgaaactatcgagctaactaattatgccagtgagataggttaccagggcgttttcatcattgggccatattactatggtttaaacccggaacgtttgtttgagtattatgatgaagtcgcaaagtcggtaaagtgtaacattcatctatacaactaccctgaaagaagtggccactctttggatgctgatacggtaaaaagaattgtagctgctaatatcaatgttgttggtatgaaagattctgttatgattccagctcattctaacgaaatcattttagccataaataaaaaagattttcagatgtattcagggtttgatgatcagttcttgtataatatagcagcaggtggctgcggtggaatttgtgggttatctaatatcgtaccagagatttttagtagccttgttgatgcctgtcggaagaaagactttgacaaaacattccagctttcaaatctgatacatgggttaatgccgatctatagcctggattcaaatccttcgcttatcataaaaacgcttatgaactatagaggagttaatgtcaataaaaagtcaatatttccttttaccaatattagtgatgagaaactcacttatgccaaaaaattgatagaccaggtattagctcgatataatcggatttgtcaagagtag

SEQ ID NO: 393427 - DNA, 297 bp, Salmonella enterica
atgtcctcagaaggtttacgtttcacgctggaggttgacggccaggagccggacacctttgcggtggtgagtttccggttaattcagcgccagtcgactccgtttgtactgagcgtgaacgtggccagcgactcgttcatgcagacggcagagatgctgctggagaaaaaggcggtgctgactgtctggcaggagtgcacagcgttacgtgaccggcgtggtggcggtgcggcctgcgacagaatttccgcattttccagcagcaggacattcagacgatatcggcgacgttactga

SEQ ID NO: 393428 - DNA, 285 bp, Salmonella enterica
atgcccatagccgccagactcaatgatacaggcacccgacacgatggttattacaagaccgtgattatagcgggttcgcccacggtatttatcaacggtttacctgccgcccggatgggcgacccattaacacctcacgccaaacctgaacacccgcctcatccgcgcaaaatcgcgggcggttcttcaacggtatttatcgacggcctgcccgctgccagaaccggtgatgcggtggactgtggcggggtggttactggcagcggcaaggtgaatacaggctga

SEQ ID NO: 393429 - DNA, 492 bp, Salmonella enterica
gtgtatatccacgcgcagaagaacatggacacggaggtgctgaatgaccggacgacgaaggtagggcatgaccacacggagagcataacccggaaccagaaaatcacggtgggcgtgggacagactgttaacgtgggaagtaaaaaggaagtcggtcatgaccagaaggtgacggtggctaatgaccagaagattaccgttcagaataatcagacactggatgtgacggaaaagcggacgaaaacggtggggagtgatcagaaagtcactatcaccggggatgaccatgaagaagtgaaaaaatcccaggatattaaggtacatgagaattacacgctgactgtaaataaaactatcgagttgatatgtaataacggtgcctgctcaatgaagtttgaggcagatgggaaagtgaccataaaaggcgcagaattcttgtttgaagcaaccggccccgtacacattaatggcaatgacgttcatttgaactga

SEQ ID NO: 393430 - DNA, 1077 bp, Salmonella enterica
atgtctgttttacctgaaccaagattgcgcgttctggataaccagaccggtctgactgcctttcagtatgacaaaatggctcccgggcggatatttcatgatgtggtggtagtgaaagctagttttaaactgctgccaggcgggctttgtcccgtacctgagctgggaaagctgtgcctggccgatgaacaccgtcagccagatgatccagtgggatcttcactggctcgggtgggcgatctggttctgggtaaacccggtactgatgtatttgttacaggtatggcccatgcaaatcagcccgctcaacgtttccgggttggtttacgcgtcagtagccataacgcgacacttcttaattatacctgcattgctacagggcgtcgtagctggcagtttacccgcgctcagggctggcatatgggagagcctgaaataacagactctgttcctgttgcctatgaactcgcatggggcggccgtaaggtcgatcctgatattcccccggaaatgtgggaggcttatggtccgaatccggtagggagtggttttagtttttccggctattctgaacacgatcagcctttagcccctcagtgggaaccggaagacggccagctctggtcgcaaccaccactaacagggttcggtccggtagcgcggcactggcagagccgcagacagtatgccggaacctatgacgacgaatggaagaaacagcttaaggataacctgccctactttgactatcctggtgattttgacctgcgtttttttcagtgcgcgcatccgtcactgcaaagtccggtctgcctggtcggcaatgaatgccttgagctgacgcacctactcaatggtgtgccatatctgaaaacctggctaccagagatgggtattgctgcctggtggcaggaagggcaaaccaggcaacaaacaatgttgccgctggacacagtgcatatctgtacagatgaaggacagagtcgcgttgagctggcttggcgctggagtaaaccacaccatttaaatattgaacggttgacactgcgaaccattcaggtacctgaatcagaataa

SEQ ID NO: 393431 - DNA, 345 bp, Salmonella enterica
atggccataaagcatatagcggatgcggaaagcgattttgttgttgtcagcgtgacgccggatttctgtcaggttggggacagcgtaattccctatgacattagccaggtgttgtcttcggagaaagtgcattatgccgaaacggtgtttgcgcggggacaaaaggtgctgatggtggatagtattattggagcggtaaagggtaatgccggtaaaggtgtgcagtcagatgtatcactgggaagtggacacagcaagatactgacgggcgccggaactgttttcactgaggggcggcagacagcgcggcatctggatgaggtgctgatgaatggtaaggtctga

SEQ ID NO: 393432 - DNA, 1197 bp, Salmonella enterica
atggtaaggtctgaaattatggatagctttactccaaacggaacgatagggcgtctgcaagtcatgccggggacatgtgagctggagaagccagagaagatactgactaaaccaccggggatttgtgatgaatggctgaagagagccacggaagaatatgaaagtaaatcctggtgggataaacaactagcagttggtctcgaagcaggtaagaccaggacgaaggatatggagaatgctgaggatttcaaaaaaaattgtgacagattgccagatgaaataccagaaaagtatattaatgatttacggcaacaactgaatgattatgttaatggtaaagcacgctggatggacccggaatatactctggggctccgtggcgcgttgcccttgcttgaggatatttactacacaggccctcgcctgactgcgtcacctccaccattcacagaagcggaaaaagagtggatagccaaacagcaaaatgacattgacatggtttttatggggatatgggctgcacctggactcatagcgcggatggctggagtgtcagaacaacgtgtaaaagaggttaatgagcaaattggtgttccgatgtttgacatgctcaccgcccatatgtcagtaagggaatggcgaagtcccggcgctgtcggaaaattatcaaaggttcctgtatgggaacctttgaagccactacgggatggggttagaattactcgcggtcagatagaaggttacgccattattaataatggcgtaatggaacattcggggaaagggacatggactgaggcttcctcaatgccaccaaaaaatagaaggacctttccgaatggaagacttgcctcgggaggtcatgggcagtctgctatagaggagttacagaaacgaggtatcccctataatatagaacacacttatcctaatggtgttagagtaggaaatattcctaatcacaccgtaaaagcgaaacgttccggaactaatcagtcatggtttccagaaggctggagtgatgatgatatccgaaaagctggtcaaatagtgctaaattctccttgtagttcagtgacaaaattgccatcaggaggtactatgacatcagggatctttaaaggggtttatattagagttgtgattgatcctaatggcggtggttctatattccccgataataatatccaaccatag

SEQ ID NO: 393433 - DNA, 615 bp, Salmonella enterica
atgaaagagagtcaaagattgtatcagatagaagaaaaatgctgcgatgttatgagcatcagtatgtggtatgagcttcctgatttcttgttttggtcaataactgatgttatggatttaaatgatgaggttttcgtagtaaatgtatataaaaatattggagaaaaatatcttgaagttctgttgcatccgccaattttaatttccattgtagaatcattgcaaagtaatttgatagttgaatatatacgaacgttatataaaaataaacaggatgttgatgccgttctcttgtcagatgtcgaatcgtgtctctttattaattatgaagataatggtgggacgaatgctgaactatttcataaaatttacaatggactgaaagaaatggtcagcctggcgaggaagtacattcaagatgaacaggttatttttgataatcttagcaaaataatgaaatttgcagaggagaataaacacgaatacttttcatacataaaagcatactggcttagtttgtatttctatgagctatctcagcatgtgacagataaaacaaaactatcattttatagaaataatttatcttgtgtttttcctaatgtaagtttataa

SEQ ID NO: 393434 - DNA, 192 bp, Salmonella enterica
atgattacaatagaaaagaattacgactggaatcctaagttgataaatgagaatgatggctggctgtattataaatatgaatcaactgtattctccgtggaaaatacctcttatgaatatcagtatgaattagcgaataaaattatgaatgctctacgtgatgcgggatatctagcagaaacaatttggtaa

SEQ ID NO: 393435 - DNA, 468 bp, Salmonella enterica
gtgccggatagtctgtttaatggacggcgcttccgggcgctgactgtagtggataattttagtcgggaatgtctggcgatccatgccggaaaatcattaaagggtgaggatgtggttcgcgtaatggaagcgctgcgggtgctggataagcgtctgccagtacgtattcagacagataacggtagcgagtttatctcgaaaagtctggataaatgtgcgtatgaacacggtgtcacgatggtcttctcccaccccggaaaaccgacagataacccgtttattgaatcgtataacggaagtctgcggggtgaatgcctgaatattcactggttcctgtcgctggaagatgcacaggataaactcgacaagtggtgcagggaatataatcatgagaggacgcattcatcattaaatgacatgactccggcagaattcatccgaagtctccagaaagacaaagatctctga

SEQ ID NO: 393436 - DNA, 342 bp, Salmonella enterica
atgagtcaatataacaaaatagtaagaatgttatttgggataatagcttttttattattttcaagagttagtgttatgcttggagatacggggtggagagatgtctgtttttttattgggtgctatttgttgttgtatttttttcttttctcccttattgattcagtagtcgggaatatatcatcatttcatcaggtgtataataaggaaagtattaaaaaaccatttcttaaaaattttatcgaaaacacaaacttagtatcccaagggtataaattaatatttaatttggggtttttacttatcttatttctcagattaaggcattattattatgagtaa

SEQ ID NO: 393437 - DNA, 639 bp, Salmonella enterica
atggcgaaagccggttgcgatgaggatgactataaattagtggctgaagatcttttccattgcgtgaagtttttcactttaattaatgattcaaaatggcatttggcagaagaattaaagagcataaaccttgatatgccagtaaattattctttttattacccggcgtcatggctatattcagaacgctacaataatgaaaggatgagctactattcgttatccctgaaagaagaaagtagatttcatggtgttattgatggctatttcttatatcatgatgaggaaatcaataaagagcagatctgcaatttaattgttagcagtctgaaagagaataatttctctgacatcaaagatatcgcccttaaaaaaagtaaaaatatttttaatagaaacatcacagagttatgggcaactaatgttaaagtcaatagcccacggaaaatggagggcgtattggttatctttgcaggcagagttcaggaaagctggttctgtataattggttcacttattcccagggaaaaaagtttcgaagcatgggcagaaggaaaacgagcaatagatattattctgaattcacttaacaattacgacctggaatacgaagaccagttttatgccgggcataattaa

SEQ ID NO: 393438 - DNA, 603 bp, Salmonella enterica
gtgagtaaaaagaaaaacaccacaacgcccacgccgcatgatgccgcgttccggtcgttcctggcgaatcccaacatcgacagagattttctggaactgcaccttccggctgaactgcgggctgtctgtaacctggacacgctgaaactggaatccggtacgtttgttgaggaagacctgcgccagtatgccagcgatatcctgtggagcatgaaaaccactgacggcgatgacggatacatccatgttttaatcgcacatcagtccagcgatgacaaaatgatggcgtttcgccagatgcgttatgccattgcagcgatgcagcggcacctggaagccgggcatggcaagctgccgctggtcataccgctacagttctatcacggggagcgcagcccctacccacattcaacaaactggctggactgcttcagtaatccggaagttgcgggtaaaatatatacaaacccgtttccgctggttgatgtcaccgtcattgatgacgatagcatcatgtgctatcgccgcatggccgcgctgacactgctgatgaagcatatccgccagcgtgacctgatctactggataagctcccgctgttaa

SEQ ID NO: 393439 - DNA, 447 bp, Salmonella enterica
atgaaaaaagcatttacgtttattgctgcagccatgctattttcctcaaacgtccatgcagatcagaaagaaaaagatactgaacactgcccgcaattagataaaattacagaggttggtacaggtgtgtatcgcgcttcaggtaataacggcgaatggattggtattacacaagatgctctcctgaagagtgataaaattcatagtttcaattcggcatcaatacttcaggaaaatagctcatcgccaatgaagtttcagtactgttcctataatcttggaagaggaaaacaagtacagttgcgatttacccttaataattatcagaattacactgtcaaaactgtaggtaaacactggcaaaaaggcccaggtccctatagtttgactgaatatttttgcgagaatacatcgcctgaaaattgtgaattcactattgtgaaatag

SEQ ID NO: 393440 - DNA, 408 bp, Salmonella enterica
atggaattaacttatcgaacggggcggcattgtgtctttgtgctgcactgtcatttaatctttatcaccaggtatcggggaaaggtgtttaacgccgcacaactggcaacgctggaaaggattatccgaaacgtatgcgggcaattcgaatgtgaggttgtggagtttaacgggaagtcggatcacgttcacatgctgcttaacttcccgccgaaagtggcgatcagcaagctggttaatagcctgaaaggggttagcagtcgcaggatgaaattgcatcatcctgaattacacaagcccgcctggaagtcagacgcgctttggtcgccgtcttatttcgctggcagtgtaggcgatgcgcccctggaagtgattaagaaatacattgaggagaaccgtcctcattag

SEQ ID NO: 393441 - DNA, 426 bp, Salmonella enterica
atgaacagtatccttgaaaaagaagtcccggctctgaaaacaaaacagcaagaagctgtgatgaatcgtattcatcacttggcctttgagcttgtcatgaagtgggcgaaggacaagaatcttggaaaagtgctcaactctactgataccgaactcgcacgaattatttttgaatcccagattgaaagaaactcagagatgtcgcctcgcgagttaagaaaaatcagcttgctgaatgagggcacagagaaattctcaaatcgcctaaaggaactgggcggaacttgcagagtaagcatggctgccgatattcttggagttaagcgtcaaacggttagtaacaggcagaaggcaaacgaaattctgtcgataaaattggcgaagaaactcgctttccgatttttcagtttgatggaagaaaaataa

SEQ ID NO: 393442 - DNA, 330 bp, Salmonella enterica
atgctgcatatcaccgcagataaaacgatgggcgacgaccagagcgtaacccagtctattaccgattgggctgcgaatcactctgagaatgactatgacggggttacttacgcgtcacgccattatagtagcgcagagacatgtaccgcgttctggagaagcgaggggaaagatggcccccttgtcgatgtagaacatagtcctgttgattcatatgtcgattctgataagcggaactacccaccgaactggcaggaagaagacatcactggatttgaaatcgtgacccagacgttacgtttcaatgtgtccaaagacggcaaaaaataa

SEQ ID NO: 393443 - DNA, 2142 bp, Salmonella enterica
atgacagaaaacattcaacaggctgatgttttcgctacaaagcggtatttacgtgaaaaatatcttcaggccaggattacctattcggcgacaaaagaagttgtgatggcacaaaggcatttgcagaattttctcagtaaacttgagttacctcaggacgatgcagcgctacactgggtcgccgaacaaaaccacagaacgatggaaatgtttgcccgaagcgggcgttttcaggagacacaacagaccatcctgcagtcgttaaatgatcaagcgaacattccctggggcgagcattatcgcgataccgtttataacttctggcaggatgagaaccatcctcgtggcatctggcgccgcacccacgaaacatcgtatctgtcagcagagcctgaatgggaaactgtgctggatattgatcgtcttaacgaagaggagggtgctaactggagctaccagggtgcagacctgctttatcctgatttcacgcgtgcactggtttttttatcgggtggtggtgatgcctgcgaaattcgcgagttcgacctgatcgaaaaaaagtttatcagcggcggtttttttctgccagaaagcaaaagttcagtggcctggcttgacgaaaaccacctgttactggcacttgatgcgggtggcgatacagtcacaacatcaggttatccgcgttgtgtcagacgctggcaacgaggtactttaccgcaagatgctgctctgatttacgccggggaaacaaccgatatggctgtttccgcttggcatgactatactccggggtttgaaaaaacactggtgcattgcagccgggatctttatcacagacgaacataccagcttaccgggcagggaaagctggagttcatagatattccgggagatgcctattgcgatttttttaatgcctggctgcttgtcacgctcaccacagcctggcgaatagcggataaaacctatccgcctggggctttgctggccactgattttgcctcttttcaacagggtcagcgcctcttcaccatcctgttcacgccggatgagcatactacgctacaggggcacagttcgaccctagattatctcatcctcaacctgacccgggatgtactcgggtgtgttgaaattttaaaagcagagagtgggctgtggaatcgcgttcagacgctgacattaccggacttcactgcgatttcggcttcaggcattgatacaaagagcaaccgctatcagttggtgagtcacggttttctgcagccctgttgcctgagttatggagatttggataacaaaactctcagtgtggtgaagcaggctccagcatgttttgataaggcagattttgaagtcacccggcattttgcgcggtcactggatggtacgcgtatcccctattttcagatagcaaccaaagggctggagcttactggtaagcatcccaccctgctgtatggctacggggggttcgaggtctctttaacccccgaatacctgggggcgaaaggtaccacatggctgcaaaaagggggcgtctatgtagtggcaaatattcgtggtggcggcgaatatggtccggggtggcaccaggccgcgctgcaacaacaccgacaccgtgcttatgaagatttcgcggctgtggccatggatctggttacccgcaaggtgacctgtgctgctcgactggcggcacagggaggaagcaatggcggtctgcttattggcaacatgttgacagactatcccgcactgttcggtgcactgttatgcgaagttccgcttctggatatgaccaactaccatcgctggcttgcaggtgcctcatggattgctgaatatggagatccagacattgctgaggaactccaatggctgcgaagctattcccccttcgacaaagtatcttccgataagagctatccgcctgtactgtttaccacaggtacgcaggatgaccgcgtcagtcctgcacatgcacgcaaaatggtggcccggatgcagcagcagggtcataacaatgtctggctgtatgaagaaactgacgcaggccacggtagcgcaccggagaatagccaggtagcgttttatcatgctatgaccgaagaatttctgtggcaaatgctgacaaatcaatag

SEQ ID NO: 393444 - DNA, 192 bp, Salmonella enterica
atggcgctggatgcgttcgcgggcgtgtgggacgccaaatacccacacatcagcaaaagctggcgtgtgcaccgggaaaacctgaacacgtttttcagctaccggcggtcccgcaggcgggcatgcgctcagcgcagaggcgggcaacaggcatatcccctgagcattcgctttatattaaatattccctaa

SEQ ID NO: 393445 - DNA, 291 bp, Salmonella enterica
ttgaaactgaataaaaaatcattttccggcgtcaggatagtgagggccggagaactcgaaccgggggcagtatcagaagagcagttctggttgctcgttgatatatccccgatacatagtgaaaagattattctggccctgaaagattatttcgtttccgggtattccagaaaggttgtgtgcgaacgccacggtatgagtggcggatatttcagcatcagtgttaaccggctgaattttatcagcaggaatgtgcataaactggcgggttattacagccatcatgaatga

SEQ ID NO: 393446 - DNA, 339 bp, Salmonella enterica
gtgagtgagcgtcctgttcttaccctgaaacgccgtcctgctgcggaaacagcagcatccgaagcgtctgggaataccgttccggttctgcgccgccgcagaactgtggtggttgttacgcctgacccgcgtaaacagaaaaagcaggcgcagatagacgctgaaaaggtcgcagaggctgcccgtaaagcggcggcaaaggaagaacggcaccgtcagtggctgctgaaaaatgcccgccctcccaaaaaaccgttaaaagcaccggtccgccctccgcgtccggttcgtctgataccggtggcggatgcgctccgggtgctggccacagctgtttaa

SEQ ID NO: 393447 - DNA, 261 bp, Salmonella enterica
atggtggccggtgcggtcatactgtattttccggaaacctggtaccttaaggaaacacagtggcagcttgcgacagaaaaggacatccccggtatacagggcggtctctcagacctgacgtggaacccggaccgcgggaccctgtttgccgtgaccgaccatcatcacctgtgccatcctggcaatggcgtaaacaatctcatcctgacgtatgatcccgttatacattttcaattcaccataaggagcaccggtgagtga

SEQ ID NO: 393448 - DNA, 414 bp, Salmonella enterica
atggaatcccaatcctggcgaaaagaaccccgtaaaaattattcgaacgatttcaagctccgtatggttgaactggcttcacgccccggtgcctgcgttgctcagattgcccgcgaaaacggcgtcaacgacaacatcatcttcaaatggctacgactctggcagaatgaaggccgtatatcacgccgacttccggctgccgtagatgcttcatcattaccagcaatgttacctgtcgaggtgataccagatccgacaccatcggccaggatgaataccgaaccgggtcagttctcagcgctgaatgcctcctcctgttgtgttgagttccgccatggcaaaatgacgctggagaacccgttaccagagttgctggctgtgctgatccgcgagctgaccgggagaagtcaatga

SEQ ID NO: 393449 - DNA, 291 bp, Salmonella enterica
atgatatccctcccgtcgagcacccgtatatggctggttgccggcgtcacggatatgcgtaaatcgttcaatggtctgggcgagttggtacagcatgcacttgatgaaaatccgttctccggccacctgtttatcttccgtggtcgcaaaggcgatacagtgaaaatactgcgaacacctgccgctatatcgccagtgcgaaatctttgcccgtcagggcgtggatctgagccggtcactgctctccaactgggtggatgcctgttgccgattaatggccccgctggatga

SEQ ID NO: 393450 - DNA, 411 bp, Salmonella enterica
gtgtatatccatgcgcagaagaacatggacacggaggtactgaacaaccggacgacggacgtgaaggtggaccacacggagagcatcggcaacaaccagcgtgtcacggtgggcacgggccagacggtgaaggtggggagcaaaaaggaaggaggccacgaccagcgcatcacggtggcgaacgaccacccggagtactggaggctctggaggatgatggtgaggatggtgacgcggaagatggaaaggataacggcgacggaggtgatgacggggccgggggcggcgatgaatctggaaatggcggttcgggtgatggagacgacgaacaggatgatgcagtatttgacgaacaattcttgctcttggatgatgaagataaccctattccattccagaaatataaaataa

SEQ ID NO: 393451 - DNA, 807 bp, Salmonella enterica
atggcaataagtaacaatagaggaagtactaaccagcagactaatagccaacagattgtaaaaggaaaggtaagatatgttaagtcacttgataccacaggatggttatgggttaaattatatccatataaaaaccaggcaaaagatgatgtttatttgtgtgagtatacaaaggtgctattacagaaagtccctgaaggacaggaaaaatccgggaaaacgttttttaagataatggaaggaccctatactgggaaaatggcatttttatcagatgggtatgtggggaagtgtttaatccagacaacacgttcgtcgggagcaaaattagatatcaaaataataggaagggataaaaagaaatcagaaataaggatgagtgaatataatcagttaatggctattatgagttttaatggagataaagcatcaatcactcttgactctgatgttaattataaggaaacgaataagaatagccctaactatggtcagatcttacattcatctaaaattcctaaaggtgtttataaaataatggctcctgattttcctaaagataaaaaaatgactgggcaatacagaacaacagtgaagggagggaatcccaatttgaaatatgatacagtatggtttccagtgcagtatgctgctaatcataatagtagttttgttcatgttggacatttgtctgaggggtgtataactgtgtatgaaactacgaaatggaattctgtatatttgtatttgataaaaaacagatctaataaagagggaaaatatgtgggtattcttgaaatacaataa

SEQ ID NO: 393452 - DNA, 384 bp, Salmonella enterica
atgtgggtattcttgaaatacaataatatatttttgttgttcatcccttttattgtttgcgcatcatatagtttgggtgataatcgtacaaatgatgtaaatcacggtctttggaatataagagaacaggcagtagattttctttattatgaaagaataaatcatcatatattcaggagtgcccttgagccaaatctaaagatagtagttcctcgctgctctatacctttacgggcaatttgggcgcctgaatatcaaggtcttccccggtatactgtttccgttatttgtgataaaacaattccaaatagttttgtggcgaaatggtttgtcgcggttccgactatcgctgctcatagtgaaagtcagacagtaggtaagtaa

SEQ ID NO: 393453 - DNA, 1107 bp, Salmonella enterica
atgaaaaaattcccctttcccctgcttatcccgctggcgatgctgttgctggcggcaggactctatattcacaactatgtgacgtttgtgcatacgccgccagcgttaacggacaaggaaaaacgtatgatcgaaactttatttttcaccacgaaaacccagtgcgtggggcgttatgtgtttgaggtgccagtctcttttgagaataccctgacggatcgcgccaagattaatgaagtcagtatcagcagcaagcggctctaccttcaggcgtttgagcagcggatccgacagcgagagcaggaattacagaacgagcacacggtgagaaaaatggatcagccttttctcaagcaggtgtaccgggttagtgagaatgcggtgatctttgaccgtaatagaaacgggagtgagggcgggtatggccgcactctggaagggcacctgtatgttaacggggtggcgtttatcctcactcaggatattatcgatttatctgatcctaaatatcaaaaagataagcaggattttatcagggccggcgtcagtgtcgaccatcttaacaccaaacctcagaaactggcggagttacgggatctcatgtcccgtctgagtggcagaaacgagcatgaaataccgacgcaaccagggacctgtatcccggagggatttattcgggacggtaacaatcagtccagggaagatattacttttatatacccgcataatcaggtcttttcttttgttgtctggagcaataatttcctgaaagaaagcacaaacataatggaacgaagcgatgaaattcaatcttatctgactcaaatagatgcccggacgttgcgtaaagggaaaacaaagatctccggttttgatgccagtgaatggctggccactgctccgtcagaaaagaatcctaataatgcgtcagcccagttattatttacagccgtagccaatgagaaaacagcggacttcgggcatcctaatcttgatctgacattaaataaccatgcactgcccccgccgatttacagcgatgccgaactggtggaaatatgggaccgtatcactcgttctttccgcatcaggaacaatgctttctga

SEQ ID NO: 393454 - DNA, 777 bp, Salmonella enterica
atgaaaaaaacactgattgcactggcggtggttatctccgtggcagcatcaggttctgccatggctacatgggaggtgcatggtctggggaaagcggctgattttggcggtgtgttaacacctacaactactttaattccgtgggaagttcaggttggaagtgcagttactgatttgaataaaaatgctaatatgggcgatagaattattaagatggttgcgagtaaaaatatccccattctggggattcggaccaaaactaatagtgtattcgcagggacgtctggcatttcaccgcagatcagctatggatcggcaattaaagtcagtgagtttgaaaatagcaaagtccctctaactctggaagttaaggatagtagtgacaaaaaaattggtgagttgaagtccactgttagtgcctcgtcattagtttctgtaagcggcagtggttatactggtgcttactatgcattttctccgagcgcaggggctgggttttacggtggcttaccgacatcaaaagataaggtctcgaataacgacttagcaaaagaaatcatgcctgaaatagcagataattatgctgatcaggggcaggttgctacggttgttaaatcaataactgattttaccgatcataactctaaatttagtggttattatgcatcaggtattaaaagtggggacgacattaatgttgttcttgatgattcgattaacaattatacgaatattacatggaaagcatctctgccggttactgtttcctatcagtga

SEQ ID NO: 393455 - DNA, 801 bp, Salmonella enterica
atgatgaagaaaaaattgatagcgatagcgctgggcgctgcgactgtatccagctctgccatggcgtgggaagcgaatggtttagggggggaagttaattttagtggggttgttactattaatagtatcagtacgaaaaatccctgggaagtatttgttgggggtaaagcatcgggccttgatgcaaacgtggccactggtgcgaccgttgtgaaaattcctcttagtagttcaattcctgtgctcggaattcgaacgaaagataaatctgcatttcctggagctgctggtattactcctcaaattaattatggtggcaaggttaatttatcctcatttaacaatgggcttactacattaactatcgatgttaatgattcgtcaaattcgaaaattggtacaatgactgcgcctatttacgcagcggcagaggtgagcaccaggaataaggacgggggtccggggatgcgtggtcttgttttaccaaagaaggccggggatgctttttttggtggtctggctacaaatgattctggtattcctacctatgctggtgtggcggaatctactttagatagtatagatcctgccttttctgctaactgggttgatcagggttggggtatcactgataacagatggactaatacattctcacgcagcaacgaaactttcaatgctttttatggttcaggaatacagccgggagagatgattgttttgaatctggattcagcctttaattcttcaacagtagtgcaatggaaagcacagttgcccattgttgtcagttatcaataa

SEQ ID NO: 393456 - DNA, 429 bp, Salmonella enterica
atgcttggatttgtttctgcattatcctcagcggtcgcggtaatgatattattgatgtccgtcttattagctaacttactatctgcggcaatttctaaagatgctaaattgaactctgcaacactctcttttaattctatcgaagggaacggtgcgaaggaaaataaaaaaaatgttattattccggggcctggacaaggtttttctttatcggctacagaccttatatcattagcttcttccaatactactgtccgggtttattgtacgtatggtaataacttaagtcttgacgttgctaaaaaatataccacatacaattatattgttgctaaatcagttttagcaaattcaaaaattattgtagagcaacctgtctatgagcctaagagcaagaataattgtattgtagaagaagtgaaaaaatga

SEQ ID NO: 393457 - DNA, 282 bp, Salmonella enterica
atgctgaccccttacccgtcgccatgggacgccagcgtgcaggagtaccgccgttatttgctaatcggtctggcaccggaaggcaaggtgcgagtctggctggagaacactaaaaagcccaatacgcgattaacggaggataaagatattctggtcgagacggtatccggtgacaaactggcgatgtgcaagggggtaaccagatttagccgtggatataaatatataaaagaaaccgaagattttatcaaagataaaaaatacccttacggcaactggtaa

SEQ ID NO: 393458 - DNA, 681 bp, Salmonella enterica
atgatgaaaatacaatccggagtgacgaccatactgatgttgacgcttttgctgtgcgtagaaatacccgttcatgcggcggataaaaagctaacctcgctacttgccccctatgatgagtggtatttcaatttcctttatccaaatgcgttgccagcagatgtgacctatgtggaattgctggacacggacgggatactgtatcggtacaggatgctgggaagtacaaacgccagttcagccagtgttggaaaatggaatgaagaggtgatgggtatccattcagatttcaataaggccaaaaatcctccccaggctatgcatttctgctgggactcgataatcgataaaaaagtgtatgagacgtggataacgtttggttatccggtctgggaaatgatgctgaccccttacccgtcgccatgggatgccagcgtgcaggagtaccaccgttatctggtcattggtctggcaccggaaggcagggtgcgtgtctggctggtaaataatggcaagcccaatacgcgattaacggaagataaagatattctggtcgagacggtatccggtgaaaaactggcgatgtgcaagggggtaaccagatttagccgtggatataaatatataaaagaaaccgaagattttatcaaagataaaaaatacccttacggcaactggtaa

SEQ ID NO: 393459 - DNA, 771 bp, Salmonella enterica
atgaaaaaaacactgattgcactggcggtagctgcatctgcagtggtatccggctcggctatggcggcgtggacggcaaacggcggaggtggtacggttgagtttagcgggtcactgacgcctgtgacgaaagcgactccgtgggaaacttctatcggcgctgctgtcacagaccttaacgctcaaattcagaaaaatgacacaaaagctgaaattaatgtacaaaaaaccctccctatcctggccattcggtctactgaacagtttgcaggtcgggcaggaattactccaattattaattatggctggctcaataaggactggcataatagtgctgtaacaggtaatgcagcagtatggaatgaggcgggaaagagaatgggttctgctgttatctctgtaactgctcaggcactctcggcctcatccaggcttgacggtagcgaaccagatcagaagctgctgggggcaaacaaggggcaggggtacttcggtggtcttccaacatcgactgacgatattttagatgttagaaatatcattcgtgaagggtggcctaatattgaagagaaatatgttgtccccaagggggctgtatggataaaaccttggtcagagacattttcgaatcctgagtggaaattctcttcctattatggttctgtaattgctaaaaatagtaaaattaaaatgaccttcgatgctcccgttagtggtgatgctccgtttaaatggagcattcgtttgcctgctacagttacctatcagtaa

SEQ ID NO: 393460 - DNA, 441 bp, Salmonella enterica
atgcctactattatattttggtctgtgacaaaagaaactgatattcgacgcggaagcccctgcgttttcttgatgcacgttcacttggtgttagtaaccaagtatcgaagaaagatatttgacctggacgccatcgaaaaactacgcagctactttgccagcgtatgcgctgactttgatgttaagctggttgaaatggacggcgaatgcgaccacgtgcatttgctgatcaactacccgccaaagctcgcagtatcgaatctggtcaacagtcttaaaggcgtttccagcaggctgcttcgccgtgatcggccagatatcgcccaacgctattactataaaggcgttctatggacaccgggctattttgcaagtagctgcggaggtgcaccgatttcgatcatccggcaatacattgagcagcagcagacaccgggttag

SEQ ID NO: 393461 - DNA, 330 bp, Salmonella enterica
atgggactggttaccttattttcctcccacgatggttatcttcctgatttcgcacagactctggcgaatagggcggaaccgcatgtgacctttgagtatacgcttacggtaaagcactgcatcgacacaataacgggtttcctgcgccgtgttgatattgaaccacgtccggctatcgcagatatacttactcagtttgagagtaccgtaggccagttcccgctgggatgccagatttgccctgaactgctgaaaattggctgtgccaggtaccgggagtttaccacgctgaaggctaccgggttttgtattcggtcgagggaatcttag

SEQ ID NO: 393462 - DNA, 981 bp, Salmonella enterica
atgaaagataaccgtatctgtcaaatccttgacatagaaaaacctgtcatccagggacctttatcctggctgacagatgctcgtttagttgccgccgtaagcaatgctggtgggctgggcgtgctgggtcctaacgcaggcttaaccgcagagaccgctgtttccacccctgaggaaacggcagaaaaaatgcgcgcagaaatccgtaaaaccaaaaagcttaccgaaaagcctttcggtgtaaacctgatacccacgcctgaaaatgacatctggactcaacctattttgcaggtggtaaaagaagaaggtgtcagggctgtggtatacaccgggtacggtgaaggcgcggtcatacccgcattgttcgacgaattaaaagcggcgggtattgccgtaatttaccgggatattaatccgacacctgaaaatacccggcttgctgaagaagccggggccgatatcgttgttgctaccggttttgacgaaggtgggactctaccgggtactgcactgggtaccttttccatcgtgccgctgattgccgattctgtgatgaatattcccgtaatggctgcaggcggtattaccgacagccgcaccgcaaaagcggcgcacgcgctcggtgccgaaggcgtgtttgccggttcggtctttatcggtaccgaagaaagccgcgtaccaaagtcggttaaagataaaatcattgacgcaaacgggctggatttgttgctgttccgtactcttcctcactattaccgctcgctgccgggcaagctggcagcaactctcgtatcgatggacaaagctggcgcaagtcatgaagagttaggtaagacaatgggaggactgcgcggcctgcgtattggtatgctggaaggtaacaccgataaaggttatatctcactcgggacgggcatcggaaatattcgcagcgttaaaagcgtagcggaggtagtggacgagttaaccgtagggtga

SEQ ID NO: 393463 - DNA, 885 bp, Salmonella enterica
atgcaaataaatctctttgaatctcttagaatttttatagaaatagttgaatccggtagctttactcaggcggctgagaatctgggcattcatcgtcccgccgttaccaaagcgctacagttacttgaacagcacagcggcacgcgtctgatgcagcgaacgacacgccgtatcaaccttacacctgacggagaagagttctatcgtcgtagtaaacccctgctggcacaggcagatgaattgctggagtccttcagtagcgaccaggtgctgcacggtcagctacgtgtagatatgcctatcgcgcttgcagctctgctggtcatcccgaggttgcccgatttttatagcaagtatccgggaattgaaattattctgagtagttcagaccgccgtcgagatatgttacgggatggtctggattgcatactgcggatgggggaactggaagatggtgattacattgctcacaggatgggcagtatcgaaatgaccacctgcgccagccgtggctatattgcgctacatggcaagccggaaacactggaggatttgagggatcacctggccattaactgggttaacagcagtagcagacaaattatgccgtggacctttgcgacgccagaagggactgtggagataacgcttccaggtaaacttgtcgtagataactctgaggcatacgtctctgcgggccttgcaggtctggggttacttcaggggatgaacgtctttttaaagccttatctcgatagcggacaacttgttgaggtattgccccacaatccttctcctgatcgtaaattgtcacttctttatccacaccgacatctttcacgcaaggtatgtatatttaccgaatggttagaaagcttattgtga

SEQ ID NO: 393464 - DNA, 345 bp, Salmonella enterica
  misc_feature (331)..(340): n is a, c, g, or t
atggatacatgtgatcttattacaagaatgggcaatgtagatggattgacgcatatagagctaaactatcctgagcattttattggacaggataaaaaaataattaaacaatgtattacagataacggattgaaagttagtggcattgcactacgttacaataaagatttcattgatggtgaatttaccaacccaaatactgctcttcgcgataaagcgattgagacaacgctggaagctgctgaagtttgtaagttcctggggggcactactgtaacattatggtttggctatgatggttatgattacccatttcaacaagactatttcnnnnnnnnnntatga

SEQ ID NO: 393465 - DNA, 147 bp, Salmonella enterica
atgatgattggcgtgccagactacgacaactatgttgagcatatgcgcataacgcatccggatcagacgccgatgacctatgaagaatttttccgcgagcggcaggatgcgcgctatggtggaaaaggcggcgcgcgttgctgctga

SEQ ID NO: 393466 - DNA, 375 bp, Salmonella enterica
atgaagggcgtaaagcactcacatcgtggttctaagatgcgtagccctcatcttgtacctctaagccgtcaggcactgaaaatattagaagagataaaacaaatcagtggggattacgagttggtcttcataggcgatcaccagccggataggccgatgagtgagaacactgttaacaaggccctgcgctcaatgggctacgacaccaaaacagaagtttgtggacatggtttccgctcaatggcctgtagtgccttgatcgaatccggcttatggtcaaaagatgcagttgaacgtcagatgagccatcaggagcgtaataacgttcgcgctgcttactccatcttgctgaacatctcgatgagcggaggctaa

SEQ ID NO: 393467 - DNA, 162 bp, Salmonella enterica
atgttggttttttctgtcttaaaagtgcagatgtatctctttatatttattagaattattggtttgaatttgttttatataaataaagaattaatgatagccgagatgaaggcgttgcagctaaagaaaatctgcaacgcgcaaaggaaagtgaaaggatag

SEQ ID NO: 393468 - DNA, 123 bp, Salmonella enterica
gtgagcgcctgggaaccgccttttgtcgtcaccccgttcatactcaatcaggtgattgaagtgggtaaattgatgggggcattgggcggtgatagcgggccgggcctctcctttgctacgtaa

SEQ ID NO: 393469 - DNA, 690 bp, Salmonella enterica
atgaagaaaatattcattgcaaccgctgttgcactgtctttgtctgcggctgcgcaagcggctgaatctaccgccgtgttaaaagtgaccggcgttctgaccaacgatgcctgtaccccggagctggacggcggcggcgtggttgattttggtaccaaatatatcaatgaactgtcggcaacagagacaaaccagttaggccacaaagacctctctttcagaatttcctgcaccgcgccaaccaaagtgggttttactatcagcgacgatcgtgctgactctacagcaagtatcaccgttgagaacaccagctttaccgagcctaacgagaccgcctggaccaattctatccgttacggggtcgggaaaacggcaggcggtgttaatattggcgcctactctgttgcgctaaaccggagcgcgctcacggcagacggtcaaccacagacggcgctgaaccactcaccaggcgacaccgaatggagtgcttgggtcgacagcaccgatcttctgaaccatagcggttcactcagctacagcttaggcagtgccgcaggtgtgccggttgcctttaccaacgcagaatttcctttacgcatcgccctggccgttcaaaaaacggatgcgctggctattaccgacaatacgacacttgatggccaggccaccattaccctgatttatctgtaa

SEQ ID NO: 393470 - DNA, 150 bp, Salmonella enterica
atgggttatctggcggacatccagtttgttgatgttgccgccgccattgaaatagccgacgacatcatggaactggcgaaaaccgcagaagtgcagagcagggggagagcgaccaataacggcaaaagtttcataaacgatcctctttga

SEQ ID NO: 393471 - DNA, 681 bp, Salmonella enterica
atgaaattattctggtggggattaggtatcacgggcgcttattttttaatgctctgtgcaaccattttaaaactgaatttgaacgtcatggaaagctggaatgaattcggagactttcttgcaggggctttttctcccgttgcctttttatggcttgttctcggattcatccagcagcagaaggaactacagcaaaacacagatgccttgaaactccaggctgatgaacttaaaaattcagtagatcaatacaaagaaatggtttctatcgcacgtgagcaactgctggctgacgcgagtttgatagaagaaaataaaaaaattagagaaattgaaacgaagccagatgtcagtataaaaaatatagggtggcagagtaagactgggatggaatatacatacaaaatcccagtttactctgacgaaagagaggctaggaatgtatgtataactttttcaaatggctttggtgaattcacgtcattcacaaaagatatgctcaagagttcaatgattttacccgaaatcgtaattaaaaatggtaatgtccctgacgaggttgaactatttatttcctttgagagtgtaattggtaagaaatacaagtatcgatatcttttttccgacgtccatgacgggaactatcaaaaaatggaacgccttgaattagttccagactaa

SEQ ID NO: 393472 - DNA, 483 bp, Salmonella enterica
gtgggggctgaaatgaaccgcataaccacgggcgtaatagcctcattgttgattgtggtcgcggcgctggcatgggcaacagaccattaccacggtaacgcggtgaagtacaaagagcagcgcgacaccgttactcataagctggcgctggcgaacgcgacaattactgacatgacgaagcgccagcatgacgttgccgccctcgatgcaaaatacacgaaggaattagccgatgcgaaagctgagaatgatgctttgcgcggtgacgttgccgctggccgtcgtcgcctgctcgtcaacgccacctgtcccgcaatgccgacaggtaaatccaccgccaccgccagcatggatgatgcacccaccgctagacttactgacgccgctgaacaggattatttcactctcagaacgcgaatcgaaaccgttaccaaacgactaacggggctacaggcgtatgtgcgtaatcaatgtttgaattga

SEQ ID NO: 393473 - DNA, 255 bp, Salmonella enterica
atgcctaaacagccacctattgcaaaagccgacctgcaaaaaacacagggagcacgcaccccgacggcagtgaaaaataacaacgatgtgatcagctttatcaaccagccttccatgaaagaacaactggcggcggccctgccccgccacatgacagcggaacgcatgatccggatagccacaacagaaatccgaaaagttccggcgctgggtgactgtgacaccatgagttttgtcagcgccatcgttcagtga

SEQ ID NO: 393474 - DNA, 459 bp, Salmonella enterica
atgatcgaccttgtccgccgttccggacagattgccagcctttccgcgcgcgtcgtccgcgaaggtgacgatttcagcttcgagtttggtctggaagagaagctggtacaccgtccgggtgagaacgaagatgcaccagttactcatgtctatgccgttgcccgccttaaagatggcggcacacagtttgaggtaatgacccgtaaacagatagagctggtacgggcacagagcaaagccggtaacaacggcccgtgggttactcactgggaggaaatggcaaaaaaaaccgccatacgccgcctgttcaaatacctgcctgtatccattgagatccagcgcgcggtatcaatggacgaaaaggagacgctgactatcgatccggctgatgcgtctgtcatcacaggtgagtacagcgtcgtcgaaaacgctggcgtggaagagaacgtgaccgcataa

SEQ ID NO: 393475 - DNA, 321 bp, Salmonella enterica; identical to SEQ ID NO: 390265

SEQ ID NO: 393476 - DNA, 978 bp, Salmonella enterica
atgacgaagaaattactatatagtgtaataatctcaggcaacatgttgctgataaatttggctcatgcgaattattttatagcagcctctattaacaccgcaggttataaattaaaccaatcctcaattccagcgactgtcggagaggaaacatcctggtggatggactctggttccgttcttactaacatatccagtagcaatacgaatagctatgcgcaactcacgattaatggaacattagtcggtgataatatttatgcgacaaacaatcctggcttaggtattaaatacagattgtatcttggtaccgatcaaaccactccaccagcaggttctgaaatagcgcctgattataaagttacgttaaatgcaacaccgaaacaattaaatacttatacgcatgtttattacaaaatggtaagactaacggagaaggttgaagccgggaaaataacatcagccccggatgttatattgacttttcataatcctaacggtgatggtccgtcgacgatatcaggcaccatactttccgggatttcatcacaaccacaagttgttggttgcacagttgatgcggtgtcggaaataaagctacctactttatacggcaatgagttaataaacggggcacaaaaaattaccgaagcgcctactattatgttgaaaaattgtcccggcgcgataaacggtatttcttataatttttctgccgtttacggcacacataacgcaaccaatggcgttctcaataccgttaccggcgacggctatgcgaaaaacgtttatgtgcagatacaaaatgccgacggtagcgcgcatacagtaaatggttctattccactgagcaattacgacggttccggcgactatgctatacccgatttcaaagtggcctattttattgatgacgcgaataccgtaaccgccggtaaagtgaaaacggccattgagctgaaagtaacctataactaa

SEQ ID NO: 393477 - DNA, 906 bp, Salmonella enterica
atgaaaaccttactgtcctctactgcgctagttatgtgcgctggaatggcttgcgcacaagctgccgaaaaaagtgactggcattttaatatcggtgccatgtacgaaatagaaaatgtcgaaggtcagggcgaagatatggatgggcttgccgaaccctccatctattttaatgcggctaatggtccatggagaatctccgtggcctattatcaggaaggcccggttgattacagcgcgggtaaacgtggaacctggtttgatcgcccggaatttgaaatccgctatcagtttctggaaagtgacgacgttaattttggcctgaccggcggttttcgtaattatggctatcactatgtagatgagcccgggaaagataccgcgaatatgcagcgctggaaagtacaaccggactgggatattaaactcagtgacgacttacgctttggtggttggttcgccatgtatcagtttgtcaatgatttgtcgataacgggttattctgacagccgtgtagagaccgaaacaggtttcacatacaaaatcaatgatacgttctcgatggtaactaactattatcttgagcgtggctttaatatagataagtcgcgtaacaatggtgaattctctactcaggaaattcgcgcctatctacccatttctctgggaaataccacgctgacgccctatacccgcctggggttggatcgctggagcaactgggactggcaagatgatcctgagcgcgaaggccatgatttcaaccgtctgggattattatatgcgtatgacttccagaacggcttgtcaatgacgctggagtatgcttttgaatgggaggatcatgacgaaggcgagagcgataaattccactatgctggggtaggcattaactacgccttttaa

SEQ ID NO: 393478 - DNA, 126 bp, Salmonella enterica
atgggtcgtaacaataaactggatctgcggaaatgcgctgcgcagagactggataatttgctgttgctaggcagggtgcaggaacatatcgacttcatcgatcagcacaatcccttgggtttttaa

SEQ ID NO: 393479 - DNA, 285 bp, Salmonella enterica
atggcggaaagctttacgacgactaatcgatattttgacaataaacattatccacgtggattctctcgtcacggtgatttcacgattaaagaggcacaactgcttgagcgtcatggtcatgcctttaatgatgtatgtcgcggtgaacgcgagccggtaacggatgctgaacgcgtctggtccaagtatatgacgcgcatcaagcgtccaaaacgcttccacaccttgtctggcggtaagccgcaagttgaaggcgcagaagactacaccgaagctgacgattaa

SEQ ID NO: 393480 - DNA, 681 bp, Salmonella enterica
atgatacagtacctgaacgtctttttttacgacatctacccctatatctgcgccacggtattcttcctcggcagttggctgcgctatgactacggacaatatacctggcgcgcgtcgtccagccagatgctggataagcgtgggatggtgatatggtcgaatctgttccatattggcattctggggatcttctttggccatctgtttgggatgctgacgccacactggatgtacgcctggttcctcccgattgcggtaaaacagcagatggcgatgatcctcggcggcgtttgcggcgtattaacgttgatcggcggcgcgggattactttggcgtcgtctgaccaatcagcgtgtgcgtgcgacgtccactacaccagatattatcatcatgagcattttgctgattcagtgcctgcttggcctgagcaccattccgttttcggcgcaatatccggatggcagcgaaatgatgaagttggtgggctgggcgcaaagtattgtcaccttccgcggcgggtcgtcggaaatgctgaccggcgtggcgtttgttttccgtgtccatctggtgctggggatgactattttcctgctcttcccgttcacccgtctggttcatgtctggagcgcgccgtttgagtatttcacccgccgctaccagattgttcgtacccgccgctaa

SEQ ID NO: 393481 - DNA, 249 bp, Salmonella enterica
  misc_feature (198)..(207): n is a, c, g, or t
atgaaactaaaatctggctcctctgactggatcgcctttgccgttaactggctgaagattaagctaaatcagaaatctagtcttgtcaagaccaccaaaatgaccaccattttccttcataaaacggcgttcaaaacagcattattcccagcttcggcacatcattcttttaaatacgttttcaatctttccagaagnnnnnnnnnnagacagttttcaatctttccagaaggatatctgcttctttaa

SEQ ID NO: 393482 - DNA, 249 bp, Salmonella enterica
atgccttttataacaggcgaacgccagatccataagtcggcgttctgtatcacgattcaccagcgtcgggttttcatgatagtagccatggtgagcgatttcatgcccggcatcaaaaatcgctttactgatttccgggaaggtgtctacagagtgtccgggaataaaaaaggtggttctgatattattttctttgaacaatttcagaagcctcggcacgccaacttgcgccccaaactctccacgtga

SEQ ID NO: 393483 - DNA, 234 bp, Salmonella enterica
atggaacgctttcttgaaaatgtaatgtatgcgtctcgctggctgctcgcgccggtgtattttggcctctctttggcgctgatcgctttagcgctaaaatttttccaggaaattctacacgttttgccgaacgtttttgccctggcggaggccgatctgatcctggtgctgttatcgctggttgatatgacgctggtcggcgggttgctggtaatggtcatgttctccggatga

SEQ ID NO: 393484 - DNA, 285 bp, Salmonella enterica
atgtttgatggttttctgtctgcaaagcgcctgataaatattaccgggcgctttgtattttggagccaacatcactttcatcgtcatatatcgaatgattacaatagtgttcgatcccaccattacaccagacgaaaagtccctgacaaaatgttagaacggttcgccatcggcagggaagcgtcggtggactctgaaccgcgctataccatcttacctgatggtttcttgattgtgattaattctttgaaaaataaaagtatttcctccgtctctgttttgtaa

SEQ ID NO: 393485 - DNA, 150 bp, Salmonella enterica
atgctttgtctgtgtaaaccaatgttatttattggtcagcagcaatataatacagaatgttattatttcaatgatctattgcggaaaatatttagttttcaaaaaaaaataataagaaaacaatgggttattaatcatgataaaaaataa

SEQ ID NO: 393486 - DNA, 1254 bp, Salmonella enterica
gtgcaacagggcgctgtactgctggaaaatcgttacctttatgacccgccgggccgccgcatcgggaaacgggtatggaaaagccggcgggagcgcgggagtctcagcggggaggaatatattttcctgaataaaaccccggaagtgacatggtacgggtgggacggcgacaggctgaccaccaccgaaacagccacacagcgcgtacagacgatttacacaccgggcagcttcacgccgctggtcagaattgaaacagaaacagcagagctggcaaaagcagtccgtcgcacgctggcggagaaattccagcaggaggcgaacgtaatcttcccgccggaactggtggcgatggtggataatctggaagcggagctacagcgcagagaactcagtgaagctaaccggacatggctggcacagtgcgggctgacggcggagcagatacaaaaccagatggagccggaatacacgccgcagagaacaatccacctgtaccactgcgaccaccggggcctgccgctggcgctgataaaccgggaaggaaaaacagactggtcagcggaatatgatacgtggggtaatgtactcagtgaaaataaccctcacaacatgaaacagcacatccgtctgccggggcagcagtatgatgaggagacggggctttactataaccggcatcgttactacgatccgttacagggacggtatatcactcaggatccgattgggctgcggggaggatggaatttttatgtatatacgtccaatccaataatagaaattgaccctcttggattagcggggtgggattcattaggttcctatattaatcaacctgggtataaatcaaaagttacaaatgtagccccggagggggccgatactacaaaaccagtttcgttaaggcctgacggttacccttggggatatggttgcggagatgaaagtacagataaatttgttcctgatggtctgtatggtgttagttttatgcaagcttgtagaaatcatgatatctgctatggaacatcaggaagcagtaagcagtcatgtgatactcatcttggagacgacatagtgttggcatgtaacaggatctggaaggatacactgagctcagatgatatgctttataaatgctatactgctgctggtatttatcagttagcagtggaaaaaaaaggtggccccgctttcgaagcggctcaacgagaggcagcaaaaaaagtaacagagttcggtccaaaataa

SEQ ID NO: 393487 - DNA, 486 bp, Salmonella enterica
atgaaaggaaatatattttcaaatagagatgaaatatataatgaacttgtaagttcattcccagaaaaaccaatcccattactttctgaaaatatcagaggcatggatgatccagatatcgtacattcctttttttctgaaagaaaatggactgatattgcatctggattaaatttgaaagatgattcatacgcattagaacttggcgtgtcatttcttcctgaagatgttttctgttatcatatacctctatatatttatgcttccttacataatacaaaggaattctgggtttttgagtctgttttcattcaaaactatttatgccctgaatatcgaacttatgaggactttttttcatttatttttaaactctctgacgttcaattatcagtgatagctcgatttatggcttatgaagcaaaaatattagggttcgattatgcaagtagagcatgtcacgatttctgggatctttattggtaa

SEQ ID NO: 393488 - DNA, 366 bp, Salmonella enterica
  misc_feature (244)..(253): n is a, c, g, or t
atgtttgatagcaggcgtacagacattattgaacttgataagaaaaagattattgaaaatacactatatgattgtggtttttgtatctttgataaagttctcttacctagcaatgtcaataaacctgtcgttataaatgataatgaaattaattacatttgtgaattcagcttctcaaacattaatgatggattttggctaattgatattgatggaaatgttagcattaaagaaattgtgaacnnnnnnnnnntcccagatgacaaaataaagataatcaccaatcgaaacaatttcgactgcaacaaagaacaggttaatttcatagcaaaagttttattaaaaatcgcaaaaatagtgcaataa

SEQ ID NO: 393489 - DNA, 441 bp, Salmonella enterica
atggaactgaatagccaattctccaaagagcagttaataggacatgcgcagcgacgttgcgaggtgatagaggaaatcattgctgatccaggcactgatcccgtttcgcgcgactactacagacgtgaggtggttatgagcaaaatagcgctggctgcgctaacggttgagccggttgcgtggacagacgagcaagagttgcgggacgttgaaaaagtcgggtgtggctatctgtttacggttaagcctgttacaccgaacacagatccgcaccgagtcataaaactgtatgttaccccgcccgcacaggtagtgcctaaaacgttgccgtgttctgttgagttaaagccggggctaataatcggtaagggttgtaagacagacacattgctaagggctttgcagaatcgcgccactatcctcaaaggtggtgcaaaatga

SEQ ID NO: 393490 - DNA, 1305 bp, Salmonella enterica
atgaaatttcccggtaaacgtaaatccaaacactattttcccgtcaatgcgcgtgacccgttgttgcaacaaattcagccagaacaggaaaccaacgcctcctgggtcgtcggtatcgaccagacgttggtggatattgaggcgaaagtggatgacgattttattacacgctatggattaagcgccgggcattctctggtgatagaagacgaggtggcggagaagctgtatcaggaactgacgcgggaaaatctcattacccatcagtttgctggcggcaccataggcaatacgatgcataattactcggtactggcggatgaccgttcggtgttactgggcgtgatgtgcagcaacattgagattggcagctacgcttatcgttacctgtgtaatacttccagccgtactgacctgaattatctgcaagctgtagatggcccgattggccgctgtttcacgctgattggcgaatccggcgagcgtaccttcgctatcagccccggtcatatgaatcagctacgggcggaaagtattccggaagcagtgatcgctggcgcctccgcgctggtgttgacctcatatctggtgcgctgtaagcctggcgaaccaatgcctgacgcgacgatgaaagcgatcgaatacgcgaaaaagcataatgtgccggttgtcatgacgctgggcaccaaatttgtgattgccgataacccgcagtggtggcaggcatttcttaaagagaatgtctcgattctggcaatgaatgaagaagaagcggaagcgctgaccggcgaaaacgacccgctgctggcggcggataaggcgctggactgggtcgacctggtgttatgcaccgccgggccgatagggttatatatggcaggcttcaccgaagaggaagcaaaacgtaaaacccagcatccgctgctgccgggggctattgctgaatttaaccagtatgaatttagccgggcaatgcgccataaagattgtattaatccgctgcgtgtttattcgcatattgcgccgtatatgggcgggccggaaaaaatcatgaacaccaacggcgcgggcgatggcgcgctggcggcgctgctgcacgatattacggcgaacagttaccatcgtagcaacgtaccgaactccagtaagcacaaattcacctggctgacctattcgtcgctggcgcaggtgtgtaaatatgctaaccgtgtcagttaccaggtactgaaccagcattctccgcgtctgacacgcgggctgccggagcgtgaggacagcctggaagagtcgtactgggatcgctaa

SEQ ID NO: 393491 - DNA, 405 bp, Salmonella enterica
atggttgataccttggtgcgcgcggaattttttatttgtggtgatgtgtttgataccaatgaagttactaggttaataggtgttgagccggatgaggttaatatcaaaggtaccataactggaacaagaaaaaggcccagcgccgagacgagttggggcatttttacaaataaagaaaattctcttgatgttaatgtacaaactgagaaattattgaaattattaattaataaaattgatttattgttaatgataaaggagaggtataatgtttcatttattttatcactcgtgatagaggtaagtaatagagagttgccagcgatatattggtctccggaaacaaatcgttttttaggtaggattggagctgaaagttctatagatttgtattattatagttga

SEQ ID NO: 393492 - DNA, 321 bp, Salmonella enterica
atgacatcgcttggcgaagccgaaatattaaaagccgaaagcgagatggctttttggaacgatccgtgcggtgcttttgccagtgtgtttggcggggatgattcagggaacccaaatgtcggtaaagacctgacggatgaagagaagaatgaactgggtggaattggatctggtgcgcctgggggaccagagggtgaagatgaatggaataaggtacagtctacaggctcatctgagggggaaattaaaaatacatatggttctattaaagatgcccccaatatccaaaaggatttagatctagtcaaaacggtgcagtga

SEQ ID NO: 393493 - DNA, 447 bp, Salmonella enterica
atgtttaatatggagcataaattatctccatattatataagttcactttgctattataaaatagaacaatacttcagaagtggcgaattagatactaagtacaaaaaaatacggttccatttaatcatggccgtaagagtgttatctataggctctcagttagatccattaaatagcaataagcttgataaacaatgtgaaaatgtcaaaaaaatattacttgatgataagttatgtgtttcccttttgagaatcgcagcgatactaattttcgatagtggcattgacttggagaaaactagatacaaggctgaatctgaaactgatatgatgttaagcagattaaatgctttcactaaggagcatgggctgcttacatatgaatccttaaccaaaatatcatcaactaacaaacttgaatttgacacagaaaaggttgaattataa

SEQ ID NO: 393494 - DNA, 363 bp, Salmonella enterica
atggtgcagacgcagcggagccgcatccagaccgtgtacgcgccggggggcttcacgccgctggtgcgcatcgagaccgacgcggcagaacaggcgaaggcgaagcaccgcagcctggcggagaagctggagcaggaggggagcggggacggcgaggcggtgcagttcccggcggcgctgcgggcgatgctggacaggctggaggacgagctgaggcgtgacgcggtgagtgaggaaagccggcagtgttttccgggaggagatcagatgtttgtttgttgtagaaggtaccggtggatctgtaattattactccaataaaaaaagccacggttctcaccgtggcaaaatccaacatagctaa

SEQ ID NO: 393495 - DNA, 2130 bp, Salmonella enterica
atgactggtgataatgctgaattaggtttttctgttgatacctcagaagttaaaaaaggttctgatgctttagataagctagcacaatccgcaagagaggcaacggatgccgcaagtaaattagctgaccagatgagcaagccagtatctattcacgctggaggtttttattctggacttgcttcaaaaacaaaagagcaattagaaagggcagaacaagaaatatctcaaaacgcaaaaaaagctggtggtaattggtttaccagcttcattaatggagttaaggaaaaccatagcgcacaacgtgaattaggggtaatgtctcatgaattaatgtctggacggtggtctaatttgcgtggttctgctgctattatgcttggcgctgctggtatgggggggcttgctggtactggcgtggtaatgggtatcactggtttaatagaaggtattgaggcattaaccgaatcaattcaggaagccgcgcaagcgcaaaaggatttacaacaatcagcaatattatctggcaatgctggcgcattatttacaggtaaaattgatgatattgttaatggtctacaaactattaaagatgcatcaaaagaaactaaagaagagtttgtttctaatgctcttaattcggggttaacgcctgattttttgaaaaagaatggttcaatgcttcttcaatatcaacaggagttcggagaaaaacaaaccgaagcgctagagagaattctcgtagaaacacaaactgatgcaactaaaggatacaccgcactatataaaatgggtggcggcttacttgatagggtaaataaagatatagaatcaggtaattataaatctgctggttctgatattatggctgggctattgcaaggggttaaaaatcaactaagagaatctcaggcagaaaataaagagcttgagggtccgtcatgggttgatgacgttctatcatacatgggaatgggcgctttcggttattctgtaagcggttttcagactcagaaaaaaataattgatggaatgcagaaaaaaaagcaacaaataaaaacatacaatcaggaagcaaatgatgcaataaagaaatctgtggactcaattgcatcgccaaaggtaaaccttgaaagtacaaaagtatttaaagactggggaaggtatatacatccatcattttctatccaccacggtttaactgatgctcaaagggcggcaaaaaaggccgcagaagaagcggcgcgttatgctcaacaaattacagatttaactaaccgtcatgaacaattagcggaatcaattgataagtctgttaataggcgatgggctaataaaaatcagcctttcagtgatttaacatctgatgcttatgattttgaagaagttcaaagccagattaatgaccagtttgataaaatggttgatagcgttaagacattggcagaacatcagcataaatcaattacgtcacctgaatttgtaaaacaaatcgctgaaattaataaaatgaggggtgatgcattagaagataatttatctggtcataataaatatgaagataatttacattccgttttagctggcgttaaaaaggggatgaaggattaccaagaaacgtctgataaagttgctttacaagtcgctcaagtatgggataaatctttagattatatgactgattcgcttactgacttttttactactggggaagctgactggaagaattatttaactgatattttgaaaatgattgaaaaaatattagtgagagatgtaattgtccagcctgcatctaattatattggaggattattaggcgtaagcactggaggctcacaggccgttgataccgttatgtccgcaaactcattgccagtgccatccgtacctaatctatcttcatctaaaagttctggcgttggttcttcagcattttcaggcattcaggttatcgtaaataataataatggcaatgttaaaggtgctactcaaagcgatacaaagcaggggcaagatttagggcgcacattacaaaaagccgctcaaaattggattaaacagcaaaacgttcaatcaaataaacagggtggtgtgaaccgctctatgaatagctggagtgtaaaataa

SEQ ID NO: 393496 - DNA, 1470 bp, Salmonella enterica
atgaacgcagtgacgaaagaaaatattgctaaacgagcgttgaaatgtattgaatttattaatcgacaactccttcgatttgcaaaaatgccgcccaatgaactgatggcctacttacgcaaacatcccagagaggctttctgccaaatcccccatccgaaaggaagtggtaacctccagtgtggttctatcgcatggaacaagttaggtgaacttgcagatttggctcttaaattggacacctgcctaggtcgtcgcgtaagtagccaacaggcaagaaaagccgtaactgatgcttttgtatcaaaggtattgcaggaagcacgtgaagctaatcaggagacggcgatgatggttctccaagatgctttggcaattttaagaaataagctcgtagtcagggaacactacctaccatgcgtactcttcggcgatgatgctcccacagagtttaccgttggtccagtcacattcactcaaaacgccatgttcttcagggacaaaaagtcagtgttcagacatagcgttgatataaacacgaatgctcatattaagagtgtaactgctgcgatcactcaaggattctttcgagagaatgtgcccaccccagatgaatcaagaaaatttgttggagaatttcagaaacgcgctatcaagatatataaagactatccgtgggttgcaagtattaaagtcactgattgtgacgaagtgacctctcaagaacgggccatccaagcaactgaattggcaattcatattatccgtatcctcttgggagctgaaccaactcggaaaatcagactagcatggtctcgaagtaatgccttaaatacagctcatttatactctgacgcggatggtgtaattcacgcaagtgtcggcgctaattctttaggacctgtcgggataatcaattggtataaggcattgatgaaatgcgatttagagttaacaatccttggttctgccttgttaccaatagtcaatcccatagaaaccagtcatctccatcaacgtctcattgatgccattaattggtttggagacgcggcaacggattcaaacccgtcttcgagtattgttaagtacgtatctgcaattgagcgattgttcttcggaaaatttgagtcgggacgcactaaattatttgcaggaagaatcaagaatattctggacgcattcggttgtgacggcgatcaccaagtctacgatcaggccctcaaagtatacagagcccgttctattttggttcatggagagatatatcagaccgaagatgaagcaaatgaaagtatttgccttgcttcatcactgagcaggatgtgccttctctgttctgctcagctgtattcaatgatgcaaaatgcgtttgataatccagatgctctcgccttagaagaaataatgaaacgtattagtgctgagggtttagattggctggtagatgctgcgggatttcataagtga

SEQ ID NO: 393497 - DNA, 579 bp, Salmonella enterica
atgagccgtacttttgcatattgtcgtgtgtccaccagcgagcaagcgaccgaaaaccaaatcatagcgatccgtcaggcgggttatgatgtactcgataaccgtgtagtgtcggaagttgtttccggtggggtacaggcaatgaagcgtaaagcttttgccgatatggtaaatcacaagctggagtcaggtgatcggcttatcgtgctcaaactagaccgtttgggccgtgataacatagacgtacaacaaactattgatatgcttgttaagcgtggcattgaagttgtttcattggatctgcccgttcgtaatctcacgagtgcagaaggaaagttaatgctacaaatgttctctgctttcgctgagttcgaaaaatcccgaataatagaacgaaccaaagaaggtcttgatcgtgcaaaacaggaaggaaaacggttaggccgtcctgttgctacagacacacgagaacgtgttcaaagagccaaagctaaaggtttgagccagtccaaagcagctcttgaattaggtgtaagccttccaaccataaagcggaactggaacatcgtagcggaataa

SEQ ID NO: 393498 - DNA, 645 bp, Salmonella enterica
atgagctatccccaccgctttatgaatggcgaagaagacaaaacggaagaaataataaacaccatccttcgcttcggaataaaagaggaaatgcttaccagaattagcgggctgctgattttgcaactttacggttctttcatatccagaagcgaaaacccgttcattatcgttgatgaaatttcttgcctggaaggcaatcctttacggggcgaaagcagaaccaaaccaccaacaatgtttaaccggaagccttatcttcggggactatggcacaagcactatcacggtgctggtatagatgttatggctaggaatatacaaatcgccctgaaaaattacggtttaccgcgattagaagcagaggttgaaaaagtcattgaatcaggtgaagaacggtattttacagccgaagatgcggccctgatcgcccatgaggctgtgagggaaaattggttgcgacgctccaacgaacaaaaaatcactggacattggattatttatgccatccatgaaggtaaaaattactatctgagccttggtcggcacaccgatgatgaggcggaacttcggcggcaaatcgaaaccgcgtgcctgtaccagttcccttttttgtcggacatactttgccctgttacggattaa

SEQ ID NO: 393499 - DNA, 534 bp, Salmonella enterica
atggcgatcccgctactgttcccggctaattactttctcaccatgaatgataaggctgctcttgctgttttttatgtaaccgccgtcgcctgtatgattttcgaccaaaaggagatggttaaggctggctacgaatccgaaccgcaatttgtcgggtcggctctggggattatggtttttcctcctctttacgtttacggcagggttaaagctgctggcgaaaatttgagtaaacgatgggcgtggttcctcgcatatattgcaattgcgttgggttgctcctccattgccgttgtttgggataacagcgaagcactaaagacgagcgcgtgtgagattacgacttcaatattcaaagacaaggggagtgaggtgaagtgtctggttgtggaggacgtgaagaaggtttcagacaaaaactatcgggcgaaagcggtgttgagtaatggcattgatatgcccatcaccattgaagaatgcgatgacaattacatttacgtgacgctagcgccgctgagtggtttgcttgagtag

SEQ ID NO: 393500 - DNA, 165 bp, Salmonella enterica
atggttatacgccctgcattggcgctgaacgataacaataaactgcaaaatatcaatagattacctttcatccctaacctctcaatgtcattgctcaccaatcatgactatttagtagccttctctcgcataggcaattatagtaaccatgccaatcaattttaa

SEQ ID NO: 393501 - DNA, 2088 bp, Salmonella enterica
atgagcgaaattccctggtatcttggtcaatatgaccgcagaaattatcagccctacctcaaagccgtcgcgcaggaaaccccgaatggctggcgtacgatcgattctaagaagttatttcctcgaacgggagaagttgaatttaacgatgctgacgaattacggcttcgtaaaggcgaatgggccgcttttcaggtaggtccaggcccccgcagaaaggtgcaggcgaaacgctcccgtcgtatttatccctattacgatttatcttttgggcagtctctattggaagcacgtcgtctattgagtttcgagggcataacggtaggcggcgaaccagggctatgggctatccgtttcgggtcggatgcgcttattctggttaatctggcagaatcgaaatcaggcagccttatcctatccagaaaccagaacgtttacgaatatgatttcaacgaaaacggcgtaattatcgtatccgacatgtctgagagtggaaaagcgttttatatgcctgatgtcgatgcttcgcctgctcagatccatgactggacgccagataagcagtacattgaaaatgtcattcagcgtctttcctgcgctgactcaacagcaatggtcgctgaatggcttcggaaacatgccgacgaacaaaccggaaaattaacctccggcatcaacgacatgctgaccgccgctcaaacactccgggcaggagagttggcgaagacgttggaggaggaggattctctagcccgtcagttcgctgaagcggcattgaaggaccataatatcgccgacctgctcgagcgacagatacaaaacatcgcggaagaagagcgagtagcattacgcgccgaacaccataaggcgctcgataacgagttttctgctgaacgccagcgacgtcgtgaagctgttgaaacggaaatagccgcttttgagaaaacaaggaaaaacgagttcgaagaggagatcgcgcaattactgcagctcgaacaagaaaaattacacattgattttacagaaaagcaagcagatatagaacgaacgcttaaacaagaaaaagcggatcttgaaagtgaaattagtcgtctgaaagacgctaactctgatttatgcgctcagaacgaaagccagcgtcaaatactggcttctctgacctgcgagcgtgaagtgtgtttggcatttttaacagatgtcgaagaacgtaccgcccaagcacaaattgaactcgaaaaaataaatatcgccattgctgagaaggctcgtcgtatgacttattcagcgctccccgaagttcgtctcccggcgcaagcgagagttgtatcctgcgaagaattcggtcatatcgtcagagagaacaagttgctgacgcctgacggaaagatactcatgacgcaatttctggcgttgatgttggcaggagaatgtccattgttatctggccctgaaacgccggacttccttgctattgccgaatcgctaatttcctcgggccgctccatccgacagatcgccgatccaacgatgatttcctgcgaagatctttgggttcgtgcaggaaataatatggcgacgccgctttatcaggggttattgttgagcgaggcctcttgcccccgaacgattctcgccatcattgaacgtgtcgaatgttccgctgcacgtttctggctgccagcgctgaaaggccgattacacggcggcgatttgcccagacgctttctgatttgcggcaccattgaaaacgaagattgtgaagaagcggagaaaatgaaggaacaacatcttcgcctgcggatggaaaacgtcgtcattcagaatgcgattgcgctgtcccctttgcatctttcctcagaaaatcatagtgaactggatcctggcgtagcatcgcaaggttcgctaccggatcaactcgctatctcggataaaatgtcagccggacgtttggatctggcaaataccctacgagcgatgcgaacggcgcatgaagtcgcgccgttcgacgatgaaaacaaagcgacacatcagaagcggttaatcgacttatacgccaatttacagaataacgagctatgcgcccaatag

SEQ ID NO: 393502 - DNA, 2559 bp, Salmonella enterica
atgaactggacatcgcccgttacgcccgatggctgggaaagtaaactgattgattattttctccggttcggtgccgacggcgacgcgcaggatattcgctggtttgaagttacgccagcgacgctcgcgacggcattcgccgacagtggcgttaacgcggatgaagttgaagaagcttttcgaacctgtatgtcgaaaatacgggatctgccacagcgccttgaatgcggcatgatagaaaagtcgacccgtcgatcgcccggatattttacttatcttatcatgacgttgcttatcagtagtcaattcgacgcacaggaagagcataatgattttcgcctgaaactacagaactggttgcagaccacgcatagttttcagaacttatccggcgtcaacaagatgtgggaggcattagccgaatggcttaaacagcgtattcaggaaggcgaaccctaccggtgccttatcttgccgccacgggatggctgggttcagatcggtcacaccctgcgactggcattcccgaataaagccgatctacgcctgatgagcgaatgtcttgaaaactatcctcaagccgccgcgaacccacgccagttaattgaatactttcaaatcgttattcagagacacggcgtttctcatgcgctgaaggaggcttttgccgatttcagagacgcgtggttgttggggcgtcgcgcgctgttcgatatgcctttctggcgcttgcgccaacgagcggtccagatatcgtcctgtgtaacaccgcatcagaccatcattgatatgtacatcgatttcgatggctcgcggtgctatttcagcgtcgctggcgagagcgacgaaagtgtctttcatcctacattatccgaagcccttagcgccagcgacgccgggagcagcgaaaatctggggaaggcgatgcagatcggcttactctttttttgtgagatcggacacggacgctggagaactaagccatcacccgatgtagactcgcaacggttttatatcgctttatccagtaaacactctgtacagatgagcaagcgcctcaacgaatatatcgcagaggacgagtggattttaacggcgcaaccgatgaacagggtctcagcggtcgatatattccgctcagtaagatcctcttcgggtattcagggtgatgacgttacgcgccctcaactatacggtggaatacgcgtccccggaggatggctgggattaccggcatttttgccttctgttgagtcagatacgcgacgctacaaaatatattcattcgggaatgatgaagcaggaaccaatatttctgtaatagatggtcggctgaattcttctgtgccgcttaacggtgaatttttcatcgagccagcccttgaggcgggtgaaaaaataccgccgtggcggcgtcgcgcgcgttttttcacccacgccataccgcacccaactttaggcgaaagcgcaagataccagtttgagccgctttgcgattggttgacgccttcactaaaggtaccgacgtttaatttcgaaggactgtttgagtgggaagatagtgaagcgtgttgcgatcatcttctcgaagcgatttacgcgagtggagccagcggctgggaagaggccgagttaatcgagcttctcaggcatatggccggcgatatcaacgtatggcatttgattcgttgtttacatcatgcgggtctgatcgagccacgcctgcgccctgggtggaaaggtcgggcatggacgctgattaaaccttcattacttcatattcgctacggagaaaattctctggttgttgtggaaggctcggtctgcgcctgtctgatggatgattttcaaaaagtagtcgccgggctgggtggagaaagtttccgtcgtcgcggcgcaagcctctggtcgccacctgtatttggggccttactcgccaaccctgttgcgttatccctgcgcctgggatggccacttatcgaagccccatcgtcatctgatacaacgccgctagcactaaccacgacagaacgcgccgctgaactacatgagtcaaaggcagtctggaattggtattcaggaagatttcagcgacatgataccctagataaagaatctgcgtcgctgtcacttcatattcatccaggtggtcgggatcatgatatctatcgggtcgtttctgggcgaaaaacgacgcattatctttcccgaactgccgctattatcgccgctagcgcgaaaaaccgtacccccatatttgaactcgtcgccaacaatcatctgttatgtcttatcactgattgcggcctacctgacgcgctggccgcgggaatacggcgccacacgctcagaaacggaggcccaactgattctggttatgtttatcctgtcaatgacgcctctttcctctggctgaaatcgctgcttccggggtgtttttcttccctcgcgccggacggtgagagggatgcaagcaatctggtttcctccgctcgccattccggcgggaaaatacgtctgacatggcgagacgggcaactcatgctgggcccgagataa

SEQ ID NO: 393503 - DNA, 1362 bp, Salmonella enterica
atggccccggtcatttatccgtatagatattatctttatgatttaatagactatcccgttaagaatcctcttttcaggaaattgagcgatgcccccgattcatcaacaaaattttatggtcaggccatgagcggtaaagccgtcacggacgatgatcgttcaacagaaccgcacgaggcggaatttagtttctatgagtttttcgcaggtggtggtatggcacgggcaggcctaggaaagcagtggcgatgcctgttcgccaatgacatggatccgataaaagcatcgacctacatcgacaactggggcgacgaacattttgacatccgcgatgtacgagaaatcactcctaatgacctgccgcgccatgctgatttaacttgggcttcattcccctgtcaggatttatcgctggctggtaatggcctggggatcggcgaaagagattccagcgccgacgagattacgcgttccggtgctgtgtggccgtttctcaatttgataagcaacctcagtgaagaaaaccgtaagccgccaattcttgttctggaaaatgtacttggattgctaacgctggatcaaggtcggcatttcgccgcaatatgccatcagctaagtaaaacgggttaccgctatggcgcaataatcgttgatgcaaaacactttcttccacaatctcgaccccgcgtctttattgtggcgattagtcgtcatatatctattcccgcatatatagtttcaaaagaacctcttcctgaatggcattcgtcgtcccttcttcgtgcctgtgatgcactatcagaagaagttcatgacgactgggtctggtggtcacccggaattatgcccgaagccaaaatgaaggaactgacagacataatagattgtgaagatacaaatgcgctatggcactctgctgacgaaacccaacgacttattcgtatgatggcacctgcgaatcgggcgcgtttggcgaaggcgcaggaatcaggcgagacgatgataggcagcctttatttacgcatgcgcaaagaaaaaagcgtcaatcagcaacgggcagaaattacattctcgacggttcttggttgcctgagaaccccgaaaggcggagcttctcgtcctcgcattattgttgtcaacggcaaccaggtgaaaacgcgtttgttgtcggtcaaagaagcggcggcgttaatggggttgccggatgattttattctcccggcagcgtatcaatcggcatttaaagttattggcgacgggcttgccattccttccgttcgttttctggccgaacgtattctggagccactggcgatggccgtccgaaacaatacccaccggacggaggatatacgcgaatga

SEQ ID NO: 393504 - DNA, 1002 bp, Salmonella enterica
atgccattcactattcacccttggtttgaactcgcgcaacgatacgatgggactattttactgggcaacggcgcaagcatggctgtcagccctcgttttgggtatggatctttgcttgaacacgtcacacaaagtgagagtctggcggaagatgcccgcaggctatttgacttttttaaaacaaaagatttcgaacttattctgcgtatcgtctggcaggcatctaatgtcaataaatccttagaaattgaggatgcgcgtacccacgaggcctatcttcgaatccgcgaatgccttattcaggctgtacgcgatgttcatcctgaacacgatgaagtgaatgaacaactgtcatatatttatgaatttctgaaaaaattcgacactgtcatttcgcttaactatgacctgatcgtttactggacaatgacatatggcttggatatcaacgatcatcaccgctttaaggactgttttcttaccagaggcctttttgagcaggactggcagcggttaagagggatgtatggaaatgagcggtcgaatacgcttgttttttatccccatggcagcctcatcttgtgtcgggatcgtgtcgaacaggagagtaaaattcatattcagaacgcggggttgctcgaatcgattctggaacgttggcaaagcgaggaagtcgttccgttgtttgtcagtgaaggaacgcatgaacagaagattaactcaattcaaagtagtttctatctttcaacggtttaccgagaagttctcgccgagcaacgtgaaaatctggtgattttaggctggggaatgggcgaacatgatgtacatctgctaaaacgtatggcaagaacagggatacggcgggttgctgtgtctgtttttcggggagatcaggcttattgcgctagggtcaaccaattaatcagagacaatctgggaccacatgtcctcatagagtttttcgacagcgaaagtccggggtgttggaatcagccaatctaa

SEQ ID NO: 393505 - DNA, 327 bp, Salmonella enterica
gtggcatggcacaaaaccaacaaaagatggtcggcggattatgccagccgtctgctcgccagcatgaataatcatatctttccagctatcggtcatctacccgcaaccctgctgaaaacgcagcatttcactacgttactgagaaatatcgaagaaaaaggctttctggaagtcacgtcccgttcccggcacctgattttgcaggtgcgagggagggatactgccatttgggatgggcggcaaagagattggattagcaacatttatttctgttttagattggctgattccaacaccccggactttcgctgtcgaaaaactctatga

SEQ ID NO: 393506 - DNA, 363 bp, Salmonella enterica
atgcgtattcagttttccctccgcatccggcgaaattggtggtcaggttggttcgattctggagtgaccccaaatgtctttaaacgattcaaaaatccgcaacttaaagtccccttccaaacccgtaaattgtctgattcgcacggtttgtaccttctggtcaatcccggcggctcacgtatctggtatctcaaatatcgcttcaatggcaaagtgtcccgcgtcagtctgggcgcatatccgctggtttctctcgctgaagcccgccagcagagcgacggtatccgtaaactactggcgcagaatatcaatcccgcacaacaacgcatgactgaaaaagccgccgcgtcatcggaaaaatga

SEQ ID NO: 393507 - DNA, 666 bp, Salmonella enterica
atgaaacagctcatccgcctgccgggccagcagtatgatgaggagacggggctgtattataaccgccatcgttactacgatccgttacagggaaggtatatcactcaggatccgattggtggtgccggaggctggaatttataccagtatccgttgaatcctgtatctaaaatagatccattaggattatctgcgtggagtgatgcaaagtcaggagcatgtacagaaggaatatgtcggttgttttcaccttttatcgggccagagaaattctcagatcctgatacagcagcattagatgcgttgaaaaaaatcaatggtcaatcaatttgtgaagataaagagtttgctggcctgatatgtatggataataagaaaaattattttgctacagaagctaatagaggtgaagaacatgaatcatcaccttttgatagtccatgtcccggaagtactgttattgcgacttatcacactcatggtgcttatagtttcggttatgcggatgatttcttctcaaaaagagatgtgggagtatatgaatataataacgtcttaggttatttaggtacccccggcggagagtttaagaagacagacaaaagtggtaaagaacttttttcaaagaaagaattaacaacagtttgtcgtatacatgcaaactaa

SEQ ID NO: 393508 - DNA, 129 bp, Salmonella enterica
atgctggtgtttgtcgccgacccggcgtttcaggcttatcaggggccgattttaattatctttatgatcgtgattggctggatattgtttgcggtaaggatggtgaggaaggagggggataagccttga

SEQ ID NO: 393509 - DNA, 225 bp, Salmonella enterica
atgccttctgtaatttgttgtttaacggtcgacgtagcttcattttgtgcggcggttgacgttgccgccgatgccgatgacgccatcagagttaacgttatcgcggtggccgaaaaaaatagtgatgttttttgcataatatttagcccatatggtcttttttttgagacgctttatctttcctgttacgttcacctttatgctaaaggggacattattcactaa

SEQ ID NO: 393510 - DNA, 657 bp, Salmonella enterica
atgctccacgctgaccgtaacgcgaacggcgtcatcatcaatatgctgcaggttaaatgtcggctgggcgcgattcgtcatgttatcgccctggacaccactgtcgtccacgctatccagtacgataaccggcgtcgacagcgtggtatcgatagtgaagttgagcgtcttcgttaccgtattacctgctttgtcagtcgcttccacggtcagcgtatagtcaccatccttcacagtgtctggccaggtataatcccagacgcccggtgtcgagctttgtgtcgccttaacccaggacacgccgccgttaatgctcagacgtacctcgttgacatcctcgggcaccgtcacgcggaaatgcggacggtcgtcattggtcgtgtagtcacccttgacaccgctgtcgttaaccagttccaccttatcaatggtgatatgggtatccaccgtgacagtcagcggcgcggagtattttacgttccccgcatcatcttccaccttcaccgtcagcgtataactgccatccgcccacgtgccggttggtataacgctccagatgccggtcgcgcctttggtcgccgtcagcgtctctttagtgccgccatgctgtacctcaaccgtgacaaaccgggcgtccgcgtcaatattgccaagtaa

SEQ ID NO: 393511 - DNA, 510 bp, Salmonella enterica
atgcgtcacgctgaccgtaacgcgaacggcgtcatcgtcaatatgctgcaggttaaatgtcggccgggggtgattggtcatgttatcgctctgaacgccgctgtcgtccgcgctgtccagtacgataaccggcgtcgacagcgtggtatcgatagtgaagttgagcgtcttcgttaccgtattacctgctttgtcagtcgcttccacggtcagcgtatagtcaccatccttcacagtgtctggccaggtataatcccagacgcccggtgtcgagctttgtgtcgccttaacccaggccatgccgccgttaatgctcagacgtacctcgttgacatcctcgggcaccgtcacgcggaaatgcggacggtcgtcattggtcgtgtagtcacccttgacaccgctgtcgttaaccagttccaccttatcaatggtgatttgggtatccaccgtgaccgtcagtggcgcggagtgttttacgttccccgcctcatcttccaccttcaccgttag

SEQ ID NO: 393512 - DNA, 249 bp, Salmonella enterica
gtggatccttttgtgattccaggggggtccctgccgcctcagaacctgaaaaagtttcggaaaaccgtatcgtgggtatcgctcggccactgcctgcaacgcggcaataacgggttcgtcacgcgtggtatccggacggtaatggtaaaccgttctgctcaggttcagactccggcaggcctgacggatactgagtccaaatgtcgttatcagatgagtgaccagctcacgcttaaaggctggttttaa

SEQ ID NO: 393513 - DNA, 684 bp, Salmonella enterica
atgggagacagctttgccaggcaatacgcacatgcaatggatgtaaattctaaatgttataaattcatgacatcaatgaatgatggttgttttttctcacgtaattacacaactttctatgcaggacttcctgatcctaaatgtcaacaaagactaaattttgcaattaattacgccgataaatttaatatccctgttatttttggattacgatggattggctgtgaaggaatgataagcgctcccaaaggaaaccaaaagaaatttaaagatgaaaatgaatttattaaatttagtatttctaatattaaaaatgttatagctgcgttcaatgggaagaaagttgtcatactcggtgcgcctcccggaaccgatggtgttggtggtgtcgaaaaatgcatcaataggccatcatatttacctctagcatgtacaaaatatcttaacacggataacaaagatacgtttaacaaacgtatgaacttagccatacaaaatgcacttaagggaaaaagtaacgttatgtttattgatccttataagtacctttgcaaagatgggaagtgtatgactatgacaagtgatcaccagttcgtctattctgacgcagttcacctttctaaatcaggtgcaaaggtggtgtggaggtacataaaagaagatgtaattaaatacatagaataa

SEQ ID NO: 393514 - DNA, 450 bp, Salmonella enterica
gtgctggttatcgtagtcgtaccggtgcgtccgctcgtcgtgcatccggatgaccccctccgggatacggtccgtcttctccgtcagcctcccgtaacggtcataccggtaccggtactgcatatcctccgtgatgcggttatccgcccataccgtgctgctgctctgcggataaaactccgggtccggcagccggttccctgccgggtccgtggcgtacggcagggtgatgtccagattcgcggcggtggtgtgcaccccggtcaggcgcccggcttcgctgtagcggtactccctcgtctgctgcggcccgctgatgcgcatcagcctgcccccttcatcgtaaccgtactcccggtcaagctgcgggtggttcaggtgccggccctgaagctgtccgccggggttatacgtcgtcgtcagttcataactgtccgggaggctgtctga

SEQ ID NO: 393515 - DNA, 672 bp, Salmonella enterica
gtggataatcttcgcccccgggtgtttttccagaaacgcttccgccagcaggccgacgatgtagtacccctcgataaactgccctttctcatcaaacaggaagcagcggtcgaagtcgccgtcaaaggcgatgcccatgtccgccccgtgttcaataacggccttgcgggtgtcgtcgcgacactccggcaacaacgggttgggaatgccgttcgggaaggtgccgtccggggtgttgtggattttgatgaactccaccggcgcgcccagccccttcaggcgcgcttcgatggcgtcgatgaccggccccgccgcgccgttgccggaattcaccaccagcttcagcggggtgagatttttaacactgatgtagccgagcaggtggtcgatgtaggcgtcacgcagggtgatttgtctgtagctgccgcgcgcggcgtcgttcaccggcgggaaatcgcccgcttccgccaggcgctgaacgtcacgcagaccggtgtcgccgcttatcgggcgggcgccctcgcgcaccagcttcatgccgttgtagtccatcgggttatggctggcggtcacttcgataccgccgtccacgccgaggtggaaggtggcgaagtaaatctcttcggtgccggacataccgatatccagtacgtcgacgcccgcatcctgtaa

SEQ ID NO: 393516 - DNA, 1320 bp, Salmonella enterica
atgctgcaaaccaccatttgccgtctgaacggcgtggagtgcgaaagcccggtggttatctgcaacgaacagcaccgttttatcgtcgccgaacagcttcgccagctcaataagctgacggagaacattattcttgagcccgccgggcgcaataccgcgccggcgattgcgctggcggcgctggcggcggcgcgccagcatacggactgcgatccgctgatgctggtactggcggcggatcatgcgatcgccaatgaagaggccttccgcgacgcggtgcgcagcgccatgccctgtgccgacgcgggcaaactggtgaccttcggtatcgtgccggatctgccggaaaccggctatggctatatccggcgcggtgatgccgtgccgggcgcgacggatgcggtggcttttgaagtggcgcagttcgttgagaagccggggctggaaaccgcccaggcctacgtcgccagcggcgattactactggaacagcggcatgtttctgttccgcgccggacgctatctggaagagctgaaaaagttccgccccgatattctggccgcctgtgaacaggcgatgcgcggcgtcgatccggatcttgacttcattcgcgtggatgaagaggccttcctcgcctgtccggaagagtccattgactacgcggtgatggagcggacggcggacgcggtggtgatgccgatggacgcgggctggagcgatgtcggctcgtggtcctcgctgtgggagatcagcgcccaagataactatggaaacgtccatcacggcgacgtcatcagccataaaacggaaaacagctacgtctacgccgaatccggcctggtgactaccgtcggcgtgaaggatctggtggtggtgcagaccaaagacgcggtgctgatcgccgatcgccacgcggtgcaggacgtaaaaaaggtggtggagaagatcaaggccgacggacgccatgagcaccacatgcaccgcgaggtttaccgtccgtggggcaaatacgactccatcgacgcgggcgagcgctatcaggtgaagcgtattaccgtcaagccgggggaaggactgtcggtgcagatgcaccatcaccgcgccgagcactgggtggtggtggcgggtaccgccagagtcaccatcaacggcgaggttaagctgctcggtgaaaacgagtccatctatatcccgttgggggcgacccactgcctggaaaatccgggaaaaataccgctcgatttaattgaagtgcgttcaggctcgtatctcgaagaggacgacgtggtgcggttcgaggaccgttacgggcgggtctga

SEQ ID NO: 393517 - DNA, 942 bp, Salmonella enterica
gtgggacagctgaatatattcgttaccggtgatttctccgtatgtccgccggcttttccacacccgtttcccgatgcggcggcccggcgggtcataaaggtaacggctttccagcagggttatgccctgttgctcacgacggtagtgcaccagccggtgccggttatcgtagtggtaatggtgtacgtagccgccgccgtcgcgtatctggcgctcatccttttccgtcagccgtccgtgcgcgtcgtggtggtaaaaatacgccacgtcttcactgatgcggttatcccgccacatcgcgggaagcgccgggtactgctcccggtctgtaatacggttgcccgccgggtcggtggcgtggcgccgcagcaggtcgttgtgccgggcgctgatgagccgccccgcgccgtcacagcggtagtcttcctcctgatgcgcgccacggatgtgtacaagctgcccgttgtcgttatagccgtattcccggttcagcaccgggtcactgaacgtgtggctcagcagctgcccggtggcgctgtagagcgtgttctgctcataagcgccggacgttcgctgtgtctcccggtgcaggcggtcgcgggtgaaatcgaccagcggcacgtcgccgagcttcagcccggcgatatagccggagccgtaggtgagccactccaccggcggcagattatcgggggtggtccgggtcgccagcccctccggataatcgtgttttgtttcgtgctgccacagcagttcccccgttccgggatgctgcaccgtctggcgttcgcagttcatccgtccctgtttatcgtactcatactgcaccgcgacgaggtggccgtcgcagagatggctgactccggtcagccagccctgttcgttgtactgccagcgttcggcctctgcgccattcacggtgcggtacatcagccggtctga

SEQ ID NO: 393518 - DNA, 969 bp, Salmonella enterica
gtgccacagggtgacgaggctttcatcctcactgcggataagctgtccggtggggctgtagtgataacgctgcgtccgcccgtcgaagcccgtttcctgcgccagcctgtccagcaggtcgtaagtaaaagtggtgcccgctccgttttcattaataagccgggtgacgcgcccggcagcgtcgtattccatctgccgcgtcaggccgcctccggtggtgctcaccggatgccctgcggcgtcatactctgtggtctgcctgctgccgtccgggtgaatgacagcggtcaggtcgcccgcgacgctgtattcatagcgggtctcatggcccgcggcatcctgctggctgaccagcctgccccgttcatcgtaagcgcggtactggctgagcccttcctcccggtgaagggcggtgacctgcccgaagcggttgtattcatagcgggtctggtagccggagcagtcggtcagggtcagcagctgcccgtagcggctccacgtcatctgtttccggctgccggtggcgtcttcggtggcagagggcagttcgctgtgcgggtcatcataataataacgggtcacatcgccgctgcgggatttctcctgcgccagacgcccccgctcatcaaatgtctgctggctgcgcaggccgtcagggccggtggtggcgatgagctggcgctggtcgttataactgaagcgtacacgccttccgtcaggtgtgacaatttctgttacatttccggaagcgatattcagccggtattcggttttacgcccggcagcgtcggtctgcgcgacaagtctgcccgcgttatcaaattcccgcgtaaccgaactgccgtcggcctgttcttccttaatcacccgtttcagtccgccttcgccttcggtgtgcagcacctcgcggcggttcaggctgtcggtaatgatgacggcatttttctcatagccgtaggtatagcttaa

SEQ ID NO: 393519 - DNA, 573 bp, Salmonella enterica
atgagtgtgacatctatctttaaagaagaacacaaagttaatgttttattttttatcttgtcgtatctctcgactgtttttttcttaagtgtagtcattgttggggtagtgacttttattaattacactaagcataattttttgatgtttgatatgatgtttgcacttaaaacagtgaagatgctatctattggcggtttttttgcatttatatggagcgcgttttgcatctctaatgacaaaaaaaaatgtataaatatgacctcgaatttaataaagcagtataataattaccgtccaggtctcgaaccggaaaataaagaaaaaatggggaaattaaaagaagttcttgaagaaatagatatgaatcggaatctttatggtttaatgtcagatttaatagttaatggttttgacaccagagtaagaggtattaatgttaaagaagttaattattatttatcatgtgagatgaaatataggacgggtgaaaaagataattttgagattaagttttctgctatcaatggtggtgatcctgtgttgaagtatatttcatgtttaaatcagtga

SEQ ID NO: 393520 - DNA, 1209 bp, Salmonella enterica
atgaataataatgttgataaaaaaaggattctcgttcttactccacgtttcccttatccagttattgggggggatcgactaagaatatacaagttgtgtgaagaattatcagagaagtttgagcttgttctgcttagcctttgcgatgataaattggaattaaacactaaagtcgatgatgatgtttttaaagaaattcatcgggtttatcttcctaagtacttatcttatttcaatgtcatcaaagcgtttttctcttataagccgctgcaagtcgcttattataactcaaaagattttaaagaaagatatgaagagcttgtaaaaaatagtgatgcggtattatgccatcttattagagttgctgattatgcaaaagatacggaaattgtaaagtttatcgatatgacagatgcaatatctttaaactatcgacgtgtcaaaaatattgcttccaggaaaaatgttcgtacattaatctattcttttgaacaacggcgtctagaaaaatatgaacgtaatatcgctcgtttttttaatctaacaacttttatttcaccagtggatcgcgattttctttatcctcagccaagcaaaaatattcagattgtaaataatggcgttgatttggagaagttagtttaccaggaacgtgttattgaaatgtcacgacctgttgaactggtttttattggtaatatgctgtcaatgcaaaatatggatgctgctctattttttgcaagaaaaattttacctagtcttagtgttgattttaatattgtattcaaagtaattggtagaattaccgaaaaaaataaaaaacttttaaattcctgtaacaacacagttgctattgggatggttgatgatattaatcatgcaaccaaaactggacatataggtatttgctcggttcggattggtgctggtgtacaaaataaaatccttgaatatatggcgttaggcttaccctgcataacttctcctattggttctgaaggcattgatgcgattgtaggtaaagaaattatggttgctgactctatcgctgattataaaaatgctcttaaaaggttgataaatgataaagtgttttatcatgaaatcgcatcaaatgcgcacgaatttgtctataagaattattcttggaaatcaaagctttcatcgtttatgaatgctatagaagatcatatttatgaaaatcaataa

SEQ ID NO: 393521 - DNA, 174 bp, Salmonella enterica
atgaatagagttaaacgtttatttctgatgatcattttagcattctcaatatctattgtatcactacctgcaatggcactggtttgtgaggataaagggggatcgcttgctgattgtgcattacaatgtggtggttttagtataatgatatttccttatatcttttgcatttaa

SEQ ID NO: 393522 - DNA, 1281 bp, Salmonella enterica
atgtgccgtgtgaaagaccgcaattttactctcaactattatgttgattttacagaaaaagattttgtcgattctcttgtcaaagaggtcaacgatagctctttcaaagaaacagttccaagtaagtttactcaagaacttaaggataaaatactatctcagtatcctgagctttcatccagaacactcatgaatgaaatctttgatgatgggatcattgatgataatgaaaacttcaaaggttcagatgcctatagtcgcttaaaagccaaatatccggcagcattccctacaggagtgaaaccaagcaaaatcaaaaaagccactgatggaaaaagacgcactaaaatgcgggttggtaagttcagtgagctgaaagagctatgggatttgatcaatcaaaaagcagtgattgagtataaaataaatagcgaaaatgaattcttatctattttcaagtcattcatgctcgaagaaacagaaagatttactaaatcaggcgttcatactcgcattgatagaatttacatctataatgatacggcaatgtcgagaagcattatcagtgatgatgataactttgctaaactaaacacaatgagctatcgggaatttcttgataacttatcacaaactatttttgctaaacacgataccttacataaggttttttgtgatataaaagacactatcaatataactgaatacctgaacattcaaacaatcagaaaaattaaatctggttttagcaagtatttgttgaataattcatttaacaaattcagccttggatataatgtgatttcaggttcaattcatcctacaaagttcactaatgcagacggtgtgcctgtgagtgaggtattatcaagtgatcttggtatattgaatgacaacacaaaaccaccgttggattcttatctttttgaagaagtcttttatgactcagagcttgaaaggctaaacataacagatggagagattcagtctgtagctgtttttacaaagataccgaagaattccattaagatcccggtagcaggtggatacacgtactcccctgactttgcatatgttgtcaaaacaacaaaaggtgattatttaaactttattatcgaaacaaaaaatgtagatgggaaggatagtttaagacttgaagaagaacgtaagataaaacatgcacaagcactattcagtcaaataagtaaatctgtcaaagtcgagtttagaacacaattttctgcagacagaatagctgaactgataaaacaagttggatga

SEQ ID NO: 393523 - DNA, 423 bp, Salmonella enterica; identical to SEQ ID NO: 393238

SEQ ID NO: 393524 - DNA, 912 bp, Salmonella enterica
atgcaggatttaccatcatggttaacgtattatccggcgggaacgcagtttgataaaaaaacgccggatggcagccagggagtaagctatcaggcgaagtatccgatactggccattacgtccaccatcactgatggcgatagcagagacatacttgaaggcatgaatagcgcgggattgtcatttagtgaaaacatgatcatgaatgcgcaattgccgccattgcccgcgagtgaatataaacaggcaattcctgtcacctcgttgggagaatgggcgctggcccgttttgctactgtcggcgaggtaaaacaggcaataaaagaaggcaaattctggtcaccggagctgcatcggtttggcgatctgaaatcaccatttcattatgcgttttatgacaagaaaggaggaagcattgtcgttgaagtggaagatggcaaattccatgtctatgacaatcccactcgcgtgatgacaaatgggcctgcattcccctggcatcttacaaatctgaataattatacgcagttaaccaatgtggaccgctcttcaggcacattgggcgggataaaagttatgcaacctgatagcgggatcgctattgcagacttgccatcgtccgatacttcggtttcccgttttatacgcggcgtttattacaccacatatgcgccgcaggcgacatccgcccacgaggcaatgaatacgcttgcgcatattatgagccgtttcgatcgtccgaaaaatattacggttgattatatggggagtgaaggggaaggcaacgccacccgcaaaccggtctcagaatatacggtctggacaacgctatctgacttaacgcacggtgagataatggtacgcggctacaatgatatcaactataaaacctggtcccttaacccaggataa

SEQ ID NO: 393525 - DNA, 321 bp, Salmonella enterica
atggctcacgacagtataggaaatgccgttttttatattgctaattgttttgtcaatcaacgcaaaagtatggcaattgctaacgccgtctccctgggcggtagattagtcttaaccgcgacggtaatgacgcattcatactggagtaatagtttgggactacagtctcatttattagagcgtattaatgatattacctacggactaatgagttttactcgattcggtatggatgggatggcaatgaccggtatgcaggtcagcagtccattgtatcgtttgctggctcaggtgacgccagaaaaaagtgcgccggagtaa

SEQ ID NO: 393526 - DNA, 255 bp, Salmonella enterica
gtgggggaaaacgtcagtttcacggcaggcaaaacccggacggaaagtgccggaaaggtggcggtctgcaacagtgtcggggagtatcctgggctggtttgtggtcaggtccaactggtgctgacgcaggacggcggcatcttcctgaacggcacggcgattaatattcagggcgcacaggccatcagcgacgacgggccggtgattagccgggactgcggggcggcaaaaaatccgcctgacgcaccagagtaa

SEQ ID NO: 393527 - DNA, 507 bp, Salmonella enterica
atgttcaacggtcttttagttcatttaaatgacaatctcattattcttgatgatggaagtcatgtttcttttcgatcttttgtaagagaaaacattcaacatcaatataaaatatatgagctatttgcgcgtgatatgctggttcatcctttgcatttcagtactaaacctgtactacccaagccagggagtcctttatggacaagggaaagccattatacgaaagtcctgtatgaaaagtttcctgctatttctggttcaggctttgaggctttctatggtaaggaggctattattacagcgttagaaatagcatctttcaatagaaaagaaaaaggaaagagcgcttttagtaaaaaaaacatgaaggatctttttaagctggttcaattagtgatacaccatttatccagcaatggcggtgatagagtattgcttagtcctgaaggcataaaaaataactttattattatgcgtccactgcccagtttgagaaaatgcaagtaa

SEQ ID NO: 393528 - DNA, 282 bp, Salmonella enterica
  misc_feature (243)..(252): n is a, c, g, or t
atgagcgttctggttttttgtgttatcgctatgattttttttgccgtctttgttggcatatcaaaaggaattcaatccgattggcctgttataaaataccgcgtcaaattaattgatggaaatgctgtatctttttttgaggtgaatggtgaaatttttactcaaattgaaactgattttctaaacagacagggggatgggatttaccattttgctggagataaaggaggtaacgcttatatnnnnnnnnnnatttactcgcgaaaagaattaatgacataa

SEQ ID NO: 393529 - DNA, 240 bp, Salmonella enterica
atgattgaagcaggcatcagcgacggtgacctgctggtggtggatagctcacgaacggctgaccacggcgacattgtgattgcggcaattgaaggagagttcaccgtgaagcggttgcagttgcgtccgacagttcagctagtccccatgaacggtgcctatcgacccataccagtcagcagtgaagacacgctcgacatattcggggtagtgacttttatcgttaaagcggtcagttga

SEQ ID NO: 393530 - DNA, 291 bp, Salmonella enterica
ttgctggtcggtggttatacacgggatgcgaataccgatacggtccaaagtattccgtttttaggaaaaataccgtttattggtagcctgttccgttattccagtaagaataaaagtaatgtggttcgtgtcttcatgattgaaccaaaagaaattgtcgacccgttaacaccggacgccagcgaatcggtaaacaatattctgaaacaaagcggtgcctggagtggggacgataagttacaaaaatgggttcgtgtttatctggacagaggccaggaggcaactaaatga

SEQ ID NO: 393531 - DNA, 168 bp, Salmonella enterica
gtgacggaagtaaaagctaataatgttaaaataaataacgaaagtattatgcttgcaccgctctccagtgcagatgtggcattaaaaagtgctaatgccaatcagtataaaatgaccattattgacgatcacggtaattatattagcgataacgtcagcttaaaataa

SEQ ID NO: 393532 - DNA, 159 bp, Salmonella enterica
atggtggtcaacgccgccaccatgatggacaagcaaaacgatggtattgagctggggcgccagaaaataggggtgatgcgtttgaacaataccttcgtgggcgatcgtacctacaatctgcgcgatcagaaaatggttatccctggtattgccacgtag

SEQ ID NO: 393533 - DNA, 2583 bp, Salmonella enterica
atggcgcactatgaaaaatttcgtctaagcacgctggcggctgtggtcggtattattctgaccgtcgggtcgggaaatagctacgcggaatcgcccattcagtttaatacccagttccttgatgttaaaaatggcactagccttgatcttaaccgcttttctcgcaaaggctatattatgccggggaaatatactcttcgggttatggtcaatgagagccagattgcccaggaaagcatcattaattattatattgatgataacgaccctgataatacctatccctgtttgacgcctgaattgctgccgatgctgggtttaaaacccgcaatagcagaaaaattaacctggatgaaatccgtacaatgtttgcagccagggcaactggaagggatggatacgcaaacagatttaagccagtcgacgctgaaaattattatcccccaggcgtatctggaatatagcgacgacgagtgggacccgccttcccgatgggatgaaggcattcctggcgtgttatttgactacaacgttaacagtcagtggcgacactcagaacatgatggcagcgatgaatatgacgtcagcggcaacggtacgctgggggccaacctcggtccgtggcgtttacgagcagactggcagggcaactatcgccatgaaaacgacaacgaagagagcttcggctccggttctgaacaaagctgggactggaaccgctattacgcttatcgcgcgatcccgcagcttcaggcgcagtttacgctgggggaagggtcgctggaatccgatatttttgacggctttaactatctcggcggcagtcttatcaccgacgatcaaatgttgccgcccaatctgcgcggctatgccccggatatctccggcgtggcgcgtaccaatgccaaagtcactgtcacccagcgcgggcgagtgatctatgaatcgcaggtaccggcggggccgttccgcattcaggatattaacgaaacggtatccggcgatctgcacgtcaaaattgaagaacaaaacggtcaggtacaggaatatgacgtcagcaccgcctctattccgtttctgacccgtcccggtcaggtgcgctacaaagtagccgccgggcgtccacaggactgggatcaccatatgcaaggcggtttttttaccaccgcagaagcgtcctgggggataactaacggctggtcgctgtacggcggtgctatcggcgagcaggattatcaggctctggcgataggattaggacgcgatctggcgctactgggcgcgatttccatcgatatgacccattcccgcgcggtgctggatgagggaagtgtttacggtgacggcacgattcagggcaactcgtttcgtgccagctacgccaaagattttgacgatatcgacggtcgtctgacttttgccggctatcgattttctgaagaaaactacatgacgatggacgagtttatcgatgtccaggacagcgatgacgatcgtcagcgcaccggacacgataaagagatgtacaccctgacgtacagccagaacttttcggcgattaacgttaacgcctacatcaactatacccatcgtacttactggaaccagccgacccaggacagctataacctgacgctatcgcactattttgatattggcgagatgcgggggatcagcctgtcagttaacggtttccgcaatgagtatgacaatgagagcgatgacggggtgttcgtctcgctgagtattccgtggggcaataaccgtacgctgagctacaacggttcctttagcgacgataacaacaccaatcaggtcggctattacgagcgcattgacgatcgcaataactatcagatcaacgtgggtcgcgcggataacggcgcgagcctggacggctattatcgccaccaggcgagctacgccgacattgacgtcagcgcgaactatcaggaaggcgactatacctccggcgggctgaacatccagggcggcgccaccttgaccgccaaaggcggggcgctgcaccgtaccagcgtcaacggcggctcgcggctactggtggatgtcggcgatgaagcaaacgtgccgatctcaggctacagcaccccggtatataccaatgccttcggtaaagcggtagtggctgacgtcaacgactactatcgcaatctggtgaaaatcgatatcacgcagctaccggaagacgcggaggctatccactccatcgcccaggcgaccctgacggaaggggcgattggctataggcgtatggaggtgttgagcggtaaaaaagccatggccactctccgcctgtacgataacggaataccgcctttcggggcggaagtttacaacagccgccagcagcaattagggatcgtgggcgacaacggcagcgtttatctgatcggcattaaccccggcgagcgcctgcaggtgaactgggacggcaaaacgcagtgtgaagcggtattgccggatccgctaccgggcgatctgtttaacagcctgctgctgccgtgcgtcggcaacgcttcgccgcagcccgacacgctctcttctcgtaatccaacacattga

SEQ ID NO: 393534 - DNA, 864 bp, Salmonella enterica
atgaaaatactgcgaattttattttggctgtttgtggcgacgggggctgtttcgtcggcctctgccgggcatggcaggccgatgctcaaagcaacctttcaaagcaccacgctctattatgggttggggccgaccggggcggacaggagaatagagttagacattacggtgacaacgcctttgggcgtttactatggcatctggaacgttggaggagcggttggaagtacgctaccgctcatctcctggactggcccgagagattttcccgcgccgacgattacgctgcgaggttataataatcgcaacgttcctcgtgagcgctgcaaaaatcttccgagcaactggagtggttgcgcatccttcacgctggatattgatgttgccgccgatgattatggttgcccctggctggcaagctcgcacatcacctctaccgatctattctacgctagtgaggtatatagtccgccggatgtccgtggttccgtttgcccggtcgtgccgctggatacctttgatatctcctggagcccggacagaccacagcatgaaatgacgttaaggtttgatgcgaccggcagtactgttaccagcactgtacatacctacctgctggaaagcaacaaactgtgcgatggcggtaaaatggacacgcgtggcgcttactgccgctatgtgtctaccggtatcacgctcaacgtactgggctgtgataagtcggaggtcacgaccagcgccgtcgcgcatccgatcacggatgccgaactgcacgatattaatgtgtcggtaaacacgaaaaagattggcagcggacagttcttatccacctgtagctttcagtacattctggatgagttataa

SEQ ID NO: 393535 - DNA, 309 bp, Salmonella enterica
gtgaaatttaagatcatattaataattttaattattagtttattgtctaatgtgtttcttctatataatttgatagatcgctcaatcagtttggcttattctgggcaatctgtcgataactgtagcaacgatctgtcattacttacagcagtagttaaaggtgaacttaaagggaaagataaaaaatatatacaacaacaacttatgggtgagggcttaaatgactccctgttgattaaaaataatgtaatgtatttgggcaatacggagtttatatttaatgatggcattttgatagatgtgaaataa

SEQ ID NO: 393536 - DNA, 744 bp, Salmonella enterica
atggcgtgcagaatatgctgtgaccagcatagactagcgctggcgctggtaaaaccgcacggcagtattgtctggcgcgccgaatatgatgagtggggcaatgtgctgtgggaagagaacccggagagcctggcgcagcttatccgtctgctggggcagcagtatgatgaagagacggggctgtactataaccgacatcgttactataatgcgttattagggaggtatatcacgcaggatccgataggatggcgtggagaatggggtctgtatacatatccgttaaatccacttaaatatattgatcctcttgggctgtatatacaaaatgcattaggaccatttgttagttcgccaggtgttcaggctgaattaaccaaatctatggccgagtactctgaagctgcaaaaccagtgtcaatgagacctgatgggactccttggggatatggatgtggagatgaaaaatcagactggtacgttcccgatggtctgtttggggctgattttatgcccgcctgtagaactcatgataaatgctatggcacattgggtagcaataaggcatattgtgataaacaaccaagagataatatagttttagcatgtaataaaagtttgaaaggcattcctggtcttggagagaccctctctaattgctatgccgctgctggtatttatcaacttacggtagaacgtttgggaaaggatgcatacgatgctgcacagcaagaagctaaatga

SEQ ID NO: 393537 - DNA, 642 bp, Salmonella enterica
atgtgcgaaagtatattaagaaactactcttctaacaacaatgaagctattctgaaaaatagtcaggaattatttagtgagtcaatattaccttctgaaattgagcttgaattattcagaccgttaacatctggagaggtcaagctggcgcaaagtatatttagagatgtcattaactatgacagagtaaagatatattgtgaccgtaatcactcaagagcgcaatcgaaagttataaccaatacccgaaatggtgaggttcttttgagtataaatgaatataggtctgatttttcatctggttacgataattatcatgattctgtaaaatatcagcatttatttatattcaccatgtcatttgtctggcaaaattatcggcatgactcttcttttcatgataatacatatgtatcaacaccttggggctcgtatgactttgaaaaaattaactttattttttactctttggagcaacaggcggcaattattgctgactactggttactgaagaagtatgatctttttgagtatgaaaaattaagtagttatcaaaagcatatacaatttaaaattaatatgcgaatagtgttattggaaaaatacgagtctattttggggatgtgcactcaagttttatga

SEQ ID NO: 393538 - DNA, 1062 bp, Salmonella enterica
atgataaaaaatagaattaatgaaatagatcttttacgatttgtagcagctatggccgttgttttttttcactacgcattcagaggatacgctgctgatggtatgtcaataatgccatatccctcgctcgcgccagtatctaaatatggctttcttggtgtccaactattttttatgattagtggatttgttattctcatgtcggcatctcatggaagcatacagaactttactatatcaaggatggtcaggctttatcctgcattctgggcatgttgtactattacatttatagtgacggttgcaattggtgctccaaaatattctgtatctttcaatcaatacattactaacatgacaatgttaaatggattcatcggaactccatcggtggatggggcatattggtcattatttatagaaatacgtttctatgctttaatcgcagttattttagctattggtaagatacatcgagcacaagaattaatcctttcatggttgattatatctatagttttagaaatatatccgacatggaaactacgcgctatttttatcacggattactcaacatactttattgctggcgcaacatgctatctcatttactcaaaaggactttcagcattaaaatcggcaattttgggcacctcattagctcttgctctatatcaatcaatcaaccaaattattttttttgaaaatcattacaacacttttattagcaaatatattacagctaccattatcacatcattctatatcgtaatgacacttatatcattaaagctcactgggtttatgggtcgtaaaaaatggttattaataggctcattgacatatcccttgtacttgatacatcagaatattggctatatgatttttaatattgcatacccatcaataaatcctcacataatattttggtgtactatatttttagttatcatagttgcatattgcgtgcacagatttgtagaaagaaaattatcaaaaccaatgcgtgtttttttagaatcaataacaaatagcaaaaaacgccttaaaatattaaaatag

SEQ ID NO: 393539 - DNA, 354 bp, Salmonella enterica
atgaaatactatattgatggcgaaaataatgtttacgcctatgaagatgatgtgggtgaaagttttattcagcccggcctgacagaaatcagtgaagaagaggccgtgagtatcgctaatcctccaccaacccatgaagaactgattcagttagctgaaaataaacgccagcaactactttctcatgctgacgcaatcatgctcgactggcgtacagcgttaatgctgggtgaaatcagtgataccaacagagctaaactgtcggcctggctggactataagaatgaggttaaggcagttgatgtgacaaccgaccctgaacatataaactggcctgttcagccggaggcgtag

SEQ ID NO: 393540 - DNA, 714 bp, Salmonella enterica
gtgagcatgatgctaatggtgaaagccatgcagattaaagtcggtaatccgctgcgtaagctcgttcttctgaaacttgctgacaacgccagtgataagggcgaatgctggccaagctatcagtacatcgctgaccagtgcgagatcagtaaacgatcggtgatgaatcacatcgatgaactttgcaaatcaggcctgctgaaaaaggtcttcaggaaaggaccaaaaggtaatgccacgaatgtttatatattaaccatgcatggtgcaggagattcactaggggtggtgcaggagattcaccagggtagtgcaggagattcactagggggtagtgcaggagctgcacccagaatcagtcactcttttgaaccagtcaatgaaccattaaacacacaagctgctaaagccgcttgtgataccgacatgaacgatcatcatatttctgatcgatatgcgtttgagggtaatgtgattcgactgaaccacaacgactaccgatcctggctgaacttgtacccgcttattgacctcaactacgaactacagcggcttgatatcgagtttacccatgagaagccaaaaaactggtttatcactgccagccagaagctgagttaccagaacaaacaggcggctgcccgtaccataccggctaccaggccaaaacttgacctgaataacactgactggatttacggagtggagctatga

SEQ ID NO: 393541 - DNA, 210 bp, Salmonella enterica
atggcaactcattcagaaaaatcaaatttataccctacgcataaatgctcattttgcggaaaaaccaataacgatgtcagctcgattattgctggtgatggtgtgtgcatctgcgatgaatgtgtatttatctgcgtgaaaattatttttaagaagagcaggagattgacccgtgagcatgatgctaatggtgaaagccatgcagattaa

SEQ ID NO: 393542 - DNA, 195 bp, Salmonella enterica
atgacgattgcagagaggctgcggcaagaaggtcgccacaatgggctacaggaaggtttgcagcaaggacgacaacaaggaacgcgagaagaagcactacgtatcgcgcgcatgatgcaggaaaaaggtatcgatcgcgatgcgattttggccattaccgggctttccgtcgaggacgcggctaacagccattga

SEQ ID NO: 393543 - DNA, 558 bp, Salmonella enterica
atgaatttctataacttcttacgaagattaccagttgtaggatctgtttttcgtatcgtcaatgcttatgcatataaaggtgatgttgattgtcaatgtaaaatagcaccttttaaactatggtggagcaggattttcaagaaaatgctttggttagttatttttgttggagtcctgttcttaattaaatatgatagtatattagattgggctgcggcagatactattctatcggtgtttcctagtgtgcttggttttggcattggtgcatttgctttattattcataatgccaagtaattttatgctttttcttacacaaaagagagcgcgtttaggatttggtccagaaatcgttcccgttgatatgggctatccgcttattgtgtttacttttgttatggctatagcaggtttaaataaaatgtttcctagctcaatatttaatatttttagcatatgggcatttttttatggcctagcaatggcattagaactgattacttttctatttaatgcgtcggtaattattcagaaacttatatctaaagacaattga

SEQ ID NO: 393544 - DNA, 972 bp, Salmonella enterica
atggcaatttataaattctataatatacaaatgcttccaataaatactgatgttggtaatattggcgcagaaggatactgtcgcctatttcaatctgtaagtgacttgattgatgagataaaaagagaacattataaactaagctcgattgcagtttcgatgagaggagatatgtttttcgctccttttcatgttgatgtctacgaatatccaggaattgatggaaataagaaactgatctatggatcttttcttaagtttgatgatgtgaatgaattggttgacaccaatagcggagaaacagagtatcgttctaagggaaatacaagtagcaaacggtatagcttggagtttgtttttgatccgtatactcacatgcttgctatacatgatacgaaagggttaccaacaagggttccattgataaaatccttgaaagcgatattagagtatcatgcaataaatttattcaaagatcacaatcttgaaattgaggaattaacatctgctgattctatatcagaatttctttcttctcccaaaaaaggttataaaaattataatggatttatcaccttttcaaattctgatgcattcgatgaagcaatagagaaagatatgttgcttacggaacaagaattgaaagaaaaacgggtaggtaagtgggaagttaattataaaagtttttctaaatcggtgatgaatgaattacctcggcaagcaaaaattcaaatgcttttggcaacaagatatgggaatgcagaggtttcatatttggatgaaaatggtgatcgccagaagtaccaaatggataactatcctgtaagggaaggctttaaagatgaaaaggttaagggaaatagagatagggcattagagatattaggtttgattaataaggctctgaataagacgaaggctaaaataagaacggtgctttcaaataagaatttccttaataataaggagtaa

SEQ ID NO: 393545 - DNA, 783 bp, Salmonella enterica
ttgccaaactatctaaactggctgatgcagaacaccctccccggtcaggtgctgctccagtcatggcttacccgtaacggcatagatcgtaagctttcttacctctatgtccagaatggctggctcaggcggatcgcacacggcgtatactgccggacgggccgtgagccggactgggtggacgcggtttactgcctgcaaacgcagtgggaaaagccggttcgggtggcggggctgaccagccttgcgctacagggccatgcccactataccgaaccgggtaaaccacaggtctggctcacacttccggcttacgtcaaactgccgggatggttcgccgcctttgaacaatccgcgacgtttgtcacgctgtatacgtctggcctcaccgtcgatataacgccattcacgacaaaactgaatatcggcgaccggcagttaacaggaagtgtcccagaactggcctcgtatgagatcgcctgcggcgttcctgcgttgatctcgttcgaacatgccgatgccctgtttcaggggatgaatcttctcagcccgcgtaaattacaaacactgctctgcgccagccattcggttaaaaccaaccgggtgatgctctatcttgcccaacgcaacgagcatccttattttcagtacctcgatcaaaacggtatagaaacaggcacgggaaaacgacaaatcgttcccggcggctggctggagccggattatcaaatcaccgttccccgcgcatttaaaccggaaggagtcgaagatggatctgcgtga

SEQ ID NO: 393546 - DNA, 930 bp, Salmonella enterica
atggatctgcgtgatagctatgcccgacaggtcaggctattaatggctgccctgccgcatgtggcaaaggagtcccgtttcgccctgaaaggcggtacggcaatcaatttgtttgtacaggatttccctcgcctgtcggtggatatcgatctggcgtacaagacctatgcggatcgcgataccgatctggcggccatcaatgacgccttgatgcgtattactgaatcgctgaatggcagaccggggatcaccgctatccggcaggaaaataaagcggatgaaaagcgcatcatcgtcaataccgccgatgcgaagataaagattgaggttagtccggtctggcgtggactactgttgccaccaacagaaatgccggtatgtgaacaggtggaaatggagtatggattcaccaccatgaatgtcgtttcgctggcggatctttacggcggtaagatctgcgccgcgcttgatcgccagcatccgcgcgatctgtttgacgtgctgaatatgctggagaaaccgggcctgacacgcgagatctttgacggttttctttgctatctggctggccatccccgccccattgccgagctgctggcaccaaactgggatacagcgcggatcgctacgctgtacgcacaggaattttcaggaatgacacagcaggaaacattgctggaatcccttttatcagtaacgactttgctgccacaagcgctgaaatcgcatcttacggacagagatcgccagttcttgctcagctataagcaaaatacccctgactggtcgctgtaccgctatcctgaaattcaacacctaccggcgattcgttggaagatgcataacctggcggtgctgaatgataagaatccggccaagtatgcagcggcggtgaataagctggagagagttctggaacagtacttttag

SEQ ID NO: 393547 - DNA, 141 bp, Salmonella enterica
atgtttttcacgctgttatatgtggacctcgaactgttatgtgtggagttccatccgctatatgtggacctcagaccgttatgtgtggacctgactccacacataacgaagccacatcccttaaacaccgatttttcgtga

SEQ ID NO: 393548 - DNA, 231 bp, Salmonella enterica
atgtgtggacctgactccacacataacgaagccacatcccttaaacaccgatttttcgtgataaccatcacaaaaataaagcgatttttcatgggggccttcgtgggggcgctgtttatgagaaatatcaacaaaaccaataacaaacagcatgttaatcgtggatatgattccgagtccggcaccactcattcagaaaacccagcctacagctgggtttttgctttttga

SEQ ID NO: 393549 - DNA, 465 bp, Salmonella enterica
atggccccagtcgcgcagcgagtccatgttgccgagatacaggcaggactccagtccctgggcgatattggcgatggcgcgggtgatcttacgggtgacgaaggtttcgccgcgacgcggggactcatggttaaacagaatgccgttacaggcgtaaataccgtaggattcacggtagtttacggtaatccagtaggcgtacagtttcgccaccgcatagggggaacgcgggtagaatggcgtggtctctttctgcgggatctcctgcaccagaccgtacagttcagaggtggaagcctggtagaaccgcgttttcttttcaagaccgaggaagcggatcgcctccagcaggcgcagtgtgcccatcgcatccacatcggcggtatattccggcgactcaaacgacaccgccacgtggctcatcgcgcccaggttatagacctcatccggctgtacttcctgtaa

SEQ ID NO: 393550 - DNA, 144 bp, Salmonella enterica
atgtttttatcagaggcggatgcgccgcccgttaaccgattttccgatttccccctcggcgagggggaaacgattattgcgcggaaagataggcgtatattttttgggtatcgtcacgagaacacagacgcgtaccttgattga

SEQ ID NO: 393551 - DNA, 291 bp, Salmonella enterica
atgcatgatttcaaagataaaatttatttttacacagaaggtgaatttcttgaaatgcttgaggagatagtaaatgcaaccagcaaagataaatctctaaaagggaaaaaattagaaaaatatctcgataccttagtggatcatttcattaaaattactgggcatcctaaaaagggcgatctcatcttctatcctaatcccccagaagatggtgaacctgaaaaaatcataaaaatcgtcaaggaatggcggcgatctcaggggttgcctttgttcaacgattcagaatga

SEQ ID NO: 393552 - DNA, 1857 bp, Salmonella enterica
atgagccgctatgccgggaaagtgacgcttggcgatcagtcaacgctggacgtacgcgaaatttttactggcagtatccaaagtcaggacagcactgtcaccgtttcctcgcgtcatgcgaggctggatgattacagccggttcggcaacacgtcactgactcttcaggagggggctcgactgactgccaccggggggtggtggaatgattcagatgtcattgtcggaccagccgctacgctgagtctggccggtacgcctgtaaccgaacagtcggggcaggtgagtccggcgttttattccaccagttatggcgcgggttatcagctgggtgtaggcagtgaactgcagttctctccttacacttttgtcaccggcgatatccgggcagaggacaatgcagatatcaccattggcagtagtgagaatgtcgccctggcggataatctgcccctgaaaggacagatgatgtacagtacgttcaatggattccgtaacgtttattcggggaatgtcagcgccccgcaagggcgaatggcgatgacggatacgcagtggcagatgcctggtgattctcatacaggggcactgcatatgacacggtcgctggccggctttaccgggcgcggattccacactctgactaccgacacattacaggccagccagtctgcttttgcactcagaacggacctgaaggacagtgacaaaattgtggtgaaccagaaagcagagggtcgggacaacaccctgtttgtgaacttcctgaaaaaaccgtccgggcaagaatccctgaatattccactggtcagtgccccggcagggacaaatccggcgatgtttaaggccgcagagcgggtgatcggttttagtctggtgacgccgaccctgcacacaacagagcaggatggcaaaacacagtgggtactggacgggtttaaatccgcgccggacaaagggtcagccacgtcggctaacagctttatgggcatgggatataaaaacttcatgaccgaagtgaataatctgaacaagcgtatgggggatctgcgtgatactcagggcgaggatgggatgtgggtacgtatcatgaacggcgccggaaccggtgacgccggatattctgatcgctacactcatctgcaaacggggtttgataaaaaacaccgcttgtctggggctgacttattcactggtgtcctgatgagttataccgacagcagcgccagcggtcgggcctacagcggcgacacgcattcgctcggcggtgggttgtacgcatctgtgatgtttgattcggggatatatatggacgttatcggtaagtatatccaccatgataatgactataacgccggatttgctggtctgggtaaaaggaattacggtacacactcatggtatgccggtctggagggcggatatcgctaccacctgacagaaagtttgtacattgagccgcaggcggaactggtatacggaaccgtgtccggaacgacgctgaaatggaatgataacggcatggatgtgtcgatgcgtagcaagacctataatccgctgatagggcgtacaggcgtggctctggggaaaacattcagtggaaaggactggagcgttacggcccgtacgggtgtggattatcagtttgacctggtggccaatggcgagacggcgctacgcgatgcatccggagagaaacgttttaccggtgaaaaggacagcagaatgctgtacaacgtggggttgaatgcgcaggtgaaggacaatgtgcgttttggtctggaactggagcagtcggcatttggcaaatataatgttgatcatgccataaacgctaacttccgctatatgttctga

SEQ ID NO: 393553 - DNA, 234 bp, Salmonella enterica
atgagtcagcattacggggggtcacaggctaatgaccttagttctgagtattcggcgctggtaattaggctgacgaagcgggtgcaccgaatctttcccgatacagatgtgagggtgaaaccgatgcaggcgaacggcttgaatagtgatgccagcaaaagcgatcgtgtaaaactaaaccgtatgttggaggaaatgtttgaggagtcagatatgttgctggttgcagaataa

SEQ ID NO: 393554 - DNA, 1203 bp, Salmonella enterica
atgtcccagcccttcgatttcgacaaagcacttaaagccctccagtccggtcaggcactaacgggcaaagatggtatcttaactccattaatcaagcagttaaccgaggcagccctgtctgctgagcttgactcccatctggctcaggatgtggaagcgaaccgtaaaaatggttccggcaaaaagaccattaaagccccgacaggcagttttgaactgacaaccccgcgcgatcgtaacggcacttttgagccacagctggtgaagaagcatcagaccacgctgtccgacgagatcgaacgcaagatcattcgcctgtttgcgctggggatgagttatcaggacatcagccgggagattgaagatctctatgccttcagcgtttcaaccgccaccatcagtacggtaacggacaaagtcatccctgaactaaagcagtggcaacaacgcccgctggagaaggtttaccccttcgtctggctggatgctattcattataaaatccgtgaggatggccgttaccagagcaaggcggtttataccgtgctggcgctgaatctggagggcaaaaaagaagtcctgggcttgtatctgtcggaaagcgaaggggcgaacttttggctgtcggtattaagcgacctgcaaaaccgtggcatggaagatatcctgatcgcctgcgtggatgtgttgacaggcttcccggaggcgataaacagcatttatccgcagacagaagtccagttgtgcgtcattcaccagatacgcaactcgattaaatatgtggcgtcaaaacaccacagagcgttcatggctgacctgaagccggtgtatcgtgcggtgtcaaaagaagcggcagaaacggcgctggatgagctggagacgaaatggggccagcagtatccggtagtcctccagtcatggcgtcgcaagtgggaaaacctgtcggcatacttccgctatccggcgaatatccgcaaggtcatttacaccacaaatgctatcgaatcggtacaccggcagttcaggaaactgaccaaaaccaaaggagctttcccgaatgaaaacagtctgttgaagctgctttatctgggactgatgaacgcacaggagaaatggacaatgcccatccagagctggaatttgacattgtcgcagttagccatttattttgaagggcgactgaataatgtgatgacgctgtag

SEQ ID NO: 393555 - DNA, 753 bp, Salmonella enterica
atgaatgtggacgaagttgcgttcaaaaaagggcaccggtatatcacagtgatatcagatagcgagggacgagcgctggcattaacggatgatcggggaacagaaagtcttgccagctatcttcgcaccctcaccggcagccagctgcaggcagtcaaaacgttctcaatggatatgaatgccggatatatcagagcggcacgcatccatcttccgggtgccgtagagaaaatagcctttgaccgcttccatgtggcaaaacagctgggtgaaatcgttgataagacacggcagaacgaacatccccgacttccggttgacagccgccgtcaggcaaaaggaacccgcttcctgtggcaatacagtgacaaatggatgacagagccccgacaggaaaaactggcatggctgagagaacagatgcaactgaccagccagtgctggacactgaaagagctggcgaaagatatctggaaccgcccctggagtgacaaacgacgtgcagactggttgcagtggatagcactggcgagaagttgcgatgtgccgataatgagaaatatggcaggaaccatcacaaaaaggctatacggaatacttcacgctatgcggtacagcgtctcaaatggtaatgccgaagcgctgaacagcaaaataaggctgctgaggataaaggccagaggctatcgaaatcgggagcgatttgaactgggggtgatgttccattacgggaagctggatatgacgttctga

SEQ ID NO: 393556 - DNA, 441 bp, Salmonella enterica
atggatgaaaaatcgctatacgcccacattctcaacttgtccgccccgtggcaggttgaatcactttcccttgatgaaaatgctggctctgtcaccgttgttgtcgggatcgccaaaaattcactgctaatctgcccgacatgcgggcagcaatgccctgttcacgatcaccgccaccgcaaatggcgtcatcttgatacctgccagttcatgactgtcgttgaggcgaatgtcccccgggtcatgtgtccagaccatggatgccagacgttacctgttccgtgggccggagctggtagccgatatacgttattgtttgaatcattcgtcctttcctggctgaaaattagcacggttgatgcggtaagaaagcaacttaagcttagctggaatgccgttgacggcattatgacccgggcagttaaacgtggtcttgcgtga

SEQ ID NO: 393557 - DNA, 708 bp, Salmonella enterica
atgcgccctacatcccttaacctgacattacctccgttacctctaccctcatcttcgaattcagtttcagccacagacattcaatctcttgtaaaaatgtcgggtgtgcgctgggtgaaaaacaaccaacaactctgtttccacggggctgaccttaaaatctaccagcatcttgaagctgctctcgataagatcgaatccacagacactggacgtactcttttgaactgtattgaattaacatcccgactcaaatcagaaaaactggcaatacatctcgattctgctgagttaggggtgatagcacactgcaatacggatgctgaaaactcccgaggaactggctccgactttcactgtaatctgaatgcagttgaatatccctgcgggcaaggaattagcctggtagactttcatgcgtgcattgttttccatgaacttctccacgttttccacaatttaaatggagagcgcctgaaagttgagagttctcaaccagaattacaaacacactccccacttttactcgaagaagccaggactgttgggttgggtgctttttctgaagaagttctttcagaaaataaatttcgtgaagagattgggatgccccgcagaacattctacccgcacgattcatctctcattcatgatgacaatacagtgactcagggattccagcggaaaaaactgcatccgttactttag

SEQ ID NO: 393558 - DNA, 609 bp, Salmonella enterica
atgcttaaacgtctggcctacctgactaccggcgcagctctcctgctgctggcggctgcgatgttctggtgcgtcaaccgcctgaacactctgacgctagcgcagcaacaaacacaacgccagataacgcagtggcgcgaccagccgcagccagacaacagctatcacgagctgggggttgccgtaaaaaacattaccgggcgcacggaagcccttgccagacggcttgacgatgccaccagcgctcaggacgcacgacttaaccccattaccgaacaactcagagtactggaggggcaagtccgaaccctgagcgccagttatcaacacctgcaacaacaaatcgccacgcgcagccgcgcaaaggcaaaaagccccatcccatctccgctttgggccgcaaaggcccctttttctcttattagcagcgagtttcgcgccgggtggcagttcgccgttatcgcgccatccggctatcactcgctctcacagcttcagcttgttgcccccggcgacagcatgcagggctggcaactgctgcaactggatggcaggcacgccactttccgtaaaggcggtcagcggctgacgctgaacgccggagagtaa

SEQ ID NO: 393559 - DNA, 684 bp, Salmonella enterica
atgtccgaccatgcgccaccaggaccagtacgccgccccggactgctcggctggatagcattacttcccggcgtactggtcggtttttgcctcggcgcgtggatgctggcgatagcgctggagtggctggacgatgcattgttctggcggaatgcctgcgccagccatagcgaacaggtattgcaggcaacatggcagtggtggcggggttccgctagcgcaccggtgtggttagtagaagatcaggcgcttgccagcgatacattgcagcaagggattgcggcactggttcattcgctcaacaggcaaagtgggttgttctggacagagacggccactacggtgatccgctgcgcgttactgtctgcgggtaacgtcaccctaacctttttgctgcgactggcgattttgttgcaggcactgccgctgtttgcgctgaccattaccattggccttatcgacgggctggtaaggcgcgacttacggcggttcggcgcaggccatgagtccgggtttgtttatcaccacgccaggcgtatgatttcatccagcttgatagcgacgggactggtgtggctggcagtgccaatttttctggagccggagtatgtcctgattccaggagctattctgattgggttgactgcgtcggtagcctttggggcatttaagaaacatttgtaa

SEQ ID NO: 393560 - DNA, 639 bp, Salmonella enterica
atgagtgcttatttttttcatgaaataccagtttgttatatttctggttttgttgctgtgcgcgatccgtacagcaatttggaaaatttattgaatgtagtggaggcgataaattgctgcccaacttcacgtacaactaatggttttatttttgattttgctttgttcacgggggatgtgaatcgagtattaattagaaaggctgatggtttttttactatggcaatgccttttcaaataattgattatggtgctaatatcgtttttatttatgatgaatacaacttaactattgattcggcttttatctcctatatgaaaaatgctataaatacatgtagggagggagcctattcatatgataatgttgtttattctctgcatgaaagttttgggatggaatttaatgaggcaatattatattctgatgttctttcctctttgttgctgaaagatcatgggtattttagattcgatgatgatcctgctaatcagaatgctaggatccatcctagatatcatttcgattttttctgtacaaactctactgggattaaaataggtgttaataataacataacttcttctttttttattgatttgtttgatttaaataaaaatagaccctatatggcttaa

SEQ ID NO: 393561 - DNA, 1983 bp, Salmonella enterica
atgtctaactactgcttttatacagacgatgctcttgaattagctgaaagagctaatttaaaaagtgtgattgatgattatgctacttcgaacaaaaaacaaacatatgtactgtgtcgccctttatcaaaagatgattctagttacgactacgataatgcaatcgtaatattttctgcaggtattaaaccttgctttgtaaatatcaatggcgatgaggatgattttgaagagtttactgatgattttttggaagatgttgcatatttgtcggagaaatttaaatatagagataaaatcggtagaaagaaaaaatgggaagatctattcgtatctgctgatgtaactgattttgattttagctcattgagtcttgatagaaaagaggcaaggacagtcgatttaattatatcgttaatagttggtagtattaacgacgtaactagagttgatttagatgccgataatatactcgactctgttaaatcaaaaataatattgtttgacactgatcagactagttttgtttttaagtcaggtttgggaaaaaaatttgttatacagggattagctggttcaggaaaaacagagctacttcttcataaattaaaggaggtttactcaaaaaatgctgatgcaaaaatagcatttacatgtttcaataaaattttagcatcaacgatgaaaaatcgaattccaaactttttcgattttatgagagtagagcggcaaattgattggggaaataaattattctgttttcattcttggggaagtggtcgcgatccaaattcaggaatgtatagatatatatgtcattattatggaattccatttggtactttttcctctggaagttttgagagtctatgccaaaaggcaattgatgaaattaaaggaaagaaatgggattctaagaaagcatttgattatgtatttgtagatgaaagccaagatttccctcaggcatttttagatttgtgtgagttggttacagagaaaaaagtatttattgcaggggatgtctttcagaatatttttaggccaatagcagataatgtaaaccgagcagatatggttctgaaaaaatgctatagaaccgatcctaaaaatctaatgttttctcatgcattaggaatgggattatatgaatacccggtattgcgttggttgaaagaatctgagtgggatgcctgtggttataattatgttgaagaggatgggagagttcatctttctcgagaccctttaagaagatttgaggatattcctcagaattttaaaagtacatctctgcatatgattaacgatggtgtagaactttctgaaaaaataatcagtataatcaatgaattaaaaagcaggcattctaccctaactcaaggtgatgtggctgtcatatttttggatactggtaaatatatttataatgagatttctaatttagtcctgaaagttaaaacggatcttggatgggattctaatgtctcttttgaaagtaaaagccgacaagctgacaagttttttatatcaaatattaataatgcaaagggattggagtttccttttgtaatttgttttgcaaaaagtcttactagacatgcatctttccgaaatgcattatatacaatgatggcccgatcgttccttgagagtcatttaattttaagcgaagcatccgactctgaagttattagaaatattaatcaaggtcttgattttttgacagataataattatatggatgttcgctatccaactcaggaagaaattgacaagcaaaatgattttatcatacttgatgaaactatttcattagagaaattagtcaaagactattgcacagaacatggttcaaccccaagacttgtagcaaaaattataagtcgtatatcaccttttattgcagaagttgatgattatgatgaagattatcttctggggttaatcgagcttgaatatcaaaggaataaaaccctatga

SEQ ID NO: 393562 - DNA, 333 bp, Salmonella enterica
atggcaaaccaacatactccagtatacatttatccattactaattattttttgcattctaccacttacctcagtttccgcccccctcaccgagcgcgaagagctaaccctgtccctaaaccagcttagccaaatcaaagcctcgctccaccgcgcgcaacaaagcgccagaaccggcatcaacgagcgctactacttcgactatccgcgtatccacaacgatatcactaccctgcgcagcgggattgaacattacctcacacccgctcgcgcccaaccgcgtgatacggcaacgcttgttgggcaataccggggggagaaaaacgcgccataa

SEQ ID NO: 393563 - DNA, 402 bp, Salmonella enterica
atggcgactaccctcaacaccgtctgcgattcactttctgttcccgatactgttaacaccagcccagcgaaagtcgttaaaaaagcgagatcgattcgcgatcccgacgctttgccggattttacccactgcgagttttacacctcggttaacggtcactcgctgaatttgtatggtgagtggatgccgcaggccggatttactgccgggatgccggtaaaaatccgggtgatgaaggattgcattgtgatcacacagctaaatacccgcgagctgtggggctgtattgaaggcatgagcgtgacgtacctcaatcagcggaaagttaagcaatggctggatgcttttccgggggcgttgcacgatactggtgacattccggtgatcaaacgcggaagatag

SEQ ID NO: 393564 - DNA, 1158 bp, Salmonella enterica
atggcactgcaccgcccacgactgtttatcgttgaggcgggtaactcgttcgggctgatggctgattacgctcgcgagcatggcctgacggtgaataaaatcagcctgaaacccggttccggcatcacgctaccgctgtttgctgacgcctggaagctggcggaaagtgacgcaccttcagcagaaccggaggatgacgatcccgaagagaccgacaacgagcagcgcgatctgctgggcgagatggagatcacggctcggttgatgatcaccggcggcgaactgaaagaggatgcccgcctcacccgctccgatcgggcattaattcgcgaagcgattctgcacgcggcccggctcaccgcccgagagaaaagacagacgctgacccaaggtatccgcgatgctctgtttacgctggcacaagatgtggccctaccggaatctcgccgtaaccggctgtgggagatgggcgaagcgatgaatatgttttgctccgggtttgaaggggaactgtttaaccgcgagggtgaggcgtggccggaggcagatatcactctggtggatctggcgatgtttgcccgcgaagggtacgaagcgcagctggcgatcgcctatatctcgctgattaaccatatcaataatctcggcgaacgcgaccagcacctggcgcgacccatcgtcaatattacagacgaagcgcacatcatcaccgtcaacccgctgctggcacggtttctgaccaagggttcaaagatgtggcgcaagctggggatctggctatggctggcgatacagaacctgagcgacttcccggacgacgcgaagaaactgctcaatatgatcgagtggtgggagctactggtgatgccgccggaagaagtcgagcaggtcagccgcttcaaatccctgacgccggaacagcggcagctcctgctcagcgccaccaaagcgccggggaaatataccgaaggcgtggtgctttctccgcgtgttgaagcgctgttccgggtggtctcccctgccctgtggctggcgctgggaatgacggagaagcatgaaaaggcggagcggatgcggattatgcgggagtttgggtgtagtgaactggaagccgcgattacagtgtcagaaaggagttctttcagtgggcaacattag

SEQ ID NO: 393565 - DNA, 1392 bp, Salmonella enterica
atgattgagacaattgattctggcgacatacggtatgaatttattgacaaatcactgttaagtcatgatggctcaaatatttttacagtaatgataggaagaaatggaaccggtaagagtcgattactaaaggatattgttgaagctgtatccagtgaaaaacaaaaaaaatcctcttataaaatccagtacatcaactataacaaaagtggtttctccaaggtaattgcattatccacaactcctttcgataaattccctttacctagaacaatagaatctaataataaatattactatatcggcataaaagattgcggtttccgtgatgtcagtaatggttttcttagaaaaatactaggcagctatttgagagcatacctcttaggtgatagagaaagtctaggaaaaacacttgactatcttggatatgaaaaaactttcaatttaaaattttcatatatcggtggttcgattatagaaagattgacaaatgaacaaatagaactaaacaaacaaaatgtaaaatcaaataaaaactataatttagcatggaaattaaaatactacctggaagaaagatacagaaagggtgagtatcatttggaaaatttcctgtttgaggcgaaaaagcatcccgagagtgaagggtatgtctctactattttggaatcattaattagcattcccgcaatacatcgcattaggaaagtcagcatatcaattaataacaacgaagttactgtttcaaacgaaaaaatatcatttaacaatgaacttattaatttgatagatgcaggcatattaaaactcgagagtgcatatcttcagaagaaaggaagcaaggaaatttttaagattaacgatgcgagctccggtgaacaatgtgttattttaagtatgctgggcatttcctctcttatttctgacaattcgttaattcttattgatgagccggaagtatgtttacatccagaatggcaagaaaaatacattcaattacttacaagggttttcaactcatacaaatactgccaattcataatagccacgcattcaccgcaagttatagcaaatctaagtacagatcagtgcttcgttctaaaaatggaagatggtgttgtgcataatgcaaatgaatttatccacaaatcatccgactttcaattagcaacactttttgaaagccctggatataaaaatgaatatttatctcgactagctgtttctttattttcaaaaattactgctgagcgaaacattgatagtgaagatttagaaacccttcatgtattaaaaaaatcattagatatgttatcggtagatgatcctctgtatgagttaatcaatgtaattatcaaagccgggagtgtttatggcggagataaataa

SEQ ID NO: 393566 - DNA, 630 bp, Salmonella enterica
atggcggagataaataaatccattgttttatccaaggaaagtgaggatattataaagtcagtaaaatctaagccaggattcactttcaaattatggtcagatgaggagctattaaaagttagaagggaaattagaaaattctatagaaaacaacaaaaaggtaaatgtgcttattgtcaaaatccggttaccctctcggcttctggatgtcatgtcgaacatatagttgcaaaatctttacatgaagaatttatgtttactccgaaaaatctttgtgtcatatgccccgattgtaacgaaataaaacgagagcaggaagtaatggcaaacatagaatcaacattgaaaaatgactctccaaaaacatatcctagaagcagcgcagcatttataacataccacccgcactttgataattataatgatcatatcatcaacattgatgggtattatttagataaatcagagaagggtgccaatactattagaatgtgtgtactcaacagaaaactcagagaatttggatatgatgatagtgcgattgcaattccaggacatttagatttcatgataaggattttctatagtggtaaaattgatgaaattaaaaagctaatcggcatgaattaa

SEQ ID NO: 393567 - DNA, 1296 bp, Salmonella enterica
atgtcagagagcctgcaatctaatacaactcaaacgttacctgacgacagggaagagctttaccagcttgtctggcgagagcctgcggagcgaatcacttccctctatagcatcagcaaagagcaactggaaaaacgatgcgctgaattactaataccgagaccactcgccggatactggaaggcgctggcgaaaggaactgcaccggcggtacctgctttgcctgattttaagagtggcaaggtagaaaaatcccccagaaaaaccagccaggccattcctcctcccacaaaagtatcatcgaaagtagcagcgccagcaccgcgaaagcgagcaagggccgcgggtagtggctattcactgatcgatgatctcaaaacttaccttcccgtctcttccgtcacaaaagacggctactacaaaccaacaaaaaagaagctactcgatctgaatgtttcagaaacggcattcaacagtgctatcgattttctgagtcggttctttgctgcactgggaaagcaaggttattgggtaaggttagctgaaggaaatgaaggatttcattgtcagggcatagatatcaaagaaaacccaaaagagggaggtttgcgctatgacagtttatggcgcccttgttcagccagtattatctgtgttggggatatgctgttcgcctttagccttgctgaaatgacggaatatgttccggcaaaagaggttaatggccggtatatccgcgatgaaacgatgatccgctggatgagggggaagtatgacaagccatttcgctatgtcattaaacatgccttacctaccggacgattctttctacagctctgctcgccatactcgtcaactaactggcaggttgagtttcgccagacaaaacagtgcgggcttataagccagatcccgaaaatcatttccgcgatgcgtgatgctgttccgttgataaagaagcagcaggaagaagccagaattaaagcagaagaacggcgaatccagtgggaactggatgaaaagagatatcgggaaaaggagcggagtagaagggaaaaagaggcatacaacgccagcttgaccgagctgaaatctattatggtgcagtgggcagaggataagcgtatagagcagtttttttatgaagcagaatttgatgtgtccaagcttggtgagcaacagagggtacaaattatggaacgtatacagctggctcggcagctcttatctggaaatacggccgttgaacgattgttgcgatggaaaactccgcaagagcagttgaatagtggatga

SEQ ID NO: 393568 - DNA, 225 bp, Salmonella enterica
atgacttctgtctactctattgaataccagatggttataaaggcattacgtgaagcgcgggttgctggccacatcacccaagaagagctaggcaaggcgctgggaagaccacaatctttcatcgcaaaagtagaaaacggagagcggcggttagatatcatcgagtttgttcatctatgccgattggttggtattgatcctgtcagcatcattaataagctatag

SEQ ID NO: 393569 - DNA, 237 bp, Salmonella enterica
atgtcatctatttattctgaacagtatcagcaagttataagactgttgcgttcggcgagacaggataaaggtctgacgcaagcacaacttgcaaaagcattaggtcgtccgcagtcatttgttgccaaagttgaaaatggtgagcgtcgtctggacatcatcgaatttgcccatattgctcatttgctatctttggatcctgctgccgtactgaaaatggttttgcctcagaagtga

SEQ ID NO: 393570 - DNA, 252 bp, Salmonella enterica
atgttagcggtaaaaacgacctgtaaagatcgctggcggcagatattaaatgaggcagacagaattcaggacatttacctctttacccttcaggaaggtgtttctgttgcccaatttcaggagatgcagcaggaaaatgtcaggttggttgtgcccagtagccttcatgataagtacccgaaaactgtccgggaataccttatttcgttagaaacatttattgatgaaactaaatcattatatgtcgattaa

SEQ ID NO: 393571 - DNA, 546 bp, Salmonella enterica
atgaacgtgaacaaaaaaaaactggctgaaatttttggttgtgacgtcagaactgtcacagcctggcaaagccaggggctgccccttgtttccggtggaggaaaaggtaacgaagcagtgttcgacaccgcggcagcgatttcatggtacgcggagcgtgatgcgtctattgaaaatgaaaagctgcgtaaagaggttgatgatttacgtgccgctgcggagtcagagcttaatcccggcaccatcgactatgagcgctaccggctgacaaaagcccaggcggatgcgcaggaacttaaaaatgctgagcgcgaagggctggttcttgagaccgaactgttcacctacatcctgcaacgggtggctcaggaaatagcagggatattgtcaaggataccgctggtattacagcgcaaatatcctgatctgtgccagtcgcacatcgatgtggtcagaacggaaatcgccatggcgtcaggcagggccgccacgatagcggatgtggagaagtggaccaatgatttccggagagctcagggcgaataa

SEQ ID NO: 393572 - DNA, 690 bp, Salmonella enterica
atgatttccggagagctcagggcgaataatgccaacagagccataactaacgggctgatagcgcttcatattcccgtaccgcttaccaccgtgcagtgggctgatgagtattactatctgccaaaagagtcctcctacacccccggcaaatgggaaacgctgccgtttcaggtagcgataatgaacgcgatggggtatgaactgatccgcgttgtaaacctcattaagtctgcccgcgtgggctataccaaaatgttgctggggggggaaggctatttcatagagcacaagtcgcgcaacagcctgctgttccagccgaccgactcatccgctgaggattttatgaaatcccacgtggagccgactatcagggatgttcctgtattgctggagctggccccctggttcgggcgtaaacatcgtgataacacgcttaccctgaaacgcttttcttccggtgtcgggttctggtgcctcggcggtgcagcagccaaaaactaccgtgaaaaatcggtggatgtggtctgctatgacgaattgtcatcttttgagccggatgtcgagaaagaaggttcaccgacgctgctgggggataaacgtattgaaggttctgtctggcctaaatccattcggggctccacaccaaaagtcaaagggtcatgccagattgaaaaggcggcaaatgaatag

SEQ ID NO: 393573 - DNA, 1221 bp, Salmonella enterica
atgcgttttcatgtaccgtgtccgcactgtggcgaagagcagtaccttaaattcggtgatggcagtacgccgttcggtctgaaatgggagaaaagcaagccggagacggtgtattacctttgtgaacataatggatgcgtgatccgtcagtcggaacttgatcagaaagcgggacgctggatttgcgataacacaggcatgtggacacgcgatggactggcttatttcagcgcgtccggtgaggagattccgccgccacgatccattacctttcatatctggacggcttacagtccctttaccacctggatacagattatttatgactggctggatgcgctgaaagatccaaatggtgtgaaaacctttgtaaacaccactttgggcgagccttatgaagaggcggtggccgaaaaactcagccatgagcttttgctggaaaaagtgattcattatgcggcgccggttccggagcgggtggtgtatctgaccgctagtatcgactcccagcgtaaccgttatgaaatgtacgtctggggctgggcgccgggcgaagaggctttccttattgataagcaaattatcatgggacggcatgatgatgaagataccctgcagcgtgtggatgccgtcattaataaaaaatatcgtcatgctgacgggacggatatttccatttcccgtatctgctgggataccggcggtatcaatgcagaaatcgtctataaacgctcaaaaaaacacggcattttccgcgggctgcctgtcaaaggggcctccgtttacggaaaacccgttattaccatgcctaaaaaacgcaaccagagcggggtattcctgtgcgaaatcggtactgatactgccaaagaaatgctttacgccagaatgggggcggttactgcgcctgccgacgaagccacgccttatgcgatccgctttccggataatccggatgtttttacggaggtggaagcgaagcaactggtagccgaagagctggtggagaaactggttaacggaaaattccggctgttatgggatgccaaaggacgtcgtaacgaagcgctggattgtcttgtctatgccagtgcagcgttacgggtgtctgtgcagcgctggcaactggatctggaggcgctggcgacatcaaggaaaagcgaagagcaggataccgggggaacgggatacagaacggtacacagtgtatcattgagtttataa

SEQ ID NO: 393574 - DNA, 168 bp, Salmonella enterica
atgacggtattttgcgttttttacgctttattagtggaggagcagcgagaagcatggggagattcaggcagggaaaatcagatgtatcacgtgtggtgcaggataagcgacgccataattacgaccggttacagcattattgccgctatcctgcatatccccttctaa

SEQ ID NO: 393575 - DNA, 996 bp, Salmonella enterica
atgtatttatcacaaatcatggattcggataatgatttatctgcatatctgctgaaaaaacatgacagtgaaataaccatcgtcacggcatttgcttctgcgactcagggtattgtagacaaactattatcgcagggaaataagctaaaaatcattgtcgggacgataaacgcctttaccgatccggcctttattaagcactgcgcgcagaaaaaaagaaaaaatatacggttgtcggttgattttcgtggacaagaaagtatccactggaaactatacctgattaacccggatacggtcattatcggcagcgcgaattttacccaaaccggattgaacctggcgcgggatacctgtgtggtcattaatgatgcaaacctctttaacgactaccagcagcgtatcaataagattctggcgacgccgaatgttattaacgctgaagatcctggtttttcgcagaggttagcggtgtatgctgaccaacataaaaaatcgcagcaacgcctgatcgcgaaggcatcggataagacatccgggctggcgaagtggctacaggatgattatcaccatcacattaaaatttttgtctggaataatacgcacccggcggcaactaaaaaaatcgccaatgaccttcttgtatctgaggaagaggttgatacccgacccgatctggtcaaagcggggattgcctgtattcgggatttctatacctataaatgtgacagagaagaattgccctgggaagaaggcgatattgttctctgctttagacgaaatggtgatgaaatcaagtttgatcaatttgaaagaataattcatcacgaaggcataaattatatgtattctttcaaacgagatgacaaaaactatcctaaacctttccggatacctggcaatgtgaaaaaacaaatcgcgctccgggctgacgattggtatgaagaggataagactatattaacccggcaagagctgctgtcattgatagaataa

SEQ ID NO: 393576 - DNA, 246 bp, Salmonella enterica
atggctattattaccagtccactttccgcaacagaagtccataaagcaaagcctgctgcaaaaccctattatctgtttgatggtcgtggtctgtgcttacagatcaaacccaacccccccagggtcagtgccctgactggcaaggaatttttccagtcggggattttcccgcgctatccgttttccatagcgccggagataatccagctcttcccggaaaagacgttcattaacagccataattaa

SEQ ID NO: 393577 - DNA, 252 bp, Salmonella enterica
atggccaggcatgacatcgaaaaaatgtgggaaaatctgcttaaagaggacaccgggtcgcgtgttcagattatccaggagattcatgaattaattctggccggtgaaatcgaagtcgccaaagggatgctgcgcacgcttatacgcatgttgtcgccggatgtggatccgggggttaaagcgtttatggccgttgtcagagctgtagaacgtcagtcagaaaaagcagcggctcaggggagaatccactga

SEQ ID NO: 393578 - DNA, 183 bp, Salmonella enterica
atggaaactgaaaaaattatgagtgaatgtgaaaaactccagagaattcagaaaaaatcctgtgctcagaaagatatggcaaggctttataaaagttttggagaagaaggtgttcttgagcttctgagaaacgcctgtagtgctaatgatgcgtcgccttccggtgaacaaaaagcgggataa

SEQ ID NO: 393579 - DNA, 327 bp, Salmonella enterica
atgaacaccaaaggtcttatccttataattatcggtgcaatgtttgaatgcgcctgggcatttggccttaaacacgcacagggctcatttgaaatatttctgacagtggtctgcgtggtggctagtttcggcatcttcatgctttcgttcaaatatgtcggcgcaagtattgcgtatgtggtttataccggtctcggtaccctgtttgtggtgctggtcgaaatggctgacaccctgtctcacggaggtcagctagaaattctccgtatcgtatttgttgttaccctgatgctgggcgtcactggagtcaaaggagctaaatcatga

SEQ ID NO: 393580 - DNA, 327 bp, Salmonella enterica
atgatttcctatctcattctgtttattgccgggtgcttcgaggttgcgggtatctccaccctgaatggctatgccaatgcccaacccgtgcgccgtaaggtcacgttccttctggtcaccattgtactctttgccattgcgctcagctcgttgagtatctccatgcgcgagatccctctttccgtggcctatgccatctttacgggggtgggtaccatcggtgccgtcgcggtaggcgtatttattaacggagataaaatccgtctactcaagggggcaagtatctttcttatgattttcagtgcgatcatgctgaagctggtttaa

SEQ ID NO: 393581 - DNA, 885 bp, Salmonella enterica
atgaaccttgttgacggtatagaggcattcgtaaagattgcagaccttggcagctttgccgcagcggcacgtgagcttaatatctcgccctcagccgtaagcaagctggttggtaaaacggaggaagagctgggagcacggcttctcaaccgaaacacccgtggattaagcctgacacaggaaggggagatgttccttgaacgttgccggatgatcctcaatgaactaaaatctgcaaaagaagagctttcatctatatcgagtgaaccaaggggaaagttacgtgtaagcatgcctaatatgccttcgttctttgtgcccctaatcagtcgatttatcgagctttatccagctgtaatgctggaagtggctctcagcgacaggctggttgatgtcgtggatgaaggttttgacgccgtaatccgtgtcggacaactctccgattcccgcttaacggcccgctcgctcggtaactgccccatgaatctggtggcatcaccggagtatctgaagagatatggtacaccttcctgtgtggatgacctcggctcacacagttgcatccagtaccggtatccttccagcggcagaacagagccctggccgttactgaatgccggggctggggacatcaatatcatccccgctgttgtatgcaacaataccgatgttcgcctggggctggccctgaacggaaaaggaattgtttttatgcccaggttattgacagaaaaatatcttgcgtcgggagaactggagattgtactgggtgatatcgttgggcgaagttacgatatgaatattgtctggccgacgaatagatatacaaccccaagacttaaatcttttgttagttttatggttgaatattttaacctgtcgtga

SEQ ID NO: 393582 - DNA, 2544 bp, Salmonella enterica
atgtcgtcagacaaacaacaaaaagccagctctacgccacatcatgacatcaatacaagtgtaagcgtacatggagcaagaacacataacctcagagacatttcgtttacattcccccgcgatgcaatggtggtgtttaccgggatatcgggctcgggtaaatcctcactggcctttgataccctctatgcggaagcccagcggcgttttatggaatctattgcccctcatgcacggcgtctgattgagcaggcgtccacaccggatgttgatggtatcgatggcctgccgcctgccgttgcccttcaacagagtcgggccggggctcaggagcgctcaaccgtcggtagcctgacccgtatttccgtcaccttaagactgctgttttcacgcgcaggcattcgccccgaaggtatcccgttcctgcccgctgagtcgttttcacccaataatcctcagggggcttgtccggtctgccagggtatgggaatgattcatgaagtgaaagccgatgcacttgttccggacggtgcgctgagcatccgcgaaggtgctatcgcttcctggccgaatggctggcaggcgaaaaaccttcgttctattctcgatacgcttggctacgacattgatgcaccgtggaatacgctgtctgaacaggacaaagagtggatcctgtttaccgaagaacagccttctgtacctatttttatgggtctcaatgcagagcagcgtcaggaagcaatagcagcaggaaccgaacctgcttataacggtacttataccagtgcccggaaatacgtcctgcaaagctattccggcgggaaagactctgtgaaaaaacgtctctcacgctttattaccgtggcaccgtgcaccgaatgccacggtaaaaggctcaatcagaatgcactgtctgtgacttttgccgggcatgatatcgctcaaatcggcgagctgacgataacccaattgaaatctttatttttaccctttgccaacgggcactctcagtctttgcctggcgaagctgcattaagggaagccactatcaaaatgacgaccgacatttgcggacgtctcgaacaactcgaaaaactgggtcttggtcatttgtctctcggtcgccggaccacaatgttgtcttcaggggaactccagcgtatccggcttgcaacccagctcatctctcgccttttcggtgtgctgtatgtacttgacgaacctgcggccggattgcacccggatgacgtgcgggcgctgattcagtctttacgttctcttctggaggcgggtaactctctggtcatcgtcgagcataacctggacgttatcgccgaagcagactggctgacggaggtcgggccagggccgggcctactgggtggcgaaatcgtctataacggcataccgtccgggcttgcacaggtttcccgatcgcctacggcaggttatttgttcggacagcgctacacgggtctgcgccgacgcagacttccggagcgctggctgaagcttgagcaggttacgtataataatatccattctgttgatgtccaaatcccccttgagcggatgaccgtgatcaccggtgtatccggttcgggtaaatcaacgcttctggcccgggtgctcccgacgttgctacagcggctcgataaaaccccggaagatgaggatccggaagaagaaacagtatctttggacgttcaggggaaaatcacggctggaggaaattctctcaaacgactggtccgtatcgatcagaagcctataggacgtacaccgcgttcgaacctggcgacctataccggtttttttgacacagtccgtaagctctttgctgaaaccgatgaagcgaagaaacgcggctttgacgccagtcgattttccttcaatctccccgccgggcgatgccccgcctgcgagggtcaggggcagattactatcgaactgatgttcatgcctcaggcaagtgcaccgtgttctgcctgcggtgggcgtcgctacaatgacgaaacgcttgaggttcgctggaataacagaaccatagccgatgtactagcccttaccgtagacgaagccatcaccgtattcaggaacaatgaaatcatacagcgttctctggcagcgcttgcctcacttggtcttggctacctgacgttaggccagccagccaccgagttatcaggaggagaatgccagcgcatcaagcttgcctgggagcttcagcgggtgcaacggggtaaaacactctatctccttgatgagccgtccacggggctgcatcctgcggatatggataagttgatgcgggtactggacaaactggttcagcggggggatacggttgtgatggcagagcacgatatgcggattgcctcggaagctgactggatcctcgatcttggtcctggctcaggtgaaaatggcgggaaaatcgttgcggtcggtacccctgaggaggttagctatgcgggtgacagcatcactgcgccgtacttgttagcaaggttgaaaaagcggatcggcgatcctgaagaataa

SEQ ID NO: 393583 - DNA, 249 bp, Salmonella enterica
atggcatttcaaattttaacgactactgcagcaagcattacagaactgaaacgtgatccaatgggaactttcaatgccggagatggcgctccagttgccattcttaaccgtaatgaaccggctttctactgtgtgcctccggcactttatgctcatcttatggatattcttgaggatgaagagctcggtcgtattatcgatgagcgtgcgaatgagcgcgtcattgaggtcagcattgatgacttataa

SEQ ID NO: 393584 - DNA, 153 bp, Salmonella enterica
atgggggaagctgatcatgttgatggggcgagcaggggttacggattcctgccttctgcgattggctttccggagcagcattccgtcggcagcgtatcgctcgatggtactcacgctaccgcattagaaatatatagaggtctggtgacgtaa

SEQ ID NO: 393585 - DNA, 546 bp, Salmonella enterica
atgactctttgtctgggctcagctttgccagtaaatctggcaaggggtggcacaatgcgccctactgagcggaggttttacaaaacagagacggaggaaataattttatttttcaaaggattaattacaagaaacatccaggtaagatggtatagtgcggttcagagtccaccgacgcttccctgccgatggcgaaccgttctaacattttgtcagggacttttcggctggtgtaatggtgggatcgaacactattgtaatcattcgatatatgacgatgaaagttatgttggcgccaaaatacaaagcgcctggcaatatttatcaggcgctttgcagccagaaaaccgtcagacatcggtttctcgttctcccgattctaccgggaaaaatggcaacccacagttattgggttttactgtcgggtcttgccagggattttgtgttatccccatctcttttaaaagacgtcgtgccatcactaattcatggggtgttattcttttctttggttcatcctctttaggtggacgaatatcttcctga

SEQ ID NO: 393586 - DNA, 960 bp, Salmonella enterica
gtgaccatccggacacagcagcgccgcgttcagaccgtgtacgcgccgggaagcttcacgccgctggtgcgcatcgggaccgacgcggcagggcaggcgaaggcgcagcaccgcagcctggcggagaagctggagcaggaggggagcggggacggcgaggcggtgcagttcccggcggcgctgcgggcgatgctggacaggctggaggatgagctgaggcgtgacgcggtgagtgaggaaagccgggcatggcttacgcagtgcgggctgacggcggagcagatgaaaaatcagctggagccgcgccctgagccggagaggaagctgcatctttaccactgcgaccaccgcgggctgccgctggcgctgataagcccggccaacacggtggcgtggcgtgcggagtatgacgagtggggaaacctgctgagtgaggagaaccctgagcacctggagcagctgatacggctgccggggcagcagtatgatgaggagtcggggctgcattacaaccggcaccggtactataaccctgggcaggggcggtatatcacgcaggatccgattgggctggcgggggaatggaatctttattcatatccactaaatccggtaacaggtatggatcctctaggattaataaatataagtaaaggaatagaaggagcttctggagatacatctgttcatgcgaatccaggtcctgaggccacaagttttcgcccagaccactcacccgaccatattcatctaggtaaaaatgatgggccgcggttgagtaccgataattggaaacctctatcacaagcggatgcagcaaagatgtctaaagaacagaaatctttttgtaagaaactaaccgatgaggctaaaaaatattatctgaaagacaaaagcatatatttagatatggtaaattactgggagtgcttggtgattatatgtcggttcgagacgtag

SEQ ID NO: 393587 - DNA, 204 bp, Salmonella enterica
gtgactatccagaaagtcacaccacagtcattaatcaacagtaccgctcaggtcactccgctggtagagctgacctcacttgagaaaaaagatatctcaaaaggggaaaacgccgctgctgtcggggctggcgttggcgtgacagcgctggttattgctgcaacactgtctgcaggtttagccgcgatgattgtcaatagttaa

SEQ ID NO: 393588 - DNA, 243 bp, Salmonella enterica
atgttacatccaaccgttactctctccatgagagtctggcagattttacataagtaccattctcagggagttttagccatcttttcactttgctcattacagagaagttccatcaaaaataaacgcgcctttccccaagtcaaaatgacattgttctttcggaattatatgcgccccggttatggcttccctgctaatcggatgaggcagacgccgggacacctgctctttcagcgcagttga

SEQ ID NO: 393589 - DNA, 1014 bp, Salmonella enterica
atggaaacaaatattacctggcaacaattgatagatgaatacttcttcgcaaaacctctgcgctcagcatctgaatggagttacaccaaagtcttcaaatcatttgtacattatatggggccgttaagctgccctaatgatgtgacatatcacaaagtgcttgcctggcgccgttttcttttaaaagagaaaaagctgtccggacgtacctggaataacaaggtggcgcatatgcgggccatctttaactacggaatacagcgagggttactgcactatgacgaaaatccgtttaacaattcggtagttaaaccggacaaaaagagaaagaaaacgctcactcaggcacagattgagtatgcctatcagatcatggagcagtatgaaaatcaggagaatacagggctgggactgaaatattcccgttgcgccttatttcctgcctggttctggctcactgtcctggatacgctctattacacagggatacgtcagaaccagttattacatattcggctgaatgatgttgatttgggagaggggcagattcggctgattacggaggggtgtaaaaatcacaaagaacactatgtgccggtgatcagttttctgcgtccccggctgacctgtttagtggagaaagcgcagagcgaaggattgaaaggcaatgaccgcctgttcaatattgcactttttaccggcaaagatcccgccattggcgatgacatggattctcctcaggtaagagcattcttccgtcgtctgtccagggagtgtcagtttgcgatcagtcctcatcgtttcagacactcgctggcaacggagatgatgaaaataccggaacagaatctgcatatggcgcaaagtgtgctgggtcattcaaacatgaaatccacgctggagtatgtggagaatgatattgcagtgatggggagggctctggaagcacagtttatgcagattaaggcagctcatgcccgaagcatttacagtgggttgacaaagaatagataa

SEQ ID NO: 393590 - DNA, 696 bp, Salmonella enterica
  misc_feature (682)..(691): n is a, c, g, or t
atggaagagaaaaaagatgtcatcatcgcgcttgatgaaggaacaactaacgccaaggcaatagcgatagatggcaccggaaaggtacttgccagatcgtctcaggcattggctatcaaaacgccccgcgagggatgggttgagcaatctggcgagtatcttgtcgaagcatcgctaaaggtaatgcgcgacgttatagaacaagtgggaagcgaacgggttgcggggattgctatcagtaatcagcgagaaaccaccattggctggtatcgtaagagtggtaaaccgctgggtgccgctattacctggcaatgttcccgtacagctgaatattgcgaacggctgcgtaatgataattacagtgaaagtatccagtcgattaccgggctgccgattgccccgttattttctggttcaaaaatgcgttggttgcttgatactgtgccgaacgggaatcgcctcgcagaagaaggcgagatctgtttaggcaccatcgacagttggctgctttggaatttaacaggaggtgacgtttttgcctgtgattactctaatgcctcgcgaacccagttattcaatattcatgagggagcatgggataaaaatatgctttctcttttccagatccctgagcaggcgcttcctgaaattaagccgtcgagtggttgctttggttatactnnnnnnnnnncttaa

SEQ ID NO: 393591 - DNA, 231 bp, Salmonella enterica
atggtcggcctggaaattttatataagatgtacaaaattatgtgccaaggtggtaagcgagataattctggtgtgttggcgcaatgcggactgacaccaaaatggatggcggaacaaatggagtcacacgatgagccggagaggaaagtgcatctttaccactgcgaccaccgcgggctgccgctggcgctgataagcccggccaacacgggcgtggcgtgcggagtatga

SEQ ID NO: 393592 - DNA, 468 bp, Salmonella enterica
atgcaggttgtcgccctgaaccccgttcaccttccagttcacctccgcatcccgggtaatatccagacctgcgccctgccaggtggagccgttagtggtagataccgtataattgctgttaaaagtcagcgcacccgcgccctggttaaccgtatcttccagtacaatctggccgtcagcaccattgaataccagatttttacccgcattcaggtctgtgcctttctgaccatgcatctgataggcagtctcttgctgggtaagagtccccgtgccatctgtcgagtcaaacgcccagcgcaaaggcccctgccccgcaacggaaacgaccggctcatcagtatcatcagccatggtactggtaataaaatcattttgcattattgtccatatagtacttccattacctatagccgaatataccccgacaattgcccattgatggttagcctcatcccagccaaataa

SEQ ID NO: 393593 - DNA, 264 bp, Salmonella enterica
atgttcagcttgttcctgagtaagaccgacgccattatcaaggattttcagcagtacactggagtcagactccgttatcgtaaaagttatctgtggggaggattccgaagaattttgcatcttaagggcatcaagcccattacggataaggttaaccagaacctgttgaataagaatttcatcggcacagataacaaccctgggagattctggtatgacgacagtgactttctcccggtagatttcactggagaacagggctaa

SEQ ID NO: 393594 - DNA, 633 bp, Salmonella enterica
atgagacagaaacgtgtttatctcgttgatgatgatcccggcatccgggagtcactgacctggttaatgggtgctgcgggtattcagttaatctgctttacgggtgcagaatcttttttaaagcaggctgacagtactcttcctggctgtgtgttgctggatatctgtatgccgggaatgacaggcgttgagcttcaggagcacctgcaatgtaaggaaaatatgctcagcatcattttccttacggggcatgcagacgtaccaacaaccacacatatttttaaaaatggtgcttttgatttgatggaaaaaccggtggacacagaggaactattgcggggcatacatctggcgttggaaagcagcgagaaaaagtatgaatggcatgccggtcgacggcggttgactgaagcctgggaagaactgactgacagagagaaacaaattctgctactggtactggaaggtttatcaaataaagttatagccgatcgtctccatctggctttgcgcactgtagagattcatcgccataatatgatgaaaaaaatgggtactgactctgctatccagttagcccactcagtgtcaaagtatatggatataaaagaatttaaggctgcctcgcattag

SEQ ID NO: 393595 - DNA, 747 bp, Salmonella enterica
atgtataaaattagtatattaaccgcaatcttgttgatttcagtttcctctggcgtagttcaggctaaaagtaattttacgctcggggcgggggtaggtgtggttgaacacccttacaaagattacgataccgatatttatcctgttccggttatcgactatgagagtgaatatttctggttcagcggattagagggcgggtattatctgtggaacgacaaaacggataaactgtcgatcacggcgtactggtctccggtttattttaaacctggtgacagtaatgatcgccaactgcgccgtctcgacaagcgaaacagtaccatgatggccgggatgacttacgttcataatacccaattaggttttctgcgtactacccttgcgggtgatacgctggataaaagtaatggtatcgtctgggatcttgcgtggctttatagctactccacagggagactgaccttaactccgggaatcggggttgagtggaacagcaagaaccagaataaatattattatggtatttcccgtaaggaatccactcgtagcgggctacgtaactacaaccctaatgacagctggagcccatatctggaaatgagtgcaaactataactttctgggaaactggaatgtatatggtttggcacgctatacacgtctgtctgacgaaattaccgacagtccaatggtcaataaatcctggagtggcctgatttctaccggtataacctattcattctga

SEQ ID NO: 393596 - DNA, 600 bp, Salmonella enterica
atgcgtctggtgttgtgtgaaaaactttctcagggcagagatattgcgaagtttcttggcgccactcaaagaggcgaaggattcctgaatggtccgggagttacagtcacctgggctcgcggccatctgctggagacagctgaaccggaagtatatggcgaacagtatggtaagccatggcgcaccgatgtgcttcctttattaccacagcagtggaaactggtagtcaaagcggatgcaaaagcccaattcgcggtaattaaccgtctgcttaaacaggtagatgaggtggtaattgccacggatgctgaccgggaaggtgaagtaatcgcccgtgagttgctggattactgcaagtttcaggggcgtatattccggttgtggatgtcagctctggatgatgccagtatccggtcagcgttagctgatttgtggccgtcttcccgaactgaatcgctttattatgctggcgtgggcaggagcagggctgactggctgattggtatgaatctgactcgcctgtttacactcctggggcgtgaagcgggtatcggtaacgtacttcagttggccgggtacaaacgccaacgctggcgatag

SEQ ID NO: 393597 - DNA, 558 bp, Salmonella enterica
atgactttttcacttgcacagggtgccaacagtcttttgtttaatctggttatggaactgagaggtggaaacattcggcgatgtgaggcgctggggttgaaacctgaagaaatgcgtctcctcagaagtctgacgatggaagaactgcactatctgtcaggcagccctgtttctgttttaaatgtagcaatacatcatgaaaatctaaaacgaatgctggaccaggccaatcgagagcaaaagcgtagcgaacgaattgatcgtgctattgctcttggtgcatcaatagagatgatggggatcttctttggtctgaatgcttcagatgtcagttcgaaacggcggctagaggggatccagacacgtcagggacgttgtcagtcacctgatgaggagtgtgaagcgaagatatggcgtctctggcatgaggccaatatcagcgatatagaaagtcttaactctcttgaaacgatgatgcttattgcggaagaggctgatgtcagtctcactgtgatctggggattaatcaaaagctggtgtacgggggaggtagcctga

SEQ ID NO: 393598 - DNA, 189 bp, Salmonella enterica
atgatgtcggaggaacagcccatttcccagaaagaggcatcatcagtaacccagatgttgcctttgtcagcctggacaataccatcccagccgctgcttgaaacagaatcaccgccgggcatgctcaatgctgttattgttgtggtcgcgctgattaatcgccggatcaaaatgggcaataatccctga

SEQ ID NO: 393599 - DNA, 1167 bp, Salmonella enterica
atgattaactatccattagcaagtagcacttgggatgatttggaatataaagcaattcaatcggttatagactctaaaatgtttacgatgggagaatgtgtaaaaaaatacgaaactcaattcgcagagacatttggaagcaaatatgccgtgatggttagctcaggttctacagctaatttattaatgattgctgccttgttcttgacgaaaactccgaaattaaaaaaaggtgatgaaataatagttccggccgtttcttggtcaactacttattatccgttgcagcaatatggtctgaaagtaaaatttgttgatatcgatataaatactttgaatattgacatcgagagtttaaatgaagctgttacagataataccaaagcaatacttacggtaaacttattaggtaatcctaataatttcgatgagattaggaagataattggtggcagagatattatcttattggaagacaactgtgagtctatgggggcaatgtttaatagtaaatgtgcaggtaccttcggtttgatggggacatttagttcattttattctcatcacattgctacgatggaaggtgggtgtattgttactgatgacgaagaaatttatcatatattattatgcattagagctcacggctggacgcgaaacttaccaaaaaataatagagttactggtatgaagagtgatgatcaatttgaagagtcattcaaatttgttttgccaggttataatgttagaccactagaaatgagcggtgcaataggcatagaacaattaaaaaaattgccaggatttatttcagtgagaaggaaaaatgctgagtattttctcgaaaaatttaaagaccatccatacttggacgtgcaacaagaaactggcgagagtagttggttcggtttctcatttatcataaggaaaggttctggtgttatcaggaaagagcttgttgaaaaattgaattcggcaagaattgagtgtagacctatcgttactggtaatttcctgaaaaataaagatgttcttaagtacttcgactataccgttcataacaatgtagttaacgctgagtatttagacaagaatggtcttttcgttggtaaccatcagatagaattatttaatgaaattgattatctcagaaaaatattgaaataa

SEQ ID NO: 393600 - DNA, 753 bp, Salmonella enterica
atggcaaaaccggactggggagcactgcaacaccagttcctcgccgaacatgctaaatccggtatttcccccaaagactggtgtgaagcgcagggactgaattacgccagcgcaaagcgttatatcaagattgcgaatagtgctgcgaattcgcaaaaaaaaactgcgaatcaaactgcgaattcgcagaaaggaaaaatgcgtaactccactcaggagaaggcttgcaagggaaaagataaaactgcgaataaaagcgaaaactccacaaattctccagaaacgaaaccgatacgcggatccaggcggtcaccgccaacaaacccattcaaacccggaaaccagcaagcccttaaacatgggggatatgggcgccgcatgcttctatctgacgccattacagaggatgcacaagcgctcacgctggatgatgagcttttctggctacgtgctgcgaacttgactgcggcggagaacatcggccgctggcaggcagagttagaactcgctaatgacgagacagcaaaagaccttcatgaacttatttcctccgcggagaaagctatgcaccgcaatactgcgcgtattgagtcgctggaatacaccaaaggatcaatagcgaaacttcaagttgatgccgcgtaccgggaagcagccactgaaaaagttgaactggaaatcgatgtgatgaaagacggtgataaagacaacgcgattgtcgttcataactcgctgccaataccgggaagatga

SEQ ID NO: 393601 - DNA, 1332 bp, Salmonella enterica
atggccgatatttaccttcctacgctgcatgacgggcaattaaaggtatggtctgattcctgggaaggtcagttgcatgcggtccggtgtggtcgtcgctggggcaaaaccttcatgctttccagcgccgcggtgacctacgctactgctccgtttaagcgtccgggtatggatattgaactcggcggcagggtggggatttttactgctgaatatcgtcagtatcaggagatctacgacaagctcgaagaaatcctgctgcctctgaaaaaaagcttcagccgccaggagaagcgactgctgctgaagaacggcgggaagatcgacttctgggtcaccaacgacaacaaactggctggccgtggtcgtgaatacgaaatcatcctgatagacgaggcggcgtttaccaagtcgcctgagatgctgagggagatatggcccaagtcgattaagccaacactgctgacgacgaaaggccgggcctacgtattttcaacaccggacggtgtggacgaagagaacttcttttatgccatctgccacaacaagaaccttggctttatagagcaccacgcgccgacgtcttccaatccgttcgttccacctgaagaactggaaaaggaagaggcgaacaacgacccacgagtgttccgccaggagtttctggccgagttcgtcgactggtcagccgcttcgctgttcgacatccggaaatggtttgagggtgagaatcaggatcagcctgtcgattaccctgaaatgtgccaggccgtctttgctgtcatggatactgccgttaaaggtggttctgagcatgacggcacggcggtggtgtattacgccgtcgacacccggcccggcattcagcgcctcaccattctggactgggatgtggtgcagattgacggcgcactgctggaaacgtggatgccgtcggtattcgaccggctcaacgagctttccggccagtgcgttgccatcaacggcagcctcggcgtttttatcgaagacgccagtatgggcagcatcctcctgcagaaaggcgaaagcctgggatggccagtcaacaaaattgagtccgccctgaccagcaaaggaaaggacgagcgcgccattatggcctccggttatcactaccgcgggctggcgaaaatatcccgatacgccttcgagaagacagccgtcttcaagggcgagacagcaaaccatctgcacaagcaggtttcccgattccaccttgccgacaagaacgcgcataaacgcgccgatgacttgctcgatgattatacctacgggctgatcatcgccttcggcagcagcgacgcaatctga

SEQ ID NO: 393602 - DNA, 1422 bp, Salmonella enterica
atgaacgaagacgatttcgaaatcggcagctgctctcactcagagttgatggcattgctggacagcgacgacatccagccagggtcaacggctggctatcagacctgcaaaacggtttacctctaccacccgctgggcggaaagatggtggatcgcccgattaaaatggcgatgaatgagccgcgcaccgtccatgttgcccagtcctatggccttgagcagcgcctgcgtgacgcgttcgagcgagaatggaaagcgatgggtgctaaccagcacatcgccaacgccgcgcggatcgcccgaatttacggcgtatctgcgattgcaatgctggtggataaccaggagccgaatgaatcgctggattaccgcacgctgtacaagcacaacgtcagctttaacattctcgacccgctgaacaccgcgggcagcatcgtgctgaatcaggacccgaatgctcaggacttccagaaagtcgacggtatccgggtggcgggcaagccgtatcacaaatcgcgctgcgttgtcgtgcagaacgaggatccgatttacctcgcatacaaccctgcggcgttcggcttcaccggccgcagcgtataccagcgagcgctctatccattgaaatccttcatccagaccatgcgcaccgacgacatggttgcggtgaaaggtggcttgctggtgacgaaaattaaggggccaagctccgtcgtcaacaacatgatgcagaagctcagcggcattaagcgcatgatgcttaagcgcgggaagacgggagaggtcctgcagatcggcgagagcgacaacatcgagtcaatcgacctgagcaatctggaaaaacctctcgactctgcgcgtaagcacatcctggagaacgtggccgccgccgccgacatgccggcgatcatcctcaactctgagacgttcgcccagggcttcggtgaaggcactgaagatgcccgcgccgtggcagtatacatcgacaacatccgcgagtggctggactcgctttacgcgttcttcatccgcgtgtgccagtaccgtgcctggagcatagagttcttccagtcgttacgcgccgacttcccggagctgaaaaacacctacagcgtgtatttcgcgagctggataaacaacttcgagtaccgctggccatcctctctgaaagagccggaaagcgagaaggtgaaggtcgatgagacgcgattcaaggcgatagtaagcatgctggaagtggtgctgccgcagctcacagcggacccggagaaccgcgcgacacttatcgagtgggcgtgcgaaaacgccaacgccaacgagaacctcttcccgcagcggcttaacctcgattacgactcgctgaaagacaacccaccgccggagccgccaaaagctgaagagccgggcggcgggatgatgctatga

SEQ ID NO: 393603 - DNA, 825 bp, Salmonella enterica
atgaacactttcacccgaacagtgagagatgcggtgaagttctttctccgcaacggctattcgtcccgggaagagctggaacgctggcaggcaattatccgccaggccgccgaaagcgaaaccgccgatgactacatggcgatggtcacccgcaatctgacgaaagcatacgacctgcaggtggggcgtgctggcgcgctgaagcgccaccagggcatatcccggtttacactcaactaccttgagccacagctgaggacagagctcgacaggaggatcctcgccagcgccgaccttatcaagctcaaccgcaaaaaagccatcgacaccacgttatcgcggtttagcggctgggccagcagcattccctctgccgacagtattgcgctgactggcattcagggaacaatgcgggagacggcagggcacattcagaaggccgccgagaaggtggactatgaagcgcgccgggtgatgatcgaccagaaccataagctgatagccaacatcgacaacgtgatcgcaaccagcaacaacgcgattgcagcgatatggcacagccactggcggcgtcctggctatgacttccgcgaggaccacaaggaacgcgatcagctgtattacctgattcgcgggaactgggcgcaaaaaaacgggtacgtgaaagccgggcctgccggttacctcgacgaaatcactcagcctggcgaagaggttttttgtcagtgctacgtgacctacatctacaacattcgaagcattccagaatacatgctgacccagaaggggcagaagttcatggagtcgatgaagaaagcagcatag

SEQ ID NO: 393604 - DNA, 1620 bp, Salmonella enterica
gtggctatttttggcagcgggataatgttccgtcagggtaagttcgtcttcctgatccagcgctcggatgatggcacttggtgtcagcccggaggcacggtagagcagggagaactggctattgatgccgcgcgccgcgaggtgctggaagaggtgggttatcagtacgatggcccgctgatcccgcacagtgttcacggtgattatctgacgtttcgcgccgaagtgccggagagattcgaagcgaagcttaacgacgaatcgttggccgccggatggttccacattgacgatctgcctaaaccgctacatcagccattcgctgagatgctggcacggcaggcgctcaatgaaacggaagtggccgcactcatcgctgacgggaccttaagcagcccgcaattctttatcaatatgtggatgttcgccatccgggtgaccggaacgggagtaacctggcgctctgcagatcaacagatggccttccgtaacccggacgactatctcaccccagagtttctccagcgggttgccgggctaccgctcatatggctgcacccggagaaaaatacgcttgatagcaatgaattcgccaagcgcgttatcggcaccctgacaaatagttgggttgctgacaatggtgaggtgtgggcaattgcacgcgtatatgacgccgaggctgccgaaatcatggcaaccaggcagttaagcacctcaccaacagtcaagtttgttgaggttcccgattcaatcattgagatcgacggtcagcctctactggtggagccatcccctgagttgctcgaccacgttgcaatttgtgaacagggcgtatgggacaaactccttgcccctactggtgttaaatctgattccattccaaacgaggctgaaaagatggacgaggaaaaaatcgtagcgctaatcaataaggcgattgacgcacgcatggctaaggctgactcagaagcagcagacctgaaagccaaggccgatgccgaagaagcagccaagaaagaaaaggctgatgctgaggagaaagaggccgaagaggcgaaagccaaagctgacgcggaagagaaagccgcgaaggaaaaagcagacgctgaagccaaagagaaggccgatgccgaagaggctgagcgtatggcgaaagaaaaggctgatgccgatgtccgtcgcgaaatcgcagagcttaagtcgcgcattccaaccgagttaagcgatgaagagcgtaacgaagtcgccaacgcacaggtgaaggccgatagcgtgttctcctgcttcggtaagcgcgcgccggttccgctgtccggtgaaaagccgctggcatatcgccgccgcctgatgatccagcttcaggaacattcgcctgacttcaaaaccgtcgacctgtcctccatcgctgactcagccctgctgagtgtggccgagaagacgatctacgccgacgcgcagaaatcggcaatcctgtctgttgggcctggcatgctgcgtgaaattaaacgcgctgatgcaactggtcgccagatcagcaccttcgaaggcgatcctgctgtcacctgggctccgttccagtctggcaagcgtcaggtcaccagtttcaacaaccaggcttaa

SEQ ID NO: 393605 - DNA, 861 bp, Salmonella enterica
atggctaacttatctcttaacccgatggcaaccacgaacgcgctgggttctttcggtgtgcagtccgacggttatattcagggcgtggcgctggatgacccggcgaaccgctttaatctggctgctggcacagtggcaccaaccgaaaccaaacctctgtggggtgggctgcccgtcgccgagcttcttccaggtaccagctcaagccctcgcggttcgtttatccgccgcgcggtgtctgttgccgaactggaaggctttaccgtcttcaatcaggcgcacaacggcctgaccactccgcagtctccggttccgctgtacgcatccggcatgagcgtttcctactatcgcctgggctctagcatgcgcattccgctgaaagcatctgcgcaggttgttgcgctgggtaccgctggcgcttcagtgaaaacaccgctggcttgggatttcgtgaacaaccagatcaccactgcggcggcagctggcttcgccggttccgatatcgcgacaactgatgtgtcctatgcctctggcgtggctacagcaaccactgcttcagcgcatggcctgacggctggccagtacgtaaaaatcagcggcgtagcgcctgctgcgtacaacggcactgtggtggtgctgtctgttccgaattcaaccactttcacctacgccccggcaacagcaccaggcggcgctgcaactacgcagggcaccatcggcgcagttacgctttccgacatcacgctgccgctaaaagtgctcgccatcgaatcaggtaactccaagactgtcagctatgacagcgcgactggtttcctgacttggaataacaccgacagctgcgcgctggtcttactttaa

SEQ ID NO: 393606 - DNA, 1032 bp, Salmonella enterica
atggctgcaattacccccagctacaccatcgtcaatccgtcgtatatcgcgccggagatgatcattggttaccagcaggcgtcaggtgcgtttgaaaccatcgccagcggtaacccgcaagtccgtctcggcgtaggcgaccagtacgtctacatgcgccgcctggacattcgcacccaaaccacttccagccagtccggtaacggtaaccaactacctagcgtggcgctggaagcgaagatgatttccaccccaacctacctgttccgctgccgtggcatttacgatcaccatgacatggccgctgccggtaactggaactttgcactgccggaagctcagcgcctgggcatgcgtcagggcatctttcagggtctgcgctctgctctgttgtacggtatgaaccctgctggtggtgaagggctgctcaacaccgccggcgcaaccacggagtccctgcctccggacagtagcggaaacactactgttctgacctacgaccatgggcagatggcggtttacctgcttggtcatattcaggctgccatgactcgcaccatgcaacttggcatccagcagcgtgtcgttatcctgggtccgcagcgaatccttgggaccatggagattcagcaaatcgttcagttgacctcttatcagcgccctggtggtggtactgcgtcagtgagcggaaccacgaagaatgttgctaaggatgcaggtattcaggttgattgggtatacgacgataccctgatcggtgccggtgctggcggtactgacgcggtggtgatttcaatccctgaggtggaagttcctgtggttaaccagactgtgaacaccaacgaattcgccaagctgactccgtctcttgccgcgaacgcactgatgtttaccgacatggccgcgccgcgcgaaatcccgacgcctatcgctggtggcgctatcgatgttctgtccgaaatgcgctctaccgcaggctgggccgttcgtccggaagccatcaccatcctgtccatggcgtacagcgcctga

SEQ ID NO: 393607 - DNA, 483 bp, Salmonella enterica
atgaaactctatatcgctaacaccaccaagcagcgccagatttttgcctaccgcaagcttgagactggtcgccttattcagatcccgattaaccacggggatcagatgatggtgctggatggcacaactgaagagattgatgcagtggtgcagcatcaccaggtttacggactggttgactcgacaaaaatcgaccagagccaggcattcgtcggcctgtgctacagcctgaacaagcctgtatcagcgtcggtaatcgaaaaagcaattcgcgataacgacgttcacctgacgcgtggcgcacatggccgccgtcaggcatcagtagcagctctggatagctctctgcgtgaaagtggtaccggctattccggagaaatggaagtcagcgtggagcaggcaaagtcccgtgatgacaaagacgatattgaagaagtcaacgaaacaattgcgactcaaagagccgggagcaataaaaaatga

SEQ ID NO: 393608 - DNA, 429 bp, Salmonella enterica
atgaccacgagcctgtcgggatttattgaattcgttcgaactgacatgggcgtgaccgccgcgcaggttcccgatgactcgccttcattttccctggcttataacggcgcgatcgaatgggtgaaccaggagatcgcctgtgtcatgccgaatctgtataccgttgctgtgtataacctcggcgcgtcgttcttggtcaactacggtactgagtcggtatttgctgacttcaggaaagagtatggcctgaataatttcaaggctggtgtgattaccggggccggggacaactcaaccagtgcgcaacgtctggtgcctgacttcttcaaagatttatcgctggctgatttgcagatgttacaggacccatgggggcgccggtatctgatgattgcccagcagtttggcagcctgtgggggctgtcatga

SEQ ID NO: 393609 - DNA, 435 bp, Salmonella enterica
atgatcacctttcaccttggggtgattgatgtcccctacgaggacgagaacaccacgaccggagacgtcgccgagcatctggaggaaaagtaccagatcatgcagacgtttttcgacaggtacagcggtgacatcgccgacctgatggcaaatgacatgtctgcgtcgctggaaaacatgatggctggcaccccaccagctaaagacccactcgctgagtcgatgtcacggatccatgaccttttcgttgctttcctcgacaacacagaaatgaacggtttgcccggtgttccaacgcgccgagcgctggaggggatatccagacgattcaagaacaaaaatgggccgccacgcccgtcattcattgataccggaacctatcaggctgcgatgcgcgcctgggtgagcggggtgttaaatgccttccctgagtga

SEQ ID NO: 393610 - DNA, 315 bp, Salmonella enterica
  misc_feature (12)..(21): n is a, c, g, or t
atgacgagatannnnnnnnnncaatgtagcgagattaacaataacccagaattgaaagggaaaattgatacgcttaaagaggtcattactcatcatccacaaaaagaaaaactggctgaggttgcgctgcagtttgccagagaggcgggtttgaccaagctgaaagcggaaactgattatgtgttaagtagtatgctggatggccttatcgaagacggcagctggcgtaatggcccggcttttgagtcatacctgaataaaccaggcgtgggccaggttattactactgttgatggtctgcacatgcagcgttaa

SEQ ID NO: 393611 - DNA, 405 bp, Salmonella enterica
atgccccgatattataaaatcagccgctcctgggagggccggagatacatatacaggagtgatgtccttctggaagctgtcatcatctcagatactcacctcaatacagagggaacactgattcaatggttaaatgacaaagaaaagggaaccactaccgtcgattataaaaatatcacgtgctggtattacggtggagtgtggctgcattatgttattaacaacagtaccctatctttatatatgcactcaagtggtgaagatgcttttgattcgctccatttctgtgctcgtgaaatagccaggatattctataaaaatcatcctgggattaatatccggtggattgagcatcctcacaagcgtaacaatctcagacaaacatcaataaacagtgagtcataa

SEQ ID NO: 393612 - DNA, 465 bp, Salmonella enterica
atggccccagtcgcgcagcgagtccatgttgccgagatacagacaggactccagtccctgcgcgatattggcgatggcgcgggtaatcttacgggtgacgaaggtttcgccgcgacgcggagattcgtggttaaacagaatgccgttacaggcgtaaataccgtaggattcacggtagttgacagtgatccagtaggcgtacagtttcgccaccgcatagggggaacgcgggtagaacggcgtggtctctttctgcgggatctcctgcaccagaccgtacagttcagaggtggaagcctggtagaaccgcgttttcttttcaagaccgaggaagcggatcgcctccagcaggcgcagcgtgcccatcgcatccacatcggcggtatattccggcgactcaaacgacaccgccacgtggctcatcgcgcccaggttgtagacctcatccggctgcacttcctgtaa

SEQ ID NO: 393613 - DNA, 1053 bp, Salmonella enterica
atgattaaaattttgcacatacatcttagcagtgaaattagtggtgctcagcgtgtatctttggatgaaatgaaaacacttagtaaacaattccagcaatctatggtttgttctaaggctggaaattttacagctcaggctaatgaagtgggtgtacaaacttttgttataagaactctagtacggaaaatttctttttataaagatcttaaatcctttattgaattatatagactaattaaaaaggaaaaatatgatattatccatacccactcatcgaaaactggttttttaggacgacttgcagcaaaactagccggaacaaaaaaaatagttcacacggttcatggtttcgctttcccatctacaaaaaataaaatttttaaagctatatattttcttatggaatatatagcttcgctatgcacatctgttatcattgttatgaataagaataatgctatagatattagtaggtttgataagttggttacaaatggttcatcaatgaatagtaaaaaaagaactaaaaataaatttaagcttgttatggttggaaggttatgtgaacaaaaaaacccattattggttctcgaggcaataaagaaacttaataatgatttttccatagattttataggcgatgggcctttaaaagaagaagtacaaaataaaataatagaatatggtatagctgaaagagttaaattattagggtggtgtgtttcggtagaggatattttatataaatatgatctttttgttttgccatcaaaatgggaaggaatgcctttggctattttagaagcaatggcagcaaagatccctgttttatgttctgatatcgacgccaatcgctatctcttaggtaagacatctggttttttatttaaaagcgaagatagtgacgattttgctaataaaattaaatttctttatgaaaatgatgaaattcgtcaggctgctgttcaagaagcatattctttagtagtcaatgattttgatttatgtaaacgaactaagatcttggaatcaatatatacacataattaa

SEQ ID NO: 393614 - DNA, 966 bp, Salmonella enterica
atgaataaattatttttctcgatgctaattgtaatacttcctatggatgcaattggtgctgtttatatgcagtcaaacggtagtggccgtgttaatgcgactatttcgaatgtggaaaatggtgtgggacgtaccatattaagttttgtaagccccgcaggtgggcgcgggtatggtatgtattgtagtcaatccggcatgcaaagatataattatgttcgtgctttttcaatattagagaaaacggtgactgtcaaaaatagtttgacaggtgtgtcatataatgttcctgtaacctgtccctcttgctcatattcaggtgaaaatggctttctgaatgttagtggtccacaatcttaccttcaagatcatgtatgctatagtggtttaacaccagatccatatggcgctacgacttcgcttcagacaacagtatatatttcattgcaagactctcgtataccagctggtcgttatgaaggaactatagtggggagcgttggcgaaatatccgaatattatgcgggagagtatgttaattatagtaatgaaatgataaataaaggaatgcaaacaggaacagcaggtgtggttgcaatgaaattcgatgtaattgtgccagagtatactgtatgtacatctgcaagtcctatattaatagaccacggctcgctcacgcctgaacaagtgcgcgggaatgcaaggagtcaacaattctctatttcatgtagtggtccggcgaatataaatgtatctttgagtgatttaatgccaaagattggtgatggtatttatagtaaattgagtctttctgctgacaatgtgacttggaaagataaggtagataccattttaaatgataggggaacacagattatatatatatcctcgactctagaggcaagtggtgatatttatgctcagtctttaagtgggtattcagtaataacaataaactatcattaa

SEQ ID NO: 393615 - DNA, 390 bp, Salmonella enterica
atgaagaaacatattgtattgctgggagctatggtcgcattggctatgtcagggtgctcgatgagggataaaaaaataccattagtctcccagaataaaagtccgtcagtgcaaacgggggggggctctgactctctggatgatgcggtccggatggagcggtgtcggcgtgaactggatgcgctgaagaaaataaacggagcagtctatgcaaagcgtaaacaagagtttgatacgctgatgttcggtgcagaaatttatacaggtgtaagggaagatgtttctacgtatacacaacaggcggttgatgcatattatcgctaccatgctgataaactctgtgccgatatcgcaatagatgtgctaagtaatttggcaaagaagaaataa

SEQ ID NO: 393616 - DNA, 558 bp, Salmonella enterica
atgaacattcttttaaaagtaatatgtccggtggtggttggtggggtgatgcttaatatcaacagcgcccaagcgatagatgtaaatgtcaggatcacgggggagatattaatcccgccctgcaaaataaataatgatgccgttgttaacgttacatttggcaagatcgctttgcagaaagtagatggcgtacagtcagctgtaagtaaaacactggatgtgaactgtgattactatcagggcacaccgtacatagtggtggcaggcaatgcaatgacaggagtggtggataagaatgtactggaaacagcgggtgataatgcgggacgattggggattgcattgtatcaggggaatggagtgaacacctctgctccgatgaaaattgggacaggaggggataaaggtgcttacggttatccagtaatccgggggctgtcaggcagtggtgcaagcgggcagtttacattcactgctgtgccgtggaaaaaaagtaccgcgcagctgcaggccggacagttcagcgccactgcaacgatgagcatcagttatctttga

SEQ ID NO: 393617 - DNA, 1227 bp, Salmonella enterica
atgaataggccggaacgcttttttttaaggatgctgcagtttttctccctgctgcttattctggcggttgcgctggctggtgggatgttaatcagctgtcagtcagcacaggcagctgaaaatggttcccggataccaggcgtactggagtatgcccgtaaatacggtgaagaaaagcagaaagcagcggcgacgcagagtgggggtaaaaaagcagagcaacgccctcaggcggtgagaaaggaaagcgcgaataaagtcccgtcggaaaccagactgaggcaacgtctccgccagcaggaggtgatgctggagcagatccggcgggaaaaccgacagttgcgtcaacagtgggcaaaaaaggccggggcggtctccggtgaaaatgggatgttacagaaacagatagtaacactcagtgctgagctgaagcaactgcaggtggtgcagaaatctgcacaggaagagcaggcccgcctgaaatcgctgctggctgaaatgccgatagcgacggcggatgaactgaagaagccggtagcccggcaggattatgctgcaggcgtgatgactggtcgcgacctgttggtgatgcaggaagggcaaggtctattggggctgaagacggacaaccgtctgctgctggctggtctacgggatgccctgaatcagcaggtgaagttgaattcaactgccctgcaggaggctttgtcggctgcagaagtccggacccgtcaggcacgggaacggatagttatcgctcagaaggctgtcggggagaaatatcttgcagcgttcaggaaaggaaaaggtacggaaaaggatgacagcgggttctggtaccgactggagtatgccggagacggtgagcctatccgtggggaggatacccgggtggaagtggtggtgaacgaaaaactaacggacggcagtgtggtggaggatatggatgcgtcgggacgcagtctggtgatgaagctgggggattaccctccgctgttccgccgggcacttgaacggatgaaaaaccacgccacaatgacactggttgtgccgcctgagctggcctacggggatgaagggtatccgccgaaagttccccctggagcgaccatggtttataccctgcgggtggagagcgtgacggcagcagaaaaaggtgtccccgggaaagacggggaaaacagtgctgcaggtgagaaaaatgagagtcgtaaaccgaaattataa

SEQ ID NO: 393618 - DNA, 573 bp, Salmonella enterica
atgaagcacacggtactgaagagctggctccgcgcgggattgttgcccgccatagtatcaatggccctgtccggccaggcacaggcggtgacggtaaatttcgacggcgaactgcttgaccgtccctgtcaggtggcaccggagagcctgcagcaggacgtcatttttctggagcgacccgcgcgggatttctggatggcacccgcccgtagcccggtagagaaattcactatccggctgatggagtgtgacaccacatccatctggaaagtggtcaaactgaaattcagcggcacgcctgaaaacaacatgacgggccaggccgattattttctgaaagtgacaggcgataacgcgggaaaactcgcggtgggtctgcttgataccgacggaaaaacacctctgaaactgggcgagtttcagaataacggtcagggaacgcagatagatggccgggatgtgttgctgaagtttggggcttttgttcaggcgacgccggatgcggtcacacagaaaagtgtgcggcctggtcagtatacctctgctgctaactttgagttgatttatgaatag

SEQ ID NO: 393619 - DNA, 579 bp, Salmonella enterica
atgaaaaaaatgaccataacgccaggtctgacggccctgatactcagtacagccatgaacagcgtacttcatgccggagaattactgacccgggatgatttttatctggcggatgaatcccggcacgtcataagtaatgagcatcatggccggatgggggagctggaggtacgtggtgccctgctgtcatcaccctgtacgctgataacgaatgaactggagctgcctctggcacgagaaccgggggggggagtgagccgttatcccctgcagctggcgctgacggggtgtggtgacggggatgatgtaacttcagcctcgacgccggccggacgttcttcggtgatggtagtttacagcgcactgctgagcggtactgaagggggcgtactccaccccgctcagaggatggtgggggcaggcagggccatactgcggggaggggcgtcgcagatgacctggtacctgacagaggctcagcaacttgcgctgcaaaagtcagtcaggggactggacagagcgccttttaacagcccggtatccggctcgctgttgcgactgcggatggattatgaataa

SEQ ID NO: 393620 - DNA, 732 bp, Salmonella enterica
atggtgatactgaacccggtgatgagaacaacactgatggcggtagcgtgccaggccgtggtcccggctgcgcaggcagcaatatcgcttgaccggacacgggccatttttaacggggctgacaagtccatgacgctgaatattgccaacgataacaaacagctgccttatcttgcacaggcgtggctggaaaacgcaacccaggaaaaaattacggcgggtcctctggtcgtcacgccgcccgtacagcgtctggagccgggggcgaaaagtatggtgcgtctggcctccacaccggatatcagaaaactgccacaggaccgcgagtcactgttttacttcaacctgcgggaaattccgccgaagagtgaaaaagccaacgtgctgcagattgccctgcagaccaaaattaagctgttctatcgtccggccgccattcaggcaaaacccaatgcggtatggcaggaccagctggtgctgaacaaaacgccaggcggataccggattgaaaacccgacaccgtattacgtgaccgtgataggcctgggcgggacggagaaagaggcaaaggaaggcaaatttgatgccgtgatgctggcgccaaaatcagagcagacggtgacggccggcagttacgggacgccctggctgacgtatatcaatgattacggcgggcgtccggccctgcagtttcagtgtgcgggcagtcgctgtacggtggtgaaaaaataa

SEQ ID NO: 393621 - DNA, 2523 bp, Salmonella enterica
atgataatgaataataaaaataccccctttaaaataaatcggctggcgcttgcggtactgatgattatgttctgtgatcaggcacaggctgtggattttaatactgacgtgctggatgctgcggacaggaagaatattgatattggtcgtttttcgcaggccggatatattatgccgggccagtatcagatgcaggttatggtcaatgatcagagtatttcaccttctgcgtttacggtttcggtggaggagccagcggtaaatagtgccgcatccgataaaaaagccctgcctcaggcctgtctgacgacagaaatggtggacaaaatgggtctaacgacggcttcccgggagaaggtgactttccgtgataatggtcggtgtgccgacttcagtgccctgcctggcgtggaaatacggactaatccggctgagggaatattatatattaatatgccgcaggcatggctggagtattccgatgcttcttggctccctccttcccgttgggacaatggtattcctggacttctttttgactacaacatcaatggcagtgtgaacaagcctcatcagggcaaagaatctcagtatgtcagttataacgggactactggggcgaacctgggggcctggcgtttccgcgctgattaccagggatatctttcacataccaccgggcagagatcgggaacggataaccagtttgactggagtcgtttttacctgtacagggcgctcccgcgctggcagtcaaaattgacgctgggtgagaactataccagctcagaaatcttcagtacctggcgctataccggtgccagtctggaaagtgatgatcgcatgttgccgccgaaactacgtggttatgcaccgcagatatcggggattgcggacaccaacgcgcgcgtggtggtttcgcagcagggacgtattctttacgattccaccgtgccggcagggccgttcaccattcaggacctggacagctccattcgcggacgtttggatgtggagatcattgaacagaacgggcagaagaaaaactttcaggtggataccgcgtatgtcccgtatctgacccgaccagggcagattcgctacaaactggtcagcgggcgttcacggacttgggagcattcgacggaaggaccggtttttgtcggcggcgaaatgtcctgggggatcagcaaccgctggtcgctgtacggtggcggtattattgccggggactacaatgcgcttgcactaggtatcggacgggatctgctgcagttcgggacactgtcagctgatgtcacacaatcggtagcccggtttaaagacgagggtgaccggcagggtaaatcctggcgtctgagttattccaaacgttttgatgaagctgacgccgatatcaccttcgcgggataccgtttctctgaacgcaactacatgacgatgcagcagtatctggacgcacgctaccggaatgactttaccggacgtgagaaggaactgtacaccgtttcgctgaacaagcatttcgaagactggcagacctcagtggggttgcaataccagcatcagacttactgggaccgtggagagtcggattattacaccctgtccattaaccgctatttcgatgcctttggtctgcacaatatttctgccggtttgagtgcatcccgttccaaataccttgaccgggataatgattctgtttttctgcgcctgtcagtcccgctgggaaccgggactgtcagctacagcggcagtatgagtaatgaccggtacactcagatggtcgggtacagcgacacgcttaataacgggctggacagctacagcgtgaatgcgggtctgaatcatggtggcagtgagcgcagtcaggggcagatgaatgcgtattacagtcacagcagccctgtggcaaacctgtcagcgaattttgcatcggtgcagaatggttacacctcctatggcatcagcgcttcgggcggggcaacgctgactacaaaaggggcagcactgcatgcgggagggatgaatggtggaacccggctgctggttgataccgatggtgtcagtggcgtacctgtcgacggtggccgggtttacaccaaccgctgggggctgggggtggtgacggacgtcagcagttactaccgcaacaccaccacggttgacctgaataacttacctgatgatatggaagcgacccgttcggtggtggaatccgtcctgaccgaaggggctatcggttaccgggagtttgaggttctgaaaggagcccggttgttcgcggttctgcgtctgtcggatggcagttatccgccgtttggtgccagtgtgacgaacccgaaaggtcgcgagctcgggatggtgggagacagcggactggcctggctcagtggtgtcagtgaaggggaaatcctgaatgttaactgggatggcagggcgcagtgtgccgtggacattccgaagaagctggatccggctcagcagctgttgctgccctgtcgtcaggcgacgcgttaa

SEQ ID NO: 393622 - DNA, 585 bp, Salmonella enterica
atgagctggcgagctgtgatgctggtggtgatggtcgtggggggggctcgggcttttgcctccggcgtatttcctccgcctggtatatcgctgccggattactggggagaagataatgtctggtgggaagggcggacttcattccacggacaggtcattgtaccggcctgtgcgctggccatggaggatgcctggcaggtggtggatatgggagcaacaccagtcagagatttgcagaatgtttacgccggaccggaaaaacgctttcagctacgtctgcgtgattgtgaactggccggtacagggaaaaaggtgtttaccggtagccggatacgggtcacgtttgatggcgtggagggagagacacccgacaagttttccactgtgggccaggcccggggggtgaatctgcagataatggatggtcaggggtataccgcgcgcgcgggtaaagtgatgccggcacagttgctggaaggtaatgaacaggggctggattacaccctgcgggtggtacgcaacggtgagccattgaaggccggggattattctgcctccctgcgttttaaagtcgattatgaataa

SEQ ID NO: 393623 - DNA, 519 bp, Salmonella enterica
atgatgactaaatctctcgttgcaggtgcgctgaccgttctgctggcttcttttggtgctaacgcagccaatcagggacagggcgttgtgaacttcaaaggtaccgttattgatgcaccttgtagtatcgctccggaatctgcagaccagaccatcgactttggtcagatctccaaagcgcagttagccaatggtggtacttccattcagaagaatgtagacatcaaactgactcagtgtgacccggctgctctgaccaaaggtgtggcagtgacgttcaccggtaacactgcgaccggtcaggcatcagagttggcgacaacgggtgccaccaacacggctatcgtcctgaatggttacggcagcgatatcacttttggtacggcgtctgaccatgtgaaactgggtgcaggagataacactctgcgcttcacctcctgggtcaagcaggctacaggcaaaactgtcgcagagggtgacttcacggcgattgcgaactttaacctgtcttacgagtaa

SEQ ID NO: 393624 - DNA, 624 bp, Salmonella enterica
atgtccaaacgtaagttccttactcgtaatgaagttttttccatgctgaaggcttcccttgacagttcgcatcctgagcgtaatcaatgcctgatcctgatggcctttatccatggctttcgtgccagtgaactcctttccctgcgtctgtcagattttgatttacgcagtcggattatcctggtgactcgactaaagaatggtttttccactgtacatcccctgtccccccgggaacttagagtgctgcaggactggttgcggatacgccagcagataatttcgcagggccggtatgaagatgaggggtggctatttatttcggatagggctcccagcctgtcacgccaacagttttacaatattatcagtcacaccgggcgggctgccgggctgactgtaggggcacatccccatatgctcagacatgcatgtggttatgctttggcagataacggggtggatacacggttgatacaagattatttaggacaccgaaacatccgacatacggtcagatacacggcctccagtgctgctcgatttgaaggaatatggcaacctgcaaaacgcaaaaaggggcaacattctgacccaaaatgtaaacctactttttacctgtga

SEQ ID NO: 393625 - DNA, 522 bp, Salmonella enterica
atgccattatgcattacctccaccatcacccggctgacatcggtatcaatattgtcgagggtaaagcccggcgttttaacgttggtgatattatcgcccgcgatgccgctgtcatccgcgctgtccagcgagagggtcggtacagacagagtggtatcgatggtgaaatcgagtgtctgtgttgtcttatttcccgcctcatcggttgcttccaccgtcacggtatgggaaccatcggtcacatcatccggccagatatattcccaggcgcctgctgtattctgcgccgccgttacccatgtcttgccgtcgtcaatgctcaggcgtacctcgttgacatccgccggtaccgtcactcgaaaatgcggacgcacgttgttggtcagattgtcattggaaataccgctgtcgttaaccagttcaatactgtcgatcgcgatttgcgtgtccaccctcaccgtcagcggcgcggaatggctggtgttccctgccgcatcttcgactgacacgctcagggtataa

SEQ ID NO: 393626 - DNA, 249 bp, Salmonella enterica
atgggacctggaattatcagtttagtaataaatttcttcagggcgcctatgatattgaaattatttctcaggatgccgccggtaataaatcctctactgttaaatattcttttactattcaaactgaagttgtacttccaaaagcggaactcgatgccagtgatgattccggtgcaaaaggcgactggattaccaataaacataatgctcttacattactgggaacagcggataggtttgctaccgtaa

SEQ ID NO: 393627 - DNA, 495 bp, Salmonella enterica
atgtttatcatctttgccggattacccggaagtggcaaaagcaccatagctcatgctctcgcgaaggaacttggtgccgtatacttacgtattgatactatcgaacaggcaatccgttgcgcagaaaatcatgataaagagacgggccctgcaggatattttgtggcatacgaacttgcccgggataatctgaagctgggtctgaatgtcatagcagattcagttaacccactactacttacacgagaagcctatcgggaggttgctttatctactggctcaaaattcctggaggttgaggtgatttgttcagatgtgaatactcatcgttcacgtgtagaaagcaggatttcagatatcgaaggattaaaactaccggactggaatgctgtcatcacacgtgattacgaacaatgggatcaggagcatttgataattgacagttcaaaatcgtcggtaaagcagtgcgttgaaactatcattgatgccttatga

SEQ ID NO: 393628 - DNA, 654 bp, Salmonella enterica
atggaatccattattaatcataagtttactgatgatgaccggaacttgttagctacgtttgttcccttcattgactgccttggcgcgtttttgggtgagtactgtgagattgttttgcacagcttcgaggatttacaccattcagtcatccacattgtgaatggtcatgtgacgggcagagagccgggagccccggtaacaaatgtggcactggaaaaacttgcggagtttaactcaaccgatgatatgtgggatgtttacttcagcaataagggtatccggccctttaaatcttcctccacactcattgtgaacaagaataaatctcctgttggcatgatatgtatgaactttgcgcttgatatgccgctgaatgcttttgttgataattttgctaaatcaaataattgtaaaaacgaaagctttactcaggatattaataatctggttcagagccatcttgaaccggttaaaaatatgatttatgccaataatagtatcccaagtaagagcaagaattatgaaattatcaaggagttgaactctattgggttgtttgattttccggtgactaataaaattgtatcatcaagcctgggaatcagcccaaataccgtttataaacacttgcgggcattgaatggtaaaagttaa

SEQ ID NO: 393629 - DNA, 330 bp, Salmonella enterica
atggatattccacgtatttttaccatcagcgaaagcgaacacaggattcataatccgtttaccccggaaaagtatgccatgctgggacgtgttttacgcatgaagcctggtacgagtattctcgatcttggcagcggctcgggagagatgctttgcacgtgggctcgtgattacggtattaccggtacgggcatcgatatgagtccgctcttcacatcacaggcaaagatgcgcgcacaggagctgggcgtcagcgaccacgtgtattttatccataacgacgcagcgggtttcatagactacctccgttatgttctgtctggattgtag

SEQ ID NO: 393630 - DNA, 885 bp, Salmonella enterica
atggatctcaacacgttaatttctgttaccggccgactgcagctctctgctgaagaaagcaaaataccctgggacgaaccggcgttcagccagcgcatgctggaaaatcatttgtcgcaggagcatgactgggccagtcgcagacagacagtgattgaacaacaggtaacatggatagcgagtcagctacccgcgggcgcacgcgttctggatctcggctgtggccccggcttttatacccgccggctggcagagcgtggattcaggtgcacaggtgtggatttttcaccggcctccatagaatgggctcgacagcaggcgcaggccgctgaactgaacattgattatatccaccaggatattcgtacttactggccggaagcaccgttcgatttcatcatgatgacgttcggagagctgaatgtctttagcgttgctgatgcacgtgcgctcattactcgttgtgagaagtggatgaagccgcacggcaggttgctcgcagaagtgcataccttcgatgaagttaaacgtcagggcatagcaccggcgagttggcagcgttgtccgcaggggttgttccttgcggtacctcatctgttgttgacggaaaacgcctgggatgaagaaacccaaatcagttcgacattgttctgggcgatagaagaaaacggtcgcgttacccggttcggcagccagattacagcctggcgtgatgaggagtatttccgtctgctcggtgatgccggattcactgtggtacaaggcccggacagtcactcatggccggtaagtgagacatttgagggcaggttgtttactttgctggctgaaaaatcaacaaatcagatttccccggacatacaaccgaatgcaggagttaagtga

SEQ ID NO: 393631 - DNA, 393 bp, Salmonella enterica
atgttttcttatatcatgcttgggatcaatgacttgccaggcgccatcagattctacgacccattgatggaattactgggttatccaaaggcaggccgtaacgaagaaggtgcttcctgggggacgttttgtgataattacacaaccggactgtgcgtcggaaggccgtttaatcagttgccggcgagcgtgggtaatggaacgatggtggctttgaatgcccgctcgtttgaacatatccagcaattgtatgcacttgcgatcagccttggagccagagatgaaggttctccgggtcacaggccgcaatatggtcaaggattttatagcgcatatgtacgcgatccggatggaaacaagttagcgtttgtctattacgataatgcgggctga

SEQ ID NO: 393632 - DNA, 372 bp, Salmonella enterica
gtgccattaaggtttacagccacagattcgcatatcagcgaatatcctgttcctattactttcacccgtggtaccagcctgataattcacgaaaagtatgagggagaggaaggctgggataactggttctactgcataattcccggtcatacttgcggctggatgcccggacagatcatcgagagatgtgaggggacgtatcggggcattgcaagggaggattacaacgcccgggaactggaggtgaagagaggggatgaggtttacggactaaaatcactcaatggctggatgtggcgtgagcttacttctgactggcagactggatgggttcctctgtcgttgctgcgtaagcatgggaagaaaatctga

SEQ ID NO: 393633 - DNA, 561 bp, Salmonella enterica
atgcgtaaatatatttcatatgaagaatggaagcagttttttaacgcaataaaaggaggtcctaatgaacttagggataaagctatttttaatatgatatatatacatggtctcagggtcagtgaactgacaggtgtcaggataaccgacctggatttgacgaataaaacaatctatataagacggctgaaaaatggtttttcaaccactcatcctctgcagaaagagtcttaccaacttataagaaaatggcttaaggtaaggccattttacattaaagtcgaagataatgactggttgtttcttacatcacgtggtgaaagtatctcacgtcagtggatatataagctgacccgaaaatatggtataaaagctgggttgccacttaaaattcacccacatatgctacgtcattcctgtggctatgcattggcaaatcagggccttgatactcgcttaatacaagactatctgggacacataaatatcaaccacacggtacattatacggcaagtaattctgcaaggtttatgcgtgcatggcaacactgcgcggattaa

SEQ ID NO: 393634 - DNA, 135 bp, Salmonella enterica
atgcactgttttggacaggtactaaaaaaaggtccaacctttacagtttttaccgaaaccaacaccaaggatgtctataaggcagaacactatatgccctgtattaatccgcgcagtgttgccatgcacgcataa

SEQ ID NO: 393635 - DNA, 474 bp, Salmonella enterica
atgattactccagccattggcgatatttggatcggctgtagtatccagtccgcctgtcagcgttatgctggaggtgtctacggtaagcgttccggtaatagtaggggaaagattacccgccttatcgacagtcgatatgctgtagtcataattaccgtcccgcaacgtttccggcacggtaaagctccatttaccggcgttattggcggttaccgtataggtttgcccgttaagcgtaatggtcactttcagaccagcgtccgtggtgccgctaaacgtaggtttggtgttgttagttatgccatcgtcaggagtaccggtatcgctggcgttgtccagacccccggtcaacgtcggaggcacagaatcgcgggtaattctaacggtgtaagtggtttccagaccataactattggttacggtaagattccaggtgaaatatccgccctggggcgtgtctgccgggaattctga

SEQ ID NO: 393636 - DNA, 195 bp, Salmonella enterica
atggtcgctccgggttctgttatgccagtgaatgtcggcgttttattactggtgatgttatcgcccttgatgccagtatctgaatcatcggtaagcgcgagatccgtgggggcgggcggagtggaatcaatggtgagcgaaccgctggtcggtatagaggcatttccggcggcgtctttggcctgtaccgtataa

SEQ ID NO: 393637 - DNA, 183 bp, Salmonella enterica
atgtggatatatgaaaacaatggaaaggaaagcactaaacctaatttaggtgagcgtgatgtcagaatgtttgaaaatgttgatcttagtgaaattgacaaagtaaacgtaaaatctaaatctgaattatatcgaaccgataaaaaccagcaagttgacactccggtaccttcccaatactga

SEQ ID NO: 393638 - DNA, 393 bp, Salmonella enterica
atggatgaattgtatgagcgcaatggaactcttttaccttgttcagaacctaataaagggtttgtgccccccgatatactcagccagattcaaaataaaacccccacgtataaaatgctcccaccatttacccctctccagggtaactgttccacaggagcggccactattttaagaaaagcagggacaaaagaagaagatattcttgcatgtagtcccagaaactatggtttacaccacccgatgtatttctggaaacctatactcggagaggaaattttagacgaaacagataaatcagacttacgagttgataattcaacaataagaaatcacaatccagacactacggatattgaagtatggatccatgacagacaatattttgtctaa

SEQ ID NO: 393639 - DNA, 636 bp, Salmonella enterica
atgccaccagtatttataacattgccggtaaacgaacatggaaatgtacttccaatttcgtcacatgatttgggaagtataaggggagcagctcaaaatgctgatgacggtgttaatgtgcagatgggaaatagcagttacaggataagatatctgcctcgtctggattttttttctgttaatcccaatacaggtttcaacccgctacattctgctatggaatttattgcaacaatgaataacagcacccaccttgaagagcatcttaaccaagggagagcatttttatctgtcctcgaagctgctcagtcactacgcccatcgcgtatagcaactagaattgactcctgtagcttcagtatggagcgggagaatctctcactggcggcagagcacctcacttgcccgataacgttatgcgtccctgagaggggcgtctttgcccggacatcattacagtcagatgtctgttgcttatatgactcaactgcactgaaagagctggtgttccggcgtctgcctcacccgattagcagggaagccataacaggggcacatattgttccgaaagaacagtgtcattttgatcaggaaaaattaatttttgttcacacaattttaaatagtattgggtag

SEQ ID NO: 393640 - DNA, 219 bp, Salmonella enterica
atgacaatattcaagaaaattaaacactgtttgtctgggggggataaatccgtcgaattgcggctggggccggcagaaatcctggtgtctgatgacaatggcgttattcctgagcagggcggcagggttttgacacaggtgataattctggatgcaccgaagggacagattgagtgtatttaccgtccgctgcagatgaggcaggatggcggggaatag

SEQ ID NO: 393641 - DNA, 579 bp, Salmonella enterica
atggcggtaaaaaccgttatgggtgaggtacaggccagagccccgctggacagtccggagctgacagggactccgctcacccccacgccacccttaatcgttaacaacaaacaaattgttaatgctgagtttgttcacgctgctgttgccgcactggttggcgcatctcctgaagccctggatacgctggctgagttagctgaggcattaggtaatgaccccaactttgccacaacgatgctcaatgcgctggcgggtaaacagcctcttaacgaaacgctgacgaatctgagcggaaaagatatcgccggccttctccggtaccttggtatgaatattcagctccggatggggccactctcgattgttggtgttgatgcatacggtaatattcctcagcaggacggtatggtgatgacgtcaatttatattgacccggataataatgctgccacggaggcaacattccagccgatacaggtgaaattcggcgatagtgactggcagaacttaaaaacactgaagccagcaggtaatttaaagcaggaggtaaccgatgacaatattcaagaaaattaa

SEQ ID NO: 393642 - DNA, 648 bp, Salmonella enterica
atgcgcaggactaaagataagaaaagacaacgcttgtctctcgatcatttcatggctatccgccgcgctgcggaaccatggttaagaacagcgatggacctggcgttacagacgacacatgcaaggctcgaagtatcacggatcaagtactcaattcgcgaaccaaaaaacggtggttgtgtctggttcgaacagccagagaacggcatatatggaacactgtacatccaccgccaaaaggtacagaagaaggaagcctcgcatgtcgcaatccccatcggagatgaactacagcgcatcattgataacagccgggataatgtggccagcccgtatgttgttcaccggatcccagaacggcaggtaaaacggagtaaagaggtctcgcatcccaccctggtggccccggattatttaagccggtcattctctgctgtgcgcgaccagttagggttatgcaatcacctcacaatggatgaaagaccgaccttccatgaaatacgagctttggctgctcatctgtttgacaaacagggaatagatccgcaaggaagaatggcgcatagcgatgcaaagtcgacgaaaatttatacccagaatcatatcgattgggtagtagttccacacggcgagatcaaagctggataa

SEQ ID NO: 393643 - DNA, 585 bp, Salmonella enterica
atgtcccaccatgtccggatctgtgcatttgtaattggaggggctctttcttctggcggttgtaggcgctctataccaaagggggtcagcccgctgttagtgagaaaggttccggcacttctgatggatatgccctttgacagcgcccatgctctccagccgcctgcctcgctgcgctcctccggtgacatattaaaccactcctggagttgcgtctggatgatggcagaccccctctcttcaggtggtagcagccgtttcctgccattgggggtcagtccggtatttgtcagacaggcgatagcactactgatggctatcctctgcgcctgtgcccactttatgcagccgcccgttgcgcgtttcgcctcctgcgacaatgactgccacgcccgaatctgtgtgtttgtaataggggcgcctctttcttctggcggtagcaggcgctctataccaaagggggtcagcccggtgtttgtcagaaagttttcggcacttttgatggctattccctgcgcttgcgcccactttattcggccgcctgcctcgcgtttttcctcctgcggcagatcccgccaggcctga

SEQ ID NO: 393644 - DNA, 495 bp, Salmonella enterica
gtggatttcgcggagaaggcgcacctgatgccgcaatgggttgtaatgccgcagccggctgcaatgttggcggattctctgcagcgacaacacgtggttttggcggtacagcaggtggattttgcggagaaggcgtacctgatgccgcaatgggttgtaatgccgcagctggctgtaatgttggcggattctctgcagcgacaatacgtggttttggcggtagagcaggtggaattcgcggagaaggcgaacctgatgtcgcaatgggttgtaatgtcgcagccggctgcaatgttagcggattctctgcagcgacactatgtggttttggcggtagagcaggtggaattcgcggagaaggcgtacctgatgccgcaatgggttgtaatgccgcagctggctgcaatgttggcggattctctgcagcgacaacacgtggctttagcggtacagcaggtggatttcgcggagaaggcgaacctgatgccgcaatag

SEQ ID NO: 393645 - DNA, 189 bp, Salmonella enterica
atgccgcagccggctgcaatgttgggggattctctacagcaacaacacgtggttttggcggcacagcaggtggaattcgcggagaaggctcgcttggttgcattttttttggggggtgtaatagattttttagcccatcatgaggatctgcttgtacctgtcgtgctaaagagtgcatcccctgattag

SEQ ID NO: 393646 - DNA, 225 bp, Salmonella enterica
atgatcgagtctgatggcgagaagaatcgcatttattgtgttataggaaccattagtttgaatctaaatctacttgaagaggcatctaccggcatgcctgtagctttcgataaatataacctttggggagggtatcgattgattcgtaataatgaatatttggctagtggatcaattattaaaattaatgatgatttttattttatagttaagtctgtacattaa

SEQ ID NO: 393647 - DNA, 330 bp, Salmonella enterica
atggaaaaagtcaaaatcgaatacacactcacagtcaaaacctgcatcgacgatatcgcaagttttctccaccgtcatgaggtggaagctaaacctgtggtttctgaaatgctcgaacaatttgagaaacaggtaggccagtttccgctcggttgtcaaatttgcccggaactagtgaaactcggggtggcaaaataccgggaatgcaatatcgcaggcaggtatcgtgttttgtattcggtggatggctcgactgtaacagcacatgcgattttgtcgcaccgtcaggacattaaacagttgctgtttaagcgtctcatccaggcctga

SEQ ID NO: 393648 - DNA, 267 bp, Salmonella enterica
atgaccagtaaagattccaacgtcagcagcattcctgaactgacagattttgaagtgagctattcacttctcacgaacgaggtctatctgtccacctcatttacagacaacatggcctgtataccaaactggccgttgcaagagtttcctgaccagtttatgtgtatctcacggacgaaagccattactttgattgaagaactccaaaaggcaatcgactatatggatgcaggaatagtccgtcacccaaataatcttctccagtag

SEQ ID NO: 393649 - DNA, 177 bp, Salmonella enterica
atgagcactaacgaaatgacccaggccgaattagcaaaaatcaacgctgaaatcgctaagctgattgccgagacatcgaaactcaacagggaatcagcctggtatccaatcgtcgttgctactggccttattggtgctgtagcaactatcacaacggtactgctcaaactaatttaa

SEQ ID NO: 393650 - DNA, 270 bp, Salmonella enterica
atgcgactgatcaaagactacacgccacctacgccggaagacctgaaccagctaaaagataagctgggttataccggcgcgcagatggcagaccttgctggcgtggcaagtaacagccagtggcgtaaatacaccggcggtgagtcaccccgcgcaatgtcgcctcacatcttattttttatagcagcacagcttgctttaggcgataaggaattagcttccgttctggaaaaaatgcaagaaattggagcttcgttcgagagtatatag

SEQ ID NO: 393651 - DNA, 156 bp, Salmonella enterica
atgtgggatgtattaaaatattacactttcattttgtgcggaaagaaagacgccagggttgcaagagttctattcaatacatgcctaatctccaagcgtaagaggctaaacatgtaccgcctgatacacttcatgcgggcccccctgcaacgttaa

SEQ ID NO: 393652 - DNA, 243 bp, Salmonella enterica
ttgtgtggtaacgctatctcaatcggtgaggtctttccgatttttaatttttcatttaaagatatatgcgtgtttttaacactggttatttctgaggagaaccagtttttcgtacgttcacgaatagttttagctaattttttaacctggaaaggaattgtggaaaaattaattccgcttgatgatatgttcattaaactcccttatcaacatctgttatggaacaacggtctggctttttaa

SEQ ID NO: 393653 - DNA, 501 bp, Salmonella enterica
atgccacaattaataaatgagttttttaatgttgaattagtaaaggatggcggttgttgccgtaaaaataaagggagtaaaaacatttcactcatgtctgaattactgaatatcgtattgctacagtttgtaccagcaaacgacgaatggctgaacttgcattcgtcaaaatgtaaatcagacatatcagaattcgtaaattttgaatttgaaaagttgaatcccttaataatatcaccgtttggtcccaggaagcaggggggcaatacttcgcggaatttgatgttacggaaatctgcgtttgaaaaatcacgttctgtggtcgagaggatttctccggttttcagtcgtagaactgcatccttgagtttctcagcccagccggcaggtgatgaggggggggatactggtggtggtgttctggcttcagaaacagtcggcctgttattggctgatactgagacttcttcggggagcagatctgcacctgtcactctgtaa

SEQ ID NO: 393654 - DNA, 687 bp, Salmonella enterica
atgaagtatattcttgtaatagacaatgatctgtataatcgcgcaggcattcactcatatttaataagtaagttcagtaatgttcagattttgcacgacattacactcgagaatataaaaaaatcatcactgataattttttcttttcctttaattaataacttaccttcctttatatttctgagaagatattatattacaaagattatatgtatagtaaccaatccaagttcaataaatattaaaatattacccacaggcatgaatgatatcattcttattccaaaaaatataactttgcagaagttttataatattgtaagaaatagtcttaatgacagggatagaatgacaaataataatgatggtgtttgcaatttctgcactcaaagttatttctccccccaacaatataacatcctgttcaggatgtttaatggacagactgttaatgatatcgcacgagaactaatgcttagtaaatcaacggtatattcgcataaatacagttttatgaataaatttaagcttaaaaccacatatgagctttatttattttggatgttgcttaacaagtgtatcagtgaaaaatgttcgtctgctttgtcgggtgctgaatgttcatccgggtgggttttacacctggcttcagcagccgtattcactacggcatcaggcgaatcttag

SEQ ID NO: 393655 - DNA, 459 bp, Salmonella enterica
atgggcgcaggcacaagtgatagctatcagcagtgccgggaactatctgtcaaacaccggactgaaactacgcggcatggtgcgattgcagccgccaggggaaagaggctcttctattacgaatcgacaacttcaggcatggcgagacctgtcgccagaggcaaaacgcatggctggcggctggatgacatgggtgcaggcacagggaatatctatcagcagtgccgggaactatctgtcaaacaccggactgacccctttcggtatagcgcgtctacaatcgccaggagaaaggggcgccccgattacaaatacacagattcagacgtggctggcgctgtcgcaggaggcgaaacgcgaatcgggcggctggataaaatgggcgcaggcgcagggaatagccatcggcagcgccagcgcttgcctgacaaacacaggactgactcctgttggtgctga

SEQ ID NO: 393656 - DNA, 261 bp, Salmonella enterica
atgaaaagtaaggttattgccatttatatcaagtcggcctcccctgaagccccagctaatgttatcaggattaacctggcggctgtcggtaaggatcaccgttggtcggccactggcgatattcagagaactgaaagcctgaacttttccgtcttcatccggacgctgggccagaataaccgtgccatccccaaccttcagcccgcccgggttaataccgatatcattgaccttcaataccccctcgccgatcttatgtaa

SEQ ID NO: 393657 - DNA, 1524 bp, Salmonella enterica
atgcagtaccggtaccggtatgaccgttacgggaggctggcggagaagaccgaccgtatcccggagggggtcatccggatgcacgacgagcggacgcaccggtacgactacgataaccagcaccgcctggtccgttatgtgcgcacgcagtacggggagacgcaggcggagggacggtatatctacgacccgacgggccgccgggtgggtaagcgggtatggaagcgcgagccggtccactggagcgagacgcagacggagctgtcggcgaggccgtatgagacgtggtacggctgggagggggacaggctgacaacagtgcagacacagcagcgccgcgttcagacggtgtacgcgccggggagcttcacgccgcttctccgggtggaaacagaaaatacggaactggcgaaaacacgccaccgcagcctggcggagaagctggagcaggaggggagcggggacagcgaggcggtgcagttcccggcggcgctgcgggtgatgctggacaggctggaggatgagctgaggcgtgacgcggtgagtgaggcgagccgggcatggcttacgcagtgcgggctgacggcggagcagatgaaaaatcagctggagccgcgccctgagccggagaggaaagtgcacctttaccactgcgaccaccgcggcctgccgctggcgctgataagcccggccaacacggtggcgtggcgcgcggagtatgacgagtggggaaacctgctgggtgaggagaaccctgagcacctggagcagctgatacggctgccgggacagcagtatgatgaggagtcggggctgtattacaaccggcaccgttactacagtccgggtctggggcggtatattactcaggatccgattgggctggaaggggggtggaatctgtatacctatccgttgaatccggttacagagatagacccacaaggattggccccgtcaacttttgggactatttttggcccagcaatggcgggaacattcagtggagtcgattcagtagctcatttgccagaaagtgaaagacaatcgacgctaaatgacttttcaaaaatgcgggggatgtacaatcctttatctgattatgtgtttggatgggctgtaggggcaccagttggctcattagttgctatttttggtccagcagcttcggcaggaaaagtactggcaggtagtgtggtatcatgtctttctaatgtaacctatcaggccattgaaaatgaaaaaataaactacaaagatgttatctgggctggcctgacgggaggtttggcaccatgtagaacaattatagaaaatggtttgatagctatgggaacgacttaccttaacaaaggagatactccaggagccgttactggttcaggaataggggctgtagcaagcgggttgttagggaaagtgccattcttgtctaatatatttggcgattatgccaccggcctcgtttcggaaggcattggtgataatgtagagaaagctaatagcgagggcagtaaaaaatga

SEQ ID NO: 393658 - DNA, 297 bp, Salmonella enterica
atgaaaggaccaagaaccgaatggcttgatcgtaaattaccttcggataaatatggtaacattattcctgataaagatataccacatacgcaattaggcatgaggatcggtaggcgtaaaacctatatgcaagcacgtgaatggggatatgatgaacagggtaaattaatacccaaaagactcattgattttacagatcatgggagaaatgatcatactaatcctcatcaacatacttatgaacctaactccacaggtggtacgtggagacatggaaaacaatgtgaggtggagtaa

SEQ ID NO: 393659 - DNA, 1044 bp, Salmonella enterica
atgaaattagagctcgtcaatcggcaggtcattttacctgaaagcggaaccgagcctttccagtgccatgcctctacgcttgtgcgtttaccgtgcggtatgctcgtggccgcatggtttgcggggctgcgggaaggaagtgaagatacagccatttggttatctcgttatgaccatactatctggacgaaaccgcagcaagtgacggcccacgagggaaaagcacactggaatccagtgctattttacccgtcggatagattgtggttattttataaagtgggcagcgacgtacatctgtggaaaacctggtttatcacctccagcgatcgaggattgacctggagtccaccaactgagttggtcaacggtgatacgtcgccgcgcggccccgtaaaaaataaactcctgctggcatcaaatggcgtctggattgcgccagggtcgattgaaagtcctgaacggtggcgggcatttgtggatcgatcctctgacgaaggaaaacattggaatatctcttttgtaccgctggagcctgataacgctatttccgggacaaacgtagcgttgtgggatggtgtaaaagagggcatgttgtgggaatgttgtctggaaaacctcctgcgctgggatggcgttattcagcctacgctatgggagtcttctccggggcatatccatatgttgttacgaagtacacgcggggcaatttttcgcagtgattcaatcgattatggcgtgacctggtctgttgcccgcgagacatctttaccgaataataatagcggtattgatttggtcaatatgcacaacggttcgctgatccttgcgttaaatccggtcaacggcaactggggaaagcgttacccgctttcgcttattgtttcccatgataatggcgaatcatggctaccgttactggacctggaaagtgaccgcggtgagtattcttatcccgctattattagcgatgggggcgtcgtacatatcacctacacgtggaaccggaaaaatatcgtatattgtcgattacaaacggtgtaa

SEQ ID NO: 393660 - DNA, 288 bp, Salmonella enterica
gtgcgtctgccgctggcggcagggacgttttatggcgtgtggcagcacttctatgacgacaacttttccggtgaggatttttcaactcactacattgtgctcggctttcgtctgcgcgtggcggagggcgatttacacctgcctgacgcccagcatggcagttaccgctggctgacgccggaacagcttctggcaggcgacaatgttcatgataacagtcgagcttattttcaaaatgaaccccattctgtcattggtttagacaaaaaggacgtcaagtatgtctga

SEQ ID NO: 393661 - DNA, 231 bp, Salmonella enterica
gtgtcactaaagggactgcgttttactctggaagtggacggtctgaacccgaaaacttttgcggtagtgagttttccgttgaaacagcgccactcatttccgtttgtgctggatgttgacgtcgccagcgactctttcgctgagacggctgaaaacctgctggaaaaaaacgctatcctggctgtctggcagggcgatgtcccgcaacgttatgcagacactcagtggtga

SEQ ID NO: 393662 - DNA, 288 bp, Salmonella enterica
gtggtcgttcttacctctcctctttcggcctccgaagttcagaaagcaaaacccggcgctaccgagtatgaactgtttaacggacaggggcttatcttgtctgtcagatccagcggcaacataatatggtgttttcgctacaagcgctccggttcggcttccggaaccaccattaccctgaggtattttcccgccatatcgcctgccagcgcctggatactgcacgctgaacaccctgccctgctgtttaaaagcattgacccaaaaaactggaacaggaaaaagtag

SEQ ID NO: 393663 - DNA, 471 bp, Salmonella enterica
atgaaagtcagtcaactcaaaatcatatctcacaatgatatattacctgctctttcaggaagagtgttccatgttacgcctgaaaataatatgtctctcataaaacagtccggtgctttggttccaaactcggcattattgcagatctcaaagtttggaaactcatcaaatggttttttcagacggcgcaactgtgtttccttttttgactacagatgttatgggactaagcattgggaagaacatgcctataaatgttttccaactcagtttataaaacgtgtgcctaatgatagaatttcaatactatttcttcatgaaagcaaattcgataaattgatcccctggactacatggaaagaagaagaggcatggagtgatagggtggtcccatatgttgaaactggatataaaggcatagtctccttaagtgagattactgaagagttaattgttgggtttgactgctag

SEQ ID NO: 393664 - DNA, 618 bp, Salmonella enterica
atgatcacagcctccttcccaataaaccactcttgctatagcgtagcattatcgcagagtcatttacttgatatacagaacagggccagaaaatcaggtgacggtattaatatccagcttggaagcaatagttacagtataaggtttttacctgaacatgatttttactctgtgcattctaatagccatgtagcagatcacttctcgacagaggcacatgtaatggataataatgtaggtcgtctggaaaaacagatgaacaatggtagaacatattcatctgctgtagccgcctccccattagaacgagttcagaacagaatcgacgcatacagtttcagtgtagaaaaagctggttttcctgctaccgaggagcatctgacctgtccgattacattagagatccccaaggtaggagtttttgccagaacatccttgctgtctgacatttgttgtctatacgatgctgctgcactaaaatatctcgtaggccaacgactagctcatcctctcagccaagaaaagataactatttctcatatatcccctccggaacagtgccatttcaattatgaaaagggacattttatgctcagttcaaaacaaatggcaaagtga

SEQ ID NO: 393665 - DNA, 324 bp, Salmonella enterica
atgttgcgagaacttatttcacctgtggaattttttacgccaacgctccacctcggtaactcacaacaaatacaaaacaaattacatccaaaaataagacgttactataaaaataataaaacaactctgcccaattattcattttttacccgcccagtaaagtatcatttgtttcaaaagatgtttgtcctaaaatggaccctgttatattttttttgcaaaaacatggtaaataaacagggcaacagaaatggactctccccaaccaacaccaacctgcgcttttattcaggccgtcagaacattattcacggttctaaataa

SEQ ID NO: 393666 - DNA, 174 bp, Salmonella enterica
gtggaccgtactgacggcatcagcatgtcgttcgctgactggcgcttcaacctgcgctcgtcgaacaccgaaccggtggtgcgcctgaatgtggagtctaaaggtaaacaagaaattatgaaaaaaatggcttgtataattatagatataatgaaaaaggaaaaggaagaatga

SEQ ID NO: 393667 - DNA, 489 bp, Salmonella enterica
atgaacagccatcctctgtatttttgccataatatctttatatggtcgatattgtttgacagtccaatatcctgcatgagcgctatgacacttttatcattaacgggaacagtccatcctttatactcacctgtaactgcaggcagatcccctgcttttatcgataacaggctcctggctatttcactggccagttgctcatggacatgttgcattcttgaaaatgtccagtgtggatatagtggtgttgaactcaggcagggaaacatcgactgttttttttgtttaatgactttgaattgtgcactcctgaaacgaccagactgtatagcctgctcaagtacacaggttggtagcacggcaatatccgcttcattatttatcaactgggacagcaggttttcctggggtattcctgtaaatctgagatgggataaatctttaacaggggtaataccatcattaacccactcgcgggttatgatttga

SEQ ID NO: 393668 - DNA, 171 bp, Salmonella enterica
atgaaattagccgatgtttttctggctagtttaaaatgtttggcttcaggaatgtttggttttatttctaaagtatcaaaggtgcgctcttccttggatattgccatccttgcgggtctgttccctgtgttaattaacttttgcctaatatcctcggagaactcgatatga

SEQ ID NO: 393669 - DNA, 408 bp, Salmonella enterica
atgtggaaattcgatacattagaggcactggccagtaattttaatatggatattcataagctcagacaaaccattgaagaatacaatcgagacatggccggtgataaggataagtttggcaaaccacgtagcctgctaaaaacttcagtcagtattggtaaagcccccttctatgcaatgtggttaaacccccggtataactacagccagggaggagccatgattaatagtgaagctcgtccacttgatgttgtcactgaaaaaccgatcccgggcatttttgtttgtggtgaagcatctgcaggtagctatggctatatccgactgacagcctgcggtagcctggattgcggcgtttttggcatgattgccggagagaatgcggcaaaggaaacacccgaaagttaa

SEQ ID NO: 393670 - DNA, 423 bp, Salmonella enterica
atgaaagtgttaacggtattaacggcgttattatgtctgttttattcttattctgtgttagctgcggatgaaaagaataatgcttcaggcagtgaaagcctcgtgagcgagtcaactataaattatgcactcaagccacatcataaaaagctcaatctgtcttgtgctgcatgccataaagaaaaagacgtcagcgcctataagcctctggccactaaagactgccttgcctgccatggcagtgctgaaaaggtagcgaaacgtacgggctttatggatgtaaaccacaccaatcctcatcgctcattacatgatggcctggatctggattgttatgaatgccatgccgagcataaaccatcaagtaacctttgtgagacctgccatgacaatacgcgggactggtttggggctacgccttaa

SEQ ID NO: 393671 - DNA, 456 bp, Salmonella enterica
atgaacgataagagcaaacaatgcgatcataaaacagactggctgacagcacttgattttgtaaaaggaatacaaggttcgtcaacacatctcaaatttttaatctatgaaaaaaacagttttctacatgattttggaaattattgggttctttatattgaacttaacggtgattttagtttggtagcacctgatgtatttatcagactatgcagtattcttgcggcagggaaagaatataaacaaacaggaatttttcactccagcaagaaatggtatttgtgccaaatgtacagtaaaaataatcatcatagagcaaatatctccttagttatcattcagcacacattgtcgacattaattgataaacaatttgttaagagtaatgaaggaaggttaaccacgacacaactaaatgaaaataatattttttcaaagataggaaaaacagtgtaa

SEQ ID NO: 393672 - DNA, 135 bp, Salmonella enterica
atggacattgttcatatccgcatccatttcttttctcatcccgttgagtgcatgagaaatatcggcactgccagcggcaatatcgtttatggtcttaccatgcgaaagagactcctgataacatttatcaactga

SEQ ID NO: 393673 - DNA, 429 bp, Salmonella enterica
atgttaagcggagcaatgccacggattccctgtttattgttgatgagtgatatgagtatcagtgtatccgggaaaatcttttgtctgacacgtgggcaggcgggatatgatcttgaggtactattgggtagcatactagcgcatatggatctatatcaggatatttctgcctggagtccgttgagtgaacagcagaaaataatcctgaagggcacgttatccggactgaaagtggaagagttggctgaacagatgaatatccttccccgcactgtatttgttcatcgtgatgttcttataaaaaaactggggctgcgtaatcgtcttgagttgatgtgtcttaatgtcaataatttttctgatatatacgacgaaaggcaatatatcaccacaattgttaatatatgcttagaaagcaatgtgaggtga

SEQ ID NO: 393674 - DNA, 243 bp, Salmonella enterica
atgcgctacagcgagatcattacgctccgccttcggtttttttatcagtccgagatagtcgaccataatcatcgccagatgcggatgacgccgtttgtgtgtttcagcaatggcgcgaatctgttcaaccgtaagatcggttgcatcgacaatccagatatcccggtccgtaagttcaccaatggcggcagtcaatcgtgcccagtcttcatcgtacatatccagaggattacgcagacgtga

SEQ ID NO: 393675 - DNA, 312 bp, Salmonella enterica
atggtattaacagtgaataaaagaggaagcattgaactgatagatgttcctggtgatggggactgcttatttcgtgctgccgttaaaggtcagcagatagctaaaacacccacagttaattacagctatcaacagacaggaaatcataatgatgaacatattattttaaaggaatcgataaaaactcatttccagaataattttgatacatttattgatgatatgaaaatgattctcaccacagaaaaatcaaaagcagccaacaacattttacatgacattaacacatacataaaactaataaatctctga

SEQ ID NO: 393676 - DNA, 168 bp, Salmonella enterica
atggccctggagtgtcagttgtccgccagactgtatcagctcgccatctggcgtatctatattgccgtcaaaaataacgccgccgctactgtgagaggtatcaatattaagatgaatattgccggtgatattaccgtgatatattcggtcatcggcaggacgccgtag

SEQ ID NO: 393677 - DNA, 492 bp, Salmonella enterica
atggctgcggcacaacaagcaggcagagttctgaatcaaggaaaagggatccccggtctgaaaccagataataatattgatgaagtcgtatttaataactggattaaggaagtcaggaaactggcgacagaaaatgacagaagcaatactaccgattatataatcggcgaatggctatcccgctcaaaaattataaataatgcaccatggcacagcataataatcaaagagttactggaggaaacagaacgagatgaaatcagagaaggtttctattttggcactattaatagccgtggcacaacagtaagagcttattatgaaggcggtgataaagaacgaaaactagttgaccagtacaaagaaattgccagccagctatattttactcatcccaaactagcaagtgtctttgatgatcttgcttcacattatgattttgatgctgcaaataatgatcggcatgcaaagttaagacttgaaggatattaa

SEQ ID NO: 393678 - DNA, 996 bp, Salmonella enterica
atggatgattttctcacgactcacccctgtgataacttatctttagcacaattaaccgcgctggcgcagaagggaaatagcgaagcgcaatatgttttaggccgtttatataacgatgagcaaacagatgatggcgaagaagataagctctctttttattggcttcagcaggccgcagagcaaggacactgcgaggcgcaatactgtctcggtttaaaatacaaagatgcgccagccgacatacaagataacctacaggccatcttctggctggaaaaagcagcgcagcaaggacatgtgctctcttttaatgtattaggctggatttgcgaagggaaaaccgggatggagccggaccacgcacaggccgtcgcctggtatcgcaaaggcgccgagcagggtcacagctattcgcaaaataatctcggaacaatgtataaagccggacgaggcgtcgaacaaaataatgccctggcgttgtactggtataagcaggcagcgctccagggccattgcttggggcaaatgaacctggcggatatatatcgggacggtcgcggcacggcaaaaaacccacgcttagcccatctgtggtacctcaagagcgcgcagcagggtaaagcctatgctcagtttcaggttggttgcgcttattatgaaggcgacggtaccaggcaggattatcagcaggcgctgtactggtttcatcaggccgctacacagggaaacagtaacgcctgcgttaatcttggccggatgtacaaactggggcacggcacggaatgtgatgacgaagaggcgctcgcctggtttcatcgcgcggcggaagccgacaacgtcaccgggtggtgcaacctcggctatatgtatcgggacgggcgcggtacggaacaagatttgcagcaggcgctgtactggttcagaaaagtgcagcccacgggcaaatggaacgtcgacgaagagatccgcaaactggaagcccaactgcacgcttaa

SEQ ID NO: 393679 - DNA, 708 bp, Salmonella enterica
atggataagaaatcacaatacttactctttgcgctttctgcgccgatggaggtgctgaatgaatgcagtttaccttcgcattcctcgccgggtatgtattcagggataaaacgtttcgatcttgaatcgtcatggggcattgaaaaacgcgatgaactgctgcaaaccctcaatcgtatgaccgacggcggccatgccacggatctggacgggttatattgccgctggttttgtttcgccccgcaggagtggcaagagtatgtggatgcgctgaatgaacggggacgtatttacgcccggcttgtcgctgagacggcgatgtgctgtggggaaggcggcatccgcgcctgggattatgtgcggatgggctttctgtgccggacgggcgtactcaaccagtggctgacggaagaagagagcctgtggttgcagtccaggatacagcgccgcgcgctctactactattccggctggctacagtatttcaccgcatattccgtagggcgtttgtactggcagtcgtcgtatggcgataacctcccgctgctacaggaaacgctcgcccgtaaagagttcgatgaggcggggcgacgtatggtgagccaactgatcgctgagaaagccagtttttacgcaacgctgccgtggtgctacctgccccattaccctgaatgcccggacacgcttaaggatgtgagcgatctatga

SEQ ID NO: 393680 - DNA, 444 bp, Salmonella enterica
atgaagaatctaggcgtctggattaaagctataacgctattcatattatgcttagcgttatcgtcaaccgataaacaggtttataccctgcttgagcaggcatcggcaggggtgatcggctcaattcttggagggattactgcagggatctctgtaatttttggcattctggcggtcatcaataaggggcaaaaacgctcaagttttacaagttacttgggaggtttagaagctgatctgaaattacttgtgatctgtttaggcgcaacaatttttttgccgtaccttcgaaattatgacttacctctaataaattatcccaagcatgagttgattccttctaaggataagttatttactgcggcagagctgtttgccgtagtgctgtctctcaatctcattgttgaagtgataagttgcatgattttagtagtaattacttga

SEQ ID NO: 393681 - DNA, 603 bp, Salmonella enterica
atgcgtgcctatgatgagggaatcactcatccgtttagtgagtctcggttatatgacgtggtatttgaaggccggggctacccaccgaaagcaataataggcattgcggtgttaaatattaccggtgttatgcttaaacccgaaaattttaatgggggtctaaattctaaatgctttaggttactaattgatcaagggtttgagattgttcagaaagaagaaaataatgaacagtctgacatcagcatttttcctgatgaactaccgccacagagcgtatttactgaaggcgcagctacgcaggtaacggttaaccgctatgagcgcgaccgtaaggcccggcaggccgcattagcctggcatggttgcctgtgcaaagtatgcggcattgatatgatgagggtgtatggtgagatagcaaaagattttatccatatacaccacctgattccgctatcagacatcaaagagaattactctctggatcccaaaaaagatcttattcccgtctgccctaattgccatgccatgttacatcgacgtaatccgcctttttcgcctgaagaattgaaatcaattattgaatatcatgcggctctttag

SEQ ID NO: 393682 - DNA, 558 bp, Salmonella enterica
gtgacgatcggctgctgtttctcggcaacccgcagcagagcgtgccaaagcgcctgctcccgccaccgcaaccggcgtatccgcaacatcgccattgggctgctgctcaccctgcaacaacctgtggacagtggacgaacctgcactgagtctccattgaagaccgccccaggtcttaatcgaggactcagtaaaaaatgcccgagtcttcaattaagactcagtgatgtggcgggggctggcgggcagccggagccgcattgcgtacatactggtacaaatttaaacaataaacatcaaaagcgtacgcaactgctgcactggcctgtggataatcccttcagcgccagcgagcgtcgcgccgccgaacgtgccatgcgcaatatgaatccctccctctgccagcaggtactggacgactgcttgtggcggatcgccgcccacgatatccaccgcccctcgcctatctgctggcaacgctggagagggccagacggggcgagttcaatcagcttcggcgcagacgcagatagccccgattttatgcgcaccgcataa

SEQ ID NO: 393683 - DNA, 1266 bp, Salmonella enterica
atgaaagctgaccctaaacaatatatccgaggtcttagcaaagaagcctatgctttattacaaaaaagagattttaatgaggatggcttgattttttttggaaatgacatgagaccaggccttggcttatatctcatacacaaattaagagaaataccatacaaagacagagaaaaaattctctctatgaaaactgaaaaggaaatagttaaagtaattaacgggatgctaagagctgaaataagaacacccaggcacttctttagcaaagattataccgctggccttgccgatggtaggggtggctttttgacacctgagaaaacagataataagagatatatggcatccaaagtaaaaaatgattacaaggcattaatccatggttcagaagatataaaaaacaattctaaaatcgttttatcagcagtcaaacaggatgggaaagctataatgcttgcatccgataaattgaaagataataaagatatcatacaggctgcagtaaaagccacaggaaaatccctggagttagtgcctgataaatataaagatgataaaaatgtggtgttagctgccgttcgccaggcaggaggagcgttagaatttgcatctgagcgtttaaaaaatgacagggatgttgttctcgcagcagtcaagaaggatggtgatgcgttaagatatgcttctgaacgtttgagagacgataaagatattaccttaacagcagttcagtctaaagggtatattttaagccatgcttctacacgtctgaaagatgacaaagatattgttttagccgccgtccaaagctatggctattcaatgcaatatgtttctgagcgattaaaagatgatgaagatgttgttatcgcagccattggaacaaatggaagtgctcttgaacatatttctgacagattcaaggacgagaaagatattgtattaaaagctgttcaaaatgatggctatgctctaaaattcgcatctgaaaggctgagagatgacaaacaaaccgtactggattcagtaaataattatggccctgcactcgaatacgcttcagaacgcttaaaagatgacaaatttgttgtcctggaagcagtaagtcattccggccatgccttaaaatatgcttccgagagaatgagagataataactctgttgtttcaatagccatgaaaaatgatagtaatgcgagtcgctatgcgtcagaaagagttattgagctccttagaaaaaatgtaacttatgaattcgtatga

SEQ ID NO: 393684 - DNA, 510 bp, Salmonella enterica
atgttagtcgtaatgttatcaataactggctgctggttatccagcacctcactcactctggccgtattctctttgattacagaggttaacgtactgacgcttttcgaactgtgcttaacatcttcggacaggtttttcacctctttcgaaataacgctaaaaccacgcccggcatcccctacacgcgcggcctcgatcgcggagttaatcgctatcaggttggtctggttagcgatcttctgtatctctttaatacacgcattaatttgcgttaaggaggtatttaagtcgcccatacgacagccaatatccgatgaagtcgtgccaatttcagtgatgaattccacgagcgattttaatgaacttctggctttatcattctgttcgttaagttcattaatgcgttctttttcaatgtttagctgctcacaggacttgatgatggcattacgaatgatatcgatcgtcgagatccccatcagaattttttggcacagtatccgctcataa

SEQ ID NO: 393685 - DNA, 1206 bp, Salmonella enterica
atgctaatcctgaaagcctacaaattcagactggaaccagcgcctgaacagtcgcagcgtttgcggcagttatgtggttgcgcccgttttgtctggaatttaggtcttgcagagacaaagcgcatccctggctcaggcgaaaagttaccttcggctttcgggttgaacaggatgcttacagtgtggaaaaaaatgccgggacacatctttttacaggatgcttataccgacaatctgcaacaaaagttgaaagacctgcatgctgcatggaaacgttgctttgataaaaagctcgcagctaaggccccggtatggaaacgaaaaaatgagggcagagactcaatccgttttgtgaactttgagaaatattgccgccttgaaaatcgcagagtgaagctaccgtcaggtcctgggtgggtaaaattccggcaatctcaacgtgtgaacggtaaaatcaaaaatgcgacaatcagtcagttagcgggacagtggtatatctcgtttcaggctgaagttgaaacggcagaacccaatcacacaagcacaacgatagtcggtctggacgcaggagtaacaaaactcgccacgctttcagacggtacggtataccaaccagtcaacagttttaaagcaagtcagcgcaagctggcaacactccagcggcagttaagccgtaaagtcaaattcagcagtaactggcagaaacaaaagcgaaaagtccagcgtctgcactcgcacatagccaatatccggcgcgactaccttcataaagttaccagtgaaatcagcaaaaaccacgcgatgatagtcattgaggatttgaaggttagtaacatgtcgaaatcggcaaaaggtacagcagaacagcacggacgaaacgtcaaggccaaatcaggtctgaaccgttcgatactggatcagggctggtatgaaatgcgccgccagcctgagtacaaacagctctggcgtggcggtcaggtgcttgcggttccgccagcatacacaagccagcgttgcgcgtgctgtggtcataccgcgaaagaaaatcgcctgtcacaaagtaaatttgtgtgtcaggcatgcggatatacagcaaacgctgatgtaaacggcgctcgtaacattttagcggcggggcacgccgttcttgcctgtggagggatggtgcagtcaggccgcccgtctgaaacaggaaccagacgctga

SEQ ID NO: 393686 - DNA, 765 bp, Salmonella enterica
atgctaatcagcttgatgggagggggaattacctctctatcaaaaattgccgttgtctccccatcctcacggccagatgccgacgttgactactttttctttcaggtagatccgttaacgggcgacctgctgacagatgcaaactgcggcaacatatcttctgccatagggcctttcgcctgtgagcaagggtggataggtaacaaatctgatgtgatcgcttttgaggacgggagagaaatccaggtgacaatactggatgtcacagttccttgcgtcatcatcagtgcaaaagatgcaggcattcaggggaacgaagattaccgcaccttgttaggcgacaaacgctatacggacaggatggttgaactacgtataaaagcatctttattgatgaagctctgtcacaccgaaaatgaggcgcgctttgttaaaacgaatgttccggacgtgattgttatcgcaccacccgaagacggccttaatggtgtaatagcgagatatgttagttgcgatcgtcctcacagagcagcaccggtgacgtcatcaatggcacttgccgctgctgtctgtatcgatggaaccgtggcttctgaaattggtactcttgagagaaagggtgatgtgctcattcaccatccttccggaaccctggcggtgcaggctgaagtcaacccagatggtgatgtgcttcgtacatcagttatcagaactatgcgcacgattatgcgtggggaattgttgttagccatggccacaaaatag

SEQ ID NO: 393687 - DNA, 195 bp, Salmonella enterica
gtgggttttctgcgccgccgcgaggggccggccatcaccagcagggagtgcctgagaccggttattgtcgcgtttgtcctgaaccagcttactaaactcaagtgtccgcccgaggcgcttgttgtccacgatagcaccctgatcaatttcctgaagacgatcataagtggagtagggaaggatgactccgtttag

SEQ ID NO: 393688 - DNA, 267 bp, Salmonella enterica
atgcggcactctttttgttggatagaaaaactgttatttatcagcgcaatattgcctgtgattactgttttatctgggggaagaacatggcacgccgtagcgccgcatggaggaaaagatgcgggagtcgtctggctaaggcgcaggtcgccgccgggtatgagcgctgtgaatgacgcgccacctactatggtggtgaccctaagcatcctatccgccctgaagacgatcgctggcataacccgttatgtgaacccttacaggtga

SEQ ID NO: 393689 - DNA, 777 bp, Salmonella enterica
atgaatatattatcaaaagaaataattagctggattgaaaaaacaagctccgcaacggaaaacattgcatcagacgtgcaagataaaaaatattattgcaccgccggttatctatactctggcataaattatgacgaagaaaacccaaccttaatatatactgacccaaaatttgctggcgcagcaacagcactgataatttcggctttgatgcgaagtgctaatttcctacctggtgttaatagtgatgaggtaaatgctgtagcatttactaaattccaaaataacatctatagctgtccttttttgcgtgttatctacaaccatgaatatggtgaaaacatctcatccactgactataattcttttattgatcaaatcgtttccatttacaaaacctcagatttagtggatgacacagaactcgccaatttgcgtgaaaatatgataaatatggcaaaatcagtatttagcaaagaacgagattcagattgggataatctattcgcacaaacaaataccggtgcaataaaaaatgacgcccccatatgcactatattaaacaccactttatatatggagcatgttaaaaagaaaaaagaaataaaaactcaaaaatacaatgcaaaccttatgaaaatagaaggattctccgctctttacccactttatgctgattatctcgttaaacactttccggtgatcccaacaagtgaaatgttagaagaaggtaattcacctttcaacccaacagatgtaccttgcttcatgagataa

SEQ ID NO: 393690 - DNA, 1077 bp, Salmonella enterica
atgagaatttataattatatcttccttgcaacaatgttacttttatctttcttttcacacgcgggagtcgaaacaacattccattttaatagcaggattactatcgacaccatccccacatttcctaacgtatccattcctgggactgggggcggacatctaccactaccgaatatcatcagtgtcaaagatatatgctttggtgaatcatccgattgtaacaaaacaggaaaaaacgttgtgttacaatcaattctgcatataccggcagggacggttttatatatttctggccaggcagcttttagcataagagaaaccaccacgttaacagctacagggacatgtacatatgcaaactatctgtctaattttaagtgcaaatggaattatagcgatgcaccagtttcagtttcatcattaaccagtttaagaatattgcggcaaaatatttacttaaccgtccatccgtcttcatcagactatattatccaaggcactattgaaacaacaaatattacacagctcaccgatccatcctatatcaatcattattttgggggggtcagtgcctatcatcttctcaattttagaggcggagactataccatcaaggtgattgacgggtgttgtggtatcgcgtctggcagcggcacctcgacaactgcgggagtaacaagcatagagacgatgtcaaacgtattaattactaataaactcaccccagaatcactcacagcttcctttaatccagacaataatgttctatttcttaatgtcaataagtcaggcattggcgataacacggagctgggacgaatttacctgcgaagcgacggagttaaatgttccgtggtagatacctcttattataaaaatgcgggcgtatgcgcctatagcctgcaaaataccaccgttaccgcaacatgcccggacactaaccttgctatccactatgtcaaaagtacggaaaacgaacagcaaaacgatgcgctgatgggcatcattaccggtagctggggacgagtgaatattgataccacctgcgctataacagttaccattccctatgaatga

SEQ ID NO: 393691 - DNA, 192 bp, Salmonella enterica
atgcaatataaacataaggatatccctatattggcgctgttgatgtggtttttatttttattttatatggtgaatataaatttcatttattttattttgctttttgaacattgtcccaattttaaattaaagatctttgcctatattgtcgctatccatattgcgtattatggttgtaatggtctgacataa

SEQ ID NO: 393692 - DNA, 1008 bp, Salmonella enterica
atggtttgtttttataacaatctattcgctgctgatacttactgtgaagccgatggcggtgttcaccatagcgtattagttttctccggcacaaatatcagtgcggcgcaaaacaaagccggtcagacgattaaccagaatgtggataatggcgatcaatataaaggtgtttgccattgcaataggaattacagctatatctactatacggctgaggataacccggctctgcaaaaaacaacttcccggagtaatgttcagtactacaatctggatgaatatcttgatgttgggttatccatcaaagttctggggcgagggtttattaatgttccatttaccaataaaccgaataatccagatggttcttatacttgcactaataataaaaacacaaccacctttacaagtggctcggatgcgattatctatttctatgtaaaagaaccctttattggtacggtaacaatcccctcaacgttacttgcgtctttatatgcaacgacatcctctttaagctcagggcataccaataaactgtcagatgtttatattcggggagatattacggcgccgcaggaatgtgtcatcaatggtggacaaactatcgaagtcgatttcggtaagatccctgcatcggaattttcggcgacgccaggcactgcaataaccagcagaaaaataccgataaccgcctcggtaaaatgtacgggaatgtctgcgggccaggatgttgaagtgtcgttgcatgcgacgcaggcaggatcgctgccaacggtgatcgagacgacgaacgcagatgtcggtatcaagatgtacgatgagtacaataatgaagttgacgtgaacggcgggcgtatggaaaccgatatgggaacccgctctcgcttgggtacggaggatggcgagtttaatttttctgctgcgcctgccagcgcgacgggaacccgtccgcagccgagcacgtttgatgcaaacgtgacgattaccatggaaataaaaaactaa

SEQ ID NO: 393693 - DNA, 2529 bp, Salmonella enterica
atgattcgcttgcgtttttatctcgcgctggcttcgggtgccctgttgggtttcccgactcaaacgatggccagagatagcctgtttaaccccaatcttctggaaattgaccatcctgtcgatgtggatatccatcagtttaaccgtgcgaatatgttgccgccaggtgattataaagtcgatattattattaacgacaaattctttgagaagcgggacgttaagtttgtccaggataaaccggatgcggaactacacccctgctttgttgcggttaaagaggttttatcttcgtatggtgtcaaggttgatgccttaaaagcattacagaatgtagatagtcaggcctgtctgaatcctgcgccatttatcgatggttcaatctggacatttgattcgaataaatttgtgctcaatatttcgattccgcagatttatttggatacggcagcctatggctatatcagcccgtcgcgttgggatgagggtatcaatgcgatgatggtcaactatgacttttctggatcacatacggttaaatcaaactacgactcagggaatgacgatacttattatcttaacctgcgcaacggtattaacctgggagcatggcggctgcgtaattatagtacgttgagtgccatgggcagcgatacggaatatcactcaatcagcagctatatccagcgagacattgccgcattacgtagccagatcatggttggcgatacctggacggcgagcgatgtgttcgatagtactcagatccgtggcgtcaggctgtataccgacgacgatatgttgccgtcaagcctgaatggctttgccccgatagtgcgcggggtggcgaagagtaatgcaacggtaatcatccggcaaaataaatacgtgatttatcaatctgctgtgccgcagggcgcgtttgaaatcaccgacctgaatacggtaagcggtggtggcgatctcgatgtcaccattaaagaagaagacggtagcgagcagcactttactcagccttatgcgtcgctggcgattctgaaacgtgagggacagactgaccttgatatgagtgtcggcgagctgcgtgatgaaaacagcttcacccctaacgttgttcaggcgcaggtattacacggtttgccgtggggattaacgctgtatggcggaacgcaggttgcggaggattatgccgccgccgccttcggtatgggcaaagatatggggtcgttcggggcgatgtcgctggatgtgactcatgcgcgttcgcattttaacgatggcgatgatgagaacggccagtcctggcgttttctctattccaaacgttttgatgataccgataccaattttcgcctcgtgggataccgttattcaactgaagggttctactcgctcagtgagtgggcatcgcgtcaggataatggttctgacttctgggtgacgggcaaccggcgtagccgcgttgaaggcacctggacgcagtcatttggccgcgactgggggaatatttatctgaccatcagccgtcagcaatactggcagacagatgaagtggaacgcctggtgcagttgggttatagcaataactggcggcaaatatcatggaacgtatcgtggaactataccgattccgtcaatcggtatacgagtaaccagaattatagcggtaacgataatcacgatgataccgaccatgaacagatcttcatgctgtcagtttccattccactttctggctggttgagtagtagctacgtcaactattcaatgacgcagaataaccataatgagagcactatgcaggccggggttggcggaacgctgctggaagggcataacctttcttacaacgttcaggaatcgtggaccagtacgccggaagatacctacagcagcaacgcaagccttaactatagcggaacctacggcgcggtgaacggtagctatgcttacagtcgcgattcgcaaacgcttaactacggtgcccgcggcggcattctgctgcatagcggcggcgtcacattttctcaggaactgggggaaacggtcgcgttggttgaagcgcctggcgcgaatggtctatcggttgaaaacgccaccggcgtagcaacggactggcgcggctatacggtgaaaactcagctcaatccgtatgatgagaaccgggtggcgattaacagtaactattttgctaaagcgaacatcgaactggataacaccgtggttaacctggtgccaacgcgtggtgcggtggtgaaagctgcatttgtgactcacgtcggctatcgtgtgttgtttagcgtcttgcaggctgatgggaaacctgcgccattcggcgcaatggcgacggcaacactcgaatccggggccgtgactggtatcgttggagataatggcgaactttatctgtcagggatgccactggaagggcatttcaccgtaacaggccaaaaaacatgttctgtggattatcacttagcggagcagaaggataatgaactcatgcaaatacccgttgtttgtaaatga

SEQ ID NO: 393694 - DNA, 687 bp, Salmonella enterica
atgatgacaagaatgagtaaatttattcttactgtggtgttgtttttgtttgccgctcaatcttatgccgggatagtggttggtggtactcgtgtcattttcccaggtgatgtgccggatgccacaatttctatatttaataaagaaacgacattaccttatcttatccaggtctgggtcgatccttttaataaagaggataagaacaagccgccttttaccgctattcccccagtatcccgccttgagcctggacaagaaaaaacgctacgcattgtcaaagtcgctggtgagttaccgaaagaccgggaatccgttttctggctgaatattaagaacatcccgccatcaagtgacaaaacagataccagtacactggaaatagcaattaaaacaagaattaaactgttctggcgtccggcatcaataaaactgacgccggaaaaagcgttcgctaacgtgaagtggcgtcggcagggtaagcaactggtgatagaaaacacgaatccaattcatattaacgtgatgagtgttttggtggatgggaaagacgttccgctcaatatgattcgcccgtttgagacattaacgctaaatatgcctgagggtgttggtggccactcgctggtctggcgctttattaatgactatggcgcgattagtgaaccagtgaaagtggcactctaa

SEQ ID NO: 393695 - DNA, 576 bp, Salmonella enterica
atgaaaccgaatttaattgtcagtgcgcttgtcctgtctacgagtatgctggtggggcaggctatggcatcggatggtaccgttcatttccgtggtgaagtaattgatagcgcctgtgaagtgaccgctgctactgtcaatcagagcgttgatctaggcaaagttaaccgttcctcatttgtaaatgctggtgatgtcgcagcaccgactgcattccagatcgatttgacgaaatgtccggcaacctacactaaagcggccgttcgttttgacggtgtagaagcgtctgatggcaatggcgatttggctattggcgatcctgcaacagcggttaccccaggcgattatacgggtactggcgacgcgacaacggcaactggcgtagcgattcgtctttataaccgtgccgataactcccagctcaaactatacgaagactccactcctaccgatattgacgccaccgcaggtacggcttctatgaagtttatcgcacgctatattgcaataaacaacgcagtcacgccgggtaccgctaacgccgattctcagttcacgatcgtctacgaaaaataa

SEQ ID NO: 393696 - DNA, 582 bp, Salmonella enterica
atgcgtaataaaataatacttgccatggcggctgccggtataatgtatggcgcttctgtatatgcagccgatctgccaatatcaggcccgttcggctcaggtaaaattatcttcaccggtaccatcaccaactctccctgtgatatcgcgccgggtgacgatgcgattaccgttccgtttggacagatttcttaccgcaaactgaatgccgaaaatgcaacaacagactcaaaaccgttcaccattcatctgcagaactgcgctttcgaaccgaatgacacaacagtagccggctccgccgggaaaatgtctaaagtgactgtctctttttctggcacaggtgacatcacacataaggcatatatcagtaccggcagagcagagcatgttggtgtccagctactgaagagtgacaacgccacaattatcgagcccaataccccaatgctggatgccgacgcccagcaactgcaggacggcaataacgaactcaacttctttgctcgcctgatagcactaggcactggcgtcacccccggtaatgtcgaagcatccgtcacctacaccctgaaatacttgtga

SEQ ID NO: 393697 - DNA, 423 bp, Salmonella enterica
atgaatgggcgtacaagtacctggcttggtggacatggaggtatagtaggatatgatagaaagggctcaactaaatattatgaatatggtcgttataaccctagtctagaaggtattgttggtgtcaaattaccaactgatgatggaaatatcagaaatgttattatccctgatttggttttagataaagatggtaatcccactaatgaatcacttgaaaaactcaaggtggctttatcggcaaaagccggaaagaatactaatgccgagctaacatgcagtaaagatgtagatgagaaaaaaatgtatgaatatatcaataaggtggctaatgataaaaaaagagataaatataattggaatccattatcaccaaatcagtgtcgtagttttgctgacgatgctttcgatgcgggggactga

SEQ ID NO: 393698 - DNA, 303 bp, Salmonella enterica
atgaataaagatgattttctcaaaaaaatgaattttccgattgaatggaaaatctatgacatgtatccagatgaactttacttcttgcaaattaagaattatcaagaaggggatgagcagggctcagagcacgatcgtaatggagcttttcattggtggttaaaacgccatccagataaaagtgaattaggtctgttaattaaactaacatatttagacccagatcaatttatggccaatgatgttcggaactatataaggaaagcaaaaaattacgattgtagcctagagtcatctttctaa

SEQ ID NO: 393699 - DNA, 321 bp, Salmonella enterica
atgaaaaagacccattataccgaagaacagattgcatttgcgctgaggcaggccgaaatgggcacccgcgtcggggaagtctgtagaaagatgggagtttctgagatcaccttttatcgctggaagaagaaacttgccggtccatgtgtgacagaattgcggcgttcgcggcaactggaggatgaaaatcagcggctgaagaaacgtgtggtcgatctgagtctgaataaggcgaatgtcataactacaatacgttttaacaattcaggcggaagttggcttccgcctgttttacttttactatcacgctttattttttaa

SEQ ID NO: 393700 - DNA, 243 bp, Salmonella enterica
atgctgttcagaaccatcggattctttgatggtgacgtacaggtcgcccgaaccaccggttgggtagagatcattgatggcgaatggaccagccggaacgttagttttgtagatggtataaccgttttgttcaacggtcacctgcgcgctgcttttggccacgccgcgaatgaccggggcgaaccctttcatactgtccggcaacatatcgtcatcagaagaaatctgtacgcccttaaatga

SEQ ID NO: 393701 - DNA, 336 bp, Salmonella enterica
atgaaatgtatatctgtgcctgtaagcttaacggctatgcatcgcttaaaatatgatgaatgtatagatggagatcttgttgaaatatattttaatgatgaggagtataatgcgttatgggacaccaatgtttttaatgcaataaacaaattattgcatataaatattgatgattatgaggatgaagggattgtcaatattggcgatctttgtaaaactcaatcattaattaaaaagatgttattaggtgattcatctaatcagttgctaaagttactattatctcaggtcgaaagagctatttcttttaatactggcgtatttttctttttttag

SEQ ID NO: 393702 - DNA, 135 bp, Salmonella enterica
atgaacggcgaaccagcggcgcgtcaggatgacctcgggcaccccggtgaacctgctgctgaagactcaaacctgcatcttgaattttattgggtatataagcatataggaattaagtttaggtatgattggtga

SEQ ID NO: 393703 - DNA, 1365 bp, Salmonella enterica
atggggagtaagatcaaactatctgaaatatgttctcatatatcatacggttatacagccagcgctgcgcctaaagaaattggacctaaatttctccgtattaccgatatacaaggcggaacagttagctgggataatgtaccattttgtgaaataagtaaaaatgatactgagaaatatttattggaaaaaggtgatatcgttatagcaagaactggtaacagcacaggtgagaattatatattcaactccgatgttgaagccgtttttgcatcttatcttattcgttttcggattgataagactaaggcaaatcccttctttgtatggctacaaatgaggacccctgaatggtggagttttgttgactcagtgaaatctgggtcagctcaagcaggggctaacgctaaagttttaggactttttgaattagaattacccgaactaaaagtacaaaattccgtcgttgatatagcttttaacttaattaataagcaaaatatcaatttattaatcaaccaaaccctggaacaaatgtctcaaaccctgttcaaatcctggtttgtggatttcgatccggtgattgataacgcgctggatgcgggaaacccaatcccggaagcgctgcaatctcgcgccgaactgcgtcaaaaagtacgcaatagtgcagatttcaaaccacttccggcggatatttgtgcactgttcccggttgagtttgaagaaacagagctgggctgtgtaccaaaaggttggatgctggagtctgtagcaaaatccataaatataaatcccagtgtaaaattacctcaaaatacaattgcaaagtatgttgacatgaagtccttacccactcaaggatattcgatctcagaggttattgaaaaaccatatgctggcggtgccaagtttcaaaaaaatgacacattattcgctagaattacaccttgtttagaaaatggtaaaacgggattcgtagattttttagatgaaaaagaaactgcatttggttctaccgaatttattgtaatgcaaggcactacgaaagtacattatttgtacgtagcttgtttagcccgagaaaataacttcaggctacacgcaatacaaaacatggtcggctcatcaggccgccaacgagtacagaatagctgctttgatagtttttatattgcgataccgacaccttctataatgagtttattttccagaaaggttagtagttattttgataaaatgtattcctgtaatttggaaaacaaatctctaactgccctccgcgacacccttctcccgaaactcatctccggcgagctgtccctggaggatctgccagacctagtcaaccaaaccgaacccgcataa

SEQ ID NO: 393704 - DNA, 951 bp, Salmonella enterica
atgccaattactatcgggagaggttttttaaaaagtgagatattttctccaggtcccctctcacaacgctccttctttacgttactatgggaaaggattaaggattttttttgcaacacgcgaaaaacagaggctgatcaatatataaatgagctatgtgatcttgcctccccacctgacgcacagcgtttgtttgatttattttgcgcgttatatgaattatcatcaccatcatgcagagaaaaatttcattttcagcactataaagatgctgagagtcaatatacaaatctctatatcaaagatggcgcagagattccgttatgcattgtgatacgtcaggatcactattattataatataatgggtaagacggtgatctgcattgatacttatcctgaacccctgaaaacctatcctgatattaatataaaaaccggcacttatgtttgtgaaccgctatgttgtttgttccctgagcggttgctactctcgctatccagcgacataacattttccattgatttaaaacagataaaagagaaactcatcgatatggcagagaatggaactttatgtaactggaaggaacaggaaagaaaagccgctatctcctccagaattaatacgggcataatacaagcaggtgtaacaactattgacgaagctaccaaaaatacaatagcctcaaaggttattggggctactaacttaaagaatgcaacatttgatgcaaattacattcaaagctcaattacacacatggtttattcatgtttgtttaagaatgacatattaatgaatatacttgatgaacaatcctgtcatgacctgctatgtttaaacgaccttactgaatatgtagcgctacaaattcataattgtcttttttctgaagacttatcttcactcgttgaaatagcacaaaatgagactcatcaccagcgttga

SEQ ID NO: 393705 - DNA, 654 bp, Salmonella enterica
gtggcgtggcgtgcggagtatgatgaatggggcaatcagctcagtgaagagaaccctgagcacctggagcagctgatacggctgccgggacagcagtacgacgatgaatcagggctgtattacaaccggcaccgttactacagtccgggacagggacggtatatcacgcaggacccgattgggctggcggggggattaaacccgtacacgtatccgctcaatccggtgcaactctcggatccgctagggctgacagtcgtttttactggtgatgagaaaactcaaggggaattaaagtcagcttatgagacgataaaaacatctaaatatggaaaaataatgattgatgctttagaaaagtcacagaaaatatatactattaccaaaggtgataataatgatgcttggtatgatcatgaaaataatcacaacactatttatgttgatccagattatcaccccgatgtgcctgttgatttggtatgtaataacaatggaaaagaaaaagcatcaaccgttgctctacttgcacatgagattggtcatgcctattggaatactggtaatgaggatttcataatgcagaatgctgaaaacccgataaggaaaacattaaatatgtgtattcgcacagaatattacaacgtaaaataa

SEQ ID NO: 393706 - DNA, 582 bp, Salmonella enterica
atgaaacgactttttttctttataccgataatattcattagttttgacgctatggctacgtgtgaaatacagccaaaaaaccatgcttgcctgaccatttttaccaagggcaccatctattccgctttccccattttaaacaataagcctgaatggaaatggtatcagagtgaggatataggtgaatattactggcaaacagaactgggtacatgtaaaaataataaatttatccctaatgttgccaggcttttaattaaccttggaacactgcgccccaaggaaaaccctccaactgaaggatcttttcaggatttattaaatgctgctgagaaaacagcatttttcgatgacgcaatcgttgataataatattagaagtcatatccgagggggcttctatcaaaaaaacagcagagattcagtattgtttgcaattcttgataactcaatcatggtaaattattttaaagcagagaagtcaacttatgctcgcatgacagcgcatcttcctgaaaaaaatgagtcttacgaatgcgtaacgaaaatagaatatggggtgcttcgtagtgagaaaaaataa

SEQ ID NO: 393707 - DNA, 189 bp, Salmonella enterica
atggagccggaatacacaccggagaggacaatccacttgtaccagggtctgccgcgggcgctgataagccaggatggtgacatcagctggcacgcagagtatgacgaatggggtaacgtgctgcgggaagataatccgtcgcagctggaacagctaatccggctgccggggcagcagtacgacgattaa

SEQ ID NO: 393708 - DNA, 240 bp, Salmonella enterica
atgaaagaatgtgatacagggacaacggtacaagtacgaaatatgccagtgaagatcgcactcaaagaaccatcgattccaatacctggtatgacgtgggttttatgggcgaataaccttttgaatacagagcaatttatagaacaattgaataaagaaatgttagtttatggtaaaaaattattgattcaccagataaaatttgtgctggtagccaattttaataagagactattataa

SEQ ID NO: 393709 - DNA, 330 bp, Salmonella enterica
gtgtacgcgccggggagcttcacgccgctagtgcgcatcaagaccgacgcggcagcgcaggcgaaggcgcagcaccgcagcctggcggagaagctggagcaggaggggagcggggacggcgaggcggtgcagttcccggcagcgctacgggcgatgctggacaggctggaggacgagctgaggcgtgacgcggtgagtgaggaaagccggcagtgttttccgggaggagatcagatgtttgttgtagaaggtaccggtggatctgtaattattactccaataaaaaaagccacggttctcaccgtggcaaaatccaacatagctaaataa

SEQ ID NO: 393710 - DNA, 159 bp, Salmonella enterica
atgtactcgattgattataatagctatcgctcggtaaaaggtttcaatcgtcgtattcgcttccttgttatgcactatactgctcttgattttaaggcgtcaattaccgctttgaccgggccttcggtaagcgctcactatctcatatgcaggttttaa

SEQ ID NO: 393711 - DNA, 327 bp, Salmonella enterica
atgtcgttcatcccgggtattttcaatattaatgaaccggtgatgttcgggttaccgatcgtattgaatccgatcatgatggtgccgtttattcttgtacctatcgttaactgtacgattggctacttctttgtatcaatggagatcatcccgcctgttgcttatgccgttccctggacaacgccaggaccattaatcgcctttcttggaacgggcggcagttggctggctttactggttgccttactgtgccttgctgtagcaacactgatttatctaccgttcgttattgcctctaataaagttaatgcagctatgactgaataa

SEQ ID NO: 393712 - DNA, 456 bp, Salmonella enterica
atgagtaaaacgaccgtctggctcgcctgctataaggggcgatcggagcatcgcggcatcgccaggcttgccgactggctaacgcgcaaagtcacccgcggtatctactctcactgtgaactggcggtagcacatggcggcaatgaatacttatgttactccgcgtcgtttcgcgatcgcggcgtacgaggcaagttaatgccgttaccggaagacaagtgggataagctgccgttacaggcgacgttgtcggaggtagaagccttctttcgcaaacatggcggtaaacggtatgactggcagggagcgatagggatcgttctgggcaataaagaacagcgtgacaggctgttttgtagtgagttttgcgcggaatttcttcagctcaacgagagctggcgctattcgccaaaccatctgtatgccctggtcagcagttggcaataccgtttgtaa

SEQ ID NO: 393713 - DNA, 555 bp, Salmonella enterica
  misc_feature (512)..(521): n is a, c, g, or t
gtgctgctttctctacttaacagtgctcgtttacgacctgaattactgattctggtattaatggtgatgatcatttctatgttcgtcattccgttacctacctatctggttgatttcctgatcgcactgaatatcgtactggcgatattggtatttatggggtcgttctacattgacagaatcctcagtttttcaacgtttcctgcggtactgttaattaccacgctctttcgtctggcattatcgatcagtaccagtcgtcttattttgattgaagccgatgccggggaaattattgccacgttcggacaattcgttattggtgatagcctggcggtggggtttgttgtcttctctattgtcaccgtggtccagtttatcgttattaccaaaggttcagaacgtgtcgcggaagtcgcggcccgattttctctggatggtatgccaggtaaacagatgagtattgatgccgatttgaaggccggtattattgatgcggatgccgcacgcgnnnnnnnnnnagccagctttacggttcctttgacggtgcgatga

SEQ ID NO: 393714 - DNA, 522 bp, Salmonella enterica
  misc_feature (319)..(328): n is a, c, g, or t
gtggaggtatccggctccagggctttacgtaccactcccaaaaacgcctcacgagcgttgaaatgcattgaatgcatattcgtaacgcttggcattactgagaggaaaccattttgcttaaacttcaaaccagaaaatgggccagccttatctgtctggctattatcattatcggtcgtaccggctttattacctgtaatgaccgccgtttctgattgcaaagtattgtttttaacattctcgacgccagccagttggctggcaagcggcttcacattcacaatctctgccgtcaggctttgctctttattaacatcannnnnnnnnntaccggacagtcgctggcgcgatgcaacgccatgcaccgtggcctgcgccggcttgccgataatgatcttgctggttacgccatcgactgtatcaaaaggagttgtttcacccgtagtgccctcttctgacgtgaccacctttccatctttactttcggatgaagcgttggtcacagcctctgcagtagcatga

SEQ ID NO: 393715 - DNA, 246 bp, Salmonella enterica
atggtgtccggcggcagatcgtgtctgtgcagactttccgacgttaaatcccgtaccacctgcgagcatggattatcgctgtggcacagctctgtggcaattttgtccccttcgtctttgttaaccaatgaatcctgctttaacgttaccgttctaatgttgcgaacgaacagctccttatgcggaatatcgtcaccgctctgcgatttttatagcgcatcagccacaggatttattggttcttaa

SEQ ID NO: 393716 - DNA, 840 bp, Salmonella enterica
atggcgctggtggatagtctggaagcggagctacagcgcggggatctcagcgaaaccagccgggtgtggctggcacagtgcggcctgacgtcggagcagatacagaaccagatggagccggaatacacgccgcagagaaaaatccatctgtaccactgcgaccaccggggcctgccgctggcgctggtcaacgcggagggaaaagcggactggtcagcggaatatgatgcgtggggtaatgtgctgcgtgagataaatccacataacatgaaacagctcatccgtctgccgggacagcagtatgatgaggagacggggctgtattataaccggtatcgttactatgatccgttgcagggaaggtatatcactcaggatccgatagggctggaaggcgggttgaactcatacagttatgttaaaaataatccagttaattggattgatccactaggcttagctcatacatctggaaaatggaaagactgcggcaaaggttgtcgcattcgtattgatggagacgcggtgggcgatgggagacatttgcactgggaatgcaaaaatggaagcggagtaatgggtgaatttggtggtcaatctcacggagatgattactcatccgcaccaaattctattaaaaaatgtgcaaggaagtatggtttcgaaccagaacaaagtaaactaacatgtaaagattcagagacatccgctacagaggcggttgttgcaacgggagctactattggtatgggatatgttatatatcgcgtgattcgaatgataccttcgcttgccccgcctctttggccaacaattcctgttaatgcggtaactccgtaa

SEQ ID NO: 393717 - DNA, 2046 bp, Salmonella enterica
atgcgttcacgtttaggtgagggaatcagagcgcaacagtggctcaatgtatgcgcgggtcggcaggatatggttctggcgacggtgttattaatcgctattgtgatgatgctgttaccattgccgacctggatggttgatattctgattactatcaaccttatgttttcagtgatcctgctcttaatcgccatttatcttagtgaccctctcgatttatctgtatttccgtctttattacttattaccacattatatcgtttgtcactcacaatcagcacatcacggctggtactcttgcaacataatgccggtaatattgtggatgctttcggtaggtttgtcgtaggaggaaatctcaccgttgggttggtcgtatttactatcattactatcgtgcaatttattgttattacaaaaggtatcgagagggtggcggaggttagcgcacgtttctcgctggatgggatgcctggcaaacaaatgagtatcgatggcgatttgcgcgccggcgttatcgatgcagaccatgcccgtacattaagacagcacgttcagcaggaaagccgctttctcggtgcgatggacggtgcgatgaaatttgttaaaggcgatacgattgccggtattattgttgttctggtgaatattatcggcggtatcattatcgctgtcgtacaatatgatatgtcgatgagtgaggctgttcacacttacagcgtactgtcaatcggggacggtttatgtgggcaaattccatcgctgcttatttcccttagtgcgggaattattgttacccgcgttcctggtgaaaaacgtcagaacctggcgacagagttaagttctcaaattgccagacaacctcagtcgctcatattaaccgctgttgttttaatgctcctcgcttttattcctggctttccttttatcactctcgcttttttttcggcgttgttagcattgccaattatcctcattcgccgcaaaaagacagtggtttccgcaaatggagttgaagcgccggaaaaagatagtatggttcccggcgcatgtcccctgattttacgtcttacaccgacgctacattctgctgacctgatacgtgatattgatgccatgagatggctattatttgaggataccggagtccctctgcctgaggtaaatattgaggttttgcctgaacccaccgaaaaattgacggtgctgttataccaggaacccgtatttagtttatctattcccgcccaggcggattatttattgataggcgcggacgctagtgtggtgggtgacagccagacgttaccgaacggcatggggcagatctgttggctttcaaaagacatgggccataaggcgcaaggttttggattggacgttttcgcgggcagccaacgtatctgcgccttactaaaatgtgtgctgcttcggcatatgggagagtttattggtgttcaggaaacgcgttatctgatgaatgcgatggaaaaaaactactctgaactggtgaaagagcttcagcgccagctacccattaataaaatcgctgaaactttgcagcggcttgtatcagagcgggtttctattagagatttacgtcttattttcggcacattgattgactgggcgccacgtgaaaaagatgtcctgatgttgacagaatacgtccgtatcgcgcttcgccgtcatattctgcgtcgtcttaatccggaaggaaaaccgctgccgattttgcggatcggcgaaggtattgagaacctcgtgcgtgaatccattcgccagacggcaatgggtacctatactgcgctgtcgtctcgtcataagacgcagattctgcaactcatcgagcaggcgctgaagcattcagccaaattactcattgtcacttctgtcgacacccgacgtttcttgcgaaaaattacagaagccaccttgttcgacgtaccgattttgtcatggcaggaattaggagaggagagctttgtacaagtggtagaaagtattgaccttagcgaagaggagttggcggacaatgaagaatga

SEQ ID NO: 393718 - DNA, 681 bp, Salmonella enterica
atgtctacacccgcgaattttaacggtcaacgccctgccattgatgctaacgacgcagtaatgctgctgattgaccaccaaagtggcctgttccagaccgtcggcgacatgccgatgccggaattacgcgcgcgcgccgcggcgctggctaaaatcgctaccctatgcaatatgccggtcattaccaccgcatccgtaccacagggaccgaatggtccactaattccggaaatccatgcgaatgcgccccacgcgcaatatgtcgcgcgtaaaggggaaattaatgcctgggataatgccgattttgtacaggcggtaaaagcgacaggccgtaagacgctgatcatcgccggtactattactagtgtctgcatggcttttccagccatcagcgccgtcgcggaagggtacaaagtatttgcagtgatcgatgcctccgggacgtacagtaaaatggcgcaggaaattacgatggcccgcgtggtgcaggcgggcgtagtaccgatggataccgcggcggtagcatctgagttgcaacgtacctggaatcgggaagacgccgcagaatgggcggatgtatataccaaaatattcccggcctatcagctactgattgaaagctataccaaagcgcaggaggtagtaaaaaataatgaactgctggattctcaacgcgcataa

SEQ ID NO: 393719 - DNA, 684 bp, Salmonella enterica
gtggcgtggcgtgcggagtatgatgaatggggcaatcagctcagtgaggagaaccctgagcacctggagcagctgatacggctgccggggcagcagtatgacggggagtcggggctgcattacaaccggcaccggtactataatccgggtcagggacggtatatcacccaggacccgattgggcttaaaggaggatggaatttatataaatatccattgaatccagtatcaggaatagatcctttaggcttaaaaaatatgcgctctgatgggcacccttgggggtatggctgcggggatgagagtacagataggtttgttcctgattctttgggggctgccaatttcttacctgcctgcggaaatcacgatacatgttacggaactctgggaagtgataaggctacttgtgacgcgaatcttggtgctgatatgaaacttgcatgcaaaaatgatttgacaggactacataaattgtatcgtcccgtttgtaacggtatggcaattggatatgagtttgcggtaagtagttttggcgattcagcatttacatccgcacaaaaaggggctttatataattatagagagctggagatgttagatttcttaaagtttgaactgggagaggatattgatcctgattatcatagtaaagcctattatagagttgctaatcccagatga

SEQ ID NO: 393720 - DNA, 591 bp, Salmonella enterica
atgaatacggaccctctgggcttaattaattttggctcagggatgaatagcatcggtttagcgtcagattcagctatacgatacttagaaccagaggccgcccggacagcaattggaaatatcgcatcaacaaatggtgcatggattccaggatatgaatatgtaatggggtgggctattgcagctccgactataccagcaatagttatgtttgcaccagcagagtctataggtactgcccttacgggagccgggatatcatgtggttcaaatacgccatatcagttacacaaaggagataagtttaattataaagatgcaagtctggctgcattaattggttttttagcgccaggacgaagcgtttttgagaatacgctgattgctatgggtgtaacatttttaaataaagacggaaaacccggtgctactggcggtgctggagctggaacagtagttagtgaggttatgagcttgctggttccttcttatattcctgatgctgttgttgaatttggtggtggagtcgtctctgaatatataggagataaatcagaggagatttttgatacaaaggagacaaaaaaatga

SEQ ID NO: 393721 - DNA, 273 bp, Salmonella enterica
atgtatcctttaaatccagtacaggggattgatcccctgggattagatgcgatacaaattaattatgattattacccagttaatatcggaatggggttcaatttacctctcggtcatggttcgactgtaacgccaacctattattctgatactaattacaagaatgcgaataaatatgccgaagattttagtaaaaaacatgactgctatagcctgatagggaataattgcaagacatttgcacatgatgctgcaacagcgggtgaaaaataa

SEQ ID NO: 393722 - DNA, 945 bp, Salmonella enterica
gtgggacagctgaatatattcgttaccggtgatttctccgtaggtccgccggcttttccacacccgtttcccgatgcggcggcccggcgggtcatagaggtaacggctttccagcagggttatgccctgttgctcacgacggtagtgcaccagccggtgccggttatcgtagtggtaatggtgtacgtagccgccgccgtcgcgtatctggcgctcatccttttccgtcagccgtccgtgcgcgtcgtggtggtaaaaatacgccacgtcttcgccgatgcggttatcccgccacatcgcgggaagcgccgggtactgctcccggtctgtaatacggttgcccgccgggtcggtggcgtggcgccgcaacaggtcgttgtgccgggcgctgatgagccgccccgcgctgtcatagcggtagtcttcctcctgatgcacgccatggatgcgcagaagttctccgctgtcgctgtaaccgtattcccggttcagcaccgggtcactgaacgtgtggctcagcagctgcccggtggcaccgtagagcgtgttctgctcataagcgccggcggttcgctgtatctcccggtgcaggcggtcgcgggtgaaatcgacaagcggcgtgtcgcccagcttcattcccgccagataaccactgccgtaagtcagccattccaccggcggcagccggtcaggggtggtccggactgccagcccctgttcgctgtacgcatgccgggtggcgtgctgccacagcaattcccccgttccgggatgctgcaccgtctgacgttcgcagttcatccgcccctgtttatcgtactcatactgcaccgcgacgcggtggccgtcgctgagatggctgactccggtcagccagccctgttcgttgtactgccaccgttcggcctctgcgccattcacggtgcggtacatcagccggtctga

SEQ ID NO: 393723 - DNA, 465 bp, Salmonella enterica
gtggtcagcaatttcagcgtaacgacggcgtgcctgcggacgatcgtactggctgaatgcggtctgcttggtcgggttgtcattcgcgttgtagcggataacgttacaaatcagcagggcgttcgccagaccgtgcggaatgtggaactgagagcccagtttgtgcgccatagagtgacatacgccgaggaaggcgttggcaaacgcgataccagcgatagtcgccgcactgtgaacacgctcacgcgcaaccgggtttttagacccttcatggtaagacgccggcaggttttctttcagcagtttcagcgcttgcaacgcctgaccgtcagagaactcagatgccagtacagaaacgtaagcttccagggcgtgagttactgcatccagaccaccgaacgcacacagcgacttcggcatatccatcaccaggttggcgtcgacaatcgccatatccggggttaa

SEQ ID NO: 393724 - DNA, 990 bp, Salmonella enterica
gtgcagggcgataccgttggcaatcgcggtcataccgaattcgcgcacgccgtagtgaatgtagttacctgccgcgtcttcgttgatagccttagaaccggaccacagggtcaggttagagggcgccaggtcagcagagccgccgaggaattcaggcagcagcggaccgaaggcttcaatcgcattctgggacgctttacggctggcgattttcgccgggttagcctgcagcttagcgataaattcgctcgctttcgcatcgaagtcagcaggcatgtcgcctttcatacggcgggtgaattcagccgcttcctgcgggaaggctttctcataagcagcgaatttcttattccatgcagactctttcgcctggccggcttctttcgcatcccactgcgcatagatgtcagacgggatttcaaacggaccgtatttccagcccagcgcttcgcgggtcagcgcgatttccgcgtcgcccagcggcgcgccgtgggaatcgtgggtgccctgtttgttcggcgaaccgaaaccgataatggttttgcacatcagcagggacggtttgtcagtcacggcgcgagcttcttccgtggcgcgtttaatggcgtcggcatcgtggccgtcaatgccacggataacgtgccagccataggcttcgaagcgttttgcggtgtcatcggtgaaccagccttcaacgtgaccgtcgatggagataccgttgtcatcatagaacgcgatcagtttacccagtttcagcgtaccagccagagagcacacttcgtgagaaatgccttccatcatgcagccgtcgcccataaagacgtaggtgaagtggtcaacgatgtcgtggcccggacggttgaactgcgccgccagagttttctcggcaatcgccatccccaccgcattcgcaataccctgccccagcgggccggtggtggtttccacgccggcggtgtaacccacttccgggtggccaggggtttttga

SEQ ID NO: 393725 - DNA, 369 bp, Salmonella enterica
atgattaagcttgcagttttaataacttgcttttatacggtaattcatttgtttttgtttgcattgtttattatgaggccattgtggattgagccggaaaaaataaaaaaccgtgatcttttatttcatgtgttaggtgagccaaaatataaatatgatgtaaaaggtttagttgtatgggagaaatacgataattttgtatattcaactattgagtatagaaatgatgaggtaatagttacatctaatatatttaaagagaataatgtgcaaatttttaaaaattccaaagtatgggatggtacaaatctgtaccagtacattacagtatggccttatggacgttttcgtatattatcgaaacaataa

SEQ ID NO: 393726 - DNA, 453 bp, Salmonella enterica
atgaaaaacgtgccttcgttcaccgcgcctgcatggcttgagcgttacgaggtaattctggagcaatgcgcgttgaaacccaatacgatgaaggtcaggcgtgatggacgaaagccaggaccgttaacaccagatgggcttacactggcgtttccaacggtcagagattctactggtttaaagttcggccctaacccaccatcttttcacgagataagaagtctggcggggcacctatatgagagtgagcgaggaggggattttgcacaacgcttactgagccacaaaaattttacgtatagctcctctgaccaaacaatcactgcccaatacagtacttccttcttccattggggggcttccgataccaaatgcccatgtagacgaaggcttaatagtgatgccaataaaagcaatcgcgaaaagttgagcaggtggctagtttcagattaa

SEQ ID NO: 393727 - DNA, 567 bp, Salmonella enterica
atgaaaaggaataaataccttttgaccgcctccgcgctcgcggtgctattcccgctggccgggcaggctgaagatatcaacgttgactttaccgcaacggtagtggctaccacttgcagtatgtccattgccgcactggatggttcttccatttcaggcgatgccaccagtggctataagctcaccgtcggcgatgtcgggctggataaaatcgttaagaagaccgccgaatcgcaaaaaaacttcaagtttgtcgccactgactgtagcgccggcatcacgaaaatcaccacctcgctggcatcttcggcatctgccagcggcagctatatcaagaacgaatctgccgccagcgacgccgccacgaatgtgggtatgggcttcaaaaggaaaaatacatccgacgaaagctggttaacaccgggtaccggctcgtttgactggacaaccgatgagctcaaggctaatgcagtggaaatgaccgtaggactgcgggagctgacggacggcgcaggcaccattggccccttcagcgccaaagccacctttaatttcacctatcagtaa

SEQ ID NO: 393728 - DNA, 594 bp, Salmonella enterica
atgaaaaagcaattattgtgcggtgtcgttgctggcatgctagtggtcataaatgcagtaatagcgcctaatgcgttagcggccgacgggactaaaagccttgatttaacggttgaggcgaacatcacttccggaacctgttctgccaaagttatggtcggggatgtggaaaccaacaccattcaactgggcgatgatattgcattatccgaagtgttagcaaaaagccggataaagcccttcaaagtgcgtttcagcgattgcgctggtttaccagaaagtactgccacgctcaaactcgcgcgacgctcagggaactgcgctggctctaatggtccgtccttccgtaaccagggcggtacctcggcaggaataggacttgaagtctggaccagcgaaacgccggaagctaatgatagcgttcaactcctgtgcaacacgccaaatgaacaaactatcgatatatccgccgccagaaattcagcgagtctggattacaacatgagcgcccgcttagtcgatgcgaccaatgtgggttccgtcactgctgggacgtttacctctccaacggtacttacgatcagttataagtaa

SEQ ID NO: 393729 - DNA, 612 bp, Salmonella enterica
atgaaaaagcaattattacgtgggttactggttggcgcactaacctgtgttggtgcaggcgtttcttccctggcccaggccgacggcacccccagcctcgatttaaccgttaacgccaatattacaaccggtacgtgttctgcatccatcatcggcaaaggaggagcgaccaatactatcggcttcggcaacgtgtatatttccgagcttgtcgcaaagactaaagttgagacgtttaaacttcgctttagcgattgcgcaggtttaaaagagaaaaaagcaacggtagtgctttccccagcggcaggtattggatgcgcgggcggtaagtcccaaaacgcagagttctctaatgccactactcaaacaccgaaagcggaaagaacggcggtagaggtctggacaactgatgtcccggaaagtgccaatagcgaacagttccattgttataataaaaacgcacaaaccgtcgatctggctggcgccagtaccacaacaccggtagattttccattaagtgcacgtatggtgccggtaaccagctatggtgtctcagacataacagccggtgatttctattcaccaactgtctttactatcacgtatcagtaa

SEQ ID NO: 393730 - DNA, 1215 bp, Salmonella enterica
atgaaaaaaagtggattgatcgcgttggtttgcacattactcagcgcagcgccagcccaggcagattatgcactctacataggccagtatgccaatcagggagtcggcatcccctactatacaaaggtcaacgactatacagcgaacttcaacatcggtatcccctatatcacgatgcgctctggtacaggcgttcgcgaggttgcaactttcaacggtgtagcccttgacgcccaaacgggtctatcctgtaatcgggaccatacggtgaaagatgtcaacctttttcacgggtatttacccgcaggcgtgaagagtgccgatggtaaagcactgtggaaaacaaccgtgccaggcatgtatatggggatggagttcacctccatggactttggcgcacaatactggacgggaagcaatccctcactcccgttgtggctggactgggcaaacggtaccggaaaaacctttgcactcgggccgctatttgctaacgatgggcgtacaagcggctgtaacagtgccacccaatggaaatattacgcattgggcgggatcatgatatgggtaaaatatcatctatatgttgatgaaacctttgatccaaaaggtgtaacatcgctctccatggcgatgcagaaaaaccagaactatgatttccatttttttacaacgcagccaagtcaattgggtgattctgcgaaaagcctggacttcgttattaacttcaaccccattcccatccattacccgacctgtggttccagcaccgtcaccggtgcatccgtcagcggctcaacggttaatctgggtgaacataaaatggaagatatcgccgctgggctggacccacagaaattttccatcaagctggacaactgcatgtatgtcactgacattgatgtcgcgctcagttcatccactgtcggtgctgccaatacgacgttactgggcaatacattgaccagcagtgctgcaagcggcgtaggcgtgttaatcgaaggggagcaaaatcctcgtagcgctgaagcgtggatgacattaaaacctaatgattccagctctatttataaatttaccagctcacccagcacagttgagggtaatgtccaacagcttatgaattttcgcgctacgctcaagcaggatggcacgaaagaaatcacccccggtaggttcaaagcaaccggacgattcaccatcaactatccataa

SEQ ID NO: 393731 - DNA, 309 bp, Salmonella enterica
  misc_feature (296)..(305): n is a, c, g, or t
atggatagccttaacgacgataaaattaaccagcacagcagtgacctggaagttgaaagcgaagaaaaacaaagcggtaaagagattgaagtggatgaagatcgtcttccttcccgcgccatggcgattcatgaacatattcgccaggatggtgaaaaagagatggagcgcgatgcgatggcgttgtgtggtctgccattgccgcaggactttctatgggggcctcactactggcgaaaggcattttccacgtgcagcttgaaggcgttcccggcggttttttactggaaaatctnnnnnnnnnngtaa

SEQ ID NO: 393732 - DNA, 678 bp, Salmonella enterica
atgaaaaaaatattcattgcaaccgcggttgcattgtctttatctgcggctgcgcaagcggctgaatctaccgccgtgttaaaagtgaccggcgttctgaccaacgatgcctgtaccccggcgctggacggcggcggcgtggttgattttggcaccaaatatatcaatgaactgtcggcaacagagaccaaccagttagggcacaaagatgtgaatctgaccattaactgtactacgccgacaaaagtatcatggcgtattaccgacgatcgcatcgattcagtggtaagactaaccatcacaggtggagcctggagtggtgatgagactgcatgggcctatagtcaagtgttcggcgttggcaaaacagcggggggggtcaatattggcgcctacgcggttgacatcaatagaactgcctcaactgccgatggtaatgtggcaacagtgctttattcaccggtacccgccacgacctggtctgagttgcgagaggatactacctatgcctcaaccggcgaagaatacacccttggtacagctgatacacccgtcgccttcactactgccgttttcccactacgcgtcgcattagccgtggataaaaccgataccctagcaattaccgacaacacggatatcgatggtcaggccaccattaccctgcgttatctgtaa

SEQ ID NO: 393733 - DNA, 246 bp, Salmonella enterica
atggtgcttggcaaaccgcaaacagacccgactcttgaatggttcttgtctcattgccacattcataagtacccgtcaaagagcacgctgattcaccagggtgaaaaagcagaaacgctgtactacatcgttaaaggctccgtggcagtgctgatcaaagatgaggaagggaaagaaatgatcctttcttatctgaatcagggtgattttattggtggcctgggtacgtgcgaaaaccgcatgtga

SEQ ID NO: 393734 - DNA, 915 bp, Salmonella enterica
atgaaaaatcaggctcatcccattgtcgtcgtaaaacgccgcaagcataaaccgcacggcggcggggcacacggttcctggaaaattgcctacgccgattttatgacggcgatgatggctttttttctggtgatgtggctgatttccatctccagccctaaagaattaattcagattgccgaatattttcgtacgccgttggccaccgcggtaacgggggggaaccggattgccaatagcgagagcccgatacccggcggcggcgatgattacacccaacagcaaggtgaagtggaaaagcaaccgaatatcgacgagctgaaaaaacggatggagcagagtcggttaaacaaactgcgcggcgatctggatcaactgatcgaatccgatcccaaattgcgcgcgttacgtccgcatctgaaaattgatttagttcaggaggggttgcgtatccagattatcgacagccagaaccgcccgatgtttaaaaccggcagcgccgaagttgagccgtatatgcgcgatatcctgcgtgcgattgcgccagtgttaaacggtatacctaatcgcattagcctggccggccataccgatgactttccctacgccaacggcgaaaaaggctatagcaactgggagttatccgccgatcgcgccaatgcctcgcgtcgcgaactggtcgccggcgggttggataacggaaaagtattacgggtggttggcatggccgccacgatgcggctgagcgatcgcggtcctgatgacgccatcaaccgccgtataagcctgctggtgttaaacaaacaggcggaacaggccattttgcatgaaaacgctgaaagccagaatgagccggtaagtgtattacaacagcctgcggcagtcccgccggcaagcgtacccacatcgccataa

SEQ ID NO: 393735 - DNA, 225 bp, Salmonella enterica
atgtatactgaattaactatgcagcagatttctgttggcagtattccgatggaaattgatgtaggatataaccatccttatcatgggaaaataaattttcaggatgggcgattcggcctctatactgtagtgacattgatcggaaataacaataaaccacttattaactatgaaggggggggccgtctcatgctgtgctttaacgttttcagaagtaccttgtga

SEQ ID NO: 393736 - DNA, 246 bp, Salmonella enterica
  misc_feature (90)..(99): n is a, c, g, or t
atgccggtaattaaagtacgtgaaaacgagccgttcgacgtagctctgcgtcgcttcaagcgttcctgcgaaaaagcaggtgttctggcnnnnnnnnnnacgcgaagaaactggctcgcgaaaacgcacgccgtactcgtctgtactaatcttttgagagcgggctgctctcaattcagatcgagttgtagttgtaaggccgtgcttccgaaaggaatgcgcggcttgttttcgtttatgcattag

SEQ ID NO: 393737 - DNA, 273 bp, Salmonella enterica
atgttcgtattgcacccagttactggtggttacgccattattccagccgccgttccaggtcagagagtagttttgccgataaagacggttcgtctcttttccgtaattatctttcaccagttggttcgtattggtgttctgagtatcgccggcatagaggttgccctggcgactgtaaccggcctccagctccagagactgaagcggagcaaaatcccaacgaaccacgccgttgatatctttgttaattaccccctcgcgcccggccggtaa

SEQ ID NO: 393738 - DNA, 492 bp, Salmonella enterica
atgcccctggttaatattacgcgcatcagcctgcgttttgtcgaggttgccatacagacggaagctgaaatccccgcccagcgggccgttcaggctaaagttagtgcgtttggtcgcgccttcgtctttatgttccggcgcgttgaaataggtattccaggagccgtgccactcgctaccgccttttttggtaatgatattgaccacgccacccgccgcgccgttaccgtaacgtgcggcggcaggaccacgcagcacttcaatgcgttcgatcatctccggcggcacccacgcggtatcgccgcgggtatcgcgttcgccgcgccagcccaggcgcaccgagttacggctggtaacgggtttaccgtcaatcaggataagggtgttttccggtcccatgccgcgaatatcgatttgacgattattcccgcgctgaccgctggtggagttgccggtcaggttcacgcccggcatggtgcggatgatttctga

SEQ ID NO: 393739 - DNA, 180 bp, Salmonella enterica
atgcctctaaaaacgcgtcccatttggggcgcgttgatgaatctggtcggtgatatattcagcaaatgcgctttgatagacgtaattatcagagctcacatattcaataatattatcataatgtccctgcaacacttttccttccagcgcatgaaagaaaatataatcctcgatggttga

SEQ ID NO: 393740 - DNA, 225 bp, Salmonella enterica
atgaagtatttaattttttttgcatcagctttatgttttcttttgtcgattgagtccatgtggatattttatatcatagcgaaaggtttttttgggtacatattgaacagccggttcattttttttgttaaattattaatcagttttttaatgagttgttttttcatgtttatggcctattttttatttaaaaaagttaagggttctgtttattatactaaatag

SEQ ID NO: 393741 - DNA, 207 bp, Salmonella enterica
atggtgtctgaagccatcgccgccggggatattcaggcgataaactactttgtggcgcagaaatacaccgaagcgttacagcaaatcggctcggcgaataacagcaaagtggtcatgatgccgctggatgccagcagtctgatgggcgctatcgccgggatcagcgagctggttaaggacagcgccagcgaacggaaaaaaccatga

SEQ ID NO: 393742 - DNA, 627 bp, Salmonella enterica
  misc_feature (604)..(613): n is a, c, g, or t
atgacttctacgccgatatccagaccgacgcttaatccggccctgagaaacttctggaccacgcaggcgcgaaataaggtgctctatggcgggcggtcatcgtcaaaatcatgggatgcagccggatttgcaatattcctggcaaataaatacagcctgcgtttttgctgcgctcgccagatccagaacaaaattgaagaatcggtttacacgcttctcaaaattcagatagaccggtttggcctgcggcatcgtttccgcattctgaacaacaaaatcattaaccgggttaccggctcggaatttgttttttatgggttatggcgcaacatcgaagaaattaagtcactggaggggatcgatgtgttgtggctggaagaagcccatgcactgacggaatatcaatggaaaatactggagccgacaatccgtaaagagggttcagagtgttggtttatttttaaccctggactggtcaccggtttcgtgtggcgtaactttgtggtcgatccgccagaagatacgctgattcgcaaaatcaactacgacgagaatccattcctttcagacaccatgctgaaggttatcgatgcagccaggcatnnnnnnnnnngccaggcatcgtga

SEQ ID NO: 393743 - DNA, 678 bp, Salmonella enterica
atgtcaaagaggatcgtttatgaaacttttgccgttgttggtcgctctccccctgctctgcacttctgcggttttcgccagttccatgatgtcgtcggctatttcaatggcggcggcaacatcaacaaactggatgtccgccagataacccatctgaactactcattcggcctgatttacaatgatgaaaaaggcgaaaccaacgcctcgctaaaagatcctgcgcacttgcatcagatttggctttcgccgaaagttgaatccgatctcgcgcagatcccaccgcttcgtcagcagaaccccgacctcaacgtttttctttccgttggcggctggggcgcgcgtggattctctggcgcggctgccagcaaagaagcccgcgcggtgtttattaaatcggcgcaggagattgtcgacaaacatggactcgatgggatcgatcttgactgggaatatccggttaacggcgcatggggacaggtggatagccagcctgccgatcgtgataactttaccctgctattaaaagcgcttcgtcaggcaatggccccccaaaaacgggtcaccatcgccgtcggcgcgaatgtggaaagcccgaaaagctgctgggaatatggcgccgatgacaataaccagttagcgaaacaattggcggactcgctggacattaagcgttaa

SEQ ID NO: 393744 - DNA, 471 bp, Salmonella enterica
atgaaccttgcagacatgtaccgggacggtcacggtaccgcagtcaacctgcgcctggccgccttatggtatttaagaagcgcgcaacagggtagtgtctattctcaatttcagcttgcctacgcctataatgcaggcgaaggcgttaagctggattatcagcaggcaacgcactggtatcaacaagctgcggctcagggaaatatcaatgcttacgttaatatcggctggatgtataaacaaggacacggcgtcgaacgtgacgatgaagaagcgcttagctggtttcatcgggcggcggaagccggaaatatcaccgcatggtacaacctgggctttatgtaccgtgacgggcgcggtacagcagtggatgcgaagcaggcgctctactggttccagaaagtgcagcccacgggtgaatgggacgttgatgaagaaatccgcaagctggaggctcagttgaatgtttaa

SEQ ID NO: 393745 - DNA, 1887 bp, Salmonella enterica
atgctttcgccttatggtaaagttcgtaccagtttatctattggcgaaggcggcgatctggacggcagttcgctggattattttattccctggtatgacaaccagagcacgcttttctttagccagatttcggctcagcgtaaagaagacagaaccattggcaatctgggcttcggcttgcgacaaaatgtcagcaactggctgctgggcggcaatctcttttatgactacgattttactcgcggtcatcggcgtctggggctgggaaccgaagcctggacggattacctgaaattctccggcaactattaccatcctctttctgactggaaggattccaaagatttcgacttttatgaagaacgacccgcgcgcggttgggatatccgggcggaaagctggctgcccttttatccgcagcttggcgctaaattagtttacgaacagtactacggcgatgaggtggcgctgttcggaacggacaacttacaaaaagatcctcatgccgttaccgtcggactaaattacacgccggttcctctggtgacggtgggcgctgattacaaagccggtacgggagacagtaacgatttcaacgtgaatgcgaccgtaacttatcagttaggtacgccgctggcggcgcagctcgacccggataacgtcaaaattcagcgctcgcttatcggtagccgcaccgattttgtcgatcgtaacaacttcatcgttctggaataccgcgaaaaagatccgctggatgttacgctgtggttgaaagccgccgagaccaatgagcacccggaatgcgtcgtgaaggacacgccggaagagggcatcggccttgaaaaatgccagtggacgattaacgcgctcatcaaccatcactacaaaatcgccactgcgtcctggcaggcaaaaaataacgccaaccgcacgctggtcatgccggtggtgaaggccgacgtcctaaccgaaggcaataacaaccgctggaacctggtgttgcccgcgtgggttaacgccagcacggaagcggagcgcgaggcgctcaatagctggaaagttcgcattacgctggaagatgagaaaggaaataaagagacctccggcgttgtggcgatcaccgtgcagcagggccgaaaaattgagctgattgtcgacaacatcgccgaccccgatcgcactgaccacagccacgccgccagcgcattggcggatggcgaagatggtgtcgtgatggatttactgttaacggacgcctttggcgataccaccgacagtaaaggcaatacgctggtggatgacgtgatgacgccggaactctacgacagcaacgataaaaaagtcacgctcgccgaaacgccttgctccaatgaaacgccgtgcgtgtttatcgcgaaacgcgataaagaggcgggaacggtcacgctcgccagtaccttaccaggcactttccgctggaaagccaaagaagatgcttatggtgacagtaattatgttgacgtgacgtttacgggtgaagccatagagccgctaaacgcgttgatttatcagttaaaaacggcgaaccccatcaatctaatcggtaaagaagataaacacccaacggttaacaacacttaccgtttcctgctctggcgcgacaaaaacaaggatggcgtgttccagatgtcggaacagctcactgaagcggagatggcgcaatacgactatcagtgggagttcaccggtcaaagcgtcaacgggcataccggggcgcaagccaatacccgtaatgaagatttagtccttcccgccaccaaccgcgaagcggcgcagaagtttgccgcccatgcagaagatggcgtgcagggctatggcttacgtgtgacgtacagccagaaaaaatag

SEQ ID NO: 393746 - DNA, 738 bp, Salmonella enterica
atgctatatatttttcgtcttattgttaccgttatttactccattctggtctgtgttttcggttctatttactgccttttcagcccgcgtaacccaaaacacgtggcgacgtttggacatatgttcggtcgtctggccccgctgtttggcttgaaagtggagtgccgcaaacccgccgacgcggaaagctatggcaatgctatctatatcgctaaccaccagaataattatgatatggtcacggcggcgaatattgtgcagccgccaaccgtcacggtggggaaaaaaagcctgctttggatcccgttttttgggcaactgtactggctgaccggtaatctgttgattgaccgtaataaccgcgccaaagcgcatagcaccattgcggcagtggttaaccattttaaaaagcgccgtatttctatctggatgttccctgaaggtacgcgtagccggggacgcggtctgctgccgtttaaaaccggcgcgtttcatgcggctatcgcggctggcgtgccgatcattcctatctgcgtttccaacacctctaacaaagtcaatctaaaccgcctgaacaacggactggtgattgtggaaatgctgccgccagtcgacgtcagcgaatatggtaaagatcaggttcgcgagctggcggcccactgccgtgcgttaatggagcaaaaaatcgcggaacttgataaagaggttgcggaacgtgaagcggccggtaaggtttaa

SEQ ID NO: 393747 - DNA, 2259 bp, Salmonella enterica
atgagcgagatggcagagcgccttgcgctgcatgaattcacggaaaacgcctatctgaattattccatgtacgtcatcatggacagggcgttgccgtttattggtgatggtctgaaacccgttcagcgccgcatcgtctacgcgatgtcggaactgggccttaacgccagcgccaagtttaaaaaatccgcccgtaccgtcggcgacgtgctgggtaagtatcatccgcacggcgacagcgcctgttatgaagcgatggtgctgatggcgcagccgttttcttaccgttatccgctggtcgacgggcagggaaactggggcgcgcctgacgatccgaaatcgttcgccgcgatgcgttataccgaatctcgcctgtctaaatatgcggaactcctgctcggcgaactcggccaggggacggcggactgggtgcctaacttcgatggcaccatgcaggaaccgaaaatgttaccggcgcgtctgccgaatattctgctgaacggcaccaccggtattgcggtggggatggcaacagatattcctccgcataacctgcgcgaagtagcgaaagcagcgattatgctgattgagcagccgaaaacgacgctggatcagttgctggatatcgtccagggaccggattatccaaccgaagcggaaatcattaccccacgtgcggaaattcgtaaaatttacgaaaacgggcgtggctccgtgcggatgcgcgcggtatggaccaaagaagatggcgccgtggtgatcaccgcgctgccgcatcaggtgtccggcgcgaaagtgctggagcagattgctgcgcagatgcgtaataaaaaactgccgatggtggacgatctgcgcgatgaatcggatcacgaaaacccgacgcgtttagtgattgtgccacgttccaaccgtgtggatatggagcaggtgatgaaccatctgttcgccaccaccgatctggaaaagagctatcgtattaacctgaacatgatcggtctggatggtcgcccggcggtgaaaaacctgctggagatcctgaccgaatggctgacgtttcgccgcgatacggtacgtcgtcgcctcaattatcgtctggagaaggttctcaagcgcctgcatatcctcgaaggtctgctggtggcgtttctcaacatcgacgaagtgattgagattatccgtagcgaagacgagccaaaacccgcgctgatgtcgcgtttcggcatcaccgagacccaggcggaagcgatcctcgaactgaaactgcgtcatcttgccaaactggaagagatgaaaattcgcggcgagcaggacgagctggaaaaagagcgtgaccagttgcagggcattctcgcctccgaacgcaaaatgaataccttgctgaaaaaagagctacaggcggattccgatgcctatggcgacgatcgccgttctcctctgcatgagcgtgaagaagctaaagcgatgagtgaacacgatatgctgccgtccgaaccggtgactatcgtgctgtcgcagatgggctgggtgcgcagcgccaaaggtcatgatattgatgcgccggggcttaactataaagcgggcgacagctttaaagccgcagtgaaaggtaagagtaatcagccggtggtgtttattgataccaccgggcgcagctatgctattgatcccattacgcttccgtcggcgcgtgggcaaggcgaaccgctgaccggcaaactgacgctgccgccgggggcgaccgtagagcatatgctgatggaaggcgatgaccagaaactgctgatggcgtcggatgcgggctacggctttgtttgtacgtttaacgatttggttgcccgtaaccgtgccggtaaggcgttgattactctgccggaaaacgcgcacgtcatgccgccgctggtgattgaagacgagcacgatatgctgctggcgattacccaggccggacggatgttgatgttcccggtagactctctgccgcaattgtcgaaaggcaaaggaaataagatcattaatattccatctgcggaagcggcgaaaggcgatgatgggctggcgcacctgtacgtgctgccgccgcaaagcactctgactatccatgtcgggaagcgcaaaatcaaactgcgccctgaagagttacagaaggtggtcggcgaacgcggacgccgcggcacattaatgcgcggcctgcagcgtatcgatcgcattgagattgattcaccgcatcgcgtaagtcatggcgattgcgaagagtaa

SEQ ID NO: 393748 - DNA, 573 bp, Salmonella enterica
gtgggaaaatcacgcgccaatacattaagccgcagtaccgaagatcagttttttatgtatttacgggtaaatacattaaataaactggtgccatatgccgctcagcgttttattgataatttgccgcagatttttgccggtaccttcaatcaggcgttgctggaagatgccagcggttttagccgcctgcttgaattatataagaacgtggcggttgaacatgtgtttagccatccggatgtagaacagcttgagctacagggataccgggtgatcagcgggttattagatatctatcagccgctattaagtctgtcgcttaacgactttcgtgagctggtggaaaaagatcggttgaaacgctttcccatagagtcgcgcttatttcagaaactttctatgcgccatcgtttggcctacgtggaagtcgtcagtaaattatccacggattcggcggagtatccggtgctggaatattattatcgctgtcggttgattcaggattatatcagcggtatgactgacctttacgcatgggatgaatatcggcgtttgatggcggtcgaacagtaa

SEQ ID NO: 393749 - DNA, 246 bp, Salmonella enterica
gtggccgtccggcgtacctgccctctggcgaaaattatcgtgattggtcctgcccccccggtcgggtcgacgacacagctgaatgtcatccgggaggccatgactgaaatgtatgccagcctggatattgcgttcgtggatgtcagagacgtggtgaatgcggccaataaggacttgtatacaggcagtgacatggtccacccggcgatgccggacacgtttaccggggtatgcagatggcaataa

SEQ ID NO: 393750 - DNA, 477 bp, Salmonella enterica
atggtgatcacaattctctatgttatctggcatgtttctttcagaaagtgtccattctgtcatcatgttttgaaacaacccaccgtgtgttgggggctgatgtatccgcggaagaatacaggtataagggagcgggtcgggtaccgaagcccatgggtgcgcaaaagtgaacccgcttcgatgcccaaccggcgccaggcctatccgcgcattaaagtcctggttattcactatacggcggaaaactttggcatttcgctggcgacgttaacgggtcgcaacgtcagttcgcattacctgattcccgcgatcccgccattatatggcggtaaaccgcgcatttggcaactggtgccggaacaggatcaggtcggcacgcgggcgtcagtttctgacgcggcgccacgcgtctcaatgatacgtcgtctattggccttgagctggaaaatcgcggctggcgaatgtccggtagggtga

SEQ ID NO: 393751 - DNA, 2346 bp, Salmonella enterica
atgaacatatcatcaagcggaattaatttttccacaattcctttccaggttaaaaaattagctaaaactattcgtgaacgtacgaaaaactggttctcctcagaaataaccagtgttaaaaacacgcatatatctttaaatgaaaaattaaaaatcggaaagacctcaccgattgagatagcgttaccacacaaaataaaagaactctttcagccgaaagacaaaagcaccttagacaaaacattggttactgttaaaaacattacagacacaaataacacatgtaagaaaaacatttcagaagaagatgcctcaaaaattaccatagcattcatgcgtaagcatattgcaaatcaatcatatgattataattacagagtgacaggtgcagatctgctccccgaagaagtctcagtatcagccaataacaggccgacggtttctgaagccagaacaccaccgccagtagctcccaaaccatcagccatggctatagccccaccatcatcacctgccggctgggctgagaaactcaaggatgcagttctacgactgaaaaccggagaaccccttacggccgcagatctcgatttttcaaacgcagatttccgtaacatcaaattcagcgaagtattgccccccagcttcatggaacgagacggtgatattattaagggattcaacttttcaaattcaaaatttacgaattctgatatgtctgatttacattttgacaaatgcaagttcagccattcgtcgtttgctgttacaaactgtagcaatacgatattcagtaattcagacatgagtgaaatgtttttaatccctttattttcacggcaacaaccgccatcctttactaactcaacattaaaaaactcatttattaattgtggcataaaactttctggagttattttaaataaacctgataactccaccccgccccccggcgtcggctatgccatgcgtttaggtgacacctggctatcagccccccctcaatggaatgagaggagtttagatgcgcatttaaatcatgaacacaatgatggtaaaagtattctgatgaccattgacagcctgcctgataaatacagccaggaaaaagtccgggccatggaagacgttgttacgtcattgcgggatgcccggttatcagaggcagatatccggccggttgaaagttcgctggtgagcgtactggcccacccgccctatacgcaaagtgcgcttatccgcgagtggctcgggcctgttcaggaccgtttttttgcccaccagtgccagacctataatgacgttcccctgccggctcctgacacatattatcagcaacgcatactgcctgtgttgctggattcgtttgacaggaacagcgccgccatgaccactcacagcggactctttaatcaggtgattttacactgtatgacaggcgtggactgcactgatggcacccgccagaaagctgccgcgctttatgagcggtatcttgctcacccggcggtgtctccccacatcaataatgggctcttcggcaattataacggcagcccggactggacaacccacgctgcagataatttcctgctggtttcctcccggacttcagacatggcgatgatgctctccgctgacacgctgttaacaatgctgacccccactcctgacactgcatgggaccgtttttacctgctgcgagggggagagaacgtctccaccgcgcaaatctctccggaagaattattctgccatgactttccggtgtttcacgccgcatttaatcagcaggcccaacagcgacgctttgggcaactgattgataccatcctcagccctgaaggacacgcggaactgaaccggcagtttattgccgccacgaaacagaaatattccaccgtgaagtttgttgatgccccctcacagtcacgtctgaacgctgtttttgaacccctgcttcctgaaggtaaactcagtccggcacactaccagcacatcctcagcgcttacaatctggctgacgcctccccacaggagcaggcgaaaaccctgttctgcctcagtaccgcattcgcacgctattcctccagcgctattttcggcactgagaatgactctccgaccatcctgagaggctatgcggaggcgctgatgcagaaagcctgggaactgtctccggcgatattcccgtccagcgagcggtttaccgactggtccaaccgttttcacggcctccataatgcctttacctgtaccagcgttgtggcgggtgatatgcaacgtcatgccagacaacatttcccgggtgttctgtcatccatcctgccactggcatgggcgtag

SEQ ID NO: 393752 - DNA, 474 bp, Salmonella enterica
atgtatgtactggggtttccggcagtaaaacgcgtttgcgcgcacagttatcagaaaattggtacgcgtaagcactgcggccaatttggcgagtgggaccccgcgacttataccgttgaggattcactgttcggcacgattgaattccacaacgggggcatcttacgtcttgaaaccgcctttgctctgaatattccggagcaatccgtgatgaatgtgaacttttgcggcgacatagccggggctacgctctttccggcacagatatataacgacctgaatggcgaattaaatgtcctgttcaggcgagatactgcggacgacaatcgtcatcttcgcagcatggaagcctttgttaatcatgtgcagggtaagcccgtcatgattgcagacgcggaacagggatttgtcattcaacaactggtggcagcgttatatcacgccgctgaaacagggacgtgcgtggaattatga

SEQ ID NO: 393753 - DNA, 492 bp, Salmonella enterica
atgaagggtatatacagtcatgaatttgcgctggtcgacctgacgataatgccggataatcagcttttgcagcatcggcggatagcgatgttagagctcctgcaaaaacatattcgtcaacgcgatttaagcgaactgctcgacccccttatcacgcttttaacgcaggatcatttgacggacacgcagctcagtgggctggtcaactatatgttgaaagcaggaaacgccgcagaacccggggcgctgattcgtcaactggcgcagggcgcgccgcagtataaggagcaactgatgacaatagcggaatggctggaagaaaaaggctggacggaagggttgcaaaaagggcttgagcaagggttagcacaaggccgtgagaccgaagcgcgcgctattgcccgcaaaatgcttgccaacgggctggaacccgggctcatcgccagcgtcaccggcattacgccggaagagctttccacgctttcgcattag

SEQ ID NO: 393754 - DNA, 630 bp, Salmonella enterica
atgacacggtcgcgcgtctgtccggatactgaatccacctgtctcagtccggcatcggatgccctgccggagactgccatcatcagtgatactggcgtgcccctcccgaataccctgatttgtccgcctgacactttcaaagccaggccggcggcacaggttgcccacggcatcacgccggcgatggtacgtgataaattcacgccggatgaaccggcgtcgcggatcaggactgcggtacaggaccaggatgtcatcatctataacgccagttttgatgccagttttcccggcgatttgctggccggcgcgcgatcggtacagtgctgtatgctggcccgggcccgcaacgcccgcgactggttcgagagaacaattgctgacccggacggtacttctgaaagcgggttactcacgtgccacgattgcggccatgacgccggtggccgaacgacaagttcgcgggtggccttgtgcagggcatcctggcggcaatcggcaattttcgcgtggagccgggccacctttaagcgggctctggcgcggttctttgagcctttagcctttttgcttaaccggcgctggagtggcgccaggcgagccgcgtatttagcggtatggcggggatag

SEQ ID NO: 393755 - DNA, 825 bp, Salmonella enterica
atgaaaaaaacactgatggcactggcggtggctgcttctgcgttaatgtctggtcaagttatggctgatgtaagctggcagcaacccggtaatctagatcagactgtgaattttggtggtacaattaccaaacctgaataccagaatcaatgggtatggggtgttggagctggatttgatagtttccaaagctctttcactgatctgtcagaagacaagactgaattaacatttgcagccaaagagaatatgcctgttcttgtggggaaggtaacggaggcctttcctctagattttcaggctggatatggggctgctccgcaaatccagttcagtggatttgatggtaataaaatcgaaatggtatctaacgacagaagttctgttagcttacagatccctgtaaaagggaaagactctctccagagcggtgtttttactcttactggaacagcacaaaccttagtgatgtatcacgctaaaggaaatgatatggcgttcttcggctcagtgtactcgaagcagcctggccagattttttatggtggcgcacctgaaaatgcggtttcatactcaggactcgtttcatttggggggcttggaagtgatgatttgctggctctcgtaactaaaaagtatccagacgtaacaaaaaaaggtggtaacactcccatggaggggactatcgatagaattagtggtggtgctgcttcttatgcctttggtataaaagctggagtgtcccagaaggtaaaattcaatgaggctgttactgaaaatacggagtgggttgcaccgctgcatattactgtctcttattcttaa

SEQ ID NO: 393756 - DNA, 597 bp, Salmonella enterica
  misc_feature (523)..(532): n is a, c, g, or t
gtgttacgcattgtggcgaagcgttttattatttatggcgggatattttccgccattaattttgctgcctggagcgccgaatatacgccttcctggtcccaaagccagcaacaagctgcggcatgttatatgaccggcgatgaaacctgcataacgtttattgatgatgcggtgaggcaggcctcgcggcaatatggcaaacgttcaatacagcttgttcgtagcctgctattacaaagcgatatttatcaatggctgggtaaaccggaattaacgccccacatgctgcttgaggcacgggcgattatgaatacctttccggcagacaggtatccgggcgatcgggccgatatgtttgaacacctggcagcattttctgtttatcgtgatgagggtatagaggactcgcctgctgagcattggcgatacaagatcaaggttgattaccgtcagcaaatagcctggcaggaacaggcattaacgtggcggcttaaagacaaaaaggcgtcgacagatgcgttannnnnnnnnnttattcttttgctctgcaagagagggatgtcgcctgtgatagtacgcgtaaagcatattatttag

SEQ ID NO: 393757 - DNA, 147 bp, Salmonella enterica
atggatatagacaatgctgtcttcatccagcgcgccaagatggatagtttcttttgtcagacgagacagttcgcgcatctgaatgtccgcactgcggatgagatcaacattttgcaacgctcgcgcgcccagttcaaacagctttag

SEQ ID NO: 393758 - DNA, 231 bp, Salmonella enterica
ttgcgccatctcaaccgcagcgagcgcgaccacgacacctaccaccagataaaaaaaacgcaaaatctttcggtggttatgcgcggaaatggttttgaagcggatactccagaccatcccgataatgaccacaatatagacaaacagcatcgtggacgtgacatatttaccggcattcagcgactggccgaacaggaagttaaatgctgtaagccccgcgccgatgcctaa

SEQ ID NO: 393759 - DNA, 135 bp, Salmonella enterica
atgcagatgggtgagcaagatagtattgatgttgcgcagtggaatgccatttttcaccagttgcagactggcgccatagccggcatctatcagccatattttatcgccgatagtgagcgccgtcgcttgcggtag

SEQ ID NO: 393760 - DNA, 1035 bp, Salmonella enterica
atgaaaaatagtaaaaccaaagtgagtatcattatcccgttatataatgcgggagctgattttaatgcttgcatggcgtcgttaatcgcgcagacgtggtcggcgctggaaatcattattgtaaatgatggatcgacggatcattccgttgagatagcaaaacattacgcagaacattacccgcatgttcgactgctacatcaggccaatgccggcgcatctgtcgcccgtaatcttggcctgcaagcggcgaccggcgattacgtcgcctttgtcgatgcggatgacctggtctacccgaagatgtatgaaacgctgatgaccatggcacttaacgacgatctggacgttgcgcagtgtaatgcggactggtgcgcccgaaaaaccgggcacgtatggcaatctattccgaccgatcgtctgcgttccaccggggtattaagcggaccggattggttgcgtatggcgctggcctcgcggcgctggacgcatgttgtctggatgggcgtttatcgacgtgcgctgattatcgataacaatattactttcgttcccggactgcatcatcaggatatattatggtcgacggaagtcatgtttaatgccacgcgcgtacgttataccgaacaatcattatataaatatttcctgcatgataattcggtaagccgtttgcaaagacaaggcaataaaaatcttaattatcagcggcattatattaaaattacgcgcttattagaaaagctcaatcgtgattatgcccgtcgtattccgatttacccggagtttcgccagcaaattacctgggaagcgttacgcgtttgtcatgcggtgcgtaaagaatccgatattttgacccgccagcgtatgattgccgaaatttttacttctggcatgtatagacggatgatggctaacgtccgcagcgcaaaagcggcttaccagacgctgctctggtctttccggctgtggcaatggcgcgacaaaaccttgtcgcaccgtcgtattgcccgtaaggcgctcaatctgtcttag

SEQ ID NO: 393761 - DNA, 240 bp, Salmonella enterica
atgggagacctcacgcgtgtggcgaaaagatccgaccgggaagatgatgttcctccggtggtactcggcccggatgaactgggcgatctggataacctgaccattatcagaccagacacactctacgtccgggtactccgtgatctcctcccaatatcagagccatcattcatccagacacagacctgtaaagcagattttgcaatatcgataccaacaactctgatcgtgttcatgtaa

SEQ ID NO: 393762 - DNA, 498 bp, Salmonella enterica
atggagctgcatctgcccgcagagctgcgggccatctacgatctcagcacgctgaaactggaatcaggctcgtttgttgaggatgatctccgccagtatttcagcaacgtgctctacagcctgaaaaccaccgctggcgacggatatattcatgtcctgattgagcaccagtcaacgccggacaaacatatggcctttcgcctgctccgctatgcggtggccgccatgcagcgccacctggaggcaggccataaaaaattgccactggtgataccggtactgttctgtacggctaaacgcagccgtatccgtactccacccggtggctggatgagtttgacgctccggcgctggcaggcaaactctacagcagcgccttcccgctggttgatgttaccgtcattccggatgtcgacatcgccggacatagccatctacacgtggcacgtcacggccaacagcagtgtatctataaccttcgtctccactcataggtaa

SEQ ID NO: 393763 - DNA, 513 bp, Salmonella enterica
atgtcgcaacagtctctttctacttttttgcacgcatcgctgctggtgcgtgatattcacggacactatttaccagcaactgacaaacagatcctggatgctgcttgtcagatcatcgatttgaaaatgcagcggggagcgcaatttactgctgcatcgtccacccgggattatctgtctgtcaaactggccaattatgaacgagaggtgtttgtggttctgtttcttgatatgcaaaatcggctgattgagtacgctgaaatgttccacggtagcattggcagtaccgaggttcatccgcgcgaaatcgtcaaaaaggccatgcagaataacgccgcggcagttattctggcacataaccatccgagcggaaatgccaaaccgagcgacgcagacagaaagataactcagcatatccgtgaagcgctgagtctggtggaggttcggacgctcgatcatatcattgtcggcggcaacgataccatatcattcgcggagcacgggtggttgtaa

SEQ ID NO: 393764 - DNA, 1209 bp, Salmonella enterica
atgaaacgtcttactcataccagcatgtcactctccgggggctgctctcgccgccgggccttatttgcaggctgcagcgctcacgccgtacatgacgggctgactgatgtcatctacgttttactgcctgtctggcagtctcagttcgcgatgagttatgcctggctgggcctcctgcgcggcgcatattccgggatgatggcggtttcccagctgtccgttggtatactggccagacgacggggacgggcatgtctgctggtcaccggtacggcgctggtgggcattgcctggctccttgcgggtatggccggcgggttaacaacgttgttactggcgcttttgctggggggactgggcgccagtgtccaacatccgctggcatcctcactgattaccgattcatacagcgcgggaggtggcgttaaagaggcgctggcacaatataactttgccggtgatatcggcaaaaccctgttgcccgggctggtcggagcattactggctgtcatcaactggcgggaaagcgccgtactactgggcctgtctggccttgctacggctgggctgctgtggtggctgattccgtccaggcctgctcactcagacatgccccctctgaccaccagtcccgtcacggataaggcatccggtcggtggctgtacgtactgaccgttatcggcacgctcgacagtgcagcacgaatgggtttcctgacatttctgccgtttctgctgaaagataaaggtgccggtatcacagacactggcctcggactgacgttgttatttgtcggcggtgccttcggaaaactgctgacaggctatgtgggtacacatatcggcatggtgaaaacggtgtggctgacggagttcaccacggcggtattgatcgtcatcgcagtatatctgccctttctggccctgatgatgatgttgccactgctggggatcatgctgaacggtacatcgtcggtactttatggctccgtacccgacctggccggagcaagaaaaatcgaacaggcatttgccatcttttacaccggaaccaccggaggcggcacgctggcaccgatactgttcggctgtatcggtgatatctccgggatccctcatgccattatgctgctggccgccacactgctgctgacactgcctctggcctggcatatccgaagcagcaaggaaatcgtgagcaattcctga

SEQ ID NO: 393765 - DNA, 183 bp, Salmonella enterica
atggcacgccgtgagctgactattcagtcccacgcgctgttagttgtgcggacgctggatctgatctttagcgccctccagtgtaatcggtgggggggtattgaattagatgcactggcggctgtcatgtacctctttgcgccatgctttactatgccgaccgtgagcaccagccgggcatga

SEQ ID NO: 393766 - DNA, 405 bp, Salmonella enterica
atgctgttttataccctccgtttggatgaaacaccgatagagcgtgctgctattctggcctggcatacactcaaaaccatccttcgcggtgagatagacaaagcagttcaccagatccagtcaacacagcggcaactggaacaatatctgattgggatgcggatgaaagtgcgtgccgctcagtcgggtgatttgagttcatcctgtgtgcacgatatccgccccgtactcaatgactcttttgataaaactcgggaggttctggaacatattcggaacacaatgtcggccattaccgaaatgttggttgacgggcgctcagcattacacccggataaattaaataagctgcgtaaggcgcaggacgtttttacagaggtctgctcttttacgcagcgctattaa

SEQ ID NO: 393767 - DNA, 369 bp, Salmonella enterica
atgcccggccaggttaccgctcacctgaacgccggaaagcttgtactgatcgccttcggtgatattgacggtgatgtagatccctttcttatccggcgtcagactcacttgcgtggagtcaatattgaaacgcgcgtagccgcgatccagatagtaactgcgcaaggtttcaaggtcgcccgccagcttctgcttctggtatttacgatcgccgacaacgttccaccacggcacttcgtcacgcaactggaaatgagaaatgagttcttcggtgctaaaggcatgattaccgacgatgttgatctgttggatcttcgccgatacgccctcctggaacaccagtttaagatcaacacggttgcgcggtag

SEQ ID NO: 393768 - DNA, 327 bp, Salmonella enterica
atgaaactgtcgcgtaacagccgtggccgcaagtggctgaagacgcttggtgacgatgcgctgccggatctcactgcttcagcacaaccttctctgcgggggatgcataaacgcgacaaagcacgggagaatacagcccggctctgttggctgctggttcaacttctggttgaggagactgatgggcgttatgggacgtctgataaaccggcttcggatgggatacttcggaagctgaaggcgcaggagcgggaattgccgtcagacgggcttgggcgaggtacgttttataaggtgttgaggatagggtgggagagggaaacgtag

SEQ ID NO: 393769 - DNA, 195 bp, Salmonella enterica
atgaacaaggtggtagaatatctttatacagcgaattccactccgttcattggcaacgaagaaaacggcccagaatcgctgacttttgctacgtataagtcgcaagaaagagaggaaaaagaaaggataagtaaaggatatgagggggatgtattggggaaagcgtcagcaacgacgcgctgcccctacccctga

SEQ ID NO: 393770 - DNA, 273 bp, Salmonella enterica
  misc_feature (251)..(260): n is a, c, g, or t
gtgaatgtctaccagatctttatcggctgcggaggtaacaatcaggaatccctctgccgcatcaccgcgctcaaacggcgtactgccaatggcagctatgaatatcggtttcccgtcctttctgtaaatgaaatacggctgttttttgtcgccttcctttttccactcgaactatccgtcggcaaaacagatagcccggcactgttttctgggaggagagccgtcagtcatggggtgatgatatccggtannnnnnnnnngtatcaattttag

SEQ ID NO: 393771 - DNA, 1863 bp, Salmonella enterica
atggatagtcatactctactgcaggcgctgatctatcttggttcggcggcgttgatcgtgccgattgcggtacgtttgggcttaggatcggtgctggggtacctgattgcggggtgcattatcggcccctgggggctacggctggtgacggacgccgaatctattctgcattttgcggaaatcggcgtcgtgctgatgttgtttgtcattgggcttgaacttgacccgcagcggttatggaagctacgcgcctcggtatttggcggcggcgcgttgcagatggtggtctgcggcggactgattggtctgttctgtatgtttcttggcctgcgttggcaggtggcggaactgatcggtatgacgctggcgctttcgtccacggctatcgccatgcaggcaatgaatgagcgtaacctgaccgtttcgcaagtgggtcgtagcgcatttgcggtgctcttgttccaggatattgcggcgatcccgctggtggcgatgattccgctgttggccgccagcggcgcatccaccacgcttggcgcgtttgcgctgtcggcgttgaaagtcgcaggcgcgttggcgctggtggtgctgttgggacgctacgtcacgcgcccggcgctgcgctttgtcgcgcgttctggtttgcgggaggtgtttagcgccgtggcgctatttctggtgtttggtttcggcctgttgctggaagaggttgggctgtccatggcgatgggcgcgttcctggcgggcgttctgctggcgagttcggaatatcgtcatgcgctggaaagcgatattgaaccctttaaggggttgctgctggggctgttctttattggcgtcggcatgtcgattgatttcggcacgttggtggacaatccgctgcgtattctgctgttgctggccggttttctggcgatcaaaatcgtcatgctgtggctggtcgcgaggcccctgggcgtaccggcaaaacagcgtcgctggtttgccgtcttattaggtcagggaagtgagtttgcgtttgtggtttttggcgcggcgcaaatggcggatgtacttgagccggagtgggcgaaagcgctgacgctggcggtcgcgctgtcgatggcggcaacgccgatttttctggtgctgctgacgcgcatggagaaggccgcgacgggtgaagcgcgcgaggcggatgaaatcgatgaagagcaaccgcgggtcattgtggccgggtttgggcgatttggtcagatagccgggcgtctgctgctgtcgagcggggtgaagatggtggtgctcgatcacgaccccgatcatatcgaaacgctgcgtaaattcggcatgaaggttttttatggcgacgcgacgcgtatggatttgctggaatctgccggagcggcgaaggcggaggtattgattaacgccattgacgatccgcaaaccaatctgcaactgagtgaactggtgaagacgcatttcccgcatttgcagattatcgcccgcgcccgtgatgtcgatcattacattcgcctgcggcaggctggtgtggcgatgcccgaacgtgaaaccttcgaaggcgcgctcaaaagcgggcgacaggcgctggaagcgctggggctggggcgttatgaagcccgcgagcgcgcggatctgttccgccattttaatacccggatggtggaagagatggcgaaaggggaaaacgatccgttatctcgcgccgccgcctataaacgtaccagcgcgatgttgagcgaaattattaccgaggaccgggagcatctgtcgttgattcagcgccacggctggcagggaacggcggagggcaaacattccggggaggtcgccgatgaacccgaggtcaaaccgtcaatctaa

SEQ ID NO: 393772 - DNA, 936 bp, Salmonella enterica
atggcactgcccattattattgattgcgatccgggtcatgatgacgctatcgccctcgttctcgccctcgcctcccccgaactggaggtgaaagcaatcacctcttccgccggcaaccagacgccggataagacgctgcgcaacgtgctgcggatgctgacgctgctcaaacgcccggatattccggtagcgggcggcgcggtcaaaccgctgatgcgcgagctgataatcgccgataacgttcatggcgaaagcggcctcgatggcccggcgctgccggagccgtctttcgcgccgcaaaactgcactgccgtagagctgatggcaaaaaccctgcgcgaaagcccgcagcccgtcaccctcgtcgccaccggcccgcagaccaacgtcgcgctgttgctgaatagccatccggagctgcacgcgaaaattgcgcgtattgtgatcatgggcggcgcaatgggattggggaactggacgcctgctgcggaatttaatatttacgtcgacccggaggcagccgaaattgtcttccagtcgggcattccggtggtgatggctgggctggatgtcacccataatgcgcagattcacgccgccgatatcgaacgcttccgcgcgattggcaaccccatttcaaccattgtcgccgaactgctcgatttcttcctcgaataccataaagatgaaaaatggggatttatcggcgcgccgctgcacgacccgtgtaccatcgcctggctgctgaaaccggagattttcacgacgattgaacgctgggtcggtgtcgaaacgcagggaaaatatacgcaagggatgacggtggtggattattatttcctgaccgggaataaacctaacgccacagtgatggtcgatatcgacagagaaggatttgtcaatctgctggcggagcgtttaaaacactacgcgtaa

SEQ ID NO: 393773 - DNA, 1239 bp, Salmonella enterica
atgttgtttcgtacaaaaaaatctgaagtcagtctgataaaaaataatacaacccgtgttgtcttttcagttcgaaatggtaaggcgctgcttcgtcccggtattatccacgatcccaattccgatgcggggattcataccctctcctggcatggctcgccgctgatgcgttttttctctgaatcctggtgcccgacctgcgcagaatttgtttatgccggttttagcaatgatgatgaaggcgccgcacagtttttatcctcacttgccgagtggaatcggccaggagtcgggttgaacgaagcattcaccgccctgacgccgctattttcactttgtgccgatggctattaccggctggaagaacgcgagctttatcccacggatggtaacgggcattttttctggtcggtggataatgaaaaacaactgaatccagctaccgcaggcctgtggcttgctgaatcagactatcactatctgtccggcattccctgttttttactgccaggccagccgccgtcacgatttaacccacagcgcgcggagtattatcgcgataagccagacgctcacgcgctggcctggtatatgaatgactcctggctttgcgtcctgcttgatggccaccataaagcgacggccgcggcgctggaaggccgaccgctgaaaacatgggtgattagccaaccggtagcggtatcatatgacgagaccgggcggcaatgcctgcggttctatgacgacgagtgcctggaaaaagcgatgtttcgacgacacatccccctgcaagtgcaatatgaaagattaccgccgcttctctgggatgagtacgccacgcgccgtgacgaacgctatgcacgcatccattggccagccacgctggcggactgcgcggcgcgttatcccaatcttgaggcttgcgctgccatcattgcggcaggcgatctcagtgaagccagcctcaataaaatgatggttcaaggaatagcagaggaaggatttcccgcgacggttttgcgggcactattttatacccattcccccttattgattgattttatccgttttctgacttatacccccggttattcttgccattgtccgctggcgtttcgtttactggctcagaaacgcacgccacaggccgatgcttttttcctcgactttgcaatcaatgatgacggcgagcgcccggagctgacgaaaattatggatgagtactttcgccaaacgtga

SEQ ID NO: 393774 - DNA, 702 bp, Salmonella enterica
ttgcaagaaactatgctgacatctcattttccccttccctttgccgaacacaggctgcatatcgtcgactttgatgcgagcagctttcacgaacacgacttgttatggcttcctcatcacgatcggctccggtctgccggacgcaagcgtaaagctgaacatctggcaggccgcatcgccgccgttcatgcgctacgcgaggtgggcgtcaggacggcacccggtattggcgacaagcgacagccgctatggccggacggcatatttggcagcatcagccactgcgcgtcaacggcgctggcggtcatatcccgacagcgcgtcggcgttgatatagaaaaaatcatgagtcagcacacggcgacagagctggcgtcgtccattattgatagcgatgagcgccaaattctccaggcgagctcgctcccttttccacttgccctgacgctgtctttctccgccaaagagagcgtttataaagccttttcagaccacgtcacgctcccgggattcgatagcgcaaaaattacctcgcttaccgccacgcaaatctcgctaaatctgcggccaacctttgccgccacgatggcagaacgtatcgtccgtataggatggtttcaacgtgacaatagcgttattaccctttgttcctggaataacgcgctttcctcacgacaggagcgctcccgcttctatacttag

SEQ ID NO: 393775 - DNA, 144 bp, Salmonella enterica
atgatttttctttttgttatctgcaagtgtgttatcaaaaagggaaagcatattctcgtccgccttcagcctgtcgcgcaggtaatttctgcgcatggtgtcggaggaggtaaaaatattctgctcaaaagcgtaagcaaataa

SEQ ID NO: 393776 - DNA, 414 bp, Salmonella enterica
gtgtgcgataatacaggcgttagatccctgttccgctatcctgagtattttcgccccgtccagaagtacctggttatccccctggcgaaacagttgcgtgtcatcaagggccataagcgcacgggagacggcctccagggtttttatctgcccggcgctcagatcggcgcgaaaggacgtatcttccggtacctctggcgtcaggcgaaccgcgagccgggcactgaggtcagtcagggcctctctgctcgtggagatagtttccataccgtcctggctttcggtggcataaattatcttcatggccgcatcagagtagtccggcatcagatcgacatcaacgtaggtgcccccgaactctttcagggccagaaggcgcagataatccgaggcgctggccagattgccccgtaa

SEQ ID NO: 393777 - DNA, 780 bp, Salmonella enterica
ttgctccgtcagtctcaccgtagtgtcttccccggccacaatacgttgcagcgcgtcgttggtatgggcgatggccgagccatcccggataaaccgcagagtcagagcattatcatccagccagagggttacgccggcagtcccttcactgcgaagcaggtgccggactgcaaccagcatgtcactgtccgggtccggcgaactcagttcaggaaagagatgtatatgatccggcgttgtctgtgtggtggttcgaaaggtcgcttccagcttttgttgcaggatccatacgcccgttttcgccacttctccggtcagctgcgtggagagtcgggtgagcaccttgtccagtccggacaggtcttccagagccagtggagtatcgctgtgctgacgccgggccagctgtccggcctgctgctgtatctcaggccatatgcgctctatggccgtacggtcagccccagtgacctgtgcaaacatgtctttgttcagttgccgccagtccgtatccggacgaatacggaacggtgccggctcccgctgctgcaggcggcgaataatctctgccgccgtcaggtcctgtttggatatccaggtacttgtctgttcagcgggcgtcagggtatttattccgccggtaaagtggggagcaagcttagagcgggcgtcatggacaatcccggtatccatgtcattgttatacagacgcagtctgtcgccgctggcccctgccagctcctcgccgagcggaccgagcgcctctgcatatttttttaa

SEQ ID NO: 393778 - DNA, 138 bp, Salmonella enterica
atgatgactaactacacgctaaaacgccgactggcggagttcgcctcctcgctggtgagtccaggagaatccgtttttattgaaaatggcagtagcaacgctcatctggcctttatcaaccaccatttgcaaaattga

SEQ ID NO: 393779 - DNA, 6513 bp, Salmonella enterica
ttgcatcaggtttatgtcaagattgaggatatcgcgggtaataaagcgaacagcgcggtactcgattttactatagataccacaatatcaacgcccgtgatttccctgctttctaaggatgatactggggttacaggagataacctgaccaatatcaataagccaggttttgctatttccggtgttgatatcgatgcgcatcgggtcgtcgtacaggtgatgcacaatggcgtgagcgaagagatcgaactttcccaccacaacggtagttggttatttacgccagggaatacatgggcggatggcagctacacgttaacggtgaaagtagaagataaggcaggaaatatcagccactcagcgccgctgacggtcacggtggatacccaaatcaccattgataaggtggaactggttaacgacagcggtgtcaagggtgactacacgaccaatgacgaccgtccgcatttccgcgtgacggtgcccgaggatgtcaacgaggtacgtctgagcattaacggcggcatggcctgggttaaggcgacacaaagctcgacaccgggcgtctgggattatacctggccagacactgtgaaggatggtgactatacgctgaccgtggaagcgactgacaaagcaggtaatacggtaacgaagacgctcaacttcactatcgataccacgctgtcgacgccggttatcgtactggacagcgcggacgacagcggcgttcagagcgataacatgaccaatcacacccggccgacatttaacctgcagcatattgacgatgacgccgttagcgttacggtcagcgtgacgcatggaggcgtcacgaacacgtttgacgccactaaaggggcagggggatggacctttacgccgccggcatcctgggcggatggggattataccctgagcgtgtcagtccaggacaaagcggggaacaccagccattccgcgccgctgacggtgagggtggacacgcaaatcgcgatcgacagtattgaactggttaacgacagcggtattcccaatgacaatctgaccaacaacgtgcgtccgcattttcgagtgacggtaccggcggatgtcaacgaggtacgcctgagcattgacgacggcaagacatgggtaacggcggcgcagaatacagcaggcgcctgggaatatatctggccggatgatgtgaccgatggttcccataccgtgacggtggaagcaaccgatgaggcgggaaataagacaacacagacactcgatttcaccatcgataccactctgtctgtaccgaccctctcgctggacagcgcggatgacagcggcatcgcgggcgataatatcaccaacgttaaaacgccgggctttaccctcgacaatattgataccgatgtcagccgggtgatggtggaggtaatgcataatggcattaaacaggaggtgcaactggttcagaccggcggacagtggcgctttgcgccgaccagcgactgggtggacggcgactatatcctgacggtgaaggtagaagatagggccggaaatgtgaagcagtccgcgccgttgacggtgacagtggacacgcacatcgccattgaccgtattgaactggttaacgacagcggtatccccaacgataatctgaccaatgaagcgcgcccgcactttcgggtgacagtaccggcggatgtcaacggtgtaagactgagcattgatggcggcaaaacgtggtttgacgccacgccgagtacggcacagggggtctgggattatacctggctgacgaatgtggctaacggccctcacaccctggtggtggaagcgaccgatgcggcgggaaacaaaacgacgcagaaactggatttcaccattgataccacgttgtcagaaccgactattacgctggacagtgcggatgatagcgccgctggcgataacatcaccaacgttaagacgccaggctttaccctcggtaatatcgacgccgacgtgacccgcgtagtggtgacggtggagcatgatggtaagaaccaacagatagagctgattaagaacggcggcgtatggcgctttacgccgggcgctgcctggaccgatggcgactatacgctgacggtaaaggtggaagatgaggcgggtaatataaattattctgcgccgctgacggttactatcgatacgcaaacgtctattgatcgcatcgaacttattaatgacacgggtattgtcggggataacctgactaatgaagcacgcccacagtttcatattactgtgccgacggacgtgaactctgtgcaactgagtattgatggcggcaccaactgggttaacgccacgctgacgtctggcggcgtttgggagtatacctggccgacagctctggttgaaaatacgtataccctgacagtgaaagcaaccgatgttgcaggcaacacggcgacggaaacgctcagttttaccattgataccacattgtcgacaccgaccatcacgctggacagcgcagatgatagcggcaccgtcaacgataatatgactaacgttgaaacgcctggttttattatcggcggtattgatcctgatgtgactcaggtcgtcgtgcaggtgatgcgtgatggtcacagcgaggaagtgacactgacgcagactaacgggcagtggcgttttgtaccggacagcgcatggaccgatggcgattatacgttgacggtaacggtgaaagacgaggcggggaatattcgccactcagcgccgttgacggtcactatcgatacccaaatcgccatcgacagtattgaactggttaacgacagtggtatccccaatgacaatctgaccaacaatgtgcgtccgcagttccaggtgacggtaccgacggatgtcaacgaggtgcgcctgagcattgacggcggcaagacgtggtttaacgccacgccgggcgcgacgccgggcgtctgggattacacctggctgacagatgtggctaacggttctcacactctgacggtggaagcgaccgacgcggcgggaaataaggcaacacagaaactggagttcaccattgataccatgctgtcagagccgactatcgctctggacagcacggacgacagcggaacaaaaggcgataacctgaccaacgtgaataagccgacgtttatactgggcaatattgacgctgacgcacggtatgtcacggttgaggtacagcatggcggcactaaagagacgctgacggcgaccaaaggcgcgaccggcatctggagcgttataccaaccggcacgtgggcggatggcagttatacgctgacggtgaaggtggaggatgaagcgggtaacgtaaaacactccacgccgctgacggtcacggttgatacccaaatcaccattaataatgtggagctggttaacgacagcggtgtcaagggcgacaatctaactaacgacgccaatccacagttccgcatcacggtaccggtggatgtcagcgaagtcagtctgagcattgacggtggtgtaacctgggttaaggcgatgcagagcgcgacgcagggcgtctggaattatacctggccaaagacagtggcagatggtgactacacgttaacggtgaaagcgactgacaacgcaggcaatacggtgacgaagacgctcgacttcactatcgatactacgctgtcgacgccggttatcgtactggatagcgtggacgacagtggtgtccagggcgataacatgacgaatcgcgcccagccgacatttaacctgcagcatattgatgatgatgccgttcgcgttacggttagcgtggagcatggcggcgtcaccaccacatttggcgctactaaagacgcaggcggatggacctttacgccgccggcatcctggacggatggggattataccctgagcgtgtcagtcgaagacgcggcagggaacaccagccattctgcatcgctgaaggtcactatcgatacccaaatcgccatcgacagtattgaactggttaacgacagtggtatccccaatgacaatctgaccaacaatgtgcgtccgcagttccaggtgacggtaccgacggatgtcaacgaggtgcgcctgagcattgacggcggcaagacgtggtttaacgccacgccgggcgcgacgccgggcgtctgggattacacctggctgacagatgtggctaacggttctcacactctgacggtggaagcgaccgacgcggcgggaaataaggcaacacagaaactggagttcaccattgataccatgctgtcagagccgactatcgctctggacagcacggacgacagcggaacaaaaggcgataacctgaccaacgtgaataagccgacgtttatactgggcaatattgacgctgacgcacggtatgtcacggttgaggtacagcatggcggcactaaagagacgctgacggcgaccaaaggcgcgaccggcatctggagcgttataccaaccggcacgtgggcggatggcagttatacgctgacggtgaaggtggaggatgaagcgggtaacgtaaaacactccgcgccgctgacggtcacggttgatacccatatcaccattgataatattgaactggttaatgataacggtattcccggcgacaatctgaccaatgatgttcgtccacagttccgcgtgacggtgccaggggatgtcaacgaggtacgtctgagcattaacggtggtacgacatgggttaacgccacgcagggcgctccagggcgttgggattatacctggccggacgatgtgactgacgggctatacaccttgacggtagaagcgaccgatgcggcgggaaataagacgacgcagacactcaattttaccatcgatacccagctgtcaataccaaccatcatgatggatcgtggggatgatacgggtgcgcctggcgatcatattacgagtgtcaaaacgccgggctttaccattggcaatattgactccgatgcgcactcggtcattttgcggatcacgcagggcggtaatagccaggaagtgaaactgacccaggtcggaggtcagtggcgctttacgccagatgctgactgggcggatggtagctatacgctgacggtagaggtaacggataacgcaggaaatgttcgtcagtccacgcctctggtagtgacggtggatacgcaaaccagcattaccaatattaagttggtcaatgacaatggcgagcctgatgacaatctgactaacgccacccgtccgcagtttgagatcacagtgccggtagatgtgaactccgtgcaactgagcattgatgggggcgcaaactgggtgagtgcgacgcaaggcgtcaaaggcgtatggggctacacctggccgacagagttgggcgatgggaaacataccctgaccgtgatggttaccgacgcggcaggcaatacggcgacgcaaacactcgactttcgcatcgacacccagttgtcgacgccgaccattgcgctggacagcgcggatgataccggtacgcctggcgatgatatgaccaatcgcacccggccgacctttattctgcagaatatcgatccggatgttatcaacgttacagtaagcgtcacgcataagggaacgacaacctcgtttaccgcgacacagggggctggggggtggagctttacaccgccagcgccgtggggcgacggtgattatacgctgacggtgacagtggaagatcgggcgggaaatacgcgtccgtctacgccgctgacggtgacagtggatacgcaaatagccattaatcatattgaattagtcaacgatagcggcgtccctggcgataatatgacaaaacatgtgcgtccgcagttccagatctcggtaccggaagatgtggaaaaggtcttgctgagtattgatggcggcacaacctggtttagtgcgacaaagagtccgacgcagggcatctgggattacacctggccgacagatatgccagagggacagcataccctgacagtagaggcaactgatgctgcgggtaatacgacgagacaatcgcttaatttttctatagacattacactttcgacgccaaccattgagctagcgcccgatcaggataccggccagattaagaacgataatctgaccagcgtcactcagccgttatttgtgttgggccatatcgataaagatgttcaacatgttgtattgaatattgagcataacggtacgtttaaaacagtggtgctcaccgagtcagccgacggctggcgctatcgaccggatgccgccttgggtgacggtagctataaattaaccgtgacggtaacggatgtggccggtaatcagcaaacatccgcacctttaacggtgacgatagacggtactttggctacgccgaccattgaactggcggctggcgaagatagcggtactgtcggcgatcgcctcactaatcatgatcggccagtattcgatatacatcagaatgacggttcagaaacattcgttaattga

SEQ ID NO: 393780 - DNA, 267 bp, Salmonella enterica
atggtcaaagtaacctacaatggtaaaacgcacgaggaagcggcggtattaaccaatggtcaatggagttttagcccttctgcgagctgggctgatggcgcttaccagctagtcgtcgtggtagaagatctggcggggaacgtaaaagaatcggcacccttagaggtgcgtattgatacgacaacgaccattgataatatcgtgttgcttactgatactggcgtacaggatgatcaattaacgaatgtttctgaaccgtcattctga

SEQ ID NO: 393781 - DNA, 246 bp, Salmonella enterica
atgggctttgaacccgaaggtaatgaccgtcagtttaatcaggtctttgctgaaatggtggcctggcataacgtgacagaacgtaccggtcacggtgattacattatttcccggccagatgtggatcatcatcgcgaaggtagtgagaagtactatcgcggctatattaatgtgcatgctggttgcgatagagctccactgtttcaggaggatgaaaagggttgggagcccccgacacctgtatag

SEQ ID NO: 393782 - DNA, 399 bp, Salmonella enterica
atgcaggccctgatcaggcttaaagaagaggtcagggatgagcgacagaaacttattgctgaagggaaatggtatccttcgtcatatcgccagtgggtggaagctcaggctgtacagggagacagggctgctgtttcgcaactccgtggatgggattatcgcgatcgccgtaaggacaagtcacgaaccacgacagccgatcgctgcgtgatactttgtgaacctggcggaacgccggtatatgaaaacagggggatctggaggcgcgcctgcagaaaaacggcagtgtccggttccgcgatcgccggactgatcaatttgtctgcacggattatggtgacagggtggtattccataatcatcatgaccgtaacgaactggcagataaactggatctga

SEQ ID NO: 393783 - DNA, 243 bp, Salmonella enterica
gtgatcctgttctgcgtcgtcagcgtcgcgaggcgagagcagaagcacgggcagaccttcgtgcccgctatcttgcatggcgggagcattggcgtaaacctgagctgcgttatagtgaacgctgccgggaaattcaccaggcgtgtcgtctgcgtaagtctcatattcgtgttcagtatgacgatcctgttttacgtaagctgcattatcacattgccgaggtgcagcgtatgcaggccctga

SEQ ID NO: 393784 - DNA, 960 bp, Salmonella enterica
gtgagtaaaaagaaaaacaccacaacgcccacgccgcatgatgctgcgttccggtcgttcctggcgaatcccgacgttgccagagattttctggaactgcaccttccggctgaactacgggctgtctgtaacctggacacgctgaagctggaatccggtacgttcgttgaggaagacctgcgccagtatgccagcgatatcctgtggagcatgaaaaccactgacggcgatgacggatacatccatgttttaatcgaacatcagtccagcgatgataaaatgatggcgtttcgccagatgcgttatgccattgcagcgatgcaaaggcacctggaagccgggcatagcaggctgccgctggtcataccgctgcagttctatcacggagagcgcagcccctacccacattcaacaaactggctggactgcttcagtaatccggaagttgcgggtaaaatatatacaaacccgtttccgctggttgatgtcaccgtcattgatgacgatgacatcatgtgccatcgccgcatggccgcgctgacactgctgatgaagcatatccgccagcgtgacctgatggagctactggataagctccctctgttaatggtggagatggtatctgatgagcaggtacgcgtactgattcattacatggtgaatgcgggagattcaccttccccggaatttatgcgggcgctggctgcgcgtctgccgcaacatgaggataaacttatgactattgctgaacgtcttgagcagaaaggtcgcgaggaaggacgcaaggaaggtctccaggaaggtcgtcaggaaggtcgtcaggaaggtcgtcaggagggcgctgctgaaaaagcacaggctattgcacgacagctccggaatatgggaatgacgccggagcagattaaacaggcgaccgggctttccgatgctgaactgaaaaaattatttgctgactga

SEQ ID NO: 393785 - DNA, 243 bp, Salmonella enterica
atggcgctggatgtgttcgcgggtgcctgggatgacaaatatctgcagctcagcaaaagctggcgcgtacaccgggaaaaccgcaatacgctcttcggctttccgccggatatccgtaaggccatctataccacgaacgcgataagagtgctgaacggcgttatccgggcagccatcaagaaacgtaaggtattcccgacggatgacccaatgcgtaaggttatttatcatggcaatggctga

SEQ ID NO: 393786 - DNA, 366 bp, Salmonella enterica
gtggcgaaaaaggcggcagaaacggtactggctgagctggaggcgaaatggggccagcagtatccgatagtcctccagtcatggcgtcgcaagtggggaaacctgtcggcatacttccgctacccggcgaatatccgcaaggtgatttacaccacaaatgctgtcgaatcggtacatcagcagttcaggaaactgaccaaaaccaaaggagctttcccaaatgaaaacagtctgttgaagctgctttatctgggactgatgaaagcacaggaaaaatggacaatgcccatccagagctggaatttgacattgtcgcagttagccatttattttgaagggcgactgaataatgtgatgacgctgtag

SEQ ID NO: 393787 - DNA, 528 bp, Salmonella enterica
gtgctcgtggtcagcatcgataacgaacagagcgtccggcagaccgcccatgtctttgataccgcccaggctgttttccagtttctcaagctcacgagtacgcatcagcgcttctttcttggtcagcttttcgaaagtaccgtcctgagactgagtttccaggtctttcagacgtttgatggactgacgaactgttttccagttagtcagcataccgcccagccagcgatggttcacgaagaactggtcgcagctgttagcagcttctttcaccgcttcgcttgcagcgcgtttggtaccaacgaaaaggattttacctttacgagcagagatcttgttcagttcagccagagcttcgttgaacatcggtacggttttctcaaggttgatgatgtgaactttgttacgcgcgccgaagatgaacggcttcattttcgggttccagtaacgggtctggtgaccaaagtgaacaccagccttgagcatgtcgcgcatggaaacagttgccatgatttaaaacctctatag

SEQ ID NO: 393788 - DNA, 237 bp, Salmonella enterica
gtggaccaacaatttgtagaaataaggcaccggctcactcaatgtcacttcaaaggtgtgatcatcaagcgcttttacccccagatcggtggcgggttttttaccggcgataatgtcatcgatattagcgatatgaccgtattgcagatagctggcgtacggcgatgccgtattaggatcggccaggcgttgccagctataaacgaaatcatgggcggtgacgggcgtaccatctga

SEQ ID NO: 393789 - DNA, 264 bp, Salmonella enterica
gtgacgctcaatacttctcaggtcagttattacatgactcagcgtaaaaaaggtgtaacccagcatatctcggccatgaaggccggtatctctgtccgctccggtcgccggatagaaaaagatcaatggtcaaaagccggggttcgtcactggcggacgcgtaaagatcctcttgaagccgtatgggacagcatgcttgttctccctgctgaaagagagacctgcgctgatgccaactaccttgctggaaatgctgcaggataa

SEQ ID NO: 393790 - DNA, 732 bp, Salmonella enterica
atgccaactaccttgctggaaatgctgcaggataaatatcccggtcagtaccccaacagccttcgcaggacaatgcaacggcgggtccgcgaatggaagttgcagtacggtgctgagcaggaggtcatgttccgccagcggcatcagcccgggctgcgtggcctgtcggactttaccgaactgaaaggtgtagttgtcaccatcgccggtaagttgttagcgcataagctgtatcacttccgccttgagtggagccactggagctggatgcgggtggtgctgggcggggaaagcttcactgctttagctgaaggtctgcaggaagcgctcggtcagttaggtggcgtaccggcagagcacaaaactgacagcctgcgggcggcatggaaacaacagggtgaagacggacgacgcgaactgacagagcgttatgcagcgctctgccggcactacggcatgcagggtgtgcacaacaatgctggtcgggaccacgaaaatggttcggtagaaagcgctcacggccatctgaaaagacgtatccgtcaggcgctgatcctacgaggcagtaacgacttcagtacgctggaagaataccaagccttcatcactcagcaggttatgcggcacaaccgcaataatcaggatctggtgaaggaagaacgtccccatctgaagccgctgcccccttcgccgcagcgccgactacgacgaactgacggtgagggtcagtag

SEQ ID NO: 393791 - DNA, 231 bp, Salmonella enterica
atggcgggcaggctgatggtgcacgccctgaaactggcggcaggatatgacgatatctcggttgtggcaaaaggtatggagcagatgctgaacaccccgggagacgtggatctgcaccggctgatgcgcttcctggggataaaggaaaaggagttgccgccggtcagcgtggtacagcacaacctgagcagttatgagcaactgctgcgtggcaagggaggtctgcagtga

SEQ ID NO: 393792 - DNA, 462 bp, Salmonella enterica
gtgagcaatatccatcaccttgaacgcagcctgcgtaaactacgcctgacacgtgttggtgcggaatggcatgcgctggaaaaacgggcgctggcggaaggctggaccctgtcgcgttatctgctgacgttatgcaatgaagagctactgtggcgcgagagcgaaaagctgcgtcgctataaaaaggaggcgcggttgccggtggccaaaacgttgaacgaatacgacttcagccaggtgccggaactgaacggcgctcagttccggcagctctgcgaaacgacagactgggttgatgcgggtgaaaacgtcctgctgttcggcgccagcgggctgggaaaaagccatctggcggcagcgatcgtggatggcgttgtagcccaggtaccgggcccggttctacagcgccggagagttgctgcaggagctgcgcaaagccagagcgcagctgaaactgaatga

SEQ ID NO: 393793 - DNA, 339 bp, Salmonella enterica
ttgctgcaggagctgcgcaaagccagagcgcagctgaaactgaatgagctgttactgaaactggatcgctaccgggtgatagtggtggatgaccttggttatgtcaaacgcgacaacgctgaaacgggggggttgttcgagttaatcgcacatcgctacgaacgcgggagcctggtgatcaccagtaaccatccgttcagcacgtggggcagcatcttcgtggatgagacgatggcagtggcggcagcagaccggttgatccatcacggatatatgttcgaactgaagggagaaagctacaggaaaaagacggcgaaggcagtaaccagcgcggcttaa

SEQ ID NO: 393794 - DNA, 1116 bp, Salmonella enterica
atgcgaccggcaacattcgaaccagagcagattatagaagcaggacgggccttacaggccgaagggaggaatatcaccggattcgcgctgcgtaaccggattgggggcggtaatccgacgcgtcttcgtcagatatgggacgagtaccaggcatcacaacacgcggctgagtcacttcctgtcacggagctccctgcagaaatagctgaagaagtaaaggccgtttccaccgcgctggctgaacgtctcacccaccttgtaacaaaactgaatgataaagctgtccgggcagcagaatatcgcgtcacagaaatcacccgtaccgccgctgaacaggccgcacaggcggaaaaggaattcgctgatgccgcccgtacggtggagtgtctggaaggaaaactggatgaacttcaggccggaaatgaacagttgacgcagacactcagggaagagcggttacttcgcagacagcaggaggtggagctggcccggttgaaagaacgtcttgtggccgctgaacagacagcccgacaaaatgaagaacgatatcaggaacagaagacaaccctgcaggaggcgcttgatactgagcaacaacagcttaaatccatgcgggaagatcttctgaagcgtcttgagcaggcatcggctgaagctaatgaacatgcagaagaacttaaatctgaacgtgataaagtgaataccctgctttcacgcctggaaacccgggaaaatgcgctggcccaggaacgacagcatcatcaggccacccgagatacacttcagcaacaactggaacaggttggcgctgatttacatgaccggaccagtgagatcgcgattgagcgagacagggtcagcaccctcacctcccgacttgagtcgcaggaaaaaacatctatattgcaacaacagagaatggagcgagaaattgagaagctggctgaccggtgtacccggctggagaaacagcgtgatgacgctctgctggaggtaacgagggagaaagaagccattgcagcattgcgtggcgaaacggatgctcttcagcgccagaaccagtcgctgatggccgcgctggcaggcaacaaacagaccggtggacaaaatgcgtga

SEQ ID NO: 393795 - DNA, 267 bp, Salmonella enterica
atgggactcaatccgaaactaccaggcggtgaaggaataagggatgagggtatggtcagtataagctcccccggtaagcatcgtaatgctaaaggagccaaagcagctgtcaggcttcagccaaaaggcacgcgggctggtatgccctctcacagatggggcatcatgagtgttatatcgccggtgttaacgggaggccagtcccctcaggtcacaggaacggaacgtggtaactccgtacaacaccacaaggtagtgagttcgtga

SEQ ID NO: 393796 - DNA, 243 bp, Salmonella enterica
atgaaatcgctcgtctggagttaccggaatataccgacgaaatatggcacggctatgtcccgaatctgcagcccggcgcgctgtatgggtaccgcgtttacggtccttatgacccggaaaatggtcatcgttttaaccccaataagctacttattgacccttatgcccgtgagctggtgggcgatattcactggaacgatgcgcatttcgcgtatcaattactccatgatgataaagatttga

SEQ ID NO: 393797 - DNA, 2112 bp, Salmonella enterica
atggctacaagcaaactgattcaaggcgatacgattactgaaactacccatgcagcgaatggttttgaccctgcaacaagcgatgataaaataagctatacttccgctcgtgttgcgaagccggtatacaataaatataaaaattccaccactaaaccgaaggtattcggttattacaccgactggtcgcagtatgacagccgtctgcaaggcaatatgtcccaacctggccgtggttatgatttaaccaacgtttcaccgaccgcttatgacaaactcatttttggctttgttggcatcaccggtttcagaaaaattgatacagaagaccgcgacgttgtagcagaagcggcagcacagtgcggcaaagtaaaatatgagccgaccttcctcgatccgtggggtgatttccagtcttatatcaacctgggttttgaaaccagcggctgggacgttgatccgaaaaccgtgacccaggctaacgccaaaggtctgctgggcgcgctgcgtgatatgcaggcaaaagcgaaggccgcaggtcatacgctggcgctctccatgagtatcggcggctggagcatgagtaacggtttccacgaaaccgccgcttctgactcttctcgtaaaatctttgcgaaaggcgtggtgaaactgttcaaacagttcccgatgttcagcgaagtggatattgactgggaatatccgaacaatgaaggggcgggcaacccgtttggtccggaagatggcgctaactacgcgctgctgattgccgaactacgtaaacagctggactccgctggtctgagcaatgtgaagatctctattgccgcttctgctgtcactaccatttttgactatgcgaaagtaaaagatctgatggctgccggcctgtatggcatcaacctgatgacctatgacttcttcggtacgccgtgggcggaaacgctgggccaccacaccaaccgcaaagcgctggaagagggcggctgggctgtcgaaactatcgttgatcacctgctggcggaaggtttctctgctgaccgtatcaacatcggttatgccggctatacccgtaacgctcgtcaggtagaaattgaatccctgtcgccgctgaaaggttcttacaacccaggttcaggcgttactaccggttccttcgaatccggcaccagcgaatggtatgacgtcatttatagctacctggatctggaaaaccagaaaggtcgtaacggtttcaatgtttataccgaccaggtcgctgacgctgactacctgtataacccggaatccaaactgttcttatccctggatacgccgcgtactgtcaaagcaaaaggcgaatatgcagcgaaactgggcctgggcggcgtgtttacctggactatcgatcaggacaacggcgtgctggttaacgccgtacgtgaaggtctgggttatgaaatcgaatctgaagttatcgatatggaaccgttctacttcgaaggtatcaatgtagaaaatgatgaagagcagagcgacagcgacgacgcgcagaaggtcaaccacgcgccgaaagcggcgattgaactgatggttgtaggcggatctacggtacagctgtctggcgcaggttcttctgatgaagacaacgatgaattgtcctttagctggggcgtgccttctcaaatcgctgtggcagacaaaactgcagaaatcattgaggttgtggtaccggaagttagcgaaaaaacggccttccagttcaccctgtttgtacgcgactgctacaacgaaccgtcctctcaacagcgctttgttctgacggctgtgcctgcgctgtctcaggttcaaccggaaccggaggaggaagaagaggaagaagaagagattatcgttcctgtaccggacgaggaagaagataccacgccggctgaggatgatacgccagcagatgacaaaacgtcaccttacgcgcagtgggatgcttctaccgtttatggcgcaaactggggtactttcgaaatcgttagctggaaagggcataactatcaggtgaaatggtggtctatgggcaaccagcctgacctgaactgcggtgccggcggtgcatggaccgatcttggcgcttactaa

SEQ ID NO: 393798 - DNA, 639 bp, Salmonella enterica
atgtcccccaccattaatttgaaccgcaaaagccttgcgctattgattgccatattttgctcaggctccgcgcagggtgaagagtattattttgatcctgcgctacttcagggggccacttacggacaaaacattgcccgttttaatgaacagcaaacgccttccggagactatcttgccgacgtttacgttaatggcacgctggtaacatcgagcattaatattcgatttaatgctgtaaaagagggtcaacagactgaaccctgcctgcccttatcggtgatgaaagcggcacagataaaatcactccccgcgactgacgctgcgacccagtgtcgcccgctcagtgagtgggtacctcatgccggctggcaatttgatagcgccacgcttcgcctgttgctgacgattccgatgaccgaacttacgcacaaaccgcgtggttatatctcaccttcagagtgggatagcggcgcgctggcgctgtttttacgccataacacaaactggactcacaccgaaaataccgatagccattatcgctaccaatacttatggagcggtctaaacatgggcgttaacctcggactttggcaagtccgtcatcaaagtaatctgcgctatgccgatagcaactaa

SEQ ID NO: 393799 - DNA, 213 bp, Salmonella enterica
ttgcgacaagttaaccgctggttcaaagatcactacggagtgcccgtcagagtcattcgttgggagccggaaacacaacgggttatctacctccgtgaaggctatgaacatgaatgcttcagtccgctcgaacagtttcgtcgtaaattcagggaaatagaggtcggtcatgagcctgttaatgacatcccagcccattgtgataaatcgtga

SEQ ID NO: 393800 - DNA, 180 bp, Salmonella enterica
atgattgagtgggatgaagagcttcgctcacgtattggtgttatgaattatattcatcaacgaacgcgcgtatcgcgatcggtggtggcggaagtactcgcggccctgcgtaagggtaattatattgaaatgaataaaggcaaactgatcagtattaaccgtttgccctccgaatattaa

SEQ ID NO: 393801 - DNA, 699 bp, Salmonella enterica
gtgtcacaagatcaggatgaaaataccacctcctgggatacctcgctgagcagcaaccttcattacaccagtcttagcctcgcagcgggtggtgataacgacaacaataataattactcggcgcaacttagcggcggcatagtggctcacagcaacggggtgactttctcgccgtatgcgctcaacgacacttttggcattgtttctctggacaagccagtagcgggtgtggaaatcaatacctcccgcggcaccgtatggacagataaatgggggcaggcggtgatcccctcgttgacgccttatcagcaaagttcgctgaaccttaacacccaaagcttaccgggaaatctggatgtgaaaaacggtaaagcggtgctgaaagcctcgcatggcgcggtggcgaagtggcagtttgatacgttgagtcagcgtcgtgttctgttaaatattacgctggaaaatggcgcgccgttgccaaaaggcgcgtctattacaagtgataataacgaatatataaccagcgcgccggagaacggaatggtatttctgaatgatatttccgccagtcagacgctgctcgcgaagttcaacggcgaccggtgcagactgatatttacgctgccggaagcggacccggataaattttacgaagaagtgacagggaaatgtgtcgccggaacagggagtatccaataa

SEQ ID NO: 393802 - DNA, 1464 bp, Salmonella enterica
atggcacgccagggacaggttcgctataaggtagccgccggacgtccgctgtacggcgggacgcataacaacagtacggtcagccctgacttcctgctcggggaggccacctggggagcatttaacaacacgtcgctgtacggcggcctcattgcctccaccggcgactatcggtccgctgcgctcgggctcgggcagaatatggggctgctgggcgctctgtctgcggatgttacccgctcagatgcgcggctgccgcacgggcagaagcagtccggttacagctatcgtatcaactatgccaaaacatttgataaaaccggcagcaccctggcattcgtcggataccgcttctcggaccgccattttctttccatgccggagtacctgcagagccggaccaccgacggcggcgatgcgtggcatgaaaaacagagctacaccgtgacttacagccagaccgttccggtactcaacatgagcgcggccctctcggtaagtcggctgaattactggaatgcgcagtccaataataactacatgctcagcctcaacaaagtgttcagtctcggcgatcttcaggggctctcggcctcggtgtcgtttgcccgtaaccagtacaccggcggggggagccagaaccgggtttatgccaccatcagtatcccgtggggcgatagccgccaggtgagctacagcgtgcagaaggataaccagggcggcctgcagcagaccgtgaattacagcgatttccataacccggacaccacatggaacatcagcgccggtcataaccgctatgacaccggtagtaacagcagcttcagcggcagcgtgcagagccgtctgccgtggggccaggcggcagtagacgccaccctgcagcccggacaataccgcagcctgggcctgagctggtacggctcggtgactgctaccgcccacggcgccgccttcagccagtcgatggtcgggaatgagcctcgcatgatgatagataccggagacgtggccggtgtgccagtgaacggcaacagcggggtgacgaaccgcttcggggtaggcgtagtgagcgccggcagcagctaccgccgcagcgatattgcggttgatatggccgccctgccggaggacgtggacgtcagcagctccgtcatcagccaggtgctgacggagggcgcggtgggctaccggaagattgacgccagccagggggagcaggtgcttggtcatatccgactggctgacggcgcaagtccgccgtttggctccctggtggtgtccgggaaaactggcagaaccgcggggatggtcggggatgacggtctggtctacctcaccgggcttagcggggaagaccgccggaccctgaacgtgtcctgggatggccgggtacagtgcaggctcaccctgccggaaacggtgacactcagccgggggccgctgttactgccctgcagatag

SEQ ID NO: 393803 - DNA, 933 bp, Salmonella enterica
atgaaaattacccggcttgccattctgattaccctgacattttccgtcctgaagtcgcaggccacggagttcaatgccagcctgctggacagcgggaacctgtccaacgtggacctcacggccttcagccgcgaggggtatgtggcacccggtaactatattctcgatatctggctcaatgaccagacggtacgggaacagtatccggtcagggttgtaccggctaccggacgcgatgaggtcgtcatctgtgtgacaacagacatggtggccatgctgggtcttaaagataagattattcatggcctgaaacccgttaccggtatcccggacgggcagtgccttgagctgcgatccgctgacagtcaggtacggtacagcgctgaaaagcagcggctgaccttcattatcccccaggcctggatgcgctatcaggacccggactgggtccccccttcacgctggagcgacggcgtcactgccggcctgctcgattatagcctgatggccaaccgctacatgccgcagcagggggagatttctaccagctacagcctctacggcaccgccgggtttaatctcggcccgtggcggctgcgcagtgattaccagtacagccgttttgacagtgggcggggcgcatcacagtccgatttttatctgccgcagacgtatctgttccgtgccttgccagcactgcgttcaaaactgacgctgggacagacgtacctcagctccgccatttttgactccttccgctttgccggactcactttggccagcgatgaacgcatgctgccgccctctctgcaggggtatgccccgaaaatcagcggtattgcgaacagtaatgcgcaggtcaccgtcagccagaacggccgcattctgtaccagacccgggtgtcgccgggccttttgagcttcccgacctga

SEQ ID NO: 393804 - DNA, 1494 bp, Salmonella enterica
atgaaaagaacagtcgttgccagtatgatagggttggcgctatgcgctggaggcgtattatcaaccgcgcaagcggcaaccgcaaagcgccctaatttagtcattattctggcggatgatttagggtatggcgatctcgccacctacgggcaccgcatcgttaaaacacctaacatagataaactggcgcaggagggggtgaagtttaccgactattatgcgccagcgcctctgtgttctccttcccgcgcgggcctgttaactggccgtatgccgttccgtaccggaatccgttcctggataccggaaggcaaagatgttgcgctggggcgtaatgaactgactatcgccaatctgctaaaacagcagggctacgacacggcgatgatggggaaattacaccttaatgcgggcggcgatcgcaccgatcagccgcaggcgaaagacatgggctttgactatacgttggttaatccggcgggatttgtcaccgatgctacgctggacaacgccaaagagcgcccgcgctatggcgttgtgcatcctacggggtggattcgtaatggccaacatattggccgcgcagataagatgagcggcgagtttgtgagctctgaagtggtgaactggctggataacaaaaaagacgataatccgttcttcttatacgtcgcctttaccgaagtccatagtccgctggcgtcgccgaaaaaataccttgatatgtattcgcagtacatgaccgactaccagaagcagcatccggatctgttctacggcgactgggcagacaaaccgtggcgcggcaccggcgaatattacgccaatatcagctacatggatgagcaggtcggtaaagtgctggataaaattaaggcgatgggcgaggaagataacaccatcgtcatctttaccagcgacaacggccctgtcacgcgtgaagcgcgtaaggtgtacgagctgaacctggccggggaaaccgacggtctgcgcggacgtaaagacaacctgtgggaaggcggcattcgcgtaccggcaatcatcaaatacggcaagcatattccacagggaatggtaacggacacgccggtatatggtcttgactggttgccgacgctggccaacatgatggactttaaactcccgaccgatcgtacctacgacggtcagtctttagttccgctactgaaggacaagactttaaaacgccagaaaccgctgatcttcggtatcgatatgccgttccaggacgatccgacggatgagtgggcgatccgcgatggcgactggaagatgatcatcgatcgccagaataaacccaaatatctctataacctgaaaaccgatcgtttcgagacgctcaatcaaattggtaaacagccgcagattgagaaacagctttacggtaagttcctgaagtataaacaggatattgataacgattcgctgatgaaagcccgtggcgataagccgacgcctgtcacctggggctaa

SEQ ID NO: 393805 - DNA, 492 bp, Salmonella enterica
atgaaattacacgctcactatctttaccttgttgagcaaataacagaactggaatcagaattaaaccagtcaatcaaaactgatgatgcaactcaacgcatcatgacaatacccggtgttgggccgattacggccagtctgctttcatcacagctcggtgatggcaaacaattttcatgcagcagggattttgctgcttccacagggctttttgctgcttccacagggcttgtcccccggcaatacagtacaggaggtaaatcgactctgctgggtatcagcaaacggggcgacaaaaacctccgccgtttactggttcagtgtgcccgctcgttcatgatgcgactggaacatcagcagggcagactggccgaatgggtcagagagcaactcagcaagaagcattcgaatgtggttgcctgcgctctggcaaacaaactggcgcgaatagcatgggcaatcacgacgaatcacaatgcatatcaggcctga

SEQ ID NO: 393806 - DNA, 168 bp, Salmonella enterica
atgctgacgcctgataatgttttcctcactgttaaacctgtcgatatgcggcgcggcatcgatacgctgacacagtatagacaggatgaactcaggtcgacgtggcatgagggcgccgccttcgtctttgtcaacaatctatggtcacccccatttttgcaatactga

SEQ ID NO: 393807 - DNA, 330 bp, Salmonella enterica
atgtcaaaacaccgatggtccattgaacagaaaaggcagcacgttgccgcctggcgcaccagcggccttacacgccagcaatactgtgaactcaacgatatccccttcaaatcacttcgcgaatggccgaaggatgtcgcaaaagctgaacgtcgggctaatgaccccaccattcttcccgttcagattgcgccaacactgcaggctgatactccaccgcccgtcacaaacgagccggttacactcttcatccccggcgggatacggatgtgctgtcatccttcacaactgactgatgtcttcagggcgctcaaatatgctgacgcctga

SEQ ID NO: 393808 - DNA, 450 bp, Salmonella enterica
atgacccgacagaacctgatactggccaacccggcggcagaccttgagctgccgaggctggagaagtgcctgccacggtatatccttagcgtggatgaagtggagcaggtactggcactgccggacctgaccacgcctgcgggtattcgtgaccgggtgctgatggagctgctgtggtcaacgggcgtacgcaggagtgaggcggcgggtcttgacgtgttcagcgtggatgcgaaccgtcgtatcctgactatcgtacagggaaaggggaaacaggaccgggtggtgccggtgggtgagcgtgcgctgtggtgggtacagcattatctgcatcagctaagaccgcagttgctggttaatccgcactgtaaggcgctgttcgtggcgctggacgtcgtggagggggtgtggggccgaacggcatcaccaacatcgtcagccactatatga

SEQ ID NO: 393809 - DNA, 348 bp, Salmonella enterica
gtggggccgaacggcatcaccaacatcgtcagccactatatgaaagcctccggcctggttgggcacgggagctgccacctgttccggcacgcgatggcgacacagatgctggagaatggtgcagatctgcggtggatacaggcgatgcggggtcatgccagcgtggagtccacgcagatctatacgcaggtgtcggtccgggcgcttcaggcggttcacgccagcacacatccggcagaacgggaaaccctggatgacataacgggatataccgttcataatgacaacacaaacgacaccacatgtggagggaatgatgagcagtacgatccacttccggatagctga

SEQ ID NO: 393810 - DNA, 288 bp, Salmonella enterica
atgagcagtacgatccacttccggatagctgaagaaaccaaacgactggccatgcaggcagcagagcgtcagcaggtgagcctgacagagctgatgcgccagcgtgccgaagagctggcagaagaagaacgccgctatcagagcagcgtacatgaagactggctggaagagcagatagctcaggcattcagccgctatgatgccggtgaaggcgagtatatcggccacgatgaaatggaaaacaggatgaacacgctgaaacaacaggccatgcggggcaggctgtga

SEQ ID NO: 393811 - DNA, 306 bp, Salmonella enterica
gtgacggtcagggttgaatgggaaaagcgcgcacagagggacagggaagacatcttcctgtacctgaaccgggaagccggggatgaggttgccatagccgcagacgaccgtctggcgggcatgacgggtatcctggaggaaaacccgctggctggggtaaaggccgggaggctggagaatcagcgtaagcttgtggtgcctcacttcccgttcatcatcgtctatgtagccgaaaaagagcatgtacgtatcctgcgggtactccacaccgcccggaaaatcgcctctcagtcccggaaacgttaa

SEQ ID NO: 393812 - DNA, 507 bp, Salmonella enterica
gtgtgttccattatattcctgtcactctctgcagttgtcctgtcgtcatgcgcccgtttttatgtactcactcagttatacactgttgtactttcttccgatgctccggtgtgtaaggcactgccattaaatacttcatcaaaaaataccccacaacctttgtatcatcctgtcgctgtaagttgtttccaacaaacgcaatattcatggctatgtcccgaaatgtgttcagatagcgcaggcttcgggtttggctcatcctgctctgtaatgcaatgcaccgggtacggtttccatcaaatccccctgttaaattttttgatattgtttcacgtttttccgcctgctttcccagcccaaaatcacccagcgactgccgtttatccgaaagcgatcagttcccccctcaacggccagttttttcagtctgtcggaattcaggttggtcagtatccacagccttcatcgacgcggtttgcctgtcaacaatctggttcaggaagatga

SEQ ID NO: 393813 - DNA, 264 bp, Salmonella enterica
atgtatctggccccagggctcggtgtttttacgtcagatcaggctttccctgcctggaataacaagcggacaaaacaggcaaaacaggcaaaacagaaagaactgatcaggcaggctaaatcccgtcaggaaatattgggtgacggaatgtgtgcctgtgaccgacgcaaaaataatattggccaggagtgcaggaacagcgaggtgatgcagcgcgtactggcattttatcgggggaattaccaggaagctaaatctgcatga

SEQ ID NO: 393814 - DNA, 336 bp, Salmonella enterica
atgaaggatatcaacacattgccggaagccgttgacaaaattgagtcgctaatcagacaacttcacgacgtttgcgtggaaaatggtgtgccgctggttatcgccgcgctggttagccggacggaacgggatattaaccgattcctttcgctgtatctggatggcccggcaggactgacggattcatccctgcttgccaccagtgaaattttgcggatgagggatgtgccgcctgagtttattgcctggctggagaacgtacgcaaagaaatggaggaaccctgtgagtgccctgaatgttgcgctgagcgggcaaaacacccgcagttacactga

SEQ ID NO: 393815 - DNA, 1485 bp, Salmonella enterica
atgaagaaactgcccggctttacgcaagattacttactcagcaaggcgacgaccctgcctgataaaacacgcctggagcgtgccgttgaaccgctatgcgcgcgccatcccggagagtgcggcattctcgcgctggataacagtctggacgcttttgccgcccgctaccgcctgaccgaaatggcggcgcggacgctggatgtgcagtattatatttgggaagacgatatgtccgggcggctgctcttttcggtactgctgtcggcggcgaagcgcggcgttcatgttcgtctgttgctggatgataataatacgcccggtctggatgatacgttgcgcttgctggatagtcatcccaatattgaagttcgtctgtttaatcctttctcttttcgtacgctacgcgcgctgggatatttgaccgattttgcgcggctgaaccggcggatgcacaataaaagttacactgccgacggcgtagtgacgctggtcggtgggcgcaacatcggcgatgcctatttcggcgctggcgaggagccgctattttccgatttggatgtgatggccattggccccgtggtcaatgatgtcgccaatgattttgaacgttactggcgctgtagttcagtgtcgacattgcagcaagtattatccctttctgagcaggaactgacgcagcgtatcgaacttcccgaatcctggtataacgatgagatcacccgccgctatctgcataagctggaaaccagtcagtttatggcggatctggatcgcggaacgttgccgctgatttgggcaaaaacacggttgcttagcgatgatccttctaaaggcgaggggaaggcgcaacgccattcgcttcttccgcagcgattatttgacgtcatgggctcgccgacggagcgtatcgacattatttccgcttactttgtccctacgcgcgcaggtgtagcgcagttgcttaatctggtcaggaaaggcgtgaagatcgccatcttaactaactccctggcggcaaacgatgtggcggtcgttcacgcagggtacgcgcgctggcgaaagaaattactgcgctatggcgtggagctctacgaactgaaaccgacccgcgaacatgaaaccgtcgtacatgatcgcggacttaccgggaactcaggttccagcttacatgctaaaacgttcagtattgatggtagtaaggtgtttatcgggtcgcttaattttgatccccgttcaacgcttttaaataccgaaatgggctttgtaattgaaagtgaaacgctggcgacgcttatccataagcgttttacacagagtcaacgcgatgcggcctggcaactgcggctggatcgctggggacgaattaactggatcgatcgtcagcaagaagaggaaaaggtgttaaagaaagaacccgctacacgtttctggcagcgagttctggtacggttggcggcaattttacctgttgaatggctgctttga

SEQ ID NO: 393816 - DNA, 396 bp, Salmonella enterica
atgagcagaaattacacaccggcgcagaaagctgaaatacagaagcgcctgacggaactggtgcgaacacatggtcggatgacgtttggagagctgcggaagataacggggttaactatttttacagcccgtcactacctggaaaaggcggaaagttgtggggatctgtatcaggccgggagaaacggtattttcccttcggaacaggctttccggctttggaagcagaaacgtgaagatgccaggattaaccgctttctgaaaacaccggaaggtgtggtgagttcctacgaccggaccagaaacgttatctgtacggagtgccggaacagcgtgacgatgcaaagggtactggcattttatcggggacatcaccgggaggcgaaatctgcatga

SEQ ID NO: 393817 - DNA, 750 bp, Salmonella enterica
atgcttaccgcgctggctgcgctttattatcatctgccagcgttgctacttttcatcgtcccgttatggctgaccgccctgctggccagtgtgcagcttaaccagtatgtgaatatccgttttttattagtctggcttactcttaccgccatactcatttatggtcgctttatcctgcagcgctggtttgatgaagcctggttgcgttaccaggaaaaccggatgcttatcgcgcgtctcgacgttatggctcaccaggatgcactgaccgggaccgctaatcgacgttcaatggaaagttttcttgaggatgctctccgccagacggagccgtttgtactgatcatgctcgatgtggactatttcaaaaactataacgaccattatggtcaccaggctggcgatgcctgtctggcaaaggtggccggggtaatgaagaggtcggttcgtactccggcagacctggtggcacgttacgggggcgaggagtttgtcgttgtgctgccttcgtcgtcgctgaatgaagctgcactggttgctgaacgtattcagacaaacctgcgtgaaaccgcaatgccacatgcagcatctgcggttagcgaaacggtcaccgtcagtatgggcatcaccctttccacagccggtgacactgttaccggcattattgccagagcggacgaggccctttatcgggctaaacaacagggacgtaatcgttgggtaaagttaaacccgttgcccggtgtttga

SEQ ID NO: 393818 - DNA, 198 bp, Salmonella enterica
atgctccagatagggccgcagccgggaggcgatgggaacgatatgttcatcatggcttttgctgccttcgatctgaataaacagcgtgtcatggaccagatcgatatccctgacccgcaggtgaataagctgattcagccgtatagcggtgtagttgaaggtttcaaccacggtcagccaaaaccaggccggatataa

SEQ ID NO: 393819 - DNA, 573 bp, Salmonella enterica
atggacaagaccaggatcacccatattaatgccggtcttatctttctgggccacaggatcatccgtaaacgcggtcgttacggcggtatgcgggtagtcctggcgatcccgaagaagaaagccagaaacttccctgcgtcactaacggttttgttatcaggcaattacagtgaaagcaaaatcgatatggttgagagactcaaccggaaactgaaaggctggaccgcgttctatcagttcgttaattttaaggccaaagtcttcagttatatcgatcgtgtcgtgttctggaaactggctcactggctggcccgaaaatatcgtaaaggtatcgcatccctgatgaggtggtggtgtaaatcacagaaaccgggacaaggtaaaacgtgggttttatttggtgaaatcaaccacgagaagctcaacggtgaagtactttatcggttggtaggacaaggtaagaagctgttccgctggcgcttaccagaaggtaacccttaccagaggacagaagccaggaatacatatacatcgcgtttcgctgaagtggcaatggtgttcgccagcgtttaa

SEQ ID NO: 393820 - DNA, 498 bp, Salmonella enterica
gtgtcctgcctttgtgaatctgagcctgcatcactgccggtcaccactaaaacggtcggcactgatgtgggtttaaaaaatttgttcgtcaccgataccggattcaaaacaggcaatccccgccacaccgctaaatatgcgaagcgactggcattgttacagcgccgtttgagcaggacacaaaaaggctcaaaaaaccgcgccagaggccgcttaaaggtggcccggctccacgcaaaaattgccggctgccggatggacaaccggcacaggttgtcccgcaaacggattaacgggaaccaggttgtttgcgtcgaatcccttaaggtgaaaaacatgttccgcaaccagaatctgtccaaagcgatagcagacgcgagccggggtgaacgggtcgccagctacagtacaaaggcgaacgggcggggcgcagcgtggtcgcaatcgaccagtttttcccgtcttccagacgctgtggttgttgcggcttcaccatga

SEQ ID NO: 393821 - DNA, 312 bp, Salmonella enterica
atgctgataatcgttaatcagttgcgtcagtttctttttcagcagaataatatggtcttgcgcgatggtacgaatcgtcgtgtctttactggtaagatactttttgaccgtcgtcttatccagcgtgattttccagcccttacaacagtggtcgcgacaggccgagccagaacaggaaaagcgggtgacaaaggcaggttcagtgacggtgatttctttcattacacaggctccggaattaaaaaaggcagctttcgctgccttgattgtgtaccacgtgtcggtgaatcaatcgccggattaacgcagtaa

SEQ ID NO: 393822 - DNA, 237 bp, Salmonella enterica
atggtatttacgaattcgctcccgaataatgcctgcgccgaggttcgagattttaaacagcgtctccattcccgctgcgcctacatattttttaacggcttcgatgtcgtgacctataccggccatcacctgaccgccgtttcgcccggtaccgccatacccaagatgtcgggcttccagaacgacaacattggtgatcccctgctccgccagttccagcgcggtattgatgcctga

SEQ ID NO: 393823 - DNA, 303 bp, Salmonella enterica
ttgagtcgctttccgacagaaaccattattgcgccggccagtacgctgaaagatttcagcggtcatactgttgccggtgcgggtaaagagataatgccggcagatgcctctgcccgtctgtaccggatacagaacctgagtaaaacggagacactctggttcaatgatacggggtccgtggctgccgcaggtgcaccgggcagttatgcgctggctccggggggctattacgaattttcatcaacgcatgcggtgtcggtgtatgccgccactgtggttgcgttcagtgcggcgaggtactga

SEQ ID NO: 393824 - DNA, 579 bp, Salmonella enterica
atgccagtgcttatttccggcgtactgaaagatgctacgggaacagcagtgcagaactgcaccattcagctcaaagcgaagaaaaccagcccgaccgttgttgtgggggtgatttcatccactctcactgacactaacggccactacagtattgaggctgaaccgggttattacagtgtgtcactgctgcgggaaggatttcttccctcagtggccggagatatctacgtggccccgaccgatgcgccggataccctgaatgcgtttctcgatgtgccaaaggatgccgacctgcgtccggaggcccttaagcgttttgaactcatggtaacggcggccgcacgtgatgcactggcaagcgccgcagcccgcgatgatgcagagcaggccgcaggggatgcgcgggagcttgtggagaacccgattgttattgtgccgacggctgctgaattaccggaatccccccgggggctgtatctggtggaagccgatgagaggaaaggtggcggcccgcagatttattattatcccggaagcggtcgccgtttctggtttgccagtgtggaggataccgattga

SEQ ID NO: 393825 - DNA, 135 bp, Salmonella enterica
atgaaaataagcggagttgccaggatttttaatgataagaaaaagcaggaagagctacagcaggcaactaacgaactgattggcgacaaaatttaccaccacttccattttaaggcgcaaggccagctaacttaa

SEQ ID NO: 393826 - DNA, 483 bp, Salmonella enterica
atgaaaggtaaaggccacatcgcgggcggtaatgggcgtgccatcgtgaaaacgagcgcggggattaatcgtaatttccacccaggaatagtcggcggcataacgggcgtggtcggcaatcagcggataatagcttccgggttcatcatccgaggtggtaaaaagcgtatcgtagagggcttcggtacgtacgccaggattgccgcgcagcgagtagcgattgaaattatcgaacgtaccaatggcggaaagcgtcatttgaccgcctttcggcgccgcaggattcacataatcaaagtgatcaaagttaaaagcatacttaggttcgccgagtacggcgaaagcgtcgctttctttgatcgcctgggcctgagcgccagcgctaaccagggcgacaagcagaagcattacgcgcgcaatcatttgaaggcggtttccttatcgtatcgcctgctgcaagccggcaggcgtctcgctgcataa

SEQ ID NO: 393827 - DNA, 174 bp, Salmonella enterica
atggacgatgtcagcagcgatatgcgtggtacgaagaatattggagaactgaaagcgggtattgaagggcaagttaccccgcgcctgaacgtatggggtaacgtggcgcaacaggtgggtgacacaggttatagtgatacccgaggaatgctggggatgaaatacagtttctga

SEQ ID NO: 393828 - DNA, 351 bp, Salmonella enterica
gtgattcagagacatcgtttcaatcttcgagccaaagaatctcagataacacccattaatgccgcctcaaaatccttcaagatattatcgattacaatctgcgccatgtcaggccgcaaaaatgagaccgccacaggcactgtgacgacgccagcgattgtaatcgtacttgatataattaaacaccatcgtccgcattatttcccggcggataaagcgttcaccgtggacacattccaccttcagcgaatggaagaagctttccgcacaggcattatcgtaacagcaaccctttgcacccatgctgccgtgcaggttatgccgcttcaggagcgcctgataatccgctga

SEQ ID NO: 393829 - DNA, 171 bp, Salmonella enterica
atgtcaacgccggtgtttacggtttctgcatgcaccacagttaaaaataaaggaaccaagagtgttctcagatacgaatcgccagctttcgttatcctgccaagctttgactttccgccgctactgtactgcgatggcgtaagtcccagcccggctgccggtgaccattga

SEQ ID NO: 393830 - DNA, 1974 bp, Salmonella enterica
ttgaatacctatctgtcccgttttcattcccgacgtcttgggctttatgaagatcatggggttgtttattcagatcagttatctctgttccagtatctgctttctggtcgatggcaaaaggtcagggttagcagtagtccgttttatacatatctgggaggaaaagacctgttctttggtaatgatgccggacaaattaccgcgtcagaccatgcccggtattttcgttgcatagagattaaggattattttcaggagacggatgccggtattctggatgctctgatgtatctccccgttgagtatgtcgtgacatcgtcctttactgcgatggataagcagtcagcgattaaggcgctggatgatcagatcgataagctggaaatgacagatgatgctgccaaatctttgctggcagatctgaaagtcggactggatatggtttccagtggatatatttctttcgggaaatcgcatcagaccctggttgtctttgcggattcaccggagcgtctggtgaaagacaccaatatcgtgacttccactctggaagatttggggctgattgtcacttattcaacactgagtcttggcgcagcttattttgctcagctaccaggaaattatacgcttcgccctcgtctgagtaccctcagtagtcttaattttgccgaaatggaaagttttcataatttcttttcaggaaaagaaaaaggaaatacctggggggaaaaactgattactcttcgggggtcaggtaatgatatctaccatctgaattaccatatgacgactgaacatcagaatttcttcggtaagaacccgacgctggggcataccgaaattctcggtacgtctaacgtgggtaaaaccgtattactgatgacaaaagcatttgccgcccagcagttcggtacgccggaatcattccctgcaaacagaaaactgaaaaaactgaccacggtttttttcgataaagaccgggcaggtgaagtcggtatacgggcaatggggggatcttattaccgggtgaaggagggagagccgacaggctggaatcccgccgcactgccgccaacaaaacgtaatatcgcttttatgaaggacctggtgaggctgctttgtactctcaacagtgagccgctcgatgattaccagaacagcctgatttcagatgcggttgaacgtcttatgcaacggtcagatcgctcttatcctgtcagtaaactacggcctcttatccaggagccggatgatactgaaaccaaacgtcatggacttaaagcccgtcttaagccgtggacgcagggggaagagtttggctgggtgttcgacaatcgggaagacacgtttgatgtcgataacctggatgttttcggtattgatggaacggagttcctggataataaggtgctggccagtgctgcttcattctatctcatctatcgggtcaccatgctggccgatggtcgcaggcttcttatctacatggatgagttctggcaatggatcaataacgaagcgttcagggactttgtttacaacaagctgaaaaccggacgtaaactcgatatggtgcttgtcgtagccacacagtcaccggatgaactgattaaatcacccattgcggcagcggttcgtgaacaatgcgccactcatatctatctggcaaacccgaaagccaaacgtagtgaatatgttgatggtttgcaggtcagggagctttattttgacaaaattaaagctattgatccgctgtcccgccagttcctggttgttaagaacccacagaggaaaggtgaaagtgatgattttgctgcttttgccagactggagctgggaaaagcagcgtattacttaccggttctcagtgcatcaaaaccccagttagaactgttcgatgaaatctggaaagaaggaatgaagccggaagagtggcttgatacctatctggaacaggcgaacctgatttga

SEQ ID NO: 393831 - DNA, 768 bp, Salmonella enterica
  misc_feature (751)..(760): n is a, c, g, or t
atgagtactctttttaaaggtcttacgcgccctgctttaataagggggctgggcgttccgctctacccctttcttggaatgtgcattatttgtgttctgcttggtgtctggattcatgaggctatgtatgccctcattcttcctggctggtatgccatcaggcgtgtaacacagtttgatgaacgcttttttgaccttctgtatctgagaactcttgtcaaagggcatcctttatcaaacaagcgattcagcgcagtccattacgcggggagccagtacaacgaagttgatatttcaaaagtggataactttatgaagctgaaagaccagtcttctgttgaagagttaattccgtactcttcacatatcactgataatattatcgttacaaaaaaccgggatttgctggcaacctggcagatagacggtgcttactttgagtgtgttgattctgaagatttgtcaattctgacagatcagcttaatacgcttatacgtagctttgaagggaaatctgttacgctttatcctcatcgtatcaggtgtaaaaagggcgtcagaccagtatttaacagtaaaattccttttgtgaacagagtaatgaatgattattacgagtcattccctcagtctgaatttttcgagaataaattatttctgacgatttgttttaaaccttttactacggaagataaagtaacacatttcttttcacgcagtaaaaaacaaaaagatatctttaaagagcctnnnnnnnnnnatttgtga

SEQ ID NO: 393832 - DNA, 1983 bp, Salmonella enterica
gtggttttttctaaaaaacccattactaaatatataacctgggccattgtcaccagtcagatttcactgccggtcattgctgatagcgataatgaaattcagtcgtggattgcggggacggcatcgtctatttctccgcatctgcaggaagggacgctggaggattatgccaaaggaaaaataaaggcgttaccagggcaagccgctaatcatctggtgaacgaggggatgaagagcgcttttccggagattattttccgtggtggcgtcaatcttgaagatggcgcgaaatatcgctcatcagagttcgatatgtttattcccgtccaggaaacaacatcgtctttactctttggccagcttggctttcgcgaccacgacaacagcagtttcgatggccgcacctatgttaacgttggtgtgggttaccgtcaggaggtaaatggatggctgctcggcgtcaatacgtttctggatgccgacattcgttattcccatttacgtggcggcattggtggagaagtctataaagacagtctggctttttccggcaactattatttccctctcaccgactggaaaacgtcagcagcgcatgaattccatgatgagcgtccggcgtatggctttgatctgcgaacaaaaggtacgctccccgattttccctggttcagtggcgagctgacatatgaacagtattacggggataaagttgatctgttgggtaacggtacgttaagccggaatccccgcgccgcaggtgcggctctggtctggaatcctgtccccttgcttgaggtcagggcaggatatcgggacgccggtaacggcggatcgcaggcagagggcggtctgagagtcaactattccttcggtacgccgttacatgaacagcttgattaccgcaacgttggggcgccgtcaaatgcgaccaatcggcgtgcctttgtcgatcgtaattacgatatcgtcatggcgtatcgggagcaggccagtaaaatccgcattacggcaatgccggtgtcaggcctgtccgggacgctggtgacattaatggcgacggtagatagccgttacccgattgagaaggttgagtggtcgggggatgcggagcttatcgccggactccagcttcaggggagtctgggcagcggccttatccttccacaacttccgctgacggcgaccgacggtcaggagtatagcctctatttaacggtgactgacagtcggggtacccgcgtgacctccgagcgtatcccggtaagggtgacacaggatgagaccagcttccgttcctggataaatgttatcaataacgatgttcaggttgaggacggcaactttgttatcagtacgccgcttcctgccggagaagaggggaagattattgagtggcactacgtgcgcgagcgttctgaagaggagtggacgtcgctcaaaccacgtaatattaagtatcaatcagatacgccgggtctggcatttaaagcgctcggcggtacagagcgtgacggccattgggttgaacgggttctggtgacccatatcggcgataatgcccgctcgcttaaattacatattgaagcaagcggaccagacgataaacatccggtgaagggtatcgtactactacaagcgcagtcagacagtattgcgcagaaggtcacttctgtggaggtgctttttacgccgggtactgaagaagccaacggaagcgttactgcgccagtcgtcggaacagaaatgcgagccagaacgctttgtataaataatatggactgtaccgatgcgtttaattatcagtgggaaatctcggatgaaatgaaatcctggaaatctgtaccgggggcgacaacggccgcctggcttcttccttatagccttaacggagaatcgctacagaataaatatatccgggtcagaattatttctgataaggaaaatgccaagagtaatactgcaacctctgatgcgaattaa

SEQ ID NO: 393833 - DNA, 1110 bp, Salmonella enterica
gtggatcagggtaacaaccattttgatgttgtcgcccggcattaccatctccacgccttccggcagttcgatggtgccagtcacgtcagtggtacggaagtagaactgcggacggtagcctttgaagaacggagtatgacggccgccttcatctttggacagaatgtacacttcagattcgaacttggtgtgcggcttgatggtgcccggcttagccagtacctgaccacgttcgatttcttcacgtttgataccacgcagcagaacacctacgttctcaccggcacggccttcgtccagcagtttgcggaacatttcaacgccagtacaggtagacttctgagtctctttgataccaacgatttcaacttcttcgcccactttgatgataccgcgctctacacgaccggtaacaacggtaccacgaccggagatggagaatacgtcttcgatcggcagcaggaacggcttgtcaatcgcacgctctggttccgggatgtaagaatccaggtagccagccagttcgatgattttttcttcccattctgcttcgccttccagcgctttcagagcagaaccacgcacgatcggcgtgtcgtcgcccgggaagtcgtactgagacagaagttcacgaacttccatttctaccagttccagcagctcttcgtcatcaaccatgtcgcatttgttcaggaacacgatgatgtacggaacgcctacctgacgacccagcaggatgtgctcacgggtctgcggcatcgggccgtcagtcgcagcaacaaccaggatcgcgccgtccatctgcgcagcaccggtgatcatgtttttaacatagtcggcgtgccccgggcagtctacgtgcgcgtagtggcgggtcggggtatcgtattcaacgtgagacgtgttgatcgtgataccacgcgctttttcttccggcgcgttatcgatctgatcgaatgcgcgggcggcaccgccgtaggttttagccagtacggtagtgatggcagcggtcagcgttgttttaccatggtcaacgtggccgatagtaccgacgttaacgtgcggttttgtacgttcaaacttttctttagacatcgattgtccctctaa

SEQ ID NO: 393834 - DNA, 1254 bp, Salmonella enterica
atgtacacccccctgaactggacgacgacacaacgacatgtggcgtttgccagctttaccagttggatgctggatgcgtttgatttctttatccttgtctttgtacttagcgatctcgccgaatggtttcacgcttccgtatcggacgtttccattgcgattatgctgaccctggcggtacgtcccattggcgcgctgttatttggccgaatggcggaaaagtacggacgtcgaccgatactgatgctcaatattctgttctttactgtttttgaactgctttccgcctggtcgcccaccttcatggcctttctgatttttcgggtcatgtatggcgtggcgatgggcgggatatggggcgtcgcgtcatcactggcgatggaaaccattcccgatcgttcgcgtggcctgatgtcgggaatttttcaggcgggctatccctgcggatatctgttcgcctcggtcatttttggcctcttctacagtatggtcggctggcgcggtatgttcctgattggcgctctgcctgttgtcttgctgccttatatctggtttaaagtgccggagtcgcccgtctggctggcggccagagcgcgtaaagagaataccgcgctgcttcctgttctgcgcaagcagtggaagttgtgtctgtatctggtgctggtaatggctttctttaactttttcagtcacgggacgcaggatctctaccctacctttttgaagatgcagcatggttttgatccgcatctgattagtatcattgcgattttttataacattgccgcgatgctcggcggcatattctacggtacgctgtcggaacgtattgggcgtaaaaaagcgatcatgatcgccgcctttcttgcgcttccggtacttccgctatgggcattttccagcggatcattcaccattggcctgggcgcgttcctgatgcagtttatggtgcagggcgcctggggagtcgtgccgacctggctgaacgagctggttccggcgaatgcgcgcgctgtgctgccagggtttgtttaccagctaggtaatttactggcgtcggttaacgcgacgttacaggcccgcatcgcggaaacgcatggcggaaattacgggttggcaatggcgatcgtggctggcgcggtggctattttaatctgtgtatttgtggcatttggtcgcgagacccggggagtcgtcatctccggtacagatagcgactcacttccggagtcggccgtcggtcatcgcacgtaa

SEQ ID NO: 393835 - DNA, 243 bp, Salmonella enterica
atggctgtttttgttttctgccagagtattgtgttctacgtcaggaacgataacggtaacggatttttcacccgcctgtttttttgcgtaatctttgccaataaaatcaatctgataaccgctagtcagctcatcgatattacgcgctttcagcgcgcgctcaaatctggcgagatcaaatccgcctttcgcgatcagttcgccctgctcgtcatagcgatcggcaatgaaaaattccggtaa

SEQ ID NO: 393836 - DNA, 2268 bp, Salmonella enterica
atgaaaatattaattgttgaaagtgaatttctgcaccaggacacctgggtcggtacggcggtagcacgtctggcagaagcgttacgccgccagaatgttgaggtcatgcagtccacgtcgctcgacgatggttacgctatcgtcgccgctaacgaacctatcggctgtctgatgttcagctatcagatggacgaaaaagaggagcatcaacgcgtacgccagttgcttgataagctcaacgaacatcagcaaaacgtaccggtttttttactgggtgaacgtgagaaagctaccgcgctgattgaccggcagctgatggagcttattgatgagttcgcctggattctggaggactctgcagatttcatcgccggacgggccgtcgctgcaatggcccgctaccaccagcagatgttaccgcctctgttttcggcactgatgaagtacaatgagatccacgaatattcctgggctgcgccgggtcaccaggggggcgtcggctttaccaaaacgccagcaggtcggctgtaccgcgactactacggcgaaaacctgttccgtaccgatatgggtattgaacgcgcctcattaggttctctgctggaccacaccggtgcctttggtgagagcgaaaaaaacgctgcccgggtgtttggtgctgaccgctcgtggtcagttgttgtcggaacatccggttctaaccggaccattatgcaggcctgcatgaccgatcatgatgtcgtggtgattgaccgtaactgccataaatccattgaacaggggctcatcctcaccggcgctaaaccgatctacatggtacccagtcgaaaccgttacggcattatcgggcctatctacccacaggagatgcagccggaagcgttgcaggaaaaaatccgcaccagcccgctcacgcgcgaatatgcagcgcataaaccgtcctatagtgtcgtgaccaactgtacctacgacggcgtgtgttacaacgccaaaaacgcccagtcactattggagcagaccagtgaccgcattcattttgacgaagcctggtacggctacgcgcggttcaacccggtttatgccgaccactatgccatgcgcggtaacccgagcgatcatagtggcccaaccgtgttcgcgacccactctacccataagctgctaaatgcactatctcaggcctcctacattcatgttcgtgaagggcgtagtgcggtgaacttctcccgtttcaaccaggcctacatgatgcacgccaccacctcgccactgtacgctatctgtgcatccaacgatgtagcggtgtcaatgatggacggtaccagtgggttaactctgactcaggaagtaatcgacgaggcggtggatttccgccaggccatggcgcgtctgtatcgagagtttaccgataataatgactggttttttaagccgtggaacaaagagacggttattgatccgaaaaccggtaaagagataccttttgaggatgcccccgccgaactgttaagccacgatcaaaactgctgggtcatgcgaccaggggaaacctggcacggctttaacggcctgccagataactggagcatgctcgacccgattaaggtcagcattctgactccgggtatgggggatgacggcaacctgctggacagcggcgtaccggccgcactggttaccgcatggcttggccgtcatggcatcgtaccgacccgcaccaccgacttccagataatgttcctcttctcaatggggatcacccgcggtaaatggggtacgctgattaatacattgtgctcctttaagcgtcattatgacagcaatgcaccgttgtcgcaggtgatgcctgagctggcaaatcagtacccggatatttatggttccatgggcgttcacgatttgggtgacaaaatgttcgcctggctgaaaaccaacaaccctggtgccagcctgaatgccgcctatgcttcacttccggaagccatgatgaccccacgcgatgcctatcaggctatggtgtctgataacgtcgaaatggtcgctattgaagaactgcaaaaacgcatcgccgccaactccgtcatcccgtatccgccgggaattcctatgctgctctccggggaaaactttggtgacagtaccagcccacagattgcttatcttcgtgctctgcagtcctgggatcatgagttccctggtttcgaacatgaaaccgaaggtaccgaaattattgatggtgtttatcacgttatgtgcataaaggactga

SEQ ID NO: 393837 - DNA, 1287 bp, Salmonella enterica
atgacctggttcatagaccgacgtcttaacggcaaaaataaaagcacggtgaatcgccagcgctttttgcgccgttataaagcacaaattaagcagtcgatttccgaagcgattaataaacgctcagtgaccgatgtcgacagcggagagtccgtctctattccaaccgatgatattagcgaaccgatgtttcatcagggacgcggcggcctgcgtcatcgcgtccatccgggtaacgatcactttatccagaatgatcgcattgagcgtccgcaaggcggtggcggcggcggttccggcagcggtcaaggtcaggccagccaggacggggaaggccaggatgagtttgtttttcagatttcaaaagatgagtatctggatctgctctttgaagatttagcgctgcctaatctgaaaaaaaaccagcatcgccagcttaacgagtataaaacccaccgcgccggtttcacctcaaacggcgtaccggccaatatcagcgtggtacgttcgctacaaaactctctggcgcgccgcaccgcgatgacggccggaaaacgccgcgaactgcacgcgctggaaacggaactggagaccatcagcaacagcgaaccagcacaactgcttgaagaggagcggttacgccgggagattgccgaactgcgggctaaaatcgagcgagtgccgtttatcgacacctttgatttacggtataaaaattatgaaaaacggcctgagccctccagccaggcggtgatgttctgtctgatggacgtctcgggttcgatggatcaggcaaccaaagatatggccaagcgtttttacattctgctctatctgtttttgagccgaacgtataagaacgtcgaagtggtttatatccgccaccatacccaggcgaaggaagtggacgaacatgagttcttttattcgcaagagaccggggggacgattgtctccagcgcgcttaaactcatggatgaagtggttaaagagcgctacgaccccggacagtggaacatctatgcggcgcaagcgtcagacggtgataactgggccgacgattcaccgctgtgccatgagattctggcgaaaaaactgctgccggtagtgcgctattacagctatatcgagattacccgccgcgcccaccaaaccttatggcgcgagtatgaacatctgcaagcgacgttcgataacttcgccatgcagcatattcgcgatcaggaggatatttatccggtattccgcgaattgtttcagaaacagagcgctaatcaaagtgcataa

SEQ ID NO: 393838 - DNA, 474 bp, Salmonella enterica; identical to SEQ ID NO: 392708

SEQ ID NO: 393839 - DNA, 381 bp, Salmonella enterica
atggtattgtttggttatggtctgttgcaattccttattttgttacggctgatgccgtggtatctctcacaaccatttaatgtgtccttctggggattctcttttggtctctccgccatggcggcaacagggttacatcttgcttatgatggtaatgccgttttttttcatatattagcactccctttgtttgcttttttcaacttcgctatggtgatcctgctgtggcaaaccacacagctccttgtacagggaaagctcatcacctacacccgatatgacgacaagccagggggcatggcccccccatttgataatgtggtgagaacggccgttatatcccccacgatatccgggttcacgatgtggatgatacaatga

SEQ ID NO: 393840 - DNA, 2076 bp, Salmonella enterica
atgcgggggatcggggcagtcattcattttcactcgccaacaggcagcagcgtaccttcctccgatttcagcgggatgtggaacagtatcagggactggttctccctgcccgctcaggatgaggccgcagaatgctttcgcgctttttatcagccagatgaaggaacgtcatcgccggacaggctgaagtattttttaaaactgaaggcgctggcgtctccgggacggcaggctaactttaccgcagagcgaatactcggtaccggtgaaaccatctgcatgattgcctccggtaaaaacagtgattttccccccgtcacacttcacctgagcgaccaggaatggcattcaatacgacatcagaaagaagccgttgatagcccgctgtcgtcagaaagtgatgacagccatgcagctaccgtaacagaaacagaagagcgcgacgaagcccccctaaaaggttttcccataacccgtgctcagattaaggcatggcgtgatctgtcgccggaagcaaaacgcgaggctggcggctggaaagcatgggcgcaggcacaagggatagctatcagcagtgccgggaactatctttcagacaccggactgaaactacgcggcatggtgcggttgcagccgccaggggaaagaggctcttctattacgaatcaacaacttcaggcatggcgagatctgtcgccagaggcaaaacgcatggctggcggcgggatgacatgggtgcaggcacagggaatatctatcagtagtgccaggaactatctgtcaaacaccggactgacccctttaggtatagagcgtctacaatcgccaggagaaaggggcgcaccgattacaaatacacagattcagacgtggctggcgctgtcgcaggaggcgaaacgcgaatcgggcggctggataaaatgggcgcaggcgcagggaatagccatcggcagtgccagcgcttgtctgaccaacacaggtctgactcctggtggtgcagaacgactacagcccctcggaaagaagggcgatcccattacactggcgcaacttctggcatggtttaacatgtcatcggaggaacgccgcgcgtcaggcggatgggccacatgggcgcagacgcagggtatatcttatagaagcgccagaaaatatctggcaccaacagacagtgaaacgcccccctgtggaatatcgcaatcgccgccgtccacaactgtcacgggcgccagtcccccggcatcggcatccgcaggcgatgagatagccgtcagcgtgagtcccgccccggcaagcagcggggaaaaacggtcactccccctggccacagaggatatctctgccccgccggcaaaacagatcaaggaagaagaccccgtgacctggcggacacaccagataaacaataacctgcctattctgcagcactggcgtgacccgacgatatcggtgatggcccaggcggaaggcaggattgaatccctacaggttacccggtggggacctctttttaactggttaccccggcagaccagggccaggattaatcaggatattcgctggtttctgcacaatgaaggaagccatgatgcgcgaatgaatgcaatgatatccgtgtctatccctcttgatgacagcgacggatacagggggcgtacaatctacgcaaaaaccgatctgacggcgtttaccgtactgggcccctactctggtcgcctgctggacagtgaaaagacacgacgtgagtatgaaaaagaatatggaaagaaagccagtaattattattttgccacgcgaagccaggagcgtctggtgtccgcctggccgcagggaaatctcctcagtctgattaacagtccggtatttacccgccggacagcggaggctgaagccagacagaatgtcagcgcggtgcttgtcgggaagaatatcaactttttccttaccacacgcgacgtccgcgccggggaagaactgtggtttgattacgggccggactaccagcattttgagccgggagaagcgttacgcccaacgcaggtaaaggaagagttgccttcttcggaaggagaataa

SEQ ID NO: 393841 - DNA, 204 bp, Salmonella enterica
atgcggcacgctgcaagtgtttttaaacaccatgtgttatctatgtttattagacacattgttgacttttttacgcctgttttctgtacggggaaaattcggggagtcatcccgcaaaaaaccgctaccctgtcatcaactacaatacataaattcagcaatcacatcgccgtactagtgatccagaaaaaggtctttttctga

SEQ ID NO: 393842 - DNA, 402 bp, Salmonella enterica
atgcggctgcacgttgagcgtaatggctcattgcacaataatgttttattattaaccattcttattgatgatgtgccttatgtcgcctcaaaaaaccggttaaccctgcttcaaaaagcttctggtttgtggtgctgcagcgcgcactatggttttatggaacatcccaatattcctcagttgttgagtggcgctgagttcgagcgttgccagatgaatttcaagaaaatgacttattacattggtcatgaatctttgatgctgaaaaaacgaaacaacgttttccctgcctggcagcggaaaattttcagaatcatgctacgcaacagcgctcacgttaccgactactattatctgcccagtaatcttgttgttgaaatcaaccgggtggttgcgctgtaa

SEQ ID NO: 393843 - DNA, 1332 bp, Salmonella enterica
atgagttctgtcaaaaagatcgggctatttgcctgtactggcgtcgttgccggtaatatgatggggagcgggattgcattattacccgccaaccttgccagtattggtggcattgccatctggggctgggtaatttctattattggggcaatgtcgctggcttatgtttatgcgaggctggcaaccaaaaaccctcaacagggtggccctatcgcttatgcaggggaaatatctccggcgtttggtttccagaccggtgttctttattatcacgcaaactggattggtaacttagccatcgggattaccgctgtttcttatctttctacgttcttcccggcattaaataatccaataccggcaggtattgcctgtattgctatcgtctggctgttcacctttattaatatgctgggcggggcctgggtcagccgcttgacgactattggcctgttcctggtgctgatcccggtagtattgaccgcagtagccggctggcattggttcgatatcgcgacctatcacgcgaactggaacacgtctaccacgaccgactctcacgccattgtcaaaagtattctgctctgcctgtgggcgttcgttggcgttgagtctgccgccgtcagcaccggcatggtgaaaaacccgaaacgcaccgtaccgctggcaaccatgctgggtaccgcgctggcaggcatcatctatatcgcagcgactcaggttatcgccgggatgttccctgcttccgttatggcctcttccggcgcgccgttcgctatcagtacttccactattctgggtggctgggctgcaccgctggtttccgcctttaccgctttcgcctgcctgacgtctctgggctcctggatgatgctggtcggccaggctggggttcgcgccgccaacgacggcaacttcccgaaaatttacggtgaaatggataaaaacggtattccgaaaaaaggtctgctgttagctgcggtgaaaatgacggcgctgatgattctgatcaccattatgaactccagcggtggtaaagcgtccgacctgttcggcgaattgaccgggattgccgtactgctcaccatgctgccgtatttctactcctgtgttgacctgattcgcttcgaagggttcaacatccgtaactcggtaagcctgatttgttctgtactgggctgcgcgttttgcttcatcgcactgatgggcgccagctccttcgaactctccggcacctttatcgtcagtctgatcatcctgatgttctacggccgcaaaatgcaccagcgccagaacaacgacagcgaaaacaatacggctgaagcgctttaa

SEQ ID NO: 393844 - DNA, 276 bp, Salmonella enterica
atgattattttcggaggtcagaattttcgcgatttccgccgtcgtaataatatgccccgacatcagatgtccgccgatttcatcgctgaatttggcggcgcgctctacgttgacctcatcacctaccttcaacgcgcccagattggtgatgcgcagagtttctttcatcagatcaaaacttatctgattgccgtttatttcagtcaccgtcaaacagcatccgttatgtgctaccgacgcccccgtctccagcccctccagcatgtagtccggtaa

SEQ ID NO: 393845 - DNA, 717 bp, Salmonella enterica
atgatagcgatcccacaaaaacttcacccgcacccgtccatactcatcgcaaaaaatctcttccccctccggcccggtaacaatggcgggctgcgggccatcgactttcggttttggcagcggcgtgggtcgccaggttttgtttgccgggatcgcctgaaacgcattcgtcagcgtcgtaccgctggcattactgccgggaaccgcctgcggctgctcaccgtgaagctcgctcgccaccacctgccagtcccggttcagatcgtccgccggatggtcagtcagcgtaaagcgcgtaccgggccagagttttgccgagttactgttgcctgcggcaatctccgtatcattgcgccagccctccagctggtagcgggtaaaatccttaccgtgctgctcatccttgaagcgtccaggatagtccatgacctcatactggttacgctggccgttgagttcatccgcgtcgtggcgaaaacgccccggccagtcgggaaatttaaaggtgtaatctttcgacaccacatacgccgggcgtatctgcgcacagtggctgaactggctgatgcacgccgttgcagtggggcgcggctgcgggttataggggatagtgaacgcttccggcagataaaatgccttgtcggcaaaaatcagcaactggtttgtcccttcccgcgcgtgctcttcgtagaaaaaaattccttcttccgacaataa

SEQ ID NO: 393846 - DNA, 318 bp, Salmonella enterica
atgatagtgcatgatatggccgtcatactcgccacgctcaaggcgggccgtcagccccttaatgtggcgttgcggcgtactgccctgccagatggtaagtaccgccgtctgctccagcaaatcgcgggcgttaagccggatattgctactggcaacatgaatgtcgagggtaaacagagaagagtaggactgaacaagatggaaactgaccacggcgaatgtttctgcatcctgtccgtcaacatcaacagtaaagcgaactcctgtctgtggcatagcgtcatccttaataatacattcatccagagaataaaatag

SEQ ID NO: 393847 - DNA, 2046 bp, Salmonella enterica
gtgactaactgttttggtcatattatcgaatcacaaccgccggaaaactataatcctgaatacaaagcctggaaggttgaaacgcttcctttacgtctttatcccgtgaagtatcagcctgttgaaagtgcagcaaaacaggttaaaacgattctcgaacttatcagacgtggagacgtgactgaaattgttcacgctggcgatcctgatgatgagggacagctacttgttgatgaagtcctggaatatgcaggaaacacaaaacccgtaaagcgcgttctgattaacgacaacacgcttccggcagtgaaaaaggcactggcaaatcttaaagataatcgtgatttcaaagggctttaccttaaggcgctggcgcgttcagttgctgatgccgtctatggcttctccatgacgcgtgcttacaccattcctgcaaaagccagaggatatcagggtgttctgtctgtcgggcgcgtccagacgcccgttcttggcctgattgtgaatcgtacccgtgctaaccagaaccataaattcagtttttactacaccatgaccggagtctttcagcgtggtgctgatgttatcagggcgaactggaagccaggggaatttgctccgctgacagaccgtaaattacttgataacgcgtgggcagacggaacggcagcatcccttgcaggaaaaccggctacagttgaagcggcagcaactgatgataaaaaaacggctgcgccgttgccgtttaacctggtcagactccagcaatacatgaacaaaaagttcaaaatgacggcacaaaaaacgctggatattacgcaacaattacgtgaaaaatataaagcgattacttataaccgctctgattgctcatatctttctgatgaacaattcagcgaagcgccgcaggttatcgatgccctgaaatcagtctttcctcagtcgctggatattgattctgcacgtaaaagcaaagcgtttaacagtgaaaaggtgactgcgcatactgctataatcccgaccgccagtgtgcctgatgttaacgcactcagcaccgacgagcgcaatgtttacctggcgatcgcacaacactatcttgttcagttcatgcctgaaaaagcataccaggaagtatcggttgccattcagtgtggtgatgagtcgttctatgcccgtgccagaaaaacaactgacagcggatttgaggcgtttcttggcgcggaaaccacagacgtaggtgaatcagaagataatgatgattccgcttttgaactgctctgtaaaattcgcactggagaaacactgacgacaaaagaagttgttgttaatgagaagaaaacaacaccgccgccgttattcaccgaagcctccttgcttgctgcgcttgttcgtgtcgcggattttgtcactgatccaacgattaaaaaattgttgaaggataaggataaagacaaaaaagatgaacatggcggtattggtacgccagctacccgcgctgccattctggaaacgctgaagaagagaagctatatcacgctcgaaaaagggaaacttattcctactgataccggatatgcgcttattgatgccctgcctggtatagcggttaatcctgatatgacagcattatggtctgaaaagcagactgccatagaaaatggcgacctgacggttgaacagtttattaatgagctgtacggtgaactgacaggcatgatttctgatgttgacctgggcgagatgaagattgaacccgctgcgccagcagggcagtttcaacgcctggactctccctgcccttcctgtggtaaacatattgttatcaggccgaaaggttatttctgtgccggatgtgaatttaaaatctggagtgagttttctggtaagaaaatcacccaggcacaggccggaaaactggttaaatcagggaaaaccgatttgattaagggatttaaaaagaaaagtggtggaacgtatgatacagttcttgtccttgaggataagaaaacagggaagctgggttttccggcaagggctaagaagtga

SEQ ID NO: 393848 - DNA, 684 bp, Salmonella enterica
ttgagcctgcttcagagtttcttccttcaggataattttattcagcgtgtcacggttcagagtaatcgtggcatcagcatctttcgcttcagcattagccgtgtggttcagcacgccattttccagctcaagcttgtactttccgccgtcgctgccaaggtcaatattaaataccgcccgggcattacccgctttttcaccgttgatatgtacagccaggaagtcgaagaacatttcaggggtcatcgcccgaacggtatccggacttgctgtatttggcgtcggacctttaaccacaccgttacgcagctcctgcgcaccggtcaggtagaagttacgccatggaccagattcagcctgataccccaattgctccagcgcatcggcttcaaggttacgtgcattctggttatttggatcggcaaacacgaccttactcaccacctgagcaacccaacggtagttcccctggtcaaagtctgctttagctttctgaagaatcgcatcggcaccgcccatgtattcaacaaatttcttggccgcttcttcgggtggcagctcatcaagggttgccggattgccatcgaaccaaccgagatacagcacatacgttgcttttacgtcatggctgatggagccgtaatagccgcggttggcccaggtttttgccaggctatccggtag

SEQ ID NO: 393849 - DNA, 555 bp, Salmonella enterica
atgcagggtgtgagtgacgtcctctgcggcttcgatgagtttcttctcttcgatgaaccacagcatttccgaaggggcttccgaaccaggggccagcataaagtcgtaagtcaggccatcaatcacttctttctggccgtctttatcgatgatattagtgggcgcaatcagtgtcaccgtccccgcagaggtggtcgtccccagtccggcgccaacctggccggaggcatctggtttcaggaggttgccatacatatagctggcacggcggctcatcacgttgccggccataatattctcggctactgctgcctccataaagccagcaggcgcatacactttcaccttgccggatttcacgtccgcttcatcgacaacgccacgcacaccgccatagtggtcaacatggctatgagtataaatgatggcgacaacaggcttattgccacggtttttgaaatacaaatccataccggctttggctgtttccgcagaaaccagcggatcgacaaccgtaatcccctctttaccttcgataatcgtcatgttggataa

SEQ ID NO: 393850 - DNA, 1050 bp, Salmonella enterica; identical to SEQ ID NO: 392667

SEQ ID NO: 393851 - DNA, 834 bp, Salmonella enterica
atgaatgattctctaaaagcgcaatgtggtgcggaatttttaggcaccggactctttttgttttttggtatcggttgtttgagcgcgctcaaagtcgcaggcgccagcctcggattatgggagatctgcattatttgggggcttgggatttcactggccgtttaccttacggccgggatctccggcggacatcttaatcctgcggtgacgatcgcgctgtggctgtttgcctgctttcccaggcagaaagtattgccttatattattgcccaggttgccggcgcttttggcggcgctctgctggcgtatgtgctttatagtagcctttttactgaatttgagactgcgcatcatatggtgcgcggtagcgtcgaaagtttgcaattagccagtattttcagtacctatccggccgcagcgctaaatgtatggcaggcggcgttggtggaagtggtaattacgtcgattctgatgggcatgatcatagccttgacggatgatggcaatggcgttcctaaagggccgcttgcgcctttgcttattgggatactggttgccgttatcggcgcgtctaccgggcctcttaccggttttgcaatgaatccggcgcgtgatttcggccccaaactgttcacatggttagcggggtgggggaacatggcgatgagcggtgggcgagagatcccttactttatcgtgccgattgtcgcgcctgttatcggcgcctgtgccggagcggccatatatcgctattttattggtaagaatttaccttgtaatcgctgtaaaccggaagaaaatgcgaaccagattcacagcaatgatgtatcgtaa

SEQ ID NO: 393852 - DNA, 372 bp, Salmonella enterica
atgccgtatcgtgaaaaccacttgatgctggatgtttccaacactaatagtgaaaccgatctgcaagggaattggcgtaatacagccccatatcggggggcagtcgttctggcgacgtttgataccgaccaacgtaaaccttggtatatccgggcacagcgtcccgatggttcaccgctgacctttggttacgaagtagaggatattcatggacacaatattggcgtggtaggccagggaagccagctctttattcgtaccaatgaagtaccgccggaaataaatgtggcgattgataaacaacagggactttcatgctcaatcactttcggcaaaacgattgatgaaagtaaagtttatatttgtcggtga

SEQ ID NO: 393853 - DNA, 1365 bp, Salmonella enterica
atgcagatgctgccgaactcaaaacagaattttacgccgctggtgcaggggattgcgcaaagtaacgcgctggtcaccatcgaacagaacggttttgtggtttaccagaaagaggttccgccaggcccgttctctattgcggatttacagttggcaggcggcggtgcggatcttgatgttagcatcaaagaggctgacggatcggtaacaacctatctggtgccctatgctgcggtacccaatatgttgcagccgggtgtttcaaaatatgattttgcggcagggcgtagccatatcgaaggcgccagcaaccagaccgattttgcgcagatgagctaccaatacgggctgaataatctcttaacgctgtacggcggcaccatgctggcggataactacaatgcatttacgttgggtactggctggaatacgcgtatcggcgcgatttccgtcgatgtgacacaatcgcatagcaagcaagataatggtgatgtgtttgacgggcaaagttaccagattgcctataacaagtatttgacgcaaaccgccacccgttttgggcttgctgcctatcgttactcgtcacgagattaccgaacgtttaacgatcacgtttgggccaataacaaagatagctatcatcgtgatgaaaatgatgtgtacgacattgcggattattatcagaacgattttggtcgtaagaacagtttttcggcgaacgtcagccaatctttgccgcagggctggggctctgtatctttgagcacgctgtggcgtgattattgggggcgtagcggtaacagtaaagattatcagctgagctattccaatagctggcaacggattagctataccttttccgccagccagacttacgatgaagatcatcacgaagataagcgttttaacgtctttatctctattccgttcgattggggagatgatattagcgctccgcgcaggcatttgtatgtgtctaactcaacgacctttgatgatgacggttttgcgtcaaataataccgggctttccggcaccgcaggcaatcgcgatcagtttaactatggggtgaatctcagccatcaacggcaggacagcgagacaacggctggcggtaatctgacgtggaatgcgccagttgcgacgcttaacggtagctacagtcagtcgtctaaatacacgcaaactggcggcagtatttccggggggctggtggcctggtctggtggcgtgaatttagccaaccgactctcggaaacgtttgccgtgatgcatgcgccgggtctggaaggggcgtatgtgaacgggcagaaataccgtaccaccaaccgtaatggcgtggtggtctacgatgccgtatcgtga

SEQ ID NO: 393854 - DNA, 888 bp, Salmonella enterica
atgccggggtcaacacgtaaactaccagtctggttgcccattttggtattgctcattgctatgtcctctattcagagtggcgcttcactggcgaaatcgttatttcctcttgtcggcgcgccgggcgtaacggcgcttcgtctggcactgggaacgcttatccttatcgccattttcaaaccctggcgtttgcgttttgccaaagaacagcggctgcctttattgttttatggtctgtcgctgggcgggatgaactatctattctatctgtcgattcagacggtgccgttaggtattgccgtcgcgctggaattcactggtcctctggcggtcgcgctgttttcatcccggcggccagtggattttatttgggtcgtactggcggtgcttggactctggttcctgctgccattaggacaagatgtgtctcacgtcgatcttaccggagccgcgttggcgctcggcgctggtgcctgttgggctgtctatattcttaccggccagcgggcaggtgcggaacatggtccggccacggtagcggtaggatcgctgattgcagccatcattttcgtgccgattggcgcagttcaggctggcgacgcgctatggcactggtcgattcttcccttagggttagcggtagctgtactttctacggcgctgccttattcactggaaatgattgcgctgacgcgactgccaacccgcaccttcggtacgctgatgagcatggagcccgcgcttgccgccgtttccggaatgatttttctgggcgaaacgcttacgggcgtacaaatcatggccctgtgcgccatcattgccgcctcaatggggtctaccctaacgattcgacgcgaaccgcaaattaaacaagttgacgtaaaatag

SEQ ID NO: 393855 - DNA, 984 bp, Salmonella enterica
atgccgtggcacttagtgacgcttgtcatataccgggtgatcacgttagctacagacctggctgatatatccgtaccacagcgtattgttggctatgcgcaaaaacagtttgggaggggcgacgggctggttaacaacgtagcctgttttccgagaaacaatttgaaaagtattactactgatgtgcccgatatgttaataccggtcaacctcagagttccctttatttcttataaaaatggatacgggagtaaatacggcgtttaccggatagcggactgcgtcccgttgcgggagaagctgccccggacagaaaaacagcggctggctgacgcacgtctgggcctgcaggccaggataaagagtgaacgcggtaaagctgccctgctggcgcacacctggttaagtcaggaccccgtctttctcgataccgaaaccacagggcttgatgccggcgctcaggcgctggaaattggcctggtgaatgtccgtggcgacctgatatacgaaacccgcctgaaaccgacgatcagtatcgatccggcagccgctgccgtacacggtatcagtgaagcgatgctggctgacgctccggcctggcctgatatagcgcaacagttgcaacaccatatcggccggcgtccgctggttattttcaacgcggattttgatatgcgcattctgaagcagacagcggcagcgtataacgacccgtccagctggctggacaccctgacagtgtactgcgccatgcggctcgcagcgggttactacggctccaccaaccgttacggcacgatatcgctggccagtgctgtcagccaggcagacctgagctggagcggacgggcgcattcggctgtggcagatgccgttatgacggcgcgggtgcttaacgatattgctgaatactggcgtgtgctccagtgtgaatacaacacgtctgacggggaacgtagcggggggggggatgaaggtgtttaa

SEQ ID NO: 393856 - DNA, 222 bp, Salmonella enterica
atgaccatcgcacaccagctcgaacagaagggtattgaaaagggactgcagcagggactgcagttaggggaacaacgcggtattgaaaaaggccgcaatgaaggcaagcaggaaggtaaattcgaagttgcccgcaccatgctgcagaacggcattgaccgcaataccgtcatgaaaatgaccggtctgactgaagacgacctggcgcagatccgccactaa

SEQ ID NO: 393857 - DNA, 1197 bp, Salmonella enterica
atgtctgactgtcacacttacggatttaatacccaaatcgttcacgcggggcagcgtcccgatccttccaccggcgcgctcagtacgccgatttttcagacctcaacatttgtttttgacagtgccgaacagggcgccgcccgctttgcactcgaagactctggatacatttatacccgtctggggaatccaaccactgacgctctggagaaaaaactggcggttctggaacagggtgaagcggcgctggcgacagcatccggtgtatccgccatcacaacaactctgttgacactttgtcaacagggcgaccatatagtttccgctaacgctatctacggttgtacccacgctttcctgtcacacagcatcactaaattcggtatcgaggtgagtttcgtcgatgcagcgaacccggaggcaatccgtgaagcgatgcgtccagaaaccaaagtagtgtatatcgaaacccccgccaaccccacattgtcgctggttgatattgagacagcggcggcgattgctcaccagcaaggtgcgttattagtggtggataatacctttatgtcgccatactgccagcagccgttgcggctgggcgccgacatcgtagtgcacagtgtcactaagtatatcaacggtcatggagatgtgattggcggggttattattggttgtcaggaattcatcaaccaggcacgatttgttggtgtgaaggatattactggcggctgcatgagccccttcaacgcctggcttacgctgcgcggcgtgaaaacgctgggaattcgcatggagcgccactgtaataatgctctgaagatcgcccgcttccttgaagaacatcccggtatcagccaggtcatctatccgggtttaccatctcatccacaatacgaactgggtaaacggcaaatgtcgctgcccggaggcataatcagtttcgaaatcactggcggccttgaggctggcagacggatgatcaactctgttgaattatgcctcctcgccgtcagtctcggtgatacggaaaccctcattcagcatcctgcgtccatgacacactcacctgttgcaccagaggaacggctaaaagcaggtattaccgatggactcctccgtctttctgtgggacttgaagatccggacgatattattcatgaccttgaacgcaccatcagaaaagcagccttctga

SEQ ID NO: 393858 - DNA, 1086 bp, Salmonella enterica
gtgaatccccctttactgcgttcctataatgccgttatcaaacatacgttatcccaagcaaaaaaatccagaacaacgaaacacattgccggtttttgtcagttacaggggcccacgggcagtggaaaaactagcgctctctaccgttctggcttcgccgataacgtccctccggcgttggagacaataaaaaaatcagactctcaggccattctggttacccatcgctggaatatactccacgacatttacgaaaaaacaggttcgcatgaagacagtaatggaaaaccatttaacgttagtgtgctttatgcgcaggatgaacaaattgtttctgcaatcgaggttacgccactacctcatgagaaagatatttccgcagattcactcccggatccctttaattccatcaacgaacttgagggaaaaaacttatttgtcgacccagatattgcagacaaactgcgtaagaattgcaggaatatcctgtatatcaataaattattgaaaggatacccggcacatttacgtgcagctatcgccagtgaaaaagaggcgttaataaaatcatgtgcggcagttgagatatcgttaattcaaaatatcaaattgctggaaaaagaagccaggaagcaaaaagaaaaatatggtgaagaacatgaactcttgcaggccgccaagcaacgagttgatgacttccgtcgtcatgcctgggtcagacgcattctgcccgccatcgcttggcgcgacgaaaaacaacacctgctgattatgacaacccaaaagctcgtttcatcattttacgatgggcggcgcaaagtacgaatgtccagcaaagagctgcgcaattatgtcatttttattgatgaatttgattatcaggctgaggtactacaggaatatctggcgcaagctcaatgggttcaggaaccgcctgaatgcttggggcagttactcgaggggggacgcagattactgcaacgaatgcagtatgttgaaacagcacctgccccgatgatccgtgaacgtcttgggacatttcttaacaaactggatgacgccttaaaaggaaaaaaattgatttaa

SEQ ID NO: 393859 - DNA, 870 bp, Salmonella enterica
atgattcatcggattgctgatggtgttacccatcagctcgatagcgcgaaaaccgatcataatagtcatttatggttgcagggagtttacgccagtggcgatcgtactgctggtattacgcactacagcaatgatatctccggcttccagatcggtagcgatatcgctcgccaaattcgtggcgataatgtgattggcgttggcctggcgcttggctacctgcataacgatctggatttgaataatcatctggatggccataataagatagacggcaattactacagtgtctatgccaactggaaacagttactgtctgatacgaagcattggggctggttcgcggatgcggtacttacttacggtgatatgtcttatagtagtgatgggcgtgacggacatctttccgctggcggagattacgacggacgtagttggttagctcagagccgcgtcggcgcgcagattaacgctacccgccagacctggctgcggccttatttaaccatgggttatatcaacacccataccgatagttataacgatggctacagcgatgttagcagcggtaaacaagacggcggctttgccggggctggtatgcaggcaggcgtaagctacccgttacataacgtagaagtgaaaccgtacgtggagctggcttacgttgggcaatttggcgcagagacggatttccataccgacgattatcgttttgccggtcaaaatcttaacggtggtaacgccggactgggaatggatgtgaagttttcagaaaagtggagcgcaaatacccgtatcaatacgcagtttggtcacgatgttaacaacgaagtaaatgcttatatcagcgcaaaatatcagttttga

SEQ ID NO: 393860 - DNA, 930 bp, Salmonella enterica
atggcggcgtcggtatctcaggcgttcaggctggcgaagaaagaactgacacaacagaatataaataaatttattgtcaccggagcctccaaacgtggatgggctgcatggctgacagcgctgtcggacccggacgtcggggccgttgttcctttcgctatggatctgctgaatacgcaaaagtctcttgaacacatgtatcagtcatacggaaaaaactggccagtagccttttatccgtattataaccagggcattgatcagcaggttggtacggataaatttgcaaggctgatgaggctggaggaccctctcacttatctgaataccgatatgggtgaccgcctgaaaattgataaatatattattaatgcaagcggggatgatttctatgttcctgacaacagccatttttattatggtcttttacccggttcaaagtctctgcgggttgtacctaactccacacataacggaattctgtccgttgctgagcagtcgctaatcacctttgttaaccgttttcaggaaaagcagaaactccctgaaattacggaaaacgtacaaagcaggggtgacggaaaaaaagagctggtggtcaatttctcagagaagccggtagcaattttacaatggacagccaggaatccggccgcgagggattttcgttatgcctgcgatattaaatacaactcagttcccgtcagtctggctaccggcgataatacactcagtatttcgctaacgacacccgacagtggatggcaggctacttatattgaagcaacctttactgacgggtatgtggccacaacacaggtatatattacgccggacgaaaaatatccagaaacagcaccgccgtcaatagatgcatcctgtcaaacccttcccggaagggggctgagtcccacacctgtgaagcagtaa

SEQ ID NO: 393861 - DNA, 186 bp, Salmonella enterica
atgatcggcctgtttttcccggtatttccccagcgtatgggcccgttcaattccctgtttctgccgctggcggcggctcagccagtctttatgcgacatcgcagccatcaggtcgataagcatgttattgatggcggttatcacggcgcgggtgattggggcagcctgcgaggggtctttatctga

SEQ ID NO: 393862 - DNA, 1203 bp, Salmonella enterica
atgtcccagcccttcgatttcgacaaagcacttaaagccctccagtccggtcaggcactaacgggcaaagatggtatcttaactccattaatcaagcagttaaccgaggcagccctgtctgctgagcttgactcccatctggctcaggatgtggaagcgaaccgtaaaaatggttccggcaaaaagaccattaaagccccgacaggcagttttgaactgacaaccccgcgcgatcgtaacggcacttttgagccacagctggtgaagaagcatcagaccacgctgtccgacgagatcgaacgcaagatcattcgcctgtttgcgctggggatgagttatcaggacatcagccgggagattgaagatctctatgccttcagcgtttcaaccgccaccatcagtacggtaacggacaaagtcatccctgaactaaagcagtggcaacaacgcccgctggagaaggtttaccccttcgtctggctggatgctattcattataaaatccgtgaggatggccattaccagagcaaggcggtttataccgtgctggcgctgaatctggagggcaaaaaagaagtcctgggcttgtatctgtcggaaagcgaaggggcgaacttttggctgtcggtattaagcgacctgcaaaaccgtggcatggaagatatcctgatcgcctgcgtggatgggttgacaggcttcccggaggcgataaacagcatttatccgcagacagaagtccagttgtgcgtcattcaccagatacgcaactcgattaaatatgtggcgtcaaaacaccacagagcgttcatggctgacctgaagccggtgtatcgtgcggtgtcaaaagaagcggcagaaacggcgctggatgagctggagacgaaatggggccagcagtatccggtagtcctccagtcatggcgtcgcaagtgggaaaacctgtcggcatacttccgctatccggcgaatatccgcaaggtcatttacaccacaaatgctatcgaatcggtacaccggcagttcaggaaactgaccaaaaccaaaggagctttcccgaatgaaaacagtctgttgaagctgctttatctgggactgatgaacgcacaggagaaatggacaatgcccatccagagctggaatttgacattgtcgcagttagccatttattttgaagggcgactgaataatgtgatgacgctgtag

SEQ ID NO: 393863 - DNA, 228 bp, Salmonella enterica
atgaaaccattggtttatgcaatgattctgtcactgacgaccttttctgcttttgcaaaacagaactcggctaacagtcagaaaactggtgcaagtaatatggaaagacaaagctatgagaataccgatgcggggaaaaaacaagctgaatggatgaaaggtaaattagttaaatctgattgttctccagccatgaatcgtattggctggtcagaaggttgtaagtaa

SEQ ID NO: 393864 - DNA, 213 bp, Salmonella enterica
atgctgacggtacagggggaaatggtggtaatggggggaatgggggagaaggtggaggagctaacacaccctttacagggagacctgccggaaatggaggaagaggagggaatggtggaaacggtggagattcgactgcctcagcactgggcggccccgggggtaacggcggaaatggtggtgatggtggacaaggtggttggtcaacggtag

SEQ ID NO: 393865 - DNA, 141 bp, Salmonella enterica
atggaggaagaggtggggagagtcgtaattatgctgaaaatagcggcggcaatgggggcaatggcggtaacggtggcaatggcggcaatgggggcaatggcggcaatggtggtaatggtggggggggaggagatggaataa

SEQ ID NO: 393866 - DNA, 561 bp, Salmonella enterica
ttggtatatacatccgcccattctgcggcatcttcccgattccaggtgcgttgcaactcagatgctaccgccgcggtatccatcggtaccacgcccgcctgcaccacgcgagccatcgtaatttcctgcgccattttactgtacgtcccggaggcatcgatcactgcaaatactttgtacccttccgcgacggcgctgatggctggaaaagccatgcagacactggtaatagtaccggcgatgatcagcgtcttacggcctgtcgcttctaccgcctgtacaaaatcggcattatcccaggcattaatttcccctttacgcgcaacatattgcgcgtggggcgcattcgcatggatttccggaatcagtggaccattcggtccctgtggtacggatgcggtggtaatgaccggcatattgcatagggtagcgattttagccagcgccgcggcgcgcgcgcgtaattccggcatcggcatgtcgccgacggtctggaacaggccactttggtggtcaatcagcagcattactgcgtcgttagcatcaatggcagggcgttga

SEQ ID NO: 393867 - DNA, 438 bp, Salmonella enterica
atgattattaatattcgccgttcaaggcatgaggaaggggaaaaactgattgcgatctggcgccgctcagtcgatgccacgcacgattttctgtcagacgcttatcgggccgaactggaagaactggtgagcgattttctaccagaagcaccactatgggttgccgtgaccgatcaggatgagccggtaggatttatgctgcttaccggtgaacatatggatgcgctgtttatcgatcctgacgtgcgtggtcagggtatcgggaagaggttggttgaacatgcgttaacactggcaccagggttgacaaccaatgttaacgagcagaatacacaagctgttggattttataagaaaatgggatttaaggtgacgggacgttcggaggtggacgatcttggaaaaccgtatccattgttgaatctggcatatagctga

SEQ ID NO: 393868 - DNA, 789 bp, Salmonella enterica
atgggaagacaaaaagcagtgatcaaagcgcgtcgtgaagcaaagcgtgtattgagacgagattcgcgtagtcataagcaacgtgaagaagaatcggtcacgtcactggtacagatgggcggagtagaagccattggcatggcgcgcgatagccgcgatacctcgcctattaaggcgcgaaatgaagcgcaggcgcattatctgaacgctatcgacagtaaacagcttatttttgcgaccggcgaagccggatgcggaaaaacatggatcagtgcggcaaaggcggcagaagcattgattcataaggacgtcgagaggatcattgtgacgcgtccggtattgcaggctgatgaagatcttggttttttgcccggtgatatcgctgaaaaatttgcgccttattttcgtcctgtctatgacgtactgcttaaacggttgggcgcttcctttatgcaatattgcttgcgtccggaaatcggtaaggtagaaattgccccgttcgcctatatgcgtgggcgtacttttgaaaatgcggtcgtgattctcgacgaggcgcaaaatgtgactgcggcgcaaatgaaaatgtttttgacgcgattgggagaaaacgtcacggtcattgtcaatggcgatataacccagtgcgatttgccggcccacgttcagtcaggtttaagcgatgccttagcccgctttaacgaagatgaaatggtagggatagtgcgatttaacaaggacgactgcgtgcgctcggcgctttgtcagcgaacgcttcacgcatacagctaa

SEQ ID NO: 393869 - DNA, 213 bp, Salmonella enterica; identical to SEQ ID NO: 4299

SEQ ID NO: 393870 - DNA, 522 bp, Salmonella enterica
atggatgatctcatcgtacgtctgctggcaccgcgaagtcaggatgatgagcggcacatcttgtttgatcttgaggcactgttgaacctctatcttgacaggtttgaacaggcgcttccgcatgagatacaggaccccactgatcagcccgtagcgattgaagccagcctgcgcggtatccctgagtctgtcattaggaaatgcagtgattgggttagtggacggttgaggaatcggggtcatgtgagctttagagatgttttcgacgcctatgagtacgacgaattaaccaaacaagaacaacaggtttgtttacttcatattggcagtctggcggctaacaacgatcccacaatagaagtggagataggcggcgacactatcgaaacagcactctggcgagctgacaatataacactgttcacggccacttccgttcacccctttgaggggtcgttatgtacgacaacacgcatcaacaagcgaaacgctacgctgagattgccacgcaggcaattatga

SEQ ID NO: 393871 - DNA, 369 bp, Salmonella enterica
atgagcaatcttttacggggcatggcattggcattggcagggctgtctggctgtaatactgctcaaacgtctcttggcggtggttttgtcgggccacgtcagcagaacgttaccacagttaggcaggtacaaaaagcatccgtcattgatgaaggacaaatagtgttactgtacggtcatattgtgcagtcactggggggcgaggattaccgtttccgggataaaagtggtgagatgacgctaatcattccttccagcgtctgggctggccgggtggtaacgccacaacagaaggtcggtgtacaggggcgtatcgtgaaagaatttgatgctgtgaagttatatattattgccattcgtattgactga

SEQ ID NO: 393872 - DNA, 462 bp, Salmonella enterica
atggctgtttttcaactgccatttgcaaaggtgggttttaatatttgttatgaagcagaaataccggagtgtgccgcgacgttggcggaacagggggtggagttaattttaacgccttccgccacgtttactgaacaggggttttggcgagtcaggcattgttgccactcacgttgtattgaaaatcaaatttatcttgttcactgttgcctgggcggaaacccgggcggaccactgcctggctgctgggcccgaagttcaattttaagcccctgtgatgtcgtgtggaaaaatccacagggtattatcgcagaggcgcatgtcaataaagaggatgtcattgcaggagaaattaacctcgatgttctatatgaaaatagacttgagggtgcagcaacaacgttcaaggacagacgcagaaaagcaggcatatataatatctggccatcacacattaaataa

SEQ ID NO: 393873 - DNA, 408 bp, Salmonella enterica
  misc_feature (180)..(188): n is a, c, g, or t
atggtcaaagatcagccgtggccagaaggtggcaaagcactggtcgccgtgaacctggcaagcgaagagccctatcacaatgctctcaacgaaaagctggtaaaagagaccttacaattggcggagcaggttaatcataccgaagtgcacctggtcggcgcctaccccgttacgccaatnnnnnnnnngcatgtggaaaaaggcttgccggaagaagttatcccggatcttgccgaacatctccaggcggggatcgttgtgcttggcaccgttggacgtaccggactttcggccgcgtttttgggaaacacggccgaacaggtcattgaccatctgcgctgcgacctgttagtcattaagcctgatgagtatcagacgccggttgaactggacgacgaggacgattaa

SEQ ID NO: 393874 - DNA, 411 bp, Salmonella enterica
gtgctggcgaatccgggaaatggcaatggcggcggacatggtaataacgcggctaatcagggtaataacggtaacggacataaaggaaacgccgggcaaaaaacggaacaccgtaaaaatggcggtaaaccggatcacgtcgagtcggacattagctacgctgtcgccaggcaactggcagtgaatttaggtctgacgggttatcagtctttaccaccgggggttgcgaaaaatctggcgagaggaaaaccgttgccgccgggaatcgctaaaaaaacggtgccggcatctatgctgggacaattaccttattatcctggctacgagtggaaaattgttggggataacctggtgctgatcgcgctcagtactgcggtggtcacggcgattattaatggcgtctttgattaa

SEQ ID NO: 393875 - DNA, 192 bp, Salmonella enterica
gtggctattaatgactgggataaaaataaatctaccggcggtgctgccgggttattgtataaatataataacccttacgcccatacagtggattattttatccagaagaaaaaaggatatggatattatcctgtcaatcagtcagacaacgacagttgggagtatgtcggacacaatgagatgataccgtag

SEQ ID NO: 393876 - DNA, 174 bp, Salmonella enterica
atgcagttcatacatcaaccgggtatagacataggttttacccgtcccggtctccattttaacgtcaatattggccttatcgtcgtagcgtccgttaatcagcggattagcatagtgattatgatcggcctgcgcgtgatcgataccggtgaaactcgccagaatcgccgctaa

SEQ ID NO: 393877 - DNA, 321 bp, Salmonella enterica
gtgccgggcggcgcaagcggcgaagagaccctattaacgacatggctggtcgccgatggttataaaatggatattgaagtacaggccattgatttttccggctatcgcgccatgtatgtggataatacgcgcctgtatctgattgatgaacgatggggaacagagcagacccgcgatctgctcaaccacattggtacgcaccagcttccggttcagactattgtcatttacggctactctttcgaccttgaatccattcgtgaactggaaatcggcttaaaacagcttgatcaaaaagtgaacctggtgaagcgttattaa

SEQ ID NO: 393878 - DNA, 468 bp, Salmonella enterica
atgaaacagcacatccgtctgccggggcagcagtatgatgaggagacggggctttactataaccggcatcgttactacgatccgttacagggacggtatatcactcaggatccgattgggctgcggggaggatggaatttttatgtatatacgtccaatccaataatagaaattgaccctcttggattagcggggtgggattcattaggttcctatattaatcaacctgggtataaatcaaaagttacaaatgtagccccggagggggccgatactacaaaaccagtttcgttaaggcctgacggttacccatgggatatggttgcggagatgaaagtacagataaatttgttcctgatggtctgtatggtgttagttttatgcaagcttgtagaaatcatgatatctgctatggaacatcaggaagcagtaagcagtcatgtgatactcatcttggagacgacatag

SEQ ID NO: 393879 - DNA, 312 bp, Salmonella enterica
atgagttccaataacaccgttactcagcttcgtccaaatcaagacatctctcgccaaattggacaccacttcactgatgatgcatactcacggcatggtggtggcaatggcggtggtgatgacatgctaaaacgtgtagaaaaattggaagagaaaatagcttctattagcactgatctagctgttatcaaggccacaatgtgtacaaaggaagatttacacaaagagctgaatggtcagacttggaaaattgtcatagcccttgttattactgttctaatagccgttttttctaaatactacataaagtaa

SEQ ID NO: 393880 - DNA, 177 bp, Salmonella enterica
atgggtaggataagtctgggaaatagtgacgtttcccttcgcctcgcctctgacggcgagagtcagccgataggtggtttcgggctcaatggtaaagtattgcgtaatggtattggtgggttcgattcgacaaaagtggttgttccctgtcgcgccatcttcgacaaatatggatga

SEQ ID NO: 393881 - DNA, 261 bp, Salmonella enterica
atgatgttcaactggaaaaagttactgtcggaactgacgttagtcatattcacccacagcggcttactgtattcaaaaggcacctcgaccaggctgataagatcgatatccattggggtgttagtgctgttccacggaacggaaatcctgaacgcggtacgaccagtatcagcgctggttgtgaaggcatactcttccctgtgccattccgcatttaagttagtattaatgttggacataaaagaggtatgggtaggataa

SEQ ID NO: 393882 - DNA, 408 bp, Salmonella enterica
atgctatcggttcccttagacaacatagatggatatttatattctgaatggagaaaaggaaatttagatgcgtggaaagcgcaagaaaaggcaacttacctggcagcgaaaattcagtccgggattgaaaagacaacgcgcattttacatcatgcgaatatatccgaaagtattcagcaaagcgcatttttagaaacaatggcgctgtgtggtttaaaaccgctggaaacaccaccaccgcatacccacatacctattgaaaaaatggtagaagaggtcttactggcggataaggcgtttcagacgttcctcgtaacggatgccagcgccggtcaaaacatgttagctgagataatcgaagccatctctgataaagtttttcacgctctttttagaacagatccctag

SEQ ID NO: 393883 - DNA, 252 bp, Salmonella enterica
atgaagagtggctccgataacttccgcgcctcatcgattcaggggattatgaagcgcatcaaagcgaaaggcgtagaggtcatcatctatgaaccggtaatgcaagaagacgctttcttcaactctcgccttgagcgtgatttgcgctgctttaagcaacaggcggatgtcattatttccaacaggatggcggcagagctgttggatgtcgctgaaaaagtgtatacccgcgatcttttcggtagtgattaa

SEQ ID NO: 393884 - DNA, 189 bp, Salmonella enterica
atggccagcctccaggtggcgctgcatggcggccactgcatagcgtatcaggcggaaagccatatgcttatccggggaggactggtgttctatgagtacgtgaacatacccgtcaccggctgtggttttcaggctgtagaggacgtcgctgaaatactggcggaggtcatcctcaacaaacgagcctga

SEQ ID NO: 393885 - DNA, 327 bp, Salmonella enterica
atgatgatatatggtatttgtggtaaatttcccacagatcaacctaattttgctcttgagctgctaaatgcaaatttatggtttgctgaaaatggcggcccatatctatgctacgaatccggctcgcagtccctactgctggcactacgtttcccacttgatgatagttccccagaaaaactggaaaacgaaattgaagtggtagtcaaatcaatggaaaacctttacctcgtattacataatgagggaattacaatggataatagttatttgaaaatcgaagaaattacttctagttccaataagcattattatgccggaagataa

SEQ ID NO: 393886 - DNA, 123 bp, Salmonella enterica
atgctaaatagatactaccgtttcgctgtcgaaaaagacgacccctccgaagcgccagagtcgggcgataagcctgataatcgagaggcagataatcgtggcgctgcgcaaaatgcgcattaa

SEQ ID NO: 393887 - DNA, 222 bp, Salmonella enterica
atgctcctgacgctgatggtggtcattggcattattgctaacccaaatactgtgccgcaatacagataccaggtatcggcaaaatttccgcgccagcgtaattcatgcaatgtgccgcgagaaataataaataccgcgatgatgaacagggcggcgcagataagcgtcagcgatcgcttttgcgtctccatcattccaatggcgcggcctagcataccgtag

SEQ ID NO: 393888 - DNA, 222 bp, Salmonella enterica
atgaccatactgaccgcgaccaccggactgtttcgcgtgtttaccttcgacgtcggtaactttcgcgcgaatcgcttcgcggtaagcaacctgaggcttaccaacgttcgcttcaacgttgaattcacgcttcatacggtcaacgatgatgtcgaggtgcagctcgcccataccagcgatgatagtctggttagattcttcgtcagtccatacgcggaatga

SEQ ID NO: 393889 - DNA, 216 bp, Salmonella enterica
gtgaaaatcatcggcgctaccgcgcactatgtgaatgataatctggatgaaggtccgatcattatgcaagatgtgattcacgtcgatcacacttacaccgcagaagatatgatgcgtgccgggcgcgacgtcgagaaaaacgtattaagccgcgcgctgtatcaggttctggcgcagcgagtctttgtttatggcaatcggacgattattctttaa

SEQ ID NO: 393890 - DNA, 132 bp, Salmonella enterica
atgaatacgtggcaggcggcacgtaaagaggtggcgcatacctcacgccataacgagttttccatcggtgccagcgcgtctttatgggagtgtatgcttaacgataacgttagccgggataatcaggtgtaa

SEQ ID NO: 393891 - DNA, 525 bp, Salmonella enterica
  misc_feature (503)..(512): n is a, c, g, or t
atgctgcttatgactaattatcatgctgttttacccatgaaattatctgctctggcagcagctttaatgttatgtagccccttttgtcttgcagaatccccgactgcaaatgatgaatttaatatcgatgctttaagctttgattcaccaataggcgattccgaggcgatacgtagttttttaaaggataacgctctggcgccgggtgtctatctcaccaccgtctattttaataatagctttgctgagaaaaagaacgttacttatgttttaaataaagcgcgtacagcattagttccggtattaaaaaagtcagaattagcatcttatggcgtaaatgttaacaaaataccctcgatgaaatcgatgcctgacgatacgctcattgaggatattagtcattatattgagggtgcctcatgggcattctcaacgcagcagcaacgtctggatatccgtgttccacaaattgccgttaaccagcaagcacaggggtatatcgnnnnnnnnnngtataaaccgtaa

SEQ ID NO: 393892 - DNA, 324 bp, Salmonella enterica
atgaataagtttacatcctttttagctgtcgttttttttatctcggctggcgtaaacgccgcagagaaaatggaatcccgtcagttatccgccacggcgcatgaaatgatgaataacggtgacgccttcgcgcatcagcaaatggctcagacacagaaaaccagcgccccgactaccgtggcgcagcagcaaaatgcgacacccttttctgaaatgaacgaccatgaaaaagcaatggtcatccatcaatcgatgaataatgcccattctttcgcccacgagatccaggctgaggagtaccataaacagattaaacgcaattag

SEQ ID NO: 393893 - DNA, 228 bp, Salmonella enterica
atgttgtatgttgtgttagagtattgttgctttaaaaaccgctctaccaggatgttacctaaaagcaataataatcgtttggtatcatatagtttacgttatgattggaatagtgtttcaattgttactaattatttcttgtggaacgtttttttgacctctaataagcgagtcaattcatttgaatttgtagttcttttgaacgccatgaaaagttataatatataa

SEQ ID NO: 393894 - DNA, 1719 bp, Salmonella enterica
atgaataagaaaagtccgtcaatggttaacttgcctgcaccgcgtgagccaattaaccagaaaatcgataccaataacgcattggtgttaaaccataacgccatacatgaacaacgactagcggagatcacgcaatctaatacctgtgacaaggccattgtaaccgtaaatccctacgggaccgctccgttaagcctctatctgggggtttggattgatgaagctgccgcgctagagatcaatgttgttgatagcgaagcgacgacagaggcggtgcgttatcaatatgatgtacatccgggcgctaaccttattccggtgtgtgggatggtatccgcggtgaataatcagattaccctgcgccttgcctcgcaaattgtcgggcaatatactgtaatgacagacgcattaccgcctacggattcggctaacgtgagcctcggtttccccattattagcgtttcctatcctgcgcagcaggcctcgctgatggatgaagggctttatttctccacctattttgatcggtataatctggcttttgatcataacgggattgtccggtggtatgtaagtcaggaaatcccttcttataattttgtcagaatggataatggccatttcctggcgacgtcacagggaataaaccattgtctgaatatgtatgaatttgacattatgggacgggtttatacggtttatcttctcgacaatgagtttcatcactccattcttcccattgagaacaatctggcgattgcgccttcagaatacagcaatggacggccagatggttactcaaccgggaaagatggcgtatctattattaacttatctaccggacttgaagtcgcttattacgatatgctgcatgtgatggattattccagatcgccgcgtccttccggaagcgcgccaggtcaggacgtatcaatggatgactggctacatatcaaccaaagctatattaatgaacccaacaatttgctgatctgttccggtcgacatcagagcgcgatttttggcgtaaatgtggattccggcgatctgcgctttatcatggcgaaccatgaggattggtctgacgaatttaaacaatacttattaacccctgtcgatgatgatggcgtcccactgtatgatcttacctcgccgggagggagtgatgcggcagataagaatttctggacctgggggcagcataacattgttgaaattccaaatgacgagcctggtattctggagtttatggtctttgataatggtaactatcgttcacgcgaagatgcgaaaagtctgttgccgctcgataacttcagccgggtggttcagtttaaaataaaccttaacacgatgaccgtaacgcgtccgtatgagtatggtaaaacggaagtcgggaaccggggctatagcagttttgtgagcgctaagcatttattgagtaatggtcacctggttattcacttcggcgcgacgacggttgatgagtttgagcatactattaccgcgcaaccaggctccagcgatcttgtcgatccggatgaagggcaacaggcattaggccgactggtattacaagaaatcaataaagagacgaaagaggtcttgttcgaagcgacggtgacgtcgggctatttcaagaacgaagagacgaatggcgcgaattatcgttatgatatttctgcatttagggtatataaaatgccgttgtttgcataa

SEQ ID NO: 393895 - DNA, 1221 bp, Salmonella enterica; identical to SEQ ID NO: 393573

SEQ ID NO: 393896 - DNA, 441 bp, Salmonella enterica; identical to SEQ ID NO: 393556

SEQ ID NO: 393897 - DNA, 633 bp, Salmonella enterica
atgccatcagtttttcttaacctgtcaggaagcagtgtgttacctgaacatgaaaggcagattttgcgggagctggccagagagactcccgaccacgacagacttaaactggttgtgggtaacagagagtatgaagttagttacataccctggttggatggattcagcatcagttattcttcgttaagccgaagtgcagagcgtgttgccagtcaactggagatgcagttgaatggagggaggactttttcacaagttcgggtcgacaatcttatcgctaatccgcccggaggtagctggctacaccataatgaactgcaggaaaaagtatcttcatgtgcatttaccgtcaacaaaaatgagtttccttgccaggatgagcatcttgaatgtccggttacattgtgtgtacccgataaaggtgtttttgttaagatatccttggattcaaatgtctgttgtttatttgattatgatacgctgaatcagctggttacacaggatgaacctcatccgataagcaggaaagtaattacggaacgttttattgtgcccagagatgaatgtcatttcgatacagagcagagtaaatttgtctggcatggccctgaagagaactacacttatttatga

SEQ ID NO: 393898 - DNA, 669 bp, Salmonella enterica
atgccgccagtatttttaactttacccgtggatgacaggggacgattgcaacatgtgtcacaaggggccgtctccagcctgcatgatgaagtcagaaataatcctggaggggtaactgttcgactggggtcttcagaatacagaatcacatatgctcaagaattgccagattttttctcagttgcggctactcaaaataatacaggtaatcaaggggagcaacctgtgtggcttcgggatgccttacaatcaacaaatgcaagaacgctggaaaggcagttaaataatggcaggactgctacagaggttatggaagagcagcttgatcgcctgcttccttcaagagtatcagccggtgtgcaggggattttggggaaaattgacgcgtgtctctttgtcacagaacaagcggactttcaaattccctgcgtacatctgacctgcccgataacgttaagtatccctgagaggggcgtctttgcccggacatcattacagtctgatgtctgttgcttatatgactcaactgcgctgaaagagcaggtgtcccggcgtctgcctcatccgattagcagggaagccataaccggggcgcatataattccgaaagaacaatgtcattttgacttggggaaaggcgcgtttatttttgatggaacttctctgtaa

SEQ ID NO: 393899 - DNA, 435 bp, Salmonella enterica
atggagaacgcaattgcacgaaagttagacccaccagaaatcaacccgattgagatagagagtgttctgctcaaccggcttgcatcagtagggcagaaatcatacgccgagcatatgggcatcagcgagtcgacagtcagcaggcgtaaagctgagggatatttctgcaaagagagtgttctgctcaaccggcttgcatcagtagggcagaaatcatacgccgagcatatgggcatcagcgagtcgacagtcagcaggcgtaaagctgagggatatttctgcaacatggcgaaagagctggcttttcttgggattcaggccgcgccaccggaggcggtactggtatccagaaactatctcacagcagtagagattctcgctgatgccgggctaaaggctgaacgagccaggccggatgcgctggggtgggactga

SEQ ID NO: 393900 - DNA, 384 bp, Salmonella enterica
atgcatgctgtaataatttttgagctatcttcttctaaaatatttttcttacatgtgttatttgtgtctgtaatgtttttaacagtaaccaatgttttgtttaaggtgtttttatctttcggctggaagaattcttttattttgtctggtaacgctatctcaatcggggaggtctttccgatatttaatttttcatttaaagatatatgtgtgtttttgacgctgattatttctgaggagaaccagtttttcgtacgttcatggatagtttcaactaattttttaacctgggtaggaatagtggaaaaattaattccgcttgatgatatgttcattaaaatcccttatcaacatcagttatggaacaacggtctggctttttaa

SEQ ID NO: 393901 - DNA, 387 bp, Salmonella enterica
atgattgaaacattggttgacataacaccccaaaatatatctttcagaggaagccaagttattgattttcactataaagcaggtagccttgagataattattagtcttgatggagtgagtccagattttcgggttttttttgactggtctcattcattccgcgtgaccgatgaaggtgacttgttaaaaatgttgggtgaacaaagtgggaaaatgctggtaggtatttataatgttgaaaaatcatcctacctggaatggtttaatgaccagagtgttaatatacatagtaaagataatgttgctcattatttgattgtgacagtaaatgatgtcgttgatgttttgtcatcagagcctccaattataaccaactattctaaatag

SEQ ID NO: 393902 - DNA, 1170 bp, Salmonella enterica
atggaaaatgccagaccaaaatggcgggatgatgatgctggcagtgcacaaatgagaggaacttttctttataagtattattctgcacttggtgagcgaatactggatctggcagaaaaaaatgtcgaaagaatagcagcgcttattaagcgaatagatcattttgaaggaatttaccaagaaaaacttattgcattgattaaacgcgcaatttctttttctgatagagacaaggagatcgtcagagaagcactatatcactatctgagctggcataactcgtataacaaagatggaaataaaaagagcagagtagttgcagaagaactcatgtcgttcgtcggtttattaacgcctcaagatattattcttgataaacgccgactgttcacttctcattaccctgtattacctgaagggaatgaaggagatcatataacgcatagtgaaaaaataataaaaatgcgaactaatgcaatagaagagatatattccaagcaaggatgggatggcatctcatctttacttttagtagtacaatcaccgtctgtaataggtgaatccttggctacctgcaacttaaattttatagattcattctcatggattattggaaaattcaaaggtaatggtttcccatttcatgatcaactgttaagttcattttatacctgtctccctgaagaaaagaaacttatcctgttaaattctcaagaattcaaaaatgagatggataatgatggcaaaattaccgcattacactcagtacttccacccaatatggctacatggtacaaccttgaaagttaccccgaaagcgcccaaaccctgtactggaagaggataaactatccacatatctggagtgatgatgctgatgaaattgactacttcatcggaaaaatgatgctttttgacaggtatatatccgcatttaatctcgtaaaacatcgcatggaaaaaatttcctggaaaaacctattgaaactgttaaacggattccgaagtaccaccgaaaaagatgtatcaataccagatggttggcatttgtccgaggctatagaatatcttgaatcatcgggtcaggtatcgcgtttagatttagcactactggaattcttctttttctcagcattcagaagttgttgcgaattttctgagctatgctga

SEQ ID NO: 393903 - DNA, 1875 bp, Salmonella enterica
atgaggatcaccgcgacccaaattgaacagtgggcggacacaagagacgctcagggattattgcccattttgatccggcgattaatcagcgcgaccacaacaataacagcattgagcatgcccggcggtgattctgtttcaagcagcggctgggatggtattgtccaggctgacaaaggcaacatctgggttactgatgatgcctctttctgggaaatgggctgttcctccgacatcattactaaagcacgctcagattttcggaaaagaaatcaacaaatttcaccacaggaagctactaaaagttgctttgttttcgtatcgccacgtcggtggcccaaaaaagataactggctcaaagaagctcgggctgaaaacatctggtccgacgtttatgcacttgatgctgacgatctgaaggcgtggctggaaaacactccggctgtagctctctggttcggtgaactaacgggccatactggcgcaggcattgaatccatttcccatttctgggaacgatggcgcaatcagtcgcaatttccattaacaaaagaaactttgctggcgggtagagaagaggaaaaaaacacgctgaacggctttctgtcagagaaaaaagaacaaattattatccgggcggacagtcaggaagaggccatcgcttttgcctgtgctaacttaatagaaatggggcatgaaaatatagccgtctgcataactactgatgatggatggcgctttattgataaaaacccctcaattaagttttgcctggcgatgaacagtgatatttccaggcaaagccgtcaccagcctgaacggactgtttttattccattttccctgggcgatcacaatactacgggtaataaacgaagtgatgccattacactggagcgtcttaccagaagtgattttgaagagaggctcattgctttaggagaagaagaatccgatgcaaggcggttatcgcgaacaaccggacggtcctggtcggtttatcgacgtcttagggccaggaacccgacaatttcatctcccgtatggctgaccacatcgccagcaaaagcgttaatcacgttgaccctggtggggtgctggaatggcaaaaaggaaggagataaatactgcgttgaaactattgcgcaaaaagattacgaagaactggaacaggaactacgcgaaatctctcttcgggatgactctccggtattacagattggcgatgtatggaaagcaaaatcgcccattgagctattgtatcaactagccccccgactaacagaaagccagctcgaacgtttctttttggttgcaaaacaaacgctacttaaacccgatcctgccctggagcttaaaaacgaagatcgctggatggcggctatctatggaaaagttcgttcagaatcagattttattctgaaatcaatcgctgactcactggtaaagctcagaatctacgcagaaagcagtgaagggattaatccagatttcatcattgctgccatcgacaatctggttagagacctgttgatggatgccgatggtgagagatggctgtcattaacagacgtattatgtccgctagctgaagcatcaccagaggtattcttaaaatccatagaaacaagtttgcagtcaacagatgttgccgttactcacctactaacggaaacaagcgaaagtacaggttttggtatgcgttgttggcatgctgacttattgcatgcgctggaaattctggcctggaacccaagacgattactgagaatcagccttattcttgcaaagctatcatcattaaaaattcagggaaactgggccaatacaccggaaaataccctgaaatcgttgctcaggccctactggccgtaa

SEQ ID NO: 393904 - DNA, 1596 bp, Salmonella enterica
atgggggatgtaagaagtatcgatcaactggttgcaaacggaacgatagattttgccataaccaatggtgtcaaattactgcagtatcagaccgagtataatgcagtaagaatgctgagtttaaatccagttacaggggatccgcagcatgccatagggtcagcggtcatcgcccgcagcgacatacctgaaattaaggactggagtgagctaaaggataaacgtattgttgcgactacaccccaggcatttggaggatatcaaatcataacccgcgagtgggttaatgatggtattacccctgttaaagatttatcccatctcagatttacaggaataccccaggaaaacctgctgtcccagttgataaataatgaagcggatattgccgtgctaccaacctgtgtacttgagcaggctatacagtctggtcgtttcaggagtgcacaattcaaagtcattaaacaaaaaaaacagtcgatgtttccctgcctgagttcaacaccactatatccacactggacattttcaagaatgcaacatgtccatgagcaactggccagtgaaatagccaggagcctgttatcgataaaagcaggggatctgcctgcagttacaggtgagtataaaggatggactgttcccgttaatgataaaagtgtcatagcgctcatgcaggatattggactgtcaaacaatatcgaccatataaagatattatggcaaaaatacagaggatggctgttcattgcacttgggtatggcctgcttctgatcggttatcatctgcgggtcaattacctggtgaaaataaggacacgcaaactggaagaaatgatggagttaaacaaagcttcagccgaatggatacgcgttcaacaggaaaaattctattctgcgcagcgctttttgttgtcaggtgaaatggctgcaggtctcgcccatgaactaaatcaaccacttatggcgataaataactatgtagttggctgcagaatgcgtttacaacaacaaccgctggatatccagtctctggatcaggcactacagcaggcaatccggcataccgccaacgccaaaaatattattcagcgcttaaggtttttcattaaacatcaccccgaaaaacaggaagtaatctgcctgaatgacgttatctcaaatgcgttagccctgttctccagtgaaatctaccgggagaaagtcactgtcgtcataccagaatctcccagggttgttatctgtgccgatgaaattcttattcaacaggttctggttaaccttatccgtaatgggcttgatgcccttaagatgcaaaattcttcggaatcctccccacagataacttttacgataacggagtctgactccagtgtactgctgaaaatccttgataatggcgtcggtcttactcaggaacaagctgaacatttgtttgtgccctttgtgaccagtaaggaaaacggtcttggattaggtatggctatctgtaaacgcattattgaagcgcacaacgggcgaatctgggcagaatcagtatctgaaggggcctgcatttgtatcagactacccttgatgaagaaggcaacagtatga

SEQ ID NO: 393905 - DNA, 597 bp, Salmonella enterica
atgagcagaacacggtttgtaatattattagcctgcgtaaccattctggtcgccactggtataagcctgttgggcgttgaggtcgttaaaacaaccggtaatgacgaattttgtggggcctgtcatgaaatgcagccgatggtaaaaacctatcagcaggatactcacggtggaaacaatccacatggattcagcgcggaatgtgtggattgccatctgccgcataccagtacggttggttacttaatctctaaaggagcacagggcaccaatgatgtgattaaaaaaacgtttactgatacgtctgatattaactggctggaaaaccgtaaaaagcgagaatcatacgtttatgactccggttgtcttgagtgtcacaaccagttactggataagacgaaggcggacaatcctaaatcacttgaaatgcataaactctacaaagatatgagcaacacgaactctgcactcaaatgcgtatcctgtcatgtcacagtaggacatgcgggcttactaaggggtgaattaaaccagaccactcctgagtataagtttcttaaagagaggcttgctgacgaaacaaggcacattaaataa

SEQ ID NO: 393906 - DNA, 1146 bp, Salmonella enterica
atggcaatatccaaggaagagcgcacctttgatactttagaaataaaaccaaacattcctgaagccaaacattttaaactagccagaaaaacatcggctaatttcattaaagactctggagttcaggaaggaaattatgaattacaaaaagccaaagatattattaaccctttggccgattttttcagagaaaaaattcacacaacaatacgctcaatgaacagggagcacttgctacaatttgtaattgaaaactatgatgcttatgtagccgaagatcatagaaaaaagaaaaatattatgttaagccttcaacatgaggttaattataatagaacggaaaaattagcgaaacagagcactgagttcaaccgaatgtcagcaaattatagatatttgcttgagtgtactttaagccttaactcaaaaagtgaaaccatacctactacagataatatattacagttacttgctgatattgattggttaatcgtactttataatgcaagtgacatcttgcacaacgatattgatgtaggtggtttgaatatagataatttttacatcccacaaatatttttttccgaagatcgtgagattaaagaggataagtttagtgaagaacaagctggctataagttaggttataatttaaacgacactgactctgtagattccgatattataaatgaaaaattagatgatcttgatcgtgtatttcaacaagatctaggcttcaaatactctagtttacttgctgttttctctattctgtttcaatgggcacgatttaaccaaattgaattaaatgtttcatatcaggcgacaaagactgatatggtaaacatactgcttaacagcaatactaacttggttaatgaggaagtagagaaaataatagattttcttattctcaatcctaataagataagaaaattactgggtactgattctgaatgttttgatgtgcctatatccgatcacaataaacgagatcatcgatataatattcgcccactaatagaaactaataataatataatatggggtgctgcggcagcatatcgggcaggcgcaatatggattgcccatattgcgaatggatatcttcctgccgagtttgaatggagtcacatttcacattaa

SEQ ID NO: 393907 - DNA, 294 bp, Salmonella enterica
atgagctttatttattttggatgttgcttaacaagtgtatcagtgaaaaatgttcgtctgctttgtcgggtgctgaatgttcatccgggtgggttttacacctggcttcagcagccgtattcactacggcatcaggcgaatcttaggctgacaggaaaaatcaaactgttctggctggagtccggttgtgtttatggctatcgcaagagccatctcgacctgcgagatagcgggcaacagtacgggatcaaccggggttggcggctaatgaagcgtgccgggataaagacttag

SEQ ID NO: 393908 - DNA, 273 bp, Salmonella enterica
atggctgccattggcagtacgccgtttgagcgcggtgatacggcagagggattcctgattgttacctccgcaaccgataaagatctggtagacattcacgaccatcgccctctcgttctgtcacctgacgccacgcgagaatggatgcgccagggcataagcgggaaggaggtagaggagataattactgacggtgccgtgtcgacagataaatttacctgccacgccgagacgcgtaccgttgggaatgtgaaaattaaggggacgaactaa

SEQ ID NO: 393909 - DNA, 210 bp, Salmonella enterica
atgaagattatttcgtcagtagatgttcgtgatattgcggagatgcttgaggagtatatttcagagggtcagccgcgaatggcgcaagtgatgcattctgtattgattgacgtttttaaagaggcacagcatttcggggaggttccaccgggctataaccctgccctgcaacaaaacagccacggcgccgtatcacgcgccagcgtctaa

SEQ ID NO: 393910 - DNA, 993 bp, Salmonella enterica
atgctgaacgctatcgatacaactcctcttcagccagtgcaggctactcctgttactaaaggaaaaacagaagagacaactacgaactctacaacatctaatcctgcgtttttaactaatggtaggcttgatatcggtaaacttcttttggaaattcaaaagttgctgcgtaagatgctgtctactttgcaagattatatgcaaaagcaattaggacaaagctataaaattcagcaagctgcttttgaaagtcaggataaagtgattgaagaaaaaagatcggcggctcaggcgcagttgattgggggaagtatttcatctgctttggggattttaggctcttttgccgcaataaatcaagggcttagtgagtcaggcaaagcggcgggacaagcggcgaaagaagcggcggatgcggccactaaagcttcgacaaaggcccttgaatcgacaactgacacgctgactaagacactcacgaaaaccgcagacagtattgcggacagcgtgacggaaggcattgaatcaacaactaaaaccatcagcaaagccctgaacaataccacaagtgacattactgaaggcttgactgatgctatgcaaagaacatcacaagtcaccgccaggaatgtagatgtcatatcagatgtggcgtctgaggctgaaaaatctatcggcattggggctcgcctcatgaatggcgctgagaaagtcactaaatctacgccatttattgctataaccagccttgccgaaggggtaaaaacattaccgatgacaatttctgattcgattaaatcgacgcatgaaatttctgagcagcagcacaaaaacgtagaaaacctgcaacaaaacaaccttgatctgtatcgacaagatatgcgtcgttctcaggatgatatagcgagtcgtcagactgatattacttctgttacacgcgaattcctggaagttcagaatcgtatgggtcaatcttctcgcggcgcagggtga

SEQ ID NO: 393911 - DNA, 435 bp, Salmonella enterica
atgtacaatgcgcaaagtaatctatcaatttctatgtacgctgacatgaatgaatcttcaaaacagtcaacgatggcacagaaaatggcgaacttagtggatgcaaaaatcgcagatgtacaaagtagtagcgataaaaatgcaaaagctaaactacctcaggaggttattgacttcgtttcagatccaagaaatggggtaacggtcagcgggcttagtagcgatgtcaatataagctcggacatgggggctggtgatttgcaaacggttaaagcggctatctcagctaaagctaataacctgacgaccacagtcaataatagtcaattgtctatccaacaaatgtcaaacaccctgaacctgttgactagtgcacgatcagatatgcagtcactgcaatacagaactatttcggcaatatctatcggtaaatag

SEQ ID NO: 393912 - DNA, 903 bp, Salmonella enterica
atggtggataatctggaagcggagctacagcgcagagaactcagtgaagctaaccggacatggctggcacagtgcgggctgacggcggagcagatacaaaaccagatggagccggaatacacgccgcagagaacaatccacctgtaccactgcgaccaccggggcctgccgctggcgctgataaaccgggaaggaaaaacagactggtcagcggaatatgatacgtggggtaatgtactcagtgaaaataaccctcacaacatgaaacagcacatccgtctgccggggcagcagtatgatgaggagacggggctttactataaccggcatcgttactacgatccgttacagggacggtatatcactcaggatccgattgggctgcggggaggatggaatttttatgtatatacgtccaatccaataatagaaattgaccctcttggattagcggggtgggattcattaggttcctatattaatcaacctgggtataaatcaaaagttacaaatgtagccccggagggggccgatactacaaaaccagtttcgttaaggcctgacggttacccttggggatatggttgcggagatgaaagtacagataaatttgttcctgatggtctgtatggtgttagttttatgcaagcttgtagaaatcatgatatctgctatggaacatcaggaagcagtaagcagtcatgtgatactcatcttggagacgacatagtgttggcatgtaacaggatctggaaggatacactgagctcagatgatatgctttataaatgctatactgctgctggtatttatcagttagcagtggaaaaaaaaggtggccccgctttcgaagcggctcaacgagaggcagcaaaaaaagtaacagagttcggtccaaaataa

SEQ ID NO: 393913 - DNA, 696 bp, Salmonella enterica
gtggcgtggcgcgcggagtatgatgaatggggcaacctgctgggtgaggagaaccctgagcacctggagcagctgatacggctgccgggacagcagtacgacgatgaatcagggctgtattacaaccggcaccgttactataatccgggacagggacggtatatcacgcaggacccgatagggctggcggggggatggaatccttatatttatccattaaacccagtatcatttgttgattttttgggcttacaaagcaatccattagatcaagatgaagagttaaacaaccgagagtatggagggtatcaggagaaccaatgttgctcttttttatctctacacgatagagacataaatgtcaaaatatatgacttaatgccattcctaggggttgcgatgaaaggaccaagaaccgaatggcttgatcgtaaattaccttcggataaatatggtaacattattcctgataaagatataccacatacgcaattaggcatgaggatcggtaggcgtaaaacctatatgcaagcacgtgaatggggatatgatgaacagggtaaattaatacccaaaagactcattgattttacagatcatgggagaaatgatcatactaatcctcatcaacatacttatgaacctaactccacaggtggtacgtggagacatggaaaacaatgtgaggtggagtaa

SEQ ID NO: 393914 - DNA, 981 bp, Salmonella enterica
atgagcatgaccctaatggcccgggcgatggcaataaaaaccggaaacccaattcgtaaactggtgctgattaaacttgctgataacgccaatgataatggcgaatgctggccatcttatcagcatattgctgatcattgtgaatgcagcaggagtgctgttcgctcgcacattgacgcgcttattggcatgggcgttttaacaaaagaaaaccgcatgggtataaacaatggtaagggcaatacgtcgaatgtgtattacctgaatcttgataaccctatgccaccaaaaagcacagcccctgtgccgtcaaaaatcacaggtatgccgttagaaaacacaccccctatgccatgtggtggcaccagaaccagtcactcttttgaaccagtcaatgaacctaatgatccccctaacccccagaagggggagggcgacgaatggctccttgctgacgctaaaaaagccctggaattctacaacgaacaaaccggaacccgttgccgtgatattaagccgttcgtactaatgctgacgccgacaaaaacacgcgaagcatacacactggctgagctgcaattagttattcgttgggtactggctacctggcgccgccgtggttctggtttgccaaaaccggccaatatttgccgcgtaaatcgctttgacggttatctcgcggatgcagaagcatgggctactacggaggctgatgtcgatccggatgctgtcatgaaaggctacaacgagatatttgctgacacattgcctgctgctgaactggatgccgatcgccgggggatgattattcgcctggctgctcacatgaaaaataaaactacgggggcatttcttggctatttcgaaaaattccgcgctgatgcacccgatttttatttcggtgccagtggctggcgcgccagctttgattatctgatgaaacctgaaacgttgcgtaaaacaagggaggaagcactgtga

SEQ ID NO: 393915 - DNA, 225 bp, Salmonella enterica; identical to SEQ ID NO: 384044

SEQ ID NO: 393916 - DNA, 450 bp, Salmonella enterica
atggtttccagagaggtgcagcccaccacactcagggattttagaccggctggcaaatggctgatatctcgcagggccgaacagccatccagcgccagcactgtcagggagggaggaaataatgccggcaacgttgtcaccggcgcccggatgtgtatcaaacactcttcattttccaggcatcccagcagacgagccgccaccatcgtccgttcctctcccggtgcggtctcattctgccacgcttcaatagcagccctgacactcgctgcagtaagcaccgttgtttcttctgtatttctgctggccgtcacgggcctgacagggttaacatccatttcccttttatctttcataatctctgtttacacagagagaagtgtgcaaaacagttcacaatattgtaaaggctattttggatctattttcgattcctgctcttgtatctga

SEQ ID NO: 393917 - DNA, 639 bp, Salmonella enterica
atgcctgcatttgctaatcagaaacaagctgtttctgagggaaaaatagcgcctccggtccctcctaaacccacggctgtcgctatgcctaaatttggtaaggctgcagaaatattatcagtaggattaaaaagcaaaattattaaagatctaaatcttgataactggatgggcttaggcggagaaataaccccattggttatgattgacttttataaaaaacaaaacattgacttaattatacatgcacatataaaaaaagaagccattaaaacagatccaattaaaaataattcaattaatttaatgaatgttggggaccattatatggtattaacagtgaataaaagaggaagcattgaactgatagatgttcctggtgatggggactgcttatttcgtgctgccgttaaaggtcagcagatagctaaaacacccacagttaattacagctatcaacagacaggaaatcataatgatgaacatattattttaaaggaatcgataaaaactcatttccagaataattttgatacatttattgatgatatgaaaatgattctcaccacagaaaaatcaaaagcagccaacaacattttacatgacattaacacatacataaaactaataaatctctga

SEQ ID NO: 393918 - DNA, 642 bp, Salmonella enterica
atgccagggataaatttagcaccatatataaatccccggggtgaactgggagtaatacctcaggatacactggaagtcatacgtaataccagtatgtcaacccctgaaggggctgacatacaacttggcggtattatacatactataaggcatgtaactttactggactcctttctggttcatcctggcagaaatattgacggtgtgggagttgtaagagacagcgataggaatatcttaaattctcaccgtctgagtaatcaactaaacaacagaagagtgtatgagagatcatctgcccctttttctacgcagttatctggaggacatcagcgagtaatgtctaagattgtcttatgcagcttcaatgcaggactggttggttttcaggtccccggcgaacacctaacttgtccgataacgctaagtatccctgagaggggcgtctttgcccggacatcattacagtcagatgtctgttgcttatatgactcaactgcactgaaagagctggtgtcccggcgtctgcctcatccgatgagcagggaagccataacaggtgcacatattgttccgaaagaacagtgtcattttgatcaggagaagggcgcatttattcattctgcatctgaatcgcaatga

SEQ ID NO: 393919 - DNA, 1071 bp, Salmonella enterica
atgaggacaggactaggattatatcttctaaagagaattagaaatataccgcacagtgacagacaaaagatactttctatgaaaagcgaacatgaattaaatagtgtcattaatggaattttaagacccgagataaaggtccctaaatatttttttagcaaagagtataccgctgctctcttcgatggcaacggaggatttctggaccccaaaaaaacaaacaacaaagaatatatgttagataaagtagctacatattacaaggtattagctcacgcttccaataacttaaaaaatgactatgatatagcattgtcggcagttaatcagaacggaaccgctataaagctcatttcagacgaactaaaaaaaaacagagaaatcattatggcggcagtcaaaacatcagggatggctttgagatttgccgatgaaaaatttaaagtcgacaagggggtggtattagcagcagttcaccagtcaggtgaatctttggaattcgcttccaagagtttaaaaaaagacagaagcattattctgacagcagtaaaaacatcaggtatgtctttgagatttgctgatgaaaaatttaaagatgacaaaggagtagtattatctgctgttcaccaatcaggtgaagcgttaaaatttgcttccaaaagattaaaaaatgacaaggatgttttattaacagcagttcaaaattctggtcaggctttaacatatgtccccaaaaaatttcgagatgataaacaacttattttaattgcagttcaaaagaatggtgctttattgcgatacgcttcagacagattaaaagatgatgaagatattgtaaataaagctgtacaaacccacctcactgcattattattttgttctaacagattaaaagataatttggaaactgtgcttttagcagtaaaacatcatggcaaagcattactatacgcatcaaaaagattaaaagataatgacatcatcgtttcagccgcgataaacaatgataagagtgcggataagtatgcttctgaaaggataaaaaagaccttgctcttaaataaattataa

SEQ ID NO: 393920 - DNA, 759 bp, Salmonella enterica
ttgacaaagttgactggcgttgcgttaagcggcgaggacatctctgacgttttggccgcgacaataacttgcccaggagttgaagatttcagcggcaaagcggttgtcactttaacatccagcaccgccggaaaagcccttgtcacagcaacctctgatggagttcaacgccaggcaaacgaagttgaattcttctctccactgagcattgacagcggtaatgtggaaatcattgggactggtgttagtggcgcactgcccagtacctggcttcagtatggacagatcaggttaaaagtcaccggaggaaatgggacttatacatggaaatcagccaactccagtgccgcttctgtagaggcaagcagcgggaaaataaccctcaactctaaagcggggacgactataacggtaacatcgggcgataatcagacagcaacatatactatcaatgcgccaacaaagctgattactgccgataccagtagtcgtgtaacttatgcagcagccaacgcaacctgtgccgccactggtcgtttagctaatgaccagtcagaacttgctggtgtatttgcaacttggggtgctgccaatacttatgaccattactcaaatgccgccagcataactgcatgggtcaagcagacctccgctgagatagctgcaggagcggcaagtacatatgatttagttaggcagaatccactctcaaatgttaaggtaaattcagcaagcgccttcgcagtttgcgtacaataa

SEQ ID NO: 393921 - DNA, 261 bp, Salmonella enterica
atgaaaagtgatatttcagcaagtaaaataattatatgggcgggtgtcgccgccgctaaccacaaattacctcaatatgcacttaatatcttacctgcgttacctcaactccttaccaatgaagaggatattgctcatattgaatttatcattctatatggtttgaacagaaaagatgaggcaatggaaaaaatcgccccttttattgagtttgaaacaagtaagtttcttcttaatcttgcacatcgtagcacgcaataa

SEQ ID NO: 393922 - DNA, 222 bp, Salmonella enterica
atgaatctttctgaaattacagatcagatggggaaagttgggaaaacattaagtaactcagttcccgacttacttaacagctcagatctggttaatgatccagataaaatgatagaactgcagtttgctgttcagcaatactctgcttatattaatgtagaaagcggaatgttaaaaacgatcaaagatcttgtatcaacgatttctaaccgtaccttctga

SEQ ID NO: 393923 - DNA, 723 bp, Salmonella enterica
atgcgcagcgtaccacgcagggaaagacaccgccgtttaagaaatgccaaagactgcgcctgccgttatcactctccaacgccgcagatattagatcgccttgagttactgaaccaacagctcaattatgctttgccggttggtatcatttcccaggcaataattacaacggataactacctcgggtattcgctgagtcactacttattttccggaaaacgcaccgcagcattccgctcattagacgacatgtctttgtggattgaaaaggggtcgctcagacaactgattgtagatatggaggcgctacctatctcctgtattgaggcgcttaaccagctacgcgcgctcagttggcaacaaggcgatatccagatttacctactggtatctgataaaacccccgctataccccagtttatccgtatggccgggcgtttttttgtcctgtcgcgacgacaaactctggcctcagtacgcgaagccttgttatcagccgccgaaccttgcttatcggaaagctttagccgcactgactggttgatgattgaaactttagcgcaaggcgcctctttaaaagaaatagcacgtcagcaaagcgtaccttatcaccgtgtggtttatcggcttaaacaacttatcaccctccttaaccttccccacaggcaaagctttcttcggctgatccagcagctaaacgttactttccacgacattttttaa

SEQ ID NO: 393924 - DNA, 255 bp, Salmonella enterica
gtgggggaaagcgtcagtttcacggcaggcaaaacccggacggaaagtgccggaaaggtggcggtctgcaacagtgtcggggagtatcctgagctggtttgtggtcaggtccaactggtgctgacgcaggccggcagcatcttcctgaacggcacggcgattaatcttcagggcgcacaggccatcagcgacgacgggccggtgattagccgggactgcggggcggcaaaaaatccgcctgacgcaccagagtaa

SEQ ID NO: 393925 - DNA, 213 bp, Salmonella enterica
gtgaatgtctaccagacctttatcggctgcggaggtaacaatcaggaatccctctgcttcatcactacgctcaaacggcgtactgccaatggcagtcatgaatatcggcttcccgtcctttctgtgaatgaaatacggctgttttttgtcgccttccttcttccactcgaaccatccatcggcaaaacagatagcccggccatgctgccatag

SEQ ID NO: 393926 - DNA, 276 bp, Salmonella enterica
atggacgtggtacaaacatctttgtctacccagcccggggtaggtaatgaccctaattcggctgtatcaaataacgggctaacatcctctggtagaacgatcagagcagtagcgattgtaggaattgcaaccatggcgctcactggtgtgggaggaattatcgcgtcttccattcttccaacaggctcaagcagtgcgcttgtagctggtgttatcggaggtgtttctgcaggtatcgcagtcttaggttcaggtctggcaatgaaatatgcctga

SEQ ID NO: 393927 - DNA, 510 bp, Salmonella enterica
atggcaagtttaagagataacggaaaaacacagaatgcacaatggcctgactatgtaggcagtatattgcagggaacacaaccaataaatcagttagtacctcagcatccttatctaaaagatgttcagggtctggaagaatttcagactaaaaagacagtggatatcatcttgctgactattccggaggcaatgagactggtatatgataaaacagttaatacagtcagttccgcatactcatcctatgagtctcatagcatgaagcaaatggcagttggcatattagacataaataaatcattttccgataaaggcataaatgttattacactttacgacacatggaaatgggctaaaacctcatgggaaataatgagttattatgatcaagctaacaacttagcatggaatattagtcaaacttatattgctaatggcaaaacatatattaatataactggatatgcaggattgcgccatatactcaatggagtcttatctttttga

SEQ ID NO: 393928 - DNA, 282 bp, Salmonella enterica
atggaggccttccgggtaaaaattaaagatttaatagagatgtcaatccctgggttgcaatacagtaagattagtatcttgatgcagcctgctgaattcaggatggtgcctgacgtaccagcgagacaaacgttctggattatggacgttatcaacgcccataaagggaaggtggtgaagtggttgatgaaatacccttatcagttgatgttatcgttgacagggctgctattgggagtgggcattctgatcggctatttttgcctgagacgccgtttttga

SEQ ID NO: 393929 - DNA, 303 bp, Salmonella enterica
atgctacatgtatggttaattggttcagagcttgagaatgagttgcgagagtcgataagacaaacctcatctggttcttatctaaatattactccagaacggacagagcagataatattattattaaagcaagttgtaacccctgaaaataatggtgtacttcttactgcgttagatattcgcaggtatatgaagaagcttatcgaaaaggcatttccttcaactccagtgctttctttccaggaggtaggtaataatatagaattaaaagtgttggggacagttaatgactttaatgcataa

SEQ ID NO: 393930 - DNA, 291 bp, Salmonella enterica
atggatattgcgaaaattatggttgcagaaattgtctttagagcaattgcgggtattatagtttccgccggagccccggttattttaaccgcacttgctattattgtgattggagtaatgatcgcatggagtttaaacgaacttgattctgatgacaatctgaatttgtcaaacattctaaaaaacgcgataaggcgaggtagtattgcacatgctgaaatacttatacatgattctaaaaatttatccccgtggaaatttgccttgtccaatatgcggtcttatccataa

SEQ ID NO: 393931 - DNA, 285 bp, Salmonella enterica
atggatgttagtacatttaataaccaaaaggaacttaaaacatatcaacaagcaagcgaattttttagcattatttataagatattacctaacattcctcaaatggaagactttgtccctgaacaagactgggagataatatttatagaattttttacggtagctcagtcgaacgcttatatgattatattcaagcttttggaattagatacgcagaatatccaattatccttaagcaaatggacaatgttcttattttacaggataagtttttatcaagcataa

SEQ ID NO: 393932 - DNA, 318 bp, Salmonella enterica
atgtttctttcgcttaaaggtaaacatgagctggcacgaaaattaactaaagagatctccccgcatgagataacagggcttattgctattaatcttctttatgctgaatactgtcagaatagtgagcgagccttaccggcgataagagaatatctggcaagtgaaccgagtattgataataatcctggactattaccattagtactgattgcccacggcgaagttattgccgagaaaatgtgggaaaaatttcaaaatgaagacaacatttggttcaaacgatggaaacaggatccccgcttgattaaattacggtaa

SEQ ID NO: 393933 - DNA, 240 bp, Salmonella enterica
atgtcatatatatcaagacgaaaagatcgcgttacgtttcgggtaaggcaagttacctataataagcttcattataaacgccttgagatctatgttgatgatgtggaaattgaagaccctgagaacaaaagatgtcctgtagcaagaaccggtggaaaagtctatcgtgttggcaatggaatggttggtcaatcgaacatttggaatgaaatgttaatgagacgtaacaaaaaacagtaa

SEQ ID NO: 393934 - DNA, 141 bp, Salmonella enterica
atgggtggacaaataatcttcgatactgagaaaaatccaaagaatagcgtggatataatattattttatattttttcgaaaattaatattaatagtaaattacactcacctaaaaaagtaaacacaaaaattgtaatttag

SEQ ID NO: 393935 - DNA, 879 bp, Salmonella enterica
atgcatgtaatttcagtaatttctaccaaaggcggcgaaggtaaatctactaaatctgccaacctggcaggcttatgtgccgatgctggtctcaaaactctcctgcttgatggcgattaccgtcagccaaccgtctccagttattaccctcttcgttatgaagccccatgtggtctgtatgagctgcttatgcagactgtagatcttaaccatccggaacagttaatttcccatacctgcattgaaaatcttgatctgataatttccaacgatcctcacggacaactaaaaacggcaatgatgcacgcgccggatgggcgcatccgattacgtaatcagctacagcatccattatttgcatcttatgacgtaattattggtgacacacaaggcgctcgttcaatcatgctggagcagatgcttctggcgacaacacataccgcgctggcagttgtgaagcctgtaatgcctgacattcgggaattcttacgaggaacagtgggattgatggaagagctgcttccctaccgtgggtttggtattgcgttgccgccaatgaagatattggttaattgcatggattacaccctgctggctgaagaagcgctgggtgcgttaaccacgattattgctgatggaacgtatagcaaagcggatattcctcctgtcactctgctcgaaacccaaatctacgaccttgaagtctacaaactgggtcatacgcgggggcaacccgctcaccgtcttgaataccagaccgaccggaagagtttgccagctgcgcagaccatgcacgatctggcctgtgaattattccccgaatggcgcgaccgctttgatgcggtactgcaaaaccagccgaagggggataagtcatga

SEQ ID NO: 393936 - DNA, 390 bp, Salmonella enterica
atgagactttatcgtgcaaattacagtctcgtagctcgcgatggtcgggtaaaagttgatgagcaatgggtcttttttgaagctaaaacctattctgacgctctggaaaaaatccctggcctactgaaagcaatgtgggattgcagtgaattccagctcgaagtatggggtctgatgccggataaccagattgttgatctcagcatggatatggagattgattctccccgggagtggcgtttctttgaggtcggttattccgctggttctgccgtttatcttgatgtcgaacgtgatggctggccgctgtttcttgtctccccgtcctggctggcccgtttgaataaagcgttggtcgaatgccgtagcgccggaggccagcatgaataa

SEQ ID NO: 393937 - DNA, 1353 bp, Salmonella enterica
atgaataacaccgaacagatatcgccgccgcattcaatcagcgccgagcaggccgttcttggcggtctgatgctggataacgatcgttgggatgatattgcaacgattgtttctgctgaccgcttttattcgcggccacatggcgtgattttctccgcgatgcagacgttgctgcttcagaataagcccatcgatctgattaccctggctgaatcaatggagcagcaggggacgctggaacaatgtggcggttttgcctatctcgccgaactctccaaaaatacgcccagtgcggccaatatcgtcgcttatgcagagtatgttgccagctacggtcagaagcgtcagttactgcaactggggcatgatctggttagacaggccagtgatgccagaagtgacctgatggtattactggatgaaactgagcgccgtatctttgccattgccgaacagcaatccccggatggtgacgttgatttacctgcttcactggaagtcttcctcaaccgattagagcaacgttgcggtagtgaagatctcattactggtacgcctaccggttttgctcaactaaatacgatgaccagcggcttccagtccagtgatctgattctgctggctggtcgtccgtcgatggggaaaacggcgctgggactggcgttctgcgaaggcgcattgaatgagcgtcaggatatggcggttcaagtctacagcctggaaatgcctaccgagcagctactgatgcgctttactgccatgctggggcgtgtccctctgcaacacctgcgcaatggcgatatgcaggatgaagactgggcgcgggtcagtaccgcaatgaaagtcctgctcgaagactggaaaggcaggctggtgattgatgattccagctatatgacaccggcgatcttgcgctcccgggtgagaaaaaatatccgtaaatacggccatccatccctgatcctgctggactatctgcaactgatgcgctgcccggggcaggagaaccggacgcaggagattgcggaaatctcccgctcactcaaggcgttggcgaaagaaattggctgtccggttgtggctctgtcacagctcaatcggtcactggaaagccgggcggataagcgaccaaacaacggcgatctgcgtgactccggggcgctggagcaggatgccgatctgattatgtttgtttatcgggacgaagtgtatgacaccgatacgcatgaacctggtgtggctgaaattattctcggcaagcagcgcaatgggcctatcggcacaataaaggtgcaatatcaggcggagattacccgtttcgaggattttacaggaggtcgctatgacttctag

SEQ ID NO: 393938 - DNA, 1620 bp, Salmonella enterica
atgacttctaggaaagccagccaactgggcgaaaagctactccaacgggggcgtaccccgaacactgaaagctctgctgtggcattgccggtaaacgaaatgccgatggttctgacgctggagcagctgcgccccaatccggataacccccgaacttcccgcaacccgaagtatgaagatatcaaagcgtcgatccgcgcccggggactggattcggtgccaaaagtcaccaaagatccggaatgcccggaggatgtttatatcttcagcgacggcggcaacactcgctattccatcctgactgaactgtatgcagaaacaggtgatgagcgttttcgccgtattcagtgcatcgtgaagccgtggcccgggcgtttgcagtgcgtcatcggccatctggccgagaatgatgtacgtggtgagctgtcatttattgagaaagcctttggtattgagaaggcgcgggctatttacgaggaacaactggggcgtgaagtgagtcagcgtgagctggccgctctactgaaagaggccggttatccggtacaccattcgaatatcagtcgtatggccgcgacgatagaatatctctggccgtggatgcctaatctgcttaattcggggatgggacgaccccagataacccagcttatcgcgctgcgaactgcggcggaaaaagcctggcagacctttagtcagaacgtcgcgttacccctggaagaggaatttaataatgtctttggtggtgtttgccgcacctttgacgacccagagcactattcagccgatgtttttaaagatgagctgattgcggccctgttgaaggcaatgcccgatccgcaactgacttacgatagctggttgattgaactcgatccgcaggaacagaaccggcgcaaactgtttggcgagccggaaccgcttccccagcatgttctggatgctgacaaaacccatgttgagccttcactaccatcggctgctgagccgccctccgctgtcactgattccggatcaacggggaaaaagcctgtcactaccgggggcgacacctctgatcatatcgatctaccgcccgatgaagaacagctggatctttatggtgggaatgtcccacgtgattcaacacctgaattatccgacgtttctccggacgttgatcaagagcctggtgattgtactggcggtcagcttcaggagcctccggtaaatcccattgcttttgctgcgaatgggctggagccggtaactgacatctggcatatcccggcgctacagaatgatgttgagcatctacaggacatcgcgtttcgcctggcgttcgaactggcggaggtgatggggattgaagatgttattcaggaagataaatctctcctgggcgcgggttattccctctcatcaaacccagatggcgaacctctggctacgttgtgcggtgaggcgacggatatgcctatatcgatattaaccgggtttcttatcggtgcatccagttccggcccgttagatgctccattatttgatgatgtgtatgcagtgaaattcctgcgtttaatcagggtagtgcgccgtttgcgtgagctgcaacgccaggcattcagggaggaaacggcatga

SEQ ID NO: 393939 - DNA, 243 bp, Salmonella enterica
atgaaagctgactgggttgatgaggcgcaggaagtgacccaactgatggtcgatagccaggtggagcgtattcgctctttattgatatcaccggcgatatcgtctgctgaatgcgaactttgtggacatgcgatcccggaggcccgtcgcagagttgttccgggcgtcaggctgtgcgttgaatgccagaccattgccgagtttcggcggcgtgtcggatatggaggatacgatgaaagctga

SEQ ID NO: 393940 - DNA, 525 bp, Salmonella enterica
atgaatgcactgttaacgcagatagttatggagctgaagtcgggcaatatccgccgttgtgaggcgatgggattaacactggaagagattcaggaacttaacagcttaaccgttgaagatctgcattatctggtgaatacgcaggtatcgcttctgacctttcgcatcaaccataccaacctgaacaccatgctggcgcaggcccgtcgtgagcagacccggacgcagcggatcgacagggcgttaacgctgggtggatctatcgagctgatgcagcattttttcggcctgacggcaacggaggtcagctcccggcgacgtctggttggtgtcgtgacccggcaggggcgcagccagatccccacagaagaacaggaactggcggtgtggcagcagtggaaggcgtcgaacgttgacaacctggaatcgctggatgcgctggaggccatgatgttaatcgctgagcagcaggatatttcgttaaccgcagtctggacgctaaccaaaggatggagtgccgcctga

SEQ ID NO: 393941 - DNA, 1200 bp, Salmonella enterica
atggccgttgttcccgtcgatgatgttatccagcgtacgctggcgaagatgcaaaaccggattgagcaaaaaacgcagtccggcgagcagagtaatgagcagagcggattgctctttctggggaacgtgcatgacgccgttccccggcgtttatttctggatagccggttatcgccgctggataagatggcgtgggtgatgatccggctgtatgcccagcagaatgagggcgctgtttttcctacctatgacgaattacagtgccagctggcgcttccccattcggataaagcgtcccgggagacggtcagtcgggcgctgttaatgctgcgtcttaccgggtggttgagtctgtgcaagcgtgtcagagataaatccgggcgcattcgcggcaatatctatgctcagcatgatgagccgctgggattgtttgatgcggaatacttcgatcccggctggcttgatgccgtcgctgacgcctgccgacacaccaataaaacgatacgcctgacagcgctggccgttttgcaggaaatcaaatccgatactcgtatgcgccaccggcactcgcgcgttgcgttgatcgaagcccggttatctgcaccacaaactccgcaggaaatggtggcagcacagaagaagaaaaccctcggttctgaaaccgaaccaggtcaaaaaccacagagttcggaatccgaacttagcgagttgaagagggatattttaccgggttcggattccgaactaagccggaaatcaagggatggcggcttagttcgaaaatcgaaccgttacgtacgtagttttacacagagtgtaaaagatacgtacgtagggggcgaaagtcggttgtcatggccgacagcggtaatcgaacggctgaacacgcccgatagggatatgctggagcagcagcttaacgcgctgcctgatggtttagggcagaggattctggacgatctggctggtcgcatgaaagcgacagaggtcaggaatgtcacggcctatctgctggcgaacctgaaacgggcgagggaagggcagtttaacactggtgacgtgggggctgtacatccgcctgtaaagccaaaaccggtaagtgcgccgccatctagtaggaaaaaagaggttaaacgcgcccgaagggagtttgtatccgacatgatggccgagattcgtggtaattatttcaggtcataa

SEQ ID NO: 393942 - DNA, 2508 bp, Salmonella enterica
atgaaattttcaaggctagcattagctgtaggatttagttcatttatagtacctgcaattggcattgccgccaataattgtatcgacggaagatgcaatgtggtatccaactttattgaaaacggacatgtttttaaagatataatcagtaataaattgaaagaaggaacaacagaattttcaaataaactagttggtacatatgcatcaacattagcctccacaaccgagagtaactcaacagctacggggggtaatgcagaggcatcaggccacttatcgactgcaactggaggttattcggaggcgagcgatagcagagcaactgcaactggtcattctgcaaaagctacggctgattctgctacagcgacaggttattctgcaaacgcagacacacaattcggagaccatgcggtagcaggtgcccctggtgcttctgcattcggttcatatgccagcgcatcaagtacggatgatacggcaataggatcgaacgcaaaatcgacaggtgggcagagtacagcggtaggacacacatcgttggcagcagggcgattttccagcgcatttggtgaaaacagttccgcaagtgctcagaacagcacagctctcggaaatcgaagcaccgcaacaggccaaatggcaacagcaacaggagcgcaatcaacagcaacaggcgctaactcagaggcgaccggaaaaaattcgacagcaacaggtgttgattccattgcatccgctccgggagcgacagcgacgggacgtaacgcacaagccataaacaatggggcaacagcaaatggtatgggcgcaatcgcatcaggaatagcgtcaaccgcagatggttccaacgcgtctgcgtccggtgagacatccacagcgatcgggtcttcgagcaccgcatcaggccgattatccaccgcaattggggcacattctgtggcgaccgcagatagagcaacagcaacaggccataatgcggaggcgaattctgattctgcaacagcaacaggctataatgcggatgcttgtggggaggaagccacagcgacaggtgccaaatcaaaggcatgtgaaaaaggggcgacagcaacaggcgcaaaagcgacggctacaggggtatcatcaacagccctgggctataacgcactcgcctccggtcttaattcactagcactcggtgttgactccagtgctacagcagatagctcaatcgctctaggagcgaattctgtagcaaacaggaaaaatacagtatcagttggcagcgttggcaatgagaggcaaataacgaacgttgctgctggcactaagggcactgatgctgtaaatgttaagcagcttgatgattcggttcaggacgctgtaaacaatgctaaatcctataccgatagcagtatcaccaatgccactaatgagatgcaatcgtatacagataacagcgttaataacgcgactgacaatatgcgcgaatatactgacaactcgtctgctcaaacgttgattgacgctaatacgtataccgacagcagtgtcaccaatgccactaacgagatgaaatcgtatactgataattcatcaaaacaaacgttgattgacgccaattcgtataccgacagcagtgtcaccaatgccactaacgagatgaaatcgtatactgataattcatcaaaacaaacgttgattgacgccaattcgtataccgacagcagtgtcaccaatgccactaacgagatgaaatcgtatactgataattcatcaaaacaaacgttgattgacgccaattcgtataccgacagcagtgtcaccaatgccactaacgagatgaaatcgtatactgacaattcatcacaacaaacattagttgatgcacagtcatatactgacaatagtattgccaatgcaacaacaaatatttccaatgacatgaaagaatatacagataattcatcacaacagactctaattgatgccaattcatatacagataactcagtgaatgaagcaaaaactgaaatgactgaatatgtcgataattcatcagctgattcatataacaaagcgataagctacaccgattcaaaaataactgaagggaacacctacgcaattgattattccaaaacgtatacggatgagtcatcgcaaaaaacactaaatgaggcaactacatacacagacaatcgtgttaatcaggcaatcgactatactgacgctcagattaataacataaataaccgagttaacagcctcaacagcaaggttgatgacaaccgtaaaaaagcgtcagcaggtattgctggcgcaatggcaatgagttcgattccgcagaactttagttacgatttcaactttggtatgggaatggcgaatttcgatggggagcaggctatttcagctggcggatattatcggatcagtgagagaacaacagtttcgttaaaagcgtcgtttgatacacaaaacaatctcggtgctgctgccggtgtttcctacggctggtaa

SEQ ID NO: 393943 - DNA, 753 bp, Salmonella enterica
atgtcagacaagacagaaaagaaaaccggttcgctgcattctgagctgcgcatcgaactgcatacccaatacgccattaacacctggaacgggcggccagcctcggatgggaagccttcgctcatcgggatgccgctatttttccggctcatttcccggattaaccgcgactcactggccgataatccgtgggcggatttggccctggtagaagtggaatcattgctggagacagcaagtcagcagctccagaaatggctgaatgatattgatgccctgatggcgatgctgccagctaatgcttctgtttccggggttacctccaccgcgccgctgaatatcggtgttcacagccatactccgttggggtaccgctgcgtttatctccttgttggattcgatcagcttattctgcgtgtctttcaggctcaccattacggtctgatgtcgcttaaagagcgcaaagcctggctacatcgcggtagtcatcaaattcgccaaatcttctcggttgctctgcgttaccgttctcatcccgttacccgccaggatattgcctcagataacgatattgcccgaaaggctatcgaacaatttggggaacttgacagggcgatcctgctgggaagccgccgttcccgcttttctccgccagtaagcgccgaaagtattaaggcgctgaaagctgccttcaaacgtcagtcacgcaaagggaaagcggcaaagcaggagatacaggatgatcagcaataa

SEQ ID NO: 393944 - DNA, 564 bp, Salmonella enterica
atgatcagcaataaaacagcttttaccggattgttcgtcctgagtacctgcctgagtggctgtgcgagtgttgacagtgtcaacagtgcgataaaccagatgagcggcgggatcttctcagtcggttccgcaccggcagacagtggtccggtggtgttgttgaaaggcgtaccgcaggccagccataaaatcgcgcaggaataccgtgttcccgttgatgttgatacggcagcggcgcgggtaaaacgctactaccgctttatctcggctgaagaagtggcgcagctacgtaacaacggtacgcaaagtggaggatggactgccgcttcagtagccgatggagcatgggtatgggacggacaacccggtagctactacaaaatggggcgtgactggggaagcgagaatactagcgacagtgttcaggtcgagctggagaaaaacggttccggtagccgcatgtatatcacctttcgttccgggctggcctctcatgccacggcggcttataccagccagctgtttgagaatatgaagagcgtggcggaagggacgatccgatga

SEQ ID NO: 393945 - DNA, 2004 bp, Salmonella enterica
atgaagctctttctctgcgaaaaacccagtcaggggcgcgatattgctgccgtgctgggcgcaacaaagaaaatgccgggttatcagaccggaaacggcgtgtgcgtcacctggggttttggccacctgctggagcaggccagcccggatgcctacggtgaacagttcggtgttccctggcgtactgatgtgctgccggtattaccgacaacgtggcaaatgcaggttaaaccggatgcagcggctcagttctccgtcatccagaaactgctgaagcaggctgatacggtagtgattgccaccgatgctgatcgggaaggcgaggtaatcgctcgtgaaatcctcgattattgtcactatcagggaaagatggagcggttgtggctctctgcactggatgaggccagcgttcgcgccgcgctggcggcgataaagcccggcagtgcaactttaccctactatctggcgggtctgggccgcgcccgggcggactggcaaataggtatgaatatgacgcggttatattcggtcaaggcccgggagaacggctacggaagcgttttatccgtggggcgggtgcagacgccgacgcttaacctgattgtggtacgcgatcgtgatattgcgcagtttgttccgaaaccttactggaatgtcgtggcgcagctggcggcgggagggatcgcatttcaggcgcagtgggtgccagcagcggcgtattgcgatgaggaaaaacgctgtattaacccgacagcggcgcagcaggtggttcagctttgccagaaaaccgggcaggcgacggtggcggaggttgagaccaaaagggaaaccgaatccgcaccgctggcgtttgatctcggtacgctacaacaagcctgttcccgccgtttcggctatggcgctcagcaggtactggatattgcacaggctctgtatgaaacccacaaagcgacgacgtacccgcgcaccgactgcggctatctgccgacatcaatgcgtggtgagatcgggcaggtgatggcctcgatacagcaaagcgatccttctttatctgcgatcaccttgcggcttgatatgcagcatgtttcccgcatctggaatgacaaaaagattaccgcgcaccacggcattatccccactaagcagccctgtgatctggcggaaatgagtgagcaggagcgcaacgtttaccagcttatccggctgcattatctgacccagttcctgccgaaccatgaagtggatgccacgcgggtttcgctgcattgcggtgggcagttatttaagaccagcggtaaagttgtggtcgttgctggctggaagagcctgtttggtaaggaggctgaagaggatgcaggcgatgccagtgacaaggcccggttacctgcaatggctaaagggagcgtatgtcagatcactggcgcggaagcaaaactgcaacagacgaaaccacctgagcactatacggaagggacgttgattgcggcgatgaagaatgcggcacagtttgttactgatccgcgccttaaaaagatccttaaagagaacgccgggctgggaacggaagcgacccgggctggcgtgattgaaacgctactgaagcgcggttttgtggtgaagaaaggcaagcatttgctggcgacacctatagccgctgacctgatggcggtgttaccggcacagctcaaagatccgggtatgacggcgctctgggagcagtcgttggatgatatcgctgaaggccgaatgtcgctggatgactttatggcgaaacagtccgcctggacaacgcaactggtggcaaaggggcagcagcagaccgttaagatcacgttaccgccttctccgccgtgcccgatctgcggtgggacaacgcgccagcgcacagggaaatcaggcccattctggggatgcgtcaactaccctgactgcaacgggattgtgaacgtcggggcgaagaaaccggctcggcggcggaaaagtccggcaaagaacagtggctga

SEQ ID NO: 393946 - DNA, 720 bp, Salmonella enterica
atggataatggcgagattgttagtaaagttattgattctaaagttgttgagaatacctacaacgatgctctttctcctggtttaaaagagcttggcaaagttggtgtcgatttagctaaaacagctcgacttttgcttgcgccattacaaattgctgcaaccttccaggaacgtctggaacgttttttacgtgaaatgaatgagcgtattcctgaatctcagagaattgatatagctccagaaatttctgggccagcgcttgagtcaatgcgttatgttgatgagtcgaatatcctttggggtttgtttaaagaagttctctttaaatcagctgatcaaaaacatgtgaatatagttcacccatcatttatacaaataattaagcaattgactagagatgaggcttttttactcctgaagctagatgtcgaacctttttacattgttgatactatggattttattcaagaagaaaataggtttactaataaagtaatagaacgctcaacaattcccacggatgaatttctgtctccggaatcaatgggagtttatcatttacatttagaatctctttcgctaattgcttggcctgttactaaacaagagccaattcatgagggaggtgttcaggtaggtattcgtcgctatagcgaaattcatctaaccgaatttggacggttatttgtgactgcttgtatccccactcaggtatcgtga

SEQ ID NO: 393947 - DNA, 600 bp, Salmonella enterica
atgagtaaagatacatactcttgctttgctgagttggaacaagcagaatccggaaattttagaattatcaagtcaaaaaaacatagcgcctacgctatcattgctccgcacggaggaaaaatagaaccaggtactgctgaaatagcggagtctatcgcaggcactgctctctctctttatattttcaaagcaacatctaaaagtaagcctaatattactcttcacattacaagcaccaatttcgatgagccagaatgtcttgatctgctaaaagacacagaaacggctttagcaatccacggtgcaaaagatcctgatactgatccgaaagaaagagtctgggttggtggaaaccttcataacgaatttaaaccccatttagaaagagaattatcgccgttaaacctgtttgtagggattaattctgatttcactggtacatctccaaaaaacatttgtaatcgagggactagctatcaagggatgcaacttgaactttcaagagcacttcgtgacaggctaaaaactgatgcaacatttctaagtaaattcagtaatgctgttcgtaccgccatgaagaaaacatacccaatagattaa

SEQ ID NO: 393948 - DNA, 483 bp, Salmonella enterica
atgtctactacatctaaaaccaccaccgctacacctaaaaaaaacagtgccagtaagaaagctccggcacaaccaaaaccacaatccagctacttcaatttgcatatcgatggactgggttacctgagcaatattcgcgaaattaacaccgctacgggttcattccttagctgtacaattaacgcgttacatggctcaacggataaaccggattacacgcgttttgatgtcacggtgtcgggtaaacagaccacgtctttaatcagacgctgccagaatgcggtgaatgaagagaagaaggtacttatcggctttaagctcagtaatctgactgccgatgtgtttactttgaccaaaggcgatcatgcgggtgaatcaagagcgtcactgcgagccaggctgataaaaatcagttttatcaaagtggggcagaatatggtttataaggctgaaaagcctgagtctaccgactccgcatattga

SEQ ID NO: 393949 - DNA, 597 bp, Salmonella enterica
atgaatcttcatatcccaatggcagtctgcctgacagccagcatcctggctggttgtacgcaaaaactccagcaacctgatacgcaacctcatccgacggcgctgaatggtaatgttcagccagcccgactggatgtctatgccgcctctcccgaagttgtccgctatgaccgctatctgctggttgatacttctccgagcgctgcgcaacgtgcgccgctggagcaaaccattgatatccgtatccctgcatcgctatcgccgaccgtagcggatgccatgcgctatgccctgcgccagtccgggtactcgttgtgcagtacgacaccggcaaaccgggtgctgtacaaccagatgttgcctgctgtgcattatcaactggggccaatgcgtctgagtcaggcattacagattctggccggatcggcctggcagcttgaggttgattccgtacaacggatcgtctgccactcattgcgtgatggctatcgcttaccgccggaaacggtgaaaacgtcagccgtatcggtctcagcgccgttacctgctcaacccgccaatattaccgctccggctccgcagaggatgctgaaatga

SEQ ID NO: 393950 - DNA, 717 bp, Salmonella enterica
atgaacgagtccgctagtttcatggaggtgccggaaatgaaagagtctgtcagacccgcacacagcaaattctggacgatggtccgatacggatttggtgggctggttttgtttgcgttaggcggaaccacgtttatcaacctgaagcagatccagctactttccgccgaggttagccagcttaaaactgcattgcagggtagcccggatatcgcgccactccgggcgcaactgacgacattacaacagcagtttgaagcgtcacaaatacaactgagcggaatggcggacaaagcggcgcttgcagctttgcagcagaagattgaggcactggataagcaacagaatgagcagacagcttcgattgcggcccttaaagccgggctgtcttctcttcagtatcagattcgaactctgaatcaacgcccgaccagtcctgtcgttgttcatgcggcaacgtctggatctgtcgcggcaaagaagaagcccacgacgaaagcgcagcggtcagttatggctcccttcgtccttaccggcattgaacggcgaggtgggattgcatttgctgcgatagcgccgaaatcggcaacgcaactgacagaaatagcgttaatggaaccgggagaaacccgacagggctggactttgctggcgatcaccgggcagcaggcgcagtttcgcgtggcggggaaaacccggacgttgacggtacgatag

SEQ ID NO: 393951 - DNA, 705 bp, Salmonella enterica
atgaaaaagttcaatatcgtgctgatggcaggagtgttgacagtgtcaacagtcgcgtttgctgcctcttctgtgaaccaggaagacagccagacggtgaaaacctcgttgcaggcgctggaccagcaacaaatgacgagaagcactcaggagtgggggctaacagctgaagaatggcagcgttatgaaacgctgaaaaaaggacgtcgcggtgtgctgtctccggggttagatcccctgacgatgctgggtatcgaggcgcgaagtgacgaagaacgtcgtcattttgccgagctggcggtgaagcaggaatttcagcgagttgaagcggagctggcatttcagcgggaagtgaacagcgcgtggacgcggatctatcccggcgttctgcccgttcaggatctgcggagtgaagtcagtaacgcccggcaggcgctgtttgtgaaagacagctgtccgacctgcgatcgcaagctggcccagttgatgaaatcaaaccgaccgctggatatctatctggttgacagcggcggcaaggatcaggcggtccggagctgggcgaagaagcacaatatccctactgaaaaggtgaaatcccgccaggtaacgctgaaccacgataacggcatgtggctgaaatatggcaacgggctgatgccggttgtattgcaacagggggcgcagggatggcagcgcgtaaactga

SEQ ID NO: 393952 - DNA, 567 bp, Salmonella enterica
atggcagcgcgtaaactgatgtggctggcaatgttcattgcactgccggagtgtctggcggcgcaatctgtcccggaagggtattaccgggtcgcttcggcggaaaatattcccgccgaagcgctgtatagtctggcgctgacggagtcatcccgcaagctggcgcatggtgtacgtccgtggccgtggacaatcaatgttgccgggaagggatatcgctatgcctccaggaatgaagcctggcaggcgctgttaggctttatgcggcgctatccgctcaagcgcatcgatgtcggtattgcgcaggtcaatctgggctggaacggccatcatttcacatccacctgggacgcatttgatccttatctcaatctgcacgctgcggcgcgtattttacgtgcctgctacgaacgtaaccccgggagctggatagcggctgcggggtgttatcaccatccggcaggcggcaaaccagcgcaaacctacaaggccatcgtgtcgcgtcaccttggcacgttgcagccgtccgtacaggcgctggcattcaatcaggaaggaacacaatga

SEQ ID NO: 393953 - DNA, 501 bp, Salmonella enterica
atgatgaggcgttttccgctggttctcacactgctgtttccgggcataagccaggcagagctgactgttgtcgccgatctgggcggacagccaacggctgaatattttgccggtattaacaatcaaggggaggaatcacccgcctcgcaggtgttgacactgtcaacacctgacaaagcatcggtattacccatccgtaccccggagctttcgcccgggccgctggaagcgcgttctctctctatgcccgggatgcggtcgattttcctgataggcgacgatgacctttcccggcgttggctggctttgcgacgcgatcagcttattcagcttaatgccgtgggctatgtggtgaatgtcgccagcaaggcggcatgggatgatttgcagcaccaggcgaacgggctggagttgcttcctgtttcgggtagcgatctggctgttcggctggggatttctcactaccctgtattgattagtgagaagggactggagcaatga

SEQ ID NO: 393954 - DNA, 2085 bp, Salmonella enterica
atgagcgatcgctatgttattgaagccatgctgcggcctgctgtggagctgaacaccgccgttgttgccgcctgcgccagttatatctgtgcgacggcgccgtgggcggtggcgctggcaccctcagtcagctatgtcacggcggcagggtttgctctgctgtcggtgaaacgtacgcagcaggggttacggatattgcgttaccggcgcaatatccggcgtctgccgcgttatgttgtgacaagcagcgaggtgccggtgagcaatcagcggttatttctggggaaggggtttatgtgggagcaaaaacatacccagcgcctgctggataccctgcgcccggaggtggcggggtacgtgaatccccctgcgttgtaccaggccgtacgtcgttttgaacagcactatgaacatcgctttccggcattgtgcaaactgctggcgcgtgattcggcgttgaatcccgttcggccattacccccggtcggtggtcatccggcattgcatggtatcgaaccggatgaggtcaatgtctcaatgagcctgggagagcgtgtcgggcatatgctggttctgggcaccacacgcgtcggaaaaactcgcctcgccgaactgctgatcacccaggatatccgtcgcggcaacgtcaccattgttttcgacccgaaaggtgatgccgatctgctgaagcgcatgtatgcggaatcacaccgcgcgggtcgcgccggtgaatttcatgttttccacttgggctggccggatatcagcacccgttacaacgcggtcgggcgctttggccgtatctcggaagtggcttcgcgtgtcgccggtcagctcagtagtgaaggtaacagcgccgcatttaaagagttcgcctggcgtttcgtcaatattattgcccgggcgctggttgcgctgggacaacgcccggactttggcctgatccagcgttacgtgaacaatatcggcgatctgtttgagacctatgcggaaacctggatggtgaagcacactcctgcgttgtggcaacaggtggagaatctggcgcaaattctggatgagcgtgatattccccggcatatggaaggtcgttcgctgcgggtggtggcgattgagcaggtgctgaacagcgacgaagggaagaagatttacgatccggtgcttgatggcctgcgttcgtcggtacgttatgaccagaagtattacgacaaaattgttgccagtttgctaccgttgctggagaaactgacttccggtaagacggcacagctgatctcaccgaactacaccgatatgtccgatccgcgtccgatcttcgactggcagcaggtgatccgtaaaaagggcgtggtttatatcggccttgatgcattgtccgatccggaagtcgcagcggcggtaggtaattcgatgtttgccgatctggtctctgtcgccgggcatatctacaaatttggcgtgaatgacggtttgccgggtggcgagggtaagaagacgccgattagcctgcactgcgacgagtttaacgagctgatgggggatgaatttatcccgctaattaacaaaggtggcggggcgggtattgaagtgacggcctatacccagacgttgccggatatcgaagcgcggctgggtaatgcggcgaaagctgcgcaggttgtggggaactttaacagtctggttatgctgcgggtaaggcatacggaaacggcagaattgatgactaaacagttgccggaagtggaggtctataccaaaacgctggtttccggtgtcactgatatctcgaatccggaaatgggcagcgattttacttcaaacacgcaggacagggtcagtaccgtacgtacaccgctgatcaccgccgcgaacgtgattaatctgccgaaaggacaggcgttcgccctgctggaaggggggcggttgtggaagattcggatgccgctgccatctgctggcgcggatgccctgatgccggatagtattgggcaaattgcagactatatgcagcggaattaccggacaagcgatgcctggtggtcgggtagtgctttaccgggggattacgatgcagccactttttga

SEQ ID NO: 393955 - DNA, 270 bp, Salmonella enterica
atgaaacaacgttatcgggttgaagcggttatggcgtcttcaaaacacaataatctgcaagtcccgcgtgatgtgatggatgttttgtgtgagcaggactgttcgtcgcttcagatcccggaaattattgaacggctggcttcgttgggttatcgcccgagatatgaagccaccactgatacgctcacggatatcgttaccctgtggatttgggttgggcaggaagagatgttgctgaactgccagatggagccgctggcggtgcattaa

SEQ ID NO: 393956 - DNA, 765 bp, Salmonella enterica
atgtcgcagatgaacacatcttcagccccggcacaaccttcaacgccaccaaaaccgcatggttttttcaccgtgctgctgtgggatacgccgtggcgcattatcgggatgctgctgttatcattgctcttcagcctgattgtggagtatatcggtatcgcgttcttctggccggatcagggagcggaacatagtcgcgccgttatgcagacggaaagcggttattttgccgaggggtttacgcaaagtttgctgctgtcatcgccggtggtgacggtacagagctggctcgcgctgggttatcagtggttatttgtgaacagcggctttactggctggttgcagtcaattcagacgccgattgccggaactggcaatggcgtgacggatgaacttaatgcctggagtggctgggcagtacaaactgcgtataaatacctgatggcgacaatgtatgtgtcgctggtttttctgatgcgggtcaccattctggtactgtcggtgccgttattcgtcctggttgctattgtagggatcgcggatgggatggtgcgacgcgatctccgtcgctacggggcggcgtatgagtcgagttttctctaccatcatgccaaacgcttagtgaagccagcgatgtatataccgtgcgtgttgtatctgtctgcgccgtttgcggtatattcaaatttgttgttattaccggctgcgttgctgatgggactggcaatttcagtgacgatgggaagctttaagaaatatttgtag

SEQ ID NO: 393957 - DNA, 549 bp, Salmonella enterica
atggcacaaaccactttagccctaatattatcaacagtaataataacgataagcgctattatatttcttacttatatattaaatgatgtcttcacagatttatggaaaaaacgctttgagacatctattaaaaatggaatagaaaaaaataaaatccaaaatactgacatctatatactagctgagcggtggcccatcggaaaaacaaacatacaacattgccttaacaatatcttttattattatatcaacaccgctgaccaagataccattaaactagaaaaagttagagaaattatcgactggcataaaaagcaagatcctttttctgagttgccagaaaatataagactacagctaacaacgctacaaaatctatcagatggaaataaagagatagttttgcagctgtcaaaatcattaagcgaattatatagttcaaaagaaaaaagtcttcgttcagataaacgaattacacgcatcagccttctgcttgctgtaataggagttgcttaccctataatatccccatatataacaatgagttaa

SEQ ID NO: 393958 - DNA, 312 bp, Salmonella enterica
atgcgcatgacacaaccccgggcatggtgcctgttgggttttttgctggtttcgggagctcaggccgctgagcctgacgagctggcactagtgatgaagcagctggatcaggtgcaggccgcgctggagcgtgctcgtgttgttgccgttcaggatgggcagaacgggcgtttctacttcgattatttgcgtgcaacgcaggatatcaaagcaattcgccaggggatcggtatctatctggaaccttcccgcgctcagccggtgccttcggcctccctcaccggtcagtaccgggtggagcgtcgtccgtga

SEQ ID NO: 393959 - DNA, 237 bp, Salmonella enterica
gtgaatgatgcccagaccagcgcatttaaaacggcaagcggcaatgccgatcctgcacaactgagcaaagtgttcattggtgtgctgattgccctgctgattttgtgggtgggatggggttttctgcatgtttatcgggggtacgcggcaggccacatcaaagagcaggcactggtgcgttttgccattcgctccgtccttctcatcattatcgctatctatctgtttgccagctaa

SEQ ID NO: 393960 - DNA, 372 bp, Salmonella enterica
atgttttgctctgcattatcttctctgcgtttttcttttcgcttctggtgtgcgcgggttttgaccgttgctctgaccggaatttctgctgcccgggcgggtttgcctaccgttgaaggtccgaaaagcagcaccgacagctctctctacggtcagatctctgggtatatcaatgacggcatcgtgctggctgggttagttcttgcggcggctgccatgctggcagtgggcaatgccattatcgctactttttctgaagttcgcgataacaaagcgacttgggggaaattcgggatgctggtcgttgtaggggtgatcctgattgtcgttgttatctggctggcatccaaagccgcgacaatcctgctttga

SEQ ID NO: 393961 - DNA, 381 bp, Salmonella enterica
atggcgactatcgaatttatgcctgacaggctgaatgctgagccggtggtgtttcgtggattcaccacgccggaactgggttttaccgcgctgttcagcgtactgggcggcctcgtggtcgccataccggttctgccatttctcggctggatagccttcccgaccgtggcgctgctgatgccgctggtcacggttatttttggcggcagattaatggcgcgttttaagcgcggcaagccggaaaattacctctatcgcaggctggatatgctgttaagccactttggtctgggaacaaaagggctggtgcaaaccagccgggtaatggcgttacgccgtctgcatcctgtggttcgccgtcaggaggccgttcatgagtaa

SEQ ID NO: 393962 - DNA, 657 bp, Salmonella enterica
atgagtaagtttaaaaatgccctgaatgcccgtgataatcatatccggacgctccgcgctgcatgtggagttatgttggtgttgttagtgttgtccatgcttggttggatgatgtctccgcgcaatctgaccattcacaaccctcccgatctccgctccggcagttcccgtccgtggtgggaaattcctccctcaacggtgtatgccttcagtttttatattttccagcaactgaacagctggccgaaggatggcgacgttgattatccatatcgcatcgagacgctgtctgcttacctgacgccgacctgtaaggaactgctgcacaaggatgcaaaacagcgtaaggacctgggcgaatcacgggatcgcgtgcgcggtgtgtcggagattcctgagcggggctatcgggatgacagcgtcaccattattgatcgcgataactggcgtgttcgtctggatttagtcaccgatgaatatgttaactccgagccggttaaacgctcgctggtgcgctatccgctgaaagtagtgcgctgggacaaaaatccggaggctaacccgtttggtctggcgctggattgtctctcggaagcgccgcagcgtctggaagcggcccctgtggttaaggaagagaaaaagggagtgtttaactga

SEQ ID NO: 393963 - DNA, 876 bp, Salmonella enterica
atgagtttacgacgatttttgttgtcgctggcctgtcttgccgcattaccggcgcaggcggttgaactggtgaagtgggagcgtattccgctgccggtctccctgcatgtcgggcaggagcgcattgtgtttgtgaaccgcaatgtgcgtgtgggctttccgcctgagctgaaggggaagctgcgcgtacaaagtaccggcggcgcggtgtacctgcaatcgggggcgcagtttgcccgtactcgcctggtacttcaggatgtggagaacggcgagatgatcctgctggatatcagtgccgaagaaggggaaaacgtgctggagccggtgagcctggtgtatcagggggaagtctccagctcgacggggaacggtgacattgcagtgggcgacaataaaaccgcaacaaccggcgaacggcagtccacatcgaaaccaaaagagaaaaaatccgccacaccgctgccggtggccttaacccgctatgctgcgcaaagcctgtatgcgccctcgcgcacgattgagccgcttcccggtgtgcatcccatttcgctggcgctgccggacaagctgacctcattgctgccgtcagaatccgttgaggtcaggccgctggccgcatggggattgcagagctacagcgtggtggcgctgacgctacgcaatcaacgtgcggagaaagtggttctcgatccacgtcgtcttcagggtaatttttacagcgcgacattccagcatcgctggctgggcgcgagcggaacgccggaagataccacgacggtttatctggtgaccaaaggccgtcccgatgccgcgtttcttcctgagccagtgaaggcgaaaaccggcaaaggagggaagggcgatgcagattaa

SEQ ID NO: 393964 - DNA, 360 bp, Salmonella enterica
atgcagattaaatcgaataccctgctgaaggtcattgtgccggtggtgttgctgtcggcagtcatgatcggcgtgaaatcctgtggtggttcgaaacagactcaggactcggcggataacgctacggtggccgatctgacccaggaagaactgcgcatcctcggcatcgagggcgatacgccgcaggatacgctgcgtaccctggtcgggcgtattaaaacgatccagataaatcaggagaatctggagaagcagaatgccacgttggttgaagaaaacgcccgcttgcaaagcaaaggcagcaatgtggacggtcgtatcaatgacgcggttaatgctgttaaacaggaaagcacctag

SEQ ID NO: 393965 - DNA, 1053 bp, Salmonella enterica
ttgaaaaatacggttcccggcccaggagcgggtagcaacactcccgcaggcagtgacttacctgtcgggctggggctggaagatgcaggacagcccgaaacggtggcgcaaggcacggtctggattgagccgcaggatggtgtgcaactggatcgcaacggtaagcctgtgactggtgcggctgtcgcgaccaatggcaccggcacgtttcagttccccgccgcgtttggtggactgaatgataatgaggtcacccgtcagaaagcggagctggaccgtgtcgcgaaaaaccagcaagccattgaggaaaccgatctgccggtttataccctgccggagaactccacgctgatcgggagccaggcgatgaccgccctgctggggcgtgtgccgatcgatggcaaagttaccgatccatatcccttcaaggtgcttattggcaaagagaacctgacggccaacggcatcgagctgccggatgtggagggcgcgattgtgtccggtacggccaccggtgactgggtgttgtcctgtgtgcgtggcgaagttcactccattacgtttgttttcaccgatggtacggtacgcacggtgccgcaatcggcaaaatccagtgatggcagcaacgggaaatccaatggcggcagtattggctggctgtccgatgagcacggtattccgtgcctatccggcgaccgcaaaagcaacgcctcaacctacctccccacgttatttgcactgtctgctgccggtgcggcctctgatgcgatgtccgaaagccagaccactaccactactgacgggacgtccatcaccagtacgcttaccggcagcgccggacaggctgcgctggggaaagcgttatcaggtggcacgaacgagctggcggaatgggtgaaagcgcgatacggccagatgtttgatgcgatttatgtccctcccggtgcgaatgttgctgtgcatatcacccgccagatcccgattgattacgaagagaagggccgcaaggtcaaatacgattttgatgtcagtcagcagcacgagctggactaa

SEQ ID NO: 393966 - DNA, 402 bp, Salmonella enterica
atgaaaggatacggtttattcatgctggtcgcggtgctgctgagcggttgcagtacctctaaagatgaaatgctgccgcccggcgacagcaccatgctcgatatgtggcagaacaaagccagcagcgcccggaccacgatggaggcccggagcgtgttacgccggggactgaacgatactgatctggcaacccgtcagtcactggaagagagctatacccgtgatgctcagaatgagatccagcagctttttccgcgcctgcctaatccggatatggtgatttatatctacccgcatatggcgggaaatgagccagcgccggtgccgggatacagctcggtcttctctttttacagccgggtgcagtatgcgttaccgggcgagcgactggagacactctga

SEQ ID NO: 393967 - DNA, 2769 bp, Salmonella enterica
atgttcagtttattcaccaaaaaacagtcgcagccagtggctgatgaaccggcgctgccgtcacagaaaaagagcggcaggctgacgcaggacggcgtgcgctcgctgtaccccaataacgcctcgtttatcgacttcctgccgtgggtggaatacctgccggaaagtcagagtctgctgctcgatgatggtatttcggtgggcgccgtatttgaactggtgccggtgggaaccgaagggcgcaccggcgaacgcctggaagagatccgcgatatcgttgaagacgcgcttcaggacagctttgacgagcgggacagtcacccgtgggtcatccagttcttctgccaggatgaaaccgatgtgacggagtacatcgataaactgcgcggctatgtcaagccgtgggcgcagggaacggcttttaccgctgcgtatctgcatgagatggaacgtcatatgcgcggcatcgccgtgccgaaaggtttgtttatcgataaagccgtcaccggcgcaccgtggcgcggccagcagcgccgtacccggatggtgatttatcgctatgtgagcccaggagcgaacgaaccgtattcgccggaagagcaactgaatcaggtctgcgagcggttatcctccgcgctggccggggcggggattgtgacggccaggcagaatggcgagcagatccatgcctggctgctgcgctggtttaatcccgaacctgactgggtggataaagagacactgtaccgtacggcggcgcatgttgacacccgcaacggtgagctgccggtgcttaatgatttcagcgaaaccctgatgtttacgccgccacgctctgatgttgaaaatggcgtgtggtggttcgacgaacgaccgcataaagccgtcagcatcgatcgcatccgtcgtgctccctcggtcggccatcttaccggcgaaacccgcaaaggggagaacatcaacgcgctgatggatttgttgccggaaggaacagtgatctccctgacgctggtcgtgcagccgcaggatgtgctggaagagcgcttcaaccatctggcgaaaaatgcgattggtgaaaacactgagtccgaacgcgtccgggccgatgccgatacggctaaaagctatctgggtgaacggcataaactgtaccgcgccagcatgaccttctttctctccggggagtcactgaaaatcctcaacagccgccagcgcgacctgacggccattcttctgaacgccgggttacaaccggtaaaaccggaatacgacgtcgcgcccctgaatggttaccttcgggcgctgccgatgtgctttaacccgacgctggataagaaaaactggtatacccgcctgacgtttgttcagcatatggcaaatatgctaccggtgtttggtcgtgacactggcaccggccatccgggatttaccttctttaaccggggcggtacgccgctgacgttcgatccgcttaacagcgccgaccgttccaaaaatgcgcatctggttctgtttgggccgaccggttccggtaaatccgcgacgcttaacagcctgttcgctcagttgatggcgatccaccggccacgtctttttattgctgaagcgggtaactcgtttggtctgtttgccgactactgcgcggagctggagctgtcggtgaacaaggtcagtatcaagccgggctgtggcatttcgctggccccatttgccgacgcgtacaagctgattgaagcgccggtgaaaaatgttgatgagagcgaactgagtgagcgcatcgaggtggaggaaacggacgacggtgatgcggaggaagagcgcgatattctcggtgaactggagattgtggcccgtctgatgattaccggtggggaagccaaagaagaggcgcgtctggagcgagctgaccggggcatgatgcgcgaggcgatcctggccgctgcgcgtaaagcctggaatgaagaccggcagatgatcaccgccgaccttcaggatgcgttttacgccttcgcaaaggatgagtcccgcccggaagttcgccgcgcccgggcgcagaatatgggcgaatcgctgggcgtatttatgcagggcttcctgggtgagctgtttaaccgcccggggcagaactggccggaagcggatgtcacgctgattgacctgggcacgctggcgcgtgaaggctatgaagcgccgctggcagtggcctatacctcgctggttaacaccattaataacatcgccgaacgtgaccagtttctggacagggagatcgtctttccgaccgatgaggcgcatatgatcaccacgaacccgctgctggcgccgtatgtggttaaggtggtgaagatgtggcgtaagctcggcgcgtggttatggctggcaacgcagaacctggaagacttcccggccacggccaagaagatgctcaatatgatcgagtggtggctgtgtctggtaatgccgccggaagaagtggaagagatcgcccgctttaaaaagctcaccgccgagcaaaaagcgatgctgctctccgcgaccaaaacgccgcgctgctacaccgaaggcgtggtgctggcaagccgtatcgaggcgctgttccgggctgtgccgccgagtctctatctggcgctgggcatgacggagaaggatgaaaaggcggcacgtcgggcgctgatggttgaacacggtatcagcgagctggacgcagcgaagcgtattgctcatcaactggatatcgcccgtggcattgccacgaaggaggcggcatga

SEQ ID NO: 393968 - DNA, 402 bp, Salmonella enterica
atgatgcgattcagatccacggtgctggatatagtggatggtaatatttccaataccggcgtgttgtttgatgcgccgccgcaggggaatccacgaatcagccagcaccatcatgcgcaactgggtgaattatgtcgccagatccgtctgcgggtaggggagaaggcaacatttacttattctcctcatcgcgtggccgggcataactgcctggctgttcaggtagatggcaagacaggaacggttaacctgttatttaccattactggtagtttgcgttggcctatgatggatgattacgaacatagcttgcgttggtatatcaatgtgattgatgcggtagatgtagtttatttggtgcagaaattatattatttttcaaaaaataccaatgaaagatag

SEQ ID NO: 393969 - DNA, 1029 bp, Salmonella enterica
atggaaattttaaagcgtgattcaaacagcattaatattgcctccttttgggagggcttttcattaggtaaatttaattttgaccctccttatcaaagggatagtgtgtgggatgaagaaaaacaatctttctttatagatagcatactacggaactatccaattccacctatatttcttcaccaaaaaattgatgatgacacaggaaaaatcacgtttgaagttgttgatggaaaacaaagacttacagcaattgttaattttatcaatggtcgaataacatctgcaagtgaagaagaagatgatgagttgactggagtatttttttccgacttatcaacatctaaatatgctgaagttaaaaaattattttggcgatatcagatgcctatagagtacattgatactgaagacgaaagaataattgatagcatcttcgacagactgaacagaaatggtgagcgacttaacgggcaagagttaagaaatgcgaaataccacgatactgatttttacaaaaaaatcgtcgaatactcacagcttgaatattggcaaaagctgcttgaacacgttgataagaagaggatggaagacaaagagtttgtatctgagttgatattcacgatccttgagaatgaagtatttggtgcaactcaagatataattgacggtctttatgagaaatattgcaccaaggatggcgatgaaacaagtgaagcctttactatttttgagagaacgactgactatttagtttccatggatattgatttcaaaaaccataaagcaagtggcgttagtcatttatatgggttcttcagttacgcactttattgcaatactaataacatccccgtagaagaagcatctaataaattatctgcttttttggatagcctttgggaaaaagacatacaacaaaatgaagaattaagaagagaatatagaaaaactatgagttcgagtactaaaagcaagactcagcgctcacgtagaattgaagtccttttgaatctacttcgcgattaa

SEQ ID NO: 393970 - DNA, 1050 bp, Salmonella enterica
ttgagcagcgaacaaaaaaagaaagttgggttaatgcttgggaatggattcacaattgacctgcttagcaagatgggcaagcttgatacaattgatccgtccgatctattcaaatatggagatatggttaagtggcctgccactggcgaaccaggttttctttcagctcggtattgtccaaatttgtggcgactaggggcaaggccggggttaaaccgaactgcatcatatcaaatcatagaagagttaattacagtaataaatttatatgcaacactgccgcctgaaactataaagaagaaaaaccaggccagtcacaccccactttcgaatatctacatttatgcctatcaagaattagtttcatatttgcgggaacttttcattgattacaatgaaaaagtttcttctaatgatctacgtaacctcgaaagtggctggcgcgattatctaatgaaactggataaaaatgacaatatagaaagggtagatatcataacctataattatgatatctaccttgagcgtttgcttgacttacttaacatcaagtttgacattcctaacatatcagatggaaatgccaaatttaaaatatataaaccacatggttccataagctttttatatgatggctatatgtcaaaggacaactataatattcaaaaagagttatccttgaataatggagatatatcaaaattcgaatgtcggcatgaagatttgagcttatacatgcctcttattcctataatacctccagcaggagaagcgcatcgatatgcccaaaactgggcgaattctatcaaagggtctatagaatcaacaatggagtcatataatccaaacgatgatttctttatttgtggcatttcgtactggcacgttgatcgcgcagaaattgatgcaataatccgtaaaatcaatagtgacgttaatgttaggatgatcaatccaggaaacgttgatggcttaagtgctatacttggaatggtatttaatagttatgttcatcattcatcatctgaagtcctaaaggagcttgcctaa

SEQ ID NO: 393971 - DNA, 399 bp, Salmonella enterica
atgagaccttcaaagttcctgatctcgctactggtcgttgctgttcaggctccagcagcgaccgttatctacaccgatagccatcatcccccattaaatgctaccagcaatcaggtggtttacctggatgccccagataccgttcagcgccaggtgtttggtgagttgcctgctgatccggtacgggcggcacaggttgtaaagtccatcatccagtcacctgactggcagcaaaaacagcaacaaatcgggcaggcataccagggcgtgcttcaggcatacagcctgaagctggcgaagtatcccgccgtggtgtttgatgaccgctacgtggtttacggcacggcggatgttgtggtagctgaagcccgccttgctgaatttcagggggcgcggtga

SEQ ID NO: 393972 - DNA, 951 bp, Salmonella enterica
atgaaactatttcgacgacaccggctggggattgcgctggcgttgggttgcgcagctcaaccctttgcggcaggtgcaattaactccgcgcagatcatcgccagtgcgttgtctccccagtgcctggaatacaagattgtcggtatttgctactggctgctctgtacgcctgtaggctgcgttgtaaagacctccaccaaagtaagccactacatccccaacgccgtggtttccagctacaaccagacgggcagtaatccctggacggaaatgtcgtttctgggaacgggtctttccggtattgccgaaggcggcggtgcgaatgagcagaaacgcgttgagcggaaagataacctgcaattcaaaaatgccgatgttatcggtcatccggcgctggccgctcccgtctttaataagttcatggggcaaatggggtatacctgttctggcccggccacggcgatgatgccgtatcttctcagtaccctcgatgcggtgatgtggcgttctggcttgccggagtcgttttatccggaagcgctgacgcccggactgcgtgaaattggcaccacaacgggcggcaatatgtgggggaacgtctatccccgcagcgggtttgttacccaggttgatgactataaagcggctgcggttgtcgcgcagcgtgcggcagatgttgtcacccgtaccgggcaaattcacgtctatcaaccgatgacggccagcgccagcccgggctactggcccccttcgccggtaatggaaaacaccggcacccgtaatcacaaatggcagcagctcacgccgtcgctgtccacatcttgcgctgtctttccggacagccctaatcccgttgcaaccgatggcaattacgcctgggcgctatggcagccctacagttgctgtaaacgacgcggtcagacgttcctctacagcatcgattaccaataa

SEQ ID NO: 393973 - DNA, 1416 bp, Salmonella enterica
atgacgaataaacgcatagtttttgcaggcgctctgatgggatgtcttgcgctgagccttccggcccgggcggtttttgatctaaataatgatgtaatcagcaccgattccagcaaagggctgaaaggtgcagtaaacgataacctcttttataccatcggtggcgggacggtgatatcgcagccgcccagcaacaacaatatggaaaaactgggcatggggatcagctggaacagcgatctgatgtgcggcaattttgatattaataccactgttaaaaaccagctaaatggcgtaaccagcggctttaaagacatgatgagtaatgtaatcagcagcgccaccggcgcggtagcaagtttgcctgcgatgatcatccagcgagcaaacccgggcttgtatgaactgctgaccaacggcgtgcttcaggccaatgtttcgtttgataaagcccagctcaattgccagaacatgtcgaaaaaaatggcggattacaccatgtccagccagtggacgcaggcggcgataggggaagagttcaaaaatatcgtctccacaacgccggatgcggtggcggcggataatcagctaaaaacctccaccggcaaagaaggggtgaagtggattggcgggcaaaaacgcggcggtagcggtcagcctgcaattaaaccgactcatgacctggcgaaggccggatttaacattctgaataagcaatctgttaccagtagtggcggcgtcagtggatcggcctgtaatggttctttgtgcaagaagtataagaccagcgaagaggcggcggaagccgttgttaaagtgctgggcgacagggcaattcgcacctgttccgaggccagcgattgcagcagtggcggagtggaaaacgaacctggcgcatcaactgccggtgttggtttttcgccaatgctggaagagaccacacaggagaatctggaaattctggtgaagctggttaacggaaacctgacgcctgatgcaactaatctggcgacgctgaaaacgggtgatctggccgtaactcgcggcgttattcaggcgctgaaggatgacccggataatgcggcgctggtacagcgtcttgccagcgaactggcgatgtcagagaccatttccaccgcgctcgggatgcggcggatgctgatggctggtcagtcggaaccgaatgctgctgatcagacgatggcgcttgatgagtccgaccgtcgtctggagttcctcgaccgtgaagtgatggcgctgaagaacgaaatggagatccgcaaagcaatcagcaacaactccattcttgttacgctgacgcggcaggaaagacgcgaggccgatcatggtctgcgtcagccggtgcagcagaatgatgacgccatgcagaacctgaatcagaaggtggaggaataa

SEQ ID NO: 393974 - DNA, 333 bp, Salmonella enterica
atggacgttattcgtaaaccattctggcagcgagtattgcgggtcttgatgttttgtattgtcgccattctggctatcggggggtttagcttcacgctgctgcattttgtgggtagcgaaacggaactgaggacgtggttgcttcggataaaaacgccgctcctgttctggcgactggcgctgtatacggtcatcacgtttttctggttgcaccgcgtccggggttatttcctgcgccactgtacccggcgctttcaggtttaccggctggaaataatgacggtttgcctgttcgtgatgattgaaatcaccagcttgcgttgggggatgtga

SEQ ID NO: 393975 - DNA, 1530 bp, Salmonella enterica
atgacggctgacagctatctggaaatggtgctggtctttatgggctggctcattaataacgcgctgtggatgattattaccaccacagggatttttgctattccgctggcatttaaaatcgccggtgtctggctgaaagttcgggaagagggggatgatgaggggaataagggagcgctggcgctgccgcgaatggagcacgttctgtatgtcgcgtttgtggtgatcatgttctgtgcgatgccgatgcaggatatcaatatcacaacgatgaagtttgatcgcacccgttctgctcaatgtggcgtgaacgtgcctaaaccagatgaatccggctatggaccgctgattgcggagtttaacggccagacggcgaaaatcccggcgtggtggtatctggtgcattcgctgtccaaaggggtgacccacgcagccatcgcctcaatcccctgcgggaatgacttccggttgttacgctttgaggttcagcacaccaaattgatcgatcctatcatccgagaggaagtgcaggagtttgccagccagtgctatgcgaagtcgtattacaagctgaaaaacagcaatccgaaactgaccgctgccacgattgattcagttggctggattggttccagttattttttgaacaccggaggatattacgactactacacctcgacgtcgccgcgagccgcgtggccgtatagcgaaagccgggacagtggatatcccaatgttggccgtggcggctatccaacctgcaaagactggtggagcgcatcgggtaaagggctgaaaagtcgtctgctggagagttttgataaacgcacagttaatatgatgaaggcaaagtctccagggaactgggaagaaagcctgttgcgctggctggtgagtccgcaaaatacgcacctgtccggtggcggcgatacttacatgatgggaaatcagcaggggcagggaacggggatcgataccggtattaagcaggcgttgagcggtcttggtgcgctttctgctcaggtgacgcagctcccggcgtttgatgccctgcggcaggcactgccgatggttcacgccgttttgctgatggctatcgtagtgtgtatcccactggtcatgttgttcggggcttacgatccgaaagtggtggtcaccattacttttgcgatgtttgcgctgatattcgtcccgttctggtgggaacttggcggctggctggatgacaagctcatcgagctgatgtatgccagctacaagggttacacgaacagcttcaataactggcttgccagtaccggctcggatggctggatcatgaatcttgtgctgggggcaatgtatgtggttctgccgatgttctggtttggggctgtgagctggagtggtgttcagatcggtggagctttatcttcggtagtggataaagcaacgcaaggagccaaagatgccggagctaaaggccctggagttgctggtgaagtagttaaaacggtagcaacgaaaggagcatccaaagggaaaggctaa

SEQ ID NO: 393976 - DNA, 213 bp, Salmonella enterica
atgaacaatgataataaatcatctagccaagcagacttctggacagttttatttaacggagtaatagagatcgtaaaaatgatcttttctataatcatagctattgtggttgccggaagcaaaacatccagtacatcagcagaagataaaacattgcatgcaggtgatcggcataataatgacaaatctgtacattttgacaatgatgcttga

SEQ ID NO: 393977 - DNA, 330 bp, Salmonella enterica
atgcctagcaacactaaacttgagatattctccattgaatacagaaaaaatatttttgatttatataaagatacatttgtttgcgtagctattgctattttgggagtttacttgattaaaaatgattatcaatttattggatggttaacgtatattgttgctggtgcattatccatactggcatcaaccactaccattaaaatgattggagaaaagcgaaagtcagaggaaacaagcaaattagggttcttacttttgttattcttcagccttttttccataataattctagttggtggtttaattaagggggtaaaggatgttctgtaa

SEQ ID NO: 393978 - DNA, 447 bp, Salmonella enterica
atggatggcgtagttaaatggttcagtgaagagaaaggatatggattcatcactgataaaaataatagagattattactttcatgtcagtgatgtcaaaggtgcatcacttcctgaaaatggtcaagacgtctactttgattctgaagcgacacaaaaagggtatagagcaaaaaatgttgttctgacaaagaatagcggttcaactgagaatagtctggatttctgcaaaagctgtaacaggaagatcattccaagaatgattacctatcgaggtgaaccacaaaagacggtttgtccttactgcgctacagtaataaaaaatttcgatgcgaattttttgggtgaaatcgttacagcgatattttattttttcacttccatgacaaaaatactctttgattttatcgtatgggtatttggtatcataactaacaaaaggagataa

SEQ ID NO: 393979 - DNA, 891 bp, Salmonella enterica
atgtcgaaattaagtaagcagctggttacgctggcaagacagggaggtggtgggttcaaaactatcgcagatcgttcaaagatcgcctcccgtgtagcagaaagaatagccaaattaaatattcagatcagggatgtgaagcatataaaaaccaatcatattgaactgtatgtcaagagtcgccaggctgaagggatatctaaaagaacaatgcagaatgagatggccgcaatcagaaatatgctgactgttgctggtcggacaaaacttgccgacccaggtcatgaaaaattaagtaattcagctctcggattatctgatgccagtcgtgacggtactaaagtcgcaattagtagcgaacgctatctcgcagcgttcgcttattcagagagacaagacgttggcgtagcagcggcaatgcaggttgctcgttgttttggtctgaggacagaagaagcggtgcaatctgttaaatcattaaaaacctggcaacgggcgttatcacgtggtgatgatcgtatcaggatcgtatttggtacgaaaggagggaggccaagagatacgacagttatcgatcgcgataaaatgctaagtgctgttaatcatgctctgaaagttgctgctgaacagaatggtaagctggttgataaaccggatctaaaatcagcgattgatcgctatcgaaatattgtcagagatgcgggattagtggggaaatatgcgcctcatagcctgcgatatgcctgggcaggtgaagcgatggaatatcataaaagcaagggtatgagtgacgatgaggcaaaggcaatggtgtctatggatctgggacacggtgatggacgggggcgttatattgaacgtgtctataataaacccgatatcgaggaataa

SEQ ID NO: 393980 - DNA, 285 bp, Salmonella enterica
atgaaccacaacatttcttatgatgctgtcatttttcttcgacaggccggtttcagcgatacgcaggtggaggcgttagtgaactttcaaaagtcagtcaatgcacaacttgccaccagtgcggagttgcagtcagtaaaaactgagcttcaaaccgaaatgcggatcatgaaagctgagctgaagaatgatattgacaggctggaaaatcgtctgacgctcagaatgggcgcgatggcggcttttatcgttgctgctgctggcgctatgaagttttttgcctga

SEQ ID NO: 393981 - DNA, 288 bp, Salmonella enterica
atgactaatcgcttatctctggcatttacgcctgcttctatcacactcccggcctgggaactcgccgttgaagtatttgatttttcccagtgggaacgtcggcagttcgcgctgattaaagccgcgcaggatgcctggaaccgccgttctgatcccgacactcaacaggtgacattttcgctgacgctgtttgtccgtctgggaggcgagactgccgaacggacgcaaaactttgtcgccagatatgtggatgatgcactggttgtcactttgggagaaccagtatga

SEQ ID NO: 393982 - DNA, 273 bp, Salmonella enterica
atgacatcgaaatacacttatcttccggttgcggattatcgcaatacgactgagcgattattccgtcaggcgattgttcattacagtgcttgcgtggggaatgatgaacgagcttcctggcgtagtcagtccattatggcgctggaaataacagcggatattaactgcaagcgtgcaacggaacgtgaccggcgaaattttctttccgccaggaagcgtttgcaggaccaggttgaccgtgcgctggagtcaggagaattgtgtaatggataa

SEQ ID NO: 393983 - DNA, 399 bp, Salmonella enterica
atggataacgtaacgacgatcgatatgcagcctgttccctttggcctggttcttctgaaatatctgcatactccacgtcgcgtggctccgttctttgcgtgggctaagcgtctgggtgatgaatatgatgaaaccagccggtgggaaggtcgggtgttgtcaaacaacggattctatcttgtccccaactcccgtctgacttatggcgtcagcgtagccgggaatggctatgaaggcaccatgacggcagaggcttttggcatcacgctgtctttgtttgccctcgggcagatagccaatacgacggaagaggacagcgatatcctgctttaccacgctttgcgcgattacgcgttggatcactctgaatcggtcgaaattatggccgcgatagactga

SEQ ID NO: 393984 - DNA, 339 bp, Salmonella enterica
atgatgacagaccagacaaatagcgtattttctgctgaagatttatgtgaactggcaaaacttgaaggtgatttgttggttgtggccgcattcgaacgtctggatatcggaacacatccggatgaggataacttcacggataatcagtggacggttgccagtctggcccgaacttttgcacggggttgtgctggcgatttgcctcattattcgcacccttcatgcaaggctcttttcgatgaggttatggagcttgccagaacggtgtgtccgggaacctgggattattttttcaagattggcttggatgaatcgttagctatggctgcgatggactga

SEQ ID NO: 393985 - DNA, 936 bp, Salmonella enterica
atgacgaagaaaactaccaaccgcaaattagctccacggcaggatttgttccagaccgttactgataaaatcattacagcgctggagaacgggacgacaccctggcgtaaagcatggcaaaccggaaaagagggtttgcctgctaatgcaataacaggccggaactacagtggtattaacgtgatgctgttatggatcgatgccgccgataagggattccattctaatcgctggctgacgttcaaacaggcgctggatgccggtggtaatgtccggaaaggtgaaaaatcgacgctggtgacgctgtttaaaccgttccagaaagaggcgacggataacagcggtcagccggtgtttgatgacaacggtgaggtggttatgcgggagcgctgttttatgaccagctttcacctcttcaacgttgagcagtgtgaaaacctgcccgataagctttacccggaaataccggttttgcccgacgtggaacgtatcgcccgggcagaacagatagcagcctgtagcggcgtatcagtgatacaccgtcatcaggatcgtgcgtattaccgtccgggtgttgaccacattatgatgccggaagccgctcagtttgattcggcggaagactactacagtacgctgctgcatgaactggtgcattccaccggtcacgcttcgcggctggcgcgtgaaggcattgtttccacttcgaagaagttcggcgatccagtttatgggtttgaagaactcatagcggagatgggatcagcctttctgtgtgctgaacttggcatgcatggcgacctgcaacatgagagctatattgcctcgtggctgcaaacgctgaaggaagacaaccgcgctgtatttcgtgccgcacgctttgcccgggaagcatttgaatacctggtgctgcgtgagcaggcgctggcagcataa

SEQ ID NO: 393986 - DNA, 948 bp, Salmonella enterica
atgagcaacataagaccaaaactcttcatttcctattcacatgacagtgaggaacataaagaatgggtagaaaggctcgcgaccagacttgaaggtaatggcgttcacgttttttttgatcagtgggatgttggattaggcgatgatttagctctctttatggaacaagggctaaccaatgcagatcgtgtgatggttatatgtaccgaaccatatgttaaaaaagctaacgctcaaagatcaggtggggttggctatgaaaaaatgattatttccgcacaaataatgagcagcttaggtgataaccaagtgatccccgttattgtaaataattcattagataaccctgttcctacatttgtaggttccagactacgtctgtatttcgacgacacaacctatgaacaaagctatgcggaacttatccacgatttacatggaaaaaaactaaaggctcgccctcctgctggtgatagccctttctctcgacaaccgctaccaaaaccagcagccccagcatcaattccagaaggagacaatcattctcctgctttaaaagggaaagtggtacttccgctctcaaaaccttcaagctactggcttggttctggagaaatgctttttgaagtgtcctggagtattgcaagtcatggctgcgcctatatctatcaaaataaacctagccttagttctctatactttgccacaggtataaaagaaattaatcaaataacggaggcagcatcaagctcattcttcagatgtgataattgtgaagtcctacgtaacggagatatagtagttatgcaaaatacttgcggttactatattgctgttaaacttgaagaagctctctatcgaagccgaaatgcagatgatcgtaacgaagttactttttcatatgtcatagcgccagctaaaagtacttcttttgcgaacattgtttga

SEQ ID NO: 393987 - DNA, 225 bp, Salmonella enterica
atgaaagagaacattcctgctgtaacgcgtacacatattgatgttgactgctgtgacagcagtgcagtttttgtgcttgataatggtcatgatcatttcgctgtttcccttgaaactgtactctcatgtctgaaggtggcagaggaacacggccatgtacctgaaattggcgcggattggtggtgtcttatcgctaaccatactgcgctgggatacccgtcatga

SEQ ID NO: 393988 - DNA, 1377 bp, Salmonella enterica
atgttgaatctgaaatctcttcttcgtccggggcgttcacgcccggatgcccctccgatagttgaggcgataaaaccttctttgcctccaggctacttccggcctatgcctgccagagaactgctggcgacagcccgccgccagcaatggctgcaatcgctctgggattattcgtccctgccaaaagacatgtaccaccagtattaccttgctccgctggagcattgtgtggcgttgatgcagcaatttcctcttacggaaagtgggccatatacccgtgccggagggatggctgactatatgctggaaactgtgtcgtatgcggcgcggttgtctaaaagctatatgttgccggttggcgcaccgccggaagaacaggcggcgcaaagcgcagtctggaatgcggtggtggtctatgcggcaatgttgcctgcgctggaatatctttgtcacctccacgtcgagctggagaacggtaaacgctggtttcctctgctggatgcacctccggaaccttatcgctttcgtttcgcgccggaacagtctccagaacgattgcagagctttggtgccatgctggcatggaaaattattcctccggaagctattaactggttgagtagctggccggaagccatcaggaccctgtcaacgtacctgaccggctttcggacgcagtcgggcgtggtcaatgccattgtgtctgaagctattcgcctcacggctggatctccagaaagtgagtcgccggttgtatcgacgatcattactccggttcaggctgaagtattaccggagggcgcgttgttgtccggattagcggagaataccccggagctggtagcgtcatctgccgaagaagaaatcctagcgcctgcgccggaagcagggctggcattaccggatgcactggaggaatcggatgatactgatgcgttgctggcgatgatggggtttgtgagcgacggtggtgttgaaaccggcgaaatttcgccatccgttgagcagcaagatcccggagagatcttctggcaatggctgattgtgggatgtcgttccggcagtctgattccgaacaaacctgatgggcgaattcatctggttgccggttacgtgtttctgcgtacgccagggatttttcaccagtttctgactgagactaacgctcctggggaagataaagtcaggcttcagaaagcgtttgagcggttaggacatcaccggcaggacaatggcaccatgtacacctgccagctgtaccagaatgaacagcgggaaggtcgctttcagaaactgagtggctacctggtacttgccagtaagatttttacgggtgataacaatcctggggacaacccgttactgattgttatataa

SEQ ID NO: 393989 - DNA, 963 bp, Salmonella enterica
atggatgatgtttcctttgggcttcttactgaacagtatttttacagcaaatcattacgaccggcgacggagtggagctaccagaaagtggttcgctcattcgaaggattcacatcgtttaaccctacgaagatcgatcacctgacggtactgaagtggcgtcatatggtgttgaatgaccagaactgcgcgacccggacgtggaataacaaagttgcccacatgagggcgttgtttaatttcggcatcaagcaggggttgttgccgcaggccgaaaatccttttaacggtgcggttgttcgcccgggtacgaaaaagaagaagacgctgacacagacgcaaatggatgcgatgtaccgactgatggaacaacatctggaggctgagacagggaaggggaacagcagtatgttcaacggtcgtagaaatgcgctacttccggcgtggttctggctgacggtggtgaatgtttttcgctacaccgccatccgacaaaaccagcttctgcatatccggttgggcgatattaatcttgaggaacggtggattgacctgaacatcgagggggccaaaaaccatcgtgaacatcgggttccgatcgtctcgtcattgtatccgtcgctggaggaactggtgagaaaagccggtgaggctgggatggcgtcggacgatcaggtgttcaatgtgggctggtttgacctggtgagaaagagtaagtatccggaagtaatgaacgagtatccgctgagggcgttcttccggcgcttatcccgggagtgtaagtttacgatcacgccacaccgattccggcatacggttgcaacacacatgatgaaatcacctgaacgtaatttgtacgcggtgaagaaactgctgggtcatgtcagcatcacatcaacgctggaatacattgatgaaagtgttgatagcttgcgggatatactggaaacggagttgatgtag

SEQ ID NO: 393990 - DNA, 477 bp, Salmonella enterica
atggtaaccgcaaaaggttcaggggctgctcagggcgatggcgactggcctcttccggctttctacttcagcgtttctatcagtggctgtgccgatgacacagcctttcaggaagtatccggactcgagttccagatagaaacggaagagtatcgtgaaggtggaaataatctggtttaccacctgcccaaaacgataaaaagtagcaatttaacgcttaaacgtgcggtaacggataaagcatccaggctacttagctggtgtcttgacattttaaatgatgagctttcgaaaccgattcagacaaaaagcgtgtcgatcaatttgctcaatgaaaaaggcactacctgtaaaagctggacagcctctaatgcctatccagttaagctgaaaatggcccctttcaactcaacgcaaaatgatatcgcgattgaagaaattgaaatttgctttcatcatttgaaaaggaacttataa

SEQ ID NO: 393991 - DNA, 171 bp, Salmonella enterica
gtgccattagaaataaaacagctagtgattaaatcacaaacgataaatgacgataataaatctccgtcgttcggctccgactggcctggcattgagtctgaagaaagtgtttctgcaaaagttattccttatccctttatgccgtcgcctgacgaagtaagagaacgataa

SEQ ID NO: 393992 - DNA, 2214 bp, Salmonella enterica
atggcgcgtcttaaaactgctcagccaaactcctcactgcgtaaaatcgcagttgtagtagccacagcggttagcggcatgtctgtctacgcacaggcggcggttcaaccgaaagaagaaactatcaccgtaaccgcagcgccagccgcacaagaaagcgcatggggacccgctccgactattgccgcaaagcgttccgctactgccaccaaaactgatacgcctatcgaaaaaacgccgcagtcggtttcggtcgtgacgcgtgaagagatggatgccaaacagccggcttcagtgaaacaagcgattgcttatacgcccggcgtttttgccacgcgtggcagctccaacacctatgatgtggtgactattcgtggtttcaccgcaccgaccaccgttaataccaaccagtatctggatggtatgaaactgcagggcaataactactctgaagtttccatggacccgtattttctggaacgcgtcgaagtgatgcgcgggccaacttccgtgctgtacggcaacagtaaccctggcggtattgtcagcatggtgagcaagcgtccgaccacagaaccgctgaaagaaattcagtttaaaatggggacgaataatctctggcaaaccggttttgatttcagcgatgctatcgatgatgacggcgtctggtcatatcgtttaacggggttaggcaacagtcagaattctcagcaggaaatgtcaaaatcaacgcgttacgccgttgctcctgcgtttagctggcgtcctgatgacaaaacagatttcaccttcctgagtaatttccagaacgatccgtatgcgggttactatggctggttgccgcgtgaaggtacgcttgttccgtattacgatgcgaatggcaatccgcacaagctgccaactgatttcaatgaaggcgaagacgataataagatggcacgccgtcagaaaatggtgggctacaacttctcgcatgtctttaacgataccttcaccgtgcgtcagaatctgcgttatgaccgggtgaaaacgctctaccgttccgtttatggctacggctacattgctcctggcaagattaatcgtcagtacgtgcgttcagatgaagatctcaatgcgtttaccgttgatactcagcttcagtctgcttttgccatcggcgaggtcgaacatactctgctgaccggcgttgattattcgcgcatgcgtaacgacgtgaatgcgctgtatggctccgccgatccactggatatgaataacccgcagtacggcaatccgaatattgatgtcagcggaccgtatgcgaagtacgcggtacttaaccgcatggagcagaccggactttacgctcaggaccagatggaatgggataagtgggtgctgactttaggcggtcgttatgattatgcgacaacctcgacgctgacccgctccagtaatacgctagccgaagtcaacgatcagcagttcacctggcgaggtggaattaactatctgtttgataatggtatttcaccatactttagctatagtgaatcgttcgaaccgacctcaggttcaacaaaagaagggaagccattcgatccatcgcgcggtaagcagtacgaagcaggcgtaaaatatgtgccgaaggatatgcctgtcgtgctgacagcggcggtatatcagctgacgaaagacaaaaatctgacggctgatccgaacgatccaacaggactgtatagcgttcagagcggtgaaatccgttctcgaggtattgagctggaggcgaaagccgcggtcaacgccaatgttaacgtcacggcggcttacagctatacggatgcggaatatactgaagacaccatctttaaaggtaagcgtccggcagaagtcccgcgtaaccaggcctctttgtggaccgattatacattctatgaaacggcgcttagcggtctgaccctcggggcaggcgtgcgttacaccggttcaacggtcagctactacaaaaatgacgctgcgaagaaaaatgacgcctttaacgtcggtggttataccgttgctgacgcgatggtgaaatacgatctggctcgttttggcatggcaggttcgtctgtcgctgtgaacgtaaacaacctgtttaatcgtgaatatgtttccagttgctacagtgaatacgcatgttactggggcgcagaacgtcaggtcgttgcaacggcaaccttccgtttctaa

SEQ ID NO: 393993 - DNA, 279 bp, Salmonella enterica
atggttccgaagcgtcttaggattgcgagagagctggcaaatatgtcacaggaagagctggctgctgcggctggtgtttctgaggaaacgggctattccagaatgtcacactacgaaaatggcaggcataaaccaaaatttgaactagtttgtcgctttgccgaggttctccacgtcccggaggggtacttctacacgcttgatgatagctttgctgaagcgatgctgaagctatacgctggaaaacgcgttcagtggaagaagagacattctgcttag

SEQ ID NO: 393994 - DNA, 282 bp, Salmonella enterica
atgaccaaaaaagactggcaccccgccgacatcatcgccgccctgcacaagcgcggcaccagcatggcgaagctctcgcggcaagcggggctggcgtcctccacgctgtccaacgtgctttcgcgtccgtggccgaaaggcgagtggctgatcgccagcgtgcttaacgtgcatccggccacgatctggccgagccgttacgccaacagcgccggtccgcgcctgccaagaaaaccgttgcccgacgtggcgcttacggctcccggctcatgcaaggcctga

SEQ ID NO: 393995 - DNA, 732 bp, Salmonella enterica
atgcaaggcctgacgcagcccggcggcaaaacatccgacgctattccacggcgctttactaacagcggccggacgccgggctgcgacctgccttttctgccgcatcccccggctaccaacatcgtcttcagcccgcaccatttctccggccacgccatgctgcgcgacatcacactgcccggcgggacgttactctaccggcaggggcagccttatggcgggttctggtatctgcgcagcggcatggtcgggctgtatcatgcgctgaaaaacggcaaggaggtgctggtacgcacctgtcagcgccatgagtggttcggcttcgccgggctgccgggcaatgcgccctatcactgcactgccagagtgttgcatgacgccctgctgtgtcacgtcacgccgcaggatccggctaagtttctgctccacttcccggcattccgtcagtttatgctgaaacagatggccgacgcgctggccgatgccgagcaccgcatggcgtggattgcccgttaccgtacccggcaccgggtgctgagcagcctgtggtatctgacgcactattttcccgactatgcatggacatggcgcgaggtggcggagttcgccggatgtgaaacggagactgccctgcgcttcagcagggagttaagggagatgcggatccttgacggcacgcagcgccgcctgcatgtgcgttatccggatcggctggcggcgttgctggactga

SEQ ID NO: 393996 - DNA, 456 bp, Salmonella enterica
atggtgctggttaaagaatgctatttagcaataagatatagccgtagtagaagctcacttctggtactaagtcgactgtcagttcccattacgcccaaagagaaaaacgagccgaattatgtatgcgtcagtacaggtcagcagtcgctaaaattcccctgtgtaatcttcttcgtggcccagcgaccctcgtttcccgtattacctatattatctcaaccctttcatgcttctcgctcatcgacagcgctagatgcagggcagggagcaccactcgaaacatcgcctcaacccatagggagagtcatatactgcccggcgactccaacaccaaacgcaaaaactggcgttgttcttcagcctgcggtagcgtcaaaaaacaggacatctttgcaaatgatatcggcggatgacatcgccgctcagtccagcaacgccgccagccgatccggataa

SEQ ID NO: 393997 - DNA, 708 bp, Salmonella enterica
atggcgcgaaaaaaaaacaaaccacagcgtacgcagataaaaaaaagaacatcagttaaaaagcaagaaaaacctttgtacaaaaaaatcaacagtcttttattatggctggctgcaataggcatcctacctataataagtaattattttctcgattttttcacaggagatgtgcaagttaattatattcagccgtcaggacgtggctacgagttcaagtttgttaacaacagctctacggatcaaattataaaacaattcaggatatcacctgagtttggtcaaaaatttatatttaaaatcaacaaatcagtatatgcaaaagttaccgacaatggtgttactcttccgggtggaaactctacctatatgcctgcttttgaatataaagaaatgaatggttatgtgttaaaagctaaatccgaagtaaactttcgcattccaccacttgttgcaagagattatatgattcccgaatctattgttgtatatgcagactatagcacagaatcaaaaaataggttcatggctgggatcgaaaatatttttgaatttataaaaattagagatgtaaagaaaagaaaaaaatacttagtcgttgataattactggacacctcttggtcgagaaaatgaagtcgacgcaataaagaatgcttgcagagatgacgacatattcgcaaaatcagagatctgcaaaattcaatga

SEQ ID NO: 393998 - DNA, 225 bp, Salmonella enterica
atgagttctgtctattcaaaagaataccagatggtaataagaactttgcgagaagcgaggattgccaatcatattactcagggagagcttgctaaagcttttggcaggcctcaatcttttattgctaaagtcgaaagtagtgaacggcggctggatattgtggaatttgttaaactctgccgtctgataaatattgatccggctagtatattaggtaaattataa

SEQ ID NO: 393999 - DNA, 249 bp, Salmonella enterica
atgtcatctatttactctgatgaatatcaattggttatagggatgttgcgtacggcgaggcgtgaaaaggggttaactcaggctgcggtggcaaaagcgttgggaaaaccacaatcattcatagcaaaagtagagaatggtgagcgtcgactggatgtgattgagttcgcccacttggcttgcgcgctttcgctagatcctatcgaggttttaagtcaattaatggcaaacaagtcattcgctgggtga

SEQ ID NO: 394000 - DNA, 282 bp, Salmonella enterica
atgaccaaaaaagactggcaccccgccgacatcatcgccgccctgcacaagcgcggcaccagcatggcgaagctctcgcggcaagcggggctggcatcctccacgctgtcgaacgtgctgtcgcgtccatggccgaaaggcgagtggctgatcgccagcgtgcttaacgtgcatccggccacgatctggccgagccgttacgccaacagcgccggtccgcgcctgccaagaaaaccgttgcccgacgtggcgcttacggctcccggctcatgcaaggcctga

SEQ ID NO: 394001 - DNA, 732 bp, Salmonella enterica
atgcaaggcctgacgcagcccggcggcaaaacatccgacgcttttccacggcgctttactaacagctgccggacgccgggctgcgacctgccttttctgccgcatcccccggctaccaatatcgtcttcagcctgcgccatttctccggccacgccatgctgcgcgacgtcacactgcccggcggagcgctactctaccggcaggagcagccttacggcggattctggtatctgcgcagcgggatagtcgggctgtatcatgcgctgaaaaacggcaaggaggtactggtacgcacctgtcagcgccatgagtggttcggcttcgccgggctaccgggcaatgcgccctatcactgcactgccagagtgttgcatgacgccctgctgtgtcacgtcacgccgcaggatccggctaagtttctgctccacttcccggcattccgtcagtttatgctgcaacagatggccggcgcgctggccgatgccgagcaccgtatggtgtggattgcccgctaccgcacccgacaccgggtgctgagcagcctgtggtatctgacgcactattttcccgactatgcgtggacgtggcgcgaggtggcggagttcgccggatgtgaaacggagactgccctgcgcttcagcagggagttaagggagatgcggatccttgacggcacgcagcgccgcctgcatgtgcgttatccggatcggctggcggcgttgctggactga

SEQ ID NO: 394002 - DNA, 1161 bp, Salmonella enterica
atggcgaaacccaccggctggcgctgcaatctggcctgtgattactgcttctatctggcgaaggggcagggcgtactgcgcgacgccggcgggcagcgccatatgtcggacaaggtgctggaggcctacatccgccagtacatcgccgctgcgcccggcccggaggtggaatttacctggcagggcggagagccgacgctggccgggctggatttttaccgccgggcgttgacgctccagcagcgctacgccggtggcaagcgcatccgcaacagcatgcagaccaacggggtgttgattaatgatgagtgggcggcgtttctggcgcagcaccattttctggtggggctgtcgctggatggcccggcgcatctgcacaatcactaccgtaagacaggaggcggcaaaccggcgtttaatcaggtgatgacggcgctgacgcacctgaaacaccatcgcgtcgctttcaatatcctgacggtggtgaataacgtgaccgctcaggcgccgctggagatttaccgcttcctgaccgaagaagtcggggcggaatttatccagtttatcccggtggtggagcaggatgcccaggccggcatgttgccgtggtcggtgacgggagaagcctacggtgagtttatcaacgccgtctttgaccagtgggtgcgccacgacgtcgggaggatatttatccagctgttcgacaacgcgctggcggcctggctcggcgaacgcccggcgctgtgcgtgatgcagcccacctgcgggcgcggtctggtggtggagcagaacggcgatatctatagctgcgatcactatgtcgatgcagatcaccgtctcggtaatctgctgcggcagccgctggaaacgctggttaacggcagggcgcagcgccgttttggagggcaaaaggcgcaattgccggatgactgccaccgttgccgctggcgtttcgcctgccacggcggttgcccgaaacaccgcctgcgccatcggctgaattatttatgcgccgggtaccgggcgatcttcggtcatatcgatccctatatgcgctttatggcgcggcagatccagctgtgccagtctccggcacgggtgatggcggtggcggacgacatcgccgctcagtccagcaacgccgccagccgatccggataa

SEQ ID NO: 394003 - DNA, 819 bp, Salmonella enterica
atggaaagcggactgattatcgcgctgtgcggttgtggcgtggcgaccagcctgctttcggcgctgtttggcgtcgggggcagtatcctgctggtgccggtgctgcatctgctgttcccgcagtgcgcggtgcaggtgctggcggccacctcgctgacggtggtgatgctgagcgcgctgataaacgtctgcgccttctggcggcagggcgtccgcctcaacgccagactgctggcgctgtggtcgctgggcatggcggcgggcatgcagctcggcgtgtacgccagctttatgctgccggatcgggcgatcctgctgctgttcgcgctggtgctgctggggctggcgctgcgcggtattcgtcagcatgacgcggcgacggaaacggcgcgcccggacgtcaggacgcgcaacgccgggatgctgctgtgcgccgcaggcggtgcggtggcgggtctgaccggtctgggcggcggctcggtgctggcgccgctgatgtcgcagcttgccggcattccgcgcaaacatatcgccgtgtactgcaactggatgatgctgttcggcagcgccggaacggtgctcagctacctgcatcgggcgacaccccgcgtcgcgcctttgccgcaggcgacccagtacggttacgtcaacctgctcattgtgctgacggtgtttctcagcgcgctgctgtttcagccggtcagcatgaaactgcgtgaccggctgccggaacagcatctgcgccgtatgttcgccggggtattgctggcgatcgccgtcctgattgtgacaacgctatgtaatatcccttccatctga

SEQ ID NO: 394004 - DNA, 1293 bp, Salmonella enterica
atgaaacccaatattctggtattttttaccgaccagcagcgctgggacacggtcgggtgctacaaccccgccgtcaacagcacgccggtgctggatcagcttgcccgcgaaggggtgaagtttgagcacgcctttaccgttcagccggtttgcggcccggcgcgctcctgcctgcaaaccgggcgctacccgacgcagaacggctgttatcgcaataatatcgccatgcggcaggatgaggtgacgctggcgaaactgtttaatcaggcgggctacgatacggcttatatcggcaaatggcatctggcggatcgggatgaaaaaccggtgccggaggcgctgcgcggcggctggcgctactggctggcggcggatgcgctggagcacacttcccacccttacggcggccagttctttgacggcgacaatcagccagtgcgttttgacggctaccgggtggacgaccagaccacgtttgccctcgattacttgaaaaaccgcgcgcgggacaatccgttcctgctgttcctctcctatctggagccgcattttcagaacgatatggcgcgtttcgtcgccccgaatggctacgccgaacgcttccgggatgcgccggtgccgccggatctggcgaaccgccccggcgactggccgcagaatctggcggactactacggcatgtgtcatagccttgatgagaatctcggacggctggtcgaatacctgaaaaccagcggcgagtatgacaacaccatcatcctgttcttcagcgatcacggctgccacttccgcacccgcaacgacgaatacaagcgttcctgccacgaagccagcatccgcattccctgcgtggcgcgcggcggaccgttcagcggcggcaaaacggtggcgcatctggtcacgctgctggatatcccggtcaccatgctggggctggcgggcattccggcgccggttgcgatggtggggcgcgatctgcgtgcggccctgcacgccgacaactgggatcaggaggtgctgattcagatcagcgaatcggaggtgggacgcgcgctgcgcacgccgcgctggaaatacgaaattatcgcgccgggcagcgatccgtggcatgaaccagcggcgaagatgtacgtcgagagccagctttacgatctgcaaagcgctccgtgggagcgcaaaaacctgatcgccgatcctgagtacgccccggtgcgcgcgcagttgcgtgagacgatcgcccgcaaaatggtcagcatcggcgaagcgcagccggcgatcgtggcggtggagtga

SEQ ID NO: 394005 - DNA, 1593 bp, Salmonella enterica
atgacaaatattctccctgtaataagcaggaagaatacggggaataatctgtgttcacggttattcttcgctattcttttgctgttaattgctgttccagtctgcgcacagacgctttatatcgactgctccgccgccagcgatggcgacggctccatcggcagccccatcaacgccgtcgccacgctgaaccagcgtacgctgcatcccggcgacagcgcgctgttccgccgtggcgtgacctgcaacggcgaggtggtcgccgcctcatccggcgcagaaaacgcccccatcgtttacgatgcctggggtgaaggcgcggcgctgcccgccatcgccgccagcggcaatgaggcggctttccacctgacggacgccagttgggtgacggtgcagaacctcacgctttccgccagcggcgacggcaaatcgccgcggcgcggcatgtgggtaaccgcttccgacagcggcgaacatcggggcatccggttgctgcatctgaatatccatgacgtgcgcggcgagatgcccgccagcaagaacccgtccgacagcagcatcggcaaatatgcgcatgcctcgggcggcatcgtggtggaagcgctcggcaacgccgttcccacctggttcagcgatatgaccatcagcgacaacgttatccacgccgtggatcgggaagggatctacacctggtccaactggtgccagcgcccggatctggtggagttctggtatagcctgtgcagtgcgcggtggcagccgttcagcaatctgctcatcagccataatatcctgtctgatatcggcggcgacggcattgcgccgatgaccaccatcaacagcaccgtcgagtacaacacactgaacggttttaacatgcgctccggctcgcccaacgccggcatgtggtcggctaacagcgacaacgtggtgtatcagtacaatttcgtcgccggcggccacaccacgcaggacggcatgtcctatgacgttgaccactccactaacggcattgtgtaccagtacaacatttcggcggacaacgagggcggctttttcctgctctgcccttacggcgacgatgtgcccggccaatcgcgcaactttattatccgctataacctgtcggtggcggacagaactcgtacctttcaggtgtgcagcggcggcgtgattaacgggcagatctataacaacaccattctgctgccaccggacagcgccagcccgcatctgatcctgacggaggcggccactcatgacggcgcggtcggactgacgctgaccaataatatcctgatgagcgacggttccggcgctaatccggtctgggattatcatgactccgccattaccggcgatcacaatctgtatgatcatgtgccggtgatgccgtctgaaagctatgcgttaattaacgatccgttgctggtaaaccccggccccggtcacgttcgctggcgcgattatctgccgcagcccggttcaccgacgataggcgcgggcgtaagcgttaccggcgcgccggcgcacgatgcgctgaaccatgccgttggcgcgccaccgacgattggggcgctggagccggaataa

SEQ ID NO: 394006 - DNA, 5730 bp, Salmonella enterica
atggcgattaaaaacagcgcaatcatttatgcaggctatgattatcagacactccaaggtgtcaggctactggcggattggctcaatacaccaactaaatataaccgaatagcatttgaggctgatgcgaaacaagttgatgctccacaaggcattgatgatattgtctgcgaacgtcaggatggtaaaacagatttttggcaagttaagtttacgccagataccgacaaagaagacaatcaactatcatgggaatggttactgaaacgtagtggtcatagtattcgagctcgttctatactgcaaaaaatagctgatgctgttgataaagtacctgcggaaagaaggggagatattactcttttgaccaataaaatacctaatcgtgagatagcaacttgcttgcgaaataacaaaatagattggaatcaggttccaattgctaagcagcaaagcattattcttcagttaggtacccaggaaagagcaaagcaatttttcgatatattacaaatatgtcatagtgatcaaagttatacgcgattaaatagtattgtcccagaactacttcgcaaacataccaacgaggagggggtatatcgcctgattgaacgagctaaacgttgggctatccagcgtaattcaccttcggatggtggatggatatgtcttgaacatattcgtgcagtgatttcaactaatagacctgaacctattccgcagacttttgtcttgccagataactatattgttcctgatgcagattttcacgacaaattcattgactcactttttaatcctactaatcgattagttgtcttaactggtgctccaggaaagggtaaaagtacttacatcagccatatttgtcagatattacaaactcgcgagtttccttatattcgccatcattattttcttgggttagatgatcgtacgacagatagattaagtcccagaatcgttgctgaagacttgatgtgtcaggtcaaagcattttgctcacaaatcgaaatgaaaaattatcatgcagagcacctacataaagtgctggctgaatgtgggcagatatataaagaagaaggtaaacgatttttcatcattattgatggtttggatcatgtctggcgtgataacggcaaagataaatctccactggatgagctattttgccaattgttaccgttgcctgataatgtaacattattggttggtactcaaccagtagatgatgagctattgccatcaagattgttacagaacagtccaagagaagaatggttgcacctaccaaatatgtcaggcgatgctattcgtaaatatctatcgggacaagttgaaagtggccgtatcgtattcaattttcatccaagccagtatgaagaagttttatcacagtgtgctgagttgttgactactaaaactcagggatatcctcttcatgttatctactcatgtgaaaaattacatgttgaaggtaaagggttatcgcactgggaaatagaaaacctgcctcgctgcgaaggcggaaacattacaaattattataatgaattatggaaaatattaaattacgagcaacgcgatattcttcatctctgttgtgcttttccttttttatggcctgccacatcattttctgagattttttctgagaggactgaaactataccgaatgttaaggctgtaatccatttgctttatgagtccattgctggattaagaccgtttcatgaaagcttgattgtttttacccgtagcacaactgaacatgagaatagaataaaattattattgccagcgctaatttcatggctggagaaaagcgcacccaaaccgataaaaaattgttggtactggtcatgtcttgcttacaatggtgatccatatcctttaagaaatggcttaactagagactggatattggagcggttggctgaagggtatcgacaggatgagtttattcgattactcactcaggctgaaacttctgctttagccgaagggcattttagtgaggcctatcagcatcgttcacgcaagactcgactacttaatgctaggttgcaaatctgggatatgtcgacgttgggcgtttgcagtatgattaatgcttctgaagcattgcttaaacaatatcaatctacccagaatgtcagttcaccaaagatactggcaactttggctatcgctttatggtttcgtaatcatttcgatgaagcaaagcgcattacaagattggcgttacaacgctactcaaatgaatcatccgtatataccaataaaaatagcgatgagtcgcgtgctgacattcgtttattaatcaaagctgctgttttgactgagtgtttcgatgaaaaatggttggcaaccggttcagtacacaagtggagtgatagtaatattaatctgcttatcgaatgtgcggaatataaatcagatataggattactattttcattacatgatgtttttaagcaaactgtcataaaaaataaaatagtaaatgcgattgtcagggttgggattgttgaacaaatagatttagaatactggccacatttttctggtcttgactccgctctgctgcggttatacagtcatttatccactgcacatccatgttcaattataacagaacaaggtgaaagtgaaatcggtagatatcatgttcatccagaagtatcctacgatgaatggttctatgacagccttttttatcgtcttaatgccagtggagattattgttggctaccggttagcacgggggaaggacaggaggaagtcagcagtcattttcaccatttaaatgatttctcagatattattgctgaaagtatggctctaaatattcaacaaagcttcagcgatttttgttcacttattgctttggtatcagatcttaaagatcatcaaatgcaaatccaacagaagcgaatgttttttaaaactgattgggtaagcattgctttaaatttacacttaatcatgcattgcaagccggttaatacggaagaaattgatattattcttaattctgagcatacagccctgtatcggctgcataaaactattcttaactttcatagtagagccttcgaatctgatgcaatagcaaactttctggtatttgaggatgggaggcagaaggaaaaactacaagagacaaatgaatatttggcgaataatcttgagttgtcagagattgcgcttcattatgatctcaatcaatcaattttttttgagcgagtcaagttatgttgggactatggtctgggatacggacatcataaagatatagctctgaatcaggtgctgactgcaataaaaactattgcaactgttgagcctaaatatgcattaacgcagcttgagcgtgtgagtccattggttcataatatttgtgacttcacagatggtgaccatactcaacattccgtaacggaattgtctgcgctatatgctcgtctttctccccttactttaagtagtatctatgacagttatgttagtgagggtgagtggtatgatgcggataatgcattaacgcaatacttaaaacatgctgatctatcatcacctttcgttgagagtttatgccggacattactagatgatgggcaaattgaaataatacagaatcgtgctaaagacaatgccatattgactacgttttggccggaaatattaccacgaaaaatggattatagtagtagcgcaaaacgttcattaggggggactgaaaaatttgatccagaaaaaatcagccctgctgatgtaactaatttactcaatgttcggtcaagttatgaaaatattcctaagtggtatcattattggaaagaccaaggaaaagttacagaagtaattaacgtattgctgccaatcattaataatggcttgccagaatatagtgaatttcgttatatattatctgatttatttgaagatacattgcgtttgaaaggtaaaaaatatgcttttcccattttagtgcaggaacatattcagcgaaatggttggggtgaatgggaggagtctgatgatcaaacatatgctcggttagataaagttatcagattgtatccggataaaattgatgactttctttacaagacgactcgacttcatcactataaaactaaagaagagaacttggtaattcccgggaataagctaacatatctgttagtaaatgtaggccgagtggatgaggcgaaaagtctatgtgaagcgatgatttcggaggtagaggcagaaacccagaatctgccattgtgcaaacctcaatggcaatgggagggagaattagataacgatatgatcgccgttaaattcatcattcgtcgtcttttttggcctgttcaatgtgtaaaacatcttgtcgctgatcaattgtctcatctcttagttaatggtcaatgtgctgaagaaattgaaaatttacttgtagttgagatgggaaatcgtcaactggagtcagaggtggtagatattttaactgttctctggttagctagtttgaaaggttataaggttcagaataatatatcttcctttatctatgctcgtagctttctttcagatgcattgctggaggctatcgatccaaatttaccaaacctcagtcgctatcaagtgctgtataaacatcctgatgatgatggtaatcactatggctttgaaaaaacacttggcaatgaacttccccatatattttgggatgaaataaaaaggcttgaggagaaatctggagctccggctaaaatattaatgaaaaaagaatggaatgatatttgttataatcatgttcaacgatgggaaagggttgattatttcttcggttcggagcgtgatggttttactatgagtttttccacaaggaatacacgatttggtatatctgcatacttgagaaccattaaccgacttatcaacgaatttagaatgccaaagcattatgcagaacattattcgatttgtttaatgtcagccaacccattattttattccgtatctaatcaccgacctggttggttacctttatggcaatatggggagattaccacaaaggaaaatgtaaaaacatatgttgaggaatgcctgaatgcattcaaaaatgaacaggaaaattcaatattaggagcattgtcattacctgtacgcatcgatgaaaataattggttagatattacggctgttatggggatacaaacagaagaatatgcctcttttaagatacaacatgccgactgtggtcatagtgtagatagtttacttcaagcttatagaaatattaaattctcatttgcaaaatgggctgaataccaaaattgtgtaccactattgggaagtacacgcgaattactgagaatagcacggtgggatataatgtacgaatttcgtgggcttttctcattcggttgccaggaacaggttactgcctacccggctaaaaatcgtattaacttcgattatcagggtaaaaccatcggctatagtgacttctggcaggcaataccattatcaatttatcctaaggatatacgctcacctgttgctacttacactgcttatgataaggaccttgcctgtaactggaaaaattatagcgtactgaaaaagcctaatatcatgttatgtgattgtaaggtactaaagagagaaaatagttacagtccttttgaaatatcagatattcgttttcactttgaatctgagtcgttatag

SEQ ID NO: 394007 - DNA, 339 bp, Salmonella enterica
atgaatggtatattttgggtactttgctcaggtgctccctggagggatttacccgaacgctatggtcactggaaaaccatttacaatcgctttaatcggtggtctaaggctggggtaataaataatattttcaataaattactccagattctggatgaaaaaggatacgttgactgggatgttatcgcgcttgatggcagtaacattcgtgctctgaaagccgccgcaggagcgaaaaaaaacatcccgatgaactcgacgaccatgggctgggtcgctcacgcggcggctttggcaccaaaatccatctggcgacagatggcacaggattgccattaa

SEQ ID NO: 394008 - DNA, 1020 bp, Salmonella enterica
atgacgcaatacgggtggaaagatttattggaccggaacaatcgctggcagggactggaactgactgtgcgggcagagcaacatcccggtcatgcgatggagatgctcagcggccaccatggacgcatggcattacagtttcagggcgagacgctgttttgggccaccatgctgaaagatcattccggcgtctggctggtatttaacgccgatcaccccggtcagcgggagctattgccgtcagtgacctcggcggatgtggagtcggttaaggcgcagggggcgcaggcatggacaagcgaatggtgtcgctacttcgcccggcggttgatggagacgcccgcgccattgctgcccgcgcgccgttggttgttaaggcctatggcgccggtaagctgcagcgcgccatattcctgccaacaatctgtaccggtggccaactggcgttttgattcccctgccagcgccggaaacatgggctgcgactgggtgctctatggcgaggacttccctgatttagcggatccgcaaaaagtcaggctggtggactggtggtggggcggtaatctgctgctgggacgctacccgataaacaccgatgcgggacggctgaaatggtggcgtaaaaaatgccgtgaaggcgcattgccgccggtgttggtctggtacattgccgggctggcgtcgtttgtgatccttgacggtcattatcgcctacaggcggctatcgcagaggggatcccgcctcagtttttggtgctcagtgaactgcatgagagagagtttccctccgatccgcagcatcaggcgcgtattgcccgggcgctggagcaacagcaacgtaaaaaccccgcctgcagcgttgaggggataaatcagacgctgattaatctctatgacacccgctatctgtatgcttcaacccatagccgcgccctgcttggcgatggggaaagctgggcgcgcgaggttaaggcttatttgcataaacatcagcttgaggaatgtctcagggcgtga

SEQ ID NO: 394009 - DNA, 936 bp, Salmonella enterica
atgacttaccgtcaacaacgattactactgctaccgctgctgctgattgctttcccctgtctggcaatcaccaccgcccagatagccgcctccgccctgtcgccggagtgcgtgaaataccgggtcgtcggcatgtgctactggctgcaatgctcgccctttggctgccgggtgcgcacctcggtgaaagtgcgccacttccgccccgatttggtggtatcggcctacggcgtgaccggaaagaatccgtgggttgaaatgtcgccgctcagcccgccgttgcccgggatcgccgaaggcggcggcgataccaatccgcgcgcagccaatcagcacagcaaggtgcggtttaaaaacgccgacgccattggctttccggcgggcgacgagctggcgaaatttttcacccagttcggctatgtctgcgcgccgtcggcgcaaccctttctgccctacttcctcagcacccttgatgctctcgcctggcgcggcggcgtacccgaaatgacctggccggaagccctcacaccggggttgcgcgaggtcggtaaagagggcgataggtggggcaatatcttcccgcgcgccggcgccatcagccagacccatgactacaaggccgccgcggttatcgcccagcgcgccgctgatctggtgacgcgcgccgctcagccgcacgtttatcaaccgctgacggcagcgtcccatgacggctactggccgccggaaccggtgaaggaaggtgacgacgacaatcatcagtggcaaatgctggcgccgaaaatgagcgcctcctgcgccatctttcccgatggctccgccaccgatacctatgccgataagttggcggaggatggcgcttacgtctggacgctgtggcgaccttacagctgctgcccgcgtcgcggacaaacctttctcggcagcagcggataa

SEQ ID NO: 394010 - DNA, 1359 bp, Salmonella enterica
atgagagtgatttgcctgattctggcgctgatcgcctggcacagccgggcggcggaggactacagcttccgtaagcagggctcggtggatgacctgctctattaccagatcggcggcggcgaagcggtgatgccgccgctggtgaagcacagcaccaccccgttaagcgcgggcgtaagctggaatgccgatatgatgtgcggcaatttcgatatcgacaccacggtgcgcaatcagcttaacggcatcaccgacggcttccagcaactgatgggggaagtgatccagagcgccaccggcgcggtcgccagcctgcccgcgatgattattcagcgcgccaacccgcagctttacgatctgctgaccaacggcgtgttgcaggggcggctggacttcgataagtcgctgctgagttgccagaagatggcggaaaagatgaccgacctcgcctacgattcggcgtggtttgccggcgcgaaggccgagaactaccagtccatcgctgccggcgatcaggacgccatccgcgccgaccagaaagccgcgcaacaagccgccgataacggcaagcgctgggggggcggcgaaaagcgcggcggcaagggccagccgccgattaaggtggttcgcgacaccacgacggcgggctggaacatccttaatcatcagtccgcgaccagcaccgcctcgctcaccccggtggagtgcgacggcgaactctgcgccgtctggtcctcgccacaggaggccgccgattggatgaccagggtggtgggcgagcagaccatcagcatggcgcaaagcgatacgccggacgcgcgtcccggcgcgcaggccgggatcggcctacatccgctgattgaagaggagcaggagaagattaagcctgtgctggtcgatctggttaacggcagcctgaaacctaccttcgacaacctgacgcaggcctcgggcggcagtatgcagcttacccgcggcgtggtggaagcgttgcgcgacgatcccgacgctgcggtccttaccgaacggctggcgggcgaactggcgctggcccgcgttacggaacaggcgctgatggcgcgccgcaccctgctcgccggcatgcgcgaacccaatatcgccaatgtgaaggaggcgcaggaagcgctgggcaagaccaccacgcagctggatgaggaactggaccagcttaaactggagctggatttccgccatgcgttgacccgcaacgccgccagccagatcctgcagcgcaagcatcagcgcgatctgctgcagggccaggcggtggcggttccggacgacagcgaccgccgcgtgcgcgaccttaatcatccccagccggacagccagccatga

SEQ ID NO: 394011 - DNA, 1488 bp, Salmonella enterica
atgaccgccaacagctatctggagtatgtgctcactttgctgggctggctggtgaacaacggcgtgtggcatacgctgaccgccaccggcctgtttgccctgccgctgctggcaaagctggtctcgttgtggctgaaggcgcgcggccagggggcggatgaaggcaatcacgcccgcctgctggtcatctggctggaacatgcactctacagcgccctgctggtgatcctgtttgccggcgtgccgttcctgaatgtggatatcagtaccatcacgtatgacagccagcgcacccggcagtgcggctactcggtggttcagccgggcgattccggttatgcgccgctgattaacgaactcggcggccagacggcggcggtaccggtgtggtggtatttcacccatgcgctgaacaaaggcatcaccagcgccgccgtcgcagtgttgccctgcaagccggatctacgccagctgcgctttgacgtgcagcactcgcgcatcgctgacccggcgctggcgcaggagctacaggatttcgtcaacgactgctacggcccatcgcgcgccaggctgaagcgtcagggcagcgacatcagcgaagagcagagccgggaggtagactggcccggttcgtcgtttttcctcactagctcaggctattatgacagtgaccactcacattcgccgcacgccgcatggccttacgacgccagtcgcgacgacgggctggtcgacaccggcgacggcggctatcccacctgtaagcagtggtggtccgatagcgaaacgggcctgaaagatcggctgctgaaacaggtccatacctccatctggcagcagttgcagaagcttggtcaatccaaagaggaatatgaagaagcggtgctgcgcgcgctggtcagtccgcgcaatatgcagtcgtcacagggcgggctggtgtataacggcttcggcggcaacgccggggataatctcaatgcgtcgcaggcgttaagccggctggggagtctcgccggcatgtcggtttccagcctcgcgctgttccccgctttcgacagcgtgcgccaggcgttgccgatggtgcaggctttcctcgaaatggcgctggtgatttgcctgccggcgatcctgcttttttcagcgtgggaattgaagacggtgattacgctgagctttgtccagttcgccctcttcttcctctccttctggtgggaactggcgcgctggctggatagctggctgatggagatgatctacagcgaagacggttattcgcatttcaacctgtacggactgcagaacgcttctgatgatgtgattgtcaacgtggtgatggggacgatgtttgtggtattgccagtgttctggctcgcggcgctggcctgggcgggcgtacgggttggcggcgccgtggccggggtagtgtctgcggggagtggggatgttaagggaggtggcggagctgtggggaggatgatggtgaaatag

SEQ ID NO: 394012 - DNA, 1029 bp, Salmonella enterica
atgacaacagatactactgcatcaaagcgacaaaaacgtagaatggatcgccttaaagaacaaggtgttactcgaacaacagtttttgtccacgaagaatgcaaatcggcttttgaaaacctgagaaatcatctgattgatccttctaaagcaaaagctttagtttcactggttgcgcaattagaagataagaaaaaactgaccaatgttgcccaagtcaagcaactcagcccttttcgttatcccggaggaaaaacgtggcttgtgcctgaagtgcgtaaatggttgactgaatccagcaatcagccatcggtcttagttgagccttttgcaggcggggcaatggttggattatcagtagcagctgaagggttagctgagaatgttattctgagtgaactggatgatgacgtttccgctgtttggcagactatattccatgaaaaagaagaagatgttaaatggttgcgtcaaaaaatagttgattttgatgttaaccttgaaaatgtacgagcaattattgatggtaatccacaaactatctgcgagcgtgcttttcggaccatagtcaaaaatcgtatgcagagggggggaataatggctgcaggagctggcttgattaaagctggcgaagctggacgtgggctaaaatctcgttggtacccagaaacgttggctcggcggattgaagttttgcaaagtatgcgtcaaaaaataaaatttgaacaagccgatgcctttaaaataatacgacgctattctgatgacgataaggcattttttttcattgacccaccttatactgctggcggaaaaaaagctggctcgcggctttacactcataatgaggtagatcatgaagggttattttctttaatgtcttcagtaagcggctccgttatgatgacatatgatgatgctccagaagtacgcgaaatggcaagatgctatggtttccgagtagaagaagtgccaatgaaaaatacccaccatatggttattcgagaacttttactattaaagccttaa

SEQ ID NO: 394013 - DNA, 1014 bp, Salmonella enterica
atgaagaaaaaaactaaagatttaacaccaaggtttggtataggtgaatggtttggaaataatctggtccaactttctggagaagagcgccatcagttagcaactgaagttcttaaatttaagaaggataggaaaccccagttgtgtccttttcagtccagaaagcagggggcaatttgttctaaggatggaggcgtgtgctcgcttcgcctttattcctatgcccagcatcctgataatggacgggctattggtgtccctgttaaaggtaaacaaggcgagttgcgtgctacttgtccatatcgtttccatgaagggttagagatattcaaatgggtgggtgaaactattcttggtgatccagaaccattattagtaggagaagtcggctttttagaagcgggtgcatcaactgatagtgaaggtggtgatgatgttggacgtatagacatggttttagtaagttccaaaacgtctaatgccacacctttgaattggactgcgcttgaaattcaggctgtatatttcagtggaaatgcgatgcggggagaatttgaggcgtttgcagatgattctttagattgggttattttccctgcagggcgccgtaggcctgattaccgtagtagtggccctaaacgtttaatgcctcagcttcagattaaagttcccactctacgtcgctgggggaaaaaaatggctgtagttgttgatcgtgctttctttgattcgattggtgaaatggataatgtttcagatatatcaaatgcggacattgcatggtttattgttcgattcgaagaagtagaggggcaaaaacgtacgcgtatagttcgtgatgaggtccgttacaccacgcttgaacgatcagttgaggggcttacgggtggtaaaccggtggcactatctgtttttgaaaaaagaattagcagtaaaacaatttctattgtacctcttactgaacttgtagacgaattttcgctaaagggaagtgaccttgatgcttcaacctaa

SEQ ID NO: 394014 - DNA, 201 bp, Salmonella enterica
atgaaccaacaagacttacacacactgagcaattttgatttcctggcgcgcagttttgcccgcatgcacgtcctgggccagccggtagatatccgcgccgtgaccggcaatatggatgaagcgcagcgggcgtggttccgggagcgctacgaacattaccgccagcaggctgagcgggcgagggtgatggagctgcgctaa

SEQ ID NO: 394015 - DNA, 1218 bp, Salmonella enterica
atgtcatcccggaaaatcctgcttggctgtcatgttctggacgccgcacagaaacggctgttatggacgtttaatactttcccgcgcatttgtctctcgttttccggcgccaaagactctacggtgatgtttcatctggccgccacctgcgcccgccagcttaaacgccgttttcatatcttatttatcgactgggaagctcagttctcacataccctccgccatgtggaggcgatgaaaaaagactatcaggacgtggtggagaatttttactgggtagcgttgccgctgcgtacgcccagcgccgtatcgttacatcagccggaatggacctgctggcagccgggcgtcgcctgggtgcgtcaaccgccggacgatgcgattaccaacggcgattacttccccttctacctccagggcatgacctttgaggaatttattcccgccttcgccgaatggtttgccagacggcgcccggcggcgattctggtgggtatacgggcggatgaatcgctccagcgttttcaggctatcgccagcaggcgtaagcagcggtttgctgacgataaaccctggaccagcgccacgccccggggccatgcgtggaacgtttatccgctgtatgactggaaaacggaggatatctggacctggttcgcccgcaccggcgcggcctgtaatccgttatataacctgatgcaccaggctggcgtgccgctgcgcttgatgcgggtctgcgaacctttcggcccggagcaacggcgcgggctgtggctgtaccatgtgcttgaacctgaacgctgggcattgctgtgccaccgggttgcgggcgccaattgcggaaaactgtatgccaataagcagggggatttcttcgccgtgcgtcagttgacccgcccggcgactcactctacctggcgcagctacgcgctgttcctgctcgacagcctgccgcacgccacggcggagcactaccgcaataaaatcagcgtttacctgcgctggtatcaacagcatggttttccgcaggatattccggacgaacaggaaaacgatctcggcagccgcgacattccgtcatggcgcaggatctgcaaggtgctgctgcgccatgatttctggtgtcgcgcgctctcttttagtcccaataaggccagccattacgcacgctactgccagcggattcaggccagacgtcaggaatgggggatactgtga

SEQ ID NO: 394016 - DNA, 630 bp, Salmonella enterica
gtgacgctgaagcaattactacatcacctggaaacgctgctgtcatcaatgaccgtgccggaaaaaatcgacgcaggcaaccagatcaaaaccctgttgcatcactacggccccttccgggaagagccggtcgactgcctgcagtgggtgccggctgaccagatccacgccaatgattacaaccctaaccacgtggcgccgccggaaaagcgcctgctgtacacatcgttgatgcgcaccggctttacgcatcctctggtggcctggcgcgacgaagacgaatactacacgctcattgacggcttccatcgcttttctctgacgcagcagcgcaaggcgctgcgtcagcgattacatggctatctccccgtcgtcgcggtaaatcatgcccggctggataaaagccagcatattgccgccaccattcgccacaaccgcgcgcggggtcagcatcaaattcaggcgatgtcatcggtggtgcaggagctggcgcgtctgggctgggacgatcggaagattgccgttgagctggggatggaggcggatgaagtgttgcggttgaaacagattagcggcttgatggagatgtttcaggatcgggaattctcgaccgcctggacggtaaaatag

SEQ ID NO: 394017 - DNA, 909 bp, Salmonella enterica
atgaatacattatttaccccttttatcgacgtagccgttaatgccgagtggtccgactggcaacattatcccaatggacggcccaacccgctgtattcgcaggaagccattgaatggggcgtcagcggtctggtgtttggctttattaccctgtctgcatccggacaaccctgctgggccgcgcaggacgccatgccgctggactgggcgttgccgctggcggatgatctgaatgccgctaacctggatgtgatcgtctcgttcggcggcgcgtccaacagcgatatttcaaccgcgttcaacgttacgcagctgatatcgacgtaccagcaggtgattgatgattatcaggcggcgggcctggatttcgatcttgagaatggtctctataatatcggcaatatttgcgaggccttacaaaccattcagcaaaataatccggacgtcaggctctccttcacgctgcccactatgccgtccgggctgacgacgaccgggctgagcattgttcaacaggcccgcgatgccggactgaattttgtcgtcaacggtatggcgatggattattacgatccgcaggcggcgcagaatatgggcaaagcggcgaccgatgccgcaaccagtatctgtcaccagcttgaaagaatgtccatccaggggggattcgctaaggttgcggttacccccatgattggcctgaatgacgatctgagtatgtttaaactgcaggacgcgtccgcgctcgccgcgtttgccagacaacagtcgctcgctttcctggcaatgtggtccttcaaccgggataatccgtcgtcatacagctatgtcgatctgaccaccagcagcaacccggagcaaaaagtcccgggcgagtacagtcagcgtttcgtcagcggcctggagtcataa

SEQ ID NO: 394018 - DNA, 291 bp, Salmonella enterica
atgtctgttttcgacaaaatgccttcactgatgccggtcgtcatcgccccgcaggtctgggaatcggttattgaattccccgatgccccggaacaaatggaggagcggctggctaacctgttactggcggtgttgctgacgctacgcaccgccggctcgcagcgcgagaagttaatgttttcgctctactgcctgccgccgcgcggcgatatgaaagcgccggtgtcggtgccgctgtcgcttaaccgtatgagccactacctgcatatttcactggctgcacaggcgtaa

SEQ ID NO: 394019 - DNA, 711 bp, Salmonella enterica
atgaattttctgaaaactgaatgtaattgcgacatggatgaggcgcctgaacaatccatgtccctggttgcttccgccatcgctgacccgtcaagggtcagtatgttatgcgcgctgatggatggccgcgcatggacggctacggaactcagcgccgtagccggtattgccgcatccaccgccagcggccatctggcccggctgctcagtaatgggttgattatctgcctgacgcaggggcgccaccgttattacagcctggcgggacatcatattgccggcctgctggaaaacctgatgggagtttccatgcacggtcggggctctccggcatgccggacgccggcgcagttgcgttatgcccgtacctgctatgaccatctggcgggagaactggcggtgaaaatttacgatttcctgctagaggcaaaatggcttgaggatgacggaaaggcgctgacgtcagccggtataacgcattttcatgatcttggcgcggtgcttgatccaggctctcgtcgcagagcctgttgtccgtgtctggactggagcgaaaggcgcttccatcttggcggagacgcaggcgcggcattgatgacgtttcttctgcaaaaaggctggataacccgcacgcagggataccgcgaagtcagcgttaccggtagtgggaaaatcgatataaaacggctgtttgggctgaatgtgccttga

SEQ ID NO: 394020 - DNA, 393 bp, Salmonella enterica
atgtatgatatccatgtacgactgaacaatatctcggggtcgcttgcgtctttcggcagaatactgggaaggaatggcgtcggccttgaagggggaggcgtattctccatgccggacgcaggacatgcgcattttctggtggaagacggcgaaaaagcccgccagattctgcttgaagcaggcttcgacgtccagaacgtacgccgtcccttaatcaggaaattatgccaggagcagccgggagaactgggggagatcgcggatgccattgctcaaagcagcgtgaatatcctggtgcagtacagcgatcaccacaaccggctgattttgattactgatgatgatgcccgggccgcgcaagcgacacggaaatgggaaatccccgctgaatga

SEQ ID NO: 394021 - DNA, 324 bp, Salmonella enterica
atgatagccgtactttttgaagcggaaacgcaacctcacgcccgggaacgctatcttcagctcgctactgagctgaagccactgttatcagacatcccggggtttatttcgattgaacgattccagagcctgaatacccccggaaaaattctctccctgtcatggtgggaagacgaggacgcggtactcaggtggaaacgcaacgtacagcaccaggcggcgcaacaggaaggtaagcagtcgatcttttcattctacagaatacgcgttgtcagcgtcctgcgggattacgcgtctgatgaggaaacacaccagcatgtatga

SEQ ID NO: 394022 - DNA, 777 bp, Salmonella enterica
atgccattctgttttccgatttctaatctgaatatgaatgacgactattatctgtatttattcctgatatttactgccgccggatttgtaaaaggcgtgaccggaatggggctgccgacggtggcgatggggctgctgggtatattgatgccgcttcctgccgctgcctcgcttctggttattccctcgtttgtgactaatgtctggcagctatgctctggcccttctgcgcgcgttattttccggcgtctctggccgatgatggtttttattattatcggcaccgttgccggttccttttggctggtgagtatcgcgcctctgtggtctggtttcggtctgggcgtcgccctgatggtttacgccggttacgcgctttgcagtcctgcgatccacgttcccgcgcgccttgaatgttggttgtcgcccctcatgggcctggtaaccggtctggtcacgggagccaccggtgtatttgtgatgccggcggtgccgtggctgcagtcgctgcgtttcagccgtgatgaactggttcaggcgctggggctctcttttactatttcaacgctcgcgcttgccgccgggttgtacctgcatgatgcctggcaagtgggacagctgtccctgtcggggctggcgattatcccagcgctcatcgggatgtggctggggcagaaggtacgcatgcggattagcctgcggcgattcaggcagtgtttcctgctgttcctgatggtgctgggcctggagctgatttcccgcccgctgcttgcgtga

SEQ ID NO: 394023 - DNA, 885 bp, Salmonella enterica
atgcgatttgatctggccgacctgcagttgtttgtctgtattgtcgacgccggcagtatcaccggcggagccgccagggccaacctggcgctggcatccgccagtgaacgtctgcgaaaaatggaggatgactatggaataccgttactgcaacgtcatccccggggaatctccctgaccggggcaggcgaggtgctggaacgtcatgcccgcatcatccttgagcagcatcagcgcctgcgccaggagatgggcgcctttgccgcaggccagcaaggaacgctgcgtctctacgccaatacctcagctctgacggcatttctgcccggcaaactggcgtcgtggatggcggcccatccgggaatacatatcgaaaccgaagagcgcaccagtaccgacattatcagcagcatacagtcaggggtggcggatgccggcattgtgtctgacgccgtcgcctccggcacgctttgcatggagccggtcgcagacgatccactcgtcctgatcatccccccggcgcatcccctgtcgggaaagaaagcgctttttttcgcggacgtcatagcggagccgctggttgcgctctatcccaccagcgccttgcagcggcacatcgagcagcacgcggcgcgtatcggccaggcgctgaacatccgcatccggatgagtcacttcgaggggctgtgcgagatggtcgcacacggcgctggcgtagccattcttcccgccgtcattgccaggcgctatcagagccgctatcggtttgaaattatcgcgctgcaggataaatgggcgctgcgcaggctgtgtctgtgctaccgggacagggcctcgctttcacccgcgatgcagtccttattccgctggctgaaacagccttga

SEQ ID NO: 394024 - DNA, 657 bp, Salmonella enterica
atgttactatctggaaaaggaacgtcaggcgcgtttagccttcagatagcggtgaatgatttaactatggatgcgagtttaatcgatttaaaagatctgtgcggcatggcgacacgagatttacaggatatcaatctgcgtgaatataccgactgggccgagcagcaagttctaaaagggaatgactctgagaatgtgttgatattggcctctcttgggctggatcgcgagctggattggtatgatgtatcaagatatttttgtgcgtatttaaaggaaattggcgcgtcaatccctgataaggacgaggcggactattattatgtgcgcagggctttcaaaatgattgcttatgctaattccgataaagcgctatggtctgaggtgtcgaaatatttctcaggttggtatttatcgtttgatcgggaacctttaaacaataccttcagttattggaatagcgtgcatgatgatttcatttatcactatattgatgactatccctggtttctgaatgtacgtcatagcggtatccctgaagaaaaacgtgctggttacgtcagggcgctggcggaaagattttatcgactatttaatagtgaatatttcacctttttcgtgagggcacccggtaaattgatgtccctgcctgattga

SEQ ID NO: 394025 - DNA, 417 bp, Salmonella enterica
atgattatagcagcgcccaacgcacaaacgcggcaagatttgcttggcgagactctatttttgatccaggaaaagctgataacagtaattgaaaatcagtacgttctggagaaagtctggcataccggcggaaagaaatggacatatgagatgaaattccgcaaagggagcaagacggtatgttcattacttttcaatgagaaaacgctcggctttatggttgttttcggcaggccggagcaggcgaagtttgaagcgcagcgcgatgatttttctccggtcattgtggcgggatatgatgcggccacggcgtaccatgatgggaaatggctgctctttgaggtgcaggaagcgttgttgactgactttatgaagttgcttcggataaagcgtaggtcggataaaaaagagccatag

SEQ ID NO: 394026 - DNA, 1599 bp, Salmonella enterica
atgctgaagtggctaccaaaatcattacaaaacccgcgaactgcgtcagacgctacgctgccggagggatggtttgcgccacaatccgcagcgccgttgctggcgacgccgttacgccaggcctgcctgcgccagttacggcaactgacgccactgccggatacgctgttcgatagctggatcctcactgcgattcaccgttgcgccggattggtgcagcaactccccgcctcacagaaccatcatcattccgctcctggcgggttactggaccattcgctggaggtcgcctgcaacgccgtccgcctgcgccagggctatctgctgccgccggaagcgggcgcggaagaacaggcgcggcaggccggcgcatggacggtggcggtggtctgcgccgcattgctgcatgatgtgggaaaaatcgccgtagatatggagatccgcctgctcgatggctcacgctggcacccgtggcagggagtactggcgcagccttatcgctggcaataccaaagtcatagccgtgactaccatctgcatccggcggctggcgctttgctgatcactcaactattgccagcatcattgctggactggctggccggataccctgcggtcttttcttccctgatttatcagcttaccgggcaccatgaccgggccggcgcgctggcggaactggtgcagcaggcggataaagcctcggtcgccagaaaccttggcggcgatatcaaaaccgcgctggcgcacaagccttcgtccctgccccagcagcttctcgccgccctgcggtcgctggtgcgggatgaataccgactgaacaacccggaatgcggctccgatggctggctgacggaggatgcgctgtggctggtcagtaagactaccgccgatcgggcgcgcgcctggctgctgcaacatggcgtcaccggcgtgccggaaaacaataaccgcctgtttgatgaactgctggcgcaccagcttgttgtcgccaacagagataaagcgatctggcgctgttccattcagtcggcgcaaggctggtcaccgggcgagccgctgacgctgctgcgagttgcgcctactcttatttgggcacaaacggaacaaaggccggcttattttaacggcggcatcatgcctgtggcggataatccggaaaccagtgatgcgccggcggcgcctgagctacagatgcccgatgtcgcggcgcatcaacatacggaggctgaaaacgatatgccttttatgctgtggctgaaaaagcatgttgccgcgcctgctgcggttaatcatccgcgcgcttatgttcatctggtcgaagatgaggtgtttctggtcacgccggggttatttaagcgctatatgcaggaaacgaccggcgcgacgggcaacgagtggaaactggcgcaaaaatcgttgcaggagtccgggctgatccggcgcagcggcgaagatagctatatctggacctgcgaagtaaaaacgcccggtaagacgcttcatctgaaaggttttctgttgtcggatccgcagcgggtgtttggcgggaaagtgccggtgaataatccgtggttgaggctggtgtctgtgtcctaa

SEQ ID NO: 394027 - DNA, 441 bp, Salmonella enterica
atgacgaaaactgaatacatgacagcactgcaagatatcctgagaatgcacacgcaagaggccgttgataagatttgcagaattaagaatattctccctgtaaaaactagcgctgttgaagtgggcattcatccttctcaagatgaagaaggtatgttttgcgtcatgattcatcttcgtggcccagatttatacgtgcttaataaagctattgcgccttatcgagagctttttgaagtaaaattcatcgacggtaatctacaaccagaagttccattattcgatcctgatgaagtttcattttcagtcaatgatcttattgttgaggttggtattgtctgggttaaacagatatgggctttatctggaggcttagacgtcccggcatacgtgtttggagaagaatgttccgctcctaagagactgctcctgcccgtgtaa

SEQ ID NO: 394028 - DNA, 135 bp, Salmonella enterica
gtggcggagtcactgtgccagcaagaactgagcagcctgattcctgaagggagcgctaacgtgacgacctggctggtgacgccggaggaggccgtaaacaccccgatcattgagcatttcagatctgttttgtag

SEQ ID NO: 394029 - DNA, 171 bp, Salmonella enterica
atgagtgacaacaagaaaacgaatggctcttatgctaagccatcacgtgcagacatcgttcgctccgtagtcacctccacagcggttgaaacagggcagtcctctgcgaagatcgaagcttctcttgaagctacgcgcaaaaaattcgcccatctgcgccttgcggtttaa

SEQ ID NO: 394030 - DNA, 618 bp, Salmonella enterica
atgagccgataccatgtatccagtagtgaaggtcaatatgagaaaggctctagcgagcaagttctggctaacaagctgggaataactgcttccgatgaaatggatgaggccgagcttgtattgttagagcaactctaccattttgtttttgaagaacagtttccacagggaaaactcagcgtagccatgttaaaaagctggcatcgccgctggttaggtaacatctatgattgggcggggcaagaaagaacggtaaatatcagcaaggggggttttatgtttgccccctcagcgcaattgccaaaactgctgaatgaattcgacacgaagtatcttgcccgttacacgccgtgtaccgacatggatgaagaacaacttatcgccgctatcgccataatccatgtcgagttgatactcatccacccattcagagaaggaaacgggcgcttgtcgcgactgttagccgatgtgatggccgttcagggaggttacaaaccgctggattatcaaagctgggagcaaaacaaagcccagtatattgcggctattcacgcgggcgtatcaatggactacgagccgatgaaatactgggttagtaaagcattaaaaagcgattaa

SEQ ID NO: 394031 - DNA, 168 bp, Salmonella enterica
atggttgagtacaaacatggtgacatgcttcattcggatactgaagcgaccatcaacactgttatgacggcaggatatgccgccatgcttgcccttatgcagcgtttccttaatggtctgcttgacccgtttatctcgccgattgagctacacaatttaatgtattag

SEQ ID NO: 394032 - DNA, 933 bp, Salmonella enterica
atgaaacacgaactatcaagtatgaaagcgtttgtcgctctggcggagaccacttcttttaacaaagcagctaaattactcaatattacgcaacctgcgttaactcgcagaataaaaaatatggaggatgatttacatacactcctttttgagagaactacacgtaaagtaacattaacaaaagcgggaagaatgttgttacccgaagctcgtgaattaatcagaagactggatgaaactatttttaatgttcgtgaactcaataattaccatcacggtataattacattgtcatgtattccaaccgccgttttctattttttaccgctcgcgattggcaaatttaatgctttataccccaacattaaagtgcggatacttgaaaaaggcaccaataattgtatggaatctgtactgtgcaaagaggcggattttggcataaatatgaatagcatcacaaatcccgcgattgattttaccccgctggtaaacgaaccgtttgttctggcctgccgacgggatcaccctttagccgccagacaactggttgaatggcaggaattagtcaatcacacgctgataggcgtacgcgcttcaagcggcaaccgcctcttaatcgagcaacaacttgctgataaaccctggaagctggagtggttttacgaggttcgccatttatccacttcgctgggtctggtggaggcaggtttaggtatttccgcattaccaggactggcaatgccgcaggcaccgcatcctacgctcattggcattcctctgatagaaccggtgatcaggcgcactctgggcattattcgccggaaagacgccatgctttcgccgccggcggaacgttttttctcactgctgttaaatgtctgggccgatggcaaagacaacctttggacgcattttgccaaaccgcagccataa

SEQ ID NO: 394033 - DNA, 213 bp, Salmonella enterica
atgttaattcgatttttcgatacttatgcctgctgtccactggtatcaggcttagcggccctgggccgcttattaacgagtgcggtcacgccgggttgttcagaccacctggtcacatggcggacaattgaaaaatataaaatgcatttaataagtattgatttactttatgacaatatgaacctcaaatccagcattgcagaggcagaataa

SEQ ID NO: 394034 - DNA, 1068 bp, Salmonella enterica
atggtaactcgtcgtgagtttattttgaaaacagctggtgtggcagtttgtagttcattagagtttaattcctttgcgggtacaagagatacacaactcaatgcgccatcttgggattttttaaaggaaggagatgtcattgatgttatagcaccatcctcgccagtttatgaaccacaagaatgttataaaaagatagaaaattattttgaacaaaacacatcttttaagataaatataccttaccatttaatagagccaacagtattactggatgaagcaaataccatctggaaacgcgcgaaatttatctatgatgctttctgttcggagtcaaaagcaatctgggcgatatcaggtggaggttggggcgctagtatactcggcgaattgatgagttatccaaagccagataaaataaagccaattattgggtattctgatattacggcattacatatttatgcaaatgaatacctgaatttcccctcgatacattccgttgttctgggtattaatggcgatatttctgcagggtacaataaaaatgggattggatctacgttagatgtccttagcggaaaaaaaacagaagtcatatatgaattatctccactcaataacttaactgcttcaatgacagaggttaaaggtaaaattgtcggtgggaactctcttttggtatctgcgcttaatggagcttcgggactttcgcttagaactaagggtaaatttctatttctggagtctgtcgcagatgatcctggccaattttccaggaaattgatggggttggcttattcgccagtaataaaggattgcttaggagtgatatttggtgatattcttaaagaaggtggtaaaacaaactcacctcttgtgcaaagtcagtttgattatattatccgcagatttgcagaacaattcattgaagacaagattgttttgaaagcgaataatctttttgggcatggatcgataaatatgccattgccacttaatacttttgctgtcttaaatcgtagcggttcgagtataactgctaccattagtactaatagagtttaa

SEQ ID NO: 394035 - DNA, 1611 bp, Salmonella enterica
atgcggacatttctttcacttatttgttgtataataatcagtaactgttctcttgggtatgctgcaaatgttcctcacggagtggtgctggcagagaaacaagaattggtccgtcagataaaagatgaaccagcttcgttagatccagctaaggctgtaggattacctgaaattcaggtgatccgcgatttgtatgaagggctggttaaccaggatgaaaggggcaaaataattcctggcgtcgcctctcagtggagaaatgacaataatcgtacctggacgtttacactacgagataaagcacaatggtctgatggtactcctgttacggctcaggattttgtctatagctggcggcgtctggtagacccaaaaacaatttcgccattttcttggtttgccgtgctggcaggaattacaaacgcacaggctattattaatggtaaagtcacgtcggaccggcttggcgtagatgctatcgacgcgcatactttgcgtattcacttggatagaccattaccctggtttgccagattgacagcttgttttgcattttatccggtacagaaaaaaaacgttgaaagcggtaagggatggacccaaccgggtaaactgatcggcaatggcgcatatgtgcttacagatcgcatcgtgaatgaaaagctagttatcgagcccaataagtattactgggataatgataaaacggtgttacaaaaagtgacttttttgccaattaaccaagagtcagaggcgaccaatcgctatcttgcgggtgacattgacattaccgaaacgtttcccaagattatgtatcaccaactgatgaaggatattcctgagcaggtttacacgccgcttacattaggtaccagctattatgcgtttaatactcaaaaggggccaactgcagatcctcgcgttcgccttgcattaagtatgacgattaatcgccgccttataactgaaaaagtgttaggtacaggtgaaaaaccggcctggcattttacccctgaaataactgcaggatttgtacctaatccttcaccttttgaaaaaatgagccaggaaaaactcaatgctcaggccaaaattttactttatgcagcaggatatggggcgcaaaaacatcttaatttgaggcttctctataatacctcagaaaataataaaaagatcgctattgctgtggcttcgatgtggagaaaaaatctagaggtggaagttaaattacaaaaccaggagtggaaaacctatatcgacagccgtaataatggtaattttgatgtgatctgtgcctcttgggtaggtgactataatgaagcttcgactttcctgtcattgttaacctctactcattccgggaatatttcacgctttaataatcctgcctatgataaaatcataacacaagcaacaattgaaaacacgttgggggcgcgtaatacagattacaatgccgccgaaaaaatactgcgagaacaagcgcctattgctccgatttatcaggagactaacggaagactcattaaaacatgggtaaaagggtatcccattaccaatccggaggatatggcttatagtcgtacaatgtatattataaagcattga

SEQ ID NO: 394036 - DNA, 1065 bp, Salmonella enterica
atgagatcatggtttgatggagatagatctgaaggttttttattatcaccaggagataagtcaagttgtggtggttatatattgaagagcaaagagcactatactcttgagggcatggaaatagtatatgaaatggatgaatatgtatgtggggttaatggtcaaaaatataaaattaaaggtggtgtgcctagaggctcatggattgaaagagggaaagaaatatttcgtcggattcactttagttcctggtatagtgatatgaattctgaagggcggaaagtagaaccaccatcggtatcgataaagcgactcagagaagaaacatccttgttcagggggagaaccaattcactgaatttttctgaaaacggatttggacataataggtttctcggaagtgctggagggtcgataaatcttaggaaaaaaacaatcgttaatgatgaaaatgaagatattttttcacatagagcactaaattttagattccgaaccagaataaataatgaattatataatcataacttaaagatgggacatgatatgtctcaatacgagacggaaattatctgttcgctggctggttcagcacatagcagaggtacatgtccttgccattgtcgatttataccccacttaaatattacatacagatatgatgattatattttagcaaggtatgaagcagcaaatagatctcaaaactccacacctctaggccacacaacaaaacaaatttcagaatccaggcaatcagttgaacctggtttttgtgtagtaccagaattgacgacacctaaatcatatgaatgtgagttaatggttaatccaccatcaggagtaaaagagttatatcatcagttgaatccagaaaaaaagaaaaaggcaggttcaattttgattgttgccgatccggaaaaacaagatgcaaaacaaattaagattcttgaaacagcaagaaataaaatcgataaagcgcttgaaccattatcaaatgaagaagccaaactattgcatgataataaaacggcagtggatatttttttcatctcaattgcatag

SEQ ID NO: 394037 - DNA, 519 bp, Salmonella enterica
atgcggttaaatgatagtgttattaaaaaccttaaagctaccgaccaatcttactatgttttcagaaacgacggtattcgcggaaccgggcgacttgggatcaaagtgcatccttctggtcgcaaatctttcgtctatcggttccaattagacggcaaacgtaaattcaaaaaattaggcgactggcctcactacactcttgatcaagcaagccagcgttacgccgagttagcaggaatgactcacaaagtaagaactgaaaatttcgttaaaaaaatgtgctacgggacattgagggagatatttgcttctttcattgtatacaaagaaagagagggacacaggagtacggttaacgaatataaaatattattggatcaactaatcaaatgtggactaatcactggcaacgaaacggctaacgagatcactccagcacaggttactcagtggttacaaagttgggcaaaaaagggattcctggcacaagccgataagataagaaaaaaattcatgtag

SEQ ID NO: 394038 - DNA, 1158 bp, Salmonella enterica
atgctcaccgttaagcagattgaagcagtaaagccgaaagaaaaaccataccgcctactcgatggtaatggcctgtacctttatgtccctgtatccggaaaaaaggtctggcagcttcgctacaagattgacggtaaggagaaaatcctgactgtcggaaaatatccgcttatgactttgcaggaggcaagggataaggcatggaccgcgaggaaagacatctcggttggcatcgatccgataaaggcgaaaaaggcttcgtctaacaacaattcctttagtgcgatttacaaggaatggtacgagcacaagaagcaagtatggtcagtagggtatgcgactgaacttgcaaaaatgtttgatgacgacattttacctatcatcggcggccttgaaattcaggatattgagccgatgcaactgctggaagtaatccgcagatttgaagatcgcggtgcaatggagcgagccaacaaagctcgcagaagatgcggcgaggttttccgttacgctattgtcaccggcagggctaaatataacccggcacctgaccttgctgacgccatgaagggataccgcaagaagaacttcccgtttcttcctgcagaccagatcccggcattcaacaaagcactggcaacattttcaggaagtatcgtatcgctcattgccaccaaggttttacgctacacagccctcagaacaaaagagcttcgttctatgcaatggaagaacgtcgattttgaaaacaggattatcactatcgacgccagtgtgatgaaaggacgtaggattcatgtggttccgatgtcaggccaggtggttgaacttctcagtacactaagctccatcaccaaaccagtctcagagtttgtttttgccgggcgcaacgataagaagaagcctatctgcgagaacgcggtactgcttgtgatcaaacaaatcggctatgaaggtctggaaagcggccacggattcaggcatgaattcagcacgattatgaacgagcacgaatggcctgctgacgcgattgaggtgcaactggcacatgccaatggcggatctgtgcgcggtatttacaaccatgctcagtatctcgataaacgcagagacatgatgcaattttgggcggactggcttgatgagaaggtgacgtaa

SEQ ID NO: 394039 - DNA, 255 bp, Salmonella enterica
atgcaatccattgatagtaaaagtaagacgttaacctgcaaagcgctccgctgcgtcggtgtttttgactggtacagcgccattacctccgtcacggaatatcgcccggaaaccaaaacgatgttcatgtactcggccacagaggcaaatccgctcgtttccgttctggatgaagtcaaagacggtactcaggatgtgatgctggagctaaaagtgcacagtaattgtaccggtatgctgggctatcagcgctga

SEQ ID NO: 394040 - DNA, 1164 bp, Salmonella enterica
atgattttatctaaatatatcaagacttttatatgcttgctggtaatctacacagggctaatgtttctcacatttttgcttcctaacttcaatttagaaaaaaatattaatattgcacatcagatgtatgctacggatgggccttatcctgcaactattaaaggttttccacagacacagatagataatttcactgatctagaaattatggccccacggatgttggcaactgatagtgcaattcatcatgcgatggatatggataattatgcccgctattggcatggttatgcagttgtactgaagccacttttaagtttctttgaaatgaaggatattcgcttaatttacaatacagtagtgatatttttattatgctacacatcatattcaatagcaacatcagtaaacaagacctcttccattgcttttattttatctatggcagcaatgcatgttgagatttttggtttgtcacttcaaatttcaaatatgtttattgtgatgatgctgttcattatatttatttgtagaaataaaacagctttaatttactccaataatattatacctctatatttctttattttaggttcagtaatcaactttattgatttacttaccgctccggttgcctcactgtccatccctctgattattataattcttttcttatatgaagcaaaagccactttcatatcatctataaaaacgactatattatcctctattagttggggattaggctatggcttaacatgggtagctaaatggcttattgcatctgctattttggggcagaacgtttttcttaatgcaatccaatcaatgtttttcagaacagtaggtaatgagaattaccctatacatcgaatagacacaatactaaataattttacagctatgttttatagcgaatatatgctaattgcattagctgtcgttttattaatggctataattcttaaatctcacatttcattatctttatcattgcctttattgtttatatcattgataccatatatttggtacacgatactttctaaccattctcagatacataccttctttacttatagagcgcagggtggaacgtttatgattttcttaatcatgttagctgcaattattaggcctaattcttttaattttagaaaataa

SEQ ID NO: 394041 - DNA, 924 bp, Salmonella enterica
atgtttgatggtaaaaaaatagcagtcatagtgccatgctacaacgaagcgtcatctattaataaagttgtttctgatttcaagatgaatttaccagatgcggacgtttatgtttttgacaataattcttctgatggaacagcagatgcggcaaaaaggtctggtgctattgttaggcatgtagaatataaaggaaagggaaacgttgttcgaaggatgttcgctgatgttgaggcggatatttatgtaatggttgatggtgacgatacctacgaagctgccgccgctccaaagatgatcactcgtctgttagaagataatctggatatggtcgtagggacgcgcgttgaaaacggtgacgaaaaaacctatcgtcccggtcatcgcttcggtaacaagatgctaacaggtaccgtggcgacaatctttaagggatctttcagtgatatgctttctggatatcgagtattcagcagaagatatgttaaatcattcccatgtcattcacatggcttcgagatcgagactgagttaactatcaacgctcttgagttacgtatgcgaattggagaggtagcgacagcatatggggaaagatctgaaggttctgttagcaagctttctacatacaaagatggcataaaaatacttcacacaataatacaattatatgcatatgagagacctttattcttttactctctcatagctatattgtttgcaatagtatctctactcattggtgggccggtattgacagaatttttttctactgggttagtgccaagactcccatccgctattgcagctgcctctataatggttatggccatgctttcattgatgtgcggtattatatctcacctgattacaattagtcggagagaaacaaaatatcttgcatatctgtcaataacaaagtga

SEQ ID NO: 394042 - DNA, 324 bp, Salmonella enterica
atgaataagtttacatcctttttagctgtcgttttttttatctcggctggcgtaaacgctgcagagaaaatggagtcccgtcagttatccgccacggcgcatgaaatgatgaataacagtgacgccttcgcgcatcagcaaatggctcagacacagaaaaccagcgccccgactaccgtggcgcagcggcaaaatgcgacacccttttctgaaatgaacgaccatgaaaaagcaatggtcatccatcaatcgatgaataatgcccattctttcgcccacgagatccaggctgaggagcaccataaacagattaaacgcaattag

SEQ ID NO: 394043 - DNA, 447 bp, Salmonella enterica
atggaatcctcaaatattgataaattcgatcaaattgcaggtcgtgcgtttgccttgctttatgaatcctttccgacacctcgccctctgctgcccaaggattttcttgatgataacctaactgtcgaagatgactttatgggggaaataccctcaccagaatccatctttgttctggactcccttacatggttactcaacagcggttttatttctgcagccagacacaacagtggcttatcaaacgctgttttaactgtcagaggacttgaagtactaaaacaacgtccacattcagtttctccttcagaacctgaaataacccttggtgctcgtctgatgaaagccgtaaaaactggcagcggaaaaatgattagtacagcagtaaaccaggcattaagtattggtgtcagcatcttacttaggcagcacggatttagtgagtag

SEQ ID NO: 394044 - DNA, 222 bp, Salmonella enterica
atgtcagtccttattagtagtgagatagaaaaatctaagcgtgaaagcgagattgttcaagaattacgtaacgttatagaacaacaaatctatgcagagatggatcttgttcgggctagacattactggaaatgtcgtctgaagggtattgatattgaccttcttgcagaggcgttaacctacgcccttcataaggcatccatagtgaaaagagatgagtga

SEQ ID NO: 394045 - DNA, 300 bp, Salmonella enterica
atgaatatcaagcttcacactttaaagattgcccctaaatacattaatgacgttatagctgggcaaaagaaagctgaattaagaaaggatgatgatcggggttataaaactggtgatgttcttgttttgtgtgagtggaaacatgggaaatatacagggcgtgagtgggctgcagtagtaactcatgtgctgcctgttcgtgaggttatgaacgattctgataattgggtgatgctttctattcgcccgcttcaccctgttgatgccatgatttatgtgcttacaggtggtgatttatga

SEQ ID NO: 394046 - DNA, 858 bp, Salmonella enterica
atgagcaccatcctgaaatgggcgggaaataaaaccgctattatgccggaactgattaagcaccttcctgctggcccacgactggttgaaccttttgcgggttcctgtgctgtgatgatggcgacagactatcctcattatcttgtcgcggatattaatgctgacctgattaatatgtatcaggtaattaaagatgaagtagaacaatttattgctatctcaaaggctctctttacctgcaacaacttttccaaacagtattatgttattcgtgaagagtttaattatttgcattccttagacttaatctggaaggctgcttatttcctttttctaaatcgtcattgttatcgtgggttgtgccgttataaccgtgcaggacatttcaacgtaccttatggcaactacaaagcaccctattttcccgaagcagaaatccgcacttttgcggaaaaggcccagcgtgcaacgttcatatgtgccggttatgaagagactctgggtcagttgctgcctggtgatgtggtttactgcgatccgccgtattacggcacgtttgccggttatcacaccgcaggctttaacgaggatgatcagtatcggctggcctctgttctggagcgtcggtcatcagaagggcatcacgttattgcttccaacagcgatacgctgctgatccgctcgctgtaccgtaatttcaccctgcacaaaatcaccgccgcccgtagcatgggtgtcgccgcgggtgatagtaaatctgcagttgaggttattgctgtttctgagccgttagtttggatgggcgttgattatgtggccggatgcgacaggactgtaacgcatgaggttctggcgtga

SEQ ID NO: 394047 - DNA, 1770 bp, Salmonella enterica
atggctgaacttgcttcacaaccaacgtctatccagtctatttataactggtttattgagaataaactttttgtgaatagaaggtatcaacgtaagttagtttggactctgattgaaaaacaaaaactcgtcgattcgattttgaaaaagtaccctgttccagcaatacttattgctgaaagggaggggacgcctggaacatatgaaataattgatggtttacaacgtcttcacgctattatgtcgttcatagagacttcctatgcaactctagatgataaaattttcaatcttcaattctttccaacagctcaaacaagagctgatgaaggcgtttttgaacctcgagttcaggatgaaatgatttctcaacgggatgtaggaacttttcttgattatcccttagctttgtcagtgatgagaaatgctactgaaaatgaaattaatgatgtatttgatagaattaactcatatggtcacagactcagcgatcaggaaagaaggcagtcaggtgtagagaacggtttttcaacaatggttagaaatatctcctgttcaattcgaggtgatgtttcaaatgatatattaccactccgcgacatgccttctattagtattgatttgcctttaactcggcatggatatttagtacaagctgatgatgtattctgggttaaacacggtgttttacgttcaaccgacctcagagacagtatggatgagcaatgtattgctgatattgccgcctgcgtgattttaggatttcctattgagagatcaaaagttgcacttgatagaatatatgatcaagaacgccctgaatatactcagattaattcagcgcttgaagtttatggagacgataagtttaccgaggaatttaagtattgtttggatgaaataattaaggtttgtgaatttgggcaatttactaagttgcgggaattgatttttcctgatgcaaataataatgcttacccttcagtgttctcaattttgtttttatcattctatgagttaattgttggcgataataaaaaagtaactaattattctgaattgaaaggtagaatgaataatattgttgaaaggataaatattgggcgtagggctgggagtgctgatgagaggagagcgaacattgatgctgtaaaaggggtcattggtgtgtcttttgtcgtatcagatgaacctcttcctatttatgaaaatcacaccggcatggatatcgaaaactacataagaagatctgaagttgaattgtcaacttatgagttgaaacaaggtatgctcaatttgaacgatcagaggactttgaatcaggatgttgtgcagagagtgatcaatactatatgtgcaatagctaataatggcaaaggaacattagggaaaattattattggcgtggccgatgatgatcgtgatgcggaaagagtaaggctactggatcgtatcgaaccaaaacgggttggtatgaaaaatgttgtaggcgtatctagggaagctagagctcttggtatttctaatgaagaatatctaactcgatgggtcaatgccataagaaactcagaacttacagaaccattgaaaagccatgttttgtcaaaaattgattataatgatttctacggattaggggttatcgttattacaataccacctcaacaaaacatttctgctgtaggccaagatattttctggcgagaggcggataatactgagttggcgcaaggtttgcaaatagcgacaattgctgcgagatttaattaa

SEQ ID NO: 394048 - DNA, 276 bp, Salmonella enterica
atggacgaatcaagaaatcagtttgaagaatggtttaaaaacaaatatcacgtctcaagtgacgtgatgaagattatgcatatcaagtccgaaattgcgtgggaggcatggcaggcgtctcgctcagctatcgagattgagtttccagcaaaaaatgatatctccagcgatgacaaccccattcctgacctggttgattgggatgatggaagaaacgctggaattcaggaatgcgcagaagccatccgcgccgccggaatcaaagtgaaggagtga

SEQ ID NO: 394049 - DNA, 246 bp, Salmonella enterica
atggctaccaacgaaattttgccggtaacacgcattggtcgcgccgatggtgattatggctgttactgcccacattgcggcaaccctatgttcttctcggaaagtgaacttgatgatattcgcggatcgcaatatcaacacacgagaatcatcagcctgctcacgggagaaaggtgtgacggctggttggaggtttcaactaatgcctgtttctcacgcattcttttcgaccaaggggaggactaa

SEQ ID NO: 394050 - DNA, 765 bp, Salmonella enterica
atgaccactattaccaaagaagaagttaaggcattcattgagcaaattgaatccgatttagctaatgggtgggaagcgcagatattcgaattgaagctggcgcgtatcgcactggcatcgctcgaagcggaacctattggcgctttccacattgccgatcagcaggtgggcggaacctcggattatatcaaggacggcgagtggcccatcgataatggagtcattgaggtatatgccgcccaaccagtatcgtatgtgcctgaaacgcttccatgtccagtgcatctggtgcctggtctgcgcctcggtaaagggtgtaaaacagaaactttattgacggtattgcagcgccgcgcagagtattacgccaagttggaagccatgacaccagaagaacgggagaaacatggcgccagtatagaagcattcaaagcgatgttgccgcaaccagcaccggtagacaaagaatttatccctaaaaatctggacaaagcgttgggagttgttggtgttgcgttacctgaatcaaaggaagagtttaatttccagacagagcgctggatacagcgtctcattgaccgggttattcgttatgccgacgaattcaaagagcatccagtgccggtagtgccggaagaaatgaacttttccaccgcctgcaactttgtgcaaatcaacggaatggcgaaggaggaccgggcaactcttgcaatgagagcatggaacgcctgtcgcgctgccatgctcaacggaggtaaatcgtga

SEQ ID NO: 394051 - DNA, 339 bp, Salmonella enterica
atgctggcgttgctgaaagacgggacgttcaaaagcgcctcacaggtggcggcctgtctggggctgacaccggtagagaaaacgtcggggagttcagtgcgtggcagaccacatatgtcaaaaacagggccgtcaggagtacgggctaagctgtatgttgcagcgctgaccgcgagccgctggaacaaacaagcgaaggctatctatgaaaggctggtcgcaaagggcaaggcgaagaaagccgcgctgggagctgtgatgcgcaaactggtgcatttatgcttcggcgtgttgaaaacgcggcttccgtgggatgaaaattatgtagctaccgcttga

SEQ ID NO: 394052 - DNA, 1215 bp, Salmonella enterica
atgaaatttgaacgccatcatgaaatattgaaaaaaattggcacgtccgggatcgtaaaagtctctgttctggcgaaaagtctgaacgtcacaaaagagacaattcgttcagatcttaatgaattggccagactcggttacctgacccgctgtcatggcggcgcgtttataactctcgattcgctggataacgtagcgaaaaacgaaattgcttacgcacttgaacattacgaaaaaacacagggcataaaaaagggtcgctccgatatgaaaagtcatgtatgtgtaattggatcatttaatgtcgacataatcagctatttgcccaggcttcccgcggtcggcgagtcgctgcttgccaataaatttattttttctcccggcggaaaaggctgcaatcaggcgttggcggcaagctacgcagactcagacgtacattttattactaaagtcggtgcggatcattttagcgaatatgctatcaattttatgaacgcctcaaaaatacataaaagcattatttaccagacccaggaaacgcaaaccggtactgcaacgatcctggttaatgaggacaccggagataacgttatcgctatctatcctggcgccaatatgactattacaccagatgaggtcgtgatccaacaagaagcgattattaacgctaatattgttcttctgcagcttgaaactaattatagcgcattgcgccaggccatcgctctggcgcaaaaaaatagtatcccggtaattattaatccagcgccgtataacgacggggttaattctattattgaaaatattgattacattacgcccaacgaaacagaggccggactcctggcagggattgaggttacagatattgcctccgccagagaggcggcaaaaattatccaccagaaaggtgtaaaaaccaccattatcactttaggcagcaaaggttcgttggcctatgacgggagaaaatttatctattccccggcgtttccggcagtagtcaaaaataccgcgggcgcaggcgatgcgtttaacggcgcgctcgcttcaagcctcgccaaaggcaaaccgctggagtctgcgctgtgctacgccagcgcctttgcctccctggcagtagagaccgctaacgcctctgatatgccggaacatgaatccgtcattcaccgtattcagagcacatcatatcagcaatctatctctagccattaa

SEQ ID NO: 394053 - DNA, 339 bp, Salmonella enterica
atgctggcgttgctgaaagacgggacgttcaaaagcgcctcacaggtggcggcctatctgggactgacaccggtagagaaaacgtcggggagttcagtgcgtggcagaccacatatgtcaaaaacagggccgtcaggagtacgggctaagctgtatgttgcagcgctgaccgcgagccgctggaacaaacaagcgaaggctatctatgaaaggctggtcgcaaagggcaaggcgaagaaagccgcgccgggagctgtgatgcgcaaactggtgcatttatgcttcggcgtgttgaaaacgcggcttccgtgggatgaaaattatgtagctaccgcttga

SEQ ID NO: 394054 - DNA, 264 bp, Salmonella enterica
atgactcaaagaacccatgttagtgtcgccagctatattcgtcagctggcaaaagccaacaatgtcaccgccaaccgtgatggcatgagccgcatagctgcgaccattactgcgcttgctgatgacgctgttgagctggataacgtcgagcaattgctggttaatctcaagaagaaaggcattctgagcaaatctgaaatcctgcagcttcagggccgctacttccgcgaacaaaggcattttcataagaaagtcactgcatga

SEQ ID NO: 394055 - DNA, 564 bp, Salmonella enterica
atgatttttgatccgttcggcgatttcgatactgcaggctatcttcaaaattcccttcagcttaaggagccagaagaggtcaaacgggcagagcatcttgcgtttgaggcaagtattgaaatcgcattcaattacttagctcaaacagaaactataaattatccgtctattcttaaagtccatgagatccttttctccgatttttatccttgggcaggaaaagaccgtaacgaactcgttcctcatcttgccgttttcaaaggctcgcaggataaccctcaccacatagtctttgagcgaccagattccatccgtatggctgtcgaatacgcccttcatttggcaaatgacaaaaaacgcttccgggaaaggccaggagaagtcatgggattattggccttcgcacatcctttcctcgacggtaatggccgtactattttgctcgtgtttatggaactcgcctttcgggctggttttaccattaactggtcacagacaaccaaaaatgactacttgagggcgctcagtgacgaaatcggcgaaccattgaccttccccctgtaa

SEQ ID NO: 394056 - DNA, 183 bp, Salmonella enterica
atgtgggcattaggaatgttaacagaagaaattggcggtattggtgctggattatgtcttgtcacaggaattgcgtcgggtatagctggttcaaaagttgcggaaggtgtaggtgaggatgcaggagaaaaatatagcaaagaatatggagatgttatatatgaaaaactttttaacaaataa

SEQ ID NO: 394057 - DNA, 984 bp, Salmonella enterica
atggctagtgcaaaccaactaaaagcgttagtaaaaaattttatcgcacgcgatgatcgcaagtttttgactgtagtactacagattgcagctcatgaagcaaagataggtcatggaaaattcgccgatgagttgagattacttgtagaaaaggctaagttacaagctaacgaagggaacaattaccctcgagtactttcgtcgagcactgctgtaataaatcattcctctaatgatctttttactgtttctcatccgactaataaaatttcagatgtcattctttcaaatgacgtcaggaataagatattgcgttttttagaagagaataaaaatgcatctaaaattaggcagtatggtcttgtcccgagaagacatttactactatatggtccaccaggtactggtaaaactttaacggcaagcgttattgctcatgaattacatttccctctttttactgtaagaatggattctcttataacgaagtttatgggagaaacatcgtctaaactacgaagtatttttgaatatatcaatatgaatagaggagtctatttgttcgacgagttcgatacaataggttcaaaaagaagcatgcataatgatgtaggtgagattcgccgtgttttaaatacttttttgcaattattagatgagcatcattctgatagtttgattattagtgcgacgaatcataaagaaatcctagatagtgctttatatcgtaggtttgatgatgtgatcgaatattctttgcctgaaaaagataacttaattgaattaattaagtcaaaatatcattcttttgaattaaacgtaaaagagtggggaagtttgttgagtagcgctgaggggctaagttactcagaggtttcaaaaagttgtgatgatgcgataaaatttgccattatcaataacttaaagaaaatagatcaaacagaccttcaaaaggttttagaagagagaaaagcatataaataa

SEQ ID NO: 394058 - DNA, 1809 bp, Salmonella enterica
atgttagttcagactttgaattacttcaatgaacactgtaataaaaagccattattccatttatttgggcaagagataaatatcagaacggcagtaataagtagaattaatttattcatgcatggtattagccagtttacaattaaatgtggcgatagcctattagaaccaaaataccttgttggaagtgcaggcccattttggagccaatatgataaacaacttagaaaatttgatgttgtattaggccatccaccattctctcaggggaattggggcagggaagatatataccatgatccatttagacgattcatttacggtatcccaccacaacataatggagactatgcatttttatcacacatgattgctagtgcaaatgaaaacggtcgagttggtattatattaccgcaatcagctcttattcgaggcaatgcagaaaaggaaataagagaggaaataattacaaaagacttaatcgatgccataatagctttacctccaggtttactttatggcacgggagttcctgtatgtatccttattattaacaagaaaaagccaaaatctcatataggtaaggtattgtttattgatgcatcaaataactttgaatcatctcgtaagatgaattttcttagagattctgatgcagagaaaattgtatatgcctatgagacattttcaaataatggtacgttctgtaaattaattgatgtcgccactctcgtaaaaaataattctaatttaaatgttcgtagttatgtagatgactcagaggtgtcaaagcgaattaaagatcttttacgtcatcattcggatttcaaaaggtattcattttctgaccctagtttaatattatcaatcacaataccaaaggaaatagatcatatggatgttaacgcgatttacatccataggagctcaatcgctcagcgtttacaatacaggcttccctctgatgtaaaaaatacaagaaattattttagggtggaaataaattctgaattgttgatgaaagaatatgcaagcctttattttcaatcggagcttggacgattgatgttgtcccatttacctatgggtactagcttgcctattttatctatggactatgtaaggaatttggaaattcctgttccacccattgaaatacaggaggaagtagttaggatagctaataaattagaaatagctcgagacagcattagttcttttttctcccagctcacaactgagccaaagcaatatgaattcattgaaaacattacagatgagatgatttactcattatctagtttaagtgatgaaacacacttgaaacatattatagaggggggtgaaacacggcgcgtagaatttaaacagtctttttttgccaatgttgataaaattatgggtgaagaaagaaacatagaaaaagactcaaaggttcagtatgaaataataaaagatattgcttcctttatgaatacagatggcggtacattgcttataggtataaatgataaaggtaaggtaattggtattgagcgtgaaatggcaagatttaaatttaagaagattgataattacttccaagagttaggtgcccaactaggaagtcggctgtttcaagattatcaacagtattgcaaattaatagaggtaaaaattgatgggatcattgtcgtgaaaatagattgtcgacctacatccttccctgtttttttggataatgaaaagttccatgtgaggacggatacttcatctccatgcttaactggtattgaaatgttaagatatatacaaaatagatttaaatga

SEQ ID NO: 394059 - DNA, 603 bp, Salmonella enterica
gtggatctcgccaccttcgcccgcgagggctacgaagcgcagctcgccatcagctatatctcgctgattaaccatatcaataacctcggcgagcgtgaccagcatctggcgcggcccatcgtcaacatcaccgacgaggcgcatatcatcaccgtcaatccgctgctggcgcgctttctcaccaaaggttccaagatgtggcgcaagcttggcatctggctgtggctcgccacccagaacctggcggactttcccgacgaggcgaagaagctgctcaatatgattgagtggtgggaactgctggtcatgccgccggaggagatcgatcaggtgtgccggtttaaggcgctgaccgaggagcagcggcaactgctgcgctcggcggtgaagtcgccggggcaatataccgagggcgtggtgctgtcgccgcgtgttgaggcactgtttcgggtggtgccgcccgcgctgtatctggcgctggcgatgaccgagaagcatgagaaggcggaaaggatgcggattatgcgggagacggggtgtagtgaggtggaggcggcgatctccgtatcacaggctgagcaccgctgctctaaaattaaataa

SEQ ID NO: 394060 - DNA, 1923 bp, Salmonella enterica
atgctgctggaagatggccgctcggtgggcgcagtgtttgaactgaatcccgttggcaccgagggccgctccacggcgtttctggaacaggcgcgcgataccgttaccgacgcgctgcaggatgccttcgacgagcacgagcgtgcgccgtgggtggtgcagtttttctgtcaggacgaggacgacagcgaggcatggctggcggcgcttgctgcttatgcggccccggagatccgccactccgcctttacccgcgagtggctaacacagatgaccaagcatatggccgcccttacccgcgaagagggcctgttttttgacgctgcggtcacccgcacccgctggcgcgcgacgtggcgacgcacgcgcatggtggtgtatcgctggctgcccgcgccgtcgccggacgatatcacgccggaagaggcgctgaaccacgtctgcgaacggctcaccgccgggctgaaagcggcgggcatcagcgcagtccgccagaatgaacaggccattcaccgctggctggtgcgctggtttaacccggcgccggcgacggaggataaaaaggccttctggcaacggctggatttaccggaagaagaatcgctgcccgtcctgaccgacttcgccgaacggctgctgacgagcgaaccacgttcggacgcggagaatggcgtgtggtggctggataaccgcccgcataaggtggtggtggtcgaccgcctgcgcaaagcgccgccgcccggcctgctgaccggggaaaccgcgcgcggcgacggcgttaacgccctgtttgacctgctgcccaccggggccatcatgaacctgacggtggtggtatatccgcaggataagctggagcagcatctcagccgcctcgccgaacgcgccatcggcgacaacaccgactccgaatacacccgccgtgactgccacgaagtgcgcagctacctgaaagacggtcataagctatactgtagcgcgctggcgttttacctacatgcgccggataccgatgccctgttccgccaacagcgccagcttcacagcctgctgctcaatgccgggctggtgccggtgcaggagcagcatgaagtcgcccccttaagccactggctacgctggctgccgatgtgcttcgatcccctacgtgacccgcgcggcctgtatacccggctcaatttcgtgcagcatatcgctgggctgctgccggtgtacggacgggaaaccggcagcgggcatccggggatctgctacttcaaccgcggcggcgggccattgtgtttcgatccgctcaacaagctggaccgcgcccagaacggccacctgctgctgctcggcccgaccggggcgggaaaatccgccaccctcaatgccaaaatcgcccagctgatgtcgctgcatcgcccacgtttgtttatcatcgaggcggggaactcgttcggcctgatggtcgactatgccgccgtccacggcctgacggtaaacaaaatcagcctgcgtcccggttccggcgtcaccctgcccttgttcagtgatgcgtggcgactggtggaacaggcggtcaccgacgccgaaccgccggaggaagaagagaacgacggcgacgatcagcgcgatgtgctgggcgaaatggagatcaccgcccggctgatgatcaccggcggcgaggcgaaagaggatgcgcgccttacccggcccgaccgggcgatgatccgccaggcgattatcgccgctgctcacgcttgttatgaggaaaaacgccagacgctgaccgaggatatccgcgatgcactgtttggcctttcccgtgataccagtctgccagaagcccgccgccagcgggcgtatgaaatggcggaatccatcaacctgttctgcgccgggtttgaaggcgaactgtttaaccgcgcggggctgatgtag

SEQ ID NO: 394061 - DNA, 360 bp, Salmonella enterica
atgatgcgctacctcttcatacttctgtttttactgaccggctgcagcacctcgcaggaagaactgatgccggtggatcctgacgccaccatgctgagcctgtggcaacagcaaagcggcggcaacgccgcgctgctggatgcgcgcgcacggctacgccgcccgcccaacggcccgacagcgccccctgaagcaagcgccatccgcagccagtttccgcgcctgcccaacccggatatggtgctgtacgccttcccgcaccttaacggcaacacgccggtgcccggctacagcaccgtgttccccttctacacccgcccgcagtacgcgctgccgggcgaacgcctgacgccgccatga

SEQ ID NO: 394062 - DNA, 1290 bp, Salmonella enterica
atgatgccgcgccagagcctgttgctgaaaatcctgctgccgctggtggtgctagcgacgatctggctgctgctgcgcccggcggggaaaagcgcgccggataaatccccggcgcgcagcgtggccgccttaacgccgcaggagctgcgcgatctgggcattgatggcgacacgcccgccgataccgtcgctacgctggtcggccagatgaaacagtaccgtcgcgaactgcaggtgatacagaacgacagcgaaaaccagcagacgcgcgagaagcggctgaaagcgcaacaggcaacgctggccgcgcagttgcgcgaggatatgcgccgccagcaggatcagctgcgcagcgaactgttgaaaagccagcgcagcctgctggataagctcgaccagcttaatctgccgaccgtcggcgataccccgcccgggctggggctgacgcccggcgcgcttcccgccgacgtgcagccggaaatgcgctggctggagccgctcgacgcgccccctgaagataaaccgctgccgatagcgctgaagacgactcagcaggcacagccgaaaccggcgatcaaaacgtacaccctgccgcagaacgccaccctgaccggatcgctggcgatgacggcgctgattggacgcgtgccgctcaacgggacggtcagcgatccctacccgtttaagctgctgatcggcgaagagaacctcaccgccaacggtatcgaactgccggacgtggcgggcgcagtggcctccggcattgcgtccggcgactggacgctctcctgcgtgcgcgggcaaatcacctcgctgaccttcgtttttcacgacggcactatccgcaccgttccgcagggcgacaaatccggcagccagcagcaggcgatcggctggctctctgacgcgcgcggcctgccctgcattcccggcgagcgcaaaagcaacgctaaagagtacctgacctcgcagttcctgctggcgggatccggcgcggcggcacaggccttcgccaacggcgaaagcaccaccgtggtagaggacggcagcatcaccagcgcggtgaccggcgataacggtcagtacgtgctcggtcaggccctcggcggcgggctgaaggaaaccgccgactggatgaaacagcattacggccagatgttcgacgcggtgtatgtgccgccgggccacagggtggcggtgcatctcagcgaagcgctggcgattgactacgagccggagggccgcaaggtgaagtatcagcaaaccgcgacgtcgggagatctggaatga

SEQ ID NO: 394063 - DNA, 762 bp, Salmonella enterica
atgatgcgcctgttcctgttgctcctgttcagcctgccggcgctggcgaccgaagtcgtgcgctgggaacagatcccgctgccggtggcgctgcacgtcgggcaggaacgccgggtggaggtcggcaaaccggtgcgcatcggttatcccgccgggttggaaggcaaggtgcgcctgcaaagcgcgggcggaaacgtctttctgctggcgcatgccccattcccgcccacccgtatccagctgcgcgacacccaaagcggcgaactgatcctgttagacattcaggcgtcagagaatccgtctgcgcttgagccgatcgcgctcagctatgacgatcccgcccccgctagtacgcagcagcccgcgcccgcctcggacgaaccgctgcccgtattgctggtgcgctacgccgcgcagaacctgtatgccccgctgcgcaccgtcgaggcgctgcccggcgtcacgccgacgcccactggcctgaatacacagataaccaccctgctgccgcaacagcccgtcgccgccacgccgctggcggcatggaaagcggataacaccaccgttaccgccattcgtctgcaaaaccgcagcgggcaacgcatcgacctcgatccgcgcgaattgcaggggcagtttatcgccgccgccttccagcatgactggctcggaccgcacggcgcggcggaagacaccacggtggtttatctggtcacccggggcagcgccgcccgcgccctgttgccggagccgaaaccatga

SEQ ID NO: 394064 - DNA, 429 bp, Salmonella enterica
ttgaaccgttggccggataacggcgaagcggattacgcccgcaatatccgcgccctgcgcgcctacctgacgcccgcctgccagggctggctgaaccacgattttcaggtgcggcgcgacggcggcgaactgcgcgaccggacgcggggcatttatgaactgcccggccacggttacggcagcccggtgcgggaggataacgccgcgtcgcacctgcgcgtggaagtgctgagccgcgacagctggcgggtgacgctggacgtggcggtggaagagtattaccagaacgaaccggtgaaaaaggcgctggtgcgctacccgttacaggtggtgcgctatgccatcgacggcgaaaagaatccgtgggggctggcgattgactgcctgagcagcgcgccgcagcgcctggtggcggaggacaagccatga

SEQ ID NO: 394065 - DNA, 228 bp, Salmonella enterica
atgagccgttttcgccatgcgctggccgagcgcgacgcccatatcctgacgctcagggcggtgatcgccctgctatgcctgtgtctggccggcgtcggctacggctggtactccgcgccgcaaaagctgacgctatggttcccgccggatctgcgcagcggcagcacccgcccatggtgggaagtgccgcccgccagcgtctacgccttcaccttttatattttctag

SEQ ID NO: 394066 - DNA, 354 bp, Salmonella enterica
atggcgaccattattttccttcccgaccggctgaaccgcgcgctcatcgtctggcgcggtttgaccaccagcgaactgttgctggcgttgctgaccggactcggtggcggtgcagccctcggcgtcgcgctggccctgttttttcacagctggccgccgatccccgccgcagcgttggcgggcgcggcgctgttgattcagggcggcgggcgcattctggcgcgccttaaacgcggcaagcccgacagctggctgttacaggcgctgttcgcctggctggagcgccgtcacctgcgcggcgcacagctcgttcagcacagcgcggtatggaccctacgcaggagcccgcgatga

SEQ ID NO: 394067 - DNA, 234 bp, Salmonella enterica
atgactgaagcacagatcgccgcattccaggccgccagccagagcaaaccggaagccgtcaatctgctgatgctcggcctgtttgccagcgccatgttgctgtggtgcgcctggtcgctgctcaccgcctggcagggcgtctgccgtcagcggttaagctggcaaagcttcggcgcagtggcggcccgctcgctgctgttgctgttggttagcttctggctggcgttgagctga

SEQ ID NO: 394068 - DNA, 309 bp, Salmonella enterica
atgcgcagctgtttactatttctgttactaactttatccatagggtcgcaagcctccgcctccccggaatccacccaactcgccctcgcgctaaaacagctcaacggcgtaaaaacctcgctggatcgcgccagaaccagcgctaacaccgatccccaggcgcgttactacttcgactacccacaggcgcagcgcgaccttgccgccgttgagcagggcattcagcgctacctcaccccgtcacgggcgcagccacgcgccgttcaacccctgagcgccagctatcagcgggagcacgccaatgactga

SEQ ID NO: 394069 - DNA, 1359 bp, Salmonella enterica
atggctattagtcaccaggcccatgctatttatgttgatgctatggcagtggcgtgtaacgaacttgtaaagaataaaagcttaactcaggcaagaaatgcattttatctgagcataaaaaatcaaaaaattcctgctggaaacccaaaacactctcgtgagcaagatattctggattattttgaggttcatggtgtgttggagcttcagcgtaaactgaagagaatgacaaatactgtgcatgataaaatttatccagaagagcaacatgaaacagtgaagaaaatacccgttgcgaagcaaatcaaaagcaaatcgtcagtggtgggtgattcttcggataaagttaaatataccgtcccaaaattagatgttttggatgctgataaatctgtgtctaaaaaaatatctgctgttaaggttgatagcgccattttatgcattatatgtcgtaaaaagttcggaacagtacaaaaacttcataggcattacaaaaagaaacatacacgagctgccatccgaaatttagaatccggtgaagaacaccgcttagccaacgttgcatcaattgaagctgacttgaaaaggcacagaaataaagaagaaattagggaagcattacgcaaacaattggccccctctccattagatgaacttcctgcctataatgctgaagcctatcgaatagctctacgcacaatgacgcaaggcgaagcctaccgactcgctaaagatgcagcacgctctgcggcattaattgagaagtttaatcagtcaattgcaagctcactggaaacccaaacgtcacataatgctgaaagtatgttgcacgtaacgaaagtgttagggaacgttactgatcactataagccaactgaaacaggtgacaacctcgtccgtcgggcgaaagaagagcgaacgcaaagagatatactcaacactctgctcttacaggacgatgtaaaagaaaaagcgttatttaccgaacgcacagtaaaagcacgtagtaaccagacagattttgcgaaacgagtggcttcaaacttctttcataagtgctgcataactggcagcactgaacctttagaggctgcacatatcgagcctcttagcatgggtgataataataatacgtcgaatggtttacttctgattgcctgcttacatcgcttgttagattcagggaaaatggctattaatcccgactcccttaccgtgcatttttctgaggactgcgcatggtttggagctaaaacgtttaatggaacacgtattgccagaccacgaactccacttaatataacaggacttaaacgactatgggacacgttcatgacgaaccatattgatcgacattaa

SEQ ID NO: 394070 - DNA, 648 bp, Salmonella enterica
atgagccagcagcgcgcgccgtctgtccgtccgccacagggagcggttggctggctgctgtcgctggcgggacgggttatggggctggtggtcggggcactgctattgcgggtgacgcttgaactgctggggttatatttctggtggccgcaagaggggatcaggcatgtttttcaggtgatgcgacaggaacaggctgagctggttagcgcattacggccccatccgctggggaaagagatagtggcgttactggaatatggctacacgcacttccccaatatcagccagcaatttgctgcgcagcttatccagcaaaccatcactaccctgacttataccctgatgagctttatgctgcgcctggcatggctggcggcgatgctgcccctgttttgtctctgtgcgctcactggactggtggaaggcttggtgcagcgggatctaagacggtttggcatcgggctggagtctttatttatccatcggcacgtcacccaggtcggtaattcagttgccataacactctgggtattttatctggcacagcctcttgcgctacccgcaacgctgtttttactgcctgcggctatctggttcggtataacggtacggatggtggcagggagttttaaacgctggttataa

SEQ ID NO: 394071 - DNA, 2019 bp, Salmonella enterica
atgagccgttatccgctggaagcgctgctgcgcccgcccgttgagttttacagcgccgtcaccgccctgtgcgccgcgctcatctgcctgcgctgcgcgccgttactgatgctcaccgcctggcagagccggctgatggtctgcgccctgatactgctggcgctgcggcgcggctggcagggatggcgaatcgtgcgctaccagcgcaatctgctgcgcctgccgcgctacgcgctgaccagccagcaaatcccggtcagccgcgcccgtctgtttctcggcaaaggcttccgctggcagccgatccatacccagcggctgtatgattgcctgcaaccggaagctgcgcgttggctgcgtcccggcaaatgttatcacctggcgcgagccgtggaaaaacgcggcgaacaccgcttgccgcgcctcatcaggctgctgagcgccgaccactggctgaatccggttcgccctctgccgcccgtcggcggcacgccctggctgcatggcgtggagctcaaggagagcgacgtcaccctgccgctcggcgagcgcgtcggccacaccctggtgctcggcaccacccgggtaggcaaaacccggctggcggaactgctcgccacccaggatatccagcgcggcgacgtggtgatcgtcttcgatcccaagggcgacgccgatctgctgaaacgcctgtgggtggaagcaaagcgcgccgggcgtgacgatcgttttatcctgttccatctggcgtatccggaaatcagcgcccgctacaacgccatcgggcgctttggccgcatctccgaagtggcgtcgcgcctggccgggcagctttccggcgagggcaacagcgccgccttccgggagttcgcctggcgcttcgtcaatatcatcgctcgcgcgctggtggcgctcggtcagcgcccggactatcagttgatcgcccgtcacgtggtcaacatcgacgccctgtttatcgactacgcccgcatgacgctgccgcgccataaccaacgggcgtgggaggtcgtcgcgcaactggcggagcggattaacgataagaacacgccgcgtaacctgcaggggcgcgaccgctacgtggtggcgctggagcagtatctgagcgcggagaaactttacgatccgatcctcgacggcctgcgctccgcggtgcgttacgataaaacctacttcgataaaatcgtcgcctccctgctgccgctgctggaaaaactcaccaccggcacgctggccgccctgctcacgccggattaccacgatctggacgacgcgcgtccgatccttgactggcagcaggcgatccgccagcgcgcgattgtctatatcgggctggacgcgctttccgatgcggtggtcgcctccgccgtcggcaatgcgatgttcgccgatctggtgagcgtcgccgggcatctgtataagttcggcctcaatgacgggctgccgggcggcaatgaaaaaccgctgccgataaacctgcactgcgacgagtttaacgaactgatggggccggaatttatcccgctgatcaacaagggcggcggcgcgggcattcaggtcaccgcctacacccagacgctgagcgatattcaggcgcgcatcggcagcgcgccgcaagcgggtcaggtggtgggtaacttcaacaacctgattatgctgcgggtgcgcgaaaccgccaccgccgagctgctgactaaacagctgccacaggtggaaatccgcagccgccaggtgagttccggcgtcaccgacacccctggcggcgtcaacagcttcaccagcagtacccgcgaacaggtcgttagccgtagcgtgccgttgctcgacaccgccgcgctgatccagcttcccaaaggccaggccttcgccctgctggaaggcgggcaactgtggaaaatccgcctgccgctaccggtggcggataaatgctggccgctgccggaatccatcgaacggctggcagagtggatgcgcacgcgccagcaggagcaagcggaatga

SEQ ID NO: 394072 - DNA, 438 bp, Salmonella enterica
atggcgcgaagtgttgccctgatcctgttgctgccctggttcacgctggctcaggcattgccggcggcgtaccggcaggcggcggaacgctaccgggtgccgccggaactgctgtgggcggtggcgcagaccgagagcggcgcgcggctaaacacgcagcgccaaccgtggccgtggacgctgaatatcaaagggaccggctaccgctacgccagccgggagcaggcgtgccgggcgctgctcgccgccacccgcagcaccagcctgaagcgcatcgacgtggggttaggacagatcaacctcggctggcagcgcgactatttcacctccccctgcgacgcgctgcatccttaccgcaacttggcgctcaccgcccgcctgctgcgccagcgctacgacgaacgccccggaagctggctcaacgccgccgcccgctaa

SEQ ID NO: 394073 - DNA, 675 bp, Salmonella enterica
atgaaacgtcttgtcccgctgctgttgtttagcgccggtttgcaggcccagccgctgccggtgcagaacagccagaacagcgccaccgccctgcaaccgctcaccacgcaacaacaggccgcggtatggggcatcacgccgcaggagtggcagcgttacctgacgctgaaacagcaggcgcgcggcgtctggtcgccggggctcgatccgctgaccacgctgggcgttggggcggaaaacgaccaggaacgccagcgcttcgccgaactgctggtgaaacaggaatatcagcggctggaaaaagagctggcctttcagcgggcgtatgacgccgcctggcgacgcctgtatccggggctcaccccgctgaagaccgcctcttccggcgcttcccgcgtctcgctgttcgtcaaagaacgctgcccggactgcgacagcctgttgcggacattgctggcgcaacgccgtccgctggatatctggctggtgggcagcaacggcgacgacgagcgggtgcgccgctgggcgctggaccacggtatcgacgcaaaacgggtagatgaacacaacatcacgctcaaccacgacgcgggccgctggttgcggatcggccagggcaaaatgccggtggcgctggagcgacagggggaacaatggcgcgaagtgttgccctga

SEQ ID NO: 394074 - DNA, 681 bp, Salmonella enterica
atgaaactgctgttggctattatgctggtgctgatgctcatcgccgccgatggcgtcgtcagcgcgtcagaatcggcccccgccgtagtacgctatgaccgctacctgctggtcaacaccgcgccgacgcagccgccgctggagcagctcaccaccctgacggtgccgcccggctttcatcccgatcttggcgaagcgttgcagtacctgctgcgcgacagcggatattccctgtgcctgcccgacagccagcgcgcccggctgtacgccttcccgctgccgctcagtcagtaccacgttggcccgctgcagctcaaggccgcgctacagatgctggcgggaacggcctggcggctggatatcaacgacgcccggcgcgaggcgtgctttacgccgcaaagccaggcaaccccttccctccccctgacggtcaccgaccgtcgtcccacgtcccgccacgttttggggccggcaacggccccgttttttctggccgggacgatgcaacgcggcgaagtgcgcctggcggtgatcgtgccgccggaggcgcgctacctcaatcagacggtgtggctgcgtccgggcgagcaatggcgcggctggcggctggagcgactcggcgcacagcaggccgtgttccgtcacggcaaacgccgcctgacgctgaagataacggagtaa

SEQ ID NO: 394075 - DNA, 381 bp, Salmonella enterica
atgaataccgtatctgactcgcgcgcagaggccctgaatcggggcgacctgtttaatctcaatgacgcggcgctggccgccgggctgccgctggatctggcaatcacccttccggcccgcaaagtatgtctggaaggccgggacgagaacgccacaaaagaattactgcaaggcgttgaaatggcggcggtggtggcgtttatcgcccagacgccgccgcagcgcaccctccgcgtcgattaccaaaccgcactgacgctgaacaccaacggcagcgttcggcagcaaaccgtcaaactgacattacgcgttcatttcaccgaacgcggtactccctgctccgccacactggggttgttgggagaaaaatggccttactga

SEQ ID NO: 394076 - DNA, 2307 bp, Salmonella enterica
atgaaattcagccgcaacctgtacatcctcatcctgttcagcgccctcgcccgggctgactatcacccgactatcagcacaggcgtcacggttgccggcgatgtggtggacggttcgcagggcgatcagcatgtctatggcgtgcttaccgactcgacgatcgccagccagagcgcctggagcgacatcgccagcggcgggcaaaccgacaacatcctggtgacccagcagggaacgctgtttctggaacccggaagccaggcggaccacacccaggtgaccgacggcggcatgctgcaaatcaacggcgtctcccgcaatgcttacgtggaaaacggcggggaaatttatatcaacgccgggaaaaacggggtggagaacgcgttgcagggcggccaggccatcgacaccaccgttggcgccggcggagtgatgatcaaccgctacggcgtggatgccaatacccgcgtcgaagcgggcggcgagctggataccggctgggattatccgtatgaaatacgcaacaccgccctctcccgcaatgcgatcatcgaaagcggcggcgtccaacgggtaaccaacggcggcaccagcgcaggcagtctggtgaacgccgacggcagcttaatcgtcagcggcacgtggcattacgacgtggtgacggacgaacagccttccgcatggtatcggggaacggccctcaacagcaccgtttacggcgccatgcagaatctgggcggctttgatcaaaacaccaccgtcgcagccggcggtcaatatctgctggacggcggcgggatcgcccataagctgaccgtggatcagggcggcagggcgcaaatccatcacgggcagcttgaagacttctggctttacggcctgatgaacgttggccctgaggcgacgctaagcggcaacggtgaagtcggcgacggcggcgaactgacgctgaacgagggcgcacaaacgaataccctcgacctgacgctggcaggtacgctgaccctgcaaaaccgcggcgataatgcgccgcacgattatcaactgaatgatgtcgccttgaacgagggcgcgatctggtttgatcccgcctcgttcagcacgctgacgatgaccaccctctcgggctgcggatatttcattatacataccgatatcgccgaccagcagggcgactttctgaacgtcaccggtacggcgaacggcgatttcggcgtctggatcaaggataccggcgaatcccccgccgacgcccggtcgctgcaaattatccataccggcggcggtgatgcgcagttcactctgttgaatcccgatcagcaggtggatatcggtacctgggaatacgccttaaccccggatggccagggcaactgggcgctgacgccggagtccacgccgacgccctccaccgaagcggtgctggcgatggcgaacgtcacgcccactatcttccacagcgaaatccgcccgctgcaaaatcgccttgatgccgtccgctcacggccacacgacggcgagatctggagcgccgcgctcagcaaccgcgttgacgtcaagcgcacaggcaacgccgcttatcgccagcggctcggcgggctggttatcggttacgacgccagccggacgctgaacggcggcgtggtaacctggggcgtggcgggcagctacagccgttccagtctggatctcaccaacaacggcgacggcagcgtcgacagctacagcgccgcgctgtacgccagctattacgccacaaaccgcttctggctggacgggatgctgaaaagcaacctgttcaaccagcatctcaacgcccgcatgagctccggcggccacgccgacggcagttacaccacgcccggcgtcggcggcagcctgagcgcgggctatgacctcaggctggagaacctcaccctgtcgccgtttatcggcttcagcgctttcatcacgcaaagcgacgactaccggctctccaacggcatgcaggcgcagcccggcgtcgccaaatccgcgctggcgcagggcggccttcggctcagccagcaattcatgacccgccagggctggcggttgacgccctggctgaaggtggcgctggagcaggagctcgcccacagcaacccggtcagggtgaatgacgatcgcttcaacaatgacattgccggtacgcgaggcagctatcaggcgggcgttagcgcggcgttgacgcggcaaatgcgcctgtccgccactgtccagtaccagaaaggcgaagggatggagtcgccgtggacgggggaattggggttcagttacaccttctaa

SEQ ID NO: 394077 - DNA, 210 bp, Salmonella enterica
atggctaaacaaatcctgaccatcaccctggaagatatcgttcaccgtgaacatatcgaactgaactgctcgctgaagatcgacgccatgcacgaacccggctccgtatcggaaatcgtggcgacggcgtttaaatatcactacccgcagatcctgaaactatgcatggacacggctgatgatattgcccgtctgaatgctcgtcattga

SEQ ID NO: 394078 - DNA, 1359 bp, Salmonella enterica
gtgggccgcgcccgcgccgactggctggtcggcatcaatatgacccgcgcctgcacgctgatgagccgacggcacaaaggcgtactctccgtaggccgagtgcagacgccgaccctgcgcctggtggtggaccgggatcgacacatcagccagttcgttcctcgtcccttctggcgcgtggaggtgcggctgcgcagcaacgacgccgcgtttctggcccgctggcagcccgacgactcctgctgcgatgacgaaggccgctgcatccgcgaatccatcgcgcgtgacgccgccaggcggctgctacaggcacaaacggcgctggtgcaaaacatcaccacccgcagagtgcaagaggcgccgccgctggcgttcaccctcagcgccctgcaacaaagctgttcaaaactgtggggaatgggcgcgcagcaggtgctggatatcgcccaacgcctgtatgaaacccacaaagcgaccacctacccgcgcaccgactgcggctggctgcccgtctccatgcaccatgaggctccgcaggttttatctgcgctggcggcaagcgaagcctcgcttagcgccatcacgagccagcttgacctgcaacgccgctcacgcatctggaacgacgacaagatcaccgcccaccacggcatcattcctacccggcaggcggtggatctggcgcgcatgagcgacgatgaacgcaagatatacggactgatccgcagccgcttcctggcccagttcctgcctgatttcgagggcgacaataccgaactgcgcctcaactgcgccggtgaaaccctgatcgcccggggaagcacaaccgtcgtcaacggctggcggcaactatttacacgccagctggaccgcgacaggccagaggaagcgcagcgcatcccaccgctccggcagggacaaacctgtcaggtggagcaggtcgacgtgcgcgcccgccagacgcagccgccggaacactatacggaaggcacgctgattgcggcgatgaaaaacgccgcccgctttgtcaccgacccgcacctgcaacaacggctgaaagagagcgccggcatcggcaccgaagctacccgcgccggcattatccagacgctgcttaagcgcggttatctgacaaagcgcggacgctttctgctggcgaccgacaccgccggaacgctgatggaggccctgccggaaacgctgaaagatcccggcactaccgcgctgtgggagcagatgctggatgaggtggcgacgggcaacatgacgctggaggatttcctggcgcagcaacaacgcgccgttagcgcactgaccgcacaactactcggaaaccgcaggagcaacccccatggctaa

SEQ ID NO: 394079 - DNA, 426 bp, Salmonella enterica
atgcagctctacctgtgcgaaaagccctctcaggcgcgcgatatcgcccgcgtgctgaacgctaccgcccgccgcgacggttatctgtccggcgcaggccttaccgtcacctggtgtttcggccacctgctggagatggccgcaccggaagactatgacccgacgctgaaacagtggcgggcggagcgtctgccgattatcccgcagcagtggcggctgaacgtcaggccagaggcccgcaagcagctacgcattatcgacgcgctgctgaaacaggctaacgcggtggtgatcgccaccgacgccgatcgcgaaggcgaaaccatcgcgcgcgaagtgctggcgctgtgtcgctggcgtggaccgatccagcgtctgtggctctccgcgctggatgaaaccagcatccgccaggcgctgacgtag

SEQ ID NO: 394080 - DNA, 444 bp, Salmonella enterica
atgctgagtgatcacgactaccaaccctgcgcccgcaaaagctcgctaaagggccttttaaaggcctttaagggtaagggagaacttcaggcgttgttacaggaactgcgggagacgcaggcgcagctgctgcaactccagccgatgctgaaacaggcggtttatgtcctgccggtacactatctgccgctggtgctgtgcagcaacccggcgcgctccggcgtcagctatctgcgctggcgcaatctggataacaaccgttccggcagcgcggcgttagaggagatcctgacccggcccgacacctcgccagcgttgaggaaagcgctgctggcgatcgagcgccagcgccaggtgctgaatatgcagcttgcggtggtgacgtttatgcggcggcggatagggcaactcaccgacgttgatttagatttttcgctaaagtga

SEQ ID NO: 394081 - DNA, 612 bp, Salmonella enterica
atgcccggcgtcaccctgctaagcgatatccgcatcacgctgcacacccgcatcgccgccggattatggcaggcgcagcccaccagcctgccgctgtgcctggcgctgctcaaccgtctgctgcgcgccgaacagcatgacgatccgtgggccgcgcactggctgacccatatccggctgcggctcgatgtactgaactatctgctgcagcaaaaacatggcctgctcgaccgccgcttcgccgggctgccggaggccatcaacacgccgctcggccacaatcctgaacccatgcaattcacgctgccgctggcgctgttaaccccgccgggttcgcgcctgatgcagatcgtggccgggtacgatcgactggtatgccgcgtcctgctcgcctggcggctggatctgatctcgcaggaggaaaaaagcgacgtcctcagcaccttcccgcgcctgatacgccagctgtacagttacgtgaatcgctttcgcaccaccggcgttacccgcgacgatgtgcgtcacaacacgccgctggcgcagggcgttgcccgacgcctcggccagttgccgaaacgcctgctggtggatattcaacgccatgctgagtga

SEQ ID NO: 394082 - DNA, 879 bp, Salmonella enterica
atgacgagtaacccccaggaccggctgttgttcctcggcaaccgccacgaaacggtgccgcgccgtctgctgctggcgcgcaatctctcgccgcgcgacaaattcgcctgggaactgctgcgccttcacgcccatgacgtcagcagcggcctgttccccacttacgccgcgctacaatgctggctcgccgaccggcaagagcgcgaaaaagcctcgcgcagcaccgtcagccacgcgctgaccatgctgcgcctgacgcgctggctgagcctgtgtcagcggctgcgagacgccagaaccggccagataaccggcaatctttatgccctgcacgatgagccgctcaccttcgccgacgcctgccaaatggatgcggaatacgccgcgctgctgaccgcctgcgcccaccatcgtaacctgcgcatccgcgccaccgccatcgcgctgctgctggctcagcctgtggacagtggacgaatctgcactgagtcctcattcgggaccgggccaggtactcaatcagtacccggcgtcaacagcccgggtccttcaataagacccggtgatgcggcaagggctggcgggcgctcccgggccgcctgcgtacttactgctacagatctaaaaaccaataataaaaggcgtacgctaaacctgcgctggcctgtggataatcccttcagcgccagcgagcgccgggcggcggaacgcgccatgggcgggctggacgccgaactctgccagcaggtgctggacgactgcctgctgcggctggcgcacagcgatatccggcgtccgctggcctatctgcttgccatgctggagcgggcgcgtcggggagagttcaaccggctgcgcagacgccaccgcttgccatag

SEQ ID NO: 394083 - DNA, 558 bp, Salmonella enterica
atgacgccatcgattaaccaggcggtgcttactcatgtggtgcaggcgctgaaggaaggccatatccgctactgcgaatcgctcggcttcagcccgcaggagctctgcgaactgacgcgcctttccgccgacgacattctgtttctcagcaacagcccggtgcagtttatgcatcttagcgtcaatcacgacatgctgagcaaaatgctggcccgcaccgaacaggaacgccagtttcagcaacggcttgaggaggcgctgacgctcggcgcttccattgagttcatcaaccactacttcggcctctccaccctggaggtctgcgcccgacggcgcttgattggcctgttcgtgcgccagggccgcaatctggcggcggatgaagaaaccgaagcacgggtctggaaggcgtggaaaacggcacaggtgacaaagctggactccccgcaggcgctggaagccatgatgaccatcgcccgcgcccacgatctgtcgctgacggtgatctggaacctgctcaggcaatggcgacaggaggcgttgctgcatgacgagtaa

SEQ ID NO: 394084 - DNA, 1341 bp, Salmonella enterica
atgagcgcctcacatcttcttaatcgctggctgcacggtgccgccactgcggaacccgaaatggttcaggtcacgctggaacagatccagccgttcaccctcaacccgcgcgtgacgcgcaacccgggctatgacgcgctaaaaacgtcgattcgcgcgcgcgggctggataacccgcctgtgctcacccgtcgtcccggcgacgaaaaatatatgctggcgagcggcggcaatacccgcctcgcgatcctgaatgaactatggcaagagacgcaggaaacgcgcttttaccagttttgctggccttaccgcccgtggccgcaggacgtgtcgttgcagcagggggagcttcaatgcctgattggtcatctggcggaaaacgatctgcataacggcctcacctttatcgaacgcgccgaaggatgcctgcgcctgcgcgatctttaccgcaccgccggcataccttgcccgacgcagcaggcgctggcggagcagctcacccgcgacggctaccccatcacccagtccaaaattagccgcatggtgcagaccgtcgactggctgctaccctgcattcccgacgccctgtacgccgggctgacacgcactatcatcgaacgcctgctggcgctgcgcagcgcggcggaacaggtatggggtcggctggccccgccggaacaagagcaggacttcacgctgttgttcaacaacgcgctccgcgcgttcaacggcgaaccggcgggcgtgatcccacaactggtgcaggatgaactgctgggcgaaatgagcgctcacggcgggctcccttacaacacgctgctggcggaactgagcgacgggcagagcaaacgtcaggcactgctcggcccgcccgccgaaaagatcctctggccgccaccgcccgcaccggaaaaactgcccagagaaagcgctacgctggttgacgatgacgctctcactccgccggatgaagctgacggtgaagcggaaactaccgtcgagcgtcctgtcgaccatcagacgccgccgctgcacgcgcaaatcgcccaggccgcgcaggagatcggcgttatctggggactgggatcctgcatcaggcaggataacggggccgcgagcggattcagcgtcgccccctgccaggatttccgccatccggcggcgcaaaaaggctggcaggtgctggtagcgctgagcgggaaatacgtcgcgccgatgcccctgctggagctgctgctgtcgccagcgtgcgacgatgaacagatcccgcgcatcctgcggctgatcgggctgtgtcgtcagcaacggctccgggaggcgcacgatgacgccatcgattaa

SEQ ID NO: 394085 - DNA, 195 bp, Salmonella enterica; identical to SEQ ID NO: 190201

SEQ ID NO: 394086 - DNA, 879 bp, Salmonella enterica
atgaaaacctaccctatccggcaagagtggctgacgctggaggaagccgccgacgtgctgaaacaacacgacatcgccctgctgcccgcagacctgttccgccatgcgttgcacaaaaatctgacgctttccgtctggttccagtctccggcgctgctcaggccgttaacccccacctgccagttcgcctgcataaacaacgaaggcgagttctgccgcccgtcgcgcaggcaaaaaatcataccgttttcccgtccggaacgccccggtccgcagatgcgggaaacctgctgcaccctgtgggatctgccgctcatcggcctggagcgcctgctgattcaacaaaaaatggcgcattccctggtctgcccctgtccgcagcgcggccactgctgccgcgaagccggcatcgtcgtgcgcaatccggaggggcgttattaccagctttgcgagcgcaaaccgctgcgcgaaatcgctcttgagctcatcgaacagcgcggcaggctgcccgtgccgttccatcagttcatggctcgcctgtatcgccgtcatccagccttcctgcccgcccgcttacggatgccgttctgctacccgtccacctcgcttcctgaggatacgttattggtaatacgcaaaacgcagctggaggcattcctgaaacaacatctgccggagggcaaaccgcgcgtcaccaccgccctttcgcgcctgctatggctggcctgcaagaaaaacccgcagttggacgatgagctgctggcccatccctacaagctgctgaacattttcgaaagctgggcgcaggaggaaggtttgcgcgtttcgctcaacggcgacacgctgaagagcgccctcagccgtggcgcgccagactga

SEQ ID NO: 394087 - DNA, 1263 bp, Salmonella enterica
atgaaattgccagaagatagaaaagcgctttatcacttagtttggtctttgcctacaacagagattataaatcgatattgtattactgatgagcaattggctaaacattgcagtcattttagagttccccgaccattaattggatactggaaagctaaagaaaaaggtgtcgctccagagatacctccgttgcctgaatatattggtgatgatggactgcagttgaaagaaaacgttacaactatttcagtaaaagaatcaacggcatcatttggaattgctaagaaaaacaccagaataaaaggaaataagggaaaggttaaaaggatagtgtgtgatggtgaacatcgattaattaaagaggcgaggctttattttaaatctggaaggaaaagctatgagggctactataagccaagtaaaagaaagttgatagatatgatcgtgagcgagaccggatttgataaatcattgttatttgcttctaccttttttaatgaatgcctgaacataggatatgatattgggtttgacgatcatggcacagcgaatcgtcctaaaattgacgtgcgtgagcttgaccataaaaataataatcagtggtcaaatctctggaaaccttgctcttcgacaatacttctaattgataatattaaaattggtttgacaattattgaaatgacagaaaatgttccagcaaaatgggtgagcggagaatacgtaagagttaaacctggcgcgaaatccaggcgaacagaacagtatgaatggatttcaaatcacgacttaccaagtggaaggttatgtttatttgcatactctccatattatggaactgattggcaaaaaaaatggaaggaaacagaaaagaaatcactgaatgatagtattcaatctattatacgtgacttgaaaaaatcagtttctgagattgctgtgcaaataaaaaaggcagagtatgagcgagagcaggaggaatggcgcaaagaaaaaatgctaaaaaagcaaagtgaagcttattataaaagtaagaatgatttactttcgattatggaacaatgggctgagaaaaagcgtacagagcaattttttaaagatttagagacggaaatcgttaactcaaacattaaaaatccagaagatgtattcgaacgtatggcattggccaggcagtttctgtccaaagctacactgataaaaagtttaattaactggaaatctccagaggaaattcttgatgccgatgaagaatatggaaaataa

SEQ ID NO: 394088 - DNA, 171 bp, Salmonella enterica
atgcaaattaaaaatatgttcctgaacgtgaagaaattttttagttttaatagtttcgctatggcacttactgtgtttagcgaacgcttatgcgtcccggtgctgcgcattcgcggcaacacagtaagtgccatagcttatcataaaacatcaataaagtcaatttgttaa

SEQ ID NO: 394089 - DNA, 156 bp, Salmonella enterica
atgaaagatgatggctatcaacaacagcgcgtggcgtttgcagcgcctaatacgcttacagacgaagaccaattaatggccgttatcattttggaaaatatggatgattttctcctgctcagattatctttagatgatatcgagtcagcagaataa

SEQ ID NO: 394090 - DNA, 123 bp, Salmonella enterica
atgggctggcaaaagtgtagcggtattaggcgcagctatttaggagcagtgtacatcggaaaatacagccatatggcagatgccgggaacaaaagaatcgaaagaccggatcttgatgagtga

SEQ ID NO: 394091 - DNA, 282 bp, Salmonella enterica
gtgaggtgtcacaatacaaatgaagatggttcggtaaaaaatccaaatggctcggatgagtttaaattatataccgggtatgcagtgtcagctctaacggataacgatagtgatggtcaatatgatacgagtaacctgaaagcaggacttattgattttcagctaagtcatccaatgggggatagtggggctaactttaatttcggtggcgttgtcggtaaagtggaaatgaatgcaggtactatctcaaacgataaacagttatcaggatatatggtgtaa

SEQ ID NO: 394092 - DNA, 255 bp, Salmonella enterica
atggtcaaaatagacggtgatcgtgatggaaaggtgacggaagaggaaatcaggcaggcgctggtggtgcgtgatccgctggtaaggaatgtggtgagccgcctggtggtaaagctccacagtgagtggggcagaggtcgctcgacaggaagatgggaagggttctgcaaggatcttgacactgatgaagtggcctactgtgagaagtggcagttagatcaggagtggatgagtgaggtgtcacaatacaaatga

SEQ ID NO: 394093 - DNA, 918 bp, Salmonella enterica
gtggacttcctgaacggggacccggaccagccgataatcatggggaggacgtaccatgaggacaaccgttcgccggggagtctgccggggacgaagacgcagatgacgatacggtcgaagacgtacaggggaagcgggttcaacgagctgcggttcgaggacgccaccgggaaggagcaggtgtatatccacgcgcagaagaacatggacacggaggtgctgaacaaccggacaacggacgtgaaggtggaccacacggagagcatcggcaacaaccagcgtgtcacggtgggcacgggccagacggtgaaggtggggagcaaaaaggaagggggccacgaccagcgcatcacggtggcgaacgaccggagtgtcacggtgggcaacgaccagacggtgagggtgaagcatgaccggatggtgaacatcagccacgacgaggggctgtatgtcaaaaatgaccggaaggtgacggtggagggtaagcaggagcagagcaccaccggagaccatatcagcctggtgaaggggacgcacagtctggaggtgaagggggacctggcgaggaaggtggccggagcgctggggataaaggtacggaatgaaatcgtcctggagagcgggggcaatatcaccctgaaggtgggtggttcgtttattgtcattcatgcaggcggggtggatatcaccgggccgaagataaacctgaacggcgggggcagtgcgggagtgccggtatcaacgctgcaaccggcggtgctgagggcgctggccgatgaaagtgatgatggttccagtgcgaatgatgtggatgatgcgggtaattcagagacaccacggaaaaacgttcaggacacgtttaatacccccccgcagaacctggttccgccacaaattcagagaatattttcacgataa

SEQ ID NO: 394094 - DNA, 831 bp, Salmonella enterica
atgatcataaaaaggatttttataaatattcttttcatcgtgttatgttccaatcaagtctcggcagatgaaagcatttttattgaaagatatggttttggctttgaaagggatgtggatgggatgcctgtacgccatcctgctatcaattttgacgaatgtaagaaaaagggatgtgatgataatataagtaattctgaaaatattaaagttaaattaatggtaaggcaggagggtgaaactgtctccgcgcatgtcaacttcattaattacagtggagatgaatatttcttaccaaagtattattatcccataaccatcgtgaatggggccggagaaaaacgtcatgcgatgtgttcagaaaaattcattatcagttctgaagatactgctttagattatttgagtgggacatgcccttttgatcttagtataaatatagataggtgggtaagtattaaacccaaaagtgaaatctctttaaaaataaaattaaacgatatatatgcgtttatacctgaagctagttattattttatgaaagtgtctgggtataaactggttaacaaaaaatggtttatttctaaatcaattaatgattcattcatttccattttggaattaaaggtaaattgtgataacgaacactttggaaatgttgtggagcatttatcagtttgcgagtgtcatgtttttgataaaatcactcatgatttaattatggggatgattgaacaatgggggaacgatgatgaaagaaattcaattattgttggttcagaacaagtggttgtaaggattgatggaaggcaagtaaaattgccctattga

SEQ ID NO: 394095 - DNA, 807 bp, Salmonella enterica
atggaagataacgatgaccaatttactcctggagatacagagccagaatcgaaagaatgtgtaaaggagcaacaaataactgatcattttaaaataatgattaataaagcacgcagagctcaaaaaatggttttaataaaaagagctgatgaccttttgagctggggggctcaagaagaagtggacttttcgaacatcttcggtgttaagggaaataaaataataaaagtaaggaagtatgggcaagattcaggtaagcgtatgcccgctcggtttttaatgatagatggagtaaggaggttaatgatattagcaaatgatttggcaatagataattacaaagatttcacaaagtgtaatgaatatgccgccttcgttagccctggtatggatgtaccttatattattaacataggtgggaattttgaatatagacaagggaggaagcaatccatatctgggaaggagtctcaagttgctaccttatgccatgaaatgtctcatcttcaatggtattataaggataataataaaggaggtatgtggacacaggattatatatccttaaaggaatttgcaacaagtagagcaaatgagatctcctatgaagcacatgtacaagttgcaaatgttttatttcgttccggtaatgatcagatttttgaaaatgcttataatattgaaaggtattttgaagtcaaatttgatgataacgctattgacgcaagcaatgatgatgcattgagtagtgaggttagtaagaaaattttagagttagaaaatatgctaaaaacgttaaataaatag

SEQ ID NO: 394096 - DNA, 1029 bp, Salmonella enterica
atgacgatacggtcgaagacgtacaggggaagcgggttcaacgagctgcggttcgaggacgccaccgggaaggagcaggtgtatatccacgcgcagaagaacatggacacggaggtgctgaacaaccggacaacggacgtgaaggtggaccacacggagagcatcggcaacaaccagcgtgtcacggtgggcacgggccagacggtgaaggtggggagcaaaaaggaagggggccacgaccagcgcatcacggtggcgaatgacaggcgcatcacggtgggcaacgaccagacggtgagggtgaagcatgaccgtgtggtgaacatcagccacgacgaggggctgtatgtcaaaaatgaccggaaagtgacggtggagggtaagcaggagcagagcaccaccggagaccatatcagtctggtgaaggggacgcacagcctggaggtgaagggagacctggcgaggaaggtgtcgggtacgctggggataaaggtggaaggcgatatcgtgctggaaagcagcagccggataagcctgaaggcgggcggttcgtttattgtcattcatgcaggcggggtggatatcacggggccgaagataaacctgaacggcgggggcagtgcgggagcgccggtatcaaccctgcaaccggcggtgctggaggcgctggcggatgatggtgaggatgatgacgcggaagacggagaggataacggcgacggaggtgatgacggggccgggggcgggagaggcgatgattcaggtggttccggaggtgatgatgccggtgatgatgaagacgaacaggaaaaatatacccttcagtttcattttacggatgatgacggaataccgtattcagagacgcgctatatcgcctattttgaggatggcacggagacgcgtggagaaactgataaagaaggatatacagaaagatttatgactgatagtaaacaacagattaaagtgaaattattgttcgctaacaataattacaacacatcagaggggcattatggaagataa

SEQ ID NO: 394097 - DNA, 159 bp, Salmonella enterica
atggccatatggccatgtttaatgggcagcaatgggtttcagattttaaacaaaataatggttattaccctggtggtgattaccgaaaagcaaagcctgcatgtgtcttttatcgacataaagatgccactggtgacggatcgcagagtaccaatgtaa

SEQ ID NO: 394098 - DNA, 795 bp, Salmonella enterica
atgacgatacggtcgaagacgtacaggggaagcgggttcaacgagctgcggttcgaggatgccaccgggaaggagcaggtgtatatccacgcgcagaagaacatggacacggaggtgctgaacaaccggacaacggacgtgaaggtcgaccacacggagagcatcggcaacaaccagcgtgtcacggtgggcacgggccagacggtgaaggtggggagcaggaaggaagggggccacgaccagcgcatcacggtggcgaacgacaggagtgtcacagtgggcaatgaccagacggtgagggtgaagcatgaccgtgtggtgaacatcagccacgacgaggggctgtatgtcaaaaatgaccggaagatgacggtggagggtaagcaggagcagagcacgacgggagaccatatcagtctggtgaaggggacgcacagcctggaggtgaagggagacctggcgaggaaggtgtcgggagcgctggggataaaggtggaaggcgatatcgtgctggaaagcagcagccggataagcctgaaggcgggcggttcgtttattgtcattcatgcaggcggggtggatatcatggggccgaaaatcagtctcaacagtggtggcagtgcggggacaccggtaccgaccctgcaaccggcggtgctgagggcgctggccgatgaaagtgatggcgtttccggtgcggcggcggcggcgccatggaaaaacgtccaggatacatttaatagtccccgggaggatctggtaccgccgcaactccggagaatattttcacgataa

SEQ ID NO: 394099 - DNA, 1395 bp, Salmonella enterica
atgtctaatattatactccctgtagtcatggctggtggagcaggaagccgactatggccactgtcaagagctttatatcccaaacaattcctctcacttacatctacaaattcaatgcttcaagaaacaataatacgacttgaaggaatagaacatgaatatcccttgtttatctgcaatgaagagcatcgatttatagttgcagagcaactccgtcaattgaatatagatcatagtggaattatccttgaacctgatgggcgtaatacaggtccggccattgcgctagctgcttttcatgctcttaataatggatatgatccagtaatgcttgttcttgcagcagatcatgagattcaagaaagaaaaaattttatagattctatagaaattgcaaaacaatttgctgaaaatgataagcttgtcactttcggtatagttccagcctctcctgaaacagggtatggatatataaaagttggtgaaaacatagggcctgatggatataaagttgctgcatttgttgaaaaacctcatagacttttggctgaagaatacataaatagcgggaagtatctttggaacagcggaatgtttatgtttaaagcatctgtatttctaaatgagttaaagaaatttcgtccagatatttatagcatttgtgagacttcacttttaaagtcagagagcgatctcgattttatacgagttaatggcaaagtattcaattgttgcccatcagagtcaatagattatgctgttatggaaaatactatgcaagcggtagttgttccgcttgatgcaaaatggagcgatgtaggatcatggacagctttatgggatattagtaagaaaaatgaaaatggaaatattatacgcggtgatgttatagctaaagatacaggtaattgttatttgcattcagaatcacggcttattggtaccgttggagtcaaagatttagttatagttgaaactaaagacgcagttttagtcgcgcataaaaacaatgtacaagatgttaaaaatatagttgaacaattaaaaatccaaaatcgacaagaataccttcatcatagagaagtttaccgtccttggggaagtcatgatgcagtggctgatggtgaacgatttagggttaaacatgttacggtattgcccggtcatgccatatccaaacaagttcattaccatagagctgaacattgggtaattgtgagtggaacagctcgtgtatatataggtgatgaaaattttttattgggagaaaatgagtcgacatttattccggtcgggactgtacactctattgaaaatccgggtaaaatcccactagagattattgaagtacaatcaggaacgtatttgcatgaagatgatgttgaaaggtcttaa

SEQ ID NO: 394100 - DNA, 765 bp, Salmonella enterica
atgaaagtaagtattattacagctacgtataatagtcaagatacactaaaagatacattgctatctgttgagcaacaagattatcctgatatagaatatataataattgatgggggttcctcagatcaaactttgcagcttattaaaaaatactccacaagagttaaatgcctaatatcggagaaagataatggtatttatgatgctttaaataagggggttaagcttgcgaccggtgatattgtcggatttatacattctgatgatatattagcaagcccacaaattataagtaatattgtaaataagttcaagggaaatactgctgatatagtttatggtgatcttctttttgttaatagagaaaaacctgatattatacatagattttggcatagcggggaatttaagaaatctaagcttagatatggttgggctcctccgcatcccgccttttatataaggcgggaattatataaaaaatatggctgctttgatttggtttttaaaattgcagctgattatgatcaaatgcttcgtttattactagtaccttacttacaaatcatctatgtaccagaagtctttgttaaaatgagacttggtggagaaagtacgaagttaaataatgcgcttttaagtactaaagaaataattgcgataatgcgtaagcataatataaattggcaagtagcaatattgacgagaaagttaagtaaactttggcaaattttttcgaaatttaaaaggtcaaatatttcatga

SEQ ID NO: 394101 - DNA, 189 bp, Salmonella enterica
atggttaagtatattcttataacatccttattgagtgttggtgggcaacctgatgttaatacggctaagtttttcattgtgaattcagatcaggattgcattgccaaaatgggagagattcagagaccagctcacgaagaagggaggaaagtatacacgtggtgtgttcctgccattgaagaaaaataa

SEQ ID NO: 394102 - DNA, 1110 bp, Salmonella enterica
atggacggtgatcatgatggaaaagtgacggaagaggaaatcaggcaggcgctggtggtgcgtgatccgctggtgaggcatgtggtgaaccgcctggtggtaaagcaccacagtgagtggtgcagaggtcgctcgacaggaaggtgggaagggttctataaggatcttgacactgatgaagtggcctactgtgagaagtggcagacagatctggagtggatgagtaaggtgccgccgtttgataagggtgaggcggtgtggcattttcatccggtggtgtttttggcggcggttcgttcaacgactgggtgtgcttgcaacagagatataactttggatgaattaaaaaaagttgccccgacagtagatgaagaaattctgaaaagatatctctctgatataaacgctggttttacccggtttggcatgaccacttgtagagaaaaagctcattttctcgcacaacttatacatgaaagtggttattttagatacactaaagaaattaatggcgaatcagcgtcgtatagtccttggtatggccgcggtttaatacaaattacaggtaggaataattatactgcttatggagaatatatcaatgaggacgtgatatcctcagattcagcgagagataaacttatatcggctcctcatagtgtattatcggcattttggtactttaatatatttaagccagtggctgtatatgcaaaaaatgatgattttaaccatgttacagcattaattaatggtggttacatacattataacgacagattatctctatttaataaattgattctttctctgaatgctgaacatttgaataataaggaaatagatgagcattttacattcgagaatagcagtatatataataataaagtatattcgtttggttgggggttgtggcatgatcctgataactccaaacgaggcacagataagagtaaagaggaagcattaaaaggatataaaagaacgaaagagttgattgatttgcatccatttccccatgaaggagttgagagtagaagaaaaatttatggaatagagaaaagaaatatatctacatttgtagtcaggcggataaatgaactggagtaa

SEQ ID NO: 394103 - DNA, 405 bp, Salmonella enterica
atgaagcttaaaattttaattatcattttatgttttttttcattttcttcgttagctaagcaacaaactactgttggttgttttagttctggggggattaatttaaaatttaccgagatattgtatgataatatttttttaggttatgttatttatgatgggaaatcaaaattcataccacttgcgttcataaaaaagacagaggtaacttttgatgatagaccttcagagttcacttataaatggagcgaagttgtagatggtaaagtcaatggtttatatgtggttgcctcgcagggggcgagatttactagtttttattacaaatcaaatagcgggagagtaactgagtttgaagaaaaaatagaagcatataataacgatggttctgattgtatatggtaa

SEQ ID NO: 394104 - DNA, 300 bp, Salmonella enterica
atgggcaaattcgcggacacgacaggggttggctatgcagacgctgacaccagcctcatgcaggccatacgccagattttcatggtaaatacccgtcgcttccagtacgacagtcacactttcaggaacgcatttttgtgcgttcagccagtcgacaactttacgggcaatggcgggttcgttagtcagaaccttgtgcttttttttaccgccggggccggcagtaagcagacaaagatcgattttatttttactgacatcaataccgagagtacacacagaacacctcctttcacctga

SEQ ID NO: 394105 - DNA, 345 bp, Salmonella enterica
atgcgtgaatttctttatgttgatgatatggcagcagcatcggttcatgtgatgaatttaccaaaggaaatttatgataagaacacagcgcctatgctttctcatataaatgtcggcactggggttgattgtacgattcgtgaattagcagaaactatcgcctcggtcgttaagtttcgaggagatattatttttgatgaatcgaaaccggatggtacacctcgaaaattattagatgtttcacgcttagctaatatgggatggaggtggtcgacatcgttagaagaaggacttcaattaacttatgcttggttcttaaaaaaccaagaaaaattcagaaaatag

SEQ ID NO: 394106 - DNA, 261 bp, Salmonella enterica
atgcctgcttatcaagtatgtcagaattttttccgcgatgccttagctccgtttcacaaaaaccgacaaaatgccttactggatgccaccctcgccttaatcaacggcgcttcaccgacgctgaccagtatcggccgttatttacccggcgctgcccaagttaaaaataaaatcaaacgtgttgatcgcctgctgggtaatgaatcacttcattgtgatattcctctgattttcaaagacattattaatatgctgacgtaa

SEQ ID NO: 394107 - DNA, 633 bp, Salmonella enterica
atgcgactggacagcaaaggcgaatactggttcaggcgtcaggaattacaggccagcagcaagccagaatatctgggaccgggtacacttgcccgttcggaatatgcccgatgtgatggtcatttttatctgcataaaaaagagccgaaaggccagaaaaatcgccgctcccggtgccgcatagagcgtaaatcccagatacgggacggacactcttcggcaaaagaaccgtggctaatttttagcagtacgaatgactttaaaccccgcgaaatcatgaagttgtacagccgtcgcatgcaaattgagcagaacttccgggatgaaaaaagcgagcgcttcgggttcggtctgcgtgccagttacagtcgttcagcgggaagaatgctggttatgagtctgttggcgacgctgagaacaatagtcctgtggcttattggctatcatgctgaaaataaagggttacatctgagatatcaggcgaacagtctgaagtcgagaagagtcatttcatatctgacattagcagagaatatcctgagacattctccgctaattttaagaagaacggtactgagcaccgttcttaaccacttcgccagaacttaccgaagtatggttctggtttattag

SEQ ID NO: 394108 - DNA, 240 bp, Salmonella enterica
atgatattatttaagaaaattaaacactatctgtttgggtgtgataaatccgtcgaattgcggctggggccggcagaaatcctggtgtctgatgaaaatggcgttattcctgagcagggtggcaggattttgacacaggtgataattctggatgcaccgaagggacagattgagtgtgtttaccgtccgctgcaggtgaggcaggatggtggggaatgggaagacatcaaagggatgtga

SEQ ID NO: 394109 - DNA, 2115 bp, Salmonella enterica
atgttaaggatgactccgattgcttcggcggtattactgttgctactcggcattgacgcccatgccgcagaagaaacgtttgatacaaattttatgatgggtggaatgaaaggtgagagggtttctgattttcgcctcgatgataaccaacccctgccaggccaatatgatattgacatctacgtcaataaacagtggcgtggtaagtatgatattactgttaaggataatccggatgacacctgtttatcccgcgatgcattaacgcgtctggggataaatatacaagcgttggacaagcagaatgaatgcccaaccttgaagcaggcggtacaagggggcagttatgcctggaatattggcacgtttcgtctggatctcagcgttccgcaggcgtttgtcgatgaacttgagcaagggtatgttcctccggaaaactgggatcgtggcattaatgccttctatacctcgtactatgccagccagtattacagcgactataaggattctggcaacagtaaaagtacctacgcgcgtttcaccagcgggttaaacctgccgggctggcagctgcattccgatgccagctataacaaaaccgatgacagcagcggggagtggaaaagtaacaccctgtatttggagcgcggcatcccgcaaattctgggcactctgcgtgccggggatatgtatacctcatcagatatttttgatgcggtgcgttttcgtggcgtacggctgtatcgcgatatgcagatgctgccgaactcaaaacagaattttacgccgctggtgcaggggattgcgcaaagtaacgcgctggtcaccatcgaacagaacggttttgtggtttaccagaaagaggttccgccaggcccgttctctattgcggatttacagttggcaggcggcggtgcggatcttgatgttagcatcaaagaggctgacggatcggtaacaacctatctggtgccctatgctgcggtacccaatatgttgcagccgggtgtttcaaaatatgattttgcggcagggcgtagccatatcgaaggcgccagcaaccagaccgattttgcgcagatgagctaccaatacgggctgaataatctcttaacgctgtacggcggcaccatgctggcggataactacaatgcatttacgttgggtactggctggaatacgcgtatcggcgcgatttccgtcgatgtgacacaatcgcatagcaagcaagataatggtgatgtgtttgacgggcaaagttaccagattgcctataacaagtatttgacgcaaaccgccacccgttttgggcttgctgcctatcgttactcgtcacgagattaccgaacgtttaacgatcacgtttgggccaataacaaagatagctatcatcgtgatgaaaatgatgtgtacgacattgcggattattatcagaacgattttggtcgtaagaacagtttttcggcgaacgtcagccaatctttgccgcagggctggggctctgtatctttgagcacgctgtggcgtgattattgggggcgtagcggtaacagtaaagattatcagctgagctattccaatagctggcaacggattagctataccttttccgccagccagacttacgatgaagatcatcacgaagataagcgttttaacgtctttatctctattccgttcgattggggagatgatattagcgctccgcgcaggcatttgtatgtgtctaactcaacgacctttgatgatgacggttttgcgtcaaataataccgggctttccggcaccgcaggcaatcgcgatcagtttaactatggggtgaatctcagccatcaacggcaggacagcgagacaacggctggcggtaatctgacgtggaatgcgccagttgcgacgcttaacggtagctacagtcagtcgtctaaatacacgcaaactggcggcagtatttccggggggctggtggcctggtctggtggcgtgaatttagccaaccgactctcggaaacgtttgccgtgatgcatgcgccgggtctggaaggggcgtatgtgaacgggcagaaataccgtaccaccaaccgtaatggcgtggtggtctacgatgccgtatcgtga

SEQ ID NO: 394110 - DNA, 372 bp, Salmonella enterica; identical to SEQ ID NO: 393852

SEQ ID NO: 394111 - DNA, 243 bp, Salmonella enterica
atgaaaaaaagtaccctctatgcgacaacggttatcaccgttgggctgttatgttatttaggtttgtccgggtatgtatggtattacgacaaacagcgcagtaaaaaagcgatgtgcaggcctcggttgtgggtgaaaataataaaatactgggttatttcagagagaaaggatgtgattattgccacacgccgtccgctgaactacctttttattcctcttttccggtggcaaagcagctaa

SEQ ID NO: 394112 - DNA, 225 bp, Salmonella enterica; identical to SEQ ID NO: 393735

SEQ ID NO: 394113 - DNA, 486 bp, Salmonella enterica
atgggtattccatcctacttgtggttaaaagatgatggcggtgcaaatattaaaggttctgttgatgtccgtgacagagaaggaagcatagaggtcattgcattcgggcatggacttaatataccaacagataataacaccgggaaaatcactggcacgcgcattcatgcaccattagtatttgaaaaagaatttgatagttcatcgccttatctgtacaaagctgtagccacaggccagacattagacagtgctgaattcaaatggtatgcaataaatgatgccgggcaggaagctgaatatttcaatatgttcctggaaaaggtgaaagtagtcggtgttacccctgtgatgtataacaccaaaacggttgagaaaagtaatcatctggaacgtatagaactccgctacgaaaaaatcacatggaagtactgtgacgggaatatccagtttacagatgcctggaatgagcgagtgactgcataa

SEQ ID NO: 394114 - DNA, 933 bp, Salmonella enterica; identical to SEQ ID NO: 393803

SEQ ID NO: 394115 - DNA, 1098 bp, Salmonella enterica
atgtcacgccaaccggagacgagctggtacggctgggatggcgaccggctgaccaccacgcagacggacgacacgcgcattcagacggtataccagccggggagctttacgccgttaatccgcactgaaacggcaactgaagcgctggcaaaaacgcatcacaggagcctggcggaaaaactccagcaggatgcggggatggcgtttgtgccggagctggtggcgctgctggataacctggagcgggagctgaacgcggaccgggtgagcgaacagagccggcagtggctggcgcagtgtgggttaactgcggagcagatgaagagccagatggcgccggcgtatacgccggcgagaaaaatccatctgtaccactgcgaccaccgtggcctgccgctggcgctgattgacgttaagggacggatagcgtggcgcgcggagtttgatgaatggggaaatatgctgcgggaggataacccggataacctgcaacagctaatccggctgccgggccagcagtatgatgaggaatcggggctgcactacaaccggcaccggtattatgatccgggacagggaaggtatatcacgcaggacccgacagggctggctggaggattaaatccatatgtatatgcacttaatcctgtgagttggactgacccattaggtttagaacaatttttattttcaaatgccgatgaagccggattgtttgctataaaaatgtgtaacgctgactcaatagaaaataatctcgaatatggtggtttgatatgtaaaaaggatcaaaactatttttatactggtcctctaaaaggcaatttagcaggggtgaatccatacaaagctgcctgtcctgacgactcaaaaagggttggtgtataccatacacacggctatttttctgatacagaagggaataaggttttaaagggaaatgatgcatatgatagcttacatttttcgccgcaagataaaagtagtgctgatttttttgcaaaaggggaaaaagagtattcaagctatcttggaacaccagagagtacctattttaaatacaatccaaagacccaaaaagtatctgagatgaaatga

SEQ ID NO: 394116 - DNA, 441 bp, Salmonella enterica
atggagtttgatgcattctttttagcgagactccagtttgcctttaccgtctcttttcatattattttccccgcgattacgattggcttagccagttacctggtggtactggaaggtttatggctaaaaacgcgtaatcctgtctggcgctcgctctatcagttctggctcaaaatttttgccgtcaacttcgggatgggtgtggtctctggtctggtcatggcttaccagttcggaacgaactggagcggtttttcccagtttgccggcagtatcaccgggcctttattaacctatgaagtgctcaccgcattcttcctggaagcgggattcttgggcgtgatgctttttggctggaacaaagtcgggcctgcatttcttgtctacctgtatggtggcgttgggcacgttaatgtcgacgttctggattctggcgtctaa

SEQ ID NO: 394117 - DNA, 459 bp, Salmonella enterica
atgtggctggcacagacacttggtgcatgccgctatgcattgatgtatcagctgtgtactggttgcgtcaatacgctgttcaagttcaaagaaccgcgtaatcttagtaaattacagacatatcgtacatggctgtaccacagaactcagattaaattgcttccatcttttagcctgagttgcataaaaacaccgctggacaaaatggtaattacaccaaaaacaaagaaacttattttaaatgcatcaactaaagtctcattactttctaataatctaatcagtacagaagcaagactgacgccgaaagtaatcgctaactgctggctagtagataataggctattaccgctgctactttgttctggtggaagatcggcaagcgttatactgctcaaggcagtaaaacgtaacgagttaaagcccccgattaacaaaagagtcattacgataagataa

SEQ ID NO: 394118 - DNA, 585 bp, Salmonella enterica
atgaatctacacaagcagttgcaaaatggcctctcacttatagaagccgccatggtattagctctgagtgcaattgttatctctggtgtcatgttttactacaattccactcagtccaactactatttaaataccgcagaagaaacaattattgctatacaacaacgcgttatgaccctttacgccaatcgtaaccgtattgatgatgcgctgtctttgagcatgcttcacatgcctggtatcaaaacagtccctgataacccgaatattggagttcttccaggtaatataacgttcaaagttgagcatggttggatagaggatggtttacttcctagtgatacagagctcggtgtcagtaaccgtttttatgttatcctttctggcgtcaccccagaacaatgtgccgttcttggagggggagcctatggtaaatcaggctctttccggggcgcatatattctgtctgacatgagttatacaaatatttccgatttaaatttaaaacagcgcttagagtactgtagtcaaaatgaccttaaaaaaaccattggtctgatattctcattggcaggaagtgactaa

SEQ ID NO: 394119 - DNA, 159 bp, Salmonella enterica
atgcatgacacacttcccgccgcccagtcttgcacttgtgagacagaaaacatgaacaaagttaatctccggttagcttcaatcgcctcgctcggcggtttgctgttcggctacgaaacagcagtgatatctggcgccattaagcatttgactgcataa

SEQ ID NO: 394120 - DNA, 1014 bp, Salmonella enterica
atgtacgatacgaaccacgataaattaagttccgtttcacatgtgaatgatgtaccccctccatcagaacaaacctttcatggcgaactggtttcatcgtccgtctcgctccggtatgttgaggacaaccctgctatagcctacctcattagtcttggctcaaagcgaagcagacagaccatgagctcattcctcaacatcgtcgccaggatgattgggtttcctaatcttcgagactgtgcctggagctcaatcagaaggcaccatatattggccgtgctggaaatgttgggtgatgcagggaaagcaccggcaacaataaatacctacctgtcagcgctgaaaggggttgctcttgaggcgtggacgatgaagcaacttgatacagacagtttccagcatattaagcaggttcgttctgtaagaggttcccggcttcctaaggggcgagctcttgagcgccatgagatcagaaatcttttttacacatgtgaaaacgattcaagtgtaaagggagtacgcgatgcggccattcttggggtcctgctcggatgtgggttgagacgctcggaaattgttgcacttgatatggaatctgttattacacgagaacatgccctaagggtgcgcggtaagggcaataaagagcgcatcgcctatgtgcctgacggagcctggcagcggattatgacgtgggtggaggaggtacgtggtgaacaaccgggaccgctgtttcagcggatcaggcgttttgatgatgtaactgctgaaagaatgacagatcaggctatctatcacattctcgaaacacgaaggattgagagcgggctggaaaaattcgctccgcatgatcttcgcagaacctttgcttcggccatgctggataacggtgaggacattatcacagtaaaagatgcgatgggtcatgccagcgtaacgaccacgcagaaatatgacaggcgcggtgatgagcgcctcagaaaagccagtcagcgccttgatatagcggattga

SEQ ID NO: 394121 - DNA, 438 bp, Salmonella enterica
gtgatttttgacgtaagaacgaccttcgaggtggctctccagacatacacccgtctggtccttgtcgatagggaccagggaacatcagttacgaacgatgccgatgcaggctactctggcaaaaaaacaaccctggtcagggatccaatgttaaaacatgaggtagaatggcccgtgaaaaaagtcaccttcatcagccaggctgagaccgaaagaccggagcatgttgccggtgcggccatgatctccataactgatccagacaagccctctgcttctcttcgactgtgggagccgttggacaggaacaccagcagggtcgtttacgaattactgtgcgttcccgcaaaatatgaacagcttatacaaagccatgaaacacagtatcttgatgaagagatacctttccacgtcaagatacgggagctacggaggtaa

SEQ ID NO: 394122 - DNA, 375 bp, Salmonella enterica
atgcgcgtcaataaacacacgacggaaaagatactcaccacaaccgcaaccctggaatggggatacctcgcttatcagggcaatgacctgtcgatgtttgatgaacaaataatccggctgggccagtcgttcaggttatggcaggaacgcgtcgaagacttcaggaaagcgctgaatgccgatgaggacgtcatgccaatgcaacgagactgtttcatgagggctgatacggattgccgatcaactcatggctttacagacgaaaacccagatacattgaaaaggacgtctataccagactccccgaaaattccgcctcgatcgtcacttctggcgacaactcatcaatttaacaagttacagtgtcacttataa

SEQ ID NO: 394123 - DNA, 861 bp, Salmonella enterica
atggaaatttctacacataagctttctgacggcatagttttgacgcttcgttctcccgcagacagtacaaaaaatccggtaatcattttgtgccatggtttctgtggtatcagagaaattttgctccctgatttttctgaagcatttacccgcgcagggttttccaccataacttttgactatcggggttttggagacagtgatggcgagcgtggacgtctggttccagccatgcagattgacgatattatttctgttgttaactgggcaaaaaaacagcccacccttaatgcacagcgtattggtctgtggggaacctcatttggcggatgtcacgtatttggcgcggcggtaagagacccggaaataaaatgcattatcagtcagctggcttttgcagacggtgaggaaatcgtcaccgggaagatgaatgatgcagagaaagaggcttttcttttaacactgaataagatgactgaaaagcagaaaagcaccggtaaagaaatgttcgttggtgtcaaccgggtattgagcgatgctgaatcaaaatcattttttgaagaatacagagcggagtatccaaagatggacattaaaataccgtttcttacggtgagggaaacccttcagtacaaacctgtattgaatgcgtcgcaggtgacatgtcccactctggtagttattgcaggtcgggatacagttaatccaccagagcagggacgggcattatttgaagctgtagggagcaaagaaaaaaggttatatgaggaaagcaatgcccgtcattacgacatttatacaggagagcactttaagcaggttatcagcattcaaactgaatggtttaaaacgtatctttaa

SEQ ID NO: 394124 - DNA, 300 bp, Salmonella enterica
atgaaagagctaacaatggaacaattaacagtggtaaatggtggttctgatgatattgccggatgtaaggccgcttattgggggatgaatggaggaaaagctggaggtggttttatagggggtacaggatatgctgctggttcggctgcagcctgggctgccttggggtgtgaaaaaatagataacatttatgaaaagatgaaaaattataaccctgcttcagatacctctacgcctgaaattttcaaaccaaaaccgaactggaatcaacccatgacaatgtggcatggtggtttttaa

SEQ ID NO: 394125 - DNA, 258 bp, Salmonella enterica
atgaaatcattatctgaaaatgaaattattaatgtcagtggtgcgggattcggtgactatggtggctatacaagtggagagctaggagcaaaagcaggatgtgcaatagactctattttgggcgtccctgcctgtggtcataataatggtaaagacccaagtaaactcgaccctaaagcacacaatatcagtgagccattaattccaaaaccaaactggaatcaacctatgacggaatggcatggtccttcattctaa

SEQ ID NO: 394126 - DNA, 2181 bp, Salmonella enterica
atgggcgttcgcgcctgccatgaagaagcgtatacggtacaaactcgcggtatgtttctggcgggtctctatcatcgggctgggagcggcgagataaatgaactggtcaatatccccgatgtgattggcgtcgacatcacattgaatggcgaaattttttcgcttttgagcggaacgattgagcgctggcgtcgggaaatcgactttgccagcggtgagttgcgtcgatccttgatttggcgggcgccgaatgggatgcgctttgcgattgatagccgacgtttcgtttccgctgagaagttaccgctattggcgatggagatgaccattacgccactggacgctgatgccagcatcgccctttcaaccggtattgacgccacgatgactaatcatggtcgtcaacatctggacgaagcgcagatcagggtttttggccagcattatctgcaggggatctacaccactcaggatggacgcaacgatattgccatttcctcatactgctgcgtaaaaggtgacgtgcagcgttgtttcacggcaaaagatcgccgtctgatgcagcataacagcgcgcaaataaaagccggcgagcggcttgtgctggaaaaactgacgtgggttaactggacctccgaaaggcgaaattcgctcgaaagctgggggcgtcagtctctacggctgctggaaaactgtgtcgggcagggttatgacgcgttgttggcggagacaacggcgaactggcgttcatggtggcgatgtcatcgtgtgaaggtcgtcagtacagcatgtgacgatcaacagatgcttgatttcgcgctttatcatttacgtatcatgacgccggagcatgatgagcggagcagtattgctgcgaaagggctcactggggaaggctataaaggtcacgttttttgggataccgaggtgttcctgctgccattccatctgcttacctcgccagaaaacgccaggcggctgctacgctaccgctggcataatttgcctggcgcacgcgagaaggcgaggcgcaatggctggcagggcgctttgttcccgtgggaaagcgcgcgcagcggagaggaagaaacgccggaattcgcggccatcaatatccgtaccgggttacggcaaaaagtcgcctctgcgttggcggaacaccacctggtcgccgatatcgcctgggcggtcattcattactggcacgcgacccgcgatatcaactttatgtcccgtgagggaatggtgctgttaatggaaacggctaaattctggatgagccgcgcgatagaggtgaatggtcgtctggaaattcataacgttattggccccgatgaatataccgagcacgtcaataacaatgcctttaccaattatatggcgcgctacaatgtggaacaggcactggagttcgcccgttcacaggagcgcgcggacgaggtttttatttaccgcgccgaacattttttacagcgtctctggctaccagaaattcaaccagatggcatattgccacaggatgatacgttcctcagcaagccggttatcgatttagcgaaatataaagcgaaggcgggtaaacaaactattttgctggattactcccgcgcggaagttaatgagatgcaaattctcaaacaggcggatgtggtgatgctggcttatatgctgccgacgctgtttacgtcgcagacatgtctggcaaatcttcgtttttatgagccgcgtactattcatgactcctctttaagtaaagcgattcatggcatcgtagcggcccgctgtggcgatcccgtcacagggtatcaattttggcgtgatggggcacgtatcgatctcggtgatgatccgcatagctgtgacgatggtattcatgccgccgcaacgggggcgatttggctaggggcgatacaaggttttgccggccttagcgtccgtcagggtgaactgcatctggaaccgacgttgcctgaagcgtggtctgaattgtcctttccgctacagtggcaaggcgttgaactctttatcacgataagcgcggaaagcattcaggttagcagttcgtgtgctgtcgggatgtggatctgtggccagttggcgacgattgacggtgagcaattattctctcgacgcaacgttgtttcgccgggaattgggaccgctaccagggagggcatatga

SEQ ID NO: 394127 - DNA, 147 bp, Salmonella enterica
atgtctttagaaaaagtttatctattagtgggcggctgtgacattatattaataaatatgactaatttaattctttttatcatgctcattctattatggatgttcacctggttctttagcggattgctaaataattattatggctaa

SEQ ID NO: 394128 - DNA, 213 bp, Salmonella enterica
atgactattgctgaacgtcttgagcagaaaggacgcaaggaaggtctccaggaaggtcgtcaggaaggtcgtcaggaaggtcgtcaggagggcgctgctgaaaaagcacaggctattgcacgacagctccggaatatgggaatgacaccagagcagattgaacaggcaaccgggctttccggtgctgaactgaaaaaattatttgctgactga

SEQ ID NO: 394129 - DNA, 228 bp, Salmonella enterica
atggcatgcagtgcgttgattgaatcaggtttgtggtcccgcgatgctgttgaaaggcagatgagtcatcaggagcgtaacggtgtacgagcagcttatatccataaagccgaacacttggaagagcggcgactgatgctacagtggtgggcggattttctggatgcaaactcgaaagaaagtaccagcccctttgagtatgcaaagattaacaatccattaaaatag

SEQ ID NO: 394130 - DNA, 2223 bp, Salmonella enterica
atgagcagtgcctacaatagtctcgatccccgtgtccgtaagtgggtttataagcaggactggtcatcattaaggcccttgcaggagagttctattccggcaattttagcccgcgatcgtgatgtactaattagtgcaggtacagcagcgggtaaaacagaagctttctttcttcctgcctgttcggcggttgcagatctcaccggtggatttggcattatctatatcagcccgttgaaggcattgattaacgatcagcaccgtcgtctcgagagtcttggtgaagccctggaaatgcaagtgacgccctggcacggggatgtaccacaaagcaaaaaaaagaaagcacggacaaacccgtctggcatcttacttatcacacctgaatcacttgagtctttgctcataaactcattgggttggctcaaacaggcgttttcttcagtggcatacattgttattgatgagttccacacttttattggctcagagcgtggtatacagctgctttctctgcttaatagaattgaccatgtgctaggacgccagttaaatccaattccccgtgtcgcgttgagtgccacgctgggagaactggaaaaagtgccagaactattgcgcccggataagagattaccttgtgaaacggtaacagacagtaatagcacagccacactacaggttcaggttaaaggttatcttgagcgggagcccgaaaaaggagaagagctccagagctctgccgaacagctcgtctgcgcggatattttcaggctctgccgtggcgattcccacctggtctttgctaacagtcgaaagcgtactgaaagcatagcggcaacactgagcgacatgtgtgaggcaaatgtcgttcctaatgaattctttcctcatcatggttccctggccagggagttacgtgagacgcttgaagcccgactgcagaaagggaatttgcccacaaccgctgtttgtacaatgacgctagagctgggtattgatattggtaaggtgcagtcggtcatacaagttacacctccgcattctgtttccagtctgcgtcaacgtatgggacgttcagggcggcgcgattccccagcggtactgagaatgttaattactgaacctgaacttaccgcaaccagcagcattgtggatcatttacgtctgcagttggtccaggcgatggcaatgatcaggttgatgatctctaaacgctggttcgagcctgcagatgtccggcagaaacattactccacgctgctacaccagatccttgctattactgcgcaatggggcggagttcgtgccgatcagctctggtcacaactttgccagacaggtccgttccggaatgtcgatataaatgacttcaaaagtctgcttaaacatatggggatatgtggcctgcttactcaacttgccagcggtgaaatagttgtcggggctgagggggagaagctgactaatcactacacgttttatgccgtattcaatacacctgaggagtttcgaatcgttacaggaaaccgaactcttggcacagtgcctgtagactccccacttttgcctgagcagcacatcatcttcggcggacggcgctggaaagtgacagagatcgaggttgaaaaaaaggttatctatgttgaggcgactaaaggcggacagccgccactattcagaggtagcgggatgtctgttcatgatgttgttcgccaggagatgctcgctatctatagggaaaatgattaccgtatcgcggtaggcagcaagagagtcgattatgctgatgctgctgccagaagcctctttgcggaaggcagtaacaacttccaacgctacaatctacaaaatgactgttttattgccagcggtcagaactgctacgtgatcccgtggatgggggataaaattgtcaatacaattacgtccctgcttatacgttgcggctttaaagccagttcatttgcaggtgcgatagaggtagaggattcaaacgttgcctctgttcagcgtgcacttaagaaaatgctattgtcagggttaccttcagagtttgaacttgctgcagttgttcctgacaagtatctggataaatatgacgagtatttaccagagtctttgcttgcgaaagggtatggggcaaaggcgtatgatgtagaaggaacgtgcatctggctgcagaaacaccttcagtcgactggatatgtagtcagggtataa

SEQ ID NO: 394131 - DNA, 507 bp, Salmonella enterica
atgcgacaggctgaacatggctacgaaattatcagaccagattcctcatttcaggataacgatcaggctatcgacatcagtgattttttgcgcctgatggaaaagtttattcgaaagttcagtctgatgttaacggacctgacagccagcgaagatgaaacgtatgaatacatcaaaaagttaacccgacttctgttcgacccggttaatgactacagaccgtcatattatggttcaaccctgccaaatatgtcccggtttttgttaccacgtaccgatctgcctgaactgcgggaactaagaaaaagtaatattttgcccaatacacatgccagtatttttgggttaactaactggttgctgaaacaaaatgttgtggataccgatatcgatccattacgaatacagatcaagcgtgcgttcttgccaacaacagcagaaggtttactactgtcactagccagccgtaatctcgtttttgcactgtcgtgccacatcatatattga

SEQ ID NO: 394132 - DNA, 528 bp, Salmonella enterica
atgccacaattaataaatgagttttttaatgttgagttagtaaaggatggcggttgttgccgtgaaaataaagggattaaaaacatttcactcatgtctgaattactgaatatcgtattgctacagtttgtaacagcaaacgacgaatggctgaacttgcatttgtcaaaatgtaaatcagacatatcagaattcgtaaattttgaatttgaaaagttgaatcccttaataatatcaccgtctcgttccatgaagctggggggcaatacttcgctgaatttgatgttacggaaatctgcgtttgaaaaatcgagatctgcggccgtaaggggttctccggttttcagtcgtagaactgcatccttgagtttctcagcccagccggcaggtgatgatggtggggctatagccatggctgatggtttgggagctactggcggtggtgttctggcttcagaaaccgtcggcctgttattggctgatactgagacttcttcggggagcagatctgcacctgtcactctgtaa

SEQ ID NO: 394133 - DNA, 471 bp, Salmonella enterica
atgatggataagggatgtttgggtgatatacaaatgattaaagaacgtatttcttatgttatcccgatcgcgatagatggcagcaaatcaggagccccagtcctcatctatgagatggcaaaagactcatatgaagtggatttgtcattcggtattttttttatcggtcttagagcggccaagaaatactccgttggcatcgaggtgttcaatgacaatgagacaccaattccaattgatacaaagaaattttccaaccatatgtttttcaccgttgcagaagctggtgatggagaaactgttgtgtcggcatccataaaaataacgtttcctaaggttgaaattattaaccctggaatatttgaagttagagcatcactggttaatccagacaccaaagaaatcattgatgtgaaaagctcttttttcgatattaagcgtgctggagtggttcgcaatgagttccaataa

SEQ ID NO: 394134 - DNA, 465 bp, Salmonella enterica
atgacaatcgacaaacgtgcgctgcgtgaagtggcggagagggcgacacaagggccgtgggaaatggagcaggaaaatatctggtttaccgatgaagatgggtataccaaacacctggcttatgtggagcaaggtgatgatgttgatgataagcaagaccattacaacactgcctacattgccgcagccaaccccgccaccatgctggcgctgctggatgagctggaaaaagagaagggatacgccaacacatatgaggctgaaaagtggcattaccacggtttggcagaatcagaaggcgagcgagcagaccgggcagaaaagcaagtggaagaattaacgatgtgggttaagcgtctggcccactcgcttagaaacgccaggccgaacagcaagttacacggcgccgcaatggtctatttgatccgtaaggggttaatcagtgtggaggatgtattgagatga

SEQ ID NO: 394135 - DNA, 408 bp, Salmonella enterica
atgagtactgatgaaaaagctcgtttaccgtatgacgaaggcaaagactccttcaaagaaaggttgcatctgttagtggggaaccggagcctgagggcggcagcaaaagcctgggatctgccatactcaacattaaataattacttcgagaaaggcactataccttcactatatgtagctcaaaaaattgctaagatagaaggcgtttcgctggaatggctggcgtcaggtggtggggtaaaagaagatgctgcgccgtatcacagtgaaaaggcggcttacagcgatacaaagatggcgtggcaattgatgtttgacatgcttgaacctgaagacgctaacgcgttgatacgcctgatccatcgtaaaggtatcgaatatatcctcagtttagattcaaaaaagtaa

SEQ ID NO: 394136 - DNA, 357 bp, Salmonella enterica
atgggaacaagaagggatataagacaagctattgaacaatccaaaatgaatgagagtaacgttaacatacttttcattgaaatatttatcatttccattgcttgcggtttgacattccagtcatggtgggttttcggctgtctttttattgggttattagtatcactgaatgttaaaatattgtctcatattttaattatattactaagcattggatggggcggtgttggatttggcattggaatattaattgactctactggggcaatgataattctcactattcttggactcctcatcggctttggcatccatatttcagggctacagtggattaacgatatttctgataactaa

SEQ ID NO: 394137 - DNA, 966 bp, Salmonella enterica
atgccaattactatcgggagaggttttttaaaaagtgagatattttctcaaagtcccctctctcaacgctccttctttacgttactatgggaaaaaattaagggttttttttgcaacacgcgaaaagcagaggctgatcaatatataaatgagctatgtgatcttgcttctccacctgacgcacagcgtttgtttgatttattttgcgcgttatatggattatcatcaccatcatgcagagaaaaattccattttcaacactataaagatgctgagagtcaatatacaaatctctatatcaaagatggcgcagagattccgttatgcattgtgatacgtcaggatcactattattataatataatgggtaaaacggtgatctgcattgatacttatcctgaacccctgaaaacccatcctgatattaatataaaaaccggcacttatgtttgtgaaccgctatgttgtttgttccctgagcggttgttactctcgctatccagcgacataacattttccattgatttaaaacagataaaagagaaactcatcgatatggcagagaatggaactttatgtaactggaaggaacaggaaagaaaagccgctatctcctccagaatttataggggcataatacaagcaggtgtaacagctattgatgaagctaccaaaaatacaatagcctcaaaggttattgaggctactaacttaaagaatgcaacatttgatgcaaattacacgcaaagctcaattacgcaaatggtttattcatgtttgtttaagaatgacatattaatgaatatacttgatgaacaatcctgtcatgacctgctatgtttaaacgaccttactgaatatgtagcgctacaaattcataattgtcttttttctgaagacttatcttcactcgttaaaattacagaaaacgaggctcatctatactataaacatcatcatttatag

SEQ ID NO: 394138 - DNA, 510 bp, Salmonella enterica
atggtgtggcagatgaatcacctcagtaaaaaaaagcagtctcaacgggcattcacattaatagaagtggcttttgttattattctgtttgtgctaggggttctgggcggggtttattatctccatcaggagcgtgaatttacaacagcgaatctgattgccaaacaactgtcatacatagcaggcagtgtagcgcaattcagctggccggtaacagaagaaagtaagaaaattcagacttatgatattaccgctttagaaaaaatgggggtaatttcttctgatataaagtatatgcttcattatcaggtcagactattctggcaggataaacatacctacaccgaactggtttttataaaaccagcccccgtatttgatattgaacagttaatcagtatttcaggtctggtgggtgctgacggggggtatatgaacaggcagggtgagattgttatgagttcctcacatatttacaataatatacccgtgatcattgaagatgcttga

SEQ ID NO: 394139 - DNA, 429 bp, Salmonella enterica
atgtttgtttctggtctgatccctgtttacatatgcctcattcaggcggccgcggtaaatcatattcctgcagaaattattaccagtatcatttctgtagaggggggacggcatggtctggcggtggcaaataaaaataatacagaagatctgggcataatgcagatcaataccggtgcctggttatctttggtcagcaaagttttttttgactctgatagtgacagggcctatcaggttctaaagaatgatgactgttttaatattcaggtcggtacctggatccttaagcgctccattattcttgaaaatggtgatttatgggaaggcgtggggcgttatcactccagtacacttcgcttgaaaaaacgatatatcaagaaggttaaggcgaggtatgtgaaattgtttcataaaaatatatcctga

SEQ ID NO: 394140 - DNA, 759 bp, Salmonella enterica
atgttccaagattttcctgtgcttcagattatttttgtctttatcgtatgtgcaacgatcaccagcttttgctgtctggcggcagaacgtttaccacatcagttggggtggcgggacaatccccggaagaaatttactatatgttcaccgccgtcacagtgtaattattgtggaaagcggataaaatttttatacctgttacctgttattgtttttttcctgacaaagggaagatgttctcactgtcatcgtccaattccgagacgttatcctgtattagaactggctggcggatgtggaggggtctgtatattcatctactttggtagtatgtatacggcattgtgggctattgtgatctttctgagtctgctctttttatcactaattgatatttatgagcactggcttccggcgattgtcacgtatccgttgttctggctgggccttgccttttctccgttctgtattttacctgaaatgcgtattctgggcgcgatgttagccttttttgtaatgtatttatcgatgttgatcacggggctggttaaaaaagaggatgtatttgccgggggggatattgcactggctaccgcagctggtgcatggttaggtctggaaatgttacatctgtttttacttattacctcgctgtcgtttatttcctatgcgctaccgctgcggttaaaaggaatgcggtattcaccaatggggccggcacttgcgttaggatttatggcatgtttgtttctggtctga

SEQ ID NO: 394141 - DNA, 267 bp, Salmonella enterica
atgaaccgtaaattattttttatcgatccggttttatttaaaaaattgaatgtgcatttactcccattactttttatgttaattcttggtgaaatattacatggaaccagtgctgcttctgttttgccagatgtgccgtatgccacacaacattatgaagagggggtcagcaccctgcatgatctttatgaagcattaagccgtcgcatcgaggatatctggatttatgaacaaaaaggtataaaaaacccccatcagttcagataa

SEQ ID NO: 394142 - DNA, 960 bp, Salmonella enterica
atgaaacgcgcacctgtcattccaaaacatactgttactccccccgttgagacgagcccttcagcgacatcagccgccccaatggtggattctttaattgcacgcgtcggtgttatggccagaggcaattcaatcacgcttcctgtttgtgggaaagaagtcaaatttacccttgaggttatacctgcagactcagtcgaaagtacaacgtctgtctggtcagggaatgagcgcgaccaggatcttctgacagaagattctcttgacgacctcattccttcttttctgctgactggacaacaaacccccgcctttggacgccggatggctggagttgttgaagtcgccgatgggagccgccgtcgtaaagccgctattctcaccaccagtgattacagagtactggtaggggagctggatgacgaacagatggggacattatccaggctgggtaatgactatcgcccgaccagtgcatatgaacgtggtaaacgttatgcgcaccgattagaacatgaatttaatggcaacatctcctggttagcggatgctgagaatatctcccgaaagattatcacgcgttgtattaatactgcccggttaccgaaatcggttgttgctctcttcaaccatcccggagaattatccgctcgtacaggtgaatcattatataaaacattctctggcaaagaggaacagctgttacagcaggcagagcgtttacatgagcgaaaaaaagctggagttatgtttgaagcggatgaggttatatcattattaactgaggtattgaagaaacctgcagggaaagaaacgacgagttcacgacatcagtttgctcccggtgcttcagtgctgtataaaggtgacaaagtgactgttaatctggacagaacacgtattcctgttagttatatagagaagatagaaaacattctgagagaactggagaaaaaataa

SEQ ID NO: 394143 - DNA, 396 bp, Salmonella enterica
atgataaagcaaatgcacaagcagggtgcgtccattatcgacattgcaactcaggtgggttgctctgagcgtactgtcagacggtatcttaaataccctgagccgccggccagaaaaacgcgccacaaaatggctaaactgaagccgttcatggactatatcgacacgcacctggcggaaaatatctggaatggcgaggtcatccttgcagaaattaaagcgatgggttacaccggtgggcgttccatgttgcgctattattgtcgacgaaaatctggcgataattgtagagacactgcaaatacccaatatgatgaaaaatataaccatgcttacgctatcgaggatgctaactggcaacgggaatgcaggaaagcagaaaaaacactcacctaa

SEQ ID NO: 394144 - DNA, 327 bp, Salmonella enterica; identical to SEQ ID NO: 393768

SEQ ID NO: 394145 - DNA, 228 bp, Salmonella enterica
atggtgttgcaactgttgcgctatatcaggccaggccggagcgtcagccagcatcgcttcactgataccgtgtacggcagcggctgccggatcgatactgatcgtcggtttcaggcgggtttcgtatatcaggtcgccacggacattcaccaggccaatttccagcgcctgagcgccggcatcaagccctgtggtttcggtatcgagaaagacggggtcctgacttaa

SEQ ID NO: 394146 - DNA, 309 bp, Salmonella enterica
atgactgataaatccacaccgccaaccatgacacttgacgaatgggttgcaaaaatgttggctattcctgccgtcaaagccgaatatgatgccctcgccgaagagagtgacttgctggatgagatgctcgccgcccgtaaaagtgcagggcttaccctggagcagatagcagaacacatgggaaccacagcctccgtcatcaccagaatggaacgcgatctcgtttccggaaaaaaaggcccgtctttcgcaacgctgaaaaagtttgcaaaagcaaccggcaaaaaactacaaatccgtttcatctga

SEQ ID NO: 394147 - DNA, 1215 bp, Salmonella enterica
gtggccactatacgctgggatattaaaacaattgatcgaatatcaatggttgaggatgttctgaaggaattctcagaatgtaatatgaatatcatctcaatgaaagtggcgacggggcgagttttgattaaatcatggtgtcaacatttacatgatatatcttctgtgtatctgaaattacatcgtcatgcggatatttctgatgttttttatctaactgaagacatgagtaatatgtcgcccccggcattcacggagtcacgttcattttctgatatcgtctacagcagccgaagtatgcaatcgctcacagaaaaagcggtaaagattgcagacagtaaatatacggtgctaatccgcggcgaaaccgggacaggaaaagagctgttggcacgtgccatccataatgccggagctcgacgattatatccttttattccggtaaactgttcagcgttaccggaatcgcttatagagagtgagctctttggctatgaaaaaggcacattcagcggcgcggatggtaaaggaaaaaaaggcttatttgagatggcagataacggcactctgtttcttgatgaatttggcgaaataccactgaatgttcaggctaagttattacgtgtcttgcaggatgacggcattcgccgggttggaggttcgcagattatccctgttaatacacggattattgtagcgacaaacgccagcctggaagagctgcttgaacaacgcctgcttcgcgccgatctctattatcgtattaatgtgcttactctgatgattccaccattgcgggaacgaccacaagatgttacgttgttgatccgctattttatccaaaaatatgcaaaagaatttaatcgacgtttgattttggataaaatatgttttgagatattgtactactattcctggccgggaaacgtccgtgagctggaaaatatgatcattcgtcttatgctgatgtccgaaagcgatgtaattacggcggatgagttggggctgctgataccagccgctgagacattcccggttattcaggacaatgccgggtatccttttagagaactggctcaatatgctgagcggcgaatgatcaagcagatggtggaggataaaatatcatcgcgccgtattgctaaagcgctaggtgtatcacataccactgttctgaataaaatacggcgctataagattatgacatcgtgttga

SEQ ID NO: 394148 - DNA, 828 bp, Salmonella enterica
atgaatcaatacgcgtacagaccctggttaagccgctggaatctgattccggatggtcctcccttcatgactcattcctcacaacttatcccggtcaaaacagcaactgatggcattaaagccatgctaaaaattacacatgataaggatgagcaaaccggcaacgcccttatggcgtggtgggatggaaacggtgctgcgccggttattgcccatgaaaatgaggcaattcttctggagagggcgacggggctcaggtctctgtcctctatgtccggggaaggtcaggacatagaggcctgcggtattctgtgctttacagcaggccggttgcatgcatttaagaaaaaaagtgaacttcagcttacgcctctccatgtctggtttgccgcattaaaaccagccgctgataaatatggcggaattcttactcattgctgtgaaatttcagaagaattgctgtccacacaacaagatatggtcactctgcatggcgacttacatcatggtaacgttcttgattttggggcattaggctggttagccattgatccaaaaggcctgaaaggtgaacgggggttcgactatgccaatatttttacaaatccagatctgagtaatccggttcccggaatagccgttgtgccggaaatgtttaaacagcgacttaaaattgtgaccgaaactgcgggtctggacagaaagcggctcctgatgtggatcatcgcatggtgtggactttcagcggcatggtcactggaaagtaacgatactgcatctgtggcaacgaaaattgcagagctggcactctttgaactgcataagtaa

SEQ ID NO: 394149 - DNA, 264 bp, Salmonella enterica; identical to SEQ ID NO: 393789

SEQ ID NO: 394150 - DNA, 339 bp, Salmonella enterica; identical to SEQ ID NO: 393793

SEQ ID NO: 394151 - DNA, 291 bp, Salmonella enterica; identical to SEQ ID NO: 392791

SEQ ID NO: 394152 - DNA, 141 bp, Salmonella enterica
atggaggaagaggtggggagagtcgtaattatgctgaaaatagcggcggcaatgggggcaatggcggtaacggtggcaatggcggcaatgggggcaatggcggcaatggtggtaatggtggggtgggaggagatggaataa

SEQ ID NO: 394153 - DNA, 186 bp, Salmonella enterica
atggtggttccggaggcgtggccgggtctgctggtctggccggtgccggtggaaaaggaggaaatgggggggatgtaccgattggatcaccaacgacacggggtaaacgaggtgaggatggtgcttttggtgaaaatggtattaatggccgagtcggtaatggaggtgccggggggacggcgataa

SEQ ID NO: 394154 - DNA, 1014 bp, Salmonella enterica
  misc_feature (514)..(523): n is a, c, g, or t
atgggtattgaggatgatgcgattgctcgccgtttagaagcacaaagaaaaggggagcacgttgtccctgctagctatcaaggtgtaaccaaacaacgagtaattgatgtcttgacaacaatagacagacgtactgataacatggttgatgttgtgtactctctattatgcgatgagcctagctggtataggaaagcggcccttaatggttacagattctgtgatggtgcttctgtggcacatattggtactcatgttggtattctgcagcgcggtggtaacctaaagctagatcgagaagggcgtgattattggctgaaacctctttgggaaattggtgcaattgaaaaggtatacctcgattctgctgatggagagtttaaaccaggccacccaatagcaaaatcctcaaattccgcttatcgcctttcgactgactttatggttattcttcagtcccctgaagatcaatggcaggagcttgcccaaggttgggcacaagttgacatacagnnnnnnnnnnagcgtgagcgactagcattacaagcggcacaagctcaggcaacagctaattctatagaaagcgctcattcccgattgattcgtgcaagccatgaggtgtatgccacccgttttctgccaggctatcaggttgtctatattgatgatggcgatggtgatcgcgttacaccagaacagcaaagtgtgctggcagatgcaggtattacaattactattcacgactctatgcctgatgtgttgttatggaatcgtcagaataatagcctttgggttatcgaagctgttacaagcgatggtgaggtagatatccataaaatgagaagcttgcaggcatttgctataagaaatggaaaagcggatattggctttactacaacttatcctacatggaaaaaagctgctgaacgtcaatctgccttaaaaaatcttgctggtgactcatacatgtggatattagaagatccttctcgcaatattcaaattcatcaataa

SEQ ID NO: 394155 - DNA, 138 bp, Salmonella enterica
atgcaaaatgacgttcaatcttctgaaatcgttattctgggggtagatacccatcttgatattcatgttggtgctgttagcagcctgacaggaaagttgctggatactcacgttattcaaaccaatcaaaatgaataa

SEQ ID NO: 394156 - DNA, 162 bp, Salmonella enterica
atgtgttatccctggaacgggagcgtcagccggaaatacaggaacgcacgctggatggcccttcgctgggatggtgaaaccatgaaaaatggcagcttcagtggattaagtggggggaatgtggcctgtaccatctggttgcataggtattcatacggttaa

SEQ ID NO: 394157 - DNA, 246 bp, Salmonella enterica
atggccttttatgtagatagcacagcgaaatttttaacaaaaacaaccgagcctgaagggagtgtatggcggtattactataagccgggaaatacttgtccggcttccggcatttaccgctgcacgaactgtggtgatgaagtgacgtgcaataaagatgatcctttgccaccgcaaaatcacaggcagcataatgtcccaggtgacatccgatgggaattggtagtgatgacaaagacgaagtaa

SEQ ID NO: 394158 - DNA, 159 bp, Salmonella enterica; identical to SEQ ID NO: 36973

SEQ ID NO: 394159 - DNA, 1299 bp, Salmonella enterica; identical to SEQ ID NO: 36972

SEQ ID NO: 394160 - DNA, 438 bp, Salmonella enterica; identical to SEQ ID NO: 36971

SEQ ID NO: 394161 - DNA, 885 bp, Salmonella enterica
gtgcagttcccggcggcgctgagggcgatgctggacaggctggaggatgagctgaggcgtgacgcggtgagtgaggaaagccgggcatggcttacgcagtgcgggctgacggcggagcagatgaaaaatcagctggagccgcgccctgagccggagaggaagctgcatctttaccactgcgaccaccgcgggctgccgctggcgctgataagcccggccaacacggtggcgtggcgtgcggagtatgatgaatggggcaatcagctcagtgaggataatccggcacagctggagcagctgatacggctgccggggcagcagtatgatgaggaatcagggctgtattacaaccggcaccggtactacagtccgggacagggacggtatatcacccaggacccgattgggctggcggggggatggaatctttattcatatccactaaatccggtaacaggtatggatcctctaggattaataaatataagtaaaggaatagaaggagcttctggagatacatctgttcatgcgaatccaggtcctgaggccacaagttttcgcccagaccactcaccagaccatattcatctaggtaaaaatgatgggccgcggttgagtaccgataattggaaacctctatcacaagcggatgcagcaaagatgtctaaagaacagaaatctttttgtaagaaactaaccgatgaggctaaaaaaatattatctgaaagacaaaagcagatatttaaatatggtaaattactgggagtgcttggtgattatatgtcggttcgagacgtagcaggtgaaatgtgtcaacgtggagaattagtatcatgtcaaatttatgagaacatggggggagatttgaccccgccagccatataa

SEQ ID NO: 394162 - DNA, 294 bp, Salmonella enterica
atgaccaacacagggcaacccggaccacttacattatttgccattgaaaagatttcttgcaaatatcagatgcgaaaaaacagacttgcaggaacaagtctgtttctcaagagtctattttcaacaacaagtaacagcgttacgttgtgtttttactggctcgccttcgtgtccgtcagcattgcatcttacaaatctgaccaaccggctttgaatagtggtgccggactcggaatcatatccacgattaatatgctgtttgttattggttttgttggtgtttctctcaaatag

SEQ ID NO: 394163 - DNA, 2553 bp, Salmonella enterica
atggcaggcaggtcatcgctactattatatttcagtatattgtttggcctgatggcccgtaacatacaggcggcaacagacgctgaatttaatccggcatttttacaacatattcccggagaaagtgtcattgatgtgaaaaaattcagtcatggagagccggttccggcaggtgaatactattctgatatctggcttaacggagaatggaaaggaagaacggtattgtattttcaggcatcagttgacatggaccggaccgtactttgcctgacacctgagctgttatcattactggacttgaacgaagaagtgctaaaaaaagaagtaatgagaaaaattagtggttgtactgatatttcttctgccttaccggcagccagaacacggtttataccatcggaactgcgtctgaatatcgacctcccacaggcgctgctcatccaccgtccccgaggatatatttcaccggcacagtggcagacgggtgtacctgccgcgtttgttaactataacctgaataattaccgttaccgggtagccggtacacaggaagataagacttacttggggatccgtgcagggctgaatgtagaaggatttgcgttacggcacaggggaaactggtccgccggtggttaccgaagtacagaaaccagtatccagcatgatgtggccgcactgagagggcagctgacggcgggggacttcagtaccggaggggagctgatggagaacattagcctccgtggcatgaaactggcatctgatgacaggatgttaccgggttccctgagaggctatgcgccggtagtgcatggggtagccagtagtaatgcaaaagtaaccatcagacagaatggtaatatcatttatgaaacaaccgttccggcagggccatttactgtcagcgatctctatccttccggatatgggggagacctgacggttatcattacagaagcagatggacagactcgcctgttcaccgtcccgtttgcttctgtggcgcaacttgtccggcccgggtatatccggtatcagatatcatccggtcgataccgttatgcagacaataccttggatgatatcgtttttcaggggaccctgcagtacgggttagtgaatgatgttacggtaaataccgggctgacgacagcgccccgttatgctgccagcctggccggtgtggcatttaatactccactgggtgctatagccactgacgtaacattttccaggacaatattacccggtgatgacattacacggaaaggatacagcttgcacaccagttacagtgttatggtgccatcaataagtaccagtttgacactggctgcctaccggtatatgtcgaaagatttctataatctgcgtgatgccatgtggaccagccggggagattattccgggaacagtcagaccggaaatataatgctctggcgtcccagaaatcagtttcagatttccgttaaccaggagctgggaactggttggggtaatctttacctgacgggaacaacgtacagctactggactcgcaaagggacccgtagcgaatatcaggcagggtacagtaacgtataccggcgtttgaactatcaggtgggttattcccggtcatttgacacggacaagttgcgcgatgatcgtcgtatttatgcgaatttctccgttccactgggcgaaagccctcagagttcgctgttatccactacgctgaattacagcagaggagacgggaacagtttgcaaacctcggtcagtggtgtcaccggggaagacaatcagttttcatatggcctttctgccagcacgatggaaaaaggtggtaccggatattcagccagtgccggttaccgttcgccttatgcttatttaaccgcaactgctggtaatgacagtctcaatcatcgccagtcttcgtttggtgtatccggtgctgtggtggtccatccatttgggcttaccctgagtaacgaactgagtgatacattcgcgattattcatgcagaaggtgcccgtggggcaacgattaataattctccaggaaaccgtattgatcgttggggtaacggtattgtgccatccgtcacaccttatgaaaaaaatgcggtcagtatcgatcccgaagcgttgccgctgaatgttgagctgtcagcgacagaacaggaaattattccgcgggcaaacagtgcgacgctggtgaatttcaccacgcagtcaggtgaagctgtgttgtttgatatacgaatgtcagacggaagtactcctcctatggcatcggaagcttttgatactcaggggaaatccgttgggtatgttgttcagggaggaagactttttgcccgtgggctgaaggataaaggaaatataaaggtagtatggggaagctatattaccgataactgtaccttttcttaccacattgttgcaaaacatcaggcgaataatcctgtagctaccatacaacccgtgcgctgtataagaccggaaaagagaaatgctactattgttcagaaacagcatacagtgtattcgggacactaa

SEQ ID NO: 394164 - DNA, 732 bp, Salmonella enterica
atgcccggattgatactttttattatatcagcattgatatctttttctgccagtgccagcgttgttattatggggacacgggtgatatatcctgagcagaaaaaaagtattaatgttcagctccataatggagaaaactcaccgtcgttagttcaggcatggcttgataccggtaatgcatacagtccccctgattctgtcaaagttccttttattatcactcccccggtttccagagtggaggcgggcacagggcaaactttaaggattatgtataccggggaacccctcccccgggacagggagtcggtgttttatctgaatgtactcgatatcccttccagacccgaaactgaagaaagtgaaaccgatggcggtcatataaattatcttcagcttgctgtccgcagccgaattaagcttttttttcggcctgatacattaagtcagtctccggctgatgcacgcaggcaggtcaaatggtcactgatacacaaagagggtcggattcttctcagggccgacaaccagacgccctatttcattacataccgaaaaattttgctgaagaccgggcaggatatgttgtcattcagtcatccaggtatggtctcaccatattccttcaaagaatttgtctcaccgggaaaaaatgcccagggcagcagtgtcatctggactgtcattaatgattatggtggtgatgaagaaggcaggtcatcaattcagtaa

SEQ ID NO: 394165 - DNA, 537 bp, Salmonella enterica
atgaaaaatatttttgtcgcaactggtatgctgtcccttgcgttttcaggcggagttcaggcctatgatggtacaattaactttgtgggtaaaatactggaccagacctgctcagtcactaccggtagtaaaaatatgaccgtgacattacctgcggtttcaaaagcattactggacactactgccaagactgcagcattaacgccgtttattattgagctaaatggatgtgatgccggggcttcttccggtggccaaaatgttaaagcttattttgaaccaaacgccacgacagattttaataccgggaatctgacgaataccggtactgcaaaaaatgtgcaggtccagttattaaatgcggatggaagcactcctgttgtattgggtaaggatgtggcctctcagaataccgttgcgacccgaattgacacttcagatatcaagttgcgctacaacgcgagatactatgcaacaggggcagcaacagccggagatgttgctgctactgtgaactacacgattgcatacgaataa

SEQ ID NO: 394166 - DNA, 504 bp, Salmonella enterica
gtggcacaggattctttattaaagggaaggataaatcccccacccccgacgtcttcgccaacacgtcattcatatctcagcagcggattgttaaaatttgagcctatcgttcatctcgcaactgcgcaattaatcggctatgaggttctgacgcaacttccgttagaacgtgatagcgaagttttttttcagcagttaagtcaacaggcgctacataatcactttttccaacaaatagacgcgctacgtttctgccctcaaaatattaggtattttctgaatttaccggtgaaggtattgttaaatgatgatgcattgctcttaaaattacgttcgtactcaacaaatctcactattgaactgcaagaccctggcgctttttacactttaagttcagctcagcagtttcgtctctatgaaagaattcaacaacttgaaaccagtggattgcccgtctggctggatgatatcgatgaaaaaatgcttctggagccttgtatctga

SEQ ID NO: 394167 - DNA, 1092 bp, Salmonella enterica
atggtaacttcattgaaaatagcgtttattggcgaagcggtatctggttttggagggatggaaacggttattagtaacgttatccatacgtttgaacataactctccgaaaatcaactgtgaaatgtttttcttttgtcgtaatgacaaaatggataaagcatggctaaaagagattaaatatgcgcaatcattctcaaatataaaattaagttttcttcgtcgagctaagcatgtttataattttagtcagtggctaaaagaaacgtcaccggatattgtgatatgtattgatgtcatctcatgtctttatgccaataaagcacgaaagaaaagcggtaaacagtttactattttctcatggccgcatttttcgctcgaccataaaaaacatgcggaatgtataacgtatgcagattatcatctggccatcagtagcggtattaaagaacagatgatggcacgggggatctcagcgcaagatattagcgtcgtttataatcctgtctctagtaaagcaatcattgtgccgccgcctgagcgcgataagcccgctgtatttctctatgtagggcgtcttaaatttgaagggcagaaaagagttaaagatttatttgatggtttggctcgaacgacaggggaatggcagctacatattattggtgatggctcagattttgaaaagtgccaggcctatagccgggagcttggtattgagcagcgtgtgatctggtatggttggcaaagcgcgccgtggcaagtcgtacagcaaaaaataaaaaatgtcaccgcgttactacttacctctgcatttgagggatttcctatgaccctgttggaagcaatgtcatatggaattccgtgtattagttctgattgtatgtctggtccgcgcgatatgattaaacccggtttgaatggtgagctttacacgccgggtgctatagatgattttgtaggacatcttaatcgagttatttccggtgaagtaaaatatcagcacgatataattcccggcacgattgagagattttacgatgtgctatattttaaaaatttttataatgcgatattctcgaaattacaaaagtga

SEQ ID NO: 394168 - DNA, 414 bp, Salmonella enterica
atgacaggtacgcttaatgaggaatctcttaatcattatctgcagggaaagaattattttttgcagaaagagtacctctatggaagtgcttttttcgttggatggcgagtagaaacaagttttttttcattagcgtacaggcttgtagatggtcaggaacttatcctgtgccattttgaagcgagaaacaacacagggcttaacggccctgtgttatcgttaacacgctttctggaagatttgtatcgtcatttttcaggtattaagaaaattagtgcaatgaaagcaacatttggaactgagtccgaatgtcttaaacgaaatgaactattcctttattttcagaaaaaaggagcaaatataatagaagatcaagatgaaacttggtttgttttaaatgtgaataatcgttaa

SEQ ID NO: 394169 - DNA, 1920 bp, Salmonella enterica
gtgggacagctgaatatattcgttaccggtgatttctccgtatgtccgccggcttttccacacccgttttccgatgcggcggcccggcgggtcatagaggtaacggctttccagcagggttatgccctgttgctcacgacggtagtgcaccagacggtgccggttatcgtagtggtaatggtgtacgtagccgccgccgtcgcgtatctggcgctcatcctttttcgtcagccgtccgtgcgcgtcgtggtggtaaaaatacgccacgtcttcactgatgcggttatcccgccacatcgcgggaagcgccgggtactgttcccggtctgccacccggttacccgccgggtcggtggcgtagcgccgcagcaggtcgttgtgccgggcgctgatgagccgccccgcgccgtcatagcggtagtcttcctcctgatgcgcgccacggatgtgtacaggctgcccgttgtcgttatagccgtattcccggttcagcaccgggtcactgaacgtgtggctcagcagctgcccggtggcgctgtagagcgtgttctgctcataagcgccggacgttcgctgtgtctcccggtgcaggcggtcgcgggtgaaatcgataagcggtgtgtcgcccagcttcattcccgccagataaccggagccgtaggtgagccactccaccggcggcagattatcgggggtggtccgggtcgccagcccctccggataatcgtgttttgtttcgtgctgccacagcagttcccccgttccgggatgctgcaccgtctggcgttcgcagttcatccgtccctgtttatcgtactcatactgcacggcgacgcggtggccgtcgcagagatggctgactccggtcagccagccgcgttcgttgtactgccagcgttcagcctcttcatcattcaccgttctgtatgccagccggtccgacgcatcgtagtgccacagggtgatgaggttttcatcctcgctgcggataagctgtccggtggggctgtagtgataacgctgcgtccgcccgtcgaagcccgtttcctgcgccagcctgtccagcaggtcgtaagtaaaagtggtgccagctccgttctcattgacaagccgggtgacgcgaccagccgggtcgtattccatctgccgcgtcaggccgcctccggtggtgctcaccggatgccctgcggcgtcatactctgtggtctgcctgctgccgtccgggtgaatgacagcggtcaggtcgccagccatgttgtattcatagcgggtctcatggcccgcggcatcctgctggctgaccagcctgccccgttcatcgtaagcgcggtactggctgagcccttcctcccggtgaagggcggtgacctgcccgaagcggttgtattcatagcgggtctggtagccggagcagttggtcagggtcagcagctgcccgtagcggctccacgtcatctgtttccggctgccggtggcgtcttcggtggcagagggcagttcgctgtgcgggtcatcataataataacgggtcacatcgccgctgcgggatttctcctgcgccagacgcccccgctcatcaaatgtctgctggctgcgcaggccgtcagggccggtggtggcgatgagctggcgctggtcgttataactgaagcgtacacgccttccgtcaggcgtgacaatttctgttacatttccggaagcgatattcagccggtattcggttttacgcccggccgcatccgtcatcgccaccatgcggcccgcgttatcaaattcccgcgtaatcgcactgccgtcggcctgttcttccttaatcacccgtttcagtccgccttcgccttcggtgtgcagcacctcgcggcggttcaggctgtcggtaatgatgacggcatttttctcatagccgtaggtatagcttaa

SEQ ID NO: 394170 - DNA, 345 bp, Salmonella enterica; identical to SEQ ID NO: 204904

SEQ ID NO: 394171 - DNA, 222 bp, Salmonella enterica
atgataatggggatgctgttatgtgaaattgacggggaattcagaatcaagagataccgaactcaccctcagccctacctgataaatctggagaatgggagaatagaggcgctgccagtagatgatgatggttacagttctgcacccgctatattcggggtgatcacgtacatcattaatgatgccaggaacgcggagtttgatgactgtccggtgatgtaa

SEQ ID NO: 394172 - DNA, 615 bp, Salmonella enterica
atgaaagatctcaagctaaacaccaaccacggtcctcttaaccagaaacatctttttgctatcgacaggactatcagcaaagccatggaagaatacacacgagtaatggcgttacgtgtagatctccgacttcctgctgatcctcatatccccctgaatcttgatgatggtctggtgagtcgtttcattgaatcattacaggctcaaattgatgcagatctaatacgtaaagccaaagaaggtaaacacgtttacccttgtcaccttcgttacgtcagtaaacgagagttcaatgatggggaaacccggatgcattaccacttcttcctgttgttcaataacgatgcctatacgttcctggggaaattcgtggatgacgctggcaatttagcctcaaagattgctaaagcctggtgtagtgctttaggactcgaatatcccacctataaagccttaacccactttcctgagaaacctatataccgtctggtatccaaagaaggtaagcaaagcgcaagctaccgtcagcttatttaccgggcgagctatctcgccaaagaacgaacgactgtaaagcgagttggcgaacgtaacttcagtaccagccaaaagtaa

SEQ ID NO: 394173 - DNA, 216 bp, Salmonella enterica
atgagcaacgttattaccaacactgaattactgaacgaccaaatggttactatggcatttatcaccgactttactggtatgactgataaatggttctacaaactcattagccagggaaaattccccaaaccaatcaaacttggaagtagttcccgttggttaaaaacagaagtagttgaatggttagaaaagcacatagctgcatcccgtggctga

SEQ ID NO: 394174 - DNA, 396 bp, Salmonella enterica
atgcgtattttacaaaccactatcggcctgagcgctacgggccatatcgttaccgctgctgaggtagctaaagccccgaccgttattacctgcacctgccatcattgcggttgccctcttattctcaacaacggcggtgggtttctgcctccgtggttcgagcataatcaaaatgcctatcctgtcgataagctaaccaagtgccctcatgttgaccctgaagggaaagagtcagcacagatgaaagcgatgcgtcagttaatccgggggatacaaccggctgctgcggtgcagcgttggcattgtgctatgtgcaataccgattacagcggtgagaaacattgtgtgaaatgtaatacggggattcacagcgcagagtcaattcaattgcaatga

SEQ ID NO: 394175 - DNA, 426 bp, Salmonella enterica
ttgtggattacctattatcataccggcattgatgatgccatacgtttaggagatgaactacgctcacagcacctgcaggataatcccattttattaagtatgcaggttatgtttctttcgcttaaaggtaaacatgagctggcacgaaaattaactaaagagatctccccgcatgagataacaggacttattgctattaatcttctttatgctgaatactgtcagaatagtgagcgagccttaccagcgataagagaatatctggcaagtgaactgagtattgataataatcctggactattaccattagtactgattgcccacggcgaagttattgccgagaaaatgtgggaaaaatttcaaaatgaagacaacatttggttcaaacgatggaaacaggatccccgcttgattaaattacggtaa

SEQ ID NO: 394176 - DNA, 435 bp, Salmonella enterica
  misc_feature (404)..(413): n is a, c, g, or t
atgccacattttaatcctgttcctgtgtctaacaaaaaattcgtctttgatgattttatactcaacatggacggctccctgctacgagcagaaaagaaagttaatattccgccaaaagaatatgccgttcttgtcatcctgctcgaagccgctggcgagattgtgagtaagaacaccttactggaccaggtatggggcgacgcggaggttaacgaagaatctcttacccgctgtatttatgccttacgacgtatcctgtcggaagataaagagcatcgttacattgaaacactgtatggacagggctatcggtttaatcgtccagtcgtggtggtgtctccgccagcgccgcaacctacaactcatacattggcgattcttccttttcagatgcaggatcagannnnnnnnnnagatgatacccgatggcaatga

SEQ ID NO: 394177 - DNA, 471 bp, Salmonella enterica
atgccatcaagatctgagcttttattagaaagttttgcaaaaaaaattggtgtgagtgatattcattttaatgaaaatagattgtgttcatttgcaattgatgagctctattatatttcactgtcagattccagtgatgaatgtatgatgatatatggtatttgtggtaaatttcccacagatcaacctaattttgctcttgagctgctaaatgcaaatttatggtttgctgaaaatggcggcccatatctatgctacgaatccggctcgcagtccctactgctggcactacgtttcccacttgatgatagttccccagaaaaactggaaaacgaaattgaagtggtagtcaaatcaatggaaaacctttacctcgtattacataatgagggaattacaatggataatagttatttgaaaatcgaagaaattacttctagttccaataagcattattatgccggaagataa

SEQ ID NO: 394178 - DNA, 1632 bp, Salmonella enterica
atgcctataattaatggaaataaccctgctgctatccccgtggctccgcctctgccaaacagcaactctgcatcttcattacataatggggccgggcatggtcagcctcagcagacaataaccagctctggcgcattaaatcagcggtcaacgctgacaccgctttctcctgtacccggcacttccagtagtgctggcaatgtttcgcacctcccatcctcgccacgtaacttaaccttaccgagtaccgttaccttatccaacgaattagaagtaatgaacgattggtcatcactgaacctgttacatgaagatattggttccaggggatttagggttgagaaaagtagcgatggtaccgttcatgctattggagaaaaagatggcaaaagttatgatcgcatactctcacccgaagaagtcgaaggcctggcagcactaggttcgggtaacgatcgatttgtttttagtggcaaccgtggtggcgctggccatgtcatggtcactgctgcatctgattttggtcttgcgcgcgaagccattgtcaaaaaactggacagacaacataccactgatgctggtactgatccgatgccatctcacaactcctctggcgcgatggagatcggtactgacgcgcaaccattgcctgagtcttccagcccattaaagagcgaccccaaactttgggtatcattaggtgtcattactgccggtttagttggtttggccgttacggggatagttcaggcaacagccttaacgccggcaccggaagaaccacaagatactgatcctgatgccgccgctgcgaatgcagagaaggcggcaagagaccaactcactcaggaggcatacaaggacccgaataatcagacggttataattgatcagaatggaaatgccatgccttcaggtgatcttaaagatgatgttctggcagccatagagcagcaggctaaagctgccggagaagaagcaaaggccaaagcgattgaagataatgccactgcacaaagaaactacacagaacagaaagaaaaacacgatcgcgaaatgcttctatcctccgggattggctacggaatcagctctgcattgattctggggggaacggcgggattaggcacgacgatagcgcttcatcaccggaacaataacggcgctgagcaacccccaattgagaataactcaaatagttttcccatgaatccttttggttcagttaatagcgctagcccggcagcaggtcgctctgaagaacccgaccccatttaccaaaacacgttgaatgtcaggaaccccacccctgaggaagatccttcagcgctttattccagggttgtacccagggctgaagatgtacaatctctctctgactcggagtcttttgatagcgtttccctgaactcggttcctgatgctatatacgctgagctggatccaactgcattaggcgcaccaagtctttcaccctcctcagaaccaacgctttactcagagatgcagcagaacccggaaagagctaattttgatgcaatcagaagtcggatcgaaggcgtgtttagccgtaaccccacatcaccttctgcaggagcagcaagactaaccggccctgctaactttgtctaa

SEQ ID NO: 394179 - DNA, 195 bp, Salmonella enterica
atgcaatacagcgatcgccaggaagggtatatggctttagtaactttatataatgagttaagtaaaacactcaggatatcttccgcaaatcattatgaaaaaaatggggctgcgataagtcaccccaatgtctgcttgacacccaactttttatcgttatttaaggaagttacgggcagtaatttccgcaaataa

SEQ ID NO: 394180 - DNA, 387 bp, Salmonella enterica
atggatacaaataagaaactttactcagccacaccgtatacgcaactcattgaacaaatagaagagctacagcaggaagctaaacgcttgcgcgatctagaaatacgcagtgtcattgacactattcaaaagcagatttcatattataacataacgttacaggagctaggatactctggcgcctatgatgatggccgatgttcaagacgctctcataaagggatctactataagaataaagatggacaaacgtggtctggggtaggaagacaacccaagtggttaaaggaggcgctcgctaatggaatgaagaaagaggatttccttgtcaatgaatctgacgataacatttcagttgtactcaatccgctacaagataggcactaa

SEQ ID NO: 394181 - DNA, 255 bp, Salmonella enterica
atgatgagtttaacagaattggaagatatgcttattgaggacactgagaacaacagtgaaaagttactgttaattttgaaggagaggcgtaaacagttaaacaaaagtttagaaaatcctcttgacaaattagcttataagaaaacggagcaaatgctcgttgcctgtgaggctgcacaacaagtgattgagttgatagcttttcgatttagtaataataagaaaaaaggtgatatccatgagaaaaaaaattga

SEQ ID NO: 394182 - DNA, 687 bp, Salmonella enterica
ttgcgagaagagtggcatcttgggaagaaaagtatttccaatatgatccatcttctggaaaaacatggagtaaagatctttttcctttcagagaatacagcagatattgacgcattttccttctggaaaggtaatgtcccctatatattcctgaatacaaagaaaacgggtgaaaggagtcggtttgatgctgctcatgagctggggcatttaattatgcatcgccaccatggtgttctacaaggcgtggacatagaaaaagaggcagatgcttttgcgtcagcgttcctgatgccaagggaaaacatccttgcgattaaaatggcagtacccactctggacaaaataattcagcttaaatcgcactggatagtttctgcgttcgctctcattgtccgtatgaaaaatctgggagcgttatctgaatggcagtataacagcctgatacgcgatgcttccgcgagaggttatcgttatggggaacctggtgggatcgaaagggaaagatcactcgtaattgagaaagttttgtcaatgcttcacgccgaaggtgtgacattacccgtaatgtcacgaaagttgaatattccgcttgatgaacttaccagcttgttatttggtgttggttctatcagcggtggtggggtctcatcttccacaccaccgccatcactccgccttatttga

SEQ ID NO: 394183 - DNA, 597 bp, Salmonella enterica
gtgttacctgaacatgaaaggcagattttgcgggagctggccagagagactcccgaccacgacagacttaaactagttgtgggtaacagagagtatgaagttagttacataccctggttggatggattcagcatcagttattcttcgttaagccgaagtgcagagcgtgttgccagtcaactggagatgcagttgaatggagggaggactttttcacaagttcgggtcgacaatcttatcgctaatccgcccggaggtagctggctacaccataatgaactgcaggaaaaagtatcttcatgtgcatttaccgtcaacaaaaatgagtttccttgccaggatgagtatcttgaatgtccggttacattgtgtgtacccgataaaggtgtttttgttaagatatccctggatttaaatgtctgttgtttatttgattatgatacgctgaaccagctggttacacaggatgaacctcatccgataagcaggaaagtaattacggaacgttttattgtgcccagagatgaatgtcatttcgatacagagcagagtaaatttgtctggcatggccctgaagagaactacacttatttatga

SEQ ID NO: 394184 - DNA, 165 bp, Salmonella enterica
atgttcagcccggtggtgatgcatttgtgccacgaatttctcacctggcttaacagtgatacgtttaacgaggtaattttcgccgctatcaatcacattatattttccccaagggcggaaaacttcttgatgttgtttatattcgttcctgtcattctgttttaa

SEQ ID NO: 394185 - DNA, 432 bp, Salmonella enterica
atgaaactccagttaataacagaaagcatggaggattttttcgtagacaaaaataaactggtatatcaaatcatcggcaaagcgaaaatcatggcaattagtggagccttatttgagatgaaatgcccggattatcttttttctgggcattatcgagagcatttaattaatgaattgggctatgaaaatgttaaacaattgtcatttttttggaaggatggggatggtagagcggaatatactaatactaatttttgtgacaagcttctggcatatggctcaggtaatctggaatacatttttcgtaatgaaccattatgggagatagtaaaatatttgttacctaaaggtggtgaaattaaagctaataacattgatgaaaattttttgaaccggctaaacaggacattatcaccatatgaggctttataa

SEQ ID NO: 394186 - DNA, 180 bp, Salmonella enterica
atgagtttttacgagtatctgagggcttgcccctccagtttgatgccattaagtgaaagttgctttttggctttaagcatagtcccaatagtgactaacctagtcactcgtattagtgtaaccgatgagtcacacctacggtgtaatgttgttcatttgtatcgggttgaagccttctga

SEQ ID NO: 394187 - DNA, 198 bp, Salmonella enterica
atggtcattgagaatggtaaagacaaggaagctttattaatcataaaactggctgagcgttatgatattcctgttattgaaaatgtgcagttagccagaagtatttacggcaaagtaaaaaaagggcagtacattactgaggaccttttcgaaccagttgcgcaggttatcaggattgcaatggatttagattattaa

SEQ ID NO: 394188 - DNA, 129 bp, Salmonella enterica
atgatacaagagaaaaacacttgcatctcttgtatcaagcgaaaaattaacgattccttgttcaagtggaaaatgcactatatcattattttctgtgccaattgtaacatttccggggggaagctgtaa

SEQ ID NO: 394189 - DNA, 267 bp, Salmonella enterica
atgcgtaaagcccgttttactgagcatcagatcatcgctgtgattaagtcggttgaagccggacgaaccgttaaggatgtctgccgggaggccggtatttctgaagccacctggtacaactggaagtccagatacggcggtatggaggcttctgatattaaaaagatcaaggatcttgaggacgagaaccggcgcctcaaacagatgtttgccgacctgagtcttgagaaccgggctctgaaagacgttatcgaaaaaaagctttaa

SEQ ID NO: 394190 - DNA, 693 bp, Salmonella enterica
gtggcggctgaacgatacccgcgatacggttttccgaagctttatcaggttctgcgacgtcagggatatcaatggaatcacaaaaggctccaccgtatttactgtctgctcaagctgaattttcgccgtaagggtaaacaacggctgccggtgcgtaatccttcgccgctggccacgccggaagcgctgaaccagagctggtctgtcgattttatgcatgatgccctggtctgtggccgtcgttttcgcacgttcaatgtcgttgatgactttaaccgtgaggcattgtcgattgaaatcgatctgaatctgccagctccacgcgtggtccgggtgctcgacaggatcgcggcaaaccgtggctatcctgccatgcttcgcatggataacggaccggagtttatctcgctggcactggctgaatgggcagaaaaacatgcagtaaaactggaatttatccagccgggtaagccaacgcagaacgctttcattgagcgttttaaccggacataccgtacagaaatactcgatttttatctgttcagaacgctgaatgaggtgcgggaaatcacggataaatggttatcagaatataactgtgaacgcccgcatgaatcgctgaacaatatgacaccggaggaataccgacagcatcattatttagccgggatctcaaaaaatgcatggaactaa

SEQ ID NO: 394191 - DNA, 159 bp, Salmonella enterica
atgattaacgcgaatgataatgaacgtaaatatggcagaccccctcaccgccatattcaagaaagagctcgtacgaaagtacgggcttttttttcgcatttgacccgtcgattaccggatgatggcgcaatttacaagcgccttatccgcctaccgtga

SEQ ID NO: 394192 - DNA, 291 bp, Salmonella enterica
atgcgcacgattggcgtgttacccaaaagcgtactgatactggaatgcctcggtatgattttgctggcgcttgctctgctatcgcttaatcattaccttacgctgcccgcgccgtgcaatacgccgctggctggcgtattaatggttttcctggccgtcgtgttgatcctccccgccgcggtggcgatgatgtggcgtattgcgcaattgctggcgccgcagttgatgaaacgtccacccgacatttcttcccgttcagatagagaaaagcataatgagtccgaccattga

SEQ ID NO: 394193 - DNA, 378 bp, Salmonella enterica
atgaccgtcctctcctcacgcaacgccttaaaacgtcgtacctgggcgctgtttatgttcttctttttaccgggactgctgatggcctcctgggcaacccgaacgcctgctattcgggatattctttccgtttctaccgcggaaatgggggcggtcttattcgggctttctatcggttcaatgagcggtattctttgttccgcctggctggtgaaacgatttggcaccaggaaggttattcgcacgacgatgacctgcgcagtaggcgggatggttattcttagcgtcgcgctgtggtgcgtgcgcctcgccgctgatttttgccctgggattagccgttttcggcgccagttttggcgcagccgaagtggcgattaa

SEQ ID NO: 394194 - DNA, 4149 bp, Salmonella enterica
atgagcggaaaaccggcggcgcgtcagggcgacatgacgcagtacggaggcccggtagtccagggctcggcgggcgtgatgattggcgcacctacgggcgtggcctgttcggtctgtccgggcggcatgacctccggcaacccggtcaacccgctgctgggcgccagggtacagcccggcgaaacggattttgccctgcccggtccgctgccgtttgtgctctccagaacctacagcagctaccggacgaaaacgcctgcgccggcaggtcttttcggccccggctggaaagcgcccttcgatatccgtttacagatacgcggtaaggaactgatactgaacgacaacggcgggcgcagcatccactttgcccctctgtttcccggtgaaacggccttcagccgcagcgagtcgttctggctggcgcggggcggcgtacccgcattacatgaaagtaatccgctgtatcttctctggcagtcgctgccggaagatatccgcaccagcccgcatgtttacctggccaccagcagcttacagggaccgtggtggatactcggctgggctgaacgcgtccctgcgccggatgacgccttacccgccccgctgccgccgtaccggacgctgacggggcttgttgataatttcgggcacacactggcataccaccgggatgcggacggggaatttgccggggaaatcaccgccgtgacggacggcgcaggccgccgcttccgtctggtgctgaccacacaggcacagcgggcggagcagcaccggcagcaggcagtatcagaagccgcatcccccctctcattcccggacaccctgcccgccacggcttacggcgcagacagcggacgccggctggcggaagtgtggctgacccacgacccggaatacccggataatctgcccgccgccccgctggcgcgctatgaatactcgccgcgtggtgaactggcggtggtatatgaccgcagcggtacggcagcacgcgggtttacgtatgacccgccgcatccgggacggatggtggcgcaccgttatgcgggcagaccggagacaggctatcggtatgatgctgccggacgggtggtggagcagcgtaatccggcgggattacgctacacctacacgtatgacaggaataccgtcaccatcaccgacagtctgaaccgccgggaggtgctgcataccgaaggcgaaggcggtctgaaacgggtggtgacgctggagcgcgcagacggcagcgtccttcacagcgaccacgacccggcgggaagacttattgcgcagaccgatgcggcgggccgtaaaacggaataccgtctgagtcccggctccggcctgttaaaggaagtcatcgcgccggacggcagaaaaaccgaattttactacaacagccagcgccagttaaccggtaccgtgtacccggacgggctgcaaagccggcgggaatatgatgcccggggcaggctcacagccgacaccctgcgcgacggcagcacgacacgctatttttatgacagcccgtacagtgaataccctgcggccaccgaagacgccaccggcagccgcaaacagatggtccggagccgctacgggcagctgctgaccttcaccgactgctccgggtatgaaacccgctatgaatatgaccgtttcgggcaactgaccgccgttcaccaggaggaaggaataagcctgtaccaggtttatgacagccgtggcaggctggtcagccggaaagacgcgcagggcagggaaacgcgctatgaatacagcatggcgggcgacctgacggcggtaacctccccggacggcagccgccgcgaagccgcccgtgatgcccgggggaatatcatcagcgccacgcagggggggctgacgcgccggatggaatatgacgccgcaggccgtgtaacaaaactgaccagtgaaaacggcagccacacggtattcacttacgatgtgctggaccgcctgacgcaggaaaccggctttgacggcaggacgcagcgttaccgctacagcgccaccgggcaggttgtctgccacgaagaagcagatctgaccacgctctggcattacgatgagtcagaccgcgtgacgcgctgcaccgtgaacggtgaaccggcggagcagtggcgttacaacgaacgcggctggctggaggaaatcagccacctcagcgacggtcatcgggtcgccattcactaccgccgcgacaggcggggccgtcttatcagcgaacgtcagacggtccatgcccctgagacgaatgagcttctctggcagcacgaaacccggcacgattacagcgataagggactggcgaatcgcgtgacgccggacgccctccctgcggtggaatggctgacctggggcagcggttatctggccggcatgaagttcggtgacaccccgcttatcgacttcacccgcgaccgcctgcaccgcgaaacgcggcgctgctttggtgagtacgaactgaccacggtccggacaccgggcggtcagttacagcgccatcacctgaaccttccgcagcttaaccgtgagtatatctggaactgcggcgggcagcttgtccgcatctgcggacagtatgagacacgggattatcagtacagcgaaaccgggcggttactcagcacgcgcattacatcgccccgcagtgacctggagcagtggacgttcaccgacccggcgggcaaccggacagcggcgcgggacaaatacccggtgctgccggaaagcttcccggataaccgcatcagccaggatgtcgataacgtttatcattacgatgaacacggcaggctgacggaaaaggacgagcgccggatacgcccgcagggcagcctgtcgcaccattacgggtatgataaccggcaccggctgacgcactaccgccagatgcaaccgggcagcgtgctgacggaaagccgctatctttacgacccgctgggccgcagaatcagcaaacgggtatggaaaagccaggaggaacgcgaccttaacggggacggatatctctggctgaaccccacgccggaggtggcgtggtacggctgggacggcgaccggctgaccaccacgcagacggacgacacgcgcattcagacagtatacccgccggggagctttacgccgttaatccgcactgaaacggcaactgaagcgctggcaaaaacgcatcacaggagcctggcggaaaaactccagcaggatgcggggatggcgtttgtgccggagctggtggcgctgctggataacctggagcgggagctgaacgcaggccgggtgagcgaactgagccggcagtggctggcgcagtgtgggttaactccggagcagatgaagagccagatggcgccggcgtatacgccggcgagaaaaatccatctgtaccactgcgaccaccgtggcctgccgctggcgctgattgacgttaagggacggattgcgtggcgcgcggagtttgatgaatgggggaatatgctgcgggaggataacccggataacctgcaacagctaatccggctgccggggcagcagtatgatgaggaatcggggctgcactataaccggcaccggtattatgatccgggacagggacggtatatcacgcaggacccgacagggctggcggggggatggaatttgtacaaatatccactaaatccagtatcaggaatagatcctttaggtctgaaaagcatgcgctctgatggacacccgtgggggtatggttgtggagatgagagtacagactggattgttccagattctttaggctccgctgattttttacctgcctgtagaaagcatgacatctgttatggaacattagatagtcataaatatacttgtgatcaaaatttgggcaaaaatatgaaactagcatgtcaaagtgatttaaaaggatttcataaattataccgccctctttgcaatggaatggcggacggatataaacttgcagtaagtaaatttggtcagtcagcatatgatgccgcacaagaaaaggcattaaatgattataaagaacttgaaatgttagacctgttacaagagttaggagaacctgtcaattctgatgattataataaagtatatgatagagttaccaaccctgggtaa

SEQ ID NO: 394195 - DNA, 1329 bp, Salmonella enterica
atgtctgatgaacgcacttacagctacaggtatgataaccggcaccggctgacgcactaccgccagatgcaaccgggcagcgtgctgacggaaagccgctatctttacgacccgctgggccgcagaatcagcaaacgggtatggaaaagccaggaggaacgcgaccttaacggggacggatatctctggctgaaccccacgccggaggtggcgtggtacggctgggacggcgaccggctgaccaccacgcagacggacgacacgcgcattcagacggtatacccgccggggagctttacgccgttaatcctcactgaaacggcaactgaagcgctggcaaaaacgcatcacaggagcctggcggaaaaactccagcaggatgcggggatggcgttcttaccggaactggtggcgctgctggataacctggagcgggagctgaacgcaggccgggtgagcgaacagagccggcagtggctggcgcagtgtgggttaacgccggagcagatgaagagccagatggcgccggcgtatacgccggcgagaaaaatccatctgtaccactgcgaccaccgtggactgccgctggcgctgattgacgttaagggacggattgcgtggcgcgcggagtttgatgaatgggggaatatgctgcgggaggataaccccgataacctgcaacagctaatccggctgccgggacagcagtatgatgaggaatcggggctgcactataaccggcaccggtattatgatccgggacagggacggtatatcacgcaggacccgatagggctgcggggaggatggaacctgtatcagtatcccttgaatccagtacaaggaatcgatccattcggattagcggcatgtaaggttttatatcctgattatcccatcgaatatatgaatgggcgtacaagtacctggcttggtggacatggaggtatagtaggatatgatagaaagggctcaactaaatattatgaatatggtcgttataaccctagtctagaaggtattgttggtgtcaaattaccaactgatgatggaaatatcagaaatgttattatccctgatttggttttagataaagatggtaatcccactaatgaatcacttgaaaaactcaaggtggctttatcggcaaaagccggaaagaatactaatgcagagctaacatgcagtaaagatgtagatgagaaaaaaatgtatgaatatatcaataaggtggctaatgataaaaaaagagataaatataactggaatccattatcaccaaatcagtgtcgtagttttgctgacgatgctttcgatgcgggggactga

SEQ ID NO: 394196 - DNA, 249 bp, Salmonella enterica
atggcatttcaaattttaacgactactgcagcaagcattacagaactgaaacgtgacccaatgggaactttcaatgccggagatggcgctccagttgccattcttaaccgtaatgaaccggctttctactgtgtgcctccggcactttatgctcatcttatggatattcttgaggatgaagagctcggtcgtattatcgatgagcgtgcgaatgagcgcgtcattgaggtcagcattgatgacttataa

SEQ ID NO: 394197 - DNA, 195 bp, Salmonella enterica
atgaaacatgtcaaaacgaaatttttaatcgtcagtctggccgccgccgtttttgctgcatctgcaatggccggtaagccgggacccaaacctcatggtttagatcttgaaaaggagtgtgcgaaatataagccaccgggtcagttgtggtttccgccgccacctccttataatataatttgttttcagagataa

SEQ ID NO: 394198 - DNA, 600 bp, Salmonella enterica
atgcaagcaaccgccacaacactcgaccacgagcaggaacacgttccggtaaactcacgcaataaagtcgttattgcttcacttatcggcaccgcgattgagttcttcgacttctatatttacgccaccgcagcggtgatcgtgttcccccatatcttcttcccccagggcgatcccactgcggcaacgctacaatcgctcgccaccttcgctatcgcgtttgtggcgcgtccgattggctctgcgctattcggtcatttcggcgaccgggtaggccgcaaagtcacgctggtggcttcgctgttaacgatggggatctccacggtcattatcggtctgttgccgggctacgcgacgattggtattttcgcgccgctgttgctggcgctggcgcgtttcggccagggactggggctggcgcgtttcggccagggactggggctgggcggcgaatggggcggcgcagcgttattagcgacggagaatgcgccgccgcgtaaacgcgcgctgtatggctccttcccgcagttgggcgcgccgatcggcttcttttttgccaatggcacctttctgttgctctcctggctgctgaccgactag

SEQ ID NO: 394199 - DNA, 267 bp, Salmonella enterica
atgaatgattctgaattgacgcaatttgtaacgcaacttctatggatcgtcctttttacgtctatgccggtggtgttagtggcatcggtagttggtgtcatcgtcagccttgttcaggccttgactcaaatacaggaccaaacgctacagttcatgattaaattattggccattgcaataaccttaatggtcagctatccctggcctagcggtattctgttgaattatacccggcagataatgttacgaattggagagcatggttga

SEQ ID NO: 394200 - DNA, 252 bp, Salmonella enterica
atggcaatgccttttcaaataattgattatggtgctaatatcgtttttatttatgatgaatacaacttaactattgattcggcttttatctcctatatgaaaaatgctataaatacatgtagggagggagcctattcatatgataatgttgtttattctctgcatgaaagttttgggatggaatttaatgaggcaatattatattctgatgttctttcctctttgttgctgaaagatcatgggtatttttga

SEQ ID NO: 394201 - DNA, 492 bp, Salmonella enterica
  misc_feature (59)..(68): n is a, c, g, or t
atggcggagataaataaatccattgttttatccaaggaaagtgaggatattataaagtnnnnnnnnnnatgtcatgtcgaacatatagttgcaaaatctttacatgaagaatttatgtttactccgaaaaatctttgtgtcatatgccccgattgtaacgaaataaaacgagagcaggaagtaatggcaaacatagaatcaacattgaaaaatgactctccaaaaacatatcctagaagcagcgcagcatttataacataccacccgcactttgataattataatgatcatatcatcaacattgatgggtattatttagataaatcagagaagggtgccaatactattagaatgtgtgtactcaacagaaaactcagagaatttggatatgatgatagtgcgattgcaattccaggacatttagatttcatgataaggattttctatagtggtaaaattgatgaaattaaaaagctaatcggcatgaattaa

SEQ ID NO: 394202 - DNA, 258 bp, Salmonella enterica
atgaagcggctgatgctctccagcaccctgctgctaacctgcatggcaatgatgttttatctatcatcaggtaacgcgctgcagattaaccgcagcgatctgctgttctggcgcatcactctttacggcgtgatcttttgtacaggctggcgtctgtatgaccgatttccaccgtatcgcccggccatccgccgcatcgcgctatggtttgtcgtgctgattgtgctcaatgagtttgtgccggaggtgttacggtga

SEQ ID NO: 394203 - DNA, 327 bp, Salmonella enterica
atgacgctgacgtttgtgcagttcgcactgttcttcctcaccttctggtgggaactggcacggtggctcgatagctggctgctggatgtgctctacaacagcgatacccacagtagctggaatctcgccgggatacagaatactcaagatgacgtgattattaatctggtgatggggtcgatgtttctggtgctgccgactttctggttgggggctatgacgtgggctggagtgagggttggcgtggcggtaaatggcgcgctggcgggtggggttaaggtatcgcaggatagtggggggaaggctgggggaatggttgggaggtga

SEQ ID NO: 394204 - DNA, 984 bp, Salmonella enterica
atgcaaaatgaattatatagaactaaaatgggaagattatttgtaggggactcggtatccttatcacaaaaatatcttaacagacattataaaaataaattcaacttaataataacttcgcctccgttccctttaaacaataaaaagaagtatggaaatctacaaggggaggcttattatgactggttcatctccttagctccaatattctcaaacctacttactgatgatggttccttagttattgagatcggaaattcatgggagtctggtagacccatacaatcactcttacacttagagtgtttactagggttggtaaaaaatcctaattctgatttaaggttaatacaagagttcatctgttataacccgtcaaggcttccctcccccgcccaatgggttacagtaaatagaattagaaccgttgatagctatacgcatgtatggtggatttcaaaatctgattttcccaaggcaaataatgctaaggttcttcgaccatattcgaaagaaatggaaaatttgattaagcgaaaaaaatacaatgcaggaaagagaccatctgaacatggcataagtcccactgcttttttccgagataatggaggtagtattccacacaatctatttgaattagatgcgattgatgcttcccgagacgtaagattaccacacaatattcttagttattctaatacaacatctaatgactattactttaaaagatgtagagaaaaaaatatatcaccacatcctgcacgaatgcacggagggcttataaatttctttattgattttttaaccgacgagggggacttggtgcttgatccttttgcaggaagtaacactacaggatattgtgcagaaaagttgaataggcgctggatatcaatagaggcaaataagagctatgctcttgattctatgattcggtttgaagatccagaattaaatacaaagataaaattatttgagatatag

SEQ ID NO: 394205 - DNA, 270 bp, Salmonella enterica
atggtggatagtctggaagcggagctacagcgcggggaactcagcgccgtaaaccgggcgtggctggcgcagtgcggcctgacgccggagcagatacaaaaccagatggagccggaatacacaccggagagaaaaatccacctgtaccactgcgaccaccggggcctgccgctggcgctggtcaacgcggaggggaaagcggactggtcagcggaatatgatgcgtggggtaatgtactcagtgaaaagtttcagaggtttgcctcttga

SEQ ID NO: 394206 - DNA, 219 bp, Salmonella enterica
atgaaaaagattttagttgccactgctgttgcagcggtgctggcttcaagtgctgccaacgcagcgactactaccttactgaaagtgaccggcctgctgtccgtggcggcctgtaccccggaattaagcggcggcggcaccgtcaattataaccgtatccacctggcggatctggacgccaccagcaccaaccaatgggcaccaaaaatatcacactga

SEQ ID NO: 394207 - DNA, 702 bp, Salmonella enterica
atgtcaaagacacggtgcacattcgcgcttgccgcgccctttttattcgccacgcttttttctcaggttcacgccgacggcatggtgccggaaaccaccttactggtgattgacgagtccacccatagcggcgtcatgaacgtcaaaaataccgatagttccccggcgctgctctataccactattgttgacctgccggacgataccggcgtgacgctcaacgtgactcagccggtggtccgtgttgagccaggccagcagcagcagttgcgctttattatggaaagccagcaaccgctgacggtagaacactttaagcgcgtgttattcgaaggcatcccccctaaacgtaccgacaaaaatatgaagattggcttcaatatccgccaggatctgccggtattaattcgccccaaaaatctgccggtagttaccgatgcctggaaactgctggagtggtccggcagcggcaaagccgtcaaagtgaaaaacccttcggcttacgtggtgcggatgtcgcttaacgtggattttctgccgtcaggcgctaagggcaagctgaaaaagacctacattctgcccggcgaaacgctggatgtgaaaatgcaaaacggcatcgcaggggatacctcggttcgtttctttccggcaagccgctacggtgtggaagtccccagctttaccgcgccgctcagccaataa

SEQ ID NO: 394208 - DNA, 2415 bp, Salmonella enterica
gtgaaaagtcttaatcttgcctcttgcatacgagccgcattaccttgctcacttactgtctctttgcttctcgcgcttccggcgcaggccagagaagtgacgtttgatacggatattctcgcttcaagaggcatcagtaagaaccttgccgattatttttctgaagcgccgcggtttctgccgggaagccataccgtagccataaaaatcaacggtatggaaaagggatcgctggccgtccgtttcaatgaagaaggtcagctctgcgttgacgaggattttcttagcgcgacgggcctgatgcccatcagcatcggcaaaaacgaagcatgtcacgacctgcgcgccacttatccttcagccgtggtaaaccccatgccgaatagcgaatcgctggaactttatgttcccgcgcaagcgctggataacggctttctttcgccacaaaactttataaaaggcggcaccgccgggctatttaactataacctgttctccagccgtaatgacgtctccggcggcgacagcagtacctactctcaggctagcctggaagcggggttgaatatcgcggaatggacgctacgcagccgttatatgttgaccgacgataacggcgaatatcagtcagacagcctctatacctacgcggaacacgttttccagcaacaaaaagtgcgcgttcaggtcggccagattaacgtcagctcatcgctgtttagcggcgcatcgattgacggggtgcagtttcttcccgaacaaaacctgcaacaggatattccgggcgtcgccatcaatggtattgcgcgtacccaccaggcgcgcgtggaagttcgccagtccgggcagttaatctataccgcccctgtgaatgccggcccttttaccctcgataacgttccggtggtgcgcagtaatgcggatctcaatgttagcgtggtagaaaccgatggctccaccacgcgttttatcgttccggcctcgtcgttcaatctgcagtcattgcgccctgccgggctgacggtgtcggtaggccgggtacgggaactgaccaccgattacgacaaaccgtatgtcgctaacatgacgaacggctggaatctaaaccgtaactggagcagcaccgtttccggcgtattagcagaagattatcaggcgacgggcggtatgctccagtggctgcctgcgcaggggataatgatgtcaggctcgctcctcggcagccgggaatctttcggcgacgcccagcagggcgcgaagggggaattatccaccagcatgggcctgccgggcgattttagcgtggacctgagcgccgcgaaatacagcggcggctatcgcgaactgacggaagcgctggatgatgattttcacggttatcaaagcagctacagcggcaacctgagctggagaaacgacctgctgggctcgttctccctcggctattacgcctatgaagccaccaacggctacgacgattcccgcagtatgattgtttcctggggcaagtcattcaactatttcaacatcaacgccaactggcaacatgccgttaatcagcaggatgacgatgacagctacaacgatgatgatgtgttttacgtcaacgtcagcattccgctgggtacccagcgtgtcggcgcttacatgcgcaatcaggggaataaaaccgcctacggtttacaaaataatggttctctcggccaggatacccactactacatttccgtcgatcgcgataacgaaacgaatgaaaattccttcaacggcaacctgaataccaatcttcactatacccagttgagcataggcgcaggctcaagcggcgacaatcagcataactacaacgcgacgttaagcggcggtattgccgcccacgagcatgggctgacgttcacgccttatagcgttaaagatacctttgccattgcccgcctgagcgaaccggaaagcggcattgaaatttcgacccctcagggccgggtgtggaccgactattggggccaggcggttgtacccggcctgaccgagtggcggaaatcgcgtattgaagttaacgccaacaccttaccgaaaagtatggacctggctaacggcatcaagaatgtttccgtcgctcatgccgcctttaaagagctggaatttaaagtgctcaatacccggcgcgtcatgctggaagtcaaacaagccgacggttcctggctgccgaaaggcaccagtattgtcgatgagaaaaataactatctggtcagcgcggtagatagcggacgcgtgtttattaccgatatgtcgaataacccggcgctctacgccgtcgacgacgatatgcatcgcctgtgtcaaatcaattaccacttgagcgacacgcaggacaaagaggcgttttatgaaatggcgaaaggagtgtgcaaatga

SEQ ID NO: 394209 - DNA, 633 bp, Salmonella enterica
atgccatcagtttttcttaacctgtcaggaagcagtgtgttacctgaacatgaaaggctgattttgcgggagctggccagagagactcccgaccacgacagacttaaactagttgtgggtaacagagagtatgaagttagttacataccctggttggatggattcagcatcagttattcttcgttaagccgaagtgcagagcgtgttgccagtcaactggagatgcagttgaatggagggaggactttttcacaagttcgggtcgacaatcttatcgctaatccgcccggaggtagctggctacaccataatgaactgcaggaaaaagtatcttcatgtgcatttaccgtcaacaaaaatgagtttccttgccaggatgagtatcttgaatgtccggttacattgtgtgtacccgataaaggtgtttttgttaagatatccttggattcaaatgtctgttgtttatttgattatgatacgctgaatcagctggttacacaggatgaacctcatccgataagcaggaaagtaattacggaacgttttattgtgcccagagatgaatgtcatttcgatacagagcagagtaaatttgtctggcatggccctgaagagaactacacttatttatga

SEQ ID NO: 394210 - DNA, 240 bp, Salmonella enterica
atgacaatatttaagaaaattaaacactatctgtttgggtgtgataaatccgtcgaattgcggctggggccggcagaaatcctggtgtctgatgacaatggcgttattcctgagcagggcggcagggttttgacacaggtgataattctggatgcaccgaagggacagattgagtgtgtttaccgtccgcagcaggtgaggcaggatggcggggaatgggaagacatcaaagggatgtga

SEQ ID NO: 394211 - DNA, 717 bp, Salmonella enterica; identical to SEQ ID NO: 392579

SEQ ID NO: 394212 - DNA, 168 bp, Salmonella enterica
gtgaaacccggcttcggcattgcgccgtttgatggacaggtacttaccgggcgtcagtttgtggtgacggtagaggtaacaacctatctttcgcagaaggctttccagtcgcgtgataatgcgcaaatcgaagagatcctcaacctcaatttcgaagcgcaaccctga

SEQ ID NO: 394213 - DNA, 192 bp, Salmonella enterica
gtgaacaacgtcaaacttcccctgaattctcgctttgatttgatctttttcatattatctatatgcggcatcattgtgcctgaaaaagcagcaggcgagccattttataaaaatagccatttagatgtcttgatgcctgaaatggtggtgaaaaattgtgctattagagcagaaaaatctaatccgcaataa

SEQ ID NO: 394214 - DNA, 465 bp, Salmonella enterica
atggccgtcatgagaaagaaaacactcgacgcagctgaagctgaaacagctcaacgtctccgggaaatttggaacgaaaaaaaagtaactttgcgccttacgcaagaaaaggcggcagatgcgcttggcttcagtacgcaagccaccgttagccattatctgaacggtaacattccgctcaacactgacgcagcattaaaattcgcagcactgttgggagtaaaacccgaggaactacgacctgacctagctgaactaatgaactacgtccgtaagacaggtactcatgttgatgattattcatcggcgggttggagactactgaagccagaagaaactgaattgattgagttatacgaaagattaccccaaagtgaaaaagaacggcatcttactgaattaaaagaaaaagtaagtggctttgataaattatttgaagagcttctcgccgccagaaaacagtaa

SEQ ID NO: 394215 - DNA, 627 bp, Salmonella enterica
atgaaccaatcacaatttcagcaggcggctggtattagcgccgggctttctgcgcgctggtatccacatattacggcggcaatgagcgaattcggtattactgctccactggatcaggccatgttcattgctcaggcgggacatgaaagcgctggttttacaaggctggtggagagcttcaactacagtatcgccgggctgaccggattcatccgcgccgggagaatcactccagatcaggccagtactcttggacgaaaagcctgtgagaaggcgcttccgctcgagcgacagcgtgcaatagctaatctggtatacagcaagcgaatgggtaacaacggacctggcgacggctggaactaccgcgggcgtggacttatccagatcacaggtctgaacaactaccgtgattgcggtaacgggatcaaaactgagctcgttgcccatccggatctactggcacaggatacgtatgctgcccgtagtgcagcgtggttcttcgcgactaaagggtgtctgaaatattccggcgacctggtacgtgttacgcagatcatcaacggagggcagaacggcatcggtgacaggcgagagcgctatgaaaaagcgaaatcggtgctggtatga

SEQ ID NO: 394216 - DNA, 399 bp, Salmonella enterica
gtggatgagctggtttcgattcatatcctcaacattattcctgtgattcgcaaaggcggagaggcaaacccgctggcgcggtgcgagcaagcgttgcgtgataataagatcctgattttgtttcccgaaggaacgcgcggcgaaccgggaatattatcaccgctgaaatccggaatctggcatttgagccagcgcgtgccggaggcgagcgtggtccccgtctggctatgcggcacagaacgaatcatggcgaagggtaaccgcattccgctcccgctctttattgatgtcactattggcgatgcgttgcattcacatcctgaaaaaaagcaatttatggacgatctcaggcacagcctgcttgagcttcagcaacagacatacggaggtcgtatttaa

SEQ ID NO: 394217 - DNA, 1389 bp, Salmonella enterica
atggtgtgggcggataaccgcatcacggaggatatgcagtaccggtaccggtatgaccgttacgggaggctgacggagaagaccgaccgtatcccggagggggtcatccggatgcacgacgagcggacgcaccggtacgactacgataaccagcaccgcctggtccgttatgtgcgcacgcagtacggggagacgcaggcggagggacggtatatctacgacccgacgggccgccgggtgggtaagcgggtatggaaacgcgagccggtccactggagcgaaacgcggacggagctgtcggcgaggccgtatgagacgtggtacggctgggagggggacaggctgacaacagtgcagacacagcagcgccgcgttcagacggtgtacgcgccgggaagcttcacgccgcttctccgggtggaaacagaaaatacggaactggcgaaaacacgccaccgcagcctggcggagaagctggagcaggaagggagcggggacggcgaggcggtgcagttcccggcggcgctgagggcgatgctggacaggctggaggacgagctgaggcgtgacgcggtgagtgaggaaagccgggcatggcttacgcagtgcgggctgacggcggagcagatgaaaaatcagctggagccgcgccctgagccggagaggaaagtacatctttaccactgcgaccaccgcgggctgccgctggcgctgataagcccggacaacacggtggcgtggcgcgcggagtatgatgaatggggcaatcagctcagtgaggggaaccctgagcacctggagcagctgatacggctgccggggcagcagtatgatgaggagtcggggctgtattacaaccggcaccggtactacagtccgggactgggacggtatatcacccaggacccggcagggctggaaggggggtggaatttgtatgcttatccactcaatccggtcacggatacggatcctctggggctttggcaggagggttctatagaacaggctggcccatcttggtttatcgctgaccctatgggtaagtatagacagcaagctgcaatagatttaacgaaatggtggaatttatccgattccatgcaaaaaccagttcgttcaccagacgaagaaaatcaagcggaggctgaatatagtgcgtacaaacaacgatgtgagcaaaaacctgatagtaacctgagtcgttgcgctgctgcaatatttgaaaaaaatagacatgaagattgtcttaaaatgagatctgattgggacagaaaatggtttccaggaagacatgataaagacatacaaaatgagaaaaaagctttgagaagtgctataaaggatgttatcaatcgctgtaaaccaacaaatggtgttccaagatag

SEQ ID NO: 394218 - DNA, 150 bp, Salmonella enterica
atgcggcttacagctcaccgtcgcgaggtggcgtatattacgctttcctctttcagagtcaaccctgaatttcaggatttttctcttcaaccgaccggctgtttgtgtgaagtgattcacatccgccgtgtcgatggaggcgcattatag

SEQ ID NO: 394219 - DNA, 150 bp, Salmonella enterica; identical to SEQ ID NO: 394218

SEQ ID NO: 394220 - DNA, 723 bp, Salmonella enterica
atgcgcagcgtaccacgcagggaaagacaccgccgtttaagaaatgccaaagactgcgcctgccgttatcactctccaacgccgcagatattagatcgccttgagttactgaaccaacagctcaattatgctttgccggttggtatcatttcccaggcaataattacaacggataactacctcgggtattcgctgagtcactacttattttccggaaaacgcaccgcagcattccgctcattagacgacatgtctttgtggattgaaaaggggtcgctcagacaactgattgtagatatggaggcgctacctatctcctgtattgaggcgcttaaccagctacgcgcgctcagttggcaacaaagcgatatccagatttacctactggtatctgataaaacccccgctataccccagtttatccgtatggccgggcgtttttttgtcctgtcgcgacgacaaactctggcctcagtacgcgaagccttgttatcagccgccgaaccttgcttatcggaaagctttagccgcactgactggttgatgattgaaactttagcgcaaggcgcctctttaaaagaaatagcacgtcagcaaagcgtaccttatcaccgtgtggtttatcggcttaaacaacttatcaccctccttaaccttccccacaggcaaagctttcttcggctgatccaacagctaaacgttactttccacgacattttttaa

SEQ ID NO: 394221 - DNA, 240 bp, Salmonella enterica
atgtcgttattggctgtattgaaacgaatgggacatagtggcttaacgcagcatggtctccgttctactttccgcgagtgggctggtgaaacaacggactatcaacgtgaggttattgaacatgcgttggctcaccagttgacagataaggccgaggcagcgtatcaacgtgggacgctgtggcctaaacgggtcgcgctgatggatgattggtcggggtattgcacaagtggtatctaa

SEQ ID NO: 394222 - DNA, 306 bp, Salmonella enterica
atgctggatataatttctgacttgaaagagaaaaagagtgaagtaatttccttacatgaggtgattactactctgaagtctcagtcccctcaggcaacgttaccacagatagctgagtggcttttgatacaacttgctgataatcctgagtccccagaaatgggaatattaacggttggtggaggttttgaatctattttaccggaatggatgagtgcacaaaatgaacagtatatttcactgagagatttattaattgagttgtaccgaagcaacggtatttggccgggggatattccgttttga

SEQ ID NO: 394223 - DNA, 435 bp, Salmonella enterica
ttgaataagaaatttgatattactgaagaaacctacatgggatatggttttaaacgtcaagagttgacggacttttttcattcaaaaggtaagcacgttaactttggcgtgccaccgatgtcttttgaagattcaagtgatttggacggggccttaactcttaatgatgctttagctgaagtggaatctttgaagtcgagggtcagagatttagaagcacttttgccaatccttcttggtgagtacagaaatgacgatccacttctgttagccatacaaataagaaataaagattggctagactatgaccctgacaacgatagagctacaaggggaaatcaggcggcaataattcatgacctcgaaaaacgtggtttccctaagcgtcaggcggaagctattgaactagtcgcttgccctattaagagagggtaa

SEQ ID NO: 394224 - DNA, 186 bp, Salmonella enterica
atggcaacaggtgcaaaaaacgcaaagtcacaaatgaccactgtgcgtattccccatgaagtgatggaagatatagaatccctcaaagaggaaggtgagagtacagccggatttttagttactgcagcaaaaggtgaaatcaaacgccggcagcgcaaaaaatcgaaagacaatcccgaccagtga

SEQ ID NO: 394225 - DNA, 663 bp, Salmonella enterica
atgcgtaatacagagaataatgcagttcttaaaaataccctgaccagcgataagacctgtgaaataagtcgcgcagaagcggagccggaatgcattttatattttcgctgtcagtcagatggttgcgatgagtttgtaaaatccgaatatccggaaaccgttgttcaggagctggacagcggaaagtatgaccgggatctggtgtcgggtatgcgtctggtgtctgcgttgtggatcggttgttacaccgaatgtttcacgctgatgcctgaacaacatctgtccgtctggcgctgggtggtggccgccgtatttattggtgagatgagagaggaaaacggtctggtggaggtccagaacgaacggggtgagactgaacaggttgccgtttataccggagaaaaagggggcatcgtcgtttatccgtgggcggaacgtttcgcgctggctaatcatatcgaagggctggcgaatgaaatgtttccaccggatcaggccccggaaatggcgatgaatatctaccggagcatgattgaagccgatccggatggtcaggggatacggatgtccgtcgccggacgtaaaggcatggcactgctgcatgacggttttattgagacgctgaaaacagaaggtcttcctgatgcgccagtgatgcactga

SEQ ID NO: 394226 - DNA, 804 bp, Salmonella enterica
atgaaactggaggcatcactaaaacactttagccctcagggaatgcacatcagcgacgacgtgaaaggaacctctccggatcgtatcaccggcaccgatgtaatggtcgctatcggcaccaccagcagccgcgcccggttcggtctggccgcatttttcggtaaggccgggatcagcaaaaccgatgagcaactggcggtacaggcgctggcgcgacatgcgatggagacggctccgaagaacgtcaggaaggccgccggatgtgagttcggatggtgtatgcaggtactggcgcagtttgcctttgctgaatattcccgttcggcagctaccagcgtgacctgtcacacctgcaaaggcagcggattaacctctcagcatgaggatgtgataaaacatcctggagtcttcaactctgacggtatggaaatcgtgcctccgaaaatcaagcacgaactggtcaggcgtgcatgtgtggcatgtaacggtaaaggtgagctgttggcccggtgccgttgcggtggaaaaggtgaagtgctcgaccgtattgcgacaaaagaaagaggtgtgccggtgttcaaaacctgtgaacgctgttccggaaatggtttttctccggtaccctctacggctgcatataaagcgattctcaggcgagttccggaattacatgtcagaacatggacccgcaactggaaaccgttcctggaggcgctggtggatatttgttaccgggaagagcgtaaggctgatgctgcttttcagaatgcgaccagttttagcgatgatttcaacaaaatttag

SEQ ID NO: 394227 - DNA, 885 bp, Salmonella enterica
atggaatccagccgccatagtatttttaatttgggaaactcatgggattttctcaggagagatctgacttcgcctgatgcgaatactctttcatcaatacggagtgcagtcagtaactcaactgaaggtgctcaagtagctgtaggtaacagaatatatcgtgttgttgaattaaataatcattttcatgtgtcacgagaatcaagtgacaattgtcttatgaattttttgtatagactaggctggccgaagggagaagttaccagaaaaatcgaactcataatgaatgctcctcgacttgagatcaccccagtaaagaacaaaaccatattggataaaacaaatagtcatgatgaaatgccacctataccgcaagtagattataatgtcactttacataaaggagaaatcgttgggaaaggaggaaatgctattgtatatgctgataaagacgatgatacaaaagttttaaaaatgttcactatacctcaactccacgaagaggtagtgcatgaagttgaatgctttaacacatattatggaaaaggtagcgcagaaatcatatataacaacaatgatatatcaggtatcaaaatgacaagaatacaaggggaagcagtaatttatgctaaaaacttaccccctcatgcagaacaagctatatatgatatgtttgatcgactggagcgaaataacattctcttcgttgacactacagaaacaaatgtgctttatgaccgcgacactaatagatttaaccccatagatatatcatcttataaccaaaagcatacagatagtaaggacaggcaagatagcattatagcatcctatattgatggcaaaaattatcttattaacacagtattaaacaaaatagaatag

SEQ ID NO: 394228 - DNA, 360 bp, Salmonella enterica
atgccagggataaatttaacaccatatataaacccccgtggtgaactgggcgcgatacctcagaatacactggaaagaatacgtagtcagggtaccggcggaagtgtgcaggttcaactgggtggctcagtcgttacaatgcggtttgcttttctgggcatttcttgggtagtattccgaccgggctttctggggaagggctcaggtctgcgctcagtaatattcacgctcttgaaaggcaacttaacagcagtggcatgtctcatcgtgaacttctggacagtatgccatcgactgttccaccgcgtcctccagtggctgcatcacgttatcccgctgctcacactcagtcattgttaa

SEQ ID NO: 394229 - DNA, 132 bp, Salmonella enterica
atgatattatttaagaaaattaaacactatctgtctggtggtgataaatccatcgaattgcggctggggccaacagaaatcttggtgtttgatgacaatggcgttatttctgagcgggaggcagggttttga

SEQ ID NO: 394230 - DNA, 210 bp, Salmonella enterica; identical to SEQ ID NO: 393909

SEQ ID NO: 394231 - DNA, 867 bp, Salmonella enterica
atggagtcacacgatgagccggagaggaaagtgcatctttaccactgcgaccaccgcgggctgccgctggcgctgataagcccggccaacacggtggcgtggcgcgcggagtatgatgaatggggcaatcagctcagtgaagagaaccctgagcacctggagcagctgatacggctgccggggcagcagtatgatgaggaatcggggctgtattacaaccggcaccgctactacaatcccgggcagggacggtatatcacgcaggacccgattgggctggccgggggatggaatctgtataaataccccttcaatccggtgctgcgggtcgacccgctgggattatttgaagatttttctgcatttaccaatgcacctggaattcagtatgaattgacgaaagcgatgttcgatgattcatggtatacaccaaactcattagcattttctgatgtattgggagagggcgttacagggcgaataagaaatattactccatctatttctaatgtagaatacatgggactagatcctaacataaagcaaaaggggttatatgatcatattgctgatatgcaattcaatatatctggatcgttgaatgtagccctaacctgcaaagctgaggataagaatggggctatgaaagaatgggatacagggacaacggtacaattacgaaatatgccagtgaagctcccactcaaagaaccatcgattccaatacctggtatgacgtgggttttatgggcggataaacttttgaatacagagcaatttatagaacaatggcataaagaaatgttagtttatggtaaaaaaattattgattcaccagataaaatttgtgctggtagccaattttaa

SEQ ID NO: 394232 - DNA, 486 bp, Salmonella enterica
atggtgcagacgcagcggagccgcatccagaccgtgtacgcgccggggagcttcacgccgctggtgcgcatcgggaccgacgcggcagaacaggcgaaggcgcagcaccgcagcctggcggagaagctggagcaggaggggagcggggacggcgaggcggtgcagttcccggcggcgctgagggcgatgctggaccggctggaggacgagctgaggcgcaacgcggtgagtgaggagagccgggcatggcttacgcagtgcgggctgacggtggagcagatgaaaaatcagctggagccgcgccctgagccggagaggaagctgcatctttaccactgcgaccaccgcgggctgccgctggcgctgataagcccggccaacacggtggcgtggcgcgcggagtatgatgaatggggcaatcagttcagtgaggagaaccctgagcacctggagcagctgatacggctgcacggggcagcagtatga

SEQ ID NO: 394233 - DNA, 1641 bp, Salmonella enterica
atgcctataattaatggaaataaccctgctgctatccccgtggctccgcctctgccaaacagcaactctgcatcttcattacataatggggccgggcatggtcagcctcagcagacaataaccagctctggcgcattaaatcagcggtcaacgctgacaccgctttctcctgtacccggcacttccagtagtgctggcaatgtttcgcacctcccgtcctcgccacgtaacttaaccttaccgagtaccgttaccttacacaacgaattagaagtaacgaacgattggtcatcactgaacctgttacataaagatatcggttccaggggatttaggattgagaaaagtagcgatggtaccgttcatgctattggagaaaaagatggcacaagttttgatcgcatactctcacccgaagaagtcgaaggcctggcagcaataggttcgggtaacggtcgatttgtttttagtggcaaccgtggtggcgctggccatgtcatggtcactgctgcatctgattttggtcttgcgcgcgaagccattatcaaaaaactggacagacaacataccactgatgctggtactgatccgatgccatctcacaactcctctggcgcgatggagatcggtactgacgcgcaaccattgcctgagtcttccagcccattaaagagcgaccccaaactttgggtatcattaggtgtcattactgccggtttagttggtttggccgttacggggatagttcaggcaacagccttaacgccggcaccggaagaaccacaagatactgatcctgatgccgccgctgcgaatgcagagaaggcggcaagagaccagctcactcaggaggcatacaaggacccgaataatcagacggttataattgatcagaatggaaatgccatgccttcaggtgatcttaaagatgatgttctggcagccatagagcagcaggctaaagctgccggagaagaagcaaaggccaaagcgattgaagataatgccactgcacaaagaaactacacagagcagaaagaaaaacacgatcgcgaaatgcttctatcctccgggattggctacggaatcagctctgcattgattctggggggaacggcgggattaggcacgacgatagcgcttcatcaccggaacaataacggcgctgagcaacccccaattgagaataactcaaatagttttcccatgaatccttttggttcagttaatagcgctagcccggcagcaggtcgctctgaagaacccgaccccatttaccaaaacacgttgaatgtcaggaaccccacccctgaggaagatccttcagcgctttattccagggttgtacccagggctgaagatgtacaatctctctctgactcggagtcttttgatagcgtttccctgaactcggttcctgaggctatatacgctgagctggatccaactgcattaggtgcattaggcgcaccaggtctttcaccctcctcagaaccaacgctttactcagagatgcagcagaacccggaaagagctaattttgatgcaatcagaagtcggatcgaaggcgtgtttagccgtaaccccacatcaccttctgcaggagcagcaagactaaccggccctgctaactttgtctaa

SEQ ID NO: 394234 - DNA, 528 bp, Salmonella enterica
atgctattattgatttcgggatgcaatgagactttgtattccggacttgatgaaaatgaagccaatcaaatgcaggctttattattatctaataacattaatgtttcaaaagagaatgagaaagccggaggaatatcaattaatgttgacaaaaatgactttgtcaaagccatctcaatacttaataatcatggattaccacgaaaaaaacacgtgaacattgaggcgattttccctcccagtcaacttgtttcatcaccaactcaagagcatgcaaaaataaactacattaaagaacagaatgtggaaaggcttctgagtaaaattcctggggtcatcgattgtagtattgtactaaatataaataaagaaggtgatgtgccctcttcagcatcggtgctgattatcagttctccagagattaacttagcccctaccataaatcagatcaaaagtctggtaaaaaacagtattgatgatctaaaaatggaaaacattagcgttgtgatcaaaaacacagcaggataa

SEQ ID NO: 394235 - DNA, 228 bp, Salmonella enterica
atgattattttattattacaaaaagcactcctgtacgaacagtacttagtgactttgctgctaactatagtatccctgtatttattagtagcgctgttgaggatgaattctctggggaaattaaaaattccagccctatggcagtacttaacaaactggccaaaacatatcatctatcatggtactatgatggaaatatattatatatatacaaatctaacgaaataa

SEQ ID NO: 394236 - DNA, 759 bp, Salmonella enterica
gtgaccttcccgccggaactggtggcgatggtggatagtctggaagcggagctacagcgcggggaactcagcgaaaccagccgggtgtggctggcacagtgcgggctgacaccggagcagatacaaaaccagatggagccggaatacacaccagagagaacaatccacctgtaccactgcgaccaccggggcctgccgctggcgctggtcaatacggaggggaaagcggactggtcagcggaatatgatgcgtggggtaatgtactgcgtgagaataatcctcacaatatagagcagcacattcgcctgccgggccagcagtatgatgaggagacagggctgtattataaccggtatcgttactatgatccgttacagggaaggtatatcactcaggatccaattgggttacggggcgggtggaatccctatacttacccgctaaatccagtcgcagaggtggatccgctgggtttatgcgtagaagatttatgcattattgaaggcggtatacttttatctttcctttttggggcagggtcaacgattcaggctcagcaatcacaaactgattcatatgggcgtaaagtcaatcctgaatctgataagttaactaatgaacataaaacaggtattaacccaggtggtaactgtacaccagatgagttaaattacttacaatctgaaaaaaatagattatgtaatcaatctagggcatgtgctccccccccccagaatgctcaaagaagagatttttag

SEQ ID NO: 394237 - DNA, 348 bp, Salmonella enterica
atggcatatctcatggctaatccaaagagttcctggaaaatacgttttttaggtcacgttttacaaggccgggaagtatggctgaatgaagggaacctgtcactgggggagaaggggtgtgatatttgtattccgcttactataaatgaaaaaattgtgctgagagagcaggcagataatttgtttgttgatgccgggaaggccagggttagagttaatggtcgcagatttaatccaaataaaccgctaccatccagcggggttttgcaggttgcggatcctgtatcttactgttgttctcttctaattgccgccgggcagcccttaattgtaaaattattcctttag

SEQ ID NO: 394238 - DNA, 660 bp, Salmonella enterica
atgcaaaaggtgagagcgacgctcgaatcatggggggtcatgtaccgggatagtgtaatctgtgatgatttattggtacgagaagtgcaggatattttgataaaaatgggttacccccatgctgaagtatccagcgaaggaccgggtagcgtgttaattcatgatgatatacagatggatcagcgatggcgtaaggttcaaccattacttgcagatatccccgggttattacactggaagattagtcattctcatcagtctcagggggatgatattattgctgcgataatagagaacggtttagtggggcttgtcaatgttacgccaatacggcgctcttttgttatcagtggtgtactggatgaatctcatcaacgcattttgcaagaaacgctagcagcattaaagaaaaaggatcctgcgctatctttaatttatcaagatattgcgccttctcatgatggaagcaggtacctgcctgcgccagtggcgggctttgtacaaagtcgccatggtaattatttattactgacgaacaaagagcgtttacgtgtaggggcactgttacccgatgggggagaaattgtccatctgagtgccgatgtggtaacgattaaacattatgacagtttgattaactatccattagattttaagtga

SEQ ID NO: 394239 - DNA, 123 bp, Salmonella enterica
atgaccaggttcgaaatagatgatatctttaacgatagtttgcttatgaacagactcttgatacaggaaaagttcaataacattatctttattgttttgttgattaattactataccaggtaa

SEQ ID NO: 394240 - DNA, 873 bp, Salmonella enterica
atgaataaatcagttgaggctattagcaataatcaccttcaacagtcgagcaaagtttcattaataaatggattagctgacgtaagagactattatgtcgcaaactgcgtattaattaaacttaataaaggcagtttgcgaattgaaaatgaatttggagagttcatcgagcaatctgcgccatgtttatttttattagaaaaggatcaaacaataacgtttagcatgagcgaaattgaaggtcatattgatttttcttcactggaagtttcttatgacttaatgcaaaaattctacaaagtattttacagtacaagaaactataatgaccgagagttatcattaaaaacgaaaccaaagcattttttccatgcggacttgttgcccgggatgagtgatacttttgactctattttgaatggtgtggcatgtccacgggtttgtagtaatgtgagtattgatgatcatgattattcatattactcattgatgtatcttatatcggcatttgtacgcaagcccggtgggtttgattttcttgaacgagcaataaaaattacgacaaaagagaaagtatataacattattatcagcgatatcacccgcaaatggtcccaggctgaggtggcgggaaagctgtttatgagcgtatcaagtctgaaacgaaaactggccgctgaagaggtgagttttagcaaaatataccttgatgcccgtatgaatcaggctatcaaattattacgtatgggcgctggaaatatttcacaagtcgcgacgatgtgtggctatgatacgccttcctattttatcgctatttttaaacggcattttaaaattacaccgcttagctttatgcgtacaatgaatcattaa

SEQ ID NO: 394241 - DNA, 222 bp, Salmonella enterica
atgtctagagtagctgtatgcataaacagtcaattgacagctatgatacaaaatcacgttcgtgaagttgttccaaaacagcagaaagttgttccacagttgttccatcttgaaaatgcatatataaataaaaacagtaagttaccttcatatctatatatctggaacaactggaacaagtggaacaactactcttcctcacacatgaagaaaacaggttaa

SEQ ID NO: 394242 - DNA, 168 bp, Salmonella enterica
atgaattctgactataccttcgattcacctgacggaaagatttatctcacagatgtatttcgattacatgaggttgtagatgaagaacaaggggctgctggacttcttggatatttaactagaattatcgagcaatttattctcatcatttcattaaatttatactaa

SEQ ID NO: 394243 - DNA, 438 bp, Salmonella enterica
atgctagataacaatgatacgcactatgattttttcatatctcatgcaaatgaagataaagatacttttgtcagaccattggtagacgagttaaatcgacttggtataattatttggtatgacgaacagacacttgaagtcggcgatagcttaagaagaaatattgatttaggtctaagaaaagcaaattatggcatagtcatactttctcatgactttctaaacaagaaatggacacagtacgaattagatagtttaattaatcgtgcagtgtatgatgataataagattatattgccaatctggcataatatcaatgctcaagaggtatctaaatacagccattatttggcggataaaatggcactacaaacttctttatatagcgttaaggaaatagcaagagagttggctgagatagcatacaggagaagataa

SEQ ID NO: 394244 - DNA, 1989 bp, Salmonella enterica
atgcgtaagcatattgcaaatcaatcatatgattataattacagagtgacaggtgcagatctgctccccgaagaagtctcagtatcagccaataacaggccgactgtttctgaagccagaacaccaccaccagtatcccccaccccctcatcacctgccggctgggctgagaaactcaaggatgcagttctacgactgaaaaccggagaaatcctctcgaccacagaacgtgatttttcaaacgcagatttccgtaacatcaaattcagcgaagtatttcccccctgcttcctgggaccaaacggtgatattattaagggattcaacttttcaaattcaaaatttacgaattctgatatgtctgatttacattttgacgaatgcaagttcagccattcgtcgtttgctgggacaaactgtagcaatacgatattcagtaattcagacatgagtgaaatgtttttactccctttatttttacggcaacaaccgccatcctttactaattcaacattaaaaaactcatttattaattgtggcataaaactttctggagttattttaaataaacctgataacgcctccccgcgtcccagcatcggctatgccatgcgtttaggtgacacctggctatcagccccccatgaatggaatgaggggagtttagatgcgcatttaaaccatgaacacaatgatggtaacagcctgctgatgaccattgacagcctgcccggtaaatacagccaggaaaaagtccgggccatggaagacgttgttacgtcattgcgggatgcccggttatcagaggaagatatccggccggttgaaagttcgctggtgagcgtactggcccacccgccctatacgcaaagtgcgcttatccgcgagtggctcgggcctgttcaggaccgtttttttgcccaccagtgccagacctataatgacgttcccctgccggctcctgacacatattatcagcagcgcatactgcctgtgttgctggattcgtttgacaggaacagcgccgccatgaccactcacagcggactctttaatcaggtgattttacactgtatgacaggcgtggactgcactgatggcacccgccagaaagctgccgcgctttatgagcggtatcttgctcacccggcggtgtctccccatatcaataatgggctcttcggcaattataacggcagcccggactggacaacccgcgctgcagataatttcctgctggtttcctccaggacttcagacatggcgatgatgctctccgctgacacgctgttaacgatgctgaaccccacacctgacaccgcatgggaccgtttttacctgctgagagggggagagaacgtttccaccgcgcaaatctctccgggagagttattccgtcatgactttccggtgtttcacgccgcatttaatcagcaggcccaacagcgacactttgggcaactgattgataccatcctcagcactgaagagcacggggagctgaaccggcagtttattgccgccacgaaacagaaatattccaccgtgaagtttgttgatgccccttcacagtcacgtctgaacgctgtttttgaacccctgcttcctgaaggtaaactcagtccggcacactaccagcacatcctcagcgcttacaatctggctgacgcctccccacaggagcaggcggaaaccctgttctgtctcagtaccgcattcgcacgctattcctccagcgctattttcggcactgagaatgactctccgaccatcctgagaggctatgcggaggcgctgatgcagaaagcgtatgaactgtctccggcgatattcccgtccgttgacaagcttaccgactggtccaaccgttttcacggcctccataatgcctttacctgtaccagcgttgtggcgggtgatatgcaacgtcatgccagacaacatttcccgggtgttctgtcatccatcctgccactggcatgggcgtaa

SEQ ID NO: 394245 - DNA, 813 bp, Salmonella enterica
gtgcaggagcaacgcgtcgataccacgccaaactgcggcaatatgctttccggcgtcggcgcatttgctattgagcaggggcttattaccgcgacatcgccggtcacgcgagtgcgcatacgtaatgtgaataccaatacctatattgatgccgatgtgcagacgccggacggcagggttacgtatgaaggcaccacgaaaatcgacggcgttccggggacggcagctccggtaatgcttacgtttttgaatgctgcgggcgcaaaaaccggcaacgttttccccacaggacgccgtatcgactattttgacgatatcgccgttacctgtatggatatggcgatgccggtggttatcattcccgccgccagcgtagggaaaacaggctatgagtcgcctgtggaactagacagtgataccgacttattacgccgtattgaatctattcgtctacaggccggtaaagcaatgggccttggcgatgtccgttccatggttattcctaagcctgtacttatttctcctgcacaacatggcggcacaattaatgtgcgttattttatgccgcactcatgtcataaagcgctggcgattacgggcgctatcgccattgccagcagcagtgtcattgacggtacagtgacccgatcgcttaccacagaccatggctacggcaatataactattgaacatcccggcggctgtcttgatattcatttaaaaaatgatggcgatacccctgattccattcgggcggcagtcattcgtaccgcaagaaaaatcttttctggcgatgtctatctcccggaataa

SEQ ID NO: 394246 - DNA, 141 bp, Salmonella enterica
atgggcgatatcggcagaaaaattggactggcgggtaaacacatcttcaatacgctcaatcatatggttaaacgagcttaccagttgctccagttcgatgggcactgcctgcggctccagtcgtacatcgagatcttttga

SEQ ID NO: 394247 - DNA, 4605 bp, Salmonella enterica
atgcaaaggaaaaagctcctggctattggtattgcacttgccctgcaaacctcttattaccccgctatggctgccgataataccgatgatgatgataaatgtcctgttaatatttcttcgttatcccaggctgaacgggaaaagctgcccgccgaatgtcttatcactaaagcagaacaggataatcactggggatgggcggctggcggtattgcggcgctagcagccggtgtagcgctgggcgtgcataacagcgatagtgacgacaactcgcaccacaatgtttctccgacgccgccagatgatggcggcgatgtcaccccaacgccgccagatgacggcggcgatgtcacaccaatccccccggacgacggtggtgatgatgtgattccgccagacggcggcgataccccaactccccctgacgatacttccatcatatccttcagcaatggcgtaaccgataaccgaggcgcggacacgctgagtttcgacgatatcaagctggataacggcgaacatctcggcccggcaacgctgagctattccgaacaagatgcgcaatggcagttaaccaccctgagcggtaaaacgctgaacgtctccggctggaacgtcacaggtgataacgccgctgtcattgaaggtatgcaggaaaacggtctgtactggaagtatgacagtcgagggtatctgatccttgccgatgatcagacgcaggtaacgaccggaaacaacgagacccacgccaccaatcgcggaatgaccgtgagcggcgctgataaaactggcgttattatttccggcgataaaacgataaatacgctgaccggcgactccaccgtaaacgacggcgcagtgggtttagtgattaccggcgataacaccactaataccattgcaggccatacgacggttgacggcgccatcggcgccttgatttccggcaacaactcaaccaccacgctttccggcgatattaccgtcagcggcggcggaacaggtatggttatcgatggtaatcgcaccatcattgataataccggtacctccactattagcggtgaaggttccacaggctcaattattcttggcgataacacgcgtctcatcaacgatggtgagttagaggtttccgatggcgctaccggggcgaaaatcatcggcgatggcgcgattgtcgacaataccggtaattccaccacccgtggcgcagactctaccggactgtacattgagggtgacgacgcctacgtggtcaacgctggcgatcagacaatcgccgatggcgctacgggcacccacattaagggcgacaatgcccgcgtgatgaacgccggtaatgtgcatgtcgatggcgagggctcgaccgtcgccgtcatcgaaggcgataacgccaaactcacccagaacggcgacctgctggtaaccaatggcgcaatgggtattgtcaccaatggtcagggcgtaacgctgaccaacagcggtgacaccaccgtacatgatgaaaattcaatcggctttgtggtggcgggagaacaaaacaccttcaccaacaaaggtaacatcaacgccagtctcaacggtacgggcgcactggtcagcggcaccgaatcggacgttgatctggcgggcgacatcaacgtcactgccgttcaggacagcgaaggcctcttccagggcgcgaccggtatgaccgtttctggcgatacgaataccaccaccgttaccggcaatgtcaatattaacggcgactttgcgcagggcagtctatttaagacggataatttattgcagggtatcagcgtcagcggcaacaacaataccctcaacctggatggtgcggttaatatccatattgacgatcagcatagctcagaagattcgcagcagcatctggatgccattggtgtcgatgtcaacggcgctggtaataccgtggatattaccggtggtataaatatcgactatggacaagctaattcgcagtacagtactgaaattatcggtatcaatattgatggcgacagcgccgtcacgctaagcggcaactccacgttggatctgaccaccatctcaggcggcaatgtgtcgctggcgaaggtcagcaacgggggttcactggtgctcgccgacgatgccactgttgatattaactttaactatctgaatgccccttattttacccaaaatgccctgctgatagctaacggtcaggggtcatccattgaaaataaaggtgatatcaccagccacggcgcgagcagtattatccttgccgacaacggtgcgcaggccgataacagcggcaatattctcgtttacgccacagacggcggcaatagcgacgatcgctctgcgcttactcgcgccaataaacaaggttccgttgttcataacagcgctggcggcaatattacccttatctctgacgaagtgccaaaaagcggagacggcatcagcatatatcccgaaaaatggtctacccacacattctacgccatgctggcaacccgcaatggcagcgtggtgaatgataaagacgccgccatccgtttgcagggcgcaggcgtttatggcgtaacggccagtaagggaaccgcgctgaatgccggggatatctatctcgacggttttgtacccacactggatgatgccggtaatattaccgattcccactactgggcgccaaccaacctgaatctgaccagttcagcaatgctcgccggatcaaccgacggcgatggcgacgccaccgccaccaataccggtaccatcaccgtcaataacgccgggttcggtatgatggcgcttaatggcggcgtcgcaatcaaccagggcacaattaatctgactgcggatgagggcgttaccggcgaagctaaccaactggtcggcatggcggctcttaatggcggtacggttgtgaatgacacgacaggcgtcattaacatcaatgctgattacggccaggcgttcctcagtgatagctccagctacatcgtcaacaacggtgctatcaacctgaacggcagcccaatggacgacaccgattcacatatgggttccacgccaacggataaaacatggatacaaacgctacctggtagcggcgacaatgacactcaaacctctgatacaggatttttcactaatggcacgctggctaactacggtaacgaaacgctaaacggtgacgtggaggttactagtggttggctgtacaacgaaacaggtgccgcattgaccgtcaatggcaatctggcgattaattctggcgctagcgcactagtaaactacggaacgcttgatgccgataccataacaaccagccatagtatctttaacgaggaaggtggcagtatcagcacagagctactgagtctcaacggcgatgtgacgctgtttaacgatggcaattttactggctctatttctggaaccagttataagcaggagatcgtcaataccggaagtatgaaggtggcagaggatggtaacgctttaatttatggtagctttgctttttacaaccaggaaggcgcaacgctcagcaacagtggtaacgcggtagaaggcggtgaaaataccatcatcaatatgacacgtaccagcgactcaatctctcaggttaacagtggtacgattaccgccactaacggctatagcgccattaccacagcaagcgccagcaataatccggtatggatctggaacaccgaaaccggcgttattaacggtattaacccggatgcgccgttgatcaacctcggccgtggctataattttgctaacgaaggtaccatcaatttacaaggcgataacgccgtggcaatcagcggcggtacaagcagctacaccatcaatctggtcaacagcggcgttattaacgtaggtactgaacaagggcagattgatggcactaacggtaccggtcttattggtattaaaggcaacggtaaagctactaccatcaacaatactgccgatggggtgatcaacgtctatgcggatgattcatacgcatttggcggacagaccaaagccattattaacaatggcgagattaacttgctgtgtgaaactggctgcgctatctacgcacctggtacaactggggtacaaaacgatcacgacggcacatcagatattgttatccccgatgccaacactgcgccaacacaggggaacattccagtgccgccagccgatccgaacgcgcctcagacactgtctaactacattgtaggcaccaacgccgacggtagctctggtacgctgaaagcgaataatctggtgattggcgatgatgtgaaggtaaataccggcttcacttcaggaactgcagatactactgtagtcgtcgataacgcctttaccggaaataatatccagggtgcagaaaatatcacttccaccactgtagtctggaatgcgcagggaagcatggatagcagcggcaatgtggatgtcacgatgaccaaaacgcctatgccgatgtcgccaccgacagcagcgtttctgacgtcgcgcaggcgctggatgcgggttataccaataatgaactgtataccagcctcaacgtcggcaccaccgccgaactga

SEQ ID NO: 394248 - DNA, 381 bp, Salmonella enterica
  misc_feature (346)..(355): n is a, c, g, or t
atgacacaacagttaaatgaatggcttattgtattggctgtggcttttattcgaccattgagcctttctttattacttccactattaaaaagtggcagtttagggtccgcgcttttacgtaatggtgtgcttatgtcacttacctttcccgtattaccgatcatttatcagcagaagattattatgcatgttggtaaagattacagttggttagggttaatcacaggagagataattattggctttttaattgggttttgtgcggcggttcccttttgggcagttgatatggctgggtttctgcttgatactttacgtggcgctacaatggggacgatattcaatnnnnnnnnnnatattcaattctacaatggaagctga

SEQ ID NO: 394249 - DNA, 909 bp, Salmonella enterica
atggtggataatctggaagcggagctacagcgcagagaactcagtgaagctaaccggacatggctggcacagtgcgggctgacggcggagcagatacaaaaccagatggagccggaatacacgccgcagagaacaatccacctgtaccactgcgaccaccggggcctgccgctggcgctggtcaacgcggaggggaaagcggactggtcagcggaatatgatgcgtggggtaatgtactgcgtgagaataatcctcacaatatagagcagcacattcgcctgccgggacagcagtatgatgaggagacggggctgtattataaccgccatcgttactatgatccgttacagggaaggtatatcactcaggatccgatagggttacggggcgggtggaatccctatacttacccgctaaatccagtcgcagcggtggatccgctgggtttaagtggattgggtgcattcaattccttgctggatcaaccgggtatgaaagatgcttataatcgttctgcagctcaatatgagaattcacttccgaagcctgtatctgagtggaaattttcacgatgggaggaaggcagaggaaagagattgggtaatagttatataaacgtaaatgcgatatgtgaagatcaatttggtaacacaaaatctgttaatgctcggacttttcaaaccggctggttccctattaatgaggttgaggctggtagagggattccagaccctggagaggatccttcagatatagcatcagctacagatactattacagacaatgtaaaagatcttattgatgctcatgcgcaggcaataacatgtggttcaaagagtggttatcagtgctttaaaaattctgaagcgactcaaaagttaggtgaaaaattatgtggccgaaggtaa

SEQ ID NO: 394250 - DNA, 339 bp, Salmonella enterica
atggacgttatgtttgatgaagcggtgcaaaaacgcggtatgtcgttgccaatgtttggcaaattaatggcgaccaacgccgccgatatttttggtctgaaacataaaggacgtattgcccccggcaaagatgctgacctggtctttattcagcctgacagcagctatgttctgaaaaatgaagacctggaatatcgccataaagtcagtccgtatgttggccgtactattggcgcgcgtattaccaaaacgattttgcgcggcgatgttatttatgacattgagcatggcttccctgtgccgccaaaaggtcagtttatccttaaacatcagcagtaa

SEQ ID NO: 394251 - DNA, 360 bp, Salmonella enterica; identical to SEQ ID NO: 77306

SEQ ID NO: 394252 - DNA, 237 bp, Salmonella enterica; identical to SEQ ID NO: 77291

SEQ ID NO: 394253 - DNA, 174 bp, Salmonella enterica; identical to SEQ ID NO: 148426

SEQ ID NO: 394254 - DNA, 192 bp, Salmonella enterica; identical to SEQ ID NO: 77289

SEQ ID NO: 394255 - DNA, 558 bp, Salmonella enterica; identical to SEQ ID NO: 26735

SEQ ID NO: 394256 - DNA, 1479 bp, Salmonella enterica; identical to SEQ ID NO: 86714

SEQ ID NO: 394257 - DNA, 828 bp, Salmonella enterica; identical to SEQ ID NO: 86713

SEQ ID NO: 394258 - DNA, 996 bp, Salmonella enterica
atgaaacatgaaattgcggtgagtgtaataatccccgtttacaacgcagaaaaaaccatcaaatccttgatcaaagatatcttgatagaagacaggatcaacattgaagttattatcgttaacgatggctcctcagacaacacgtcaacgataattaactccataaaggatggcagggttcaagtgattgaacaaaataataaaggtgtatacgcggccagaaataatggattagacaagcataaaggccagtgggtcatgtttctggatgccgatgacgatgtgtctgaaggattcatttataacaggtatatccaggcttccagccgtaatgctgatgtgcttttgtccaatgcctggaagctttggcatgaaggcgataataaaaaacccgtgcatactaaccagccttatgatgaggttttatccggcaatgcgtggatgagtcacgcagtaaaagtcagggaatggccacattacctttggttacagatagttagatctgactatatcaggaataacaatctgtcatttcatgatggccggagtcataaagatattttatggacgatggaattggcgttggcaaatgggcgtttctacatatcaaaagatatggactacacctacaagtacaataatgaatccatcacaaatcgcggtgattatttcgacgtccgagcagaatgctatattgatgtaatatctaaaaccatcggtcacgcaaagtcgataaaaaataatgatttgagcgtatcgctgtttaggcatgccctgtatgaggctagacactttctaggtttatatagaaaaaaggtgagggacaaagaaaaaatcaggcggttatttgttagagaaatagcatataaagatttaataaaaggtgtatatagccttagtgatattttctttttactgaaagttttcgtaaaaacaaaaaaattcactggtgctagcccgaaattaaaatggataattatattgctattggcttaa

SEQ ID NO: 394259 - DNA, 1752 bp, Salmonella enterica; identical to SEQ ID NO: 77379

SEQ ID NO: 394260 - DNA, 978 bp, Salmonella enterica; identical to SEQ ID NO: 77376

SEQ ID NO: 394261 - DNA, 435 bp, Salmonella enterica; identical to SEQ ID NO: 77368

SEQ ID NO: 394262 - DNA, 930 bp, Salmonella enterica; identical to SEQ ID NO: 77365

SEQ ID NO: 394263 - DNA, 894 bp, Salmonella enterica; identical to SEQ ID NO: 77363

SEQ ID NO: 394264 - DNA, 447 bp, Salmonella enterica; identical to SEQ ID NO: 77361

SEQ ID NO: 394265 - DNA, 741 bp, Salmonella enterica; identical to SEQ ID NO: 77360

SEQ ID NO: 394266 - DNA, 198 bp, Salmonella enterica; identical to SEQ ID NO: 77359

SEQ ID NO: 394267 - DNA, 2454 bp, Salmonella enterica; identical to SEQ ID NO: 77358

SEQ ID NO: 394268 - DNA, 354 bp, Salmonella enterica; identical to SEQ ID NO: 77354

SEQ ID NO: 394269 - DNA, 1479 bp, Salmonella enterica; identical to SEQ ID NO: 77351

SEQ ID NO: 394270 - DNA, 432 bp, Salmonella enterica; identical to SEQ ID NO: 77350

SEQ ID NO: 394271 - DNA, 351 bp, Salmonella enterica; identical to SEQ ID NO: 77349

SEQ ID NO: 394272 - DNA, 1827 bp, Salmonella enterica; identical to SEQ ID NO: 148387

SEQ ID NO: 394273 - DNA, 165 bp, Salmonella enterica; identical to SEQ ID NO: 77345

SEQ ID NO: 394274 - DNA, 144 bp, Salmonella enterica
atgtgcttcacctcaaaaaatcgctataaaaccggtaacttttcttgcgtgctgaagcagaaagatccagacttcttgaaacgtttcagcgcgatcttgttttttgacaaaccagattggcgccttttttctcatagtagctga

SEQ ID NO: 394275 - DNA, 138 bp, Salmonella enterica
atgcatttctggaagctggtaagcctggttgtcatcatttgcaaccaggaaatgggtgcatatatcttgatgcagatatgttacttactgataaactcggcactttgtatttacctgacggtattgctatccatgtaa

SEQ ID NO: 394276 - DNA, 378 bp, Salmonella enterica
atgcagaaaaatgtgccccccggcaggcgtaagggctgccctaattattctcctgagtttaagcagcagctcgttgctgcctcctgcaaacccggaatatccatctcaaaactggcgcttgaaaacggcatcaacgccaatttgttatttaaatggcgccagcagtggcgcgacggaaagctactgttacctttctcagagagccctcagctacttcctgtgactctcaatgccactgccgtacagccagaatcgctcgcagaagacccggggctcagtatcagctgtgaggtaacgttccggcacgggacgcttcgcctcaacggcactgtcagcgaaacgttcctggctctgctgatacaggaactgaagcgatga

SEQ ID NO: 394277 - DNA, 1119 bp, Salmonella enterica
atgcgcagtgccttccgggttatccggactgtacgggaaaaacatgcctgcacaaaatgcgacgccatcgtgcaggtaccagcgccttcgcgccccatcgagcggggcatagcagggccaggactgctggctcgtgtactgacctcaaagtatgcagaacacacaccgctgtatcgccagtctgaaatatacgcccgccagggcgtggagctgagtcgctcactgctgtcgggctgggtggatgcgtgttgtcgtctgctggcaccgctggatgaagcccttcaggcctatgtcctgaccgatggcaaactccatgccgacgatacgcccgtcccggtgctgttgccaggtaataagaagacgaaaaccgggcggttgtggacgtatgtgcgtgatgaccgcaacgccgggtctgtgctggcaccggcagtatggttcgcgtacagcccggacagaaaaggcatccatcctcagacccatcttgccggcttcagcggtgtgctgcaggcggatgcctatgcggggttcaatgagctctaccgcgacgggcatataaaggaagccgcgtgctggacccatgcccggcgtaaaatccatgatgttcacgttcgcgctccctcagcgctcacagatgaagcgctgaaacggatcggcgagttgtatgccatcgaagcggatatcaggggaatgccggcagaacagcggcttgccgaacgccagttgaaaacgaaagcgcttcttaaatcactggaaaactggctgcgtgaaaaagtgaaaaccctgtcgcgacactcagagctggcaaaagcgttcacctatgtactgaaccagtggcaagcgttgacgtactacgcagacgacggctgggctgaagcagataacaacatcgctgaaaatgcgctgcggacggtcagtctggggcgtaaaaactggctgttcttcggctcagaccacggtggtgagcggggagcgctgctgtacagtctgatcgggacgtgcaaactgaatggagtggatccagaacgttaccttcaccatatccttgacgtcattgctgactggccggtaaaccgggttggtgaactgctgccgtggcggatcacactgcctgccgaataa

SEQ ID NO: 394278 - DNA, 696 bp, Salmonella enterica
atgaaaaaaatattcattgcaaccgcggttgcattgtctttgtctgcggctgcgcaagcggctgaatctaccgccgtgttaaaagtggccggcgttctgaccaacgatgcctgtaccccggaactggacggcggcggcgtggttgattttggcaccaaatatatcaatgaactgtcggcaacagaggtaaaccagttaggccacaaagacctctctttcagaatttcctgctctgccccaaccagggttggttttgttatcagcgacgatcgtgctgactctacagcaagcatcaccattgaacacaccagctttaccactcctgacgagaccgcctggaccaactctgtccgttacggcgtcgggaaaacagcaggcaatgtcaatattggcgcctactctgttgcgctaaaccgcagcgcggttatcgcagacggtgaaacacagttggttctgcgagcccagcctggctctcaggtagacagcgaatggcatcaatggagcgataacaaagaccttctgatgaataacggtacctacgaatacagcttaggcagtgtgacaggaccggttgcctttaccaacgcagaacttcctttacgcatcgccctggccgttcaaaacacggatgcgctggccattaccgacaatacgacacttgatggccaggccaccattacccttcgttatctgtaa

SEQ ID NO: 394279 - DNA, 231 bp, Salmonella enterica
atgtatgccgtattaggagaaatggaatttgacgtcgtcgcttattgggacggctttgacaatacgatgggcgtggattatgccagccatgcccgtatcgaaggtaaaccgggcgtacagtttatcggcgataagctggataaaatcaccctgcaattcagcttccatagccagttttgccagccggccacggcgttaaatcgtctgcgtgaagcgatgaccgcgcactag

SEQ ID NO: 394280 - DNA, 453 bp, Salmonella enterica
atgacgaccgtaccgtttctggctgccttttttggcgtactgctctccggctggctggcggataaactggtgaaaaaaggcttttcgctgggcgtggcgcgcaaaacgccgattatctgcggtttgctcatctccacatgcattatgggcgctaactacaccaatgatccgttgtggattatggcgctgatggcgatagctttcttcggcaacggatttgcatccattacctggtcgttaatctcttcgcttgcgccgatgcggttgattggccttaccggcggtatgtttaactttatcggcggattgggcgggattagcgtaccgttggtgattggttatctggcgcaaagctacggttttgctccggcgctggtctatatctccgtcgtggccctgctgggcgcgctgtcttacatcctgttagtgggcgatgtgaaacgcgtcggataa

SEQ ID NO: 394281 - DNA, 510 bp, Salmonella enterica
atgtccagacgtaagtacacctttcaacagcgcctcgaagtggttatgcactatttcgctaccgatgaaggctatcgcttaacttcagctcgttttaatgttcccagaacccaggtaagaatatgggttgcagcctatgatgcttatggagaagaaggcctgaagcccagggataagggcgtatcaatcgatcccgatatcagagtcgaagccgttaaggctgtactgacggggcagatttcccagacgcaggctgctgcgaaatttaacgtcgcgggttcagcctctgttgggaagtggatgaaggtgttcagcgaacatggagaggaagggcttcgttctctccgtgtgggcaaaaaaagggcacttcatatgattgatgatcctgttgcgcttgagttggcactggagcgttcgaaagataaacgtattcaggaacttgaacaaaaagtccgccgtctggaattgcggatactttatctaaaaaagttgaaagccttagttcggtaa

SEQ ID NO: 394282 - DNA, 138 bp, Salmonella enterica
atgaaaaccctggcgcaggacaacaccctaatcatcaaggttggcgcgaacgaccatgaaactattgatatcgatctgaagcagatcaaatttcagaccttgagtctggattcactgaatgtgcagaaagcgtattga

SEQ ID NO: 394283 - DNA, 207 bp, Salmonella enterica
gtgaagcgcgtctggcttttacggattcccctggttgcgctggattgctccgtcgttccggcgcatccgtggattcacggtctggggcaacagatagataacggtgcaggtatgacgcaggcaatggtcattcagggatttaaaatccatgggcgccaactgcaaatgaaaaaggatactggaatgataataacggtaattaaataa

SEQ ID NO: 394284 - DNA, 135 bp, Salmonella enterica
atgctgagaaaacagcgcgggagtataaacgtcgaatccgcgcgtcatccattcatggcctgcgagttggatatgatcgttaataccataaatttcatgcagaataatcgctgcccggcgatggccgctcgatag

SEQ ID NO: 394285 - DNA, 1128 bp, Salmonella enterica
atgaaaaaaaaagtattagttgtctttgggactcgtcctgaagctataaaaatgatacctgtatttaacatattgaaacatagtaagcattttgatgtgaaaatgtgtattactgctcaacatcgccagatgttagatcaggtgttaactatttttgatattacacctgattatgatctcaatataatgggacaagggcaaacgttaagcgatataacatcgaaaatattaaaaggattatcttttgttcttaacgagtttactccagatctagttctagttcatggtgataccgcaacgacatttgcaagtagtttggcatgtttctatcaaaaaattgatgttgggcatgtagaggctggactaaggactggtgatatatattctccgtggcctgaagaagcaaatagaaagcttactgcagtgttggcaaaataccattttgcccccacaattgtagccgcaaataatttattaaatgagggatgcagtcaaggtaatatttttataacgggtaatactgtgattgatgctttattttctgtgatgaacaagataactgatgatagcgagctacgaaaaaatcttgagtcaaagtttgattttattgaatcacataaaaggaatattttggttacaggccatagaagggagaattttgggcaaggatttgaaaatatatgtcagtcattggcaattattgcacggaaatttaatgacataaatattatttatccggtgcatttaaatccaaatgttcaggaacctgtaaaaagaattttaggcaatatatcaaatgtatatttaatcgagccacaagagtatcttccttttgtttatcttatgactaaatcttatttaattcttacagactcaggtggtattcaggaggaggctccatcgttgggtattcctgtcttggttatgagagatgttacagaacgtcctgaagcagtggacgctggtactgtaaagcttgtagggacgaatattgataccattgtaaaagaaattagtaatcttttacttgataaaagtacgtatgatatcatggctcattcacacaatccttatggagatggttttgctgcaacaaaaatatgcaatatattgattgaaaaaatgtag

SEQ ID NO: 394286 - DNA, 474 bp, Salmonella enterica
atgtctcaggcaatgcagcagcacccagctatcgcaatgacccgccatcccttattcctggcgcgagccaacgcattaaaaccccatctttattcacaccctgtcgcgccgacaggaaaaattcagatcaccggcacgccgaatcactggcaggcaacgccatgcggtaatctcgaggcggtgtatgaacaagctctggatacgggcgactcgctggttctggattttggcacccattgtgttggttatctgcgttttatctgccgcgcagtaggtagtccgccggacgccccggtccatcttacgctgacgtttggcgaaacgttgggcgaagtcgtagagcctttcagcgattatcagggctggctgtgtagtagctggctgcaacagcatcaccactatcttgatgtttttgccagcgcacgttcagttaccacgccgctattgcttcagatatctgaaaatcgatgttaa

SEQ ID NO: 394287 - DNA, 159 bp, Salmonella enterica
atgctctcagatatcaggcgacttttaccactgggcgcttttatgaacggctctctcaccccctcgctaaacatgaattcttgcgctaatccgttgatttatgccgccttcaatagtatttctaacactatcgtaaacattccctggggttccctatga

SEQ ID NO: 394288 - DNA, 360 bp, Salmonella enterica
atgtcgcagtccgaaaacctgtttgatgccgcgctttctcaggccgatgacactatccggcgtgtgatgggaagcggggtaacggtgacctccggtgctcttgtgggcgtcacgttgagtggtgtttttgatgaccctgaaaatatcggttatgccgcccctggaatacgagttgaggggcccagcccatcgttgtttgtgaaaacagtgactgtcagccagttggcgcgtctggacacgctggacatcaacggtaaacccttctgggttgatcgtattggtcctgatgactgtggctcccgccatatctggcttggtagtggctctccacccacagatatgcgccgtcgcagggagtaa

SEQ ID NO: 394289 - DNA, 744 bp, Salmonella enterica
ttgaaagcacccaattcactggtgaaaaccaaaggcgccggaaccacgttctggctgtatacgggacgcggcgatgcgtttaacaatccgctgactgacgatgactggcttcgcctggcaggcatcaaagatctgcagccgggcgaaatgagcgccgatgcggaagataacagctaccttgatgatgaaaatgccgactggaaaagtaccatgcaggggcagaaaagtgtcggtgacaccacggcaacactggcctggaaaccgggcgaaaccggacagaagacgctggtggagctgtttgactccggtgaaatccgcgcctttcgcattaaataccccaacggtaccgtcgatatttttcgtggctggctgagttcgctcggtaaaaccattaccgctaaagaggtgatgacgcgcaccgtgaaaatcagtggtgtcgggcgtcccttcctcgctgaagaagacgcgccgtccgtggtcagcgtctccggggtgaccgtggcaccggtaaatgcgtcggttgcggtcggggccaccaccacgctgacctttaccgttaaaccggatgatgccacggacacatccctgcgtatcgcatcatccgataccacacttgccaccgtcacgcaaaaggaccatgtggccaccgttaaaggggtgaaagcgggcagcgtgactgtcgtcggtatcaccacggacggcagcctagtggctgtggcccctgtcacggttactgcgtcttaa

SEQ ID NO: 394290 - DNA, 396 bp, Salmonella enterica
atgtttctgaaaaccgatacctttacttacggcggtcattccgccgtgctcagcgaactgtctgccctgcaacgggtgaattacctgatgtttattcagcagcgcacggcggaatacgatgcactgccggacatcctgacggaacaggagcggcaagccgcgttcatgcagatgggcgtggatatcaatgcctggctggtgtcccgctcgctgtgcgaaagcaagaaagaagacgatgcccgtcttttatatgatgcagttcgcgtgcagtggtcgtttgatgcgctggggctgggggcggacagggtgctgacgctcagcgggatggtggtccctgttgaggacgacacagatgacaaccctgaccaggaattgctgacaccggaaaagccctga

SEQ ID NO: 394291 - DNA, 3150 bp, Salmonella enterica
atggaccagatagcgaacctggtcattgatttaagtgtcgatgccgcagactttaaaaatgaagtgcctcgtgtgaaaaaactgctggacgaggtctcgggtaaaacagacatcgtcacacagcggcaaaaaaatctcatcgaggccctgaaaagccagggccgtgcatatgtggacgggagtattgccgcatctgatgccggcacgcgccagaaacaggcgatggttatggcggcgcagggttatgaccaggtggctcagcgtgttgatatgacacagcggcatattgcggcgcttagccagagaatgcagcaggagcgggcgcaggccgccgcggtagcggcagcccaggaccaggcgagcgcagctttttaccgtcagatagacagcgtcaaatcccttgagaatggcctgcagcagttgcagcgtatccagacgcaaatccgtcaggcgagaaacagcggcagtattgcgcagcaggattatctgtccctgacctcagaagttgccgcgaaaacccgcacgctgaccgacgccgaggctgctgccactaaacaaaaagcccggtttattcagcaactgaaagagcaggtgacccggcagaaactctctgccactgagctgttacgggtgaaggctgcccagcttggcgtcagcagttcggcggatgtgtacatcaaaaaaatggaaaaggcgggcatggcgacccattcgctggggctgaaaagtgccggtgcgcgtcaggaactgggtgtgctgtttggcgaacttttgcgtggtgatatcggggcgctgcggggtagtggcgtgacgcttgccaggcgtgcgggatggctggacacgctgatgtcgccgaaggggctggcggtgggcggtacggtcacggcgattgccgctgccgtctatgggctgggaaaagcctggtatacgggaacgaaggaaggggaagaatttaataaacagctgatcctgaccgggaattatgccggtaaaactgcaggacagcttcaggcgatggcccgcagtattgccgggaacggagtcacgcagcatgatgctgccggggtgctggcgcaggtggtgggcagtggggcatttggtggcactgacctttcccgggtggcgactgccgctgcccgtctgaaacaggcgaccgggcagaacatcagcgaaaccatcagccagtttaaaaaactgaaagatgacccggtgaatgcggtggcggcgctgaacgactccctgcattttctgaccgccacacagtaccagcagatttctgccgcacaggcggtgggcgattcgcagcgggctgcggcgctggccatgcaggcatactctgaggcagtcatgcagcggacaggtgccgtacaggataatctcggctcactggaaaaggtatggaactgggtcaaaaatgccgcggccggtgcgtgggatgccatgctgggcgtcggacgtaatcccgatgctgccatgaaacgccaggatacctttgcacaatggcaggctgcggaaaaagaatatcaggcactgtcgcgtaatcttaaggtggatccggattatagtggcagtaacccgttgcagaaggcggatgctgaacacctgagaaatgcccgtcagatcctggcgctgaaaaaagcggcttatgacgaagctgataaagcgtatgcgcaggaagggcttgctgcagcgcgggaaaaacagcgcacagagcagcaggcgcaggcgatccgtaaccagcaggagtttaaccagctggtgaaaagtggcgcgacgcagacggaaaaacgcgtgcgggctgaacaggtgctgaacaggctgatagtacagaaccgccgggatgcaaaagacgggatcgccatgctctggacagacaaagagatagcgaccgcccgggcagggattgaaaaagcctttaaagagccaaaagcaaccaaaaccgctgccacacgtaatgacgaagccggtcgtctcctgctgcagtacagtcagcagcaggcgcaggtggaggggcagattgcgcaggcaaaacagagcgccggactcagcaccgataaaatgacccaggcgcaaaaggagttgctggcgctacagcagcgaataagtgacctgtcaggtaagaaactgacggcggacgaacagagtgtgctggctcacaaggatgaactgatccaggcgctgacgctgctcgatgtgaaacagcaggcgcttcagcgacagagtgcgctcaatgacctgaagaaaaaggcgattcagctggaaagccagttaaaactggaagaacagtctcagcgccggcagcacgatctcgggctggccaccgccgggatgggggatgttcagaaacagcgttatcaggaacaattcacacttcgccagaagtttgcacaacaaatggaacaactcgaacgggacagccggcaaaaagggacatacggctcggcagagtacagcgaggctgagcaaaaacttcgtgacagtctggacgagcaactgaatgaaaaccgccgttactggcagcagttatccgttgagcagggtaactggaagaacggggtctcccgggtctttcagaattacacggcggaagcagggaatgcggcgggcgtggctgaacagatgttctcgtctgcgttcagcagcatggaaaatggcctggcaacattcgtcaccaccggcaaactgaacttcaaatccttcaccgcctcccttctctctgacctggcaaaaatcatgtcccgcatggtgatgatgcaggccgtcaaaggagttggggatgcactgggatttaccacgaatgccgacggaggcgtctaccagtctgccagcctcagccggtacagcggcagtgtggtggacagaccgaccttctttgcctttgcgaaaggggccggggtgatgggggaggccggaccggaggctatattaccacttcgtcgtggagccgacggcaagctgggcgtagtagccgcaggcgctggaactggaggtatggcgatgtttgcgccacagtaccatattgccatcaacaacgacgccagcaacgggcagattggccccggggcgttgaaagcggtgtatgacctgagccggaaggccgcggctgactttttcgcgcagcagacacgggacggcggcagattaagctga

SEQ ID NO: 394292 - DNA, 330 bp, Salmonella enterica
atggaaacctttaactggaaaatccgtccggatatgacgatgggggctgagccacaggtcatcaccgtgaagatgggggatggctatgagcaacgccgccccgctggcctgaacagcaatctgaaaaaatacaatgtgaccatcaaagtacgcaaaggggagcatcagcggctggaggcgtttttatcccgtcatggcggggtgaagtctttccggtggacgccgccgtatacctggacacaaatccgtgtggtctgcaggaaatggtcggtcagcgtcggggcgctgtgggtgacgtataccaccacgtttgaacaggtcgttatttag

SEQ ID NO: 394293 - DNA, 696 bp, Salmonella enterica
atgcaggatatcccgcaggatacgctgagcgaagccgctaaactggcgcagtccgccaggatcactttgtgggaaatcgacctgagtcgatttggtggtcagcggtattttttctgtaacgaacccaatgaaaagggagaaccggtcgcctggcagggacggaagtatgacgtttacccgatacagggcagcggatttgacctggtgggaaaaggctcgtccgcccgtccgacgctcgcagtgtcgaacctgtttggcatggtcacgggacttgcgacagatatgcagagcctcgtcggggctacggtggtcagacgcgtggtatacgcccgttttctcgatgcggtgaactttacaggcggcaacccggaggccgatccggaacaggaagtggtcagccgctgggtgattgaacaactgtcggagctgaaatccatcacggcgacctttgtgctggcaacaccgaccgaaacggacggcagcgtgtttccggcgcggatcatgctggctgatgtctgcagctggacctaccgttctgatgagtgtggctatgccggtccgcctgtggcggatgagtttgacaagcccacgacagacccggcaaaagatgcctgcagcaaatgccgtactggctgcgagctgcgtaataacctgccgcgcatcggctgtttcctctccattaaccgtctttcctga

SEQ ID NO: 394294 - DNA, 735 bp, Salmonella enterica
atgaaaaaaactattctggcgcatgccgctgcgtgcgcaccggcagaatcgtgtggctatgtagtgaactcgtctgcaggggagcagtattttccctgccagaatctttcctctgaaccgaccctgtatttccgcatggatccggaagattatcttcaggcgcaatctttaggcgaaatagtggcgctggtccacagccatcctgatggcctgccgtttctcagcgatgttgatcgccgcctgcaggtgcaaagtggcctgccgtggtggctggtctgcgatgaccggatatacaaatttcgctgcatgccttttctcaccgggcgggcatttgagcatggcgtgacggactgttacaccctgttccgcgatgcgtaccatctggtcggtattgagatgccggattttgcgcggggggaggactggtggaagcagggagataatctatatctggataatctggaggcgaccggtttttaccgcgtgaatgccgcagaggcacagcctggagacatcctgatttgctgttttggttcatcggtcgccaaccatgccgcgatttactgcggcgatggcgaactgttgcaccatattcctgatcagctcagtaaacgcgagaggtataccgacaaatggcaacgccgcacacactcaatctggcgacaccaggcatggcacgagtctgccttcacggggatttacaacgatttggccgctgcttcagcctcagtataa

SEQ ID NO: 394295 - DNA, 507 bp, Salmonella enterica
atgcaggttccgggcttccgacagaaactaagcgacggctggtatcagatacgcatcgccgggcaggatgtggatgaaataagcctctcagcccgtctgcatgagccgctgccggacggggccattattcatattgtgccgcgtatggcaggtgcaaaatccggcggcttctttcaggcagtgctgggggctgcgctgattgtggcgtcaatatggataccggggttaagtattgctgcaagcaacatcatgctttctctcggtgcttcaatggcgttggggggagtggcccagatgctggccccgaaagcaaaaacgccatcgatgaaacagaccaacaacggcagacagaacacatacttttcgtcactggataatatggtggcgcagggtaatgtgctgccggtggcttacggggagattctgtgcggctcccgcgtcatttcgcaggaaatcagcacccgggatgaggggcgtggtgggcaggtggtggtcatcggtcgataa

SEQ ID NO: 394296 - DNA, 525 bp, Salmonella enterica
atgaacaaaaagttaattacacttgctgtatttttattcagtagtgtggcctcagcagccagtaccgacacaacggttaatcttgtgaatgcaaatggcacagaccaaaagatcggaagcattacaattactgaaacagagtatggattattatttaccccacatttgtcctcacttcctgccggtattcatgggttccacatccacgagaacggaagttgcgatgccggcatgaaagacggtaaacctgttgcggcacttgctgccggagggcaccttgaccctcagcacacaaataaacatctcggtccttataatcctgaaggtcatctcggtgatctcccggcgttgtatgtaaatcatgaaggtaacgctgattatccggttctggccccacgcctcaaatcaatcagtcaggtcaaaggccacgccatcatgatccatgccggtggtgacaatcatgaagatcatcccaacccgcttgggggcggtggtgcacgaattgcctgtggcattataaattga

SEQ ID NO: 394297 - DNA, 3396 bp, Salmonella enterica
atggggaaaggtggcgggagcagtcacacaccggttgaggcgccggacaatcttaaatccgggcagctcctgtcggtggtggatgcgattggtgaaggtccgattgaggggcctgtgaatgggctaaaaagcgtcagaattaacaaaacgccggtcctcgacagcgacggtaacgcgatggttcatggggtgacggtcgtttatcgtgtcggggaggatgagcagaccgcgatggagggtttcgaagactccggcgcggaaaccctgctgaatgtggaggtgaaaaagtcagaagccatcacgcgcacgattacctcaaaaacggtggaccggctgcgctttacgtttggtgtgcaggcgctggtcagtaccaccagtaaaggagaccgcagcccgaccagcgtacagatgctgatccagtttcggcgggatgggctgtggcgaacggaacgggatatcaccattacggggaaaacgaccacgcagtttctggcctctgtggtgatcgacaatttaccgccccgcccgtttgaagttcgtatgttgcgcatgactgacgacagcacgacggacttgctgcagaacaaaactctgtggtcgggctataccgaaatcatcgatgtgaggcaacgctacccgaacaccgccgttatcggggtaaaagtggacgcggagcagtttggtaatcagcaggtcacgcgtaactatcatattcgcgggcgtattgtgctggttccgtcaaactatgacccggtgaaccggacatatgcgggcatctgggacggaacgtttaaaccggcatacacgaacaatccggcgtggtgcgtactggatatgttgacccacccgcgctatggcatgggggcgcgtatcggtattgccgatgtggacaagtgggcgctgtatgccattgcacagtactgcgatcagcttgttcctgacggttttggcgggacggagccgcgtatcacctgtaatgcgtatctgacggaccagcgtaaagcatgggatgtgctgggagacttttgttccctgatgcgctgcatgccggtctggaacggcagtacactgacgtttgtacaggaccgccccgccgataaagtctggacctatacgcagagtaatgtggtgatgcccgctgacggtgcgccgttcgtctacagcttcagcggactgaaagagcgccacaatgcggctgaggtccgttacaccgacccgaacaacggctgggaaacgtcaaccgaactggtggaaaacgatgctgccatccggcgctacggtcgtaacgttctgaagatggatgcatttgcctgtaccagccggggtcaggcgcaccgcgccggattgtgggccatcaccaccgaactactggaaacgcagacggtggatttttccgtaggggctgaggggctgcgacatgttcccggcgatatcattgaggtctgtgacagtgattatgccggcgtgaccgtgggcggacgcattctgtcggtcgacagccttacgcgcacgctcacgctggaccgtgaggtggagataccggcaggcggcaatgtggtgctgaacctggtgggcagcaatggccagcctgttaccgtcgcggtcaccgcgcaccccgccccggaccgcgtgaccgtcagccagttacccgatggcgtggcggagtacagcgtgtgggggctgaaactgccggacctgcgccagcggttgtttcgctgtgtggccatacgggaaaacgatgacggaacgtatgccattactgccgtacagcatgttccggagaaaggatccatcgtggacaacggggcgacatttgacccgttgccgggtaccagtatcacgaacatgccgtctgccgtgcagcacctcaccacagagattctggctgaggacggacagtatcaggcgcgggcgagatgggacaccccgcgggtggtgaagggggtgaacttttccctgcgcctgacggtgaaagcggaagataacagcgaccgtctggccagcagcatgaccctgaccgaaacggagcacaccttccgcaacctgacgccgggacgttacactctgacggtgcgggcggtgaacacccggggccagcagggcgatccggccagcacggatttcagcatcgccgcgcccgcagtaccttcttatgttgagctgactcccggctatttccagataacagccaccccgcgccaggcggtatacgatcctacggtgcagtatgaattctggtttacggatacgcagataactgatatccgcctggtggaaaccgatgcgcgttatctcggcacggcgctgtactggattgctgccagcgctaccattaaacccgggaaggattatttcttctacatccgggcggtaaatcaggtcggtaaatcctcattcgtggaggcgaccgggcaggccagcaacgatgcggcaggctatctggatttgatcaaagggcagataactgaaagtcacctgggtaaggagctgctggagaaggtgaaactgacggaagacaacgccagccggctggatgagttttcgaaagaatggcaggacgcgaacggaaagtggaatgccatgtggggcgtgaagatagagcaaaccggggacggcaggcattatgtggctggtctgggcctgagcatggaggatacgccggacgggaaggcaagccagtttctggtggcggcggaccgcattgcgttcattaatccgcaaaacggaaaccagacgcccggatttgtcatgcagggtgatcagatattcatgaacgaggcattcctgaaatacctgagcgcgccgaccatcaccagtggcgggaatcctcctgcattttccctgacgccggacggtcgtcttactgcgaaaaatgcggacatcagtgggcatattaatgccatttcgggggcgctgaataacgttgttattgctgaagactgtacgattcaggggacgttgcgggccgaacggatcctcggcgatatagtcaaagcggtgggtaaagagttcccgtatttcagggagccagccaccggagcaaagcgttacgccagtggcacactgaccgttcagatagatgacgaccagtcatttgaccgccagattattatcccccccatcaattttcaggggagttattacggacgcaatgatacgtgggatacatgtacgctggaagtgcgccgcaatggcgcgctgatttacagcggaacgagcagcagcattcctgagtcatacggtgccacgctggatatgcctgccggaggcggcatcgtcacactgacatttagtgtcagtaccagggggaacagcacaggctggccgaattccagaataagcgatctgattctgatggttgttaaaaaatccactgcagggattcgtatcagttaa

SEQ ID NO: 394298 - DNA, 594 bp, Salmonella enterica
atgccagtacttatttccggcgtactgaaagatgctacgggaacgccggtacagaagtgcaccattcagctgaaggcgaaaaggaccagtccaaccgtggtggttaaggtcgcatcctcagatatgacaggtgaggatggcagttaccacctccaggccgagcccggccattacagtgtgtcactgctgcgggaagggtgtccgccgacgctggcgggtgagatttatgtcgcgccggacagtctccctgacacgctgaacgcctttcttggtgcgccaaaggatgccgacctgcgtccggaagccattaagcgttttgaacacatggcggcggtggccgcatgtaatgcacaggcaagcgccgcagcccgcgatgaggcagagcaggccgcaggggatgcgcgggagcttgtggaaaacccggttgttattgtaccgacggctgctgaattaccggactaccctcgcggactttatctggtggaagccgatgagaggaaaggtggcggcccgcagatttattattatcccggaagcggtcgccgtttctggtttgccagtgtggaggataccgaagtggagggtaccgaatga

SEQ ID NO: 394299 - DNA, 303 bp, Salmonella enterica
atgagtcgctttccgacagaaaccattattgcgccggccagtacgctgaaagatttcagcggtcatactgttgccggtgcgggtaaagagataatgccggcagatgccgctgcccgtctgtaccggatacagaacctgagtaaaacggagacactctggttcaatgatacggggtccgtggctgcagcaggtgcaccgggcagctatgcgctggctccggggggctattacgaattttcatcaacgcacgcggtgtcggtgtatgccaacactgtggttgcgttcagtgcggcgaggtactga

SEQ ID NO: 394300 - DNA, 627 bp, Salmonella enterica
atgccaccagtatttataacattgccggtaaacgaacatggaaatgtacttcccatttcgtcacatgatttgggaagtataaggggagcagctcaaaatgctgatgacgctgttgatgtgcagatgggaaatagcagttacaggataagatatctgcctcgtctggatattttttctgttaatcctaatacagatgtcaacccgcaatattctgttatggaatttattgcaacaatgaataacagcacccaccttgaagagcatcttaaccaggggagaacatttttatctgccctcgaggccgctctgctgcgatgtcaatcgcgtatatcaactaaaattgactcctgtagcttcagtattgagcaggcaactctttcactgtcagcagggcatcttacctgcccgataacgttatgcgtccctgagaggggcgtctttgcccggacatcattacagtcggatgtctgttgcttatatgactcaactgcactgaaagagctggtatcccggcgtctgcctcatccgattagcagggaagccataacaggggcacatattgttccgaaagaacagtgtcattttgacccggagaagggcgcgtttattcattctgtatctgaatag

SEQ ID NO: 394301 - DNA, 192 bp, Salmonella enterica
atgcagaaagcctgggaactgtctccggcgatattcccgtccagcgagcggtttaccgactggtccaaccgttttcacggcctccatgatgcctttacctgtaccagcgttgtggcgggtgatatgcaacgtcatgccagagaacattttccggatgttctgtcatccatcctgccactggcctgggcgtaa

SEQ ID NO: 394302 - DNA, 153 bp, Salmonella enterica
atgatgacctactgcctgaaaagacatgtcttgagcatcttattttatcagccgatcatgatggtatttatcaaccactcagatttaatcttgatggtagttgtgccgaattatcacctgttgtttatgatcttagcaatccattttatatga

SEQ ID NO: 394303 - DNA, 195 bp, Salmonella enterica
atgcttcgtaatttattttatattcactatacttatggtgagaatttttttgtaagaataaaaccttattttattgcggccggatactttatgctttcattattgaagcttaactttaaacaatgcaaaacaatttttttagcattgatggactcctatgatttgagaaattcaaatttacacaaaccacagtaa

SEQ ID NO: 394304 - DNA, 324 bp, Salmonella enterica
atgccagggataaatttagcaccatatataaatccccggggtgaactgggagtaatacctcaggatacactggaagtcatacgtaataccagtatgtcaacccctgaaggggctgacatacaacttggcggtattatacatactataaggcatgtaactttactggactcctttctggttcatcctggcagaaatgttgacggtgtgggagttgtaagagacagcgataggaatatcttaaattctcaccgtctgagtaatcaactaaacaacagaagagtgtatgagagatcatctgcccctttttctagagcctgtcagtaa

SEQ ID NO: 394305 - DNA, 750 bp, Salmonella enterica
atgagcactggtatccaatcactgattgatgcaggcgcattgttcgtctctaaccattcgggcggaaaagacagtcaggcgatgttgatcaaactgcttgatgtaatccctgagcgtcagcttgtcgttgtacatgcatcgctcggctcggttgaatggcctggagcgcttgagctggctcgtgaccaggcaagggcagcaggtcttccgttcatcgtcgccaccgcgcgcaaaacgctgttggagatggtcgttcgccgctttgagaaccgcccggaggttccgagttggccttctgccagtacccgtcaatgtaccagtgatctgaagcgcggacctatccagcgcgaggtcaggcgctatgcgaaagccaacgggttcaaggtcatcgtcaactgtctcggtctacgagctcaggaatcgcctggacgagcaaaacggcgggcattccgcaagaacgagacggattcaaactctgtgctgacttggtacgagtggcttccggttcacgagctgaaaacagatgaagtattttccgtcattcgcgaggcaggtcagaaaccacactatgcctatgagctgggcaacgagcgcctgagctgtgtgttctgcatcatggcgagccgtaacgacctgaagaacggcgcaacttgccatcctgaactgctggagcagtatgcggagttggagacccgcaccggctacaccatgcacatgaatcggattccgattaaggagcttgcagcatga

SEQ ID NO: 394306 - DNA, 243 bp, Salmonella enterica
atgactcactacaccgcagaaaacatcagagacattctgaaccgcgaaggtaaccgcagcggcttcgcgttcgacaagttcggcccctacttcgctaacgccgaacgccttaaagccatgaagaataaattcgcgctgatgatggaaaatgacgcagaacgccaggttaagcgcattcctgaacgtaccaaaaaatctatcaacagatggtttttgttcctggctgaacgttacgggatctga

SEQ ID NO: 394307 - DNA, 666 bp, Salmonella enterica
atgtttaaaaatataaacatgaaaactcaaaacaataccgtgaatgcccgcatcagggagcagatgcaaaaactcggactaaaaaacaaagatctggccgaagctaccggcgccacaaaaggaaccgtgagtcaatgggtgaatgatggcaatggtccatccgctcaattcattacgccgttagcaagagtgctgggtgttagtgagcaatggttgttacaaggagggagcaacaggaaaggcctgaccgtgaatacgagaggactccaaaaaattcctttattatctttacggcaggcgggggaatggagtgatctaatgaatcaagatttaactcatttccaagactgggtgacagtctcagaggacatttcaccgttttcattcgctgtgcaaatggataatgactcaatggtcagtgctgtaggtgatgtgaccattccacagggagcaacattgattgtagatccaacgcaagaaccaaccgcaggacgtgtcgttgttgctttacttgatgacaacaaaacagtcacaataaaaaaattatctatcgatggaccgaatatataccttgtgccactaaacagtaattataaagcaatgcagatagccaaccttcagcaagtcattggcgtctgcttgcaaatgctgtcgaagttaccttaa

SEQ ID NO: 394308 - DNA, 216 bp, Salmonella enterica
atgaaaaaaacagaagtcttaacacattttggtggcactagcgctactggaaaggctttgggcatatcaaaaagcacggtcagtttatggggcgaaataatcccgtggcgatacgctttattggtttctgaggttactggcaatgcaattaaattcgaccgtaccgattacccagatcgatttagtagcacggagagcgatcgcgagactgcataa

SEQ ID NO: 394309 - DNA, 576 bp, Salmonella enterica
atgaacgagcctacatggaaagaagagaaacaaccccggtggtgggttgctgcggtacggcgggttattgtcgcgctgcatggggggtatacagaagcggcagaaattcttggtctttataagaccgacaaagaaacgccttccggggatgccgtacataaccgtttgcgaccctattcagatcaggtgatgcccatcggctgggcgatgactttacaggcggccagcgggacacatcacatagcccatgcggtagcgagggaatcaggcggcgtattcgtagcattgcctgatattgaggaagtggataacgccgatattaatcagcggctactggaggctatggaagatctgggcgtttattcgcagaaggtacgcgcggctatcgaggacggcgttattgacagacgggaaagagaagagattgacgccgaacttcaccgggtaatcgtcaagatgcaggaacacgcatcactcgttttccgggttttttgcccgccagaaaaaggtgatgcccgcgagtgtgcagctccgggcaccgtggcgtcatatggtatggagaaaaccaacgcatga

SEQ ID NO: 394310 - DNA, 360 bp, Salmonella enterica
atgaaaaccgtaaccattcgcgtagaagaaatgagcgactttacagcagacgtactggctgcattccgttccgcaacggatggcacctgcatgtcaggcgatgatgtgatctcgttccctaactggcaactgatgcacaaaattctggcacctaaccgcatgaacattctgttggcaatggcaggggctggtgaactgactatccgcgagatagccagtatggttggccgcgatgtcaagggtgtacatacagacgtcaccgcgctaatcagcaacggcttactggaaaaaggcgagcgcggaactgtgtttccgtacgacgacatacacttcgacttcaccctgcgccatgtagcctga

SEQ ID NO: 394311 - DNA, 288 bp, Salmonella enterica
atgccagctacgctgtataaaaagctcgaacgccacctcggagaagcagaatactttcgggtgactatctgggaggttgacccggctgttctgggtagccagcacaacttcaagtacagcatggcttacatcgttgatggcgtatgcgtcatgcgttacgacaacgaacgcggcaaaggtgaccataaacatattggcgatcaggagattaatactcagttcgtcaacattgagcagttgtttatggacttcctggcagacattgaaactatccgcagggggaaatga

SEQ ID NO: 394312 - DNA, 153 bp, Salmonella enterica
atgaccagttcggggcatatcgtccgcgtactcctggtagaccaggaaacccagaaggtggtgtgtgagcggctgggctccggttatcagttatccgtcccgcttatcgcgtttcacacggatcactatttcaagcgtccgggggctgtatga

SEQ ID NO: 394313 - DNA, 177 bp, Salmonella enterica
gtgcaaaaaacactgctggcaaaagcaatcctccgcacgctggcggagaaatttcagcaggaagcgaacgtgaccttcccgccggaactggtggcgatggtggatagtctggaatcggagcttcagcgcgaggaactcagcgcacaaaccggacgtggctggcgcagtacgggctga

SEQ ID NO: 394314 - DNA, 807 bp, Salmonella enterica
atggctaagacacaaatgcagttagctaatcgcacatggcgcacagagacaaaaactctcggttggcatcaggggcaaagctggaaaggtggccgtaaagcgtggaaagcgttttgtcgtgaaaatgctgcctcaaccgtttatgagcgtaaaaacagcgatgagccagattttgtagaccaggctgactctaaatggcatgttgccgaagaactcacctactggactccacaggactaccccatggccactattactagcaagttcactaaagaacgcctgattgattgggctgtgatatctgtagctgaaagggtgcgagatttaaaggatgccccggaatcagtaaaagctgcggcgaatttaaaattagctgaaatagcgctggcagcgcttaccgctgaacctgtagcgtggaaatacagacttgtcgatattgattcaggcacaggggatcattggaaatattcaactcagtgcatcacacctgcatccggaaagacgcaccgcattgagtctgttcctctctacaccgtctcgcaaccagtaccagaacgcgaacaggttcgccgtgaacacgccaagtggtcagataagacattcggcgatatcggtccagttggtccgctgaaacacctctcgaaagaagcgatggaggctgctgcagaacctgacgacctgagcgaatgggctgatatgcaattcctgttatgggatgcgcagcgccgtgctggtattactgacgaacagattacccgggtgatgaaagaaaagctggcgataaacaaggcccgccagtgccggtag

SEQ ID NO: 394315 - DNA, 1209 bp, Salmonella enterica
gtgatagtaaccaacgacctaaacaaaatggaagaggtggaaaatctggcacgccgcaaggcggaggtaatgaaactgtgtaacaatttcccgaaaggcacccctaattacgcacagattcatacattaattcagcagtacgccgagcgagggttgattgaggacgatgtgttactactcctgaattcttccatcacaatacatgaatgtaaaaaagcgattgaggaaaggcacaccgcaaaggagcggaaaaacaaaaggaaaaaagcaagacgcgaagagagaaaggctaaactagcgcgcaaaaatcgtttgctaaagtgggggcgtatatccgtaaaagtgattccatcagagcatctgctttttacctaccgagcacttgctaaaactgacgagtatatgcgtcagttggtttcgaatgctaaggaatgcctgcacgcttataacgcccgtgtcgccgaagaacaatcccgaaaagaaattgaattgcagaaggagcatttacgccgtgctcgcgcagcagcagataagctaagaaaacagccaagcaatgccaacgccgcagacagagaggatgcttacgagtacgtacatctgtctatccctcgcgaacagttgaatgagttcaggcgctggtgcgttcagacctatggaagccggattgatgatttgtttggagccgtaaatgctttcgttgccgctcatccagcgaagccaacttcacagtcgacaactattgctgataatttgatacaacctcctactaaaatagccatgcctattacagcgtttcctgtgaagcccaagcgcgaaggtagtgaagtggtaatcaccagcagacctgaccaggctaacttttccgaagcggttcggtacaactgctttgaccgttgtgtaattaccggagctactactcgctggcgcaatgaggccgcacatatcatcgaacacaagcacgatggcccagaccattacaccaatggcctgctactacgtattgacctgcatcgtctgtttgataacaacttgctcgcgatttgtccacagacactaaccgttcacataacaccagagctgctggtggatgacccggatctgaatgcgtaccaagggaaactcatcgctgaattacgccaccctgttaaccctgactatctgatagcacgctgggaagcattccaacagttgagttgtgaaaaacggtaa

SEQ ID NO: 394316 - DNA, 597 bp, Salmonella enterica
atgaacacattactcaaccagtatcaggtctgcctgaacgatttcacgcgcccggtcattattcatggtcagtgccaacccgaaattatccgctggcataagctggcgatggtgccctgcacacttcccggtggtgagcttgccgaactggtgatccctgaacggctcctgcgcattctcaatatttcaacaatagcatcaatgacagcagcacaggatatcaacacgggcctgatgtcattactgctgccgggtgtgctgcttagcgaatgcgagcgactggggatgcgtcgcctcagtaacaagctacagtcattgtttcaacaattcagggggccagggatcagagaacggttaacgctgttgtgctgggctgaactggcaactgacatcgatcacaacgaatggaaggagttacaccggctacaagcagaaacgttaatgcgatggattgacgaaaaactacaagcattctgggggttgcagtcgcagatagaagactacgtagctttgaataactttgaggtcaacgttaccgtttttcacaactcaactgttggaatgcttcccagcgtgctatcagatagtcagggttaa

SEQ ID NO: 394317 - DNA, 636 bp, Salmonella enterica
atgaaccaacgttataaccttgataacagacatgctcctttcaacaaacgttatctggaaagaatgtggatggtgttgaacaacgccattaaccaatacccaagaactctggctgtaatagcgatactcagactacctgagtatcgggatattgacgacagcatcagcaacacttccgatcacaatggaaatgtaatatccagatttattgaatctctgaaagaaaagataaccgcctatcaaaatcgtaaagtcagacggaacattcgagtccactatagcgaactacgttatgcctgggtcagagaatatgatcaaggcggaaaaccacattatcatatcgctttattcttcaaccacgacgcattcaatactctgggcaattatcgaaacaagtctgataacctggggacacttatcgagaatgcatggctgagcgcgttatctctttctgcattccatgaatatcgaacactggtccactttcctgataatccattgtattacctgcatactcattcaactgactttattgacatctacaatagcttgacgtttcgcctgagctatttcgccaaggaacgctcgaaaatttacagccgcgacaatcgttcttttggatgcagccagcgctga

SEQ ID NO: 394318 - DNA, 1119 bp, Salmonella enterica
atgcttgataatgaagggaaaaaaattaaagaaatcaagagagcagaactggagaagtcaatccgcacctgctatctcgcggctaatatattagcttactgggcgatacaggatggcaacaccaagcaagctttatttgtatccgaacgatgcttgctatgggtatggcaccggatcaatcttgaaaaagatccaaaaaaatacttcccttcgtttgaagttatatggcaaggttatattaacatttctgctgaatatttttccaaacttcagccatattttcatgaaaaatatcttctttctttatactcaaccgaaagttcactggtcaatataactgtatttgaacatattggtatacttgcaactatcggattaaataattttctcatcgcacttaaaaaagataataatgaaggagcacttcacattcacaatgccgatatcgttgctgatagcttgtgtgcattaatcataaacaatcccgcatctggttcgccacgtcttgatgagaatgtcattgaaattactctgggattaatatttctttctctgatggggagaaaggacactatcgacaagtggcttagagaactaatttcgaggctggactatgtactcaggattgggcgagaacatccaatatcaacagactctattgacgatctaatcagcatggaatgcaatagcgacgatacatatttaaaagaaaaaacgacaagcatgtcctggatgattcccaccttaatgggatggtgtgtaatactggaaaaagaagaaggatactacgcattattaacgggtacaaaagagtcatatactaaaatatgttctcagctatggcatccaacaaatgatctttataaacatctttactttcatccagcacaatccttcactggtgaaactgaagcaccaataacattcccggataatatgagttactataaaaacagaatggatgagctacgggaaaacgaacgatataatattttcaaagaatcaagtgctgtacaagcaggtttaactatactcgatttcattgcctgccgacattttagaacacctgtaccctctgttctttggtatggaatgcaaaaaaaacagagtgataactga

SEQ ID NO: 394319 - DNA, 699 bp, Salmonella enterica
atgctgtatcgggttgatgaaatactgggatatttgaatcgttgcgagcgcactacatcaaatcgggcagatccattagagcttctggctaaaagactttctttacgtgggttgatcgttagttttattttcctgctgttaatgttactccctcttgggatctacgcattttttcctgagaagctattcatcctggtgagtaaatttttctttattttgatgatgctgagtggaatatttactttattagttgagccagcattgatgttattaggtctatttaaatggaaaacaatgactttgactcgttttctgaaggaagttcaggaagatgaagggcatgtagcagcattgagccgctatgaagaaaatgaactccaatacgcagaatttcaactgataaaaaaaattaccgccaatgaaaatcgagtcaaagtcttctttggtgagaaaacagcggtatttgcgttactggcattttcggttccgtttatgaaagaactttttggatggaatgttaatttttcggtttttctctggggggacgatttttctggctatactgataccttgctggggtttgtctgggcattaatttttggtatgtctcttggcgcaattgctttaaaattagcgactgaacggtataaataccagttatcactacttaagcagatgctctggattagaactctttag

SEQ ID NO: 394320 - DNA, 816 bp, Salmonella enterica
atgtatttaataattaatagtgggggcatcataaattcgaaaatgatggctgagattgatggtatggaaaatgaaatagccaggaatgcacacgataagttatttaatattaaattgttgtcatggtgtaaaacatacagggaaatgttgctattaattcattcaatcatcaacgagaaggcatttaatgctaaagattttattgagtttaatgggcttggtagctatgttacatcattttgcgaagatgatttaaatctgtcgatgatagttgattttttcgatgaaatatctttcagatatggcattgagatgacgaaaaagattattaatacagcctgtgtgaaatatgcaaagatacattcaatacgccctgggaaaataaaatactcacttccatttgactttaaacctaatgagtgtaatgagaaaaagatagaggaatataaatggattcttgatagaatcccatttattgataaaaatgcatttggagaggacattactgaacttagcaccattatgaataaacacattccactttcattacgtgcttattatcgatatgacgtttatgtatcctgtgatgctctcgctgaatctgatataaaactctttatccttcaaacgaaaagagcatggagtcagaaaaaatatcaagagtccgtaaaagggaaacctgtattaaacacccacatcagcgccagtgcaaaaaaacagcttaaacttttagctagtgtgcataataaaaaaataaatgaagagcttgaatgtattatcaatgatgcttatgtgcggtataaagggctcatgtga

SEQ ID NO: 394321 - DNA, 306 bp, Salmonella enterica
atgaactgtccacattgtggttcagtcaatacgcagaagcgaaatattggccgaaaagtcggtggcgggattggtgccgtcgcgggcggcgttgtcggtgcgtcaggcggtgctgagggtgccgcgatcggcgcagcggcaggttccattatccccggcatcgggacgatcgccggaggcgtaattggcttcctcgtcggaatgggaagtggcgttgcactggggacaatggttggcgggagcctggatggtcaggtgctcgatgagtatctctgctacgactgcttgttgacatttgatgagtaa

SEQ ID NO: 394322 - DNA, 951 bp, Salmonella enterica
atgaagatgaaaaacaggatcacccaagggttattggtcgcatcactgatggcggcaagcgccggagcatgggctgagaattccgctgtggttaaaacggcagtacaggccatgcattgtcagcctgccggacctgaaaacaatttcaacggcacctgcccgattccggcggagctatatgcttccgatcccgtttacaaaaaggacatggaaaccagtctgaaagcagccggactaaagggcttgctggggcccgaaggggcattaaatggcccacagtcaccaatggagtctgtgaaagtagccggaaaaatctggctgaaaagtatggcctgtgaagctaataattgcggagagcactatctcaactttctgtatcaacctgatgaacatcaggtgctggggtactatttcgatggcaaaggggtctgggtgggtaagcctaataacgaagaggccagtatcctgacggacggtgagataaaaaccggtcctggtgaatccgatactgcgccggttgccactgcacccgcttccgcgcctgcatcaccggatgcaccgcctgccaataccatctggacgttcagcaataacggcacaacgctctggcaggcctgcggcgggcagaacagcgcctgcgtgattgtaggaaattcaaaatggtacgttgcggtgctgaaccgtcgttcggcgactggctgcgcattcggtgacttttatgttgccgacaggagttcgacctcgtggcatcagtacgacactggcacctgtagcgccgatgcctacatccagcagggtagtatcagccacggccagtattcatcggtcgatattcttatcaacgggtcgctggtgaagcagttccctattggttactggtcggcacagaaatcgttctccggtggcaaccggccttcctggtcgaaagcaaaacaaaaaaatcagcactaa

SEQ ID NO: 394323 - DNA, 819 bp, Salmonella enterica
atgcgattagccagccgcttcgggcggataaaccagatacgacgtgaccgtccattaacccatgaggaactgatgcaggtggttcccagcgtatttagtgaagaccgccacgaatcccgcagtgaccgatacgcttatatccccaccatcacattactggaaaacctgcaacgcgaagggtttcagccgttctttgcctgccagtcccgcgttcgcgaccccggcaagcgtgaacacaccaaacatctgctgcgcctgcgccgtgccgggcaaatcaccggggtacaggtgccagagattattttgctcaacagccacgatggttccagctcgtaccagatgctgccggggtacttcagaagcgtctgtactaattcgctcgtctgcggtcagtcgtttggtgaaattcgcgtaccacatcggggagacgtggtggagaaggttatcgaaggggcttacgaggtgctcggcgtgtttgaccgcgttgaggaaaagcgcgaggcgatgcagtcgctgcaactcccacgtcccgcacagcaggcttttgcaaaggctgcactgacttaccgctttggtgaaacccaccagccggtaacggaagctcagattctggcaccccgccgctggcaggacgagtccggcgacctgtggacggtctataaccgcattcaggagtcgctgattaaaggcggtctgtcgggccgttcagctcaggggaaactcagtcacacccgcgcggtgaaaggcattgatggtgacatcaaactcaacagggccctgtgggtgatggccgaagaactccagcaggcgctgagctga

SEQ ID NO: 394324 - DNA, 465 bp, Salmonella enterica
atgcaacacaccaccacacccgaagcagcaacaccagcacgccagccacaacctgaccgcaccgctatcacggccagccttgtcccggatgaagaacgtattgccttctggggccgtcgctttggtcacgtccgccagtgggtatttctggagcccctggtgttttcctggcttgacctctggagcactgactatcagggcggcatctgggattttcacatactgtcgaatggcggcgcgttcctgacaccgccggagcgggagagctacacgctgtttaacgagcacaacggcaatgaagctgaactcagcaccgaagccaccggcatcgctgtctgcctgatggcctggaatcatcacgcctgccgtaccggttgtcaggctatcagcgagcactactatcacctgcgcgattacgcgctggctcatcctgagagcaacggtattctacggataattgactga

SEQ ID NO: 394325 - DNA, 345 bp, Salmonella enterica
atgcaaaacgttttatcactgcctttaccggcagcggccccgtcacgcctgtcgcccgtcgaagtctggcaaaaactgctgtcgtacctgctgcaacgccactacggccttgaacttaacgacacaccattctgcgacgatattgttattcaggagcatatcaacgcaggcgttacgcttgccgatgccgttaactttctggtggaaaagtacgaactggttcgtatcgatcgccgaggatttagctggcaggagccatcaccttatctccgggctatagacattttgcgggcgcgacaggcaacgggcctgttgcgatgtcgccgtaatctctcggcacactga

SEQ ID NO: 394326 - DNA, 573 bp, Salmonella enterica
atggaggttggcggcgcctatgcgcatttgttctttgatttgttgcgttttctcgaacttcgcagtcttattatcacagatctggatgccgtcgattcccctggaggtaaagcgtgtccggttcacggtggtacctattccagcaacgcttgtctgaaggcatggttttccgaggatgatcctttcacacttgcaggcctacttgccaagaaagactccgacaaaatactcaaaggcaatcgtatatcctatcaatacgcagaagttgagaatggcccctgcggacggacattcgaagatgcattcatccttgccaatccaaaactatttgggttggtcgagaaagacgctaatgccctagaaatcgaagcccgcagtaaagctgaaggttacaaaaaatctgaatttgcattgaagtactctatttcaaataccgactggatctcaccaaaatacattgttgacggagttcgctggctggcaagcgagggtatggcctcaccagatccggcattagtattggctaaggaggtttctgcctgcgttgtagaaggagaaggctctaatggttaa

SEQ ID NO: 394327 - DNA, 1248 bp, Salmonella enterica
atggcacatgaaaagttccgtcgtatcattgcggatcgctttccaattattctcattgatgaatatcaggacaccaacaatgaatggatcgaagcgataaaaacccatttgttgggcaagccaaggacaccactgtttggctttttcggtgaccattggcaaaaaatctatgggggcggatgcggcaagcttgatcatccctgtttaaccgaaattggtaaggaagccaactttaggtcagttaaagtaatcgttgattctctcaatcggatgcggccagcactacagcagttcgttgaagaccctgatgctgaaggtggagtacgtatctttcatacgaacaattggcagggagaacggcgaaaaggtgtacattggagcggggatttacctgcatctgttggcctgaccactttagaacgcgtgaagactatgcttgctcgtgaaggttgggatttatcaccttgccacacaaaaatactcatgctaacgcataagcttttagcgaatcagcaaggctattcaaatttagcggcaatatttcgatacaacgaatcgtttacgaagaaggagaatcaacatattgcgttctttgtagataagttggaaccagcctgcgatgctttcgctgcccataaatacggaatgatgtttgaagcacttgggggcatctcacctctgttgcgtagccatgcagacaaagcaagctggcacaatgccatgacgcaattgcttgctatacgtgataccgggactgtcggtgatgtaatcgagcacttacgtaccagaaagaaaccgaggctcccagatactgtcgaaaaacgtgagcgagaattacgtgattttgacaaaacagcaggtgttgaaatgccacgagttttggaggaattagagaaactccaacaaattgcttattctgaagtaaaggcacttcgccattatcttgatggccactcaccattcgaaacgaaacacggtgtcaagggggcagagtttgaaaatgttctggtcgttgtagggcgtggctggaaccaatacaactttgctgaaatgttggagctcgccggtgcacaagtgatttctgcggcaaaagaagacgcatatgagcgtaatcgcaatttattctatgtcgcctgttccagacctaaaaaacgacttgctatcctatttactcagagtctgtcgccagacgcattggctacacttgagagttggttcgggaaagagactattatgccagccccgtag

SEQ ID NO: 394328 - DNA, 261 bp, Salmonella enterica
atgatccccaaacgcttaaaagaagcccggctgcgggcgaaactcacgcaggaaaagctgggggtactggccggaatagaagaggcaacagcctactcccgcctctcacactatgagaacggcacccataaaccgacttttgatcttgtttgcgaatttgctaaagtgctcaacgtaccggagtgctatttctatacggttgatgatgattttgccgaagcggtactggatctttattctcggtgggaaagtaaaccctga

SEQ ID NO: 394329 - DNA, 285 bp, Salmonella enterica
atgatccctgaacgacttaaagccgcaaggttacgcgccagccttacccaggagcagttgggcgtccgcgcaggcatagccgaagacactgcttattcaagactctcccagtatgaaagtggaacgcacaaaccgacgtttaaaatggtgtgtgcttttgcccgcgtgctaagcgttcctgaatgctatttctacacggtggatgatagtttcgccgaggcgctattaaggctgtatgacggtgaggttgttcagtggaatataaaagcgggggattgctcttaa

SEQ ID NO: 394330 - DNA, 228 bp, Salmonella enterica
atggataaagacgactggcatccggcagacatcatcgccgggttacggaagaaaggaacatctctggctgcggtatcgcgcagggccgggctggcctcttccacgctgaccaatgcccttaaccgccactggcctaaaggtgaaaggctgatcgccgaagcgttaggcgttacacctgaacagatctggccgccccgttaccgtaagccggaatatcgccagagctaa

SEQ ID NO: 394331 - DNA, 462 bp, Salmonella enterica
atggctactaccccaatccaaacacacccgttactttccgttcccttcaatgctgccacggacttcaccgaccttgccgactactgcgaccgcttcgccgaaaccctgattgaaagcgacgatccggcgctgcggctggcgctttgcggacggcttgccgcctgcctcgcgctgctgcggcccacgctgaacgaccccatcccgctccacctgatcgaaagcctgactgttgatacccttcccgccagttacccctgctttaaacccggttccgaattgctctgtgactactcgcttacgctggcgcagcttctgacggggcgggcgttattgccgaaaatggaacggacgttgaccgggttactgtgtgaactggtctggtacttttcctctgaactcaaagccccgcgctggatacgcaccgccgacggcgtgacgtttatcgacgaggtgacggcatga

SEQ ID NO: 394332 - DNA, 282 bp, Salmonella enterica
atgggcggtttccagtacatgacggtaatgctccagcgtgatagccagcttagtcccgttccgggatgcaccagacagaccaagagaacggttgttcagccgctcactctgcgccagcctgtcacgcccggcctgtttcagaatgcagcgcaccgccgccatctcgttttgcagggaacgcttcgtgatgccctgcgccagtcgctcgcggacatagccttcaatatgccgcgccttaagctgttccacccggcggatctgcacattctgcgccagtactag

SEQ ID NO: 394333 - DNA, 189 bp, Salmonella enterica
atgttttataccagaaaaatcattctgaccagctttattgaatcaatctatgtaatttctactgtaaacatgaatatgttctgcgtgcggtgggagaggcccgataccaagcttaacgaactggctaatatatcagtgagctacacctttcgagcgggttctttattttctgcgatctgccttccataa

SEQ ID NO: 394334 - DNA, 525 bp, Salmonella enterica
atgttatattgcgctgcttcattatttactaaggttgtaccaactgatttggacgcattggtcacacccgttgctacggctgccgcttttgaagcgacgttgttaataagcacatctgcggctttagtaacaactttcactacagtggtgccaactttcgttccaagctcgctaaacttagacattaatgcagcagccccgccaatgccggctgtcagaatacttgcagccattgatattccaccaagaacttgcgctgcagttttgagtccggcgggggctttgtcacccattacatctactgcagtttgcagtgccattgctgtcgcgctcactgcaacaacagcccaaagggcgggattaaatacagcggcaattgctgtaaaagcgacagcaagccagccaaagacctgtcccagaatcttacttttttgtgctttttcttctgctttctgctgttcttcaagctgttttttaaactcaacaactttattttccagggctttgttttgcccttcagtataa

SEQ ID NO: 394335 - DNA, 492 bp, Salmonella enterica
atgacagtttttatcagttatcgccatactgatcgagcacaggccatgacgatcaataacaggcttacgagagaaggtatctctacatatcttgatgttcttgatgttgagtcgcaatccactgatgatataacgagtgtaataactcgtcgaattagagaaagcacgcaccttattgcggtagtttctagtcaaacggcacagtcctggtgggttccattcgaaataggtgaggccacaataactaatcgcaggatctgctcgtacagaacgacagttagtgaactgcctgagtacctgagtaaatggccgcagatgacaaagcctgtcgagattgaattgttcattcaatcttacaagaatgaaataagcgggaagcgccagattacccttgagtctttcaatggaagcgaggcaatgcgtcacgtagataaaatgaatgcggacaaattccacgccgatcttaagcaaaaaatttggagagggtactaa

SEQ ID NO: 394336 - DNA, 267 bp, Salmonella enterica
atgaaatcagatgttcaacttaaccttagagctaaggaatcgcagcgggcactcattgacgcagctgcggaaatccttcacaagtcacgtacagatttcattctggaaatggcctgtcaggctgccgagaatgtgatcctcgaccgccgtgtatttaaccttaacgatgagcaatatgcggagttcatcgatatgcttgatgcacccgttacagatgatcccgttatcgaaaaactgctggcaaggaaacctcagtgggacgtgtaa

SEQ ID NO: 394337 - DNA, 375 bp, Salmonella enterica
atggctaattcaaagaaagttatattcgttgcctttgctattgaagatgaaagaatgagggatcttttaaaaggtcaatctcttaatacaagatgtgagtttgaatatattgatatgtctgttaaagaggcatacgaaagcagttggaaagataaggtcagaactaggattaaacgatctgatggtgttattgcactgattagctcagattctttaacatcaactgggcagaagtgggagatagaatgtgctaaagaagaaggcaaatctattcttcctctttggatttataaagaagatcgaaccaagccagatggattatctccagtagtatggacatgggatggcgttaaatcatttatcgattctttatga

SEQ ID NO: 394338 - DNA, 543 bp, Salmonella enterica
atgaatctgttacctgtattgcttaaaaaattctggaagccattagcagaaatactgctggtggcttttttgttatgtgctggtgcgtactggtgttattcacgaggttatcagaaggcggatacatcatggaaattccagtgggcgcaacgagaccttactgatgcgaccaccgcattgcagcgtgaagtaaccgaaagagcgaaagagcagcgtcgccagaacgccgcagatgaagaacggaaaagagctgatgaagaactggcaaaaatacaggccgatgctgatgctgctgagcgtgctcgcggtgggctgcaacagcagctcgcggcagtacaacggcaacttgcaggaagtgaaaccggcaggctttccgctcttgccgcagcaagccaggcaaaagccgagaccggaatactgctcgccaagttgcttggcgaagctgacgatctggcgggaaagtacgcaaaagaggctgatgagcgttatgtcgccggaagcacatgcgaacgtacctgggacaaagtgaccgggcagaactga

SEQ ID NO: 394339 - DNA, 573 bp, Salmonella enterica
atggatgatgcacagctggatgtgggtctgcggatagacgctgtttatcgcatccgggaagcccttcagcccatccacacaggcaatcaggatgtcctgaaggccgcgatttttcagctccgtcagcacgctcagccagaactttgcgccctcattttcggccagccacatgcccagcaactctttctggccttcggcattgatccccagcgcgaggaaaacagctttgtttatcacactgccattctgacggactttgacaacaatgcagtccatataaacaatggcatacagcgcatccaactgccggttttgccattcagcgacctgctcttttacggcgtcggtgactttagatatcagcgtgggcgatacatccgcatcgtacatttctttgaacgtggcgacaatttctcgtgtggtcatacctttggcatacagagacaaaatctggctgtccatctgcgtaatacgcgtctggtgcttcttaatcaactgaggttcaaaggtattttcacgatcgcgcggcgtattcagctcaatctcgccatcatcgcaaagcagcgtttttga

SEQ ID NO: 394340 - DNA, 588 bp, Salmonella enterica
ttggcgtcggacaaaggcgaggtagatttcgatatcgaagcgctgtggcaggcactgcgactggtaatggcagaactggtggcttcagtaccgtttccggtaaaaaatatcagtattgcgagtttcggtgagtctggcgtctttgtggataaggagggcgtcattcttaccccgatgctggcctggtatgatcgacgtggtgaatcttatctctcgtcattaagcaaggcagaggctgaagaactgtattctataacgggattgccacctcacagtaattactcagcatttaaaatgagatggttgcttgataactactccttgtatgaaagaaaagatatctgctggttacatgcgccagaagtgttgctgtggcgaatgacaggtgcgaaaaagacggaaatatccctggccagtagaacgttgtgtctggacattactcgccgtacctggtctcgtaatgctgccgggattctcggcataccgttcgatgtattggctccgttgataaagccgggtgaagtggccggatgggtgacggcaacgctcaggcaggaattgggattactacttccagagctgtgctaa

SEQ ID NO: 394341 - DNA, 276 bp, Salmonella enterica
atgacgatccagctcaagctgtcccggattcgccaccagatccagtttcagggcaacgccgcatctggtgtaattctccagcccggtaatctggataagcccacgcccgcgatacttccagccatctccggcgtctttgttacccatgcggccaccgtaaaccagatttgctatttgcggctggtgggccacctgcttaccatcgacacgccccagcatttcacactgatacggcgtcaggcgtttaccaaacgtcttcttcagcgcctccactga

SEQ ID NO: 394342 - DNA, 231 bp, Salmonella enterica
atgacggctaatcaggcgtatctgcagttagcaaagctgggtgttgttgaacatcgtgagcgttacagtcgctccgcgattaacggcattaaaaaattctggtcgctgacggcgaaaggctgcatgtttggcaaaaacatcaccagcccggcaaaccctcgcgagacgcagccgcatttcttcgagtccaaatttcctgagctgctgaagctgctcgataccgttcattga

SEQ ID NO: 394343 - DNA, 231 bp, Salmonella enterica
atgacggctaatcaggcgtatcagcagttagcaaagctgggtgttgttgaacatcgtgagcgttacagtcgctccacgattaacggcattaaaaaattctggtcgctgacggcgaaaggctgcatgttcggcaaaaacatcaccagcccggcaaaccctcgtgagacgcaaccgcatttcttcgaatccaaattccctgagctgctgaagctgctagataccgttcattga

SEQ ID NO: 394344 - DNA, 393 bp, Salmonella enterica
  misc_feature (73)..(82): n is a, c, g, or t
atggataacgaaaatggaaaattactggttcaggcaggtaaaagcgcactaaatattatcttaaaacagcccnnnnnnnnnnaccactttacttacaaggggcttactgcctggcttgtgcgcgcctgttccaccggcttgcctgccccagaagaactgttgataaaaaaagagggccagcatctgtttccagacggccctgagtggattgtgacacaacatggcaccttgctggcgctctcttattattcatgctggtgccatcgttatggcgcaatcagagcatttttatttcgtcgcatcgttataaacttcggcaacggcttcaaaattcggaccatgctcacgcgcagcgataatatggtaatattttccgcctttcgcatctgctaa

SEQ ID NO: 394345 - DNA, 600 bp, Salmonella enterica; identical to SEQ ID NO: 394198

SEQ ID NO: 394346 - DNA, 633 bp, Salmonella enterica; identical to SEQ ID NO: 394209

SEQ ID NO: 394347 - DNA, 240 bp, Salmonella enterica
atgagtgcttatttttttcatgaaataccagtttgttatatttctggttttgttgctgtgcgcgatccgtacagcaatttggaaaatttattgaatgtagtggaggcgataaattgctgcccaacttcacgtacaactaatggttttatttttgattttgctttgttcacgggggatgtgaatcgagtattaattagaaaggctgatggttttttactatggcaatgccttttcaaataa

SEQ ID NO: 394348 - DNA, 615 bp, Salmonella enterica
atgaatgaatcccaatttcagcaggcggctggtatcagctccgaactggccgcgcgctggtatccgcatattactgcggcaatgaaagagtttggtattacagcagttaacgatcaggccatgttcatagcacaagttgggcatgaatctgctggttttacctcgctggtcgagagcttcaactactcggtagatgggctgatgaaaacctttggtaaacgcctgacgccgtatcagtgtgaaatgctggggcgtgtcgatggtaagcaggtggcccaccagccgcaaatagccaatctagtttacggtggccgtatggggaacaaagacgccggagatggctggaagtatcgcggacgtgggcttatccagattaccgggctggagaattacaccagatgtggcgttgccctgaaactggatctggtggcgaatccgggacagcttgagctggaacatcatgccgcccgatccgcagcgtggttttttgtgattaaagggtgcctgaaatactccggcgacctggtacgtgttacgcagatcatcaacggagggcagaacggcatcggtgacaggcgagagcgctttgaaaaagcaaaatcggtgctggtatga

SEQ ID NO: 394349 - DNA, 327 bp, Salmonella enterica; identical to SEQ ID NO: 394203

SEQ ID NO: 394350 - DNA, 123 bp, Salmonella enterica
atggaattccataataatgacatatatatctatacattcctgaatttggatcgcgaccacttccccaagaatgaaaacagaataatttatttccccaatcaatttgccgctctactctcataa

SEQ ID NO: 394351 - DNA, 1032 bp, Salmonella enterica
atgccctgtgccgacgcgggcaaactggtgaccttcggtatcgtgccggatctgccggaaaccggctatggctatatccggcgcggtgatgtcgtgccgggcgcgacggatgcggtggcttttgaagtggcgcagttcgttgagaagccggggctggaaaccgcccaggcctacgtcgccagcggcgattactactggaacagcggcatgtttctgttccgcgccggacgctatctggaagagctgaaaaagttccgccccgatattctggccgcctgtgaacaggcgatgcgcggcgtcgatccggatcttgacttcattcgcgtggatgaagaggccttcctcgcctgtccggaagagtccattgactacgcggtgatggagcggacggcggacgcggtggtgatgccgatggacgcgggctggagcgatgtcggctcgtggtcctcgctgtgggagatcagcgcccacaccccggagggaaacgtccatcacggcgacgtcatcagccataaaacggaaaacagctacgtctacgccgaatccggcctggtgaccaccgtcggcgtgaaggatctggtggtggtgcagaccaaagacgcggtgctgatcgccgatcgccacgcggtgcaggacgtaaaaaaggtggtggagaagatcaaggccgacggacgccatgagcaccacatgcaccgcgaggtttaccgtccgtggggcaaatacgactccatcgacgcgggcgagcgctatcaggtgaagcgtattaccgtcaagccgggggaaggactgtcggtgcagatgcaccatcaccgcgccgagcactgggtggtggtggcgggtaccgccagagtcaccatcaacggcgaggttaagctgctcggtgaaaacgagtccatctatatcccgctgggggcgacccactgcctggaaaatccgggaaaaataccgctcgatttaattgaagtgcgttcaggctcgtatctcgaagaggacgacgtggtgcggttcgaggaccgttacgggcgggtctga

SEQ ID NO: 394352 - DNA, 1362 bp, Salmonella enterica
atgcacgacgagcggacgcaccggtacgactacgataaccagcaccgtctggtccgttatgtgcgcacgcagtacggggagacgcaggcggaggggcggtatatctacgacccgacgggccgccgggtgggtaagcgggtatggaagcgcgagccggtccactggagcgagacgcggacggagctgtcgcgcaggccgtatgagacgtggtacggctgggagggggacaggctggcaaccatccggacacagcagcgccgcgttcagacggtgtatgagccgggaagcttcacgccgcttctccgggtggaaacagaaaatacggaactggcgaaaacacgccaccgcagcctggcggagaagctggagcaggaagggagcggggacggcgaggcggtgcagttcccggcggcgctgcgggcgatgctggaccggctggaggatgagctgaggcgtgacgcggtgagtgaggcgagccgggcatggcttacgcagtgcgggctgacggcggagcagatgaaaaatcagctggagccgcgccctgagccggagaggaaagtgcacctttaccactgcgaccaccgcggcctgccgctggcgctgataagcccggccaacacggtggcgtggcgcgcggagtatgacgagtggggaaacctgctgggtgaggagaaccctgagcacctggagcagctgatacggctgccggggcagcagtatgatgaggagtcggggctgcattacaaccggcaccgttactataatccggggcaggggcggtatatcacgcaggacccggcagggctggcggggggatggaacctgtatcagtatccgttggatcctctttctggtattgatccattaggtctagttgatataaatttatatccagcaaaagatccaattcattctgtagcgaatgagataaatatatcgggagtatttacagttggggggcatggtacccatacatccattgagtctgcaacgggtaatcgtatgatgcctaaagatttggctgttttaattaaattcgatgcaaattataaagaaggaatgcctgtttggttattttcttgtaacacaggtaagggacaaaattcgtttgccagtcaactagctaaagagttacatacaaatgttactggacctgacaccttatggtcgtggtggggacgaggttccggtaatgttctaaaaatggatactgtactcacagctccaacaaatcttaatacatataaaagtctgatgtctgtgactacaaaggatttaggtaattgggtaacatatgggccatctggtaatgttatatcaattataccaggcaagccagaaagacctggtgatataaaataa

SEQ ID NO: 394353 - DNA, 1725 bp, Salmonella enterica
gtgcgcatcagcgggccgcagcagacgagggagtaccgctacagcgaggccggtcgcctgaccggggtgcacactaccgccgcgaacctggacatcaccctgccgtatgccacggacccggcggggaaccggctgccggacccggagttttaccctgagagcagcagcatggtgtgggcggataaccgcatcacggaggatatgcagtaccggtaccggtatgaccgttacgggaggctgacggagaagaccgaccgtatcccggagggggtcatccggatgcacgacgagcggacgcaccggtacgactacgataaccagcaccgcctggtccgttatgtgcgcacgcagtacggggagacgcaggcggaggggcggtatatctacgacccgacgggccgccgggtgggtaagcgggtatggaaacgcgagccggtccactggagcgagacgcagacggagctgtcggcgaggccgtatgagacgtggtacggctgggagggggacaggctgacaacagtgcagacacagcagcgccgcgttcagacggtgtacgcgccggggagcttcacgccgcttctccgggtggaaacagaaaatacggaactggcgaaaacacgccaccgcagcctggcggagaagctggagcaggaggggagcggggacagcgaggcggtgcagttcccggcggcgctacgggtgatgctggaccggctggaggatgagctgaggcgtgacgcggtgagtgaggcgagccgggcatggcttacgcagtgcgggctgacggcggagcagatgaaaaatcagctggagccgcgccctgagccggagaggaaagtgcacctttaccactgcgaccaccgcggcctgccgctggcgctgataagcccggccaacacggtggcgtggcgcgcggagtatgacgagtggggaaacctgctgggtgaggagaaccctgagcacctggagcagctgatacggctgccgggacagcagtacgacgatgaatcagggctgtattacaaccggcaccgttactacagtccgggtctggggcggtatattactcaggatccgattgggctggaaggggggtggaatctgtatacctatccgttgaatccggttacagagatagacccacaaggattggccccgtcaacttttgggactatttttggcccagcaatggcgggaacattcagtggagtcgattcagtagctcatttgccagaaagtgaaagacaatcgacgctaaatgacttttcaaaaatgcgggggatgtacaatcctttatctgattatgtgtttggatgggctgtaggggcaccagttggctcattagttgctatttttggtccagcagcttcggcaggaaaagtactggcaggtagtgtggtatcatgtctttctaatgtaacctatcaggccattgaaaatgaagaaataaactacaaagatgttatctgggctggcctgacgggaggtttggcaccaggtagaacaattatagaaaatagtttgatagctatgggaacgacttaccttaacaaaggagatactccaggagctgttcctggttcaggaataggggcagtagcaagcgggttgttagggaaagtaccattcttgtctaatatatttggcgatttttccaccgggctcgtttcggaaggcattggtgataatgtagagaaagctaatagcgagggcagtaaaaaatga

SEQ ID NO: 394354 - DNA, 936 bp, Salmonella enterica
  misc_feature (923)..(932): n is a, c, g, or t
atgtcgttcgtcggtttattaacgcctcaagatattattcttgataaacgccgactgttcacttctcattaccctgtattacctgaagggaatgaaggagatcatataacgcatagtgaaaaaataataaaaatgcgaactaatgcaatagaagagatatattccaagcaaggatgggatggcatctcatctttacttttagtagtacaatcaccgtctgtaataggtggatccttggctacctgcaacttaaattttatagattcattctcatggattattggaaaattcaaaggtaatggtttcccatttcatgatcaactgttaagttcattttatacctgtctccctgaagaaaagaaacttatcctgttaaattctcaagaattcaaaaatgagatggataatgatggcaaaattgccgcattacactcagtactcccacccaatatggctacatggaacagtctttcaggttatcctgaaagtgcccaaatgctgtactggaaaggaataaattatccacacatctggagtgatgacgctgatgaaattgactacttcatcggaaaaatgacactttctgacaggtatatatcagcatttaatctcgtaaaacatcgtatggaaaaaatttcctggcaaaacctattgaaactattaaacggattcagaactaccacagaaaaagatgtatcaatgccagatggttggcacttgtccaaggctatagaatatcttgaatcgtcaggccaggtctcgcgtttagacttagccttactggaattcttctttttctcagcattcagaagttgtgaaaaagaagcaaaaaatctttacgcggaattactatccaatccaccattttttgtacaattaatatgtcttgcttataaaccagaatccgagaaagagtataagcnnnnnnnnnnatga

SEQ ID NO: 394355 - DNA, 399 bp, Salmonella enterica
  misc_feature (314)..(323): n is a, c, g, or t
atgcgttgttggcatgctgacttattgcatgcgctggaaattctggcctggaacccaagacgattactgagaatcagccttattcttgcacagctatcatcattaaaaattcagggaaactgggccaatacaccggaaaataccctgaaatcgttgctcaggccctactggccgcaaacaatggctcctgatgaacaaagacttgccgtacttgatatgcttatcaaaaagcacgatagcatcgtctggcgttttctctatgaacaaactaatcctatgagtggtgtttatacggaaaatgccagaccaaaatnnnnnnnnnnacttttctttataagtattattctgcacttggtgagcgaatactggatctggcagaaaaaaatgtcgaaagaatag

SEQ ID NO: 394356 - DNA, 225 bp, Salmonella enterica
atgaccagagaaaacgatctgctaacagacgctgaacttattgaatttaccggttatcagaaaccatccaaacaacgggaaatactggaccgtggcggcgtttcttacattcccgatcgggaggggcgccccatggtaacctggactcatatcaacgctgtactgaacggacagatcatcgtgcagcaatctacagaaacaaaacccgatttcggagcaatttaa

SEQ ID NO: 394357 - DNA, 153 bp, Salmonella enterica
atgaccgagattattgcgggcgattaccatgatggcatccagtttatcagcgagttcaccttcaatgctttccagcgtatcggcgatcatttctggagtaagctcatcagagctttccagcaattgcaacagactggtatagtcagcagctaa

SEQ ID NO: 394358 - DNA, 207 bp, Salmonella enterica
atgtttaatataaactccatgccgccgcttataaagaaaataacacacaggaactggctgaaaagcaaaccaaaaagtgaggtttcagcttccattgtagaattgaatatcgtccccattgtagcgccacgtaaagtatcaagcgcacaaaacccaattaaaaagccaataattatctctcctgtgattaaccctaaccaactgtaa

SEQ ID NO: 394359 - DNA, 330 bp, Salmonella enterica
ttggccgcagcattagtacgtttgcgtcgtttgttactattccttggccttgaaaaagagtgccagcgtgaggagtggatttgccagttgccgcctaatacattactgccgctactactcgatattatttgtgagcgctggcttttcagtgattggttgcttgacagacttaccgctatagtttcttcatcgaagatgtttaatcggttactccaacaacttgatgcgcagtttatgttgataccagataactgttttaacgatgaagatcaacgtgaacaaattctcgaaactcttcgtgaagtaaagttaaatcaggttttattctga

SEQ ID NO: 394360 - DNA, 243 bp, Salmonella enterica
ttgtgtggtaacgctatctcaatcggtgaggtctttccgatttttaatttttcatttaaagatatatgcgtgtttttaacactggttatttctgaggagaaccagtttttcgtacgttcacgaatagttttagctaattttttaacctggaaaggaattgtggaaaaattaattccgcttgatgatatgttcattaaactcccttatcaacatctgttatggaacaacgatctggctttttaa

SEQ ID NO: 394361 - DNA, 423 bp, Salmonella enterica
atggttgttcagtggcgtgagtcgtgggccaccatgtcaaacagctaccttgaagctattggcagtgaagaacgtatcgatcaccgttctctcagaactcaatgtgctgatgcccttgccaaagcagaagaagcattcagcgctgaagaaaaagcattctggcttgctaaagcaacggaaacaaaccgtccagcaatgcagcgtgttcatcgtgccaagtggaatgataaggaagctcaggaacaacgagctgccgaacaagctcaacgcgatcagcaaatagaagaagcaaagaaggtctacaccactttcagtgagctaccactggagatcgtggttgatgtcagaagttttacgatatctgttattcctgaaccacaagagattgttcttgcagactacccggcaactgcatgcccataa

SEQ ID NO: 394362 - DNA, 561 bp, Salmonella enterica
gtgcgattatttgctcaattaagctggtactttcgccgggaatggcgtcgctatcttggcgcggtggccctgcttatgcttattgcgatgcttcagctgatcccgcccaaagtggtggggattgtcgtggatggcgtaaccgcacagcattttactccaggccgaatagcgatgtggattggcaccattgccctgatcgccgtagtggtctatttgttgcgctatgtctggcgcgtgctgctgtttggcgcttcttatcaattagccgtcgaactgcgtgaagattattatcgccagctgagtcgtcagcatcccgaattttatcagcgccatcggacgggcgatcttatcgcgcgtgcgacgaatgatgtggatcgcgtcgtatttgcagcgggcgagggcgttctgacgctggttgactcgctggtaatgggctgcgcggtactgattgtcatgtcgacgcaaattagctggcagctaacgctattagcgctgttgccgatgccgattatggcgctgatgatcaaacgttacggcgatcggctgcatgattatttctaa

SEQ ID NO: 394363 - DNA, 240 bp, Salmonella enterica
atgaaatccgcagcatggcggatgcactggcgaaaatccggaaatgatgacgctggcggggaaaaatctccgccttttccagccggtccccggacagagcaaaaggatgtcgccgcaggctccgctttacccggccatgcggggcatggccttgtgggttttcagttatgtggcctcagcgtcgtgtgcgggctgtgccgtgcctccatcttagccgggctggcggggatgcaagggtaa

SEQ ID NO: 394364 - DNA, 264 bp, Salmonella enterica
gtgtggggggagaggaagatcctgaaccgccggaaaccggatctgcacggcgggaaacgggcaaatgatatgataataaacaatacacataaaatcatatcagatatgattttcatcattgatgataaaaccatatctgatattatcagaaatcaggagcacacaaatcatgcaggatattctttttacctgtcagaacattatcagatggagcgtgcaggatggatgaagaaagggtgttttcactcagctatgaacaactga

SEQ ID NO: 394365 - DNA, 255 bp, Salmonella enterica
atgcctgaagcaatttctggacgactattggttctggtcatcaacacccattgtgagcggaaactatttacgtcaaaaaacagcaatgatcccgagaaaattgcccgtcgtttctgtacccctgacaactgcctggtggtagtccttcgcaataaccgctttctgtttcatctggaacgggctcccggccacgccagtcgctggtacaaagggcgaacatccatctgtcgtcgtctgtatgactggctgacctga

SEQ ID NO: 394366 - DNA, 240 bp, Salmonella enterica
atgtctttaacgtgtatgccagcattgtttttggggcatggcagcccgatgaacgtgctggacgataatgattatacccgcgcctggcggcgattgggggaagccctgccgcgaccacaggcgatagtggtggtgtcggcgcattggtatacccgcgggacgggcgtcacagcgatggaaaggccgcaaactctccatgattttggcggttttccgcaggcgctgtatgacacgcattag

SEQ ID NO: 394367 - DNA, 516 bp, Salmonella enterica
gtgcgccgggctggtggtatagctcagcgtgccctgggcgtgcgcgccgtggctgcgcaccgcgctgagcgccgctttcatattgcgcgggtcgttcatggcatcgaagacgcggaacacatccatgccgtttttcaccgcgcgttcgacgaagcgttccaccacgtcatcggcgtagtgccggtagccgagcaggttctggccgcgcagcagcatctgcagcggggtcttcggcatggcctttttaagctcgcgcaggcggacccacgggtcttcgccgagaaaacggatgcaggcgtcaaaggtggcgccgccccagcactccagcgacccgtagcccacgtcatcgagctgagcggcaatcggcagcatgtcatcaaggcgcaggcgggtggcgaacagggactggtgggcgtcacgcaggacgacgtcggtaatggcaatagtcatggatccctccgggaattaagcgttaaggcggtgatggtgaatggcggcggcaatcaccggctttaa

SEQ ID NO: 394368 - DNA, 291 bp, Salmonella enterica
gtgctgctttctctacttaacagtgctcgtttacgacctgaattactgattctggtactaatggtgatgatcatttctatgttcgtcattccattacctacctatctggttgatttcctgatcgcactgaatatcgtactggcgatattggtgtttatggggtcgttctacattgacagaatcctcagtttttcaacgtttcctgcggtactgttaattaccacgctctttcgtctggcattatcgatcagtaccagccgtcttatcttgattgaagccgatgccggttaa

SEQ ID NO: 394369 - DNA, 2175 bp, Salmonella enterica; identical to SEQ ID NO: 129106

SEQ ID NO: 394370 - DNA, 2577 bp, Salmonella enterica; identical to SEQ ID NO: 129107

SEQ ID NO: 394371 - DNA, 354 bp, Salmonella enterica; identical to SEQ ID NO: 97191

SEQ ID NO: 394372 - DNA, 1479 bp, Salmonella enterica; identical to SEQ ID NO: 121753

SEQ ID NO: 394373 - DNA, 828 bp, Salmonella enterica; identical to SEQ ID NO: 95489

SEQ ID NO: 394374 - DNA, 1197 bp, Salmonella enterica; identical to SEQ ID NO: 95490

SEQ ID NO: 394375 - DNA, 375 bp, Salmonella enterica; identical to SEQ ID NO: 95491

SEQ ID NO: 394376 - DNA, 1182 bp, Salmonella enterica; identical to SEQ ID NO: 95492

SEQ ID NO: 394377 - DNA, 333 bp, Salmonella enterica; identical to SEQ ID NO: 121758

SEQ ID NO: 394378 - DNA, 558 bp, Salmonella enterica; identical to SEQ ID NO: 121759

SEQ ID NO: 394379 - DNA, 2058 bp, Salmonella enterica; identical to SEQ ID NO: 32296

SEQ ID NO: 394380 - DNA, 936 bp, Salmonella enterica; identical to SEQ ID NO: 118628

SEQ ID NO: 394381 - DNA, 2046 bp, Salmonella enterica
atgcgttcatggttaggtgagggaatcagggcgcaacagtggctcagtgtatgcgcgggtcggcaggatatggttctggcgacggtgttattaatcgctattgtgatgatgctgttacctttaccgacctggatggttgatatcctgattactatcaaccttatgttttcagtgatcctgctcttaattgctatttatcttagtgaccctctcgatttatcggtatttccgtctttattacttattactacattatatcgtttgtcactcacaatcagcacatcacggctggtactgttacaacataatgccggtaatattgtggatgctttcggtaagtttgtcgtaggaggaaatctcaccgttgggttggtcgtatttaccatcattactatcgtgcagtttattgtcattacaaaaggtatcgagagggtggcggaagttagcgcacgtttctcgcttgatgggatgccaggcaaacaaatgagtatcgatggcgatttgcgtgccggagttatcgatgcagaccatgcccgtacattaagacagcacgtccagcaggaaagccgctttctcggtgcgatggacggtgcgatgaaatttgttaaaggcgatacgattgccggtattattgttgttctggtgaacattatcggcggtatcattatcgctatcgtgcaatatgatatgtcgatgagtgaggctgttcacacttatagcgtactttcaatcggagatggtttatgtgggcaaattccatcgctgctgatttcccttagcgcgggaattattgtcacccgtgtgccgggtgagaaacgccagaacctggcgacagagttgagttctcaaattgccagacaacctcagtcgctcatattaactgctgtggttttaatgctcctcgctttaattcctggctttccttttatcactctcgctttcttttcagcgttgttagcattgccaattatcctcattcgccgcaaaaagtctgtggtttccgcaaatggcgtcgaagcgccggaaaaagatagtatggttcccggcgcatgtcctctaatcttacgtcttactccgacgttacattctgccgacctgattcgtgatattgacgccatgcgatggtttttatttgaggataccggcgtccctctccctgaggtgaatattgaagttttgcctgaacccaccgaaaaattaacggtactgctatatcaggaacccgtatttagtttatctattcccgcccaggcggattatttattgataggcgcggacgctagtgtggtgggtgacagccagacgttaccgaacgggatgggacagatctgttggcttacaaaagacatggcccataaggcgcaaggttttggactggacgttttcgcgggcagccaacgtatctccgccttattaaaatgtatcctgcttcggcatatgggagagtttattggtgttcaggaaacgcgttatctaatgaatgcgatggaaaaaaactactctgagctggtgaaagagcttcagcgccagctacccattaataaaatcgctgaaactttgcagcggcttgtatcagagcgggtttctattagagatttacgtcttattttcggcaccttaattgactgggcaccacgcgaaaaagatgtcctgatgttgacagaatatgtccgtatcgcgcttcgccgtcatattctgcgtcgtcttaatccggaaggaaaaccgctgccgattttgcggatcggcgaaggtattgagaacctcgtgcgtgaatccattcgccagacggcaatggggacctatactgcgctgtcgtctcgtcataagacgcagattctgcaacttatcgagcaggcgctgaagcagtcaaccaaattattcattgtcacttctgtcgacacccgacgtttcttgcgaaaaattacagaagccaccttgttcgacgtaccgattttgtcatggcaggaattaggagaggagagccttatacaagtggtagaaagtattgaccttagcgaagaggagttggcggacaatgaagaatga

SEQ ID NO: 394382 - DNA, 282 bp, Salmonella enterica
atggaggcctttcgggtaaaaattaaagatttaatagagatgtcaatccctgggttgcaatacagtaagattagtatcttgatgcagcctgctgaattcagaatggtacctgacgtacccgcgaggcaaacattctggattatggacgtgatcaacgccaataaagggaaggtggtgaagtggttgatgaaatacccttatcagttgatgttatcgttgacaggactgttattaggagtgggtatcctgatcggctatttttgcctgagacgccgtttttga

SEQ ID NO: 394383 - DNA, 417 bp, Salmonella enterica; identical to SEQ ID NO: 129191

SEQ ID NO: 394384 - DNA, 1116 bp, Salmonella enterica; identical to SEQ ID NO: 31727

SEQ ID NO: 394385 - DNA, 273 bp, Salmonella enterica; identical to SEQ ID NO: 31728

SEQ ID NO: 394386 - DNA, 168 bp, Salmonella enterica; identical to SEQ ID NO: 31729

SEQ ID NO: 394387 - DNA, 144 bp, Salmonella enterica
atgctttttactagtttgagctttaccgagcttgttggcgatatctttggttttcgatacaaaaagctcctcaccagcatcatgcaaagtatgtattttttcgagtgggtcgtcttcaactatgtccatctcaatacattttga

SEQ ID NO: 394388 - DNA, 129 bp, Salmonella enterica; identical to SEQ ID NO: 388177

SEQ ID NO: 394389 - DNA, 402 bp, Salmonella enterica; identical to SEQ ID NO: 16839

SEQ ID NO: 394390 - DNA, 291 bp, Salmonella enterica; identical to SEQ ID NO: 16838

SEQ ID NO: 394391 - DNA, 2967 bp, Salmonella enterica; identical to SEQ ID NO: 185427

SEQ ID NO: 394392 - DNA, 303 bp, Salmonella enterica; identical to SEQ ID NO: 388161

SEQ ID NO: 394393 - DNA, 696 bp, Salmonella enterica
gtgcgccgggctggtggtgtaactcagggtcccctgggcatgtgccccgtggctgcgcaccgcctgcagggccgccttcatattgcgcgggtcgttcatggcgtcgaagacgcggaacacatccatgccgtttttgacggcgcgttcgacaaagcgggcgaccacgtcatcggcgtagtggcggtagccgagcaggttctggccgcgcagcagcatctgcagcggggtcttcggcatggcctttttcagctcgcgcaggcggacccacgggtcttcgccgagaaagcggatgcaggcgtcaaaggtggcgccgccccagcactccagcgacccgtagcccacgtcgtcgagctgagcggcaatcggcagcatgtcgtcaaggcgcaggcgggtggcgaaaagggactggtgggcgtcgcgcaggacgacgtcggtaatggcaatggtcatggattcctccgtaaattaagggttaaggcggcgatggtggtggatagcggcggcaatcaccggcttgaggcgggcaaagtcgtcagcgggcgcggcggcggcaggtgccgccttcggtactgggaccggttcagggaagaaacggttgacggcggcggacatgccgcggatggcgaaaatcagcaagaacagaaacgccagcacgaaccccatgccgaggaacatcagagtgaagccttcacctaa

SEQ ID NO: 394394 - DNA, 501 bp, Salmonella enterica
  misc_feature (487)..(496): n is a, c, g, or t
atgattgataaaaatttttggcaaggtaaacgtgtattcgttaccggccatactggctttaaaggaagctggctttcgctatggctgactgaaatgggtgcaattgtaaaaggctatgcacttgatgcgccaactgttccaagtttatttgagatagtgcgtcttaatgatcttatggaatctcatattggcgatattcgtgattttgaaaagctgcgcaattctattgcagaatttaagccagaaattgttttccatatggcagcccagcctttagtgcgcctatcttatgaacagccaatcgaaacatactcaacaaatgttatgggtactgtccatttgcttgaagcagttaagcaagtaggtaacataaaggcagtcgtaaatatcaccagtgataagtgctacgacaatcgtgagtgggtgtggggctatcgtgagaacgaacccatgggagggtacgatccatactctaatagtaaaggtnnnnnnnnnnagtaa

SEQ ID NO: 394395 - DNA, 1005 bp, Salmonella enterica; identical to SEQ ID NO: 31749

SEQ ID NO: 394396 - DNA, 318 bp, Salmonella enterica
atgattaaaaacaacgagttaatccatccttttgacgtaaccagtaatgaatcaggtaagacttatcaactgacgcctaactcgtccaagtcggttcagcccgtggccctgctgagattgagtgtatttacccctgtcggcacaaaagaaaaccgcgaccgaaactttgaagttgatgcctctgatgagctttcgtgtatggaaattgcaagatcggagggttatgacgacatcaagataactggtgtcaaactatctatgtctaccgactttaagtgctggctcgggatacagtggcaaacaaaagcatttcaatga

SEQ ID NO: 394397 - DNA, 453 bp, Salmonella enterica
atgaaccttgcatcggtagtgcttgccttctcagactctcgtagtggtcggttcacagtaacgcatctggtgcagaaggctatgattgatccaaaaagcgatactgttgagctggttggggatccttctatgtgggaactgtatcgttacgaccataagacattgttaagccttcaggttctatacattttggctaaaaaagaagctgcgcaatctctctatatttattttgaagcaatgccagctggtacgttgttcgttaatatgaaacggttgagggaaaggttgcttcttacaacccctattcgtacgcaaaaccagataattcgtaaagcaatgcgggaacttgaatctatcggatatctcgattatcaagaagttaagaaaggtcgcgacatacaatttcagatcttcaaaagaagccctaagctggcccttgccaaacaaggttga

SEQ ID NO: 394398 - DNA, 924 bp, Salmonella enterica
gtggcaaagcaaaagttcaaaatcaccaactggcccacctacaataaagccctcatcaaccgtggctccataactttctggctggatgatgaagctattcaggcctggtatgagtcagcaacaccttcttcacgaggcagacctcagcgctattctgaccttgccatcacgactgtgctggtcattaaacgcgtattcaggctgaccctgcgcgctgcgcagggctttattgattccattttttctctgatgaacgttccgctacgctgcccggattacagctgtgtcagcaggcgggcaaagtcggttaatgtcagtttcaaaacgtccacccggggtgaaatcgcacacctggtaattgattccaccgggctgaaggtcttcggtgaaggcgagtggaaagtcaaaaagcatggccaggaacgccgccgtatctggcgtaagctgcatctcgccgttgacagtaaaacacatgaaatcatctgcgctgacctgtcgctgaacaatgttacggactcagaggccttccccgggttaatccggcaaacccaccggaaaatcaggtcagccgccgccgatggcgcttacgatacccggctatgtcacgatgaactgcggcgtaagaaaatcagcgcgcttatccctccccgaaaaggtgcgggttactggcccggtgaatatgcagaccgtaaccgtgcagtggctaatcagcgaatgaccgggagtaatgcgcggtggaaatggacaacagattacaaccgtcgctcgatagcggaaacggcgatgtaccgggtaaaacagctgttcgggggttcactgacgctgcgtgactacgatggtcaggttgcggaggctatggccctggtacgagcgctgaacaaaatgacgaaagcaggtatgcctgaaagcgtgcgtattgcctga

SEQ ID NO: 394399 - DNA, 924 bp, Salmonella enterica
gtggcaaagcaaaagttcaaaatcaccaactggcccacctacaataaagccctcatcaaccgtggctccataactttctggctggatgatgaagctattcaggcctggtatgagtcggcagcgccttcttcacgaggcagacctcagcgctattctgaccttgccatcacgactgtgctggtcattaaacgcgtattcaggctgaccctgcgcgctgcgcagggctttattgattccattttttctctgatgaacgttccgctacgctgcccggattacagctgtgtcagcaggcgggcaaagtcggttaatgtcagtttcaaaacgcccacccggggtgaaatcgcgcatctggtgattgattccaccgggctgaaggtctttggtgaaggcgagtggaaagtcaaaaagcatggccaggaacgccgtcgtatatggcgaaagttgcatctggcagttgacagcaacacacatgaaatcatctgtgcagacctgtcgctgaacaatgtgacggactcagaagccttcccgggtcttatccggcagactcacagaaaaatcagggcagcatcggcagacggcgcttacgacacccggctctgtcacgatgaactgcggcgtaagaaaatcagcgcccttatccctccccgaaaaggtgcgggttactggcccggtgaatatgcagaccgtaaccgtgcagtggctaatcagcgaatgaccgggagtaatgcgcggtggaaatggacaacagattacaaccgtcgctcgatagcggaaacggcgatgtaccgggtaaaacagctgttcgggggttcactgacgctgcgtgactacgatggtcaggttgcggaggctatggccctggtacgagcgctgaacaaaatgacgaaagcaggtatgcctgaaagcgtgcgtattgcctga

SEQ ID NO: 394400 - DNA, 150 bp, Salmonella enterica; identical to SEQ ID NO: 133418

SEQ ID NO: 394401 - DNA, 267 bp, Salmonella enterica
atgaagcaagtacaggcgttgaatgagcatgttgcgcaactgaaagccaaacaaaatgacaccaaaagtggttcttttcagcgcgagcagtttcttgaggctgcagacaaatatgtgctggctgtaaaaacgcgagttcgtcgtgaacgagatcacatccctttgaccgacagcgataaagagaatccggcatgggctgagggttcttttgataaggtaatcagaggttataatgatttagtgacaaggtttaatttaatgaactga

SEQ ID NO: 394402 - DNA, 204 bp, Salmonella enterica; identical to SEQ ID NO: 151872

SEQ ID NO: 394403 - DNA, 1536 bp, Salmonella enterica
atgtctaagattgcacgatatcagggaaatgttcgggcttttgcctctgatgcacggggaatggaaagaaccgtgtttggtggaacaaatcaggcggacgacctgacctcgcagatcacggcatctttccttcgtggatggggcattgttggcgctgcagaacacccctcgcttgaggacttcaatgcggcaatgtatgcaatgagtcagttcattgcgtatcagcaccaaatgggggttccagagtggcatgcagaacaggaatatcatatcggttcgatctgcacacataacggtgaatcttatcagtccttacaaaatgcaaatgttggtagccagccaccatcagaaaaatggactcctgtattaacgtcaaaaaacggtctcacatacctcggtttgggagaaacagcaaagcaagctgctggtgccctgcaaaaatcgcaaaacggcggcgacattcctgacaaggatttgtttgtacgtcaaatcggtgccgcgcgagcgtttgatggcgcggtgactatcggcggtgatgctaatccgtggacgacggcggagtttatctcctggcttgagttgatgggcgcattcaatcacccgtactggatgtgccgagggacatggtcttacgctttaaataaagtcatcaccgacacgggctgtggcaatatctgtctcgctggagcagttattgaggtgatgggagtgcgtggcgcgatgactattagggtgacaacgcccaccacaacgtctggtggcgggattgccagcgctcagtttacctatatcaataacggcgatggatattcgccaggctggcgacgagagtttagccgtaccggcgacgagatgaccggcaacctgacgctccgcagcgatgatcggatgcactttatgattgctaacgctgacggttcggcgcgcgcttatatctataaggacaaagatgatactggtattcacatcaacaatggcgttgatggtgccggggattttgttctaggtaaagacagcgtcctttacgtaccactcgcagtccgtgcaggcggcagtaagaaactggctattcagtccgataacaattcagcattaagcgccacatttaatttatggggtgacgctaacagacctaccgtggttgaactggatgacgatcagggctggcacctgtacagccagcgaaatcctgacggttcaatcctgtttacggtcaatggcgatattatggctaaccgtaaactgaatgtgggtgacgctacgttctccagcgacggcaatgttaacggtactgtctggggtggctggctgaatgactggcttaataacattttcgctagtcgtttcgtccgggacgtgcgagcgggaaacgtcgaaagcgctcaggtctggcgggcatacggttataatgaccaggctccctacgttattacaggtgttataaatgctaacactgacgacttaatcgataatctgactcgccgacctcttcagaaaaacatcaacggtatctggtacaacattgactttatttaa

SEQ ID NO: 394404 - DNA, 249 bp, Salmonella enterica
atgcgcacccaggcagttttgcagaaatggggaaacagcatcgcgctgcgccttaccgggaatctgaaaaccgttccgggctttgaagctggcgatcgggttgatatcgagataaacgaggcggggctagtcgtccagaaagccaccagaccgcgcctaagcgaatctgagctactttctggtctgtcgccttatatggcacacgctgacgaaatagcctcaccagtgagcagggaggttgactactga

SEQ ID NO: 394405 - DNA, 345 bp, Salmonella enterica
atgtttgtaccgaaacgcggcgatatctgctggatcgagtttgagccagccaaaggaaaggagatcggcaaatatcgaccggcgctcatactttcccatgaaacctataacaggcttacagggcttgttatctgttgccccataagcaccagcgtaaggggcgcgcctactgaagtacccgttactaaccttgattctccctgcgttgttgcgacgactctgattcatacgatggactggaggcaacgaaagacaaagctaatcacccaggcggaacccggcgtatatgatgacgtgttacgccgcattatcccgcttgttggcggtgaacatctgatagggtag

SEQ ID NO: 394406 - DNA, 2673 bp, Salmonella enterica
atgacagtaaaaatagtatcagaaacagccagattagcaataggtaaatgggaaaccatttatcagagattaggcgttaagattcccgcaaatggtaaacatggggcttgccctaaatgcggcggtaaggatcgtttccgtatggatgataaagacggaaaaggtacttatatttgtaatcaatgcggaagtggtgacggccttgatttggtgaaaggcgtcttttccattaatgcaactcaggcggctgaaaaagtccgcgaggttctttctgttacgccagtaacaaacacgccagccagaaaaaaagaatcaaaggtaacaaatatcaggccgacagactggaaaaagataatcagccaggcaaaacagggaaaaagccgctatctggaaaataaagggcttacaggttacacgcaattactgaccgtgcgggaactcaccgcagcggggggtaaatttcctcctgattcgctgttacttccgatcgtcaatagttccggtgaaataaccgggattcagttaatcggtgatgatggtaataaaggcgtttacagcggttctaaattttccgggggttttatcagcgttggcgacattcccgcagagatgccggatcgcgtcattatttcggagggttatgcaacggcggttagcgtttctcttctggctgaaggctggagcgtggcggcgatatcgaaaaccaaccttaagcccgcagcggaagcgatacggggaaaatggccggaagtcccgattgtcattgccggagataacgactttgaagacggcaaacccaacgacggcaaagataaagccattagcgcggctattgcggttaaaggccgggtaagcgtcccgcctggcagggtgaaaatagactgggacgactaccgccgccagtttgggctacagcgtgcgcgggaggcattccgggaagaggtttttgatcccctggactcgacaacgcagacgccgacagggttcagacttacaagtgattttttatggtttgacagggcaaagagtgacgaaggcgggaacggccagacacaacaaatcaaggtatgtagcccgttaagggttacggctatcacgcatgacgctgacggcgggagttttggccgtctgctggagtgggatgactcaaacggcattaaacatcgatgggctatgcctatgaaggtgatcgccggaacggggcaggacttgcgcgaggttctgttagataacgggctgcactatatcgcggtagatgggacagggcgtcagatgctcatgaattacatttccaattgccgccccgttcgccgtgtgacgtgcgtcaataaaacgggctggcacggcggatcgtatgttctcagtagtgaggttatcggcggtgatgctggttcggtgatttatcagtctgcccgttcatcaaaagacgatttcagggttagcggtgattcggctgaatgggtggaacgtacaggccgctactgtacgggaaattcccgccttgtcttttgtgtaagcctggcatttgccgcgcccttgcttcgtcttctgggtactggtggcggtggctaccacctgaaaggggaatcgacggacggcaaaactacaacgatgaaggttgccgcttcggtatgcggtggcgcggactactggaaaacgtggagggctaccgggaacgcattagaggagattgctttacgccgcaatgatgcgccgctcatgctcgacgagataagcgaggttaacggcacagaggccacacaaatcgcctacatgctcggcaacggtcagggcaaatcacgatccaaagcagccggggggttacgggacgccccattgtggcggctgcttttcttgtctaccggggaagtctcgatctcagaacatgccgcagaagccggaaagcaaagaacgggcgccggggttggggtgcgtatggtgcaaattcccagcgatacgggcaaatatggcgcgtttgaaaatctgcacggattcagcggcgggaaagagtttgcggagtacctggaaaaatcggcgtcagagtgccacggtgcgccgttcagggactggctacgctggctgacttcggatctgaatgcggtcacagaacgcgccggaaagctgcttaagcagtatgaaaagatgttgcgcccggaaggtgccggaaatcaggcaggtcgcatcgtggatcgttttgcgctgctggcggtggccggagaactggcgacagaagcaggattaaccggatgggagcagggagaagcgtataaagccgctaaatcgtgccttgatgcgtggataagcgatcgcggtcatgtcgccaaccaggaagaagcggacgcactggagagagtacagcgttttatcacggccaatcagtacaccagatttgcaggctggtacgccgacgataaaaaccgtccgtcaaatgcggttggattcaggaaagtagaagagggaaataacagccgtgaagcagaaacgaccttctacattttcgccagcggctggaaggaggtttgcggcacgtttaacgccgcgaaaacagcggcgctttgccgtgaaaaaggctggctgacgccgggcagtgacgggaaaaactcacgaatggaaaggctaccggaggtgggactgaaaagagtgtatgtactgaatagcggcgttatcgggtaa

SEQ ID NO: 394407 - DNA, 360 bp, Salmonella enterica
atgtctacaaacacagttaataaaattaagaaaactaataactattcatggagtaagagttatgcaagccttctttctgaagaaagtaaattagatcttgaagggctgattaatgttttttatctgcttgaagatttcatggaagcaaaagaagaatgtagcggagaaaagactctccccgccttgcaaataaaatgtctttttaaaattttaacgcatcatttagttatgattaatgatggcttgtttgagcctggcggcatcttttcgcaatgtgacattgtggcagggttaaaactggcgagagacagaggaattaacggagtacaggaaattatcgataaccttgcagacaaataa

SEQ ID NO: 394408 - DNA, 219 bp, Salmonella enterica
atgtataaaactagcagcatatgggaaaagagaaagccaggcgttaatcaaaaatcttttcttgtggttggttatgccgtgaataaacgtggactaaccagacatgcagagactaccgtcaccgcagccgaccagaaagaagcgattactcgcgcagcggcggacctacgctggcagggcttgacatattttaaggcattaaaagtatatgaggtttaa

SEQ ID NO: 394409 - DNA, 195 bp, Salmonella enterica
atgtataaaatacttgtcacagaggttaatcatctgacgggtaaaaaatcagagtggatctaccgcaatacgtataaaaccactcaggccgcagaaaaagccgcttacgcatttaattatacgtgtaaggcatacgacaacaccgcgaaatattcacgcagcacgcgcattattaaggagttcagccatgtataa

SEQ ID NO: 394410 - DNA, 192 bp, Salmonella enterica
gtgtttaaactgattattaccctggttaaccatgagaacggcgatcgccgccagcttgttcacaatggacgatacagaacaagcggtgaagcgtttaaagatgcccgtaaaatggcctacacgcacagggatattaaaggcaacgtaacgcatgaatgcattgtaaaaatagcgggggctgatgatgtataa

SEQ ID NO: 394411 - DNA, 375 bp, Salmonella enterica
atgtctgacttcatgccgttaggcgctcattcacatacaggcggtagcgccggtctttaccttgacgggaacgccagcgccgaagcgctgtttgacacggcgatctcccgcgttgaaagcgtgatgcagctacacgccgcaatgatggaattaccgccagctaccaccatcaacgccgcagcattaagcgcggtaagtacacacctgctttctgatgcccgtagcctgttactggcgctacagcaccgcacagaaaagtacggtgacgcgcgggagttagccaggtatcacgccatagcttacagcgtcctagctgaacgtattcgtgaacaggggcagacgccaggcaaacaggaggaatccagccgtgtttaa

SEQ ID NO: 394412 - DNA, 168 bp, Salmonella enterica
atgcgtaataatcgcccctgtttcgtctggcgtttcgtttctggccagaacgccgccacctacaccacaaccgccgccagtgagcgcgaagcccgtttacagattcccgccgttcgtctggtattcgcagctcgtatccgggtaaatgggggggggcaacatgtctga

SEQ ID NO: 394413 - DNA, 885 bp, Salmonella enterica
atgacccttttacgcttaaaaatcaatcattcatcgccattacgcaaaataatttcgcgggacgtattgacgcacgcgcaaaagctggcgtatcgttcaggcgttgccccacatcgggcaaccgggtttgacagcctgaatgtgatagcgggtagccgcttagtttccgtaaagcggtatttttatgcccgttataccaccctaccccgcattatggcgggtcgtagtggggaggccttgcggcctgctggtttctatcacgccagtctgtcaaccccgctacggctcgccaccacgtttgacagcgttctggcgagactccatgcaccagtgataggagccgctaacatggctaaatccccacaatctcagatcgtctttttgccgtatgtatgcgccgtcgatccgtctgaaagcatgtttgtacagtcaatccgcaaaactgagcaagacctgcttgaccgcgtaaaagaagcgctcgatgaagctggcgtatcctggatcgatatccgcaccaaagtgcgcagcaagcccgccgatagtgacgccagtcacattcccccaatgggggaagtagagaacgctgacagcgcggagggatgcgaagatattcgctacgccatacgtcaacacctgtactacggcgacacgctaacccgtacctactacctttcgcgtgtattcatctgtaagaacgccgcgcaggaatacgcagagcaatacaaacatgagttcaaaaccgggcaatttactacccagagcgaagttacggaactgacgccgcagatcgtcaatgagatacgcagcgaatacggctggaacagtccgacaacggtttaccgggttttgcctgatgactggcgggaggcttccgacaatgcgtaa

SEQ ID NO: 394414 - DNA, 411 bp, Salmonella enterica
atgccattaccaaatgcatttacgggtatttctggaaattctccctacttatcagagaatgagattataaaacctcagcccgtaccgcagcctgtacaagtggtacaaccagtcccacaatattacgcaatgcaaacttatgcagtgacaccgcagccaccgcagcaaaaagattatgtatttttgccgctaaaatacgaccctaaaaaagctgacagcgagccactaaagattatttttgtgtcgcgcaatgacctaattgatgtttttttgaaaaggctgaacgatgctggcgttgcatgggttgatagtaataccggaaaagataacaacggcgtacaggttcgccagcctgtaaatatatctgatgaggattataaagatctcaataaatcgccatccgacgaataa

SEQ ID NO: 394415 - DNA, 1020 bp, Salmonella enterica
atgcatgacattgtgaatgtacagcaacttaaagcggaggttttttcatcgcttgaggatgcatcgcagcttgtagaaaatgtggatcttgccttatggcaggacagggtaaacaaagatgcgcaaagttttgatcagaccgtaaagccgtgcatgtggcctaaagactggtttatgtcacagattgattataagcgggtttattacggacagccggagaaccttacagtaagcgatccggcattatctaccgggcgcagcgctgacgggcgttttatccgtgaatcggcattaaacagcaggcctaatgcagagctttacgaggttgatactggtgagtttattaagtggtcagacctcatgcaaatgatgaatattggcacgttgcgtaatcttggctctacgctggttgccgcgctgtttaataaaatgtttgtcgatgatatgcgcataggcttttgcggtaagtatgcaggcggtgtaaccgacccgaaagccaacccgaacggcgaggacgtcgcgccgggatggcatgaactggcacgacaggccagcgagggcaagcaaatcatcagcgacgctacaacaatcggtacaggtggcgatttcccgaacgttgacgccgccgcacagtatctgattaatacaaaaattcccgaagcctatcgcagcgatccgcgtctggttgtgctggttggtcacgatctggcagcgagtgaacgccttcgccttttcaataccgccagcggcgcagggaatattgaagcggctaacgcatggggtagcactgtagcgggtaagttcgcctttattcccgggtttatgccgggtaagcgtctttgtgtaacgatgctgcataacctctatatcaatattgcggcgggaacattccggcctgagtttgtgatggatgatgaacgtaaaatgttcagggcgagtgcaattcgctatcagggttatggattaacggacgttaaattatacgcggcatttgatgaaaacgccgtaacgtataaataa

SEQ ID NO: 394416 - DNA, 846 bp, Salmonella enterica
atgagtaagttaacaccagtattcaaatgctgtcatgaaatgacgctgatttcatcatggccggagagctacccgtatacgccggaaatgtcagaggctttattgctgacccgtatttttgacgtttcggcttgccactatgcgcaacagttcgcgcagacctataaggatatgacgggttacgatctcccgttcattactttaacggatgaagaacacgccgcaatcaatagcgcctgctcgcgctttattgcagaaactgaggcacaaaaaaaggcagcacagcaaggcgtagataaagctgaaaaacacctgaaggatatcagagcgggcgttattcggcctaatgaagcacaccctttaaaagttatgattgatgatgccaatacccgcattattaacgaagaaaaaagacgtgacgccatatttgagaaacttgacagtaaaatcatgcttcttaaggtagttatgaacgctaagcgtgatgatgatatttcgcatcttatcaatatcagcttacgcgagtttaacggcaacatatcaaccagggttaaccgttataaatcgatgttgaattccttacagcgtattacaacacttgataatgaaatgaagcttaagatcgaacatggcagcgtgataatgcgccagagaaacacagaagccgaatttatcaatgagcatattaatcaggttactattgattattaccgcagcgacaatgagtcgctaagaaactgtttatcactggcagaatataccgagttacatctactcaaatttaaagaagatgcacacattaacgccgtaatcacgttaggcattaatgaaactgtaatgaattaa

SEQ ID NO: 394417 - DNA, 306 bp, Salmonella enterica
atgcagaagaacacattcgcaccgccaacgccggaacaacgtataaccattcttgctgaatacggtaaggactgcgaagagatgatacgcgaggataagtgcagcaaaattacatctctttcccgttctcgccgctgggtactggagcaagcgggagctttcccacgtcgcaggcatttagggcgcaactcttgttcatggttattaagtgatgttttgtggtggattcataacccgccagagattgagaacgtcaataacccgtgcaagaacaagaaggaaaaaaagcttagggaagcgaattaa

SEQ ID NO: 394418 - DNA, 1119 bp, Salmonella enterica
atgccattgcctttaagagattattaccccataggccgtgcagctcaattactgggatgcacaattgatgatttaattcattgggcaatggttgggtgtattcggttatatataaaagttgaacattcttacggtttattaaatggtaaatcgttggatgatattgtcgggcatcatgattttaatgatgtaactgacggcactgattataaagaaaaattgaatgaacttgatgaattgtcgtctgatgatagtgatgaaaaagattattatttggacagggcaaaaataattcgtgatgcaatgaatacttatatgtttaaatgtggtgatgtaaaatgtttcgatgaaatcggcatgagatatagtttttcccaactaacatatttttttgataatcaagtaacagaagatttagcagaaataacatgtatgggttggatatctcagatgtataaaagagaacctgatgagtacaaaaaaatcaaagatatagtatcagatgatgatgaaccttatattgttagaatgagaggtttttttggattgggagagagattctttcgtggctataactttgataatgagttaataccagaacaagaggacgggtttgataaccctgtttatatgccagaaagtaacctacttattaatattatagttaatgacgatgtttcttttaaaataaatgatttgtttattttaaaaaatgatttcattgtaatacaggaagcatcaaaaaacggagttgaaccagctaaaaaatacaatcatcaaagaatttcaggtaatcatgtatggtggaaacactggactactcaacacccccacgcaaaaacgaatgattctaaacttgatgaatcaaataaaaaaagtaatccgtatattaaagaaatgcattccaccaggcgagaatctgttcttggggctgcattatatatgaaaactcatcaccctgaattatgcaaaaacaacaccaaattagccgaagcaatacacgatcattcttacgcgcgttttggtggtgattgccctttgtctctcgaatctacaaaaaggcttttaggaaaagttactaaaaaacaaaaagataagaacagaaaaacggcgagttaa

SEQ ID NO: 394419 - DNA, 1224 bp, Salmonella enterica
atgacggggacaaacaaactaagcgacaagaagctaaaatctcttttagggacagcgagagacgcgccagccatgtttgcagacggcggagggcttagcgtcagagcatcgagacaaggaaaactaagctgggtgttttcctatcgtcttggcggcagagatagcagccttgaacgtcttacgctgggaaaatatccagacatgccgctaaaaatggcgcgagaaaagcgcgaccagtgccgccagtggctggcggaaggtcttaacccaaaaatcgaagcagagctaagcgcagaagagacgctaaagcctgtaacggtaagggatgccctggaatactggctagtaaattacgcaaggaaaaagcgcagcgacgaagatctaataagggcgcagttctgtaagcatatttatccccggcttggacattacccacttactcgatgtgaaacgcgccattgggttacttgttttgatgcgataagtgaaaagcagcctaaaacgtctgggcgaatgttgcagaactcaaagcaggcgctacggttctgtaaggttcgccgctatgcctcaagtgatgcattggcatttctcactgttcaggatgtgggggagtcattcggcagacgggatcgtgttttgtctgataacgagctggccgatgtatggcggtttacttacagtaaccgtccgcgtgattattatcctcgtttattaaaaatattgattctatttggttgccgtacaatggaggcaagattatctaaatggagtgaatgggatttttctttgtggttatggacagtaccaaaagaacatagtaaaacccgtgaaaaaatagtcaggtcaatacctgaaggcattcggcaatggttgaaagatttaaaaatagaaacaggcaaaacgggattattattaggcgaggaacgcacccggcaagccgtatcattaaaaggtagacgactttataaaacgtttcaccataacgaacagtggacattgcacgatttacgccggacgttttcaactggtttaagcaatagcggagttgcgccgcacatcgtagaacttttattaggtcatgcgttacagggcgttatggctatatataataaaagcctttatatccccgaaaaactaaacgcattaaatatttggtttgacaggctggaagtgatttcagctaatcatgataatgtttctttattaaaaattaactgtaaataa

SEQ ID NO: 394420 - DNA, 138 bp, Salmonella enterica
atgaaacaagacgtcatcctggttctcgactgcggcgcgactaacgttcgggcgatcgccgttgatcgccagggaaaaattgtcgcccgcgcctcaatcgctaatgccagcgacattaccgtagaaaatagcgcctag

SEQ ID NO: 394421 - DNA, 306 bp, Salmonella enterica
atgccgcgccccgtcaccctgcccgattcactttgcgcgtttattcgctcactggataaaccgccagtgttcaccctgcccgcccgcaacgccacagaaccggaggcagacaacgccagcgacaccccggccccgcccgcttatccaccgcccccggcatgggtggcggcgcgtgatgcctatattcgccacgtcatgacgtgcgggtattgcgtgaccagcgggctacgtacaccccgccattgcaccaccggggaacggctacgccgcgaactggacgcgcagccgtggggctcagggccgtaa

SEQ ID NO: 394422 - DNA, 573 bp, Salmonella enterica
atgcaatgcgtattcacaccagcggaaagacattgcgcaccgtcgccagtgctgaaccccctttcattcattccgggaggtgcagcgggtacgcttgccctgtttacccggagggattttattgtggatgccataacccgccccgatgctgaccgcctgcccgttgactgtctgccagaggacgcccgcgaactgattcgactgctgggctatgattccgcgttgcggctggtgcggacatttggcggtgtcagtctgtcaggaagaaccggaaccgccagagagcgaagcggcggcgtgtaccgtttccttacggacgttttaagccgcgaagaaatagcccggattaccgcatggacgggaggcgcggagttttatattccgcgttgtgatgcggcgatacgggcgcagcgagacgcccgttttatccgtgattatcatcgcctgcttaacgggggttattcgggacgttgcgcgatggcgcggttatgcccgcgctacggattcagcgaccgcagagggtgggctattctgaaacgctggcgcgaaagcaacgcgcacaatcgcgggtaa

SEQ ID NO: 394423 - DNA, 1887 bp, Salmonella enterica
atgagcagtaaaccacgaaccccggacgccacgccgacaccagagacaggccggaaatcacccggccagaaagcacaggcgcagcgccggacaccccgcaagaaatatccgcaggtaaaccccacccgccccggctatgcgatgtatgagcaccccgtacaggttaacggcggcccggtgctttatccgggcctttaccgccacggcgtgcaggatgaaaaaaacaccgatacgcgcatatgttcgccgcttgaagttgtcgccatgaccagcgaccgcaacgaggagaactacgggcgacttatccgctttctcacgccttacggcacgtggcgggaatggtccgcaccgatggaaatgctggcgggcgacggcagcgaactccgcgccgtcctgttaagcatgggggtagtgataccccaccaccagcggcaggcgctgaccgattatctgatggagtcccggccaaaacgtcacgcgctggcggccaccgtaacgggctggcattcccccggcctgtttgtgatgccggggcgcgtcattggcgcgggcgatgtggtttttcagtccaccgaggcaggcacgaaggaatacaccgccgcagggacgccggagggctggcaaaatgccgttgccgggttatgccgtgaaaacccggtcttaatccttgccgtgtgcgcggcgctggcggggccgttgctgtacctgctggacgtggacagcggcggttttcacctgatgggcgacagttcaggcggaaaaagcgtggccgcgctggtggcgtgcagcgtgtggggcgaaccccgcgcatttaaacgcaactggaacgccaccagcaccggattagaggggctggcgaccatgcgcaacgataccgcgctgatactggacgagataggggaagccccggcaaaggataccggggcgctgatttaccagctaggcaacggtacgggccgccagcgcgggaaaacgtcaggcatggcccgcccggtcaacatgtggcgcacgatgataatcagtacgggcgaaatgaccgtaggaaaacacatggagagcggcggccagcgcatcaaggcggggcaggaaatgcgactgcttgatattccggcgcaacgtctttacggcgcgtttgattatcttcacgggctggaactcccccacaacccggacagcgaaacagagcgccggggcgcgggccgcagatttgcggagacgttacgcagtaacgccgccacccactacggccacgcggggccggatttcgtgcgctggctcatttcacgcagccagccggacacccccgacgacagcaacagcacccgcgacaacggccagacgctggccgatatgttcgccctcatgcgtgaacaattccccgtctgcaccgggcaggaagcacgcgccgccgcgcgtttcgccttgtgtgcgctggcgggcgaaatggcggttacggcggggattcttccgtggtcacagggtgaagcgctggccgccgttcgctcactgtttgagtcatgggccgcctatcgcggacgcgggcaatcggaggacatgaagatattacgggcgatgacgtcatttatcgcccgcaatgagtaccgcttcgaagggatgaaccccaacgaatacggcagcattcccaaccgcgccggatggtggcgggccagcgagtcaggggaaaagattctctactttgcgccggacacactgacggaggccgcgccggggtatgaccgggcgcgggttgtggcatgtctggatacggcgggggcgattaccgagcgcgacgagggccgccacaccaaacgcatacgggccggaacgatgcggccccacgtttacgccattagcgcaaatgcaattttattcataatggatgcataa

SEQ ID NO: 394424 - DNA, 1035 bp, Salmonella enterica
atgactgatgcgaaagttatcgacgctatccaacaggtggccgccgcagccgcgcaacaggccgaaatccttgtgcctgaatggttgccggagggacggcaccggggcagcgagtggataagccgcaaccccacccgcgcagaccgtcacgcggggagctttagcgtgtcgctggtggatggccgctggcatgatttcgccaccggggacagtggcggcgaccctgtttcactgctggcgtatctgatgaacgtcaggcagtacgacgcggcccgcatggtggccgacaggctgggccttgtcatgcccggactggataaacccgacccgttaaccccggaacaacgccacgcgcagagggagcggctggaggccgcagagcgggaggcgcagcggttgcgcgatgccgaatcacggcagcgccagcgggagcaaaaacttaccgcgtgccgcgcctttgagttaatgagcaatgcgggccagccagacccgcaccacccctatttagtccgcaaacggctacagccctttaacctgtaccagtcaggccgggacttacttgtacccctgtataacatacgcggcgaactggttaacgttcagaccatcggcccggacgggcgcaagctgtttttgcgtcacggtcaggtacagggggcgtttcatgttatgggcgattttgacctcatggcaccggatgcgacgccgcatgagttgtatatctgcgaggggtgggccactggcgcgacccttttgcagcactggaacacccgcgccgtggtgtgcgccatgaacgccgggaaccttaaacacgttgcgggcgcactgcgtggccgttacggggctgcaattcagcttgtgatagcggcagacgatgaccgggcatcaaaagacaatcccggcatgaaagccgcaagcgaggccgccctgctggtgggctgcatgatgaccgccccggactggccgcccggcgcacctgaaaacctttcagactttaatgacctgatgttgtgggagatggagcatgagcagtaa

SEQ ID NO: 394425 - DNA, 321 bp, Salmonella enterica
atgtgtgacaagcatataacctgtatacccgccgtcctgctggacgcaatgaaacgcgccgacgcagcgcaggcccgccgcctgtttgatgattctgaattttgcggttatgcgctttcttacggcctcactactacgggccacttgctggaggatgcgggcgcaacaaccgatttcagccccgacgaactacaggcaatgggtaaggcgatagccctttctgctgaccttatcgccgggatgtttgccgttgtggacgcctaccgataccgccagctatgcggggaactgccttttgacggagggcgcaaaaatgactga

SEQ ID NO: 394426 - DNA, 324 bp, Salmonella enterica
atgcgtaaccccggacaagtgaacatcgccagcattcaggacgcgttaagccacgccatgaacacggccaccaccgacgccgcccgatggagtttacgcagtgatgcggaatgccaccgcgatgccattcttgacgccttatcgttcatcggtacggcaatgcaggactgtaccaccagcgccacgcctcacccgttcagccaggcagatttaaagcgtctcagcggctttcttatttcagccccttacctcattcagggaatgagcgccgttattgagtcttacgaagaacccgccaccagtggagaggcccgccatgtgtga

SEQ ID NO: 394427 - DNA, 183 bp, Salmonella enterica
atgtgtaagccctttatgacgcatggccgcgccgtcaataagcgcgggcttaccactggcattcactacgcagtacaggccaccagccgcacagaggcggttaatgccgcaatacaggccgcagagcgcgacggatacagctatgtacacattaccgcagtcgtggaggtggcccatgcgtaa

SEQ ID NO: 394428 - DNA, 189 bp, Salmonella enterica
atgcgcaataatcgccccggctttatcttcctgtttgcggctgtttcccgtctggatctcaccgaccataccccgcacttggtgcgcattgccgccccggacgaactgaccgcccgccgctcgctggtgggccgttacgtgctttctttcgctggccgtattcccgctcaggaggtgcgccatgtgtaa

SEQ ID NO: 394429 - DNA, 234 bp, Salmonella enterica
atggctactacccctaccccgtcacaccctcaaatcgtctggttgccgtatgtattagccgtttccccatcagatggcgtgtttcaccagatgatttccggcattgagcaagacctgctcgaccgcgtaaaggccgcgctcgacgaagcgggcgtggcatggattgacccgcgcaccaaagagcgcagccagcccacgaccaccagcgcggagggctgcaacgatgcgcaataa

SEQ ID NO: 394430 - DNA, 501 bp, Salmonella enterica
atgggagcgatatcaaccccaattgccggaggtgaagccatgaaaagcacccccaccaccagccgcagggcgcacaaaatgattgaccgcaccaccccgcccggttatcgttatcccgcgctttataaaacgagtgccgggattgcaaccccgaagttaacaaaggcgacaccagacgccgaaagcgtctttttttgtgtccgttatacgcgccattctatggcgtggtgtgccatacatccgcagggtttacgatgccgccttgccggattcctcacacacaatggcgcggtgtgcgtatcttatgccgggtttactccgtttttccgggtaagtggcagcacatcgcgccgccgtgtaatggtggcgttggcggggcagccgcaaggctggccggttccctttgttcccggttgttgcaaccccgtcaacgtcaccgcccctattgagattgcaacctcatgcggtgactccttaaccagaacaaaggaggccgcataa

SEQ ID NO: 394431 - DNA, 552 bp, Salmonella enterica
atgactaagcgcaccttatacagcggccagagcatggccccaacatcaattattcagtttgaaggtgcgagggtgcgggttgtggcgctgaatggtgaaccgtggtttattgccgccgatgtatgcgccgcactggagatagagaacgcaacaaaagcggttaaagcacttgatgcggacgagaaaaccctaacttcaattcagggtattcaccccggccccggcaacccgctggttaacgcaatttctgaatccgggttttataagatggttgtacgcagtcgtaaggccagcacacccgacacacaggcccaccgattcactaactggatatgccgcgacgttatcccgtccatacgtaaaacgggcgcttatggcgtgccgttcgccctgcttaacgaccacaccagacgggcaaaggcttacaccatcaaagccagcaagcgcgggcgcgacctgcaagcctgcaaagaggaaaaggaggcgttaacgcgcgaagaggcgcagctatgggagcgatatcaaccccaattgccggaggtgaagccatga

SEQ ID NO: 394432 - DNA, 810 bp, Salmonella enterica
atgaataccgaaacaaggcccgtaacagggccgggattcgctcaccctgaaaacagagcaaaggttatttcatatagcggcattgcggctattattccggttatcacgggaaacattggcagcactcaaacgcatattgtaagcgcacgcgcattacataaagccctaggcgttaaacgtgatttcaccacatggataaaagaccgaatcaagcgttacggctttattggaggtgtggattatgttgttgtcgaaaatttgagctcaccaaaacgggggagctcaaaatctcgccaacaaacagaacacgactatttaatcagcctcaacatgggtaaagaaacggcgatggttgagcgcaccgaacaaggccgcgccgttcgccgttacttcatcaggtgcgaggaagagttccacaagtccgcgccagaaaaggccgcagcattgcgccgggaactgaaagcccgtattaccgtagctagttactttaagccgatgtgcgccgcgctggaactgcaacgcgcagagcatggaaaaaccacgccgcagcaccactacacgacagaagcgaacatgctggcgcgtatcgtgctgggtggcataactgccagacaatgggcgcagtctaacggcgtgacaggcgacccacgcgaccacatgaacgcctcgcagcttgagcatctttcttaccttgagcaaagcaatataacgctgattgagacaggccagaactaccaccagcgaaaggccgaattgatgcgactttctcaacgctggctagcccgtcacatggaggccagccatgactaa

SEQ ID NO: 394433 - DNA, 267 bp, Salmonella enterica
atgaaacctatcgaagataagatactcaccaagaaggaagttgcggcactgttacgcttgaactcaacaaccagcattgatgacatgatacgtgagggggaatttatacccggttttcgccgtggtaagcgccgcgttggatggtttgaatcagaggttaatgcgtggctaaccagtcgaaaggatgagcgcaataatctgatggctgaaattatcgccaaagcacaacaacgcaaagaaaacgcacaccccaccagcgagatttaa

SEQ ID NO: 394434 - DNA, 834 bp, Salmonella enterica
atggcattaccagagcgagattattataactttaatgatgcattaacttatatacatgccaataagatgcaatgctcaatttcggatctaatacatttttcggaaaccgggcgacttataccaattactttttttaggggattttggcaatttgattgtcatcaagaatcaagagcacgctcactttttatcgacatgaacgaaccgcaaccaaacaaaataataacaattaatcaaaattcttatgaagaaagtcattatacttctaatttatgctcatatcacatacttgcggaagaacctttcaccagttgcgatagattaatgataatgcttcgtggttttttagaacctactccgcatagttcttttcatttctggcgagaaatagaacgaaatggaaaagtaaaaattgacaacattaattttacaattcctttatcagcgcaaaaaatcgactatgacgatggcatgtgggaaaacagcggcccatcgcaaggctttacttttccgaatagcgagctatatctttccgatttcgttataacgaaagaagagataaacactcttataaatggcggaaggaataattgtaatcaagatgatttattcaaaaaagagacagaaaaactaaaatacaccaagacaaaaagtttgaactcacaaatagatgtcatacattcactattaaaaacatactgcccggaagcgatagaacatccgcataaagcgttaggaaaaaaaggcgcacttacaaaagcgttttcctatgctggtattgagtttccagtggatgttaaaaccctatccaactggataaatagcagaaaataa

SEQ ID NO: 394435 - DNA, 1254 bp, Salmonella enterica
atggggagaacaacaaaaccactaagcagcacagaggtaaaagcagccaaagccacaaacaaagatgcggtgctttatgatggtgacgggcttgagctactcgttaaggctggctctaactccaagctatggcgcttccggtactacagaccgttaagcaaaaaacgggcgatggttagttttggcccctatccggctgtatcgctggccgatgcgcggcgcttgcgtgacgatgcaagggcattactggcgcgtgacactgacccgcagacatacaaaaaagagcaggaagaagaacggaaccagaccacgcaaaacacatttttcaacgtagctaaaggctggtttgttgtaaaaagctcgcgcggccttgccgaggatacgttacatgacatttggcgctcactggagataaacgtattcccggtagtgggtgaaaaaccaatcaccagccttaccgcccgtgattttattgcatcacttgaaccagccgctgcaagagggaaagccgaaacagtacggcgcgtggcacagcgcattaatgaaattatggattacgccgtaaacaccggactaatacacgctaatccggccaccagcatttcaaaggcttttgtagcaccgaaaaaaaagaatcttccggccattcgcccggagcgattacccgaatttatgcaagccctttccattgccagcgtcaatatacaaacacggcttgttattgagtggcaattactgaccatttgccgccccggagatgcagcgggtacgagatgggatgaaattaattttgaggccgcagagtggacgattcccgccagtcgattaaagcagcgccgggaacacgtaataccattaagcaaacaggctttagccgtactggaagcaatgaaaccagccagcggccaccgcccctatatattcccgcataacagcgaccctaaaaagcatatgaacgcacagaccgctaatcaggcgattaaacggatggggtttgcgggcgaactggtagcccacggcttgcgctctatcgccagtaccgccatgaatgaggaaggattttccccggatgtgatagaggcagcattgtctcacatggataaaaacgaggtcagacgcgcctacaaccgctctacttatctggaacaacgccgcccgctcatgacgtggtgggccgatttcgtaacacaggcagcgaccggaagccttagcgcggctggtggctatcgtggcttaaaagtcgtgggggagtaa

SEQ ID NO: 394436 - DNA, 207 bp, Salmonella enterica
atgctgaacctcgactgtgttcctatctcagcttattgcaaagaaaccggagagacaacggacgccatcaacaagcgcttacagcgcggagtatgggctgaaggtgttcaggtattgaaggtggaaggtgttaaggagagatggatagatctatgtgaggttacaaaatgggcaaggaaaaatcgcctaaactcccacgcggcataa

SEQ ID NO: 394437 - DNA, 570 bp, Salmonella enterica
atgaaccatttaatgatcgaccttgaaacgatgggtaaaaagacaaacgcgccgatcgtatcaattgggggcgtattcttcgatccgcaaagtagtgaaattgggcctgagttctataccgccgttagccttgaaagcgcgatggagcaaggtgctgtgccggatggcgatactattctgtggtggttgaggcaaagcccggaggctcgggcggcgatttgcgatgatgctgtatctgtaacgaccgcgcttattgagttcaatgactttatcacctgtcatgccgacaacttgaaatacctgaaggtatggggcaacggcgccatcttcgataacgttattctgcgtagcgctttcgaacgagcccgcctcccctgtctgtggcatttcagtaacgatcatgacgttcgcacaatagttacgctcggtcgcgctgtcggcttcgatcccaaacgtgacatgccgttcgaaggcgatacgcacaacgcgctggctgatgccaggcatcaggcgaaatacgtttcagccatctggcagaaactgatcccgcccaccagcaacaatatttaa

SEQ ID NO: 394438 - DNA, 501 bp, Salmonella enterica
atgaaaccagcaaatttggcaccggtttattgttcgctttatccagaactggcagagatagcccgcaaacacggctacgcaatggcaatacacggaacaatggcacgagacttcgacctgatttgcattccttggaccgataagccgtcagcgccgcaggttgtggtggaagaatttacctcaagttttgcaatgaacgatgtcacaagcccaagcataaaaccacacggtaggatggtgtattccatcagttttggtttcggtgagttcttcgctgacctgtctttcatgccagttggggaatcattttttgatggtttatctgctgctgccaattgggttgataagcaacgagaagcctacgacagcgaacacggatggcatgacacagatactgggtcgtttgagtttggtaatgacgcacagcgagattattcagaaacgttagtggatattgctgatggaatcagaaatcttcgaggactaacccatgacaactaa

SEQ ID NO: 394439 - DNA, 900 bp, Salmonella enterica
atgagcaacatcgacaaacaggtgctgcgacagatagcagaaagcgttgatcgcgaagaatggtacgttctcgataatggcgatgctgattatcaggttatcgtcagcgggagtcttgaaagaggagcaacctaccgttcttaccagccagttactaatgaaatatcgaacaaaaaaatagcggcttttatcgctgcatttaacccgaaagtggcgctggcgctactgaatgaggtggaagccgcagagcacacagcggcagtagaccatgaagcggcgtgctctttggttgaagaaaacgaaacactgaaacgccggattgctgaacagcgtgagtattacgagggcgttattgctgatggaagtaagcgcacagcagaactggaaagtaaaaacgccaatctgcgaaccattgcgcacgaacagaacgagttagctatcagggccagtctggacagtaataacgcaacagtggagatgggcaggctgcaaaaacgcatagcagaactcgaacgcagcgagacgcagcttatcaatgagcgtgatgatgccgaatctgctttgaacgatgcctacaaagccgttatgggccacgcaccagaatggagcaactggtttagcttcgagaatgcgatagatgaaattgagctggcgtgcgaacaatggcgcaaccagaccgatgacgttatccagttccgccagcgtatagcagaactggagtcgcggactgtgacgctgccagatggttacgtgatggctcctgcgaaagccgatatcgcgatgattagagctggagggcgggccgctcgtaagtatctggaagagcacggcggaaacagcccgcaagtaatctatcagaccatgctcgccgccgctggcattggcgtgaagggggagtga

SEQ ID NO: 394440 - DNA, 222 bp, Salmonella enterica
atgatcgttaaatgtctcaaagattccgaaggttggtggactgaaggtggggtgtacccggctaatgtcgttactggcggctttattcaagttggcgatgatggcgatccgaacggaaaagaatggagcgcagcccctgtggaatatcgggaggatggttcgatcctgtatcaggtcggtggtctggatggtgaagtcatttttgaggaggccgcccaatga

SEQ ID NO: 394441 - DNA, 837 bp, Salmonella enterica
atgagccttaccatcaaacatccggcgatccgttatcacggcggtaaattccggctggcatcctggattatcagccattttccggtgcaccgctgctacgtcgaaccgttcggcggcgccgcgtcagtgttgctgaaaaaagagcccagcgaggcggaagtctataacgacctcgatggcgatgtggtaaaccttttccgcgtactgcgtgatccggcaactagtcaggcgcttaccgctgcttgtgccctaaccccatattcacgcgaggaatttacccgcgcctataagcatagcgatgacccggtagaacgggcccgcctcctggtggttcgcgcaacaatgggcttcggtagtgcgggcgccacaaagggcaatactggttttcgtctcgatactcgacgtaacagcgcgaccgctcaggctatctgggcacgtcagcctgataacctggcggcggtggacagcaggttttctggtgtactggttgagaatcgggacgcaatacagtgcatgcatgaccacgacacctcaaccaccctgcactttgttgatccgccttacgttcacgacacacgcgtgggagtggcaaaaaacagcgcctaccgtttcgaaatgacggatgcggatcaccttacactgctgagttgtatcaagaatttaagcggcatggttgtcatctgcggctatgacaaccagatatacaacgattcactctcgagctggaagcgtattacaagaaccacgtctgctaatggtcgggcggggtcagtacagcgcacagagtgcctttggattaacccggcagcacaaaagaatcaggagcgtgcggcatga

SEQ ID NO: 394442 - DNA, 456 bp, Salmonella enterica
atgagacatgaaaaaggcatttattttcctgacagggaaaacttagcccgtgaaataaataacataatttgttattacgatttaagcgctgaattaattgcggatgaaatattcaataataaagaaaatgacgccagtatttcagcggcaataattgacgttatcgccgaacgccagcgccagataacgggtgaaggtttcacgctagaacaggatgatgagtactatcgcgcggagctggtttatgcggcgcttagttatattagcgttgccgttttatttaaggataaagatccagatagctaccgcgagtgctgcgcccctgcgagctggccgtggtcgcctgaatggtggaagcccactaatccacgccgtgacatgatcaaaggcatagctcttctccttgccgaagctgaacgacaggatcgcctgaatggtcagggggtatcagcatga

SEQ ID NO: 394443 - DNA, 825 bp, Salmonella enterica
atgtctcagactgtagacgctactgcaattgaccagatacgcagaatggtaacagccgaccagatgaatacaaggctggaagcggtgcattgcccatctgttgcagtgcctcatgatattaaagtgcaaaatattgagagcctgttcaataatcgcttccgttttcgtggtgcaatgagaacaaccagtattgatgatttttcccgttactcaactggatttgctgccgaaggtactcgttgctttattgatgcctgtaacatggatgctgtaacagttcttaatatcggtacgcttgataatccaggacacgccgacaacaccgcccagattaagctcaaaaagacggcggcttataatgccctgctcgatattaatggcgagcggaagtcacagaaagaactggctgaatggctggaagattatgccgactttatcactggttttgataaagacggtgaggttatacaggccaccaaagccgccgccgcgatacgcaaaatcactatcgaggccaattcatctgctgactttgaagataacgatttcagcggtaagcggtccgtgatggaatccgttgaggccaaaactaaagacatcatgcccgttgcttttgagttcaaatgcataccttttgaaggactgaaagagcgtccgtttaaattacgcatgagcattatcactggcgatcgccctactcttgtgttgcgtatcgtccagattgaatccgtgcaggaagatattgcaaacgaattccgtgatttgcttgttgataaatttaaagatagccaggttgaaacgtttatcgggtcattccacgcctga

SEQ ID NO: 394444 - DNA, 369 bp, Salmonella enterica
atggctgttactaaagatcgcttaaccaatgttcccgcatttatcggtgaactggatgcgggtgtgtttgaaaacaaattatccgcagtgctcaatgacgttgccaccggcgtgattaactgccgcgctgatggcgaagtaacgattaagatgaagttcaaaccgatggatgagaaccgcgtaaaaatatcgcacaagctctcatctgttcgccctactcctcgcggtaaatcttcagaagaggacaccaccgagacgcctatgttcgtcaatcgtggcggaaagctcaccattcttcaggaagatcagggccagttgctcaccattgctggagagcctgacggtaagcttcgttctgccggaaaataa

SEQ ID NO: 394445 - DNA, 330 bp, Salmonella enterica
atggaacagaaacatactccgggtccgtggtatgcggtgccaaataatgtgtttatcgatatcacgacagcaccgggtcgttatgacggagagactatcgccgacacgtgttccagcggacacagcttcgataacggagactgcattaatggcgagacaaccgttgctaacgcaaaacttatcgcggcagcgcctgagttactggaagtctgccttcgtgcccgcagtcacctgtttgctgcagggtttgagccggaggaagggtcgatgaatccgaacgcgtgtcttctggcacaactgatccgcgtcattgaaaaagccctgaactga

SEQ ID NO: 394446 - DNA, 453 bp, Salmonella enterica
atgcaaactattgaagagataagaagagactggctgcttgagttaattcgccaacataaaacaattgcaaacttgaacattgcattaggcagaactcggacggatgcaacgctctctcagctaaaaaataaggctgtagacagtaaaagcggcagaccaagaggcatgggatctcccttagcacgagagattgaggaaaagctagggcttgagattggcaccattgatcatcccttcaggaatgatgcccaagcagataataacgattggcttgcatacaaaatggctgatagcgctactaaagccgtagttgatgcgttgcttgccaaaggaactgcgccggattgggttacaccaatgattgcgctggctcttgagggagcaaagcaagctgctgcaatctggctagactcaaaaaatgaagaaacaaagggcaaagaaacaggcacttag

SEQ ID NO: 394447 - DNA, 252 bp, Salmonella enterica
atgaacctgaaacattacacaaaagaacaacggggaaggtctgcactccttggtcgaattttatctgtatcacctgtgctgatttctcagtggattaatggcgtacgccagatccccgctgaacgttgccctgagatagaaaaagcaacaaacggcgctgtgacatgcgaagaactgcgcccggatattgactggtcctatttgcggggaactgtaacgcaagccgcccaccaggacactgacgcagcctaa

SEQ ID NO: 394448 - DNA, 441 bp, Salmonella enterica
gtgggtaacaacagcgagacaaaagacaggaacaaaaagctacatatcagcgcaagtaacctttcgctggaagaacttagacatcagttagccgatgccgccgaactggctaaatcattacagccacactacctgtatggcgatgatgctgatttcgatggctttatgcgcaccgccagaaagcacgccgaaaaactcggctcaatgattgattttctttcaggtgaatcaatcgacctttcagatgaggtcttatctggttttgatggcgatcttaagcgtcttcgtgaaattcgcgcttacctgggcggattcttgtcggcgatggaacgacttggcgagcctgctggtggttggtggcggtcatggttctccaactcccgcaaagcggaacttcttaaatcgccaacgaaatccagagaggacagctctgaacaataa

SEQ ID NO: 394449 - DNA, 705 bp, Salmonella enterica
atgagcaacaacgaaataaaagatgcaaacaacagcatcgctaaaagcgatgaagggcaaataaccatttccgaaggaaagatgcgggcttacatgtcattccagccaattgtccttccccttattggcgaactgataaacgagatgatcctgagagggagatccgcgaaggaaatacaggtggcagttgaaagcgccgcccgtggttattcaacgttctatcagacttttatgaacccacagaaactcactggtgataactcgcaagaaattgaacatcaacaggacggtgctatgagcgagagcgtaagccagaccgccgctaaagacggcccgtatatcaatgcaggcgatatgtcgctggaagagttcaggaaatggattgagcacaggcaacggaatgcatttcgctacgaagaaactcatatgtggccacctagactcaagaatatctgcgaggagttacaggaattcgctgatttcctgcctggactgattagcgacctgcaagatccccaaatagctcgctcggcagatcatgccagtgaacttctgaaagagatttcgttttaccggacattgcaagaagcgatggagaactttctgagcgccactgagctatcaaagactgatcccccagcgttatggcgtcgctataagtggatacctgaatcatcggaaactaatgcggcaggccaattctga

SEQ ID NO: 394450 - DNA, 393 bp, Salmonella enterica
atgagcaacaacgaagcagagaaaacgacacagaccgcccctaaagacggtccgtatatcaataccggctctttgtcacttgaggagttcaaagagtggctgggaaacaaacgctccggcgtatttatgtatgacagctactacccagagcatattgatgaggtctgttgctgtctgagagacctcataggaaaactcaatccagcgattgaagcattacaagatcctgaaatagttcgctcggcagatcatgccagtgaagcccggcgagacattttgttttatcaggcaatacagaaagcatcgatggattttttgacatccattgatcaattaaaggctgatcctcaacggaagtggtggagagacggtcagccagcagcgccaatgtaa

SEQ ID NO: 394451 - DNA, 477 bp, Salmonella enterica
atgacttctagtgacgtttacgaaaaaatctgtaagcacctggctaaaatgaatgacatcagggacatcgttgttagcggtgatgatcacgatcaatctgatcgcgcccctgggtacattactgccctcatttcgaaacggattacctgtctttactttgctattcacgctcatcgcggaacccactcacggtcacttctgtcattcagggactcgcttattcacatgctttatctggaaacagggcaactgatggagccgtccaaaatatccgtaaaccttacattggcgctgctggctgaccgtctctccaccacttccgttgaggatcagcctttaattgatcaatggatgtcaaaaaatccatcgatgctttctgtattgcctgataaaacaaaatgtctcgccgggcttcactggcatgatctgccgagcgaactatttcaggatcttgtaatgcttcaatcgctggattga

SEQ ID NO: 394452 - DNA, 585 bp, Salmonella enterica
gtggggatttttaagaaagtcgttgtagcggttaacgactggataatggaaaagcagcctgatttctacataaaagccgtgagaagaactattgctgatttgccgggtgggtacgaagaagcacctagctggcttggaagtaaagtcaccaaagattctctctttaaccgacttcgcagcacttttgctgatcagatatttccgcttggctgggcgctggttctgcaaaaagcctgtgggaaatattacgtaactgaagcgatcgcccgcgcatctggcggtgtatttattccgctgcctgatattgaggaagtggataacgccgatattaatcagcggctgctggagtccattgaagagctaggtatttattcacagaaggtgcgtgcagctactgaggatggtgttattgactcaagggaaagagaggagattgatgaagaattctaccgcgtaattaccaagctggaagagcataaagcactgctttacatgattcattgccgctcaaaagaaggtgatgcccgcgagtgtgcagctccgggcaccgtggcgtcatcagtcttggagaaaacaaacgcatga

SEQ ID NO: 394453 - DNA, 228 bp, Salmonella enterica
atgtacctgcttaaccgatggtttaaggactggagagggcggtatgtcaatgttatccgctgggagccggaaaccgaacgcgttatctacatgcgcgaagggtatcccgatgagtgtttcagtccgttgtggaaatttaagcgggtattcacggaatgcggcccgccagatgagaaacaacagcgccccgaagggcgcgaaaggatgctatacgaaacggatttgtaa

SEQ ID NO: 394454 - DNA, 309 bp, Salmonella enterica
atgactggtaaacgcaccccgccacccatgacgcatgatgaaatggttgctaaatggatgaaagaccccgcatttaaagccgaatacgacgccattgaagaggagttcgcactactcgatgaaatgctcgacgcacgtaaaaaagccggattaacccaggcgcaggtagcagaacgcatgggaacgaaagctaccgctatcactcgcatggaaagcaatctggcttccggacaaagtggaccatcgttcgcaacacttaaaaagtttgccaaagccaccggcaagaaattacaaatccgtttcgtatag

SEQ ID NO: 394455 - DNA, 828 bp, Salmonella enterica
gtgcagcatgacgatacgcttgcccgtaagagtgcagtaaaacacacgagcgataccgtcactgctttttatccgaagctcgaaaagcccatcaccgagcggactggtgtgtggttcaccaaggttactaccataaatttccattcggtcaacgaggtgcttgtacctgactcgtatgctcagtggatacaggtcaacctcaagccgtatttcttcgctgtagtactcaatagtgtagttcatactttaaaatataacgaaattgttatgttaatgcaagcgcttgatcatctgatttcggggagttacactgtctgcgcaccttataaaacgggtgccgggcgtgagaacccgctgatgaccatagcgcatagccgcgctcaagcggtttttttatgcgttaagcacggccacattcgcattatggtggggcgtgcagggcagccgaaaggctggccggttcctatggtcgccggtattctcacccctgtacgtctcaccacctgtcagaccgtgagaagtctcggtggtgagttaataaaactgaccatagaggctgccatcatggctactttcccaacccttgatcaccctgaattttcgtgtgaagacctaacacccctcaggcacgccgatcacctgaatatcatcctggatactatgcagtatctctccacgcgctcatctgctgatgcgcgtatccagttggtgcgcctgttgctggtggcccgtacacacgggcagaaattacgcgaagagctgttccgcatcgagaacgacatcaccctcacttcatccaccccggcaagcaaaagggggcaacaatga

SEQ ID NO: 394456 - DNA, 561 bp, Salmonella enterica
atgggcggtatccgggaagccgccttctccgtcctttcccggcacgcgtttccggctactgttgccaatacaatcagcgtggccatcatcaggcaactcgcgttcgcctgggaaggaaacaccatctacataaccaaaacacctgatcatgaggttatgcagcgtaatcagcgaatctttgatgagtttaaaggtgataatcatgacgcgttagccgaaaaatttggcgtgtcgatccagtgggtatacagcattgttaaggacatgagggatgaatatataaggcgtcaccagccagacatgttcagcaacgatgaacctgacaatagcgacatcagtgagtttattcgggaacaatttaaaaccctcggcgacatcatggatcactcggcgtactgcctgcgacaacatattccagatatcgatgaaagcaaggcgctggccattggcagggagatagcttacctgacgtcagaactccgcaaagggcaatcagcgaacatcaagaaagagaagaatgtttctgatgaggcgcaggctgatatgttcggtgatggataa

SEQ ID NO: 394457 - DNA, 636 bp, Salmonella enterica
atgattgatgccagtttaataaatttaccgtgggccacgctggtaacgctggcgtcgggttacatcggctactttattgctaacgtgggactgaaagatcaccacaagccaattgacataaccttttcgacattgatttttggcctgttcgccgcgatggtgtaccaggcttttgtctggattgggtggggagagtactttgctacactcccggctgtgctatatgcctttgcaaatggtgcctggtggcgtaaatatgggcgcaagtttatgtacaaattcttgcgcgatcacgatatctcatggtcagacaataccagttcagcatggcagcagatgtttgatcagattgattatagcgttactgaaatttacgtaatcatgaaagatggttcagggctgctttcacggttaccgggtgattttgaagacttgcccagcggaccgttcgcgcttggtaacagtggcgacatcattctgtacgcaacccattacagttcaacggacagcgaagagtggcttaaatacgataacgttgttgattcttcatggggagcgctggcaacctatatccctgcagagcagattgccagaatagatatcagaagaagtaaggtagatcgcaaggcagactaa

SEQ ID NO: 394458 - DNA, 138 bp, Salmonella enterica
atgagtgacaagaataaacacgacagcttagactacacagaaaacccgaaaagcgagcgcaccgtaacaaccgataacaaaaattcaaatagtaaacctgcaccttcagcaccgcctctcccgttgaagaaaaaatag

SEQ ID NO: 394459 - DNA, 333 bp, Salmonella enterica
atggtgatggtcgcgctgatcgtagccttttatctactgcgctacttttttgccagcgccaccgcctatacctcggcgctggcgccaatgatgattgccgccgcgctggcgatgccggaaatcccgttaccggtattctgcctgatggtcggcgcagccattggtctgggcagtattcttaccccctatgcgaccggccccagcccgatttactacggcagcggctacttacctacggtggattactggcgattaggcgcgattttcggcctgatcttcctggtgctactgatcgtcaccgggctgctgtggatgcccgtcgttttgctgtaa

SEQ ID NO: 394460 - DNA, 1161 bp, Salmonella enterica
atgaagcctttaatgccccccattgacaccccggatcaggtcttccacgatggcgatccgtcaaccggcgaactcggcactatctgtagcgctgagtggctgaataacgtccagggcaacatccgcaatattcaggcggaatgcctcgccatcctgaaagcgacgggttttacaccggacagcacaaacgacggccagctatgggaagccattcaggcggcgataaaaagccaggttccggcagcgaccgtaacgactgcaggtatcactcaactttccagttcggtcaccagcgacagcgagagcattgcaggcaccttaaaggccgttaaaatcgcgatggacaacgccaacgcaagaatggcaaaagaccgtaacggcgcagatatccccaacaaggcgctgtttcgtcagaatattgaactcggtaacagcgccaccctcaataccggcacaacggcaaacaccgtggcggctggagacgacgcccgcatcctcgccagccaaaaagctatcaacgatacccagaccggccttgctgtacagggcgtcatgtggataagcaccgccgatgacctgagtaacctgcctgcaggcgctcgtcgttttgcccgtaacaatgacggcgttacggttctgccgtctgccgggtattttttcctggaagttctggcaaaacgtgacaccgcgaacggcagttgtattctggcgacaagtgacacaagggatgtctggattggttttcgctacacagttcctgacgaggctaatttcacctggatacagctaaaccagaatgtagaaaacctcggtttaacggatacggtaaatcgcgcccttcatgtaaacagcgacggagatgttagaggctcattatggggtgactggttgagtcactggctatacgggcagtttgccactcgcgataacaacattaacgcccgcgctactgttgattgggttcatcaaaacttcctctcaggtttcaggctgggaggtgtcgaaagcgccaaggtatggagagcgtatggatataacgatacgccaccttacgttattacaggggtgataaatggaaacactgacgacctgattgataacatcactcgccgcccactccagatgtatatcaacgggtggcgtaacgtagactggttataa

SEQ ID NO: 394461 - DNA, 573 bp, Salmonella enterica
atggagcatgttcaccttctgggcgcactgctgcccccggtcagctaccagccgcaggcccccaaaatccgcgcggagcttgacgccgaaggccggatgtttgacgcgctttacagcggcattaaggggattaccggcgcggtcacgccgttttacgccgaaaacctgctgccggactgggagcgggtactgggtctgacggcagacgcaaaagacacctaccagcaacgcctttcccgcgtactggcaaaactcgccgagaccggcgggctgagtattccgtattttacgcgccttgcggccaatatgggctatcacatcacgatagaggagccggagccgttccgggcaggaaccgggcgcgccggtgaccggatttacacgccggacatcatttttatgtggcgggtcaacgtctttacgacactgctgcaaaactaccgtttcagggcgggccagtcggcggccggtgaacgtctgtcatggttcgccgatgcggtcattgagtcggtatttaacgacctgaagcctgcgcacacattctgttacttcacttaccaggaggcaaaatga

SEQ ID NO: 394462 - DNA, 342 bp, Salmonella enterica
atgctctcacccgataccggtgactacaccggcacccgcacaaccagtctgcacaacgcggcatacctgcggcttgtcacaccgctggggtcgtggtgggctgataaatcgctcggctcgcgcctgcatgagctggtacgcgagaaagacctgtcacgcgtgtttgtgctggcgcgccagtacgcggaacaggcgcttgccccgctgcaggctgacggtcgcgcaacggccgtccgggtatcggttcaccgcgatcgtcccggctggtgtttgctgtgggtgggtatcgttcaggctgacgggcagaccgtgacctttaaacatcctgtaagggtcagttaa

SEQ ID NO: 394463 - DNA, 699 bp, Salmonella enterica
atgatgcatatcatcagccagcgtattaaccaggcgctggcgcgtattcgtcaggcgtttcgtatccgcctgggtgcaactgacagcgaggccgccgtgcagcgcattcaggcacagggtatcggcaatgaaagcctgcgcggggctgagttgttccagcagtacggctttacatcgcacccccagcccggcacgatgggtatcgtgttgccgctcggcggcgtcagctcacacagtatcattatcgccaccgagcacggcgcataccgccttaaaagcctgaagcccggagaggtggccctttataccgacgaaggcgctaaaatcgtgcttaaacgcggtaaactcattgagaccgactgtgagacctttcgcgtgaactgtaccggctttgaggttaactgcactgacgcgaccgtcaactgcgacacctttgcgaccacggcaaacgacagcgcgagctttaccacccccgaactgagcgccagcgagaagctgacggcacaggggctgatttccggtaacggcggtatgagcgttaaaggtggcgaaggctcccactttgagggtaaccttaaccagaccggcggcagctttaataccgacggtgacgtcagcaccgcagaaacctcgcttaacggtcaccagcgcccacgcggccacgatggcacgccaaccggcggccctatacctttatag

SEQ ID NO: 394464 - DNA, 1401 bp, Salmonella enterica
ttgagctggcaggataatttacaggatgcgtcattccggggcgtgcgctttgatgtggtcagcgctcaggacagcgttgcccgcgatcatgcggatcatggttacccctggaccgacggcgaggacgtccacgacctcggccgcaaggcgcgtaacttccgtttaaacgccgttttctggggggatgattacgatacccggatgcagcaatttaccgctgaactgaacaagcccggcgcaggtgagcttattcacccggtgtacggttccgtcccgaaagtgcagttgattgagtaccaggtgaaacacgacgcgaacagcccggactatgcggaggttggcctggtatttctggagtccgtcaccggtacggcgtcagaggctcccgctgcccctgaacaatggggtgatgcgctctttaaccgtcttgacggcctgaaagaccgcgcacagatgctcttttcgcaggcaatggctcccgtaaacaccgtacgcgccctgttcagcaaaggccagacaatggcgtcagccatgctcaataccctcgatgtgatgcgcggcgacctgagcggcactatccgggctggcataaattacctcaacgcgccggggcattacattaatgatctgcttgctattctggatccgcgcacgctgccgctggggcgactgctgcaccataagcacaatgccgccccgtccgtcacctttaccccgcagggggccatgcagccagcgtcagcgggctaccatgcccctggcgtatcatccgctgtaccggaggcgaacggcccggccccggtcatgtcggcctggcgggagactaccggcaccctgagtcgggttgtgtcgctgccggaggcgatactgcgcgcggaggtcagcggcagcgtgccggttcctgagaacgccatcacgaccgacgtgcgcgagctggttaccctgcataaaacgctggtcgcccgacaggccgcagagatggccgcgatgctgtttatggatgatgagcgtgtcgccggtctgtcgcagcaggatctggaaagtgtgacaaacgacgtgcgcgggtttattcaggatgccatcacggccacccgcgagaactaccgggaagcaacggagcggttaagcgaggatccacaaccattagggctgctgtggcgtcctgtggtggaagacctcaaagagtccgcgctgaccatccagcggatggcagaggccattatggcgacgcgtccgccgctcacgacccggacggccacgcaggacggtaacctgcacctgctggcgcatacctggtatcaggattacacccgcgcgcaggagctgctgcgtcttaatccgcagatacgtgacccgaatgacatacgccggggggatacgctcagtgcttacgcccgataa

SEQ ID NO: 394465 - DNA, 2298 bp, Salmonella enterica
atgagccgcgattttcgcctttctatggggcttgattttcaggataacgcttcgcgggatatggcccgcgtgctgcgtgacggcgtaaaacaggtcaccgacgccacccgcgcggcagaacgccagggcgagacgcagaaaaaagcggccaccgacgccacccaggccgaaaaacagcacgccgacaccctgcgcaaagacggtcgccagaacatcagcgccagccgtcgccaggtggaagagtaccgccgttcggcccgcgcacgcgaggcgctctccatccgttcagagcgggctatacagcgcgaaatcgatcgcaccgttgcagcctacaacaggttaagccgcagcggcaccctgacggcacgcgagcagtcgcgggcgtatacggcgatgaaaaaccaggtcgccgcgctcaatagcgagatgggtaacctgacgcgccttgagcgtgtgcgtatgacaggcggtcagttgggggctatagcgggcggtattacagcggccacgctgcccttcgtggcccccgtcagaaaccagatggcttacgagcattcgcaggcgaaccttgccaataccgccttttatcagcaggacgctgagggccgtctggcccgtctgccggagcttaacgccctgatacatgacgccatcgtgcagggcggcggcacgaaagacaccgcgcaggcggcgaccggcaggctgctgaataccttttcattcgatgagatcaaagagcgtttaccgttcctgcagcaggtctccagcggcaccggcgtcagcggtgagacgatgggcgatatcgccaacgccctgcgccgtcatcttggtgtggactcggcagatgacctcaaacgcgctgtcaatatgatggtggcgtccggtcaggcgggcggcgtggagctggcagacattgcgcgcattctgccgggccagcttgagcaggccggacgtgcggggctgcgcggccttgacgggttagcgcaactgctctcagcggatcaggtctcactcaccacgtcgggtaacgttgacgaggcaggcgcacaggtcaacgcgctgctgcagcgtatctacggcaaccgggcggagatggccgcgcagcgcattaaaatcggcggtaagggtatcgatctgcgcgggacgctggcgcaggcacaactgcacggtatgtcaccgcttgacgcgctggttgggctttccgatcgcattattgacaaagaccccaaaatccgcgccctgcgcaggaagctcaacagcggcaacctcagtgacagcgaggcggccagcacccgcgacgccctgcagacgatggagaacggctggctgacaaagctgctcggcgatccgttctcggtgcgcgcgatggtggcccttcgcaaccagcggcaggcccgcgcggacaacctgaccctcacgcagcgccagcgcgatttgccggacggtcagggcgcagccgaggtgaattttcagaccatcagcggcaccagtgactttaagactgaccaggcgaagagtctgcgcgaactgtcgcagatggacgccatgaagcccgtcgccgatgctgccggtaaatttgcaggcgtggtctccgaatttaatcagaagttccccggactgtctcaggcggccgaatccgcttcgcttgccatccagtcgatgacggctgcagcggtgacgttcgccgggttaaagctgctgctgggtaaaggtggcgcgggtgctgtaccgggtaacgtgctggccgacgccgggacaacggctgccggtgcggcgtcaacgtcaggcaactggttatcaggtctgtttaagctgggcgggatcggactggcggcaaccactgtcgccacggccaccacgccggaggaagatgccgccgtcaacggcagcgaggagcgctggaaggccatcagggagaaatacccgcaagatgttatcgatgccgcgcgtaaaaaatatcagccgtggtatcagtttggtgaaggctactcaaccgaaaacgagaaatggatccagcaatacctgcaggacatgaaaaaaggtggcgatcaggatgcgataccgccccgcgcggttccccgaccggctgcgcgtaacgatatcgtgatgccggatcaggttcccggcgttaacacatcccgcagcggcacgacgtccgctaccgatatcagtgcgactaatgcggtcaatccccttaatgttcatgctcacttccatatcgacggacaggagattgccgaaaaggtggcggaaattcagggtctggatgccctgcgtaatacgggaggtaacttttga

SEQ ID NO: 394466 - DNA, 387 bp, Salmonella enterica
atgacgggccagaacacgctgctgtacggcattgagtacgacggacgcacgcactacgactttgatattcgcctgccggtgatggcggatatctacggcgcgctggatcaggctgaaaaggttcacggcagcagcgacagcggtgcgggtgacctgtattaccgcatggcgctgatggcgactgtactgacgcgtctcggtgatatcccggcggaagccgtgacgcctgaactgctgctcgacgggctgctctcagaggactacgagcgcctgaatgatgccatcgcagagcttaaaaaaaagcgcaggaacgcgaaggcaggcgacagggactgcgccttgccatcctcgccctcggacagcacggcgtcagcgaagaacgggtaa

SEQ ID NO: 394467 - DNA, 375 bp, Salmonella enterica
atggcgattgaagaatatattggcgctatcgtgatggaggttgacggtcaggaggtggaaatcaccgacctgtcgccgtcccacgagaccgggcgcaagctggtcaagaccatgaaccgcacccgtcgcgccaaagggatcacccgtggtattgagacgtatgagctggacgtgacggcggttatccccgtcccggacagcattcaatgggaagacatcgagggcgcgcgtatcaccatcgacccgatgattcagggcagcaagcgcaccatgtaccaggactgtttcactatctcggtgggtgaaaaatacaccgtggacagtgaggcgcgggtcgatatcaagatgggcgcactgcgtaaggtgatcgaatga

SEQ ID NO: 394468 - DNA, 1416 bp, Salmonella enterica
atgattgagattgaaaccattccgggcagcacccgcaagcccggcgtttatgccgaatttaatacccgtatggcgatgcgctcgttgccgggtaacccccagcgaatgctgattatcgcccccatgtctggcgttggcgttcaggcgaaggcgctggagctgcatgacgtcttttctgacgacgaggcggcggtgctgtttggtcgtggatcgcttgcgcacatcatggccgtgtcggccctgaaagccaaccgctacctgcagctacaggctatcggtcttgctgacgcgcaggcgggcaaaccggcgaccgccgatatcgccctgaccgggcctgccacgcaaagcggcacgctcacggtctgggtggcaaacacccgcattgacgcaccggtgcaggccggagacagcgcacaggccatcagccgcgcgttgctggatgccgtatcacgtcagggcgcgttgccggtgaccgcgcagatggcgaccggcgacagtggcgtcaccctgactgcccgccacggtggcgcatggggtaacgacattcgcctttccgggcgcacgaccgcccccggcgtcaccgtgaccgtcagcgccatgaccggcggcgagaacaatgccgccgtgaaggacgccctgacggcagtctttgcggccggtcatcaggtgattgccgttccctggacggatgaggccacgctgcgcgccctgcgtgagcaccttgccgccgccggtgacgcgatggaaaaacgcggcgcggtgggggtggctggctggcccggcactcttgccaccggcaccacgcttgccggtaagagtaacgacgggcgcacgaccatcggctggcaccccggctcggtctgtctgcaggcggagattgccgcaggttatgcggcggtgattgcttcagaagaagatccggcccgtccttataacggccttgaaatcgtggggctggatgtgacgccgctcacgtcgcgcgccggtcgccgcgagcaggagaacgccctgcataacggactggccccgctggaggttggccccggtgataaggtgcagattgtgcgcgccatcagtacccacacccgaagcgacaatggcacggatgacccggcgctgctggatatcacgaccatgcgcacgctggactatgcccgtaaggcctggtgcgatcgtatcgccctgcgttacccgcgtgacaaggcaaccgaacgcaaccgtaagggcgtgcgttccgagctgctcgatgtggcgctcaagctcgaagaggaagaaatcatcgagaacgtgatggcgatgaaggacgcgctgcgtgtggataagggtaaggagccggggacgttcctggcagccattccgtgtcaagtggtcaaggggctgcacgttattgccgcccgtatcgacctgtacctgtga

SEQ ID NO: 394469 - DNA, 195 bp, Salmonella enterica
atgaaggtaaaagcggcggcggggatacaggttccgtatgagaaccagccccgccggtatatcgaacaaaagcccgtggacgtgccggagaccatttactaccgccgtctgctggccgccggtgacctggtgaacgtcagtgaccaggtggcggtgaaaggtaaggcaaaacgtaaagaggccgcagatgattga

SEQ ID NO: 394470 - DNA, 693 bp, Salmonella enterica
ttgataagggcaaccgaggaggccatcatcgcgcgtctgacgcagggcttaggcgatatggttaacgaggtcgccagctacggcggcgagtttgacggggacgaccccggccgcgtggtgacctcactgcctgcggcctgggtgacattcggcggcgtgacgcgaagtgtgaccctgaacaccatgcgtaacaagtggaaggtgaccggtcgctttgtggtgcttgtcggggattataacgcccgctcagagcgcgcctcacgcgccgggggcgagcgtgacgacgaaaccggcacttatcgtctggcgtatgccgtccggcggttgctggccggtcaggacatggagcttgccatcagtccactgcgaccgggggttgtgcgcaccctgttcagtcgtcagcttgccagtaacgccctgtcggtactggcctgcgaatttgatgccgactggataacgcacgccctggaaaacggccgctggccggaagaagagccggacagcacacaccccgaccatcttttcaccctgcacaacgggcgactcgatgaaccggttcccgaccttgtgcgcgtggatatccattacaccccgccgggcctgggtgacagtgaacatccggctgaccgggtacaactcaggagtgaacaggatgaaggtaaaagcggcggcggggatacaggttccgtatga

SEQ ID NO: 394471 - DNA, 426 bp, Salmonella enterica
atgtatgccacggttgccgacatggtggacaaattcggtgagcgccactgcgcagggctgacccgttcctcacgtgacgggattgacgaggcggtgctgaccaacgcgctcattcaggccagcgccgagattgatggttatctcgtggcgcggtatcagacgccgtggacggacacgccgcgcattctggtcgggcgctgctgcgacattgcccgctaccagttaaccacggcggaacacccgctcaccgacgagatcaggctgcgttacgaggatgccatccgctttctggagaaggtggcggcaggcactatccggcttggtcgcgatgacagcggcagtatctacaggccgacggcgcaggcgcgctttacgtccacgccccggcgcttctcccgcgatgacaccaacggcggtgcgttttga

SEQ ID NO: 394472 - DNA, 435 bp, Salmonella enterica
atgatttatatcacctcaaaacgtgagggttttgcccgctgcggcgtgcgtttcagcgaaacgaccacgccttacccggacgacaggttctcgcctgagcaactggcagacctcgaaagcgagccgatgcttatcgtctcccgcgagagtgccggtatgagcgccggtcaggcggcagagcaaatcagccgactgaaaaacgcccttgatgtggctgagcatgaggtggcggtggtcaccgctgagcgtgatgcgctgtatcagcagctcgctgacatgaccgccgaacgtgacgcactactggcggcgacaacgtcggccactgtgacggcagacggcggcgctgatactgacaatgctgacgcaggtgctgacagcgcgggcgatggtactgcgccgaagactgcgacccgcgcgggcgcgaagaaaaagtaa

SEQ ID NO: 394473 - DNA, 402 bp, Salmonella enterica
atgatggacagaaacacggcccgtaacgacggcaaatcgttcgccgtcccgatggctgccggtgcggttatcgggggcggcctgatggtggtgctcgatgacaagggactggcgcacgagggacagattaaagctggctggcgcgttatcggcctcagcgatgaggcatatgacaacagcgccggtaaggatggcgaagtctgcgcactggtgcgccgctgcgaggcgttttatttcgataacgacaccgcgaatccggtaactcaggtgctggtcggtcagacctgctacctgaaaaacgcgtacaccgtgaccgccaccgccccggcggaaggttcggttgtcgccggtcgcgtgctgaccgtctccccggatgacggtgttcaggttctgattgagtaa

SEQ ID NO: 394474 - DNA, 1173 bp, Salmonella enterica
atgaaaacatgtatcgccgccttatccatcgaactgacgacagccgccaccccggcgtcacgcattcgcctgcttcccgccggggagtttcgcagtaatgacggccgcccgaaggagtgccgcacctgggtgatgaatgctgcctgcgcgcagcgtctgattgcggcggctgaaaacaagctcattgactacagctttgattacgaacaccaggccctcagagccgtacagaacggccagcctgccccggcgtccgcctggttcagtacgctcgaatgggttgagggtgacggtctgtacgccactgacgtctgctggacgcctgcggcctcgcggatgatcgaaaacctggagtatcgctacatctcgccggtgttctcctacagctccgccaccggtgaggtgacggggctgctcaatgtggcgctgaccaacttaccggccctggaagaactcgacgacggtgttgccatcgccgctgcgtcccgtctggcggccctgtctttaataacaacagaggaatcctctatggatgaagaacagattgcgtatctgctctcgcagttgcgctggatcctgaacctgcccgaaacctcaacggcggcggatatcaaaaccgagcttgaaaaaatcatcactgctatttccggcggtcagggtatggcggccgccagcgttgacctgatggcgatgctcaccagtgcggccgacaaggacgcccgtatcgcacagcaggaagtgaagattgccgacctgtcgcagaaagtctacgacccggcgaagttcgtaccgctcgccgcgctttcgcaactgcagacagagtatgcgggtgcggtgacggatacccgtacccaggagacagagcagctcattacggcagcactctccgatcgtcgtctgctgccgggtgagatggagtcgtgggcgcgcgatctgggtaagaccaacccggacgccctgaaaacgtatctggagaccgcccggccagtggccgcactcaaccagatgcagacgcaggtaacgggggtgtcgggcgcgccggtcaccacaccgcgcagcgctgacccgcgcaacgagggtcagggcacagttgatcttgatccgacgctggttgcgctttcacagcagtttggtaacgacccggcggagattgcccgcctgatgggggaatga

SEQ ID NO: 394475 - DNA, 1161 bp, Salmonella enterica
atgaccgataaagttgatctggcgtatgcgatgaagctggctcccgccgatgccatcgactacttcacatcaaaaggctatgccatcggctttaactggtatgacgtccaggctgaagccaacgcaaaagccttcaccgtttcgggcgtgcttaaacttgatattctcgccgacattcagaatggcttagcgcccgccctgaacgacggcgatacacagcgcgacattgaacgtaagctcctgcccctgcttgagcaaaagggctggattggtaaggggctggttgccgacccggagaccggcgaactgtggggtaagcgcctcacgccccggcgcatcgggacgatattcagcaccaatatccagtcatcctatgccgccgggcgctggaaacagcaggtcgccaacaaaacggagcgcccctactggcagcgggtggcggttatggacctgcacacccgtccccggcacgcgctgctcaacggctttaccgctgccgccgactcgccggtgtgggattatttttatccccctgacggttacggttgccgctgtcgcatccgggccttcaccagagcgcaggtggaagcgcggggctttgcggtacacgagccggaactgtacgacattgaacaggaatacggcataccgggcaaaacccgcaccgttaaggcaatgaagattggcggtgagacctacactgccgatccggggttcgggtttaatccgggcaaagtggccttcatgccgacgctggataaatacgccacgcaggcggcgcgccagtacatcaccggcagcctgaccgggccggactttgcgcgcggtctcgcgcaggccctggccggggacgccagcccgcagcagatgtacccggtcgcaatgcttgacggtgcgcctgacagcctgcgcaccgtcagcgtggcgcagacggcgatgccggagctgtccgctgaggcatcgggctttgtggccgcacagcaggccatcgagaaccccgcccacgtcgtgaccgttgatgacatgacctggtatgcgcgccaggcggataacgtctggtcggtcgccggggtgcgtgaacgtcagttaaccgccctgaaacagggtgataatctcagcgagctgctgccggagggcgtaaatgtaccggataaccattga

SEQ ID NO: 394476 - DNA, 171 bp, Salmonella enterica
atgagcgataaaataaaacgttatcccgataacgacagaaacaacgacgacgacatccgcattgggcatggtcaacaaatcattcccgataacgtcgagccacttcattcccggtttattccttccccttatgatgatgacgatcagggggaggagaaaatcaacaaataa

SEQ ID NO: 394477 - DNA, 252 bp, Salmonella enterica
atggtcgcttttcggaatgcccggctggaaaacaagtttgatctgctgatcgtagcaactggcgcgccagcaatgaagaggctgaccggactcatagcccggcttaatgcggtatacgataccacccgcttcaagctggtgaagttcataacgttctgcgtcctgaaggtgtcgtttaaagtctatgagttcgcgttcaatcgcgtctttctcgcaagaaatcgcatcatggcgcgccccggatattactaa

SEQ ID NO: 394478 - DNA, 216 bp, Salmonella enterica
atgagttcacttgagcaacaagagttaaagataatgctgtatacgctgcgcggtgcgatgtgtgaagagtctgaaccggtgcagcagatggtgaaggaatccgaagagaagacgcggacgtttatttcccggcttgaggcggattaccccgataagaaaggtattgtgggcggcatgattgcgacgcttgattacctggtaaaaaacgggtgttaa

SEQ ID NO: 394479 - DNA, 528 bp, Salmonella enterica
atggggctgaaaacacgcattgcaggcgcggtctgttccgttgccgtcatcatcgggctgtcggtgcagttgtatcccgaccggctgcgcacgtcggctgaggggcagttgctgacaggtaacgaggaaggctgccgtcgtaacccctactgtgacggcgtgggcgtgtctaccgtggggctaggcagtaccggtcacgttgagaaacgcacctacagcgatgaagagattgcggcccggtgggtcagtgatatggccgatgcagaggactgcgtcaaccggtattttcggggtaaagatatgccgcagcggccctttgaggcgatgacgtcgctggtctttaacgttggctgttatggcgtgcgctggaaccgtaaggcggtaaggcccacgcagatttaccgcgaggcgcaggccggaaactggacggccatgtgtcaccgcatcccggactttcccaacagtggcggaaagccggtgctggccgcgcgacgtgcgcgggaggaggcctggtgtcttggtcactga

SEQ ID NO: 394480 - DNA, 267 bp, Salmonella enterica
atgacaaattatgccaagctgggtgagtacatcgcgttaaaaaaacaggcggaagatgcgaccacaaagagaaacaagatcctgaatgatgttatcagggagttacatcgtctgagtgagagttatgaacagcctctcgatcttacgcttgtcagccgggagcttgagagcgccgtcagcgctgataaagagatgcgggcggcagtaaaacaggccaatgatgccgcgccgttgtgtggtgagcctgagattaaatacctttcatga

SEQ ID NO: 394481 - DNA, 468 bp, Salmonella enterica
atgtccgccgatatcaccgacttttccagtgtgaaacactgtctgcctgattcagcgtttgagctggtcgaggtgctcggctggcctgcggcgatgcgcctggtctctctctttggcggtgtttccctgtccggcaccagtggtcgggcgcgggagcgtaccggcggcgtgcatcagatgctgcgtgaagcgctgacggaagatgaggttaaaaagctgatccgccactttggtagtgcgggagtctacattccccgctgcgatgttgcgttgcgcgagctgcgtaacagtcgttttattgccgaactggaggccagcgttgccggtggtttatcgacacgtcaggcgctggcccggctttgtccccgttacgggttcagtgaccggtacgcctggtcgctgaggcgacggcaaaaagacaatcagactctaccgaaaggccccgttcagacggggctttttgattaa

SEQ ID NO: 394482 - DNA, 414 bp, Salmonella enterica
atgaagcctgttacgacaagccttatcagggcgatcaaaaccggtcagtctgtgcttgggtgggatgatgccacctataagggggtgctgttgcgtctcactggcaaggatagctcgacaaagtgttccatccgggaactggaagacgtcaaagagtacatgcatagccagggctttccacgtcaggctccaaagggcaaaggccgcaggcccaaagtggctaatcgtcgcaaggcgatactcgccaaaatcgaggcgctgctggctgagggtggtctgtcgtgggcgtatgccgaagggatcgcctctcatatgtacggccaaaaagtgcttgagtggctggatgatgagcagcttaacgcggtgatgatagcgcttattcagcgagccaggcgagaaggacgatccggttga

SEQ ID NO: 394483 - DNA, 537 bp, Salmonella enterica
atgctccttgaacctatgggaataccgggaatatgcccgaagcatgaacgcgcctggatgccggaagaagacgagttgctgataagtctgcatcagtcaatgacctataaagaaatgacacaacagatagaccgtagcgcaaccgcaatcaaattcagagccgcttttttacgccagcaaggacgactgaaatacaaatgccgccctttcaccccatcagaggatgtatttattcgcgctaaccgtcacaacatgacgttacgcgaagtgagcgatcacctgggaaggtacaaatcttctgttacttttcgtgccgcacttctgggcgttagttatcgaaagctcggagactcgcaccgttcaaggaaataccccgacagtgatgtagaacttattcgccagttacgcaacgaatacaaccttacattcagggagataggcgaaaaatttgatttgtcgcctgatacctgctggcaactttgtcaccgccgccatactgccattgatgccatcgcgcgcgagtatatgccgcgataa

SEQ ID NO: 394484 - DNA, 468 bp, Salmonella enterica
gtgaacaatatttttacacctgagccggtaatcagcatcatcattaagaatggctggccggtagaaaattcagcggcgatcgttgttggcgcaccagaattagcggacggggttcatgaactctatacagccccgcaactgacaccggctgcggctgatgtgctggccgaacgtcaccggcagattaccgctgagggctggacgcaggcgcatgatgacgagcaaaaccagtatggcgatcttgtcatcgcggcttcctgttatgccagacacgcttacagtcgtgggtgggtttatgaccctgaaagcccggaggagtatcaggatgaagaagtcccggatgactggccgtgggatgatacctggtggaagcccacggacccacggcgcgatctggttaaggctactgccctgctgcttgctgatattgagcggcgcgatcgtctggatcagaataaccagaaataa

SEQ ID NO: 394485 - DNA, 345 bp, Salmonella enterica
atgaaacgcatcgatatacatgttgaaggtctgagtgcggaggcgcgtgaagacctcgcccagggtatttttgcggcgttcgtaggcgctggccgtcgtgcggttaaaaggttcgcgctggggtgttcgctggcgttcgtgctggtctggggtgtgtcgtgggtgctgtttaaaacaggtgttacccgcgattcaaccgacggcaacagtccgtctaatctgattctgtataccgacgctgcaacgggttgtcagtacctggggaacggcagcggcctgacgccacgtatggacgcgctggggtatcagatgtgcagtgagaaaaccaaaggaggcaagctgtga

SEQ ID NO: 394486 - DNA, 192 bp, Salmonella enterica
atgaaagatgctgtctggctcagtgtgatcatggtggtcgtcgtggtggcggttatgggtgtggggtcgtttgctgcatggcgaaacgttctgcgggagttcgggtatgggtactggctcaggctgaccgtggctatggttgcgctcgtgtgggttatctacggtatttcctggctgaggttccatcaatga

SEQ ID NO: 394487 - DNA, 687 bp, Salmonella enterica
atgaataatcagcagaataaaaagaaagtggtgtttatttgtggcccgatgaccgggtatgaaaattataaccgtggggcctttatgcgaaaagaggcggagttaattgcctgtggcgcgactgttctcaaccctgctgtattaactgacggtctggggcatgagcagtacctgaacatcacgcgcgggatgattcgggtgtctgatttaatttgtctgctgccgggttgggaagacagtaacggcgcaaggcaggaagtgatatacgcgttgaagcgcaatatctggcctatgggctttgatggcgctatgcgggaaaagttaaaagaggtgctgtggatggcgtttactactggtagtcatgcccggcgttctgcgctttctaatcccatgcgtccagcggtgaaaggccgggaagagttccatgtgcctcatgggttccgctgccgtcaggtggagatttccgggtcgctgccgaagtctgaacgtgagtttgccctgctgccccgtcagggtgtgactgacgcagcggagaagctcacctggatttccggggtgctggaagacatgcaacagcgtttcgcgtcgctgccgttaaagctcgatgacctcagcgaggttaaggccgcagcgggtgaagcgtacaacatcctttgtgaggtgctggctaatgaggtgatggaatga

SEQ ID NO: 394488 - DNA, 222 bp, Salmonella enterica
atggcgctcactgtcatcaacgcgcaataccgacgccccggagagctgcatatatacaacatgagcaatggttctgtggctgaggagttgccgaaagttcccgggcgttccggcctgaaatgctataacgctgccggaagtcgcatacataaaaccgccgttattaatgaaataaaaaccgccattaaacggcataaacaaaagtggagattagcaaaatga

SEQ ID NO: 394489 - DNA, 516 bp, Salmonella enterica
atggcgaaactacatcgtatgacatttgatcttgtttttcgtgtctcattatttcgggacgatattgatgtttcccgttttctggtttccgctatggcggatgccagcaccgatgaaagtaatggtattgaactgacgtggcattatcggacgtcaatggcggcactgcttatctgtcgtatacgactgcgtattgagcagatgggtgagttgttgtatccatcactctatgcgggcgctcaggtcgatcacgtactccagagtgaaaagattgagcaacagatgctggatatgtacgccgatgacaatatctcggtggctgattccctggcgtttatgcatgggttggctcgttatgccagtgacttcaacctgcatgagttacgtctggcctgtcttgatgcggctgagcatattgaatctggctgcgagctgcttaatcaaatgaagtctgttcttaaatctgttaaccgtcaccggattaaaaccggggaatatatccgactggagggctga

SEQ ID NO: 394490 - DNA, 192 bp, Salmonella enterica
atggacgcgaaagagtttaaccggaagtataaggttggtacttgctttatccgtaagacgaatctggagttcggccccatagtcaggacggccgggaaggcaaatgactttaaatgtggtgctatcgttgaaattaacgttattccgtattttgtcaggattaacacactgataccagcagtaccattttaa

SEQ ID NO: 394491 - DNA, 207 bp, Salmonella enterica
atgacggtaagagtgacatttgaatttacgcacaccgaagacgggatcgacgttaagtgtgaagttgtgcctgctgctgatgggtgctgtcactgtgaaacggcatttgccgctgaagctatcacacatgttcaggaagtgacgatgcttgttaataacacattaaaggcagaccccgaccttgcgcctgatggttgcgttcactga

SEQ ID NO: 394492 - DNA, 219 bp, Salmonella enterica
atggctactgttttaaatatcgttattgaaagcaaaaatggtcgcattgaaaccgttatgactggcggtggaaaaggcaaagtaacgcctggggaagtcagtcaggttatgggactggcagaagtaataagagatgcgctggccgcatcaggtggtgaactgtacgcccggtttgatgtggcaaaggcgatgaaggctgcgggtgttgaaacgcattaa

SEQ ID NO: 394493 - DNA, 282 bp, Salmonella enterica
atggctaatccagaggttgttactcaggctatcgtgtcaggcgtctggctcgctgagtgtctgatgtcgtcgctcgttgcgcgtggggctgatgtggtttctgtctccgttcgtggcggtatgcctgtagttcgtattaaccgtaatgcgtttactgacgagctgattacggacggtaaagcgtcttatgtttatctggggtgtggagcaagggggaaatacaagcaaggcgtttatatacaggacggttgcaaagtcgtctggtctgaatccattcattaa

SEQ ID NO: 394494 - DNA, 330 bp, Salmonella enterica
atgtcagttaaaaccgaagttaaatcattgcgccgtatttgtatgcagggtgtgacgttcgggacagacaccaatgaattgtcgccgcttatttatttcgccacgaattaccgcaccaataccagaatggtcattcttgatatttacagccgtaatcgtgcgctggctgatgataacagtcagtgggagattgaccggaatgaggagcagcgcatggtgtttccggttcataaccgcgatgagttccgtcatgcctacaggctggcgcggcttgtgcgtggacgtccccgctcccgtgaggcgctttcacagtggaggacgtatggctaa

SEQ ID NO: 394495 - DNA, 894 bp, Salmonella enterica
atgaatgttattacgcaattaaaggacgtaatggatacgcacggctattcacagggccaggtggcccgcgccattggtcgcagtgtcaccgccatgaatctatatgtgcagggtaaatacaacggtgatatcgccgacatggaagaacgtattggcaacttcattcgccgggttcgtgaaaagcaaaacgccctgcgtattgatgaacgtttcgtatccacccctaccgccagaaaagggcttgaggtactggcctacgcccatcaggagtgtgagatctgcgtgctgttcggtgcggcgggtcttggtaagacgatgacgcttaaagaatacgcccgccgtgacgatgcggtgatcttcattgaagccgaccccggctacaccgcgcgcacgttgcttgaggagctttgcggccgtctgaaacagaacaagaacggtaacatccacacgctgattgatctgtgtgtcgaaaagctcaaaggcaccgggcgtctgctgattatcgacgaggccgaattgttgccctaccgcgcgcttgaggtgattcgccgtctgcacgacaaggccgggattggcgttgtcatggcgggtatgccgcgcctgataacgaacctcaagggtaaacgtggcgagttcgcgcagttatacagtcgcgttgcgctggcgctcgatttgggtaattcgctcgatcgtgaagactttgatcggatagccgttgacctgatgccggaagcggaagaccagaagataagaaatgcgctttacgaccagtctaaaggtaatgcgcgccgcctgttcaagctggcgcggggtgtgtaccggacgtgcgatatcagtaaaaaagatgtcagcgtcaaggtgatagaaaagttttcagaaatgttaatccattaa

SEQ ID NO: 394496 - DNA, 528 bp, Salmonella enterica
atggacagtttgtattttgtttacattaatgccgaaggggtgatagctgcatacgaactcacgaatgttaagcattctggtgactatatgcaaggctactgccctacagtaaatggattcaggactttcaggaaagacagggttatagcttacttggattctttcgcggatgctgttttttacctggataatacaattccaactttaaatatagataaaaagaattggatcaaaaaaacacatcataaatatacgaatttagataaacctagttttaatgatgtttttgaggtttgttttactggctttaaaaaaacagataaggacaggctaaaagattctgctatttctgctggtatgatagtccgcagtgatgtaactgcaaatcttcatattctttgttgtggttacaatgctggtccgaaaaagatggaaatagcaacattaaaaggaacgatggtattaactgaaaatgagtttctggattttttaaattcaggcgtaatccctgataagtattgttcatga

SEQ ID NO: 394497 - DNA, 675 bp, Salmonella enterica
atggatttaaactcaagcggggataaaaataaaattgcagggcgtgattataaagaaaataacgtccagattgagagtttggatagtagccagacaatcaatatcaatgttccagctaaggcgggcgaagagcgcccgttagtaaagtcccaacgtgtcagcattcgaaaacttgtaaatgctgtagctgagtctgaaaacacagaaacggctccagtttgggtaaagttgcacgctgaacttggcgtgaacggtgtgagtgagatatcaggtagtcagtacaagtctgcgttaaaattcctcaacgatttactggcagaaagtaaggagaagaaaaccaaaaaaattattgtcgctaagatcttgagcaaaacagaagggcaggagttacgccataaactgaatgaacattgtagtatttattacaaaaacacacggctggatgaattaagccacaatcaactcgttgaaatttatgagtggatagaaaaaacagcccccattgtttcacctgaatataaagaggatatgtctgtttcctttaatgacaatatcataaccagtaatcctgttaatagaacaccatttattgaattgctgacaacgcattctttagtgttcgttatcgtatttgttgctggttttattatgggcgaaattgtttctaaaatataa

SEQ ID NO: 394498 - DNA, 405 bp, Salmonella enterica
atgaacacattaattaaaaaagtccccatcgccagagcgggaaagataattgacggtcgcgaaatcacgcggtcaatgcttaagcattgcgtagagacgtttaacactgattattatcagccaaatataggcgagcttattggcgatccaatggagacagtagacattaaaaatcagggaaaaatagaacgcctgaaactgaaaggcgacactttatttgctgatgttgaaatgtacatgcccatagccgatgtaaaaaagttgtgccagtttccggctattgcatacaggaattacgaaggtatcaaagtagcagcattgatgtacgtaattcttgctgaaatccctaaccgtaaagactgcattgccattaacgattgcgaaatgacagaggtaacaaaatga

SEQ ID NO: 394499 - DNA, 630 bp, Salmonella enterica
atgaatacagaaatcaccattaaaaacgcacagcttatccgttcgggatatcacgtacgcgggttcgttggcgctaacacactactttccattccgaataacaaagccagcaaaaacgccgttgttaaatacctaggcgctcgcattggtcgcatcgataacctgtattactcagatctgcgtgatggccgcgtagaactgcactgcaatatcacatttacgaataactttatcatgctggcggaaatggtgaaaaacaaagcactgtacccggtatgcgtaataaatacccacggaaacgaagcctggttgtctgagatattctttgccaacgaagaggatcgggagtttgacgaacaggaacccattaacctgtcacgcctgcttaatctggtgaacctcatagcggaatcagaatcgccagcagaaccgcaggacgacacgccatacatctacgcaccgggtatggataacgacgatctcgccaactggctaaactctatcatctcatacctgaacactacctatgacagaaaagaagtactcaggtcactggaagcaagccgcaaaaaaatagaggccgaaataggcgagtgcgaaacgtttttgagtaaagccattcgcgcttaa

SEQ ID NO: 394500 - DNA, 309 bp, Salmonella enterica
atgattaaactgcaatgggataaagagaaataccagcatcgcgccagaatttttatgcggatttatagtaaagagaaccatatgctacctcttattataaaaagcattatcaatgaggagtatgcatacgcagggattaaaggaaatcaacaccctgaatatgagacgctaaaaataattagcaatcttatgaaaataaaagaagcccgcgaactggaaaacgcggactttataaaagtatatgaagacgttcatcaccacatagaaagggaagtgacgtccagatttatgtcactcatttttagttag

SEQ ID NO: 394501 - DNA, 243 bp, Salmonella enterica
atgaacgaatccataagagaaagcgttaacaaagctattagttggtataagggcgataacgccgaagttccgacagccagtgaagtacacagagattcgcttattgaagacctgaactatttgcacgatctggcagaagacagacacctggaagaagaccgcaaaataatagccgcaatgattaattatgtggcaagcggcgaagaaccaaacgaaataccaccacaggagattgcagcatga

SEQ ID NO: 394502 - DNA, 279 bp, Salmonella enterica
atgagcatgaaactcaccagatgggttgtattcgaacttgtgcctggcggggacatattgcatatccacgaagaccttatcgactgggacagatcaatcctggatgacatttacaatccgtttgaagagcgttatgtgtttctgattaatggcacacagtatcgcgcctgcaatatcaccattgaagggaggatcgaaccagcaccagaaaccacaccacgcgttgaactctcgccgcacgaggagtacgaaaaatacggtcagtggggtggcgtatga

SEQ ID NO: 394503 - DNA, 1011 bp, Salmonella enterica
atgaccgccaccgcctactacaacgaaatcgatccctttgccgccgcttggctgcgaaaccttatcgacgctggttgcattgctcccggcgtcgttgacacgcgctcaattgaggaagttaccgccaatgaccttaaaggattcacacagtgccatttcttcgccgggatcggcgtctggtcttacgccctgcggtgcgccggatggcctgacagtcgccccgtctggacaggttcctgcccctgccagccattcagccagtcaggaaaacgccagggattcaatgacccccgccacctgtggcccgcatggttttaccttgtatcgcagtgccgccctcacgtcatctttggtgaacaggttgcaagcaaggacggcctcacatggttcgacgctgtacaacttgacctggaagaggcggaatacgccgtcgcagttgtcgatctttgcgcagcgggcttcggtgcgccgcacattcggcaacgcctcttctgggtggccgacgccacttacaagcaacaccaaaaatgcctatcagaatgcagagaaagttatcgcccgcattctggccggtcgccagcagaatctacaggatattgcctgtctcacgggctggcctacaccgacaacgacagcggggaaaggcggctatcagggtggcaggattcgcaacgggaagttgtcaacggatcgtctggatgtggcggcacagatagcaggttgggcaactccaacagcagcaatgaaaatacgttcaccggagcggttgcagggacgaacgccagcaccacacgaagtggagatactgccagtccggttaacggcgtctggcgagatgctgactggctgttctgccgggatggaaagtggaggccagttaaacccggacttaagccgctggttaatgggactcccggaagagtgggccagttgcgcgcctacggaaacgccatcgttgcaccggtcgcggaaacgttcataagggcatacatggaggcggtcacgtcatga

SEQ ID NO: 394504 - DNA, 312 bp, Salmonella enterica
atgagaaaatacaccgcctaccgtcagggcgaagagcgatttgacggccagttataccggatgatagtacgcgctgaacggaaagcgcgggaaaatccccgcgttaacgcaccactacagccgccagtgccggaagttcaggaaccgaagccggaaacaccgaccacgatttgccctgcacgccaagtaatgaacatatacagggaactcgaagcggaaaaagagcaggccaggtgggaaagaaagcgccagatactggcccataaggcagaaacagccgcgcggtatctgaaaaaaaaacatgagagatag

SEQ ID NO: 394505 - DNA, 522 bp, Salmonella enterica
atgaaaaattactcttacctctacttattttccgtcactgccttagctcttggaggcgtttttctttttttctggtggagagctgatatcgacagggcgacctttcttgacccgcttacgttccgatatatcgttctgggttctatgggaggtgcgtttatcatctctttatttcttgtgagtaagggaattataaaagatggtaggatcgataattatctaaaactttttgcgggggtaagcattctggtttttgctctcgtacttatgccacttattacaatcgtttattttttgcctggcgagccttcttcctataccgccccctacgtgtatgttagtggtggctccagaagttgctcaggtgctgaggtttacgaccccgatctacagaaaaatattcgaatctgttatccgtatggtgactacgagaacggaaatattatttatattgagaaacggagtaatattttaggtgcagttgtgacatacgccatgacttcccgtcaggattctgattaa

SEQ ID NO: 394506 - DNA, 375 bp, Salmonella enterica
gtggtgcatgaaaataaatatgttaataaaaaagagtgccgggtcggcgagcgcccgcgcgaggggctgaggcttgtgtattcctggccaaaaaacggcaggatcgcaaatctttttaatggggtaaaaatggagcggaaacggctggtatcggtgcgaatgaggcgtgttgatgatggggtatggcgtttctatgcaaccactgaggaaggcgttcacggcgttatagcgcaagcggtgcttacgcctgataatgtccggcttgagtttccgcatatgggtaagatgccagtgatgttcatgcacatatgccaggccaggcggcatattgaagagataacggggtgtcgggtacggtatcggggaggtctgtaa

SEQ ID NO: 394507 - DNA, 951 bp, Salmonella enterica
atgagttacaccctgcatcacggcgactgcctgaacattctgccgacactgcaaccaggcggcgttgacctgattttgtgcgatccgccatacggcacgataaagggcgcagggctgaactcatggaacgacgacaccacgcagtgggataacgttatcgaacccgtagcgctgtttgccgcgtgcgagcgcgtgttacgcgttaacggagcgctgatattgttcgcccaagagccctacacaagccgcctgataacaaacacgcacaacaatgcgccgttcagttatcgcctggtgtggaaaaaagaacatttcggcgttggactgaacgccagaaaagcacccgtttcgtattttgaagacgtcctggtcttttcaaaagtcgaacgatacgacccgaagtttgatcacccgctgcgtgagtacgccagacgggtaacaacgttcgccggggtaacagcgacacaggtagataaggcgctaggaaacaagaaggcgcaacactttctgactcataacggtattcagttcggactgccgacgcgtgacacgtacgaccagttaatcgccatgtacaacctgaccgcaatgccgggcttcctggtgtatgaagaaatgaaagcgatccaccacaactggcggaacaaccgacaattaccgccacgcgttttcaatctgccacccggaaagcagcacaaatccaacatactggaatacgcccgcgaccgagaaaaatatcacccgacccagaagccggtagccctgctggaagatttgatccagacctacagcaacccgggcgatacggtactggatttcacaatgggcagtggttcaacaggcgttgcctgtctgaataccggacggcggtttatcggtatcgaaaaagataaacgctattttgatattgccgcagccagaattgaagaatcagggcaggtggcagcatga

SEQ ID NO: 394508 - DNA, 519 bp, Salmonella enterica
atgaatcgcataactgcaggtgcaatagcctcattgctcgtagttgccgcagcgctggcatggactacagaacactatcacggtaatgcagtgcactacaaagaccagcgtgataccgctactcatagtcttacgctggcgaacgagacgattgacgacatgactcagcgccagcgtgacgttgccgccattgatgccagatatacgaaggaattagccgatgcgaaagctgagaatgatgctttgcgcgatgacgttgccgctggccgccgtcgcctgtacgtcaacgccacctgtcccacagtgccgacaggtaaatccacctccgccgcccgcatggataatgcagccagccccagactggcagactccgctaaacgggattatttcaccctcaaagggcgagtaacgacaatgcaaaagcaactggaaggggcgcaagactacatcagaacgcagtgccagaagcgacgaggtaagtatgccaacaccacctgtatatcattatctgaaaaatga

SEQ ID NO: 394509 - DNA, 1809 bp, Salmonella enterica
atgcctgcatccccgaaatttaaaacaataattaccgactacggcaaacaaaggcttattgccgccatgtcgccaggcggaacaaaactcacactaactcagatggctgttggtgatggcggcggcaaccccaccaacccggatacaaccaacaccacgctgattaacgaagtatggcgcgccgctgttaactcagtctccgtggataaaacacactccaacatcatcatcgtggaactgttgattccggcagaagttggagggttctggatacgcgaagctgggatctacgacgaatttaataaactggttgccatctgtagtctgcctgccagcgaaaagccattactggaacagggatcggggcgagcacaaacggtacgtatgacgctggttatcagtgatctgtcgactattaatatcaccatcgactcaacaacgataatcgccactaatgactatgttgataacagcctgaaagaacacgaaaagtcacgcaaccatcctgacgccaccctgaccgacaagggcttcgttaagctctacagcggcgttaccagcatagatgaaacaatggccgccacgccaaaagcggtcaaaatagcgatggacaacgccagcgcgcgccttgccaaagagcgtaacctcgccgatctgactaatgttccgctggcccgtcagtccctccagctcggtaacagcgccacccttaacgttggcaccatacaaggcactgtagccgcaggagacgacagccgcatcactggagccatgcaaaaagaccagaacggcgcggatatcccggacaaaccaggttttatcaaaaacgtcggtttaaaagaaaccctgaatccgacaaaacgcgtcagtattggcaacatcggaaacggcgcttttgacggaagcgtaccgtgtataaatatcggcgacagtgatagtggattcatcggtagcgcagatggcgtactggatatttactgcaataacgccaaagtaggttatatcgacaatgccggtctgcacatgctcgcgggcatagcaactaacggtaacgtcgtactacaaaacgacgcgagagaacacatcattatccagaatgcggacggttcggcgcgcgcttatatctataaggacaaagatgatactggtattcacatcaacaatggcgttgatggtgccggggattttgttttaggtaaagacagcatcctttacgtaccattcgcagtccgtgcaggcggcagtaagaaactggctattcagtccgataacaattcagcattagacgccacgttcaatttatggggtgacgctaacagacctaccgtggttgaactggatgacggtcagggctggcacctgtacagccagcgaaatcctgacggttcaatcctgtttacggttaatggctctatcatggctaacactatgcttcatgcaggtgacgccgctgtcgccactgatggaaatgtttacggttctgtctggggtggctggctgaatgactggattaataacaatctcagccgaaaaaataccgccagtctcgaaaccaacggctggtttaaggatgcgtcgaccggtctgattattcagtgggggataacaggcgggaacctgaacaaagccgtcgttaaccttccgatcccattcccgaacgcgggtctttggtcgctgggttgggtagccggtacgctggatatgggtaacgatgactggtcaaactccgccagtctgttaaacaattctcagctaacggttacaaccgatcactggtggagtacagcctggatagcaataggaaagtaa

SEQ ID NO: 394510 - DNA, 1116 bp, Salmonella enterica
atgaatataaagtttaatgtggaaaatgtaaatgggatattgcaagccttatatactctacaggttgaaagagagtttggaattttaggctcacaaaaacttaaagttttattgaatgaaatcaatatgctttatcgacatattccagcagagagaataaccggctcccttaccataaaaatcagagtcacaatatccgatgaagaaaatatcattaatgacttcaaagaaacatctattcaaaaatcatattttgatttagctgaaaaggtaaagtgcaacacatcaaaccatattattattgaaattcttgacaatggtgagttcgtggtttttatttgtcaaaatgaatacgactgtgtggaacttgctaaaaactctattatttataaattcataaactcaactgattatatatacgctaaaaaatatcagtgccaaatcccaaaattatccccagttttagctagtaatttctgtattcctactcttaatggtcttgaggacgctcttgccctttataatagcagggttgctaaatactctagttgcccaactttatctggagtttgggagggtggagtcgaaggtcctaggcttgtcttagtgaataagccagaatcaataatgagggattctctaactaatgcattgagattattattagctcccgatgccgaggttcgaccagaacataatactgatgaaacaaaacctgtagatattaaaatctcatggattggatctagggcttcagctctaattgaaataaaatggctaggacggtctttggctaaatccagaggtaataatattggaaaaatgacttttaccaattattctcttccaagggtacaagaaggcgccttccagcttgctgattatctcgacagagaaataagaagcactagtgcaacagctcacaaaggatatttagtaattttcgacgcccgtagaaaaaatattcaaggtccggatgataagttacaatgcaatgacgcatttcattatgaaaatgatgaagtaaatctggatgttgattatcctaatataagagatgattattcaaagccttacaggtttttcatggaacctaaaaaatcgctcacgacctaa

SEQ ID NO: 394511 - DNA, 606 bp, Salmonella enterica
atggataatatagatataacccccgaggcatattacgatatactggtgctgatgactgatgctccgacatcagttttgccactttcttatattgaaattcatcttttttcttatttaagttgtgtcctggccttatcacaagggcaagcaatagaagaatggggatataaatactcagtaaccactggtggaatacccttttcggtagaacttgataattgcctaaaacatatagaaaacacaggttgtatttatcaagattctaatggcttgtttaatagaaatgataatattctagaaaatgaaatatccatactctcagaaataaaatcgtggggtaatcgcagatactatttaaaagcagcggttgaatgtgccttagctctaccaattggttcaatacgtggggctattagcacatcgccaggaatggatcttagtgtccgactacagcaaagcgcagaattactagaatctgatgatatagatgagttatataatgaatatcaaatcataacatccatccttggacatgactttaaggatttactctctcctgctgtaatgtggttatctgctaggattattcagcagggggagcattaa

SEQ ID NO: 394512 - DNA, 969 bp, Salmonella enterica
atgtgtggaaatgaagatagtcgtattgttgagtcccttgagcataaaattaaaatgaatgaatgcccaatgtgtggacattctgccgaagattttggcgggaaccaaggggaaatggtatctcaactcaaatcaatagatcgagagatgaatatcataaaagaacaacagaaaattatattatctaaaatcaaaagataccaaaatgagttagatgcagctgaagccgaaaacttagctgccgagagggctatcagagagttcgaaaacaaagagtcttataatttagatagaatcaattcgttgaaagataactccagcttaacgcttaaaattgaaaaaatgcaaagggagcgagaatcatttttagagcagggagatgaacactatagtaaaagggacgcactacgagaaaaattgagaacttatgagcgcaagcttaaaggtaggtatgaaaatagtgctgaagcttttgtattaagatttagagaattagcagaatcatttattggtttaccggtggatgtaagtttggatcacaagaaaggttcatctgtatctggatttgggttgaatttaaaaatgaatgataagctaaggtcttctccagataaattatctgaaagccagcgtttctttattgatattgcattgcgcatggctttaactgagtttatgtgtgaaggacctgcgacattatttattgatacaccagaaggctcattagatattgcatatgaagcgagagcaggttctatgttttcaaagtatgtttctgaaggaaactcaatagtcatgacagcaaacttacgtagctcgcatttagttctacgcttggcaggtttagaaaagcaacaaaatatgcaacttattagaatgacggaatggaccgagctaactgaagtacaaaaaagtgaagagtcattatttttgaatgcttataatgaaatcgagagtgtgatgcattaa

SEQ ID NO: 394513 - DNA, 750 bp, Salmonella enterica
atgagcaacaatgatgcgggttacaaaatatttttacccaagataacaaatgcttctttcaaaaattttgatctatatacaaatgaaccaaacatttcagttgatatagaaaaaaatgttttctgccttatcggtgctaatggattaggaaaatccacatttttgaattctattatcttcgccataactggagctattccgacatcaaaccggaaatttctctccgctcatgattattttaaaaacatatcaaaggcaaaggaaaccgaagaatattttaatggtagagtagctgaacatcaaagagaaacagcaagtataagtgtaactttagaatgggataattacattttaaaaatcacacgaaatttctttagcgctaacaaattcaaaaaactaataatcaaagataaaaactccggtgcaatttcagaatatgttgaaaaaaatggtgttgaaataaataaaatatatcaagatgaaatcaggaagttaactgggctaaatgatttcactcaatttgtttttttaattcattttatatctttatttgatgagtccagacatctattaatgtgggattcaaatgtattaaccaatgcactttatctcgcttttggtacagacccttcagaagctcaagatgcagataaattgcagaaagaaatggaaagagaaagttctagaggtcgaaatgcaaaatattcagcccggcaaattacaaatagaattaataatttattaagttaa

SEQ ID NO: 394514 - DNA, 1341 bp, Salmonella enterica
atgatggagttttggaactctgaacttgagcagactgtgcataattcgaagaggttaatctcttctaagttgcatgaacaggatgtaatcgactggctttcagagtaccgggatagtgctccgacttcatcaaatcaggggacgtcgaatttaccctttcagcgttggtttaagtttaaagaggccttttctcccaagtttgttgcagatactttgggggcactgccttataaagttgacacttgcttagatccctttttagggagtggaacaaccgctgttacttgtagaatgcttggcattaattctattggtactgaggttaatccttttttagccgatttaattgaagcaaaacttacacctattaatacagctcaatttgtagaactctatgaaaaaattattaataaccttagtattttaaatgaagatcgtgttctaaccgaaggtatgccaagaacactaactgagccaggggttaaagatcgttatgtatttagcattagtgcgtatgaaacgataagagctattttgcggaactcttataatttaccattagaattcggaagattattgcgtgtgctcttaggctcagtattagtagaaaatagtaacgttgtaattaatggcaaaggtcgtcggtataggaaaaattggacgagtcaatataaaagcggtagcgatgtcattaactctttggatattgctgtagataaggcatgtgcagatattacgcgtttctcagggttacctcaagggcagcatgctatattacgcggcgatacaagaggattgcttccaaaaataaaacacgctgacgctatcatcttctctcccccttatcctaactcttttgattatactgatgtctacaatcttgaattatggatgcttgattatctcaaatcagcaaatgacaacaaagcacttcgtaatagaacatttagatctcatgttcagtctttatggaataaatcagatttcacagcaaaatcatcaactctatttgagaccatttcagaattagaaagaaaaagagctcttttatggaataaaaacatcccagaaatggtcacgtattattttgatgatctatacaatattttctttgaatttaagagaatattagataatggtcatcatgccatagttgctatcggtgatagcagatatgctgatgttcatatcgacgttgctaccatacttcaagaaagcgtcgctgatttaggtttccagttagtcaatcgaggagcaattcgctctatgcgaagtagttctcaaaatggtggtaagctagagctttccgaacattgtttagtttttgagaaaatattttaa

SEQ ID NO: 394515 - DNA, 264 bp, Salmonella enterica
atgaagaagcgtttttccgacgaacagatcatcaggattcttcgcgaggctgaagccggagcctctgcccgtgaaatgtgtcgcaagtacgccatctccgatgccaggttttatacgtggcataagaagtttggcggtatagaggtggcagaagttaagcgacttaaggctcttgaggacgagaatgcctggctcaagaatttgctcgctgagtcgatgctggataaggaggtgcttcaggctgctctgggccgaaagtactga

SEQ ID NO: 394516 - DNA, 207 bp, Salmonella enterica
atgtatataaaacctgcactacttgaagatcaattcattgatatgaaatttattacccagcttactggtctgagcgataaatggttctataagctgatacaggatggcttattcccgaagccaattaagcttggcagaacctcacgatggctgaaaagcgacctagaagaatggttatattgccgaatatatgaatctcgtaattaa

SEQ ID NO: 394517 - DNA, 579 bp, Salmonella enterica
atgaatgagccctacaatgccaaccctaattaccctatgcatcgttttcttcttgaagatataaaccaccacctggatgaaatgtttgagcgttattcccgcttactggtttttcgtatggattttggctggaaacaaggaagtgaacgctcgcagcgtaatctcatggatgagatggagggcgagatacagcacctgatggacgtggtaattggccgaaagatggttattgggtactactgggtaattgaatacagacaacgtaaggggctacatgtacatgccatgctttatcttgatgggcagaagcatcggaaattctatccaacttcgcgtgcgataggggaagaatggcgcagattgactgacaatgaaggtctctttcatctgtgttccaagaaaaagcatttcgttgcaagctccggaacgatagtggatcaccgtaacaggcagtcagtagatgaattacgttacgtaatcagttacttggccaagtctgagcagaagtcacgaggggttattgcaggtatgaacgctatacctccccgcagccgtagaggcaggcccaggaaagaatag

SEQ ID NO: 394518 - DNA, 573 bp, Salmonella enterica
atgttttatcatgaggtccgtcacttcgaaacgcagcagcataaagatgattccacgctgaagtatcttcatttgctgtctgagaaacttgtttttcgtattcgatctgaaccaataatgtccttttctcttccaatgtttgatgaatgggattcttacaaaaaagaatttaaggcaaagatagaagaaaatattgaagttcatatgccagaagatgacggtatatctaaatatgtttacttatgtataaaaaagcatcctgttgaaaagttcgagttcgatttaatccagataacaattccattttacattgttgacaagtatttgtttgatatccaatcaatctgctatgttcgcgctattgatttttgcaatattggaattaatgaatacatgcagagaaataagaagtatctgcatacagcgtatctttcatgggttcctgttgcggcctttcgggatgggtttgtttttgttgcagctttgcacatcgataaagcgttgcctaatcaactatatcctcctaaagccaccattaaccttccttacgagtactggaagtatttaggatga

SEQ ID NO: 394519 - DNA, 864 bp, Salmonella enterica
atgaataatcagcaaggtttgcagccattaaaccattcgctttccggcctgccgcagtgggtgtctgaacgtatattgcagcagataaatcagttaacccactacgagccggttatcggcattatggggaaaacaggggctggtaaatcatccctctgcaatgccctgtttcaggggggagtatcgccggtcagcgatgtggcggcctgcacccgtgaacctttgcgatttcgtctgcaagtcggtgagcgctttatgaccatcgtggacctgcccggcgtgggcgaaagtggcgttcgcgataccgagtatgctgcgctgtaccgcgaacaacttccccggctcgacctggtgctgtggctgattaaggctgatgatcgggcactggcggtggatgagcatttttaccgtcaggtgattggcgaagcataccggcataaggtgctgtttgttatcagccagtcagacaaagctgaacccaccagcggtggagagcgattgtccaccgaacagaaacaaaatatcagccgcaaaatctgcctgctgcatgagctgttccagcccgtacatccggtgtgttctgtgtcggtccgtctgcagtggggattacgggtgatggcagagcggatgattaagtgtctgccacgcgaggccagcagcccggtggtggcgcaactacagcatccctttcgcacgatggtagtccgggagcaggcccgtagcgattttggtgaaaccgtaggtgccatactcgatagcgtcagtgcctttcccctgataccagccccggtgcgagccctcattcaggccgtgcgcatcaccgtggtgtcagtggcctgcgccgtctgggatttcttcttctga

SEQ ID NO: 394520 - DNA, 822 bp, Salmonella enterica
atgacccgtctggcttcgcgctttggcgcagcaaatcttatccgtcgtgaccgtccgttaacccgtgaagaactgtttcgtgtggtgcccagcgtattcagcgaggacaaacacgaatcccgcagtgaacgctatacctatattccgaccatctcccttctggacagcctgcagcgcgaaggttttcagccattctttgcctgtcagacccgtgttcgtgacccgggtcgtcgcgaacacacaaagcacatgttgcgcctgcgccgggagggacagattaccggtaaacaggtcccggaaatcattctgctcaactcgcatgacggcacaagttcgtatcagatgctgccgggattatttcgtgcggtttgtcagaacggccttgtctgcggtgagtcgtttggcgaggtgcgggtgccacacaaggggaacgtagtaagccaagtaatagaaggagcgtatgaggtactggggatttttgaccgggtggaggagaaacgtgatgccatgcagtcgttgctgctgccacctcccgctcagcaggcactggcaaaagccgcgctcacgtaccgctttggtgagaaccaccagcctgtcagtgaatcgcagctactctccccacgccgctggcaggatgagagcaatgacctgtggactacctatcagcgtgtgcaggaaaacctgattaagggtggactcagtgggcgtaatgctaaaggcggacggacgcatacccgtgccgtgcgtggcattgacggggatgtgaagcttaaccgggcactgtgggtgatggcggaaacactgcttacacaactgcagtag

SEQ ID NO: 394521 - DNA, 702 bp, Salmonella enterica
atgacccaggcagagcgccgccatgatcggctggccgtcaggctgtcactgataatcagccgtctggtggcgggggaaacgctgagcgtgcgcaaactgtcctctgagtttggggtgtcggtgcgcacgctgcggcgtgattttcgtgagcggctgatgtatctggacctggaataccagtctggctactgccgtttacgcactgctggcagtgagacgcagatggtgcccgacgtgcttatctttgcccaccggagcgggctggcaggtctttttcctagccttgaccgccgtctggtgaacgcactgctgatgtgtgacgagtctccctgcctgatagcaccagcgaatccggtcccttcaccgtcaggggcattatctttctggcgactgatacaggccattaccgggcgcaggcgggtgacattgcttaccgacgggcagcgctgtgagcggttggctccctgccggttactcatccaccagcaggcttggtatctggttgctgaacatggcggacatatcgccgtattcacgctggatgaaatccatctggttcagcccctgcaggagagtttccggcgcaatgacagtctgtgccgcctggtcgaggacccggtcttcattcaggccttaccccattttcgctttatccagcagtcactgcttgcgtttgttccggctgacaacacaccggaataa

SEQ ID NO: 394522 - DNA, 237 bp, Salmonella enterica
atgccagttattgccattatcgccattgttgtcatcgtcatcattctgaacaaaaccggggtgtccgacagtctcatcgccctgacgcttgccaccgttgccgctctgctgacgggcggcggtgcagccggtgctgccagtgttgcactgacgccgttcgtcggtgtgccggtgggtatttttgtggggatttatgtctttgccaaagtggttcgtctgatttcagggaaaaaataa

SEQ ID NO: 394523 - DNA, 441 bp, Salmonella enterica
atgaaacgtaaaacactacctctgctggcgctggttgccaccactctgtttctgagcgcctgcgatgacaggagtgatgacctgagggctatcagtaaatttaaggaccttaccccgccgcgcttcagcgatttggtcagccgtcaggatgatgtcagggaagagtggtcgcagattgctctctctgggccctctctgcaggtcttacgcacccgccagtcgccagaaggctgcgagggtggcaattactactatctggtggatatggaggaaaaaactgttcagccgctgatgaatgcgttgtgcatagccgacaacatcacgctgcaatatcacgaagagaccgatccacacacccaggagcgattccttgaatattcccatgacggcaagttgatgggacggctgctgataccatcaaacccagataaccgggaataa

SEQ ID NO: 394524 - DNA, 468 bp, Salmonella enterica
atgaaaacacgttcactcacccggcttgtgctggcaggcgcactgctcgccagctttaatgcctctgcggttcccggcctctggcagcagggttacggccagggcaatgcagaatacagcgtaaccgatgccagcgggaagagattcactatcaactgtacaggaaatcctgaccagaatggtttctaccagcattctgtttttctgacccagacagataacagaatggtcagttcgcacgacgacggcaccactatcactgtagtgattaatcatcagcagtacgttattccgtccagcctgggctggcgaaacggggataacgcctggtatgacttcatcagcgatatccgcaaggcccggcagttcgagctctacgtcaatgaccgcaaagcgggtaccttcagcgctgacccgacgaacgccgcgaaggtcctgcccactcccggagactgcggtaacgactga

SEQ ID NO: 394525 - DNA, 240 bp, Salmonella enterica
atgtcccagccagtattactgcctccggggactttcacccggacgcaggcggaagccgtcacgatagcgtaccgcaatatcaccattgaagatgaccagagaagccattttcgcctagtcgttcgtgaccgtgaaggctgcatggtctgtcgggtatggagttttgagtctgacgccggagccgggcttaacccgtatatccggcagtacggcattctgaaggagccatcagcacactaa

SEQ ID NO: 394526 - DNA, 450 bp, Salmonella enterica
atgacacagcacatccttacaccggctaacgagccacagttaattctcaccgccacggcagtacctgacgaacagtgtatcgatttctggcctcagcacttctgctccatcccgcagtgggtagcgctgcagccgcgtattttcgcctggatgaaccgcttctgtgacgaatacagcggtggcatctggcagttctacacgctgagcaacggcggggcctttatggcacccgatagtgacagcaatgaggcatggagtctgttcaacaaaatgaacggtaatagcgcggaaatgagtgcagaagccgcaggcattgcggtctgcctgattgagtacagccatcacgcctgtcgtactgaatgcgatgccatgacagagcactattaccgcctgcgggactatgccctgcaacaccccgagtcacaggccattctgcgcattattgattaa

SEQ ID NO: 394527 - DNA, 480 bp, Salmonella enterica
atggaaaaactactttccacacagactccggcatttccgctgactgtacaacgcacgataaaacgcgctttaacgctgcttgatcaccacctgcgtgaaactggtgtggcattcacgtccgcccaggctgcccgtgactggctgaaattgagaatggcgggactggagcgcgaagagttcatggtgatgtacctgaaccagcagaaccagttgattgcccacgaaaccctgttcaccggttcaattagcagcaccgaggtacatcctcgggaggtggtcaaacgcgccctgtatttcaatgcagcagcagtgatactggcgcataaccacccctccggggacaccacacccagtcaggctgacaaagccattacgcagcgtctggtgcaggcacttgcgctggtggacatacgtgttccggaccaccttatcgtcggtggtaaccagatactgtcgttcgctgaacacggtctgttgtga

SEQ ID NO: 394528 - DNA, 318 bp, Salmonella enterica
gtgaatgaaatgacctgggacctgcagcgtgacgtcacaccacgcttcggtgcccggctggtgcaggagagcaaccgactgcactatctgtctgaccgggccagtatcaccggtaagttcagtgacgttgaatgtctaaggctggatgaagcattcccgcactttgtccgtcagatggaattgatgctgaccactggcgagctgaatcctcgccatacacactgcgttaccctgtatcacaacggtttcacctgtgaagctgatacccttggttcacacggttacgtctatatcgtcatttatcctacacaacgctaa

SEQ ID NO: 394529 - DNA, 312 bp, Salmonella enterica
atgaaaaccttacctgcaataactcagcgggcggcgaagccatgccctccgcctgtggtggtctggcagacgttgctggcccgactgctggatcagcactatggtctgactctgaacgacaccccgtttagcgatgaaatcgttattcaggaacatatcgaggccgggatcacactggctgatgccgttaactttttggtggaaaagtacgaactggttcgtatcgatcgcaaggggtttagttggcaggaacaatcaccttaccttcgggctgtcgatattatgcgagcgcgtcgggcgactgggttgtag

SEQ ID NO: 394530 - DNA, 1731 bp, Salmonella enterica
atgactacccccctcgataaattaatctcatgcaattctaaacctgattttgccaggcttttaggtattgaccctgtatttctgacccgcgtagtttatattagaaataccaaaaatctttactctcaatttactataaaaaagaaaaatggcagcgatagatttatctcggctccagacgatgaattgaaggaaatccagaggaaattatctgatttactccaagattgcttaggtaacatacgagagtcattaaaagttgaaaataattactctcacggctttgaacgaaataagagcatagtcacaaatgctgaaaaacataagaataaaaaatgggttctaaaccttgacttgagtaacttttttgatgattttaattttggtagggtaagggggtattttcttaaaaataataacttttcgttgaatgaggaaatatcaacattaatcgctaagattgcttgccatgataataaactacctcaagggagtccttgctctccggtaattacaaatcttattcttttttcattagatcgacgtttaagtagattatgtcaacaagttggttgcacatatactagatatgcagatgatattacaatttccacaaataaattgctttttccaaaaggtattattaagtcacatgaagaggaacagattgttttaaacagtaagtttctgaaagaaataacttcttctggtttttctttaaattcggataaaataaggttgcatgatagaaaatgccgacaagaagttacggggttaacagttaataaattcgtaaatgtcgataataaatatgctagaaaagttagatcaatggttcatcatctatttacacaaggggagtaccagctcgttgacaaaaaatctcgtgagaaaagaaatgggaaaataaatgaattagctggtatgcttggatttatagattctttagataaatacaataattcgttaccccatgatagaaagaacaccctcaacaaacgtgagcgattatatggcgaattcctttattatacagctttttgggctaatgtaatacccgttattttaactgaaggaaaaactgatattacttacttgagggttgcactaagtaacttagcttccaagtatccgagtttaatcggagataaaaatttaggcaataaggttgtccatgattataaaataaagtttttcagaaacacagctaaaaagaaatactttcttaacctagatggtgggacgtcacatcttaaagatttcatggtgaagtttgataaaaaaacagatgatttcaaaatggttgcaactcaacagcctgttattatgattttagataatgattctggaagcactggctcaaatggaatatttaatgctttagttggtaagtcttttccaaatattaccgttcctgtggaggttttgcgaaaccaaaaatgggtttgggttactaaaaatttatatcttattttcactcctcttaacggtaaagacgacagctcgatggaagatctttttgaagactcagtactccaaaggaagcttggagggaaagttttcaacagaaccaataaaaagtgtgggcctaacgaatatggtaaagaagtctttgctactggtgtggtattaaaacaacgcgagaacataaatttttctaaattttcttcagtttttgattcagttctggagataattcaacatcatgcacatcaaaaatcttcaagttaa

SEQ ID NO: 394531 - DNA, 519 bp, Salmonella enterica
atggaagaagcacaatccccaaagggttttagctggaggcgattaacgttatctttccttattttttgctatatcatgacttacacactattttctctgaaatatctatttatgtcatggtcgagcgacttcagttatctttctgctcttttatctttatcttatgatcccattgccataaaggaaattaagcttgctctttttaccattgcgggagctctgcttggtggggccgtcttgggaattacctcactgcataaatatgcagctgttgagaaaacacttgatgttgatcacatttgggggtatctcatggcacctgttctttcgattgtcatcggtgttcttatattttgttttctttacagtgggataatggtgctaaatggcggtgctagcactaacgctgaacaaaccagcgttaaaattggatatatgtcactgggtgctatatgtgcatttaactgggaggtgtttgtgattaagctccagaaactttcccggcatctatcagattga

SEQ ID NO: 394532 - DNA, 2541 bp, Salmonella enterica
atgaaattaacccttacccagcttgaaacattgctgctccgcgcttgtgatgacctgcgtggcagcatggatgccagtgaatacaaagaatatatttttggcatgttgttccttaaacgtgccagcgacctgttcgatcaacgtcaggctgagctacgtaagcagtttgaagctcatgggatgtccaaactggacatcgagctggctcttgaagatcccgacaactactcaggtaagtatttctatgttcctccgcgtgcacgctggaacgaagagtgggaagagattgtagaagagaaggatggcactaaaaaagcggtcatccgaccggccctgaagcatgtgaaagttggggttggcagcgcgttgaataaagcgttggaagcgatcgaagaagccaatatcgatgttttacaggatgtactgaaaggtattaactttaaccgtaagattggccagcgtactctggacgacgataccttggctgattttgtacagaacttcgagaaaattccgcttaaagatgaggactttgagttccccgatctgcttggtgcggcatatgaatggttgattaaattctttgctgactctgcgggtaaaaaggctggagagttttataccccggcggaagttgtgcggatctgtgttgagatctgcgatcctgaagagggcatgagtgtttatgacccgaccgttggctcgggaggcatgctgattcagatgcgtgactacctgcgcgaaaaaggcggtgatgcggatgaaatcgcgctctatggtcaggaaaaaatcggaaccacctggtctatctgcaaaatgaacatgctactgcatggaatttcgcatgctgatattcgtcaggaagatactctgcgtgaaccacagcattacgatgaaaagaatgatttaagacgttttgatcgtgtagtggctaacccgccgttcagccagaactatatcaagaaggatattaaacaccccgggcgttttgctgtttggctgccagagaaaggcaagaaagcggacctgatgtttgttcagcatatgttgtctgtgctgaaacatgatgggcgtatggcgactgttatgcctcatggtgtgttgttccgtagcggtgatgaacgcgaagcgcgtaaatactttatcgatcacggttatctggaagccatcattggcttacccagcaacctgttctacggtacggggataccagcctgtattttagtgatgaataaagaaggtgctgcaaaacgtaagtcagttttgtttatcaacgccgatcgtgaatacagcgaagacaaagcacagaatcatctgcgtccggaggatattgataaaattatcaacgcatatcgcaagggaaaaacgatcccgggctatgcgcgcgttgttccaactgatgagattatcaaagaagattacaactgtaatattcgtcgctacgtggacaatgcgccgccgccggaaccccacgatgttcgtgcgcatttacatggcggaattccgctggcggaaatcgaaagccttggccatttctggcaaaactatgtcgggttacgcgcagatatttttgtgccccgtgatgcagaatatatgaatttttccccgtcgttggcggagaagcgtgatattgctgagtttgttaaccgacatgtgggtgtactgcaagcgaatcagacgttcatgacgcaactggaagcgtggtgggagcagaatctcccgattgtggaagcgctagcccctgacgctgccaatcagcaggcccggccacgtaatgtttatgtaatgcgcagccagttgatggacagcattcatgacgcatttgcgcagcaaaacttgttaacttccttccaggtgcgcggtgcttttgccagctatgtgaactacctgaaggcggacttcaaatctattgccgctagtggttggggggcagaactgatcccggatgaggatattctgcaaagccagttccctgaggtactggaagagcaggctaatgcacaggcccgtttagccgagttgcaggcgttatttgctgcagcggatgatgaggactttgaggataccgatgatactggtgtgatgacctctgaacaggtgaaagaccttaaagcgaagctgaaagatgcgaaaggcatggttaagcagtgcaaacgtgatccgggattgggaagtaccgaagagtaccaagaaaaggccacacaaatcgaagcacagttgaaacggcataaggctctggaagatgaagctaaagagctgaagaaagttattaagactatagagaacaagcgtgatgtgctggttttaagcgctcgtgaaaagatctcacaggatgaggcacgtgtggttatcgttgcgcgattaaaacagttgctgttaaacacttataatcgctatttacggacagagcagcgagcttgtattactgcaattgataatttgtgggttaagtatgcagtgaccgctaaagaaattgaacttgaaagagataaagcaacacaacaactaaagatatatttagcggagcttggttatgagtaa

SEQ ID NO: 394533 - DNA, 1296 bp, Salmonella enterica
atgagtaataacaaatttgagcggaaggaagaggtgtatgttcatctaagtgaatttgctgaaattactatggggcaatcaccagattcttcgggttacaatacgaaccaaaaagggcttccttttctccagggatgcgctgaatttggacgccggtctccaactgcaaaagtgtattgcaatccaccattaaggatttcaaaacctgattctattttgataagcgtccgtgctcccgttggaactctaaactggggggatgataaatattgtattggtcgaggtttaagcgcaattagggctcgtcaaggtattgctgatacaaaattcctgagctatgctattcttaataaggttgattttctgcatcgtcgaagccaaggatcaacatttttagctattagtgctagtgatcttcgtattttacctattcccaaatttgatctcgagtcacaacaaaatataagcaaaattatacaatcaattgacgatgccattgaaaaaactgaggtgttaatagataaatataataatattaaatacgggatgatgtatgacctttttacaagaggtattagctcaaatgggaaattacgtgaaaagccaagcaaagccccccatttatatagaaatacggtattaggcgtgttgcctaatgaatgggaaatattagatttgaagagtgtttttggggctggtaatatagttaatggtccttttggtagcgatcttttaacctctgagttaaaaagcgagggagtccctgtaatatattgccaggatatacgtccgggtgttttttctaaagtttctaaagcttatgtaactttgcaaaaagctgctcaacttgctttttgttccgtgcgtacaggtgatattattttatcaaaagttggttcgccgccttgtgatagttgtgtttatgatagtattgataatgcaatagttacgcaagatgtaattcgaataaggccatctagtgatcataactcttctttcttctcggcatggttttgttcagagtttgggcggtcagcgattagaaaaatatctatagaaggcactcgtgagcgggtatcgttaggggattttaagtcattattactgccaatccctaataaagaggaacaagatagaattggtattaaactttcatgcattgataataaaataaatatctctaagcgttaccttgagcaattaaaatataaacgtttaggattaattgatgatcttctttctaaaaaagttactgtagaaaagaaaatcactaaatcagaggcaaccaatgtctga

SEQ ID NO: 394534 - DNA, 3267 bp, Salmonella enterica
atgtctgaatacacggaagttgaacaaccctttctgcaacagctgcaatcactgggttggacaattattgaccagggacaggacatcccctccgatccggctaaaagcatgcgcagcagcttccgacagtggctgctgccgcaggtttttactaatgtaatagcgcatttaaataccggatcagacggaaaaacatggttaactgacaaacagttacaggatctgcaagaacagatcctgcgacaacccaatcgtactctactggaagctaatgaggcgatccaaaagctactgtttaaaacacaggtggatattaataatgccaccggtgagtctgatcctatagttaaattaatcgatttcgaacgcccggaaaataaccgctttctggcgataaaccagttccggattgataccccgggttgcgtaaaacaatttatcattcccgatattgttttatttattaatggtattccgctgattgtcgtggagtgtaaaaaaggtggtccaacctgttctaatccaatggctgaagcatatattcagctccagcgttatatgaacaatcgtaaagcaacagcgctgcagggattaaaagagggggagccacgtttatttcatagtaatttatttgcggtcagaacaacaggcgttgaagcggattacggcacgattacttccggggaagagcatttttatccctggaagacacaatggccgcaggaagacaatgttgccagcgatatgaacgcacagcaacagctaatcaatggcatgttaaataaagcgaatctgttatccatcctgcgtacatgctctgtatttatggataccgatgctggcccgcgcatcaaggttgtctgccgttatcagcaatttcgcgctgctaataagatcttacagcgtttacgtgaaggtaaaaccacagaagaaaaaagtggtgtagtctggcatacccaggggtcaggcaaaagcctgacgatggtttttgttgcccgaatgctgcgtgtttcaaacgatcttcacgattacaaaatcatattgatcaacgatcgtctcgatctggaggagcagttaacagcgacggcacaactgatcggtggacgagtcaatgtgattgaaagcaacaatacgctacgaaaagaattagccaccaacacttccgatatcaatatggtgatggcgcataagttcctggtcgcgcaggaaagcctccccatatccgttgctaaagcgctgggaacctaccaggctattccaacgggcaaaacatttggcgtggtgaatacctcttcgcgaattgtgttaatgatcgatgaagcacaccgtactcagagttcagatctgggcagtaatatttttgaggccttccccaatgcggcccgcattgccttcaccggaacgccactgattacagaacgccacggtgagaaacgtaccgtcaaacgctttggcgaatatatcgataaatacaagttgatggatgccgttgaagatggcaccacattgcagatcctttacgaaggcagaactgctgatgccgcgctgaacgataaacatggctttgaaacgcagtttgagaatctctttaaagaccgaacggaagaagaattagacgctattaagaaaaagtatggcgccacaggcgacattctggaagcagagcaacgtattgcagctatcgcgcgcgatatggtgaaacactatctggagcatatttttcctaatggctttaaagctcaagtggtgtgtcactccaaactggcggcagtccgttaccagaaggctatccatcaggcattaaaagagaaagtggatgagcttgaatctgcggacgtacctgaccacgcattaattaatcggatcaagttcctcaaagctgcggtcgtgatatccagtgatggcaccaacgaagcggcatttattaccgaaacacgcaagcaagcccgtgcctggaatgcggtagaaaatttctgtaagccatttgcgtttgacgatcctgataaaccttatacaggaattgccttcctggttgtctgtgacatgttattaaccggttttgatgcgccgatagagcaggtcatgtatctggataaaaaaatccgcgagcatacgttattacaggcaattgcccgtacaaaccgggtgaaaaaagggaaacaacgtggttttgttgtggattatattggccttactcaccatcttaccgaggcattaactctttatgcagccagcgatgagcaccaagagctggccgaaggattaaaaaatatcaattcagaagttccggtgctgcaggagcgctatcagcgcttgttgagtttgttctcgtaccatcagattaatggcatccatgatttccttgagggacgattacccgacatagcagcagaagcagccgcggtaaacgacgctgttcgtttgctgaaagacgagaaactgcgggcggattttgatgtgtacctgaaaaaattcctcagcagtctggatatcatcctgccgcatagtgcgggccaagtttatcgtattcctgcaaagcgtctgggatatatccagcgagtaaccaaagagcgttataaagacgattcgctggatttgggagatgccggccagaaggtacgcgatctgattaatcagcacctcatcagtctggggattaaccctacggttcctcccgttgaattgctctcagataacttcattgaacagctaaatcagcataccaacggcaatgatgaggcgaaagccagcgaaatggagcatgcaattcgtaagcattgcactgttcaccatgatgaagatccagctttttataagagtctttcggaaaaagtggaacaattaatcgacctgtatcaggatcaatggaagaagctggcggaagagttagagaaactgcgtaacgttgcgattaccgggcgccaagagggggaagaggggatgagccgggaggccactacgttttatgaacatattgctcatgaagcgttcccgggcggagaaatacccgtttcagtagaacccaaaattaaagcgctgatggaagcaattgttgaacttctgcaacaaagcatcggcagcatcgactactggcacaacagtagcaaacaaaagaaaacgcgcagtgagatcaaaacggctctgacgctaaccggggttcctgaattaaaacaggcaagagaacgaattgcggtagaaattatgaaactggcaaaaaaccgacatagtgcgttactccagaactcagtggagatcaaaaaaccatga

SEQ ID NO: 394535 - DNA, 717 bp, Salmonella enterica
atgatgcaccgacgggtgaaggacatcgactatcatctcgcgccaggtaccacccggcgtacaacggacatcgtcatcgaaagagatggtcaggttatcgttcgcccgccagtacactttactcctgaacaggcggataccgttgtttttcagaaacgcatgtggatttatcgtaacctggcggagtggaaagatcttaatgccactacggtggcgcgcgaatgggtaaacggcgagacctttctctatctggggagcatgtatcgcttatctctggtttccgatcagcatctgccgttaatcctgaaagatggacgcttttgccttaatcggcagcttattgaaaaaggcggtatagccgcagcgaaaggcgcgtttgaagacttttatataactaaaggtcagcagcgcatcagagaacgcactctgttttttgcgcctaaagtcggagtgaaggcagagacaatccgggtgaaggaaatggggtatcgctgggccagttgcggccataacggtacactgaatttccactggaaatgtatgatggccccagcgaagatcatagattacatcgtggtccacgaactatgtcattttcaccatcgtaatcatacagacgctttctggaatgaagttgacaaggtgatgcctgactggagagagcgtaaggagtggctgcgtaaacatggcgctagtctggatgtagtggtcaactga

SEQ ID NO: 394536 - DNA, 1746 bp, Salmonella enterica
atgttaaacgaacgccagttaacccttgtcgagctccttgaacagcagcgatggtcgttgagcgaactggcgcgacacactggcgtttcgagccgcaccattctgcgcgatattgattacctgaacttcacgctcagcgataaagcgcgtattcagcctggcggtaatgcgggttatcaactgaacattgtggacagacgtcgctttttccagttgctgcaacggcatgataatgacgatcggttgctggcattcctgttattgcaggccttttccacccgcgcccagctcgcgtcggcgctcaatttaccggagacgtgggtgacggacagattgccgcgcctgaaacagcgttatgaacgcgcattctgcatggccagccgtccgggcgttgggcatttcatcgatgaaccggaggaaaagcgcattattctgctggcgaatctgctgaaaaaagatccgctgctgattcccttaccgggcattacgcgaacagttattgaacagttgcagcaggcatgtgaagaggtggatgattttcccctcgtgcctggcgagtatctcgccagcctgacgctggcggtttacgccctgcgcaatcagctcactaccgcatggccggaatgtcggcatacgtcactgaaaaaggcggtggcgcagggagggatcgacatgggcgagaacgcgttcggaacgcttatcggccttctggaaacacagcaacagcaggcaatgaccctctccgctgacgccgtatgttctctactgcaacgcgtccccggtgccgcctcgttgaacattattgatacccaactcattgataacattaccggtcatctgctcagatgcgtatccgcgcccatatggttaccggagcatcgtcagagcagtatgaataacctgaagtccgcgtggcccgccgcgttcgacatgagcctgtgctttatcgcccagttgcgtgagcaggtagagattccgctgttcgatagcgatctgatcggcctctattttgcctgcgccctggagcgacatcagaatgagcggcgtcctatcgttttgttatccgatcaaaatgcgattgctaccattaatcagcaggccattgaacgggatgtgctgaattgtcgggtcatgattgcgcgaacgcccggcgaggtgaaggcgataagtcaggagattgttccggtccttatcatcaataacagccactatttgctcgatgaggggcaaaagaatgtactgtcgttcaggaatatcattaccgcctccgctaccgagcagatcaaaaactttcttgccacggcctttattcgccaacagcctgaacgcttcttttctaaggcaggaagttttcattacccgaatatcccaggggaagactggaataccatcaccaggcaaatttgtgaccggttagtgagccaggcccacatcaccgaggatgacgcgctgcgaatctgcgccagggaaaacgaaggcgagaacctgattatcaatcacctcgccatcccccactgctggagcgaacgggaatcaagtttccgcggattttttatcaccctggcgcaccctgtgcaagttaataatgagcccgttgaccgcgtgctgctcgcctgcgctgccgctgctgcgcgtcacgagctgaaaatcttcagttatctggcgagcgttatatgccgccatccggccgacacggttcgcagattagacggctatgaagcatttattgcgctgttaaatcagtga

SEQ ID NO: 394537 - DNA, 453 bp, Salmonella enterica
atgccaccaaaagaacaaaaaatcattaataatcaaataataaagtcacttgatgcccgtagtaaaccttacaaattttctatcggcagggggctctttttgctggtgaatccaacggggtcaaagtgctggcagatgaagtaccggatagagggaaaggagaaaagcctcacatttggagcatggccggatgtgacgattaacgaagccatcaagctaagagaagaagcacgaaacaagctcaaggatggctacgatcctgcacgtgataaagctcaggaaagagaacaacgtcatcagcaacgagcccgacaatcctttcaactttccctctcagagcattacggcttaaccatcaaaacaaccaaacagaccctttcccttacgccagaacaaacccaggctgtcaaagcattcttgctttcaggaggaaacaacgatgccattaactga

SEQ ID NO: 394538 - DNA, 339 bp, Salmonella enterica
atgaaactaaaattacttacattacttttcctctttattattcccgggatcagtgtctctgcctcagcagccgaagaggtggcgaaaactatatattcctgtaatgacaacaagacaatggaagtcgtttacattaatacaactggcggaaactcctacgccatcattaatcaggtaaatgagatgatacccatgaggttaatgaagatggcttccggggctaactatgaggccatcagccaggattacacttacaaactttatacaaaaggaaaaacagctgatttggtggaaggtgatgataagccggtactcagtaactgtttatcagacaattaa

SEQ ID NO: 394539 - DNA, 198 bp, Salmonella enterica
atgcctgcccgaacattatgccagaaatttttccgtggcgctctgagcccgtttcatcaatatcgtcagaatgctcttcttgatgctaccgtggctttgacccgtggctttgacccgtggtgcatcacttactctgacaagcatcggtcgctaccttcctggttcagcacaagtcaaaaacaggataaaacgcgttga

SEQ ID NO: 394540 - DNA, 456 bp, Salmonella enterica
atgagcggcacaaaggccaacagaccaggattaaaacgcgctttaaaggcccttaaaacaggcgatacgctcgtcgtctggaaactcgacagattaggccgcagcgttaaaaatctggttgcccttatttcagaactgcacgagcgcaaaatccactttcaaagtcttaccgacagcatcgataccagtaccccaatgggcagattcttcttccacgtaatgagcgccctggctgagatggaacgtgaactcatcgtagaacgcaccaatgccggtcttgcggctgcacgcgctcagggtcgtattggtggccgacgtccggcattgtccccggatcaaatagcccagataagccggttaatcaggaacggccatacccgcaaacagctcgctataatttatgatgtatccagatcgacaatttataaatacaccccattaaatgttgacaggtag

SEQ ID NO: 394541 - DNA, 273 bp, Salmonella enterica
atgtcaaccgtaagtcacaccctcgatccagattcaccctggaaacaaatcaccagcggcaaagaagcacaacccgtactggttcaggtcaccagtggcgggctgctgttttgtgagtctgccacacttccggccagtaatgccgctgcgcaccatatgcccgcaggcccgaccgcattcatttcagtatcatctcctaccatcctttggggcaaaggctcaagggagctgtcagacagcgttatcgtcgtcaccggtagcgatattgtttaa

SEQ ID NO: 394542 - DNA, 381 bp, Salmonella enterica
atggctatctacatcaaatccccgtcgccaaccatccagcagttacctgatatcgacccactaatgatagccgggttattcggttcactgtcggctggcccaatggaagtcgtaacagacttcaacaccgcgctgatgggctttatgcgctcaacagattcagtacccaatgtgccagaccccggctggccgtggggcatggtatggacggtctcatcaaaaggcactggctccacaggcaggcgatacatccccgccgttctggagccgggagaggtaacacatcaatttttctacaccacgcagggggcgctttattcgcgcggtggtatctggttaacgggctggggaaactggcaaatgaggtgggctaaagaatga

SEQ ID NO: 394543 - DNA, 381 bp, Salmonella enterica
atgataataacgaatacaaacacgctgggcgcacagtccgggcaatcagcagcgccaaatctggcagatatgatagcgggtcgatttggtctgcttcatgccaaagacgcgccggaatgcgccgatctggatgccccgatagtgggctacatgaaagtaacccctgccacgaaaaacaacccgcagtctggcaaactggcctacggaaacttgcagacgtgggattcactgggttgcggtgacagtggcgatcggcaaataccgccagtgggtgagattaaagagtgggtaatgcagcttttgttcatggcagacggcagtctgtacacccgcgcccgaatcaacgccggcgcatttcagccgtggatcaaacgctggtaa

SEQ ID NO: 394544 - DNA, 225 bp, Salmonella enterica
atgaaaaaatcttattgttctccatgtctcagcgaagcacgtgtaacacaaattgcccttgaaatcgtgaaaggaaacctgcatgacctgacagtcggacaggcctgcagggtgttacatgaggcagaaaaaataatcggtgcaacaatgacagttgactgtactagcgaagagtttcggaaagctgacgaagtatttcaggctactgctcctgaatcaacttga

SEQ ID NO: 394545 - DNA, 162 bp, Salmonella enterica
atgaaagatgaaactatacaactactcttatgcgcccaaatcacttccctggcataccagattaaaaagtctaaagagcgatacgatcctgattatccttatctgcgtttcggggctggtaactgcatcaacgaggctatcaagttgattcaggagcagtag

SEQ ID NO: 394546 - DNA, 549 bp, Salmonella enterica
atggctactacccctaccccgtcacaatctaaaatcgtctatttgccgtatgtatgcgccgttgacccggataactaccagcttgcccgatggatacgggagacagaaaaccagcttcttgaccgcgtaaaggccgcgcttgatgaagctggcgtagcctggatagacatgcgcaccaaagagcgcagcaagcccgccgatagtgatataggtcacaattcgccaatggtggaagttggaaatactgacagcgcggagggatgcgaagatattcgctacgccatacgtcaacatctgtactacggcgataagctaacccgtactttctacctttcgtgcgtcttcatctgcaagaacgccgctcaggaatacgcagaacggtacagacatgagttcaaaaccgggcaatttaccgttcagtgtgaagtagcggaactgacgccgcagatcgtcaacgagatacgccacgaatacggatggaacaacccgacaacggtttaccgggcattgcctgacaactggcgggaggcttccgacaatgcgcaataa

SEQ ID NO: 394547 - DNA, 765 bp, Salmonella enterica
atgagcgccatttcagcaatgaatgcaggcaaagaaaaagcgttgcacttaacgatctgcaatcagtacgttgggggtaaggcgtggtgctcactcgttgcggtttacgaccatttttccgcagtatccatgatgcgccacgccgcctacaatggcgcggtgttctttgatggtgctggtatggctcctacctacgtagacaccaacgacacaccgcgccgcccctcaatggtgttgctggtgggggagcgttcgcgctcgctggctaacctgcttgccggtcttcccatccctgccagtaacgccaccagcacggcagtaaaaaaacacttgcacacttataacggcttgggttacgtttatcccgcacctcataaaacgggtgtcgggattgagaccccgaagttgataaaggcgacaccagacgccgcaagcgtctttttttgtgtctgctatatgcgccattcaatggcgtggtacgccaaacagcagggtagctacaatcgccgctcccctgcgatcctctcgtaccatgccgccaataatggcgcggtgtgtgcttctttggatggggtagggttacggtcactttccttacttcgccgcacaccgcgccgccaaagaatggtgacgttggcggggcagccgcaaggctggccggttccctttatcgccggtagtctcaaccccatcaacgtcaccgcccctattgagattgagacctctagcggtgactccttaaatcagataaaggaggccgcataa

SEQ ID NO: 394548 - DNA, 201 bp, Salmonella enterica
atgtcaaaaataaacaatgatcgcgttgtacgcgaaaaagaatgtagagaacttaccgggttatgtcgcgctacgcgttttctttgggagaaaaaagggagatttcctgcacgccgtaatctcggtgggcgctccattggctggttattgtcagagattcaggaatggcaaaatagccagacgaaaagagatattgaataa

SEQ ID NO: 394549 - DNA, 1227 bp, Salmonella enterica
atgagcaatgcaacaaacaaactgagtgactcgacgttaaaaaaaatgtcgggcaaacctaccgaaaacgattgctttttctccgatggcgacgggttacaaattaagcactcaaaaagcgggctccttacctggtattttaagtacaggacaggcggaagggacgagcggcaatatcggctgaggctggggaactacccggacatgtcgctaaaagcagccagagaaaaacgtgcgcagtgtcgcgcatggctggcagagggtaaaaatccaaaataccagctaaacgtaacagtccaggaaacattaaaaccagtgacggtaaaggatgctattcattactggttaaaagaatatgctgcagataaacgaaaagattgcgaaaagctggagaagaagcttaataaacatatcattcgttatataggtgatattccgttagtgcaatgcgagactcgccactggctggaatgttttgacagaataaagcgtaaatatccggttgtttccggtcatatgctacagacctgtaagcaggcgcttaaattttgccgcaggcgtcgctatgctgtcagtaatgtacttgatgatttaattgtctcagatgtaggtaaaaaagcagaaagccgggacagggtacatactccgcaggaaatgagggatatattaagagcgcttgataatggtgtttataatccttattacagcgcattaatgcgtttactgattatattcggttgtcgaacggcagaggtaaggctttcagagattaaggaatgggatttaaaggaaaatatctggattgtaccgaaagagcacagcaaaacgaatgtagccatatacaggccaattcctgacgctatccggcctttgattgaaacactgataaagcagcacaggcacacagggctattgctgggcgaactgaaagcagatacaaccgttagccagtacggacgacaggcacacaagcggcttcatcatcagcactggacgctacacgatttccgccatacgtttacaaccatgcttaacgatataggcatagagccgcacattgtggagcacttgaccgctcaccagatgccgggaatgcaagccagatataaccacgcccgctaccttcctaaaaagctggaggcgcttaatctatggatggagcgcttagatattctcgcgggtaagtctgagaatgttgttgttatggagccagcaaagcaaggataa

SEQ ID NO: 394550 - DNA, 537 bp, Salmonella enterica
atgaaacgtttacttattgctgcttctgtattgtctgctatatttatgagcgctggggttttcgctgctgattctgaccagggtgaattaattattaccggtaaggttgtgggaactacctgtaaatttaccggggagactaccgccactattggtatgaaccagattggtgttgatcgcttaaatggactaaatgctggtgatgtttatgaaggatattcaaataaaaccaccgcgccgctgacggttgaatgtaccggggataaagcaccacgtattactttttccagctcacaatttgatagtacgcgtaactttattacccgtaatacggcatcggctaacggcgctggttttgtagtctactatggtgagggctttactcagcgggttaatcctgatgatggcattgggttaacaaagacagcagataataaatatacgttgaattttagcgcgcgttatgcaaaacaaggcaccactgttaccgctggcgatgtcgcctcctcgctgaccatgaccgttgttactgattaa

SEQ ID NO: 394551 - DNA, 648 bp, Salmonella enterica
atgatgaactcagaaccagtcgaattattaaaaaaagcagacaccagtaagagaataaccgtttctgtccatcctttgaacaaaccggaagaaccagaaagattacatattgacaaacaattaaattacgacattgtcattctgttagaaacaatgatgtcggaaatcacgtttaacggatacaaaaaacataacaaacgccttaacacagcggaattatctgttgacactacaaacaccctgaaaacccttaacaggctaataagacaaaaaatcacattctccggaaaagataaattaacgcatataagaaactggctgtgcgtaacaagccaaaagacagaacgtatcattttccacattccagtctttgaaaataacaagaagaataaatatacaattcattatcgtgaaaatacaggcaccgacgtacgtataagtctgccgtctctgttaagctgtatgattgaatcaaaaaaacaaaaaacaacacataattatattatatatatagaagaaaatagcataaaaatcaaacgctgggacagagatgtttttggtaataaagccagatggcgcacatcccctgtgaataaattcgaaatacttgggaaattaacttttatatatagagcagtcagagattaa

SEQ ID NO: 394552 - DNA, 477 bp, Salmonella enterica
atgggggaattattccagagagattttactgatgctgttgcagtttttatctccggcacccgcgagtcctggctgacagatataaacggaagtgacatagacattatcattcccgtcccgggccaggttactgttatggcaggcggtcgtcacggaatctttcaccttcatgtcaccggctgtgtcaagggcgctgacggtacgctccatacggtcattagcgaaaagtgtttttccgtcaccggacaacgcaagttacaccggctgaaccatcggaacatagtttttcagtgtcagcgtattatccggactgatatcaaacacgtaaagaccatgtttgtgtgccgcagcaaattccttaaatttagcaagatactcctcataggtttttgcgtcggtttcatccgggtcaatatcccggctgttgatggtatatatgcggttattcttttcatcaacaatcatgttgaggaatga

SEQ ID NO: 394553 - DNA, 1008 bp, Salmonella enterica
atgtattttctgggtctggttttttatatattaacagcggtatgctacttattatttcctgccattaaaaatatggtcaatcaggccgcttttctggcaccgcaaattacgtatgcatgtggagtattatttatattaccgctgctcctttttttaacgcattgggtattccgattaaaggcaaggaaatactacgctttactggcaacgcaaactaaactcgcggcttcagtggccgtctccttaggcctgattggtacctttatgggattaaccgacatggtttcggccatttccggttctctggggggagaaggcgatcttgcagcaaaaatgggggcaatgatttcatccatttcatcggcactgacagcaatgtcatttgcgttcctgacatctatattaggtgttacggtatcagtattacttttggtaagcctaaatttttgggaattttattacgagacggagaataatactggaaaaaacccagagaaagtaccttcagaaaatgagctccacgctttactcaacagaataacgctactggaagaaattaatactaatatcgcaaataaactagtttatattccagagaatacagacctttcagagttattagtggtaaacagcaatactatggctgagaatttattgcaaataaataccactgtgaaaaatattgaaaaagtaacaaaagcatttgctgaggtaagtgataatgcgcttgttagtattaatgcatcgctaatggatgttaatcaaagcaatatggtagcgagtgaaaaaattattgctggtaatgagcatttaatggatttaaatgttggtgttaacgcattgctggcattaatgaagaaaaactctgagtttaacgaggaaatggaaaataagaagactgaacagcttaaagtcattattgacaggcaggaaagttatttccatgaacagtataagtttaagaaaaaaatgaagcagattgtagaggtgctgactaatgaaaactaa

SEQ ID NO: 394554 - DNA, 1575 bp, Salmonella enterica
gtgccactacagtttgatgatgtggtggtgccacctgcaccgctgaaagtgacggtgaaagcaggggatgcggtcgggttcctcggcgctcaggatctggccgacgaagataaccatccgcagattatcaccacggactataaagcccatatcgagctgctgagcctcgatgagcatgtgccggatgtggtggcaaacgtgaaggggattaaaacgggcaaacagtttattaagctgaagctgaaacgcccgatgtaccttagatgcggggagggcgaggaaagtacctttgagcagatgagcgccattacccgtgccgatgccggaaaaattattccgcgtgatgccgcgtacccgtttacggataaaaccggggtcacatactttcagatccgcccgcatacgtggatgcatcaggacgatgtggagcagctcagccagcatgatttagcaggactaaactttcactgtattgaagctgaacacacaaccgactttacccgcacactggatgaacgctggctgattgacgccctgaaaagcatcagttcgcactttgacggtgaaaaagggccacaaagttcacaggccaaaatgttttatgacagcctgatccgtaatgctgaaaacagaagaccgcccagcccgtatcccgataaatctcaggatgaattactgtttggtgcactgcatacgaaccagatgaacatcccggaatatgcgcggcggctgatagtgaaacacgacagcgactggcacagtacccgtgatgatacgcgctggtcatcggtatttaaggtcagggatgaaagtccggttgtgaagatggccaacgggggatttctggaggtgacgcgctggatggataaggttccgccgttcgccagtcagtggtctgtatggcattttcatccgcttgaatttatggaaatattacggagtacagagtttcccaagactcctgttaatggggaattaactcctatagaatttattaatttctataatggagacaaaattgatgatactgattatgaagaggctgcaaaagaattgggatgcgaagttgcagcaattaaggctgtagcaaaaacagaaactggttcttatggctcctattttaaatttgaaggtaacgatgattatgttcctgcgatattatttgaaaggcatcacttccataaatatacaaatggaaaatatgatcagttcgaagatatatcaaactctgttgcgggtggatatggtgcaacatcagtacagtatacaaaactagtcaaagcgtatgccttagacaagaaagctgctttgaaatcggcatcttggggtaagtttcagattttggcatcgaacttcgccacagcaggctacgccagccctgaggatttcgtttttgcattaagcaagtctgaaaaaaatcagttaaaagcattcgttagcttcattaaggctgatagggttttattgcattccattcggactaaagattggctttcatttgcaaaaagatataacggtccaagacagaatggatatgatttgaaaatggagaggaattacaatgcgtcattataa

SEQ ID NO: 394555 - DNA, 444 bp, Salmonella enterica
atgcgtcattataaattacttgcgttagcggcaatgtttctgtgtggttcatcgtttgcgagtgatgtatattttgtgtgcgacactgcaaaaggaacaatcaaactagatgaaaacaacggtgtaattcggtacaccttatcgaaagaccgcaaaactgaatttaactatgagtcgaaaggtaatgattattcaggatttaaatacaatcattactcacgatttcaaactgattacttcaacgtgtcgtttgtaaatacagggtataaatacacgatatttagtaattatgaggatgagagtgaaagccgtggggttagtgttacgaacctgaatagcaagaaggaatctgtttacgattgtaagtccgttggcattgatcgccttagtgatttgtcggcaaaactggcctgtgataaggacaatgctcttggttgtgagtag

SEQ ID NO: 394556 - DNA, 666 bp, Salmonella enterica
atgaacatacgttatccggtacggaaagccgacggacgggactataagaactatgacgagctgctgaccgacatccgcaaaaacgcccacggttggtggttacttggcataaatcgttactggcacggggggatccatgtcgggatgtcatcatctccggcctcggtgctggatcaggaaacgccggaaaaatcggtgccgctccagttcatgatggacggcgaggtggtggcatggcgggttaacagggattacgcggctatcgagtgttgccaggaacgcccccttcgccagtccggcacctttgtgctggtcaaatcagtgtacaagcccgacgaacaggatgaagccacctggctgacgctgtaccagctttacatgcacatcgcgccactggcagaatttccgaaacgcccgctttaccgggtcacgcagaaaggccacggcgtgcggatgcgtaaacatttccgccacgatgacagccgcgaaatcgcgccggacgtgctggcaaacaaacacggtcacgccagaacgctcgttcagggcgacacgctggccgtactgcaacagaaatcgtttctgctggaacaacggccggagccgttcgctctggtgctgcgtcttttacccgcacgctggatgaaagctggctcattgatgccctga

SEQ ID NO: 394557 - DNA, 162 bp, Salmonella enterica
atgattatcacatttcgggtagagtttttagggcgatggagtaaagcgccttatacagaccgccttcgcaaaactatctttaatttaactattctgggttttggggatgtacatgatcaaaaacatcattataaaacatataatcatctgtatttaaagtaa

SEQ ID NO: 394558 - DNA, 894 bp, Salmonella enterica
atggattttcaaagagtagacagatatatatgtagtggaagtttgaatactcctcttgtttcaattatcattgcaacttttaattctgaactcgttatagctaactgtctacaatctgtgattagtcaatcctataagaatattgaagttataataatggatggtggatcttatgataaaacacttgatattgcgaaatcgtttaaagatgaacggataaagatagtatccgaaaaagatcgtggaatttatgatgcctggaataaagcagttgatttatccagtggtgattggatagcctttattggatctgacgacgtttactatcatactgacgcaattacctcattggtaaaaggggcggcaatatctaatggtgctcctgtggtttatgggaggactgcacatgaaggtcctaataaagaaatatctggtttttctggcagtgaatggtataatctaaaaggatttaaatttaactattacaaatgcaatctaccattacccatcatgagtgcaatatattctcgtgatttcttcaaagatcagagatttgatataaaattgaaaattgttgctgacgctgattggtttttgaggtgtttcatcaaatggagaaaagaaaattcaccgtattttattgacgacatcactcctgttgttagaatgggatatggtggtgtttctaccgatatatcttctcaaattaagactacccgtgaaagttttatcgttcgcaaaaaaaacaatatatcttgcttcaacatgcaactgattcttagatatattaaaataatggtgatggttagtattaaaaatatattcggtaataatatttataattcaatgcataatggttaccattttttaaagaagattaagaataaaatatga

SEQ ID NO: 394559 - DNA, 1125 bp, Salmonella enterica
atgaagattctttatgtaataaccggtttaacttgcggcggggctgaacatcttatgatgcagctagctgaccaaatgttgctacgtggccatgaggttaatattatttgtctaagtggtatatctgagattcagccgacacaaaaacacaatattcattatattcgtatggaaaaaaatgtcagaggatttgtaaaggctttgtttcaagtcagaaaaataataactgttataaagccagatataatacatagtcatatgttccatgctaatatttttagtcgtattattaggatgctaactccatcggtaccattaatatgtacagctcacagcaaaaatgaaggtggatatgctaggatgctttgttatcgactaagcgattttttggcatcgatcacaacaaacgtaagtcaagaagctgtgcaagaatttatagcaaaaaaggcagcacctaaaaataaaataatcgaagtccccaattttgttaatacgactaatttcagtttcgatcttaacgctagaaaggaaagaagaaattcttttggtataaaagataatactttactcctgcttgctgttggacgacttgttgacgcaaaagattatccgaatttattaaatgcaataaattatttaactctttcggaaagcacggggttcgataattttattttatttattgtcggtgatggtgtattaaaaagtaaattgttagatttagttaataaattaaatcttgcggataaagttttttttctggggcgaagaagtgacattaaagaattaatgtgtgctgctgatctctttgttctgagctctcaatgggaaggttttggtctcgttgttgcagaggctatggcgtgtgaacggcttgttgttgcaacagattctggtggtgttagagaagttgttgggcctcataatgatgtcatccctcttagtaatcatattctgctggcggagaaaattgctggggtattgaagatggatgaaaaaacgaaaaatatgattggtttgaaaaatagacaacacattgtttctcatttttcgattcaaaatatcgttagtaattgggagtgtttatattctaaatattccagatatactgataaagctagttga

SEQ ID NO: 394560 - DNA, 1350 bp, Salmonella enterica
atgagtggggggaaactgccggaggggtgggttggccctcaactggatgagatcgctactgatattaactatggctataccgcttcatcaacatctgaaaatatcggtcctaaaatgctgcgtataaccgatattcaagataataaagtggactggaactcagtacccttctgtaagattgaggataatcaaaaaaataaatatttactttgtaacggcgatcttgtgttcgcacgaacaggggctactgtaggtaaaagtttcttaattaatgaaaatatatctaatattgtatttgcatcttatttaataagagttagatgcaacaaaaaaataaacagccattacctttcttattttttccgctcgcctacgtactggagtcaaataacagaatttagtgcagggattgggcagccaaacgttaatggttccaaacttaaaaaattaaatttaccattgacatctgtctatgaacaaaaaatcatcgccgaaaaactcgatacgctgctggcgcaggtagacagcaccaaagcacgtcttgagcaaatcccacaaatcctgaaacgttttcgtcaggcggtgctggctatggcgctaaatgagagttcagaacaatcacgaaaccctgctaaaatagttaaactcatagacgtcactaaaaaaattactgatggagaacaccttacacctaaaacaattaatagcggcattccactattatcagctaaagatgtgcaagaagatgaattgttatttgataatgtcaagtatttatcagataccattgcagctaaagcactgaatcgatgcaaaccagaaaaaaatgatattttaattgtaagtaggggagcaactgttggcagaacacatttagtttcaacgagtaaaacattttgtctgatgggtagtgttttacttattaaattggatacagaacaagtagtaccggaatacatgaaattaatatttaatgatatttctgggcaacaacagctggtctctgcctctggagcaacagcccagcaagcgatttacattcgtgatgtcaaagaattcagtttcgaacttatatcgcttcatgaacaacacgaaattgtccgccgtgtcgaacaactcttcgcctacgccgacaccattgaaaagcaggtcaacaacgccctgacccgcgtcaacaacctcacccagtcgatcctggcgaaggccttccgcggcgagctgaccgcccagtggcgtgcggaaaacccggatctgatcagcggtgaaaacagcgctgccgcgctgctggaaaaaatcaaggccgaacgcgccaccagcgacggtaaaaaaacctcgcgtaaaaagtcctga

SEQ ID NO: 394561 - DNA, 1281 bp, Salmonella enterica
atggcgctcactgacgctaaaatccgggttgcgaaaccggatgaaaaaccctataagcttgccgacagcggtaacatgtttttgctcgttcaccccaacggttcccgctactggcgattacgctaccggtttcagggcaaagaaaaaactcttgctctcggtgtctatcctgacgtttctctgtctgacgccagagaaaaacgggatgcagcacgaaagctgataactgaagggattgacccctgtgaacagaaacgggctaaaaaatcccttcctgatgcagcacagacctttgagactgtcgcccggcagtggcacaggagcaacaaaaaatggtctgaatcgcacagtgaaaaagttctgaaaagtctggagacccacgtattctcgcttatcggctcacgggatatcacttcactgaaaacaccagaccttcttcttcctgtcaaatctgctgaaaccaaagagatattcgaaatagcggcccgtctgcaacagcgtatttcagctgtcatgcgatatgcggctcagtccggtattatcagttataacccggctgtcgatatgaccggggcgttaacgaccgtgaagcgccagcaccgccctgctctccccctgaatcgtatccctgaattactggcacgactcgacgggtataagggacaaatgctcacccggctggcagcaaaactcacccttctcatcttcatccgttccagtgaactccgctttgcccgctggcccgagattaattttgagaaagcgatgtggactatcccaccagaacgaaaaataattgaaggcgtcaaatactcacatcgtggctctaaaatgcgtacagagcatctggtgccgctctccggtcaggcactggaaattctgaaacagatacatgctatcagcggcgagtacgaactgattttcacaggcgatcataacccgtggaaacccatgagtgaaaatacggttaataacgcattacgtctgatgggctacgatacaaaggttgatgtctgtggtcacggtttcagggcgatggcgtgcagctcactggttgagtcaggactgtggtccagggatgctgttgaacgccagatgagccatatggaacgcaatggtgtaagggcggcgtatattcataaagcggaacatctggaagaacgcaggctaatgctgcagtggtgggctgattttctggatgccaacagggaaaaagccatctctccgtttgattatgctaaaatcaataacccattgagggaacaacattcctctgattaa

SEQ ID NO: 394562 - DNA, 390 bp, Salmonella enterica
gtgattcacccggaaggtgcggaggtgctggcgtgttacaccggtgatttttatgccggttatccggcgctcacgcagaatcgtgtgggtaagggctgggcattttacgtggcatcgcgtaatgatgacgcattccatcaggcgtttactgccatgctggtcggtatgttgaaactaccccgggcgctggagacgacgttacccatcggtgtggtcaccacctgtcgcacggatggtgaacgggagtgggtttttgtgcaaaactatacgggatatgaccagaagctcgctctgccgggcgtctggtataatgcggtacccggtgagaagagagaaaaccgccttacgctggttccccggtactgtcaagttctggtcagaaatctgtaa

SEQ ID NO: 394563 - DNA, 390 bp, Salmonella enterica
atgaaacagtatattaaatggtttgcggcaattgccgttgtcggtgcgctggcaggttgtgcgcgtaccgcgccgattgatcaagtacactccagcgttagcgcagggcacactcaggatcaggttaaaaccgcgattctgaaagcaggcgttcaacgcctgtgggttatgtctgaggtcagccctggcgtcatcaaagcacgtcagcaaacccgcgatcatgtggctgaagtccgtattacctattccgccaccagttatgacatcaaatatgacagcagcctcaatctacaggcttcaggcgggaaaattcacaaaaactataaccgctgggtgcgcaatctggataaagacattcagcttaatctgtcagccgatgccagtctgtaa

SEQ ID NO: 394564 - DNA, 1062 bp, Salmonella enterica
atgtacgaacaggattcgcttagcgcactggatgccattattgaagcacaacgaatcgcatttgcccctatgctttttcaagccgcgttgtgcctgcgaaatacgggcgtacttgcctggctggataagcaaggtaaacgcggcgccacactcgacgaaattactgaaaacagtactatcaacgaatatgccgccagcatcctgctggatatggggttaagcgggcgaatcattaccaataaagaagagcattattacctcgctaaagtcggtcatttccttttacatgacacgatgacgcgcgtgaatatggatttcacccaggatgtttgctatcaggggttgttctatctggaaaatgcgctgaaagaaggtaaacctgctggattaaaaatctttggtgactggccaacaatctatcccgctctgtcgcaattaccaccggctgcgcgtgaaagttggttcgctttcgatcattactattcagatggggcatttgacgccgtactgccatatgtattcgccagcgcccctgcaaccctgtatgatattggcggaaatacagggaaatgggcattacgttgttgtcagcatgatgacaatattacagtcaccctattagatttgccgcaacaaattgcacttgcccgcaaaaatatagaaaattcaggattatctcatcgcataaatttccatgctgtggatatgcttagcgattcgcctttacctgcagaggcggatatctggtggatgagccaattcctggattgtttttccccggaacaaattatcatcatacttagcaatattgcccgcgtgatgaaacccggtgcaaagttgtgcattatggaactgttttgggatgcccaaaaatttgaagcggcctcatttagcctgaatgcgtcttcgctttattttacctgtatggcgaatggcaacagccgtttctacagcgtagagaagttttatcactatctgaatcaggcaggatttcaggtagatgaacgtcacgataacttaggtgttgggcatactttattgatatgtcagaagaaaaaataa

SEQ ID NO: 394565 - DNA, 723 bp, Salmonella enterica
atgaaatttgcattaaacattatcgactggcaggccagggcgccagggttaagcgaaacagaacagtggcatgagtggtcacggctttcgcatgctatcgatccagcggcaccgctggctaaactcagcgagttgccgatgatgacggctcgccgcctcagttccggcagcaaactggccgtcgattgcgggctggcaatgctacgccgccatgagatcgatgccatcctctataccagccgccacggagaactggagcgtaactacaggatcctgcacgccctggcgactgagcaggcactctcaccgaccgattttgccctttctgtgcataactccgccgtgggtaatctgaccatcgccgcgaaaaaaccaattgtctcctcctcgctttctgctggcagggatacgttccagcaggggctatgcgaagtcatgggactgtttcaggcgggatatcagcgcgtgttaatggtcgatttcgacggttttctgcctgagttttatcacccacacctgtcacctgaaatgccgacatggccatttgccgtcgcgctggttattgaatcaggtgatacctggcaatgcaaaacccgtctgcataacgcccatagtgagaccacgttgccgcaaagcttgttgtttttacaacactatctgcaggatatcgatacgtttaccctgccgggtgaacgcgtacaatggcagtggagtcagggatga

SEQ ID NO: 394566 - DNA, 816 bp, Salmonella enterica
atgaacaggatacttctgcgccttaattggggatggcggctggtaatgaccggattttgctttgccttgtttggtcttgggggactactgctttccactatctggtttaacttattgttagttgtgatatggaataataccagacgtcggcgaatcgccagacgcagcattgccgccagttttcgtctctttttaaccgtggcgaaacgacttggcgtactggattaccgcattgaaggacgaggcatcttgcgcaaagagcgggggtgtctggtggtcgccaatcatccgacgctaatcgactatgtgctactggcctcggttatgccggaaacggactgcctggtgaaaagcgcgctcctgaaaaatccgttcctcggcggcgtagtccgggcggcagattacctgattaatagtcaggccgatgcgctattgtccacctgccagcaacggctggaacaaggcgatacaattttaattttccccgagggtactcgcacacgccccggagaggaaatgacgctacagcgtggtgcggcgaatatcgccgtgcgctgcagcagcgatttacgcatagtgaccattaactgcagcgaacaaatgctggataaaaaaagcaaatggtatgacgtcccatcggtaaaacccgtatttactatttcagtacacgaacgagttaaaatcgatcaattttacgatgcaaattcacaagaaccggcgctggccgcaaggcagttaaaccggcatcttttgcttcaattacaaccaggtaatttacctctttcaggaattaatgatgcaagcgctttatcttga

SEQ ID NO: 394567 - DNA, 258 bp, Salmonella enterica
atgcaagcgctttatcttgaaatcaaaaatctcattataacgacactgaatctcgacgaactgacagctgacgatattgaaaccgaagcggcactctttggtgatggcttagggctggactcgatcgacgccctggagctggggctggcggtgaaaaacgagtatggcgtggtgctctctgctgatagtgaagagatgcgccagcacttcttctccgtcgccacgctggcatctttcattcacgcgcaacgtgcctga

SEQ ID NO: 394568 - DNA, 252 bp, Salmonella enterica
atgaccgaacaaaaagccatttacgaagaagtctcctcgctgctggttaagttattcgaagtcgacccgcaggatatcaagcctgaggcgcgcctgtacgaagatctggagctcgacagcatcgatgccgtcgacatgatcgtgcatctgcaaaagaaaaccggtaagaaaatcaagccggaagagttcaaagcagtacgcaccgtacaagatgtcgtcgatgcggtagaacgccttctcaaagaagcgtaa

SEQ ID NO: 394569 - DNA, 582 bp, Salmonella enterica
gtgtcgggcactcactcgctgccagtcgtacaactgctgacaggtttactgctgttggcctggccatttttaatctggtttggcctggcgcataacagcctgcactggctgctgccgttgatggcgctactcctgtttttgcgctttcgccagacccggcgacaggcggggccgttgcgcgtcgtgacacaggtagtggcggttgctggcatcacactgtgcattgccagctatctgctcaaaacgcaccaactgttgctgttttatccggtggtggtaaatggcgtcatgctggcggtatttggcagctcactctggtcagccatgccaattgtcgaacggctggcgcgactgagtgacccaaaccttcccgaagcgggcgtgcgctacactcgccgtgtgacgcaaatctggtgcgcctttttcatccttaacggcagcgttgcgctttttaccgcactgtatggcgatatgtccctgtggacgacctggaacggtatgatctcctatctgctgatgggaacactcatggcgggtgagtggttagttcgccaacagatgataaaacgagatacccaatga

SEQ ID NO: 394570 - DNA, 1362 bp, Salmonella enterica
atgaagcagcccctcactcttgctcaatggctcaatgccccacgtccggacgaagtgcctgtggcgtggcaggaagagcacacctggacacttggtcatctgcgccatgatgtggcccggttgataacgcatctgcagcagcaggaaggtgaacgccaggcattgtgcttcgagaacagttatttctttatcgtcgcactgctggcaacgctccacgcaggcaaaataccggtgatccctggtcattgccgtgtttcattattaaacgagcagcatgcgctgtttgatggcgtactgagcgataaagcgctggactggcaaggtgcactgctggttgtcagttctgccatgaaacccgctacctacgatattactttcccggcaatacccagcgacgccttcgtggaactcttcacctccggctccaccggtcagccaaaacgggtcatcaaaccaatcaatcgtctggataacgaagcagcgctgctcgcgacgcgctttgccgatcgcctgacgggttgtcgggtggtcgcgtcagtggtgccacagcatctgtatggtctgacgtttcgtatcttcttgccaatggccttaggtttaccgctacatgctgcaatgctgtggtacgccgagcagttggcgacgctaagccatgaacatcgctatgcgtttatcagcagcccggcgtttctgaaacgcctcgaccatcagcttaccccgccgccggtcgggatgattctgtccgcaggcggtatgctgccctggcaggacgtcacgcaggccgctgactggctgaacgtatggcccgatgagatctacggcagcaccgaaaccggtatcctcgcctggcgttatcgccagcgggatgatgtggcatggcagccctttcctggcgtcagattccagccagaaaacgaggcatttcgcgtgttttccccacttatcgccgctgatgatggcctgttgctggacgatattctgtattttacagaaagcgggcagttccgtctgatgggcagacggggtcgcgtggtcaaaattgaagagaagcgtatttcgctcagcgaagtggagcaacgcttactggctctggacggtatccgcgaagtcgcggcattacccatctcacgcggagggcgtcagggcgttggcgtcctgttggtgctggataacgaggcgcgtcaacgctggcatgaatgcgggggtaaagcgcaagagctgagctggaggcgctcgcttctgcccttgctggagccggtcgccattcctcgctactggcgggtgattgacgaaatcccggtcaacagtatgaacaagcgtgtctatgcgcaattacaggagttatttcatgaacccccatga

SEQ ID NO: 394571 - DNA, 354 bp, Salmonella enterica
atgaacccccatgaagtcgagcgccaccaggcacagcctcaacaggctgagatcgttttacatctcgacccttctttgttctggttcagcgggcattttgctgtacagccgctgctgcctggcgttgcacagctggattgggtgatgcattacaccaccacactgctggtccccggctggcgttttcacagtattcagaacgtgaaattccagtcaccactcctgccgggaacaaccgtaaccctgagcctgagctggcaggaagcgcgtcagatgctctcttttagctaccagcgccacgacggtgacgtgcgccataccgccagcagcgggaagattcggttatgtcactaa

SEQ ID NO: 394572 - DNA, 1692 bp, Salmonella enterica
atgtcactaaccttttccccttgcgtgctgatcccttgctacaaccatggcgtgatgatgtcgcgcgtactggcacgtctacagccgtttggcctcccctgcattgtggttgacgatggcagtgatgacgccacacgggatgaactggctcgcctggcggctgaaaatagcaatctggcattaatccgcctgcctgtaaacgcgggcaaaggtgctgcggtgctccggggaatgcaggccgcagcagacgcagggttcagccatgcggtgcaagtggatgccgacggacagcatgacattgaagatattcccggactgcttgcgctggcgaaagaacatccgacggcgctgatttccggacaaccgatttacgatggctcaattccccgttcgcgcctgtacggacgctgggtcacccacgtctgggtgtggatagaaacgctctcgctgcagctaaaagacagcatgtgcggtttccgggtgtatccggttgcgccaacgcttcaactggcgcagcgcgtgacgcttggcaagcgaatggattttgacaccgaagtgatggtacgcctctactggcaaggcaacaccagctattttattccaaccagggttacctacccactggatggactgtcccatttcgacgcgctcaaagacaacctgcgcatttcacggatgcatacacgcctgttctttggcatgttgccgcgcattccttccctgcttcttcgccgctcatccacacactgggtacatcagcaggaggtcaaagggctgtggggaatgcgtctgatggtgctggtctggcgttttctgggacgcaaggtattttccctgatgctatatccggtagtcggcgtttactggctcaccgcttcggccgctcgtaaagcatctcagagctggattagccgcgtacgggcacaactgaccgcgcgtcagatgccagtgccgtcaaacctgaccagctatcaacatttcctgcgttttggcgacgcaatgctggataaaattgccagctggcgcggtgaactgcactttggtcgcgatgtggttttcgcgccaggcgcagaagaggcgttaaacgtcagcgatccgcggggaaaactgctgctggcttcacatctgggcgatgtcgaagcctgtagggctctggcccaactgcagggcagcaaaaccatcaatgcactggtattcagcgaaaacgcccggcgtttcaggcaaatcatgcaagagatggccccactggccggactaaacctgcttccggtgaacgatatcggcccggataccgccattctgctcaaagagaaactggagcgcggagaatggatcgccatcgtcggcgatcgcatcgcggtaaatacccaacgtggcggcgaatggcgcgtctgctggagcagctttatgggacaagttgctcccttcccgcaggggccgtttatccttgcgtctattttacgctgcccggtcagtctgatttttgctctgcgccagcagaagaaactacgcattcactgcgagccgtttgccgacccgttgctcttaccgcgcgccagccggcaacacgcgttacagaatgctatcgatcgctacgccgaacgcctggagcactatgcgcttcagtcgccgcttgactggtttaactttttcgatttctggcaactgccggataccaaagacaaggagtaa

SEQ ID NO: 394573 - DNA, 423 bp, Salmonella enterica
gtgcttaacgatccccgatttacggctgaagtcgagctgactattccattccatgacgtcgatatgatgggcgtcgcgtggcatggcaactacttccgctatttcgagattgcccgtgaggcactgctgaaccagttcgattacggctatcggcagatgaaagaatctggctatctgtggccggtggtcgatacacgggtgaaataccgtaacgccctgaccttcgaacagcgtatccgtgtacgtgcccagattaaggaattcgaaaaccgtctgcgtatcggctatgaaattttcgatgctgaaacagggaaacacgccaccactggctacaccattcaggtcgcggtggacgaaaaaagccgtgagctgtgcttcgtcagcccggatattctgtttgaacgcatgggggtcacaccatga

SEQ ID NO: 394574 - DNA, 606 bp, Salmonella enterica
atgaaattatggccactgttgacgctactcatcagcccattcgtcagcgccctgacgcttgactccctgcaacagcgttttaccgaacagccggtagtccgtgcccacttcgatcaaacccggacgataaaggatctgccgcagccgctgcgatctcagggccggatgctgatcgcccgcgaccagggcttactgtgggatcaaaccgccccgttcccgatgcagttgctgctggatgacaaacggatggtccaggtgattaacggtcagccaccacaaaccatcaccgccgataacaacccgcaaatgttccagttcaaccatctgctgcgtgcgttattccaggcggatcgtaaagtgctggagcagaacttccgtgtagagtttgcagatttaggtgaaggccggtggacgctacgcctgacgcctgttaccacaccgctggataagatttttgcgacgattgatttagccggaaaaacctatctggagagtattcagctcaacgataaacagggcgatcgcaccgatatcgcgctttctcaacaccaactgacgccagcgcaactgaccgatgacgaacgccaacgctttgcaacccagtaa

SEQ ID NO: 394575 - DNA, 2319 bp, Salmonella enterica
atgacgaacgccaacgctttgcaacccagtaaacgtcccgcgctgttatggggaatcgcctgcctgatactgctgggcgttttgctgacgttgctacctcaggctcgtctcaacagcagcgtgctggccatgctgccaaaacagacgctggggaccataccaccgagcctgaacgaaggtttcatgcagcgcctcgaccggcaactggtctggctggtgagtcccggtaaacagccagacccggcggtggcccgcggctggctgacgttgctgcaaaaatcacacgcgctggcacaggtgaaaggcccgatggatgccgacagccagcaggcatggggtgcattcttctggcaaaatcgcaacggcctgatagataacgacacccgcgcccgactgcaaaacggcggtgaggcgcaggcccggtggatcctctcccagctttactcagccttttcaggcgtcagtggtaaagagctgcaaaacgatccactgatgctgatacgcggctcgcagctggcgatggccaaaaacggccagcgcttgcgcctgatggatggatggctggtcactcaggatgaacagggcaactactggtatctgctgcacggcgaactgaccggttcatcgtttgatatgcaacagacgcaccacctggtcaccacgcttactacgctggaaaataaactcaaagcacaatatccccgggcacaactgttgtcgcgcgggacgctgttctatagcgattacgccagccagcaggcgaaacaagacatctctaccctcggtatagctaccgtgatcggggtgatactgctgattgtggcggtgtttcgctcgctgcgcccgctgctgctgtgcctgatttcgattggcactggcgcgctggcgggtactgtcgtcacactgctgattttcggtgaactccacctgatgacgctggtcatgagtatgagcatcatcggtatttccgctgactatacgctctactatctgaccgagcggatggtacacggtgcggaaacatcgccatggcaaagcctcgccaaagtgcgtaacgcgctgctgctggcgttactcaccaccgtcgcagcatacctgatcatgatgctggcccccttccccggaatccgtcagatggcggtattcgcggcggtgggtctgaccgcttcctgcctgacggtgattttctggcacccatggctgtgccgcggtctgccggtgcgtccggttccggcgatggtgctgatgttacgctggcttgccgcctggcgacgcaataaaaaacttgccgttggcctgccggtggcgctggcgctgttctcgctggcaggcatggcgacgctgcgcgtggacgatgatatctcccagctacagacgctgccgcaggatattatggctcaggaaaaagcgattactgccctgaccgggcaaagcgtcgatcagaagtggtttgttgtgtacggcaaaactgcacaacaaacgctggagcgactggaaacctttattcccgcgctggaacaggcgaaaaaagagggattactcggcggatatcgcaccattccgctaaattcgctcgcccgacagcaacaggacctcactctgcttaaagacgctgcgcccgccgtaacgaaggctctgaataacgccggactggcaacggtaaatcccgaccttaccgccatgccggtaacagtcgaagcctggcttgccagttcagccagcgaaggctggcggttactgtggctgacactggctgatggcgagagcagcgtactggttcccgttgaaggcgttaaacaaagtgcggcattaaacacactcagcgcgaaatatcccggcatcgcatgggtggaccgtaagagcagcttcgacgcgcttttcgccctgtatcgccatatcctgaccggcctgctatgcattgcgctggcggtaatcgcttgcggggctgtcatccggcttggctggcgtaagggcttaattagcctggtcccctcggtgctgtctttaggttgtggtctggcggtactggccctgagcggtcatgcgctcaacctgttctcgctgctggctctggtgctggtattgggaatcggcattaactacacgctgtttttcagtaatccacgcggcacaccgctgacatcgctgctggctatcaccctggcgatgatgaccacgctcctgacgctcggcatgctggtattcagcgccactcaagccatcagcagctttggcattgtactggtgagcggtattttcaccgcattcctgctttcaccgctggcgatgcccggtaaaaaagagaaaaaaagaaaatga

SEQ ID NO: 394576 - DNA, 585 bp, Salmonella enterica
atgatcaaacagacattctggcgcgccgccgcactggtcgctacgttaattctcaccggatgcagccactcacagccggaacaagacggccgtccgcaagcgtggctggagccgggcacacgcgtgacgctgcctgccccggggatttccccccaggttaattcacaacagttgctgaccggcagttttaacggcaaaacccagtcactgttggtaatgcttaacgccgacgacaggaaaataacgcttgccgggctgtcgtcggtcggcattcgtctgtttcttgtgacttacgatgaaaaaggcttacataccgaacaatcaatcatcgtgccgcaactgccgcccgccagccagatgctggctgacgtaatgctcagccattggccagttagcgcctggcagccaaaattgccgaaaggctggacgctcattgatatgggtgacacacgcgaactgcgcaacgccaacggcaaactggttacggaaatcacgtatctgaatcggaaaggaaaacgcgagccgatcagtattgagcagcacgtttttaaataccacatcaccattcaatatctgggtgactga

SEQ ID NO: 394577 - DNA, 1170 bp, Salmonella enterica
atgatctacatttctgccgttggcatgattaacgcattgggcaacgacgccgatgaaatcgcagctaacctcacacgtggcatagcacccggaatgcgcgcacgcacagactggctgcaagggcatccgtgcgccgtattagcaggcattgacgatgaacttccggccattcccgacaattttcgcgcccatcgttcacgcaataatcagttgctgctggcggtactggcgcaaatccagccacaggtggatgacgccatcgcccggtatggccgcgatcggattgctatcgtgctcggcaccagtacctccggactggatgaaggtgacgttcacgttgatctcacgctcaacggcaaagagagcaccgaatggcactatccgcagcaggagttgggcgatccctcgcgctttctcagccactggctggcgctggatggcccggcctttaccctctcaaccgcctgttcatccagcgcgcgcgctattatgagcgggcgtcgcctgattgagtccggtctggcggatatcgcgattgttggcggtgctgatacgctcagtcggatgccagtcaacggcttccacagtctggaatccctctccctgacgcggtgtcagccgtttggccgcgaccgtagcgggatcaccatcggcgaaggtgccgcgttgatgctattgacccgtgaaccacagcccattgcgctactgggcgtcggtgaatccagcgacgcttaccatatttcagctccccatccacagggtgaaggtgctattcgcgccataggccaggcgcttaacgacgcggggattacgccggatcaggtgggctatatcaatctgcacggtaccgccacgccgttaaacgatcagattgagtccaaagtcgttaacgcgatttttggcgaaaatgtcccgtgcagttcgactaaacacctgaccgggcacacgctgggcgcggccgggattaccgaagcagccatcagtatgttgattttacaacgcgacctgccgctgcccccgcaggattttagccagtcgccacgcgatgaaacgctgccgccctgcggcatcattgagcagccgcagccgctggctcgcccggtaatcttgtctaattcgtttgccttcggcgggaacaatgccagtatcctgctcaggagaatctcatga

SEQ ID NO: 394578 - DNA, 474 bp, Salmonella enterica
atgagtcactatttatcgcctggcgactatttaccgcacgatgcgccgatgctgctcctcgaagaggtcgcaagcgtgacggacgagaccgccatctgccgcgtgacaatatcagcaaacagcatgctggccccctttctcgatccagacggcaatctgcccggctggttcgctctggaattaatggcgcagaccatcggcgtctggtctggctggcaccgtcagcaacatcaggagagtattgctttaggcatggtgctgggcgcgcgcgagttagtctgtgctgcgggggttctgcctgctggcaggatgctaagtatcaatgtcaaattgctgatgcaggacgcacgtttcggcagtttcgaatgcgccattcaggcgggcgaagagacgctggcaaccggtcgcgtcaacaccttccagccgacatctgaagaaattaacacgctatttcaacaaggagcgtccacatga

SEQ ID NO: 394579 - DNA, 732 bp, Salmonella enterica
atgagtcgttcagttttagttacgggtgccagcaaaggtatcggtcgcgccatcgccctacaactggcggcggacggttttgtagtcggcgttcactatcatcgtgatgcgcaaggtgctcaagaaacgctggattctatcctcaccgctgatggcgctgggcgtctgctgacgtttgatgttgctaatcgcgaacagtgccgtgaagtactggagcaggatattgacgcacatggcgcatggtacggcatcatcagcaacgccggagtcacccgcgatgccgccttccctgcgctcagcgataacgactgggatgcggtgatccacaccaacctcgacagtttctataacgtcattcatccatgcatgatgccgatgattagcgcacgccagggcggacgtatcatcacgctgtcctcggtttccggcataatgggcaatcgcggccaggtcaattacagtgcagcaaaagcagggattatcggtgcaaccaaagcgctggccattgagctggcaaaacgcaaaatcaccgtaaattgcatcgcaccgggactcattgataccggaatgatcgagatggaggaagccgcgctgaaagaggccatgtcgatgatcccaatgaaacggacaggtcaggccgaagaggtggccggacttgccagctatttaatgtcggatgtggcgggttatgtgactcgtcaggtgatttccatcaatggagggatgttatga

SEQ ID NO: 394580 - DNA, 330 bp, Salmonella enterica
atgtcaaaacaccgatggtccattgaacagaaaaggcagcacgttaccgcctggcgcgccagcggccttactcgccagcaatactgtgaactcaacgatattcccttcacatcacttcgcgaatggccgaaggatgtcgcaaaagatgaacgccaggcaaatgaaccgaccgttcttcccgttcatattgcgccaccgctgcatgcagatgtaccaccgcccgtcaccaacgagccgctcacgccgttcctccccggcgggatacggatgtgctgtcatccttcgcaactgacagatgtcttcagggcgctcaaatatgctcaggcctga

SEQ ID NO: 394581 - DNA, 468 bp, Salmonella enterica
atgagtattgttgatacaatgattacgccagtcgcaaaagattatagcacttgctctgagtgctatgcggagttattaatttaccccgacttcattcatcccgatgaaataacaaaagttttaggaatcaatgcgtcacagttaaatgtagctggcacaaaagtaactaacagcagaggaaaaacaagggaaattagaaagtcaggatggtttcttacatcaaaaaatgaggtcgactcgaaagatctgagggatcacatagattgggttcttatgcatctatcgtccgctaaaaatggtctgagtaagatccagagtatggatggtgtgaaaataactttaaaatgtacttggcgctctaaatatggacacagtggccccgtgctgtggccgaaacaaatgtcagaaatggctgcgtttgggctggaatgttcttttgatatttattttgataatgaaagtgagtga

SEQ ID NO: 394582 - DNA, 11835 bp, Salmonella enterica
atgaaaaaggatcaggttcgtttttcccggcgtttgttaagtggcctgttgagtttcatgctggctacccaaccgttgctcccggcgatggctgccaccatcacgcctgaaggcaatacgcagatggataaagccgccaatggtgttccggtggtgaatatcgccacgccgaaccaggccgggatttcacacaacaaatataacgactacaacgtgggaaaagaggggctgatcctcaacaacgcgaccgggcagtttaaccagactcagctcggcggcatcatccagaataacccgaacctgaagcctggaaaggaagccacagggatcatcaacgaagttaccggcgctaaccgttcgcagctccagggttataccgaagtcgcgggtaaagccgccaatgtcatggtcgctaacccttatggcattacctgtaacggctgtggatttattaacactcctgtcgccaccctgaccaccggtaaacccgtgctggacgcaaatggcaaccttcagtcgctggatgtgagcaagggcagcattaccatcgaaggtaaggggctggatggtagccagagcgatgtggtgtcgattattgcccgcgccacggaaattaatgctgcgctacacgccagagatctgacggttatcgccggcgcgaatcgcgttgcggcgaatggccaggtgagtctgctgaatggcgaaggagaagcgccgaaaattgcggtagacaccggcgcattaggcggcatgtatgctaaccgtattcatctggtctccagcgagaaaggactgggggtcaacctcgggaatctgaatgcccgtcagggtgatatcaccctcaatgctaacgggaaattaacgatcggcaacagtctggcaagcggtggtctttccgccagtggcgaaggcgtcacgttgaccggcagtcataagaccggaagcgggatggtcatcaacagttccggggcgttagcgctaaaggatgcaaatctttccagcgtcgcaaacgtgcaactgggcagcgatggcaaggtgacgatcgagggtggcggggttaccgcagcaggcgagttgcaggtggctgctaaacaggatgtagccgttgccgcaaccactctggttagccagaaaaacgcctcactgcgcagtgacggttcgctgacaatcaacgacggcagcctgaccagtaaagaaaaactggatgtcgcgggtactcatgggctgacgctgacccgttccacgctgggtagtgatgctgatgtcagccttaacagccacggcgatctgtcggtgaaagggggattgctctctgcaggtaacggattaacgctgaaggcacagcgcatagcactggataacgccagtcgggccgatgctaaaggcacattaaacctgaccggtagcgaaatgaacaaccagggacaggtcaatgcggggggcgcgttgtccctttccggtgaccacctcgttaatggtggtcaactggctgcaaacggcggtcttgatgcttctgtcagcagccttaacaacgcagggctgatgcagggtaacagcgtatcgatccgcagcgggtcgctggataatatgtgtacgctggtgagcggcagccagctttcggtacggacgacagcgctgaaccagcaggggatcctgagtgcgaaaaacgatgcggatatccgggctgatgccacgctgcgtaatgatggaaagttgctctctgatggcatattaacggtgcaggccgcgtcagttgaacaacatggtgtcctctctggcaaccagggggtaacggtcaatgctgagaacctcaccgccgcgaaaggttcgctgatcgccgggcaacagggtatacagttaaatgctacacataaccttaacctgaatggtcaggttaatgccgccggtgcgcttaacgttgacgcaaagcaactgactaccggcaaagacagtcatttgcagagcggcctggatctgactatgaccggcaacagcgtgacactggacggcgtacaggcggcaaaaggtttgctggacgtgaaggctaatgttctcagtcatggcggaaaatccacgggtatgcgtgtgggcttcagcacgcagcagtcagttgataaccatggtgaactgctggctgataccctgtcgctcagtggagcaacgctgacccatagcggtagcgccagtgctgacagtatctcgattattgcacctgaacggctcaccagcagcggctctctaatcgccgactcgttaactcttcaaagtcagcatgtcgtgaacagcggtctgatgcagggcaacaccgcgctgaacctgcataccgacagactggaaaacctcagcgatggctcactctacagcaaagagtccctggccctggatatccctggcctgaccaacctcgggctgattaccaccgacggctctctgcacctgagcggcagccagttggttaacagtggcgaaattaacggcgttaatctgcaaagtgattatgcgaaggtaaaaaacgaagccacaggacgtctgctggcgggcagctcattatcaattaacggacagcagacagataacctcggacgcatggtcgccgatacgctcgtgctgaacagtcaggacgtgaataacggcggcaatgtgttgtcggtgggtgaactaagcctgaagaatcagcccctccacaataccggcttgctgcagggcggcacgctgaatctggacgcaaatacgtggcaaaacagcggtaatgcgctgggtgaaacgggagtaacggcaacagtacatgatgcgttcactaaccagggcaaagtactcagtcaacaggccatgaccgtatatgccggcagtgtgaataacagcggaatgctggtggcgaaggtgctggcattacatggcgatctcagcaacagcgggatcctgcagggggatcagacgctcgcctgggatggaaaccacttcactaaccttgcgggcgggcaggtaaccggcggcgaggatgtgcagctcagcggcggacaacttgagaatgacggcaatgttgaggggcgttcagcaacgctcatcgcagaaaatctgcgcaatggtggcagcgttcaggcaatggacagtctgaagattaagaccagcgggcgactggataatcagggggcgctgcgcagtctgaacctgttcgggctggctgcggcacagttatttaacgacaacacgattgcagcaaaatccctgagtatttccgcgccggagctggtgaataacggcattgtgcagggtaattcggcgttacaactcaccacccgtaatctgttcaatggtcagcaggggcaactggttagcggcacggggctggatttaggcctcgatacgctggaaaatcacggtctgctgctgacgaatatcgacttcacgctgcgcggcagcaaattagttaacgcaggtgatattcaggccgattccctgaacctgacgctggcaaactcggttgaaaaccaggggagtctggtggcgaaacagggggcctatctgaatacagcatccctggataactgtggttcgctggcggcgaaaagtgtcactctggatggaaaatcaatccgtaacagcggtctggtacagggcaacgacagtacctcggtttctgcgaataatttaaccacggatgctacaggtaaatggctggccggtaatgcgctgttggtgcataccgatgcgatggaaaacgccggcgtactgcagggaaataccctgacattcactgccgactcgctgaataacagcggcgtgcttaacggtttgcatggcctggaaggcaagctagccgggcgacttaccaaccccggacatattcaaagtggcggcgcactggcgcttacggctgatgatatcaacagcgccggacgtattgccggtgacaggctgacacttgccgccccgacgttaaacaattcaggcctgtggcaggggacgaacgggcttgcgctgtctggcgatgtgctttcaacgggcataacgtcccgtacgctgagcggcggcgcgttgaccttcgatgccggcaatatcacgacgcagggaacgctgcaggggcagcagttcacgctgaccgctgatgactggctgcacaaaggatcgctgataagcctgggtaatctgacggctgatgtaaacaacggccttaccacatcaggcgatgtgatgagtcatggcggaatgtcactgagcgcgcagcagcttgataacagcggaaagctgctcagcgagagcgacgtaacgctcgacggcgcacagttcgataacagtggcacggtacagggaaataccctgaccctgcagcaaaaccggatccacaatcagggcacgctgaccggcctgcaaagcctgacgctggaggctcgtcagcgtctgatggcgcgaatggcgatggcttcaccgcaacaggaattgattaacgcagcaggtggttcactgctgacgcagggttcgctgaaacttacttctggcgatgtgacgaataatggcacgtggcagggacagtctgttctgctcagtgcgcaaacgctgacaaacaatggggcaatacaaagcgccgacgccctgcagcttacgctcgcaaataacctgacgtctgcggctggcagcaaaattaccgcccctggtaacgcgacgctacaggcgctttctctgactaactccgggcaatggacggcgaaaaatcttacgctgaaggggacaacccttgataacagcgcggcgattagcggcgtaaatgcgctcacgcttgccatgaacggcgcggtcaggcagcagaaagcgggcagtatgctgagcggcggcgcgttggatctgactgcggcgtcagtcaccaatgagggcaaaattcagggggcgacgctgggcatgacgtctggcgcattgaccaacagcggacgactgcaaggggataatggcgcaacgctgtcgctgagcggtgacctgataaaccaggcttccggggagattgtcagccgtcaggggctgacgctcactacgccagtgttctccaactacggtttaatgcagggcggtggagatacccatcttaacgccacaacccgcgcgctcaatgacggcaaactgctttccggcgcgggaatgacgctgaccacgtcgcagtattccggcgcaggctggttacaggcaacaaatcttattctgaatgcagcaacggccaccaatggtgggaactggctggctgacagcgccacgcttgcagggaccaggtttaccaacctgggaaccgcgcaggccgatcaactggcggtgaaatacgcgcaactgatgaataacggtacgctgttgggcaactcgcaactgagtgttaatgccagccaggttaatcagaatgcggcagggaaactgttcagcggcggcgacctgtccgttgaaagtcgcgggctgggtgcgttggggcaggtggttgcgctgggtaatctgacgctgaaactggtggatggctttactgcgcaaagcgcttttgccgcgggtaaaacgctgaccattaccagcgatggcgctatcgacaaccgtagcgtgcttcaggggcagtcgctcaacctggcggcgggcgggcagctcagtaataacgggcaaataacaaccggcaacggcgttggttacctcagcggcgacagcgtagcgctcaatgccgccggaacgttacagggcagtggggatattacgctgaccagccgcggtaatatttctgtcgatggtttcaccggaacgcgtggttctctgacgctcaatgcctcgggtgccatcgtcaatacggcgctgttgtacgcggcaaataatctggcgctttatgctaacaccattaccaaccaacgcggcgatatcctcgcgggcaacaatctgtggatgcagcgagatgcggcgggaaatgccaacagcgaagtggtcaacacttccggcaatatcgaaacgcagaatggtgacatcaccatcaaaaccggacatctgctgaaccagcgggaaggtctggtggtgagtaatggcaaaactgaagatctgacccaacagtacgcatggctgaatgatagttttgcagatatccccctttcagaactgaaaaagggaactgactatggttatgtcattcatcgatcctgtagtggaggtggtagcccggggcacggcgcaagtccaacctgcagggatacagcctttccccaggcaatgaaaaatagcccggcaaaggagatcgcaatttcacgttctactctttctgtatctgcaagcggtgggagcgggcgtatcagtgcatcccgcgggatggttattcaggcggaccatctggaaaataacgccagtacactgttggccggtggggatatgcatctttcgggtacaaccctgcagaatcagtcctggacagacggtacagttacccgctatcggacgtatattgccgaccagaaaggtaacaaatgggaaacgcctgctgcttcagtaaaagccgatagttatcgaaagaatccaattcactacattgcacaaggaaatgaccgggaagaagcctcgggggcaacggtataccgctcggtgattcagtcaggcggaaaagtccaggctgttttttcgcaggatatcagcaataccagtaccacgcctaatacgggaggggggataaataccatcgttaccccaaccctcaacatcctcagcaaccagaccatcagtaatggggtgcaaaagcaggcgctggcaggcaatgacacggtgagcgtcagttccccacagtggaacgatagactgcatgacgcattgcagcagattaacggcggtggcgcactggaaagcggtggcgtatcagactctacgctcagccctgtttctgccacgcagaaaggtaacgccagccttggccaactcagtggcctgattaaccctggcgagaaaggcgtgaatgccgccgggcaaaatcagggtaaaacggtggataccagcgcgtatccgctgccttccgggaagaacggctatttcgttgtctccgacgatccgaaaagcccgtacctgatcaacgttaaccctaaactgaacgggctgggccagctcgatcccagcctgtttggtgatttgaatgcaatgctgggtattaaacatggcgaagcgccgcgtgaaaccaatattgcgtataccgatcaaaaacagttcctgggatcggcctatatgctcgaacgtctcaaactgaacccggaatatgactaccgtttcctcggtgacgcggcgttcgatacccgctatgtcagtaacgccatgctgaacaagacgggaagtcgttacaccaacggtattggttctgaccttgaccagatgcgttatctgatggataacgccgccagtacccggcagtcgctgggtctgaaatttggggtggcgctgacggccgatcaaatagcgtcccttgagcacagcatgctgtggtgggaagccgcgaccgtcaacggtgagacggtaatgataccgaagctgtatctctcgccgaaagatatcatcgtgaacaacggtagcgtcattgccgggaataatgttcagctgaccagcgggaatatcaccaacgccggcagtacgctgttggcgagaaacgatctcactctcgacagccaaaacagtattaacaaccttaacaatagtctgatgcagtctgggggcaatctcgacctgagcgcgatgggtgacattaataacgtcagctccgccataagcggaaaaacggtggcgctggaaagcctgggcggcaacatcaataacctgacgctggcggaacagattgatgtgagtgccagggacaaataccgcaatgtgagctttaaagatacgctgctggggtctgtggcatccattaccgcgcaggacggattgtcgctctcggcaggcaaagatatcaccgttactggcgcgaatatctctgcaggcggttcattgctgatggatgcgtggggagatattgcggtaaatgccaaccagattaacgatgcccggagccactccggacgctggataactgagactggtcggtcgtcagtggactggcagggtagcaccatcagcgcgggcggtaatctcggtatcaatgccgggaataacctcaacgtcaccgccagcgatgttaacgcgggggggaatgctcagcttacagcgggtaacgatctcagtctgaatgcggccaccactcagcaaagtagccgtaacggcggcagtgaatcgcacagcaccgggctttcccgcaccaccgtttcagcgggtgacaatctggtgttgaaagcgggtcaggatattaattcccatgcggccgggctggctgcggagaatgatgttggtctgctggccgggcgagatgtcaacctgctggctgaagaaacgacagacggcgacagctatcgtgcgaagaagaaaaccgtggtcaatgacgccgtacgccagcagggaacggaaattgccagcggtggcgacgccgtcattattgccgggcgtgatgtaaacgcacaggcagcggatgttacggcacaggccgatatcggcgtaacggcaggccgggatgtgaatctcacaaccgccacagagagcgattatcactatcaggaaaccacgaaaaccaaaaaaggattcctcagtaaaaagactacccatacgatagaagaagacagcgctacgcgggaaaaaggcgcgctgctgagcggggacaatgtgactatcgccgccgggaataacattctggtacagggctcagccgttgccggtgacggcaatgtggcgctgggggctggcaacaatgtggatattgttgccgccaccaatacggatacctcatggcgctttaaagagactaaaaagagcggcctgatggggtcgggcgggatcggtttcactatcggtagcagtaaaacgacgcacgatctgcgcgaaaaaggcaccacccagagcgagagcttcagtactgtcggctcaacagggggcaacgtcagtatcaccgcaggccagcaggcacatatcggcggcgcggatatcatcgcccagaaagatattgctgttcgcggcgacagtgtacttattgaaccgggtcatgacaaacgcacccgtgatgaaacctttgagcagaagaagagtggcctgacggtcgcgctctccggcacggtgggtagcgccattaataacgcggtgaccagctcacaggagacgaaggagaccagtgacggtcgtctcagggcgttgcaggcgaccaaaacggcgctgtcaggcgttcaggccgggcaggctgcggctgtggcttcggcaaccggcgatccgaatgcgatgggcgtaagtctgtcgctcaccacccagaaatcaaaaacgcagcagcatgctgagagtgatgcggtatcaggcagtacgctgaatgccgggaataatctcgccattgtggcgaatggaaagcaggacggtgcgaacagcggcgatattgtcattgccggaagtcagctgaaggcggggggggacaccctgctgagtgcgaaaaatgacattctgctgagcggtgcagccaatacccggcagtccagcggtaaaaacagcagcagcggcggtgggattggggtgagcatcggcgctggcggcggtggtgctggtatcagcgtctttgccaacgtgaatgcggcgaacggcaaagacaaaggaaacggaaccgactggactgaaactacgctcgacagcggcaaaagcctgagcatcaacagcggccgcgacacggcactgaacggtgcgcaggtcagcgcagacaagataacggcggatatcggtcgtgacctgctgataagcagccagcaggataacaacaactacgacagcaaacagaccagcgtggcggcgggtggtagcttcactttcggttcgatgagcggctcaggctatatcgctgcctcccaggacaagatgaagagccgctatgactcggtgcaggagcagagcgggctgtttgccggtgacggtgggtttgatatcacggtgggtaaccacacccaactggatggggccgtgattgccagcaccgcgtcagcggataaaaacagcctcgataccggtacgctgggtttcagcgatattcataacgaagcggatttcaaaacccagcactcgggcatcagcctcagcggcggcggggcttttggcggcgatcagtttaaaggcaacatgccgggtggaatgatttcggccgcaggtaacagtggccatgcggagggaacgacgcagtctgcggtggcagacggcaccatcactgtccgtgataaagccggtcagaagcaggatgtggcgaacctgagtcgtgatacggaacatgccaacgacagcatcagcccgatattcgacaaggaaaaagagcagaaccggctgaaagcggtggggcttatcagcgacatcggcggtcaggcggcggatattgcccgcacgcagggcgagattaatgcactgaaagaagcgaagaaaacctacggcgaactgaaggcgggtgcgacggaaaaagagcggcaagactggcttgggaaactgcgcaactcgcctgaataccagggcgagatgaagaagtacggtacgggcagcgatattcagcgcggtatccaggcagccacggcggcgcttcaggggctggcaggtggcaatattgctggcgcgctggcgggcgcttcggccccggagctggcgaacatcatcgggcatcatgcgggtattgatgataacgaaggcgcgaaagcgatagctcatgcgattctgggcggcgtgacggcagcccttcagggcaacagcgcggcggctggcgcggcaggtgcagttgtgggggacgtcattgcgcaccagctctatccgaatacgccaacagagaagctgacggaagaggaaaggcagaccatcagcacgttgtcgtccattgcggcgggtattgctggcggtattgccagtggtaatactgctggtgccgcggccggggcgagcgccgggaagaatgccgttgagaataactcgctgtctgctaaagatgagaaacaaagacaggatgcgaagtggtcattgccgtatatcaaagatgcaggcgagaaagccagtgctgaaaagctggttgccgatctcgatgcaaaagacaaagcgttcgacactgcgctgaataaagcctgtcagggcctgtcatcagatgcctgcaaggggatgcgtcaagagctggcggcgatgggtcggagctatgatgagcagatggacgggcagtatgtcggcacaatgggcagtgtgtacaaggaaggagccgataaaatcgctgggcagcagtggcagtacgctaccgctgatgcgaaagtacagcgcgatgcggatgttcagcgtatagctcagaactggggtgtcagtcctgaaacagcgtcaacactgtacgacacgatgaccgccatccataccaccgcggcgattggtggtgcggtctatgggatgaaaaccaactcgcaatcttcacctcaaggtcctaatcatctcgttaatggcaagtgggttgatgccgaaggattaccattacctgttcctccaagtgtgggggctgctggtcgagtaccgaatgttttacaatcgggcggaaatactttaaataaaagtacagccaacgctctaaatgatagccttggtgagaacatgacaagtcgtgaatggggtagagcattagaatctctgaagaaagataatggtctcagaaatgattttcatggccgtattcttgataatggagactatgtggataaggctggtaaggttattggtaatataggggattatgtgccatga

SEQ ID NO: 394583 - DNA, 1680 bp, Salmonella enterica
gtgagattcaggggtgatttaaacgcattctttctggcttgtgtatttttattaccactaacctccgttttcgccgcatcgctctctcccgccgagcgcaataccattcagcagcaacagcaacagcttcttaatgaaaaccagcgccagcgtgaagagctggagcgtagcgttaccctgcccgaaaccgtaacgccgaaaacgccagcccggactgaaggaccgtgttttatgatttcgcgtattgatattgacggtgcaacgaagttgtccgcaactgcctcggcaaagcttaccgcgccgtgggtgaatcaatgcctgaatattccccgcctgacggaactgacaaatgcaatttccgactggtatatcagtcggggttacatcaccagtcgtgcctttttaaccgaacaggatctctcatccggggtgctgcacattgcagtgcttgagggcaaattgcagcaaatacgtctggaaggcgtcccgtcgcgtactctgcagatgacctttccgggaatggaaggaaagattctcaatcttcgtgacattgaacaggggatggagcaactgaaccgggtgcgccagacgccggtggaaattgaaattttgccgggcagtcagcaggggttctcaatcgttaaccttaccgccacgcctgaatttcctctcaatggctcagtcagttttgataacagcgggcaaaagagcaccggaaccgggcagctcagtggggcattatttttcaataacatgctgggcctggcggataaatggtttatcagcggcgggcgcagcagtgatttttccagcagcaaagatgcgcagaactttgcggccggtgtgagtgttccttacggctacggactgcttgattacaactacagctggagtaactacctcagcacaattgataacaatggttatgcctggcgctccaccggtgacactgaaactcatcgtctgaacggatcctgggttttgtttcgcaatggtgatgtcaaaacggcggcatctgttggtctgacccatcggattaaccgaaacaagctgaatgatgtcatgcttcaaaccagcagcagcacgctttccagcgtttcgctgggtatcaatcacacgcaaaaaattgcttccggtgttgcgacgtttaacccttcattcactcggggtgtgccgtggtttggcgcagaggatgacaacgataaacacggtgatgtgccaaaggcggagtttcgcaaatggagcgtcagcggaagtttccagcgcccgctggcagataaactgtggtggctgagcagcgtgtattttcaatggtctccagaccggctctacggcagtgaacgcctgacgctgggcggagaagcttctgttcgcggttttaaagaacaatacatttccggcgataacggcggttactggcgaaatgaagtgaattattcgctgtttacgctgccggtattcggacagattggcgcgatggcggcattcgacggcggctggctgaaacaggatagcgttgacaggtatgcctccggcacgttgtggggggccgcgctgggattaaccagttcagggcgctggttctccagtcagtttaccgcaggaacgccagttaactacccggactggctggcgccggatcatctcaatgtttattaccgcgttgcagtggcgttttaa

SEQ ID NO: 394584 - DNA, 183 bp, Salmonella enterica
atgtatgaggaagataaaaccatagtaagtgggggggctgatggccgatgcgtacccactgtggtgggcttaagtcgtaaatgtcaccacatattacaggtcaatgtattttggccctggttggagatcctgattattgctgcgagttgtgtcggggctgcatatgtgttcctgaagagctaa

SEQ ID NO: 394585 - DNA, 570 bp, Salmonella enterica
atgaaaatactggcagcaaaagagggtacttacactgaaagcgggatgatcggtgtcatggtacattttgaagggttcaatgatttcattccgttcaccgcctctccggatgataccgaagaacatggacgccagctttatgccgacctcaaagccggtaaatacggccccgttactccgttttccgtgacaccagaaatgatccagtcagcaaaggatgcaaaacatgccgaaatcaataactggcgtgatactcaggagaacggcagtatcatttttacgttgaatagtcatcgctgggactgcggtaaagcctcacaaacccgccttgcgcctgttgtggctgttgccaaatcaggcgcactcccgccaggcttcttctggacggatgccgataacattgatgtgccaatgacagcggacgaactcaccgcactggaagccgccatgcagcagaacatggtgctacagggctttaaaatccacgaacgccagcgccagatgaaagaagaggtggaagccttaacaacgctggctgatatccgcaactaccgtgtgggctggctgtaa

SEQ ID NO: 394586 - DNA, 3219 bp, Salmonella enterica
atgggattgttcggcggtaagccaaaacaacatacgccaagagaagagcgggataacctgaagtccgctcaggaactcagcgtgatcgatgttatcggcgaggggccaataaaagggctggttaatgaccttcagggactgcggctgaatgacacgccggtagttgacgcgcatggcgacgttaatgttcacggcgttacgatggagtatcgcgcaggtgaagaaaatcagtctcccctggaagagtttgacggctccgcgtcggaaacgctgattcaggcggaggtgacatacgacaaaccgattacccgcaccattacttcagaagtcgttgaccgtctgcgtgtcacggttggcgttcaggcgctacaacagacgaccgataaaggcgatcgtattggaacatctgtacagatggatatccagatccagcaaaacggtatctgggaaacggtcaagagcgtcattatcagcgacggtaaacgtaccagtccgtatatggctgcggtgattattaagaatctgccaccgcgtccgtttaatctccgcgtggtacgtattacccccgacagtacgacagaccagttactgaataagacagtctggcagggactcacggaaatcatcagcgagaaacacgcctatcccaacaccgcactggtagggctgaaagttgacgctgaccagttcggtagtcagtcagtgagccgtaaatttcacatccgggggcgaaccgtcaggataccatcaaattacgatccggaaaccagaacgtacgccgggctgtggaatggcacatttaaagaggaatggactaataacccggcgtggatacttctggatctgctgacgcatccccggtacggactcggacagcgcattggtatctccgatgtggataaatgggcgctgtacgccatcgcgcagtattgcgatcacatggtgccgaatgggtatggcggtcaggaaccacgcatgacctgtaacgtgtaccttgctgaccggcgcaaggcttatgatgttatcagtgacttttgctcagtgatgcgctgcattccggtatggaatggacagcgtatgacctttatccaggacaggccgtcagataaggtctggacgtacactaactcgaatgtggtaaacggcgaatttaattacagttatagcgcgttcaaggacagacacaatgcagcggaaatccgttttattgatccggctgacggctggaatgtgtctgttgaactggtggaggataaagccgatatcgctaaaaacgggcgcaaggtgatacagcgggacgcttttggctgtaccagcagggggcaggcgcacagggatggactgtggcttattcagactgaattactggaaacgcagttagtgacattcagtgtcggggcggagggattacgccatacgccgggcgatatcattgaggtgtgcgacaacgactacgccggggcttccattggcgggcgtatcgttgctgtggacgcggcggcacgttcgctgacgctggacagggatattgaattgcccggcaacgggaaaggcatgatgagttttatcggcccgaagggagagccactgagcgttactgtcatggaccgacccgataaaaaccgcgtggtgttaagtgagcttccggcaggtgttgagaagaacagcgtctgggggctgaaacttccggcattgcgtcgccgcctgttccgctgcatgaccgtgcaggagaaagaagacggaacgtacgccatttcagcgttgcagcatgtgcctgagaaggaagatattgttgacaaggggagcaaatacgacccgcagtcaggcacgcttaacggtgtgaccccgcctgcagtacagcaccttgccgtggatacctccgcagacagcagcctttaccaggctaaggcgacatgggacacgccgcgcgttatcaagggggtgcggtttattctgcgtcttactgttggcgcgggaacggaagaagacccaacccgtctggtgacgaccgcgacaaccagcgagacggagtatacattccacgagcttccgtatggaagctatacccttaccgttagcgccatcaacggctatggccagcagggcgatccggcgtcggtggaatttgatattgacctgcctgagccgccagattttatcgagattacaccggcctactttagcctcacggttgccccgcgccagaaagtctaccatccggacgtttcttttgaattctggttctcggagaaacaactactgagtgcggatcaggttctggcggaaggccagtatctggggcgcggcagcatgtggataaaagacggtctggtattgctgggaaccgattactggttctacgtccgtagcgtgaatctggttggcaagtcggcatttgcggaagccagcggccaggtaaaaagcgacgctgaaggcgtgctggagctgattaaggggcagattaccgccaacctgcttaaccgtgaatttctcagcaccatcgagaacgacacggtacgccgggagtttgaggccgcgttgcggatatcagaaaccaacgtacagcagcaactggaaaccctgaaaagcaccgtcaatgtgagcgtggccgccgaactggcaagcatcaaacggacggctgcagacgaacacgatgcggttgcgttgcagatgagtacgctgcagacacaaatcagtacggacatcaccagcaggattgaggcattacagcgggccagcagcaccgcagaaggttcactgacggagaaactgacgcaactgagcgccacagttaacggacagggggcaaccgtccaggatatcagccgggcgcaggccatgcttaatgacacggtggccgcgttgaaatccttccgtgttcagtaccaggcgaacggtaaagcggctatcgccggtattcagttgtctgccactgctgtacaaagcgatattctgatgatggccgacagaattgcattgctgaatccttataacggctcggtaacgctgccattcctgatccagaacgggcaggtggttctggcggatacgtttgtgaagtcgctgaacattaacgatcgcttcgtggttgatactgcgggcaacgtgcaaatcagggacagtgcgagaaacacaggcttatccctgaataacagggtaatcaaagtattcgatgacaacagcagaaagcgggttcaggtgggcgacctgtgggcgtga

SEQ ID NO: 394587 - DNA, 627 bp, Salmonella enterica
gtgaaaaccgcttcggaagggctgcacgcactttacatgcagatacccggccttcgccagcatatacagaacggctactacagggtcaggatctcaggcaaagatgccagcatggacgatatatcagcacggcttaatgagtcgctgaaagacggggcggtgatccatattattccgcgtatggaaggggctaattctggcgctctttcgtttgtggttggcgcgataatggtggtggttggtgtagtgacttcatggacgggggtgggtggtgcgattggtgctgctggcgtagccatgatggcaggtggcgtggtgcagatgcttaccccggctccgaaaaccccttcacagcatcatgccgacaacggtaaggccagcgtctacttctcatctgtcgataacatgattgcccagggcaatccggttcccattccctacggtgaaatcatgtgcggttcccgcgttatcagccaggaaattacaacccgcgacgagagcacgccggagaaagtgattaatctggggcggatgccgttcttcggtcacaggttgcaggataaacttgagcagggccttatcgatcatgggctacccattacaaagcccagggtagtcattcgataa

SEQ ID NO: 394588 - DNA, 738 bp, Salmonella enterica
atgattaacgatgacattctagagcacgcccggcagtgtgcgcctgcggagtcgtgcggttatgtggtcagaacggcgcagggcgagcggtattttccctgcgaaaatctgtctgctgaacccacgatgtattttcgcattgcgccggaggattacctgcaggccagtgcggcgggggaggtggtggcgctggtacacagccatccgggcggtaaaccctatctgagcagcggcgatcgtacgctacagttgcagacggcgcttccgtggtggctggtctgcggcgataaaattcacaaattccgctgcataccacatcttacaggccgcccgtttgaacatggcgtgtatgactgttacacgatttttcgtgacgcctttcatctggccggtattgatctgcctgattttcaccgcgaggaaaaatggtgggataagggccagaatctctatctggataatcttgccgctaacggattttaccaggtgggcgcgaacgatgtgcagccgggcgatgtgctgatttgctgctttggttcatcggtcgccagccacacggcgatttattgcggtaacggcgaaatactgcatcaggtgcaggaacaactcagcagacgggagatttatacagataaatggcaacgacgaacacactcaatatggagacacagccaatggtcaggatctgcttttacggggatcttgaacgatttggacgccgcttcagtctgtgcgtga

SEQ ID NO: 394589 - DNA, 552 bp, Salmonella enterica
atgcaggacatccctcaaaacacccttaatgaaaccaccaaaaccgagcaacccgccagagtccgcttatgggagtttgatttaacccccatcggtggggagcgatatttcttttgtaatgagccgaatgaaaaaggcgagccggtaacgtggcagggcaggcaataccagccttacccgatagacgggaaaggatttgagatgaaagcgaagggagccagtaaccgtccctccgttgaggtgtcgaacctgtttggattagtgaccgggattgctgacgaccttaacagcctggtcggcgcaaggatttaccgccgtacggtgtattccagattcctggatgcggtcaattttcacgtgggtaatccggatgccgacccggaacaggaagtggtgcagttttatgttgttgaacaactggtgtcgattaacagcaagacggcaaaatttacgctggcttccccgatagaatccgatggcgcagtgatccccgcgcgaaccatgctggcaacaccagacggattcccgtcaatcgctaaactttcacggtaa

SEQ ID NO: 394590 - DNA, 333 bp, Salmonella enterica
atggaaacgctgagatatgaagcgcggcccggcatgcaaaccaccatgaagccgggtgtcagggtggttaaattcggtgatggttatgaacagcgcagccctgatggccttaatccgctgttacgttcgtattctccggtttttcgtgtgaaagacgatatggaggcaaaagtgctggaagcgttttttgcccgccacggaagctggaaggcgtttttatggcgttcaccggtgacaaaccggacagtcagagtggtctgtcgggagtggagcatcacaaccgataacccctggatggattttcactgtcagtttgatgaagtaatggcgtaa

SEQ ID NO: 394591 - DNA, 2997 bp, Salmonella enterica
atgagccgtaacgttgcctccctggcggtcagtcttcacgttaacagcgcgacctttaaatcaggtctcgctgaagcctatcagacaggagccagggaatcccgccgttttgcggcggacgtacagcgcgaatccgggaaggcgggcgaggcgcttttgtcagcgggcagaagcgcgcgcggcttgtcttctgacataaaaacattgtcaggccatgccgggacgagttccgccagtatgatgcgcctgcacagcgtgcttaattcgttgtcggtgacggggcgaacttctgcatcatcttttaccggggcgctgattccggcgcttgagcgtaccctgcatggcatggggaggctgagtaccgcctcccgcgaacagcaggcagaacaaagccgcctggttcaggtggcttacgcgacggcaaaagcacagcttggcgttgccagggcggacagggagagtgcgcaggccgccatattatcggcggaaaaagaccttgccgaagcgaaagcgcagggtgaaaaagcgaccgcgctggcgcgttattacgatcagcagaagaaggttaacgccgaatacgggctggcggtgaactaccgcgaagaatatgcgcaggttcaacggcagcttcgcgaggcggatgttgccgccgaagttgccgttaaacggcatgcagcggcggtaaaagcgttaacgatagcagagaaacaggaggccgcaggccaggtgagtctgcgggaaaacctcagacaacttaccgcaggtacgcaggcgtacactgtcagtgcgcgggctgccggtgccgcatcacggtttatgagcgccggacttgcgcttctggggggacctgctgggcttgcgatcactgcactggtggcaggtgcaggggcattgtggtctgcatatgacagggccgaagcgaaagttaaggcgctgaatgcggccatgcttgacagtggggcgggtgccgggctgacgttgtcccggttaaaacgccttaacaatgagctgggcgataccgaaggttctcttaaagcggtaacagccgcagcaaaagcgggatttaccggcgatatgctcgatcaggtttccacccttgccagtcagttagaggatatggggggaagcgccgacgatcttgttcgccagttatcatccatcagtggcgaccctgtaaaagcgatgcaggcggccacgcagcagggatatgagtttaacaacgcccagattgaacagattgccacgctggcccgtcagggaaaagaggctgaagctatcgcactggtccagaagattgtacttggagatgtgtcgcaaaagctgaaagaacagcaggagcaggttaaggaaaacgccacctggtgggacaggctgaaagaatcggtttcaggggcgatgggggcctatgccgaagcgcagatagcaaccacgcgcgcgcaggctgctgcgatgggcgtggatattgacgcgccgggcaggaaaataaaacaacagaacgacgagaagaaaaaggctgaggacgacagggcaaaggctgaacggaagcgccaggatgaacaggccgacaggatcaaaaaggaatcagaactcggcgcagtgataaaggccggggccgacaagacaaaactggccgccgatgccacggcgtttgcgactgaacgctacagggccgggaaaatcacgctggatgagtacaatgccgcactacgcggtatcgataagttatacagcgaccatacacgatcccggcaaccgaaggcgtaccatgacagcgagggagttcgtcgccttgctgcactgcaacagcagaatgttgtactgaaagcgcaggggcaggaaacggataaactgacggacagccagaaaaaactgctggcatttgatcaggaaattgcctcttacagtggcaaaaaactgacgacggaccagcaaagcgtgctgtcgatgaaagaccagatccgcgcccaactggagcttaacgccagtatcgagcagcagaatcagcaaaataagctgtctgtaacgctgtcccggcagttgcatgatgtgcgggatgaaacagcaaaccgcgcacgagagcaggcaaacgcgctggcgcagatgacaatgagcgatgcggcgtacagccagatggtggccgaacagcaggtgcgggaatcatttgccgccaggcaaaaacagcttgatcgcgaagtcgccgatcatgcctcactgctttatcagatgcagacacaaaacctgcaggacgaactggaaaagcagatagccattgttcgcaggggggctgaagataaaaagcgggcggaagaggactatgcagccggctttaaaaaaggcacggaagagtgggttgctgaaaatggtaacgcctataaccagatgcggcagtttgcaacacgctcctttgacagcatggcggactcactggcgaattttgccctgaccgggaagatgaacttcagggggctggcgatttccattctttccgatctggcaaagatggaggcgcgaatcgcggcgtcaaaagcgctgggtatgctgctgaactggggaatgtcggcaattggcggcggcgcgggtgcggcggcaggaagtaccggtacagccattcagaactatggcgcgaacttccagcttaacgcgaagggcggcgtctattcgtctcctgatttgagcgcttacagtaacaacgtggtaaatcatcccacgccgtttatgtttgccaaaggtgccgggctgatgggagaggcggggccggaagcaatcctcccgctgaccagaaacagccgggggcagttgtctgttcatacgtcaggtcagaatggcggaggggttgtgattaatcagaactttaattttgctgttaagggcgatcagaaaacgggtatgcccgacaaaggagaactgtcggagatgggcaggatgttcgaacagattgttctcgacgttatttcacgggaacgccgcgatggcgggatgctgagcgggacttactga

SEQ ID NO: 394592 - DNA, 348 bp, Salmonella enterica
atgaccagccttaaaaaagccctgctgaccgtgacgccggaagctattccctgcaaactgctgggtgttgatgtttttatccgccgaatgtccgcaatggagctgattcagtacgatgaaggtatttctgctgcccgcgagaaagacgacacaagggcgacggtgatactcagcgccgggcttattctttctgcgatagttaccgacaagggcattccgtacgcgaagggggatttacccaccgcagaagaagttgccgggaagcacgacaacagcgccattattgatgcagtgagtaaaattcagcgctgcagctacggtacgctggaagaagcggaaaaaaactga

SEQ ID NO: 394593 - DNA, 468 bp, Salmonella enterica
atgtctgacagttcatctgattacgcaaaaattccggccggctccattgttaaatggggagatctgaacgatacggcgataaagttcaggccgctgccaaactgccggggtgtgggtgcgatggggaaccagggcggttttgttgactgtacaaccctcgcggatacgcaaaaacagtatatctccgatttgccggacggccccgaaaaaacgctgctgttcatcgaccatccgggagatgagagcttcacggcgctgctgaatgccgccgaacagcgtaaaaccattcagttttacgtggaattaccgaacgggcggacgtcaacatcggtgatcgcgctggccggatggcagatgaaagaagtcgccgctcctgccagtgaagtcattatgatcgaagtcaaaggacgccagaacgccattgtatggggcgttgtcgcaccgaagccagttaatggcgctgcctga

SEQ ID NO: 394594 - DNA, 411 bp, Salmonella enterica
atgataaccgttgatatcagcggccttgatgaactcgatcgccagctacaggcaatcggggaggatatcgcgttgaacgtcattcgtgatgcgggaaaggcggcgatggcccccgttgcacaggatatgaagcgcaacgcaggttacgacccgtcaaacacaggtgagcatatgcgcgacagcataacaatacgttcgcgcagcagaataaaagacggtaactggccgacagtgatgaccatcagcgtcgggccatcgtccgcgcacggcatgaaggccgtcgcccaggaatacggcacggttaaacaggctgcagatccgtttatgcgaccggcgctggataacaatataccgaaagttattaacaccctgagcgagcagattcgccaggctatcaacaaaagaggttaa

SEQ ID NO: 394595 - DNA, 396 bp, Salmonella enterica
atgacagagcaggcagttagcgcatcactggcagcgattacggggatgccggtatacccgctggcgctgccggataaggtcagggaaggggtggtctttcagcgcatttccgatccgcccctggggattgaagaaaacactggactggtgtccatcagaatgcaggtctcattcgtcctgctggatgactattcccgcctgctgatgctggacgctgatgtgtgggaggtatggaagaggatcatacacggcacactggaagggcagaacgtacagcgtattgatcgtgacgggctgcaccaggattttcaggatttagatgtgggtaacgttccgcacaggcagtaccggctggtacgggattatatcttcatatgtccggaggatgagaaatga

SEQ ID NO: 394596 - DNA, 351 bp, Salmonella enterica
atgaaatcagagccgctcaatcctttctcttttgactgcctgctgacgctcagttatgtggaaacgacgcgtggtccgctgggtgaggtgctgccgggggaagaagtgacagtagcccgcgtcatgtcacgaatgaatccggtatcaacacgcaaggtcaggacgaaggaccagcaacaggttgtggaaacatgtctttttaccacctggcccagaaaggatgtacagccgggatggcgggtatcaaccgctgatggtgtgtacaccgtgcgtaacgtggatcgttcccgcagcgatcgcattgtaataactggtgaggcggatgtttaccatgacagagcaggcagttag

SEQ ID NO: 394597 - DNA, 312 bp, Salmonella enterica
atgaaactgacatcggctgatataaaaacacaactccgcatggacccgtcatttactgagcatgatgactattttgaaagtcttattgcggcagcaaaacgcagcattgaaagggattattactgtcgtctggtggatgacgacagcgaacaggctgtggacggcgtcaggctggtcgtgatggaagaagatattgccctggctgtcaaatatctcgttgcggatgcctacctgaataattttcagggcgcatggctggatacgcaggcggtgagggcgctgcttttccccataatggagcacaccgtatga

SEQ ID NO: 394598 - DNA, 306 bp, Salmonella enterica
atggcaacagaaagcaaagcgaaagctcagaaaacaaccactcagccggaaggcgagggagcagtacagccacagacagcagaaaagcagggcagcactgtcacacaggacgctgccgtggatgagtcaagaaaagcagtgagattcatcgtgccgtggaagcgctattcccgcgatgacattgcggtatttcctgctgaacaggctgaagaactggtggagcgcggcgcggcagagtggccggataaaaaacgcaggaaagccgcgtcagaggatgaaaatacccatgaaactgacatcggctga

SEQ ID NO: 394599 - DNA, 1287 bp, Salmonella enterica
atgtacggaatcgaagaattacgccgtcagcgcgcatccattaacgatcaggttcaggcactggccacgctggaagcggaagggacggaactgaatgcagagcaactggcgcagtttgccagcctgcaggcgcagtttggtgatatgactgcgaagattgagcgtatggaggcggcagaaaaagcggcggcactggtggctaagccggtcatcacacagggcaacaacgcgccggggatcatcgtcaaagaagagccgcagcagtaccagggggcgggggtggcccgtatggtcatgtccatcgcggcaggaagaggcgatctggcgatggcgtcaaactttgcagccagtgagcttaatgatcagaaactggcggcggtcatcaacaccgctgcggattcaggcggtgcgctggtgccgcagaacatgcgcaatgaggttatcgaactgttacgcgatcgtacgattgttcgtaagctgggagcccgctccattccactgcctaacggtaatctgtccattccgcgccttgccggtggctccacagcaggctatgtcggcgagggcaaggatgtgaaggcatcaggtgcatccttcgatgacgtcaaactgtccgccaagacactgatctgcatggtgccggtatcaaatcagttaattggtcgcgccgggttcgccgttgagcagattattctcggtgacattatcagcggcattgccacgcgtgaagataaggcgtttctgcgcgatgacggcactaacgacacgccaaaaggcatgaagaaagtggcggaagagaacagctgtacgctcgaatgggtcgggacagattattcactgaacgccattgatgcctggctggacagcatggtgctgaaagttctggacgggaacagcaatatgctgagttcagggtgggggatgtctaaccgctcttatatcaagcttcaggggctgcgtgacggtaacggcaataaagtctatccggagatggcgcagggcatgctgaaaggctatcccgtactgcgtaccagtgcggtgccgaccaacctgggtacggcgggcaatgagagcgaaatttatttcgccgactttagcgatgtgttgatcggggaagatggcaagatggtcgtggacttctcccgcgaagcatcctacatcgatgcggacgggcagatggtttcggcgtttgcccgcaaccagtcactggttcgcgtccagatggatcatgatatcggtttccgtcacgttgaggggctggtactcggaacgaaagttacctggtaa

SEQ ID NO: 394600 - DNA, 921 bp, Salmonella enterica
atgcaaaaaatgattaatctgcctcacctggcaaatcaggtgtttggcgcgccgctctacgccacaagagatctggtggatgcggttaaatcggtactgatcccaagaataatggggggtgtccatgacaacattgaaatgtcggcgggcaatgaaaaaggcgcgggaattacgcaaaaacaggacaacgccgcaattgcggtcattcctgttcacggaataatggttccgcgccggggccagataaccgccgcctgccaggaactgaccagttacgagaggttgcgtagtcaggttcaggcggcagttgatgacccttcggtaatggaaattgttctggatatcaactcatctggcgggatggtgtcaggctgtaaggaactggcggattttatttttgcctcgcgggaaataaagcccgtcacggccattgttaattttaacgcattctcagcggcgtattttattgcatctgcctgttcaaaagtggtgatcagtaatacaggcggggtgggttcaattggcgtcattatggagcaccttgacgcttccggatgggaggaaaataacggacttaaatttacctccatttttcgcggagacaacaaaaatatgtttacgccgcacgagccgctttcagaaagtgacagaacggcggttcaggcgatggttgatgccagctacgaaacatttgtctcatcagttgcgcagtaccggggaatggatgtgcaggcagtcattggcactcaggctgcactgtattacggggccgatgcaattacagccggactggcggatgagatgtgttcaccccaggacgccattaacgccatcgcgggtaaatatacccccgccgcagcagcggggagaagcagtattcagttaagggctgctgcaatgaaccagcagtccagaatgtaa

SEQ ID NO: 394601 - DNA, 411 bp, Salmonella enterica
atgaacaaaaatcttcaccccattttcgccaagcgtatccagcaagttctggatgagaacggctggtctatggctgacctctcacggcgcgtaatgctttctcacacatctgtgagaaagtgggcctctggcacgtctgtagccagcggagagcgcttgaaaaggttatcggcggtgaccggaaggcctgaatattggttcttcatggagccaggggatgaaagtgaaggcgaaagggctgaacctaaacccagagtccttgatgaaaaagaagaaacattgctttctcttttcaatcaactcccggaagcagagaaactgcgtgttatcctccatacaaaagcagtcctccaagagatggatctgctgaagaacaacgtttttgatctaattaacgacctcaaaaaatag

SEQ ID NO: 394602 - DNA, 1320 bp, Salmonella enterica
atggcaacgatgatcacccaagacagacaggtagcaaacctgacgccagacgaagggaaagcacgtattgtcgtcagcgttaagtcaaaagccggttcaggattatcagtcgaatcccgaactgggagtcgaacaaagagctggctgtatcgcccttacctcaatggtaaacaaatcaaaatcaccttgggtgcttatcctgcgatgacgctggctcaagctcgtgaagcgcatgcagaagcagtagagctggttaagcaagggatcgatccacgctacgttcgaaaaacaacaaaacaacaaaacgaacaaatgcctattttttcccaattgtgggaaagctggctggccttcagagcggaaagcaagcctattggtgcacgtaccctgtcagattatgagggaacatttcgtcgtcatctggaaaaaggtttaggttcagtaagggtctgtgatttatcacgagcattaatctatgaacacttcattagggtaagaaaaaccagctctgaaggtgttcgtaaggggttgatcttgctaaacatgacccttgatcatgcgacattacaggggtttattgatcataatccagcacggttactcaagcctgcgatgtttggagcctcgatgggtaaaccgcgtgagaggtggttgcctcgggacgagttgcaaacgttatggaaagcattagacgaagctggaaatggtggtggttctgttgccgctggagggcaaggtatcgcatccagcgttatcctttcccaagctgttgccaatgcattacgcctcattattttcacaggagttcgtcgttctgaagcagtaaatatgcgctgggagcaaattaatggcgatcactggacaatacctgaaaccaaaaacggtaaaagtcatattgttaccttgcacccgcttgcaataaccctactgaaaacacagcgcatcatttcaacgggagcttgggtattcgaatctctcagcaaaccagggtttcccatcactggtgatgccataactcgtgctctcgaacggttgagaacaaaatacatggcagaaacggccccattttctccacacgacctacgtcgaacagttgccacaggttgtgcggaatatttggatgcgcctgagcggttgatcgagttacttctaaatcacatccctaaagaccgtttgatcagaacctatcaagtcggccagcaagctgagaaattgcggaacctgtttctaagatggggggatttcattgagcatgaaataattcagcccagccatgatgttcctgataatgttgtcgaggtgatttttagcaggaaatag

SEQ ID NO: 394603 - DNA, 849 bp, Salmonella enterica
atggaaaacatacacagcgagttcggggatatcaaaagatcatatgatcttggcattgttgactacagcagaattcacaatttaataacttattgcattaacactcttgagtataactgctctaaatctgcacttccgtcaaatttaggtaaaaattattttgtttactcacaggctacagggatttctcgtcctataaattcctcaatttacattaacgatgtacaaagttttagttcattatgggaagtatttaatgataatttgaggagaaaacaattttctctaaccccagagcaaattaatgctgttatatatacatcggtaatgtctttctcctgttgctacgacatttggaaaaactcgagcagaaaaactccgggtacatattttgaagttattttaggtagttttcttagtgaatacttgaccggttttacaagaaagaaattcataagtcttcctgctggcctagataaagtatctactgatatttcattcgataatggttttagaggattagtttttgccgctaaaataaccaccagagagcgaattgtccaaccatatgctcaccaacgaattttggattctgtgtttggatttggcagatacaaaagtattttaatgtgcgtaagtgaaacgcaaagagatgatatcagaaccagagttaatgagatatgcgtaccaggtacaatacgtctttttcaagcacatttgagttcgttatcaggaatatattatcttgatccaccaattagatacttacaaaatgatataaggagtttagtctctgttggtgactatggtcagttcttctacaatgatttgccccaattattactataa

SEQ ID NO: 394604 - DNA, 1098 bp, Salmonella enterica
atgaccgttaaattgactggcattgaaagtttttgtggtgctggaggaatgtcactaggtattaaatctgctgggtttgatattagatgtgcatttgacttaaatgagtttgcagttgcaacatataataaaagcgtcgggaataatgcttttgttgcggatgcaagtttggtcacatcagcagagttgctcgagcgttctaatttatccgtgggtgagttagacctttttagtggcgggccaccttgccagggtttttccaagcaaagaaaaggggctcatttgtttgaggacccacgtaacgctttaattaaatattatgttgattttgttcttggattaaaacccaaatcttttatccttgagaatgtggcgatatttgggcagaaaagagggcgtccttatttggatgagctggctcttattttgaaagactatgtgctttatcctcatttttataatgctgctgattatggacttgcgcaaactagagagcgttttgttttagttggcattgaaagaagctttaaaacgccgtttgcagtaccattaccaactgtaaacaaatggaaaactgttggggaagtgttaggtgatctgcctgagcctccagaaaattatacggttcatcctgaatataataaccatcagcgagctcgagtgactgagatcaatattaaaagattttctcatgtgcctcaaggcggcggttggcaggatattccttacgacttacgcttagactgtcataagaaagctgatgtaaaatcaggtggttggccagatgtttacgggcgattgatgtgggatggtcagtgtccaactataactggtggttttgatagctttactagaggaaggtatggacacccgcttcatgatcgacctctaaccccgagagaagccgctcgtcttcaagggtttcctgattatgttgattttcaagggcctagacaagaggttcgataccaaattggtaacgcagttcctccccctcttgctaaagcgatagctcagaatataaaagcagtgcttttagatatcaaaatagagtcggtagaatatgcgagcaacggtgagcagatagccttaatataa

SEQ ID NO: 394605 - DNA, 201 bp, Salmonella enterica
atgaacaccaaccgtattctccgcaaaaaagaagttcttcacctgaccgggatctcgtccgccacgatgtaccgactcattgcgaaagggacattcccaatacctaagaaactgactggcgacagtggccgggcagtggggtggggatcaaatgaaattcaaagctggattgagtcgcgcgggattagcactacgcagtga

SEQ ID NO: 394606 - DNA, 606 bp, Salmonella enterica
gtgattggtaaccaaagcaacaaggctgacgctaaatgccaccgggaacggaaaagcaataacgaggtctttgaatttctggagaagaagctctatctgggacgggatacccggcaaaaactggcactgattgcccggaaactaacgggagcgggttttagcccggataaattcgacgcagagaaagcggcggatgtgctgagtgcctgcgtgaatcacatgtttaatgatctgctcaatgagggagagctaaacgggatttatgggctggaggagcatcccatgatagttccggccaggtcccctaaggcactggaaatctacactgtttatcagcttgtaaaaggtcgttttgacaagcttcatacgggggagtcagatcgtgagaaatgcgcatcggtggcagcaaaacttaatgaatgcgggccggggaaaccgtcatttaaacatttctctgacagtgaacaatggacgcgtgaagatgttgcgtgggtacttcagcctgaaaatatcaatgcactgattaacatccagaatcaaaagtacgcgcggttgagtgctgaagataaaactgcaatcgctactgacagtagtctcaaaagctaa

SEQ ID NO: 394607 - DNA, 360 bp, Salmonella enterica
atgaacagaaaactgttggccttattgatggcagccataacgcttcctgtcgcagcagctcagtacgtaaaacccggagcggttctaacccttaatccgggacagaataacgctgaattcaacattaatgcctcaacgggggatggttcgggcgtatgcaatatggagggtacagcacagcaaatagctgccggagaaagccagaagcatcgatggatatggaatgacaatgccagccagtgtgtcgcaataatcagtgaactgaataacggcaagaccagcgtaatgactcgtggttgtgaaggatactgcggatcccttgcaacagggacaatggatggcttatttaataagaagtaa

SEQ ID NO: 394608 - DNA, 711 bp, Salmonella enterica
atgcattgcaacatggctgccttctctcatcaagggcgaaagaaggaaaatcaagactcctatttgtccattcgtttggacaatggcgcttaccttttagccatagctgatggtgttggtggccatgaaggggggcttttggcctcttctgctgctataagagaggtttcaaggctttttagtaaagataatgaagtaaacattaattatgtttttagtatggttaaggctgcaatcatacgtgaagccaaggcaaaagaagcacctaaaatggctacgacactgactatttgttatataaataataatatggtgtcagtagggcatgtaggcgactgtcggttatatcatttgcgtgatacaggcattataacaaaaacgatagatcaaagcgaaaggcaaaagttgatagatactggtgttcttactaaagaaagggccagattttatcatcggcgtaatgttttattatcagtgctttcgagtgatacggattttgaccttttcgagactacgtttcatcttcaattagatgatcgtttgttattggtcagcgatggtgtatacagcctatgctctaagaaggaactggttacaatgagttcacttcataatgatataaataaatggctagatagtattgtctctttaattcagtcgaaagaagttaaagatgattatactggaatcggttttgagatgaaatgttaa

SEQ ID NO: 394609 - DNA, 1314 bp, Salmonella enterica
atgagatatacaattcaagagaatataggtcatggcggtttcgccagagtggataaagtatatgacactcaaacaaataatgttgttgcgttgaagatttatgaacctttatctgttgtcttagcccatgttgatgatttgtcacttaagagacgctttgtccgtgaagtacaatatcaaagcggagtaatacatcctaatgtggtaaaaatacttgacgctcatttagataatgatcccccatgttttacaatgcctttggctgagtgtacccttggtgatgaattagatgcagaccatactttagggaataacttaaacactgcacttttcaatatcttatcaggtttagagtgtttacataattgtggctatgtgcatcgagatcttaaaccagcaaacgtattgaagtttaatagccctcaaggaatctattatgctatttcagactttggtttaattagtgcaataaacagtgagtcaacgaatctaacagggaccaatgctacaggaggaacagctttatatgcggctcctgaactaatgggggacttcagacgagcaacccctgccgccgatatttattcttttggtgctattttacatgatatttttagtggtcgtgctaatcgtgtaccctattctgaaatatcacttcccggtccaatgggcgatattataagtaagtgtacaaaaagtctagcaataagaaggtattcctctatagctgctttgagagatgatttgtatcgtgtgttgacaactactcctgttactttcagttctagagatcaacaaagagttatagaacttctttcgttaggaactgagcttacagatcatcagtgggattcggtatttttctatttagaaagagcagagaacaatgcggaaattgatatagtattagcttctataacaatcgagcatattaacacgctcaaaaataattcccctgagttatttgcagctcttggtgactacttttctgatattatgcttgcacaaagctttgatttcgactattgcgatgttttagcaagcaaggcgaaaattttcttcgattttggaggggtagggatgaaggctaagttaattctggccttacttgaacttgggacatcacataatcgatggtatgtggaaagaacagtttcttctatgctaacaaatatgtcacctcaattaatagaacgcctactggctgagataagggtaacatcatttaacttctctagaaaaataatacacatggaacaatccatcggctataataggcaagtattgccaccacagttgttaggtattgtataa

SEQ ID NO: 394610 - DNA, 1119 bp, Salmonella enterica
atgaataaagttgcattaattactggcatcactgggcaagatggttcttatttagcagaactgttgctggaaaaaggttatgaagttcatggtattaagcgtcgtgcgtcttcatttaatactgagcgagtagatcatatttatcaggatatacatttgaataatcctaaactctatctacactatggcgatttaacagatacttctaatctgacccgtattttacaggaagttcaacctgatgaagtttataatttgggagcgatgagccatgtagccgtatcgtttgaatcaccagagtataccgctgacgttgatgcgctcggaacattgcgtcttttagaagcgattaggatattaggactggaaaaaaagacaaaattttatcaggcttcaacatctgaactttatggtttagttcaagaaatcccgcaaaaagaaagtacacctttttatccgcgttctccttatgctgttgcgaaactatacgcatactggatcactgttaattatcgtgagtcttatggaatgtttgcatgcaatggtattctttttaaccatgaatcccctcgccgtggtgaaacttttgttactcgaaaaataacgcgaggaattgcaaatattgcgcaaggcctcgacaaatgtttatatctcggtaatatggactctcttcgtgattgggggcatgctaaagattatgtaaaaatgcaatggatgatgctgcagcaagaaactcccgaagattttgtaattgcaacaggagttcaatattcggttcgtgactttgttacaatggcagcagaacaagtaggcatagagttagtatttgaaggcgagggaataaatgaaaaaggtattgttgcttcagtcaatggcattgatgcaaaagctgtaaaagtgggcgatgtaattatatctgtagatccaagatattttaggcctgctgaagttgaaactttacttggtgatcctactaatgcgcataaaaaattaggctggagtcctgaaattactgtgcgtgaaatggtgaaagagatggtttccagcgatctagcgatagcgaaaaagaacgtcttgctgaaaacgaataacattcctactaatattccgcaagaataa

SEQ ID NO: 394611 - DNA, 1077 bp, Salmonella enterica
atgatcgaagagtacaagattatggcacgttttaatgccgcttttgcaaggattaaaataatgttttcccgaattagaggtttgatttcatgtcaaagtaatacccaaaccatcgcacctacgatcagcccaccttcatcaggccatgtaagttttgctggggttgattatcctctattaccactagatcatcaaacaccgctagtttttcagtggtttgaacgcaatccagatagatttggtaaaaatgaaattcccattatcaatacgcagaaaaacccttaccttaataatattatcaatgctgctataatagaaaaagaaagaattatcggtattttcgttgatggcgattttagcaatggacaaaaaaaagcattagctaaattggaaaaggattatagaaacataaaagttatttataactctgaccttaattatagtatgtatgataaaaagttaacgacaatttatttagaaaacatcagcaaactggaagcccagtcagcaagtgaacgagatgaagtcttgcttaacggaataaaaaaaagcctggaagatgtcttgaaaaacaatccagaggaaacgcttatttcatcgcataataaatacagtggtcacttatggtttgacttctacagaaatcttttcatgctaaaaggaagcgatgcatttctggaagctggcaaacctggttgtcatcatctgcaacctggaggcgggtgcatatatcttgatgcagacatgttacttactgataaactgggcattttgtatttacctgatggtattgctattcatgtaagccgtaaagataatcatgttagccttgaaaatggaattattgctgttaaccgcagagaacatccagcattaataaaagggctcgaaattatgcacagcaaaccttatggtgatccctataatgattggctcagtaaagggttgagacattattttaacggctctcttacacaagattatcacgcattttgtgattttattgaatttaaacatgataatatcattatgaacacaagctgtttaactgccagctcatggaggaaatcgttatag

SEQ ID NO: 394612 - DNA, 237 bp, Salmonella enterica
gtggaactcgtttatgacaaaaggaattttgatggcctgcccggtgcaaaaaatatcattctggacaaattgactaagagggttcaccggaccttccccgatgctgatgtccgggtgaaaccgatgatgacactgccggcgatcagcactgacgccagcaagcatgagaaggaacagataagccgtactgttcaggaaatgtttgaagaggctgatatgtggctggtaaaggagtga

SEQ ID NO: 394613 - DNA, 186 bp, Salmonella enterica
atgggaagatataatatattcgaaaaggagataacccagacagaattttgctgcatgaccatcacctatgatcatttaatgataaatcaatcagataaccaattgtcaacttctgtaataacgtattcactctcttttactcagactggacaacactttatttgccgcttcaaactatcagaataa

SEQ ID NO: 394614 - DNA, 303 bp, Salmonella enterica
atgaaaaaatacttagtactgattatgatccttactggatgctcttctacctatgtaggtaaaatgagtgacccatatcgaaaagatatacaaattaataaatatgaaatacatgtaataaagaaatcgcaaacttcttatgaggcttttggtggtgactcatttggagtggatgttttagatcttaaaaaatctcaaattagagcaatagagcaagtttcagggtgtcacgtaattgattccgaatactcttcagtatttatcagaacattacatgcacaagtagaatgtgacagaaattga

SEQ ID NO: 394615 - DNA, 522 bp, Salmonella enterica
atgagcgaaggatggtatcagatacgtattgtcggcctggatgttgatgagacaagcatgttagcccgactgcatgagccgctgcctgacggggccattattcatatagtcccgcgtatggccggggcaaaatctggtggtctgtttcaggtggtgttaggggctgtggcaataggtgcgtccttttttacggcaggcgcttcaatggctgcatggggggcggcgttatctgccggtgctatttcggcatcctcggttctgttttctatgggggcagccatgatgttgggtggagtagctcagatgctaacgccgcaggcaaaaataccctcgtcccgacagaccgataatggcaaacagaacacctatttttcctcgctggacaacatggtagcgcaggggaatgccctgcctgtgttgtacggtgaaatgctggttggctcccgtacaatctcccaggaaatcagcacacgggatgaaggcggcggtggacaggtagtagttattggtcgcgaacagtaa

SEQ ID NO: 394616 - DNA, 696 bp, Salmonella enterica
gtgcaggatattccgcagaacacgctgaacgaaaccacaaaaaccgaacagtcggcccgtattgatttgtgggaaatcgacctgacggcctttggtggtcagcgttactatttttcaaatgaagcgaacgagaagggcgcgccggtcacctggcagggccggaagtatgacgtttacccgatacagggaaccggattcgacctagttgggaaaggtacatctgcccgcccgacactggcggtgtctaacatgtttgggatggtcacaggtcttgcggaagatgtacaaagtctggtcggggccacggtcattcgtcatctggtatacgcccgttttctcgatgcggtaaatttcaaaaacggtaacccggaagcgaatccggaacaggaggctgtcagtcgctggagggtagagcagttatccgaactgaaaaaaaccacggcgaccttcgtgctggccacgccgactgaaacggacggcagtgtgttcccaggcagaacgatgctggccgatgtctgcaactgggcctaccgctcgcaggagtgcggttatgccggcccacccgtcgcggacgagtttgacaaacccacagccgatccgtcgaaggacgcatgcagtaaatgccgtacagggtgtgaactgcgtaataacctgccacgcatcggctgcttcctttccattaaccgtctttcctga

SEQ ID NO: 394617 - DNA, 2115 bp, Salmonella enterica
atgagaacgaataatccaggtgctgcatctgttgctcagattcgtcgggaggttgcggagttgctgcgtccacctcgccggatccccgttgctgatgccgtcaggcagtttatgcgtgtaccaaacggctctaatacgtcaatgccctgggagtcaacgcttacaccctacatgcttgaacccatgaatgtgctggcaaagcgagagtatgacgcggtgatcttcgccggaccagcgcgaacaggtaaaaccctcgggctgattgatgggtggattgtttacggtattgtctgcgatccggcggatatgctggtggtccagatgaccgaaaccaaggcccgcgagcactccaaaacccgtctggcgcgtacatttcgccacagtccggaagtcagaaaacggctcagcccgacgagaaatgacaacaacgtccacgataaaatgtttcgtgatggttcattcctgaaaattggctggccgtccataaccgttttttcttcgtcggattacaagcgggtagcgctgaccgactatgaccgttttcctgaagatatcgatggcgagggggatggcttttccctggcgtccaaacgtaccaccacctttatgtcagcggggatgacgctggcggaaagctcgcccggtcgcgaaatcaccgatgtgaaatggcggcgttcttcgccgcacgaggccccgcccacgacaggcattctttctctttataaccggggcgatcgccgtcggtggtactggccctgtccacactgcggcgactggttccagcccgcgatggaaaacatggtggggtatcgggataacccggacctgatggccgccagcgaggctgcgcgtattcagtgcccacattgtctggcattaattcagccggaacagaaacgcgggctgaataaccgcggcgtctggctgaaagaggggcagttcatcaataaagatggcgggataagtggggaggcacggcgctcacgtatcgcaagtttctggatggagggaccggctgcggcgtatcagacgtggcagcaactggtctataaactgctgaccgcggaagaagaatatgagcgcaccggcagtgaagaaacgctgaaggccgttattaatacagactggggactgccttacctcccgcgcatatccctcgatcaacgtaaagccgaaacgctgatagcccgcgcagaaaaacttcccccgcggcgggtgcccgacggtgtccgtttccttgtcgctactgttgacgttcagggcggtaaaaagcgccgtttcgtcgtgcaggtggtcggttatggcagtcatggtgagcgctggattgtggaccgtttcaatatcacccggtcactacgctgtgatgagagcggcgaggccctgcagataaaccccggcgcgtatccggaagactggcatttactgattacggatgtcctcgaaagggcctggcctctggtcgggcatcctgagcaggaaatgagtgtgttatgcatgggggtggactccggcggggaggatggcgtcacggataacgcgtatgcgttctggcgccactgccggcgggaagggcttgccggtcgggtgtatctctttaagggggacagtaccgcgcggtcaaaaatattctccaaaagctatcccaacaataccgggcgcagtgaccgacaggcccgcgcctgcggcgaagttccgctctatctcctgcagaccaatgcacttaaagaccggatcgcctcagccctcgaccgtaaagagccgggggcaaactacgtgcatattcctgactggctgggcgactggttttttgaagaactgacctacgaagagcgtggcatggatggcaagtggacgaagcctggtaaaggcgcaaacgaggcgctggatttactctgctatgcccatgccctggtaatgatccgcggctatgaacgtatcaactgggataatccgccgccctgggcgcgcctgcctgagtctgcacaatccagccgcaacacatcagcagcagtagaccctgaacctgtgacggatgagagtgaaaatcacgaaatgacagaacaacacaacccggcagtgccgtttggcggcgtgtccggcggaggctggttatga

SEQ ID NO: 394618 - DNA, 498 bp, Salmonella enterica
atgtctgacatcagcaatatcagggatgtttacaactggagcatcgccaaaattgcagaggctttcgcactggacagaaaggccgtaaaacgcaaattacttgacgccaacattcctgtagcaaacaccatccggggcaatcctgtttacaacctcagggatgttggtcccgcactttttggttcaccagcttctgccgaccctgacgatattcatgacccctcaaaaatggaacccaaagaccgtaaagactggtttcagtcagagaatgagcgggtaaaacttgaggtttccaccagacaacttgtccacggtgatgaggtgagggagcagttatcctgcattgttaaagccgttacccaggtgctggatacctggcccgacaagctggaacgcgacaaaggatggaatgtggcacaaatcgatgaagcccagagtatggttgatgagcttcgcgacactctggccgatgaggttatcaattatgagaacgaataa

SEQ ID NO: 394619 - DNA, 177 bp, Salmonella enterica
atgcaaaatcaagttccggagtcaaaacaaatctgcgtgagttccggttcgttcgaaccgcagcacatcatctgtaatcttataaataagcaaccagtctggttctatatgagcatccctgtaacctttgaaattgccttgcaggggatgatcctgatagattttcggaagaggtaa

SEQ ID NO: 394620 - DNA, 261 bp, Salmonella enterica
atggctgcaaacgcttttgttcgtgcccgtattgatgaagcggtaaagaatgaggctgctgaggtgctcgccagtatgggaatgaccgtgtctgatttgatgcgcatcaccctgacgaaagtagcaaaagagaaagcattaccgtttgatatgcgagtacctaatgaactgacaacgaaaaccattgccgccagtgagaaaggtattgatgttcacaaagcagaaaatgcgggcgacatctttaacaagctgggtatctga

SEQ ID NO: 394621 - DNA, 249 bp, Salmonella enterica
atgttttttgatacatacataactataaagatacataacagtttgaaacaaagtggaaaaatagattttagtatcaattttactgcttctatctcatttactttttccatagtgtcaccagtgatttccggttccgatccctgcgggcgtatgggagacgcttggtgcttcgtgcatatgatcacctatctttccaccaatttcactaccaacacgattacctacagcagcgccaagccctcctcctaa

SEQ ID NO: 394622 - DNA, 765 bp, Salmonella enterica
atgaccaatcaagtatcccatttttatttcgaacaccagcattcaattcgtactgttctgattgctggcgatccgtggttcgtcgctaaagatgtttgtaccgccatcgacatcgacgttacacagactcgtaaattagacggtgatgaaagggggctgtattcaatacagaccctcagcggaagccagcaaatgagcatcatcaacgaatccggactctatactttgatactgcgttgtcgtgatgctgttaagcctggtacagttcctcaccgcttccgcaaatgggtaacaaacgaagtccttcccactatccgcaaaactggccgctatgagcatccggtagcaactacccgcagcgccgaaccgttgaccccttccgatatgaataacctgaatcatctggtggtactgatgacccagcagtttgcccgcacagcctcatggaggcttggagtctggcacgccctgcgtcgtgctacaggcgtaccgtcaccagaagaatttaccgttgacgatctgcccgcacttacgcaggaatgccgccgtatcattcagataaccagagaggccggagaaatgatttcgcgcatcgaacgggaaacagtacgccgcatcgtccggcatcgtgaagactgcgacacggtactcgcggagttacagcgggaatggagcacccagcggctggataacgccagtatgcgacgtcttgagcgcttcgaacagatagcgctgaggaggctggataatcgggtaatggcgtaa

SEQ ID NO: 394623 - DNA, 786 bp, Salmonella enterica
atgaaactggaatcctccctcaaacacttcagcccgcagggtatgcacatcagcgacgacgtgaaaggaacctctccggatcgtatcaccggtaccgatataatggtcgctatcggtaccaccagcagccgcgctcgattcggtctggctgctttcttcggaaaggccgggatcagcaaaacggatgaacaacaggctgtgcaggcgctggcgcgtcacgcgatggatactgcaccgaagaacgtgcgcaaagctgcaggtggtgaatttggctggtgtatgctggtactggcgcagtttgcctttgctgagtattcccgttcggcagctaccagcgtgacctgtcacacctgcaaaggcagcggatttatttctcagtctgaggacgtcgtcaaacaccccggtatttttagtcctgacggagtggaaattgtaccgccgaaaattaagcatgagacggttaagcgtatctgcgtggagtgcaatggcaagggaagactcaaagcacgttgtcgttgcggtgggcggggtgtggttctggacaggctgaaaacgaaggagcgcggcgcgcctgtttacaaagtttgcgaacggtgctcagggaaggggtttactgatgtaccatccacggcggctcatcgcgctattttaacctatctgcctgatttgcatcaatccacatggtcccgtaactggaagccgttctatgagcgcctggtggatatctgctggtgggcagaaaaaatggcagacagtgagtttcagcaagtgacagcggaagagtga

SEQ ID NO: 394624 - DNA, 144 bp, Salmonella enterica
atgaaacagaaagacaggtccgtcagcggccaggctacccggataagatatacactcggagcgaaactgttcattggcggtctttacttcggggcgctttttcttgtggttctgcttatttacatgatgaagaacccgtattaa

SEQ ID NO: 394625 - DNA, 5049 bp, Salmonella enterica
atggcagtggaaaataaattcaaacttaatgttattgccgcgtcagtactgatgggactcagcctgtctgctgtggcagcaactgcatcagacacaacccctccggcagaaaccgcaccggctaaacctgcaaaaacatttgccgggctggctacggctttgaaggatgatgctgttaatgttactgtgagcagcgtatcaggttcaggtataacagctggcaaaggaacgttacaggcgattctgagtaaagactcgacaggttccgttgccaagacgctcgagacactcacggcagcacagagcgcatacgataagctgaccgggacgcagaaagaactcgtcatcaaacttaatgatgcaacgaaaacgaaagatgaagcaacgcagacatggaatgatttcggccataaactcagtgctgctaactcagtttttaccgataatctgaacagcatgtacggtgacggacataatgcttttaccgtggatgacagtggtaagcctgtcgcggatgctaaaaagggagacacctccacatatggtaagcttctgaccgcttatgatagcctgaactcttctgttaaagcattgaatgacgctattgtagataacaccaataaactgactgcttttacgtccggaaatgctgatgtaaaagcagccgcccagaaagctgaagctgaggtagtcgtctattctgcctacatcaataaagctcttgaagtaaaaacaacagaactgcagctcgaatcagtcagaaatatagtcattaataatatttccacggtccttggtcagactgaccaggccgacaagattagtgatatcactactgcaaacagtgccggtaagaacctgaaagagttcaaagatgcctatagcgcatggagtcaggcatcaactgcgactgataaagccgctaaagaaaccgcacttgctacggcattccagacgctggttaagacaactggaataaccggggtaactggcgattcaacgcctgaaggtgttaaatttgagaaactggccgacgcatgggtgacattaacaggttctggcgccggttctgttaccaaagcacagcaagatatgaaggatgcggcagacttcggggatgccggtagcccgaatacaactactttggatacctttaactccagtcataccagtgtagtagacacaattaaaacttcaggccttgagaaagcaggtattactgccccgactgaccttaatgatgctgtcagcaaactgcaggtggcataccaggtcctgttaggtaaggatggcaagggtaatggtgctaacgaaacggaatttaaagcgctgcagaccctgataaataaagcctggaccgaccacctcacactgtcaggcatgcgggctgaatatacgcaaaagaaactggatattcagcaagccggaaataaccgccttaatctgttgctgactgaactgcctgaccaacaggcggctttcttaaaagcccagactgaatatcaggcggcgaaggatggttacacgaaagactccagtgtaacaagtgcctgggatgcgctctatgggagtgacggtaaatcaggtgccctgggtgcataccttgactcactgaaagccacatccggcggtattcagatggctattaatgaagcagaatcgacctataagggcattgctgacgataagactcaaacccagcagaaaaacactgcgctttacacactgattggtacgcagaaaacgctggctcaggaaaaactgaaactggacactgcgtaccttcatgtgctgaaaacaggtgtgccggatacactttcctcgcttgttgataataaatttaaaagtctggaaacgctgaatgctgaactgaatactgcagccacgaataagaatgaggcaaaggctcaatacgttgatgcggtgaaagcttaccgtgatgccgatacggcatatcaggcctcaaaatctgaagctgacgctgcaacactcgcttcagcgaaggctaagctcatgacggttgtcggggccagtgacatcagtaagttgtatgttacctccggtaagccggaagatggctttaagtcctttgacaagctgcagacaactgatagtgacgttatcagtaagtacaacactgcactggaagcactgaccacaactaatggtggtggtactgaaatccagcaggcccgccaggctgttgttgacagcatgaacaaactgtccgccctgatgccgctttccactcctgaagaacagactgcataccgtaccgcgtacaactctgccctgagcgaagtgggcgttgtggccacaacggctgatgagcaaagtaaggcaccgggtgccgggaaagtcacccatatcctgggcagtctgaccaaagaggaaattgcacagtacaaccccgtttctggtaactataactccgttattgttaataaggatgataaaaataacttctccgtgaaggacagtttcaccgcgaaagacctgtataccggtacacaggacaatccgttcaccaccactgttcttgatgtccgcgcactggagctgggtaacggtaatctggcagaccccaacaccatcactgtgggtgaaaccggaagcaaagccactccggttgatgtatgggcgaaaacggcgggtgtgaaacacactgataatgatgagacaaaaccctgggtaagcgcagaaaacggtccggcagttaaactgtccggaaatctcagaacggccaccgctcagctggatgaaaacggcaacccggtgaaaaatgagactgtccgtggcgctgaccagattcatctgcagaacgtcaatatccacaacagcttcacgcttgctgacagaacgaagatgctggcagatgatatggctgccataaccagtgaagctacagacaaactgaacctgggtcagcctgctgaaggtgataagggtgtcaatgcctggcgggaagcacagactgctttactgaacagcaaatacaacaatcttgaactgaccggtctgcagattgacaccaaaacggtcgatccgttgtttaagccggggtctgcggctacgaataatgctgctgactgggattatcatgctgttgccggcgctccggatgccgccaacattctgctggataacctgaatatcaccctgcagaacgacagtgtcggtggtatctcaacagcgattgagttgtccggaaccggtaaccatattctggctaacggtggtgtatttgatgcaggtcaggtggccggtacaggcagtaaggctaatgtactggacttcggtaagggtaaaaccagtgcaacaaacaatctcgttgacttctacggctccgtgctgaaaggggatattgtttccacttctgaaggtaaccaggtcaacctgaataacagcaccctgacgggtaatgccgggtctggtaatggtcagcttactctggcgctgaacggcagcacctggaccggtgcatccggtacgcacagtccggatgtcagcctgagtaacagctccgtctggaatgtgaaggcctttggtgatgcggatgataaaaattctcctgacgatgtgacgggcccgtactcttctgtccgtgcgctggccctgtatggcagcaacagtattaacctcgtttcctcagacggacaggcacagctgggcggacatggttttgcaggcacgaaatccgccgtcaccctgaaggttgacaacgacctgttcagcgatggcaagggtgtgacctccgttctggcgggaacttactcgccggataatcttcacagtctgacaaataccggtctggccgggggttatcagtttggcaccctggatgtggatggactggcgaaaggcggacagtatcgcctgtctgtggaaagcgccggtgccgagccgtacaccgttggtggccgtctggctgacagggctgacgcaaccagtgctcatgattttgtgtcatacaaaacgtctgaaagccgcgtcgtcacgggcaaggatggacaggcggttactcagactgttacatctgacgctgacttcaccagcctgagcgcaccggctgagctgggtgtgtaccagtacgccgctgagaaggtgatggacggggtgaacaaccgtacgaacatctactaccgcagcaccggtcaactgtccaacagtgccgccaccgtggtttctctggcagccgcgccggttgatgtggctaacctggagtcagacactctggcgaaacacatgaacagcgtgcgtcatggtaaggattccggcgtgtgggtgtcgtactttggcggtgaaaaccgtaacaccacggcatcaggtccggaatacaaactgaataccagtggcgtcatgctgggcgttgacaccctgacagaaaacaactggctggcgggtgtggcggtgtcttctgcacgttcagatatgagcgtaatgaacagcagcggtgacctgaacagctacggtgcgcagttctacatgtcccgtcgttatgacagcggcgtgtttgtggacagtgcgctgcagtttaaccacttcagcaatacggcaaaagcccgcatgactgatggtcagcaggcgaaagcggacttcagcggtaacagctacggccttgaagctaaggtgggttacgcctggaacagcgaaggattctttgcggagccgtatgtccgtgcagcggcgcgtgcctttgacggtgagcattatgccctgtccaacggtatgaccgtgaacagcaacgactataagtccatgctgggtgaagtgggtgccgacctgggttaccagtatgccatcagtggcggttatgtgaagccatacctgcacctggccgcgcttaacgagtttgctgacggtaactctgtccgcgtgaacaacgtttcgctggatgacagtgtgaagggtgccgccttccaggccggtctgggtgctgaagtgaaggtgacggataacctgggtggatatgcagcctttgattacacgaagggtgataacaccgagcgtccgtggcaggccactgtgggtgtgaactacacctggtaa

SEQ ID NO: 394626 - DNA, 438 bp, Salmonella enterica
atgaagaattatttaaaattttcactggctgccgctttgatgtctgtatctgccctgtctgtggctgcaaccagcgagatgtctgtaaccccgatgagaaaccctatcagtgtgcatgtactgaacctgaaaacaggcgtgccatctgaaggcgtgacggtgattcttgacaaaaaagaaggtaacaaatgggttaagttgaactcagccgtgacaagtcaggacgggcgtattaatgcgctttatccggctggtcaggaaattaatccgggcgattaccgggttacttttgaaacaggaaaatactacgccgaccataacgaagacaccttcttccctgaaattccggtgattatccatgtaccaaaagcgggcgaacactaccatgtgccactgctgttgagccagtatggatactcaacctatcgcggaagctga

SEQ ID NO: 394627 - DNA, 531 bp, Salmonella enterica
atgaagtacaaaataccggcggctgtggcgggaatattactgagtggggcagcccttgcggccaacagcctgacaattcagatgaatgatgcactgacgacgggggcaggtaaaaatattggcgatataaccgtctcagaaacaccttacggccttttattttcccctcatctgaaaggccttactcctggtgtacatggttttcacatccacacaaaccccagttgtatgcccgggatgaaagacgggaaatcggttccggcacttatggctggaggacatcttgacccggaaaaaaccggcaagcacctgggaccatataacgataaagggcatcctggcgatctccccggacttgtcgtcaatgctgatggtacggctacctatcagcttctggctccccggttaaaatccctgtctgagctgaaaggccattcactgatgatccataaaggcggagacaactattctgatgagcctgcggcgctgggtggcggtggtgcacgatttgcctgtggtgtcattgagtaa

SEQ ID NO: 394628 - DNA, 414 bp, Salmonella enterica
atgcccgacttccctctgtgctatcatgaactgaaacgtaaagggatgaccgaaatcctgctctggcaggaatatcaacagaaagccggcgaaaacgcctacgggtacagccagttctgtaacctttatggtgagtggctgaagttgcaaaaacgtagtatgcgtcagcagcatgttgccggtgagaagctgttcctcgacttctgcgggccgacggttccggttatcaacccggacagatatcagcggggaagcaccatcatcattagtcagctatcggtgagtgaatggtacaaactggtgggtaacccgacattagccgatgctctgatggaccggcttctgcataacggacaccgagttgagctcagaggtgaatcaatgcgtaaacctgtcaggcgagttaaaaattaa

SEQ ID NO: 394629 - DNA, 1470 bp, Salmonella enterica
atgatttatcgactgtcgttgagccagcgtctgaccctggtatttactaccattattttgatttgcgcggttgctgtcagcgttgtccagatccgcagcagtaaacagtatggcgacgccatggtgcaaaggctctcgctggagctggcgaaaaaaattgtcaaaagtgagttattcattgatgccagtgggcaggttaatcgccagactttgaaaggagtgtttgatcacctgatgacgctcaatccaagcgtggagctgtatctggtctctcctgcgggagacatcctcgccgatgccgcaccgccaggacatattcagcgacagaaagttgccatattaccgattcagaatttccttcgcgcggaagcattgccggtgtatggcgatgatccgcgcagcagccaacaaaaagttttcagtgcagcgccggtgatgttgaacggtgatctgcatggctatctgtatattattctccagggagaagagctgaatatgctcgcagataccgtctggcagaaaacactgtggaataccgtagtggggacgttgattctggttttgttagcctgtgggattgcaggttttctggtgtggcgatgggtaacgcatcctgtgcaaaccctgatcggacaggtaatcaaaatagagcaggacagcatcagcgttattaaacagttggcgcaaggacagcctgattcggcaccggcgaatgaaattgcgttgttgaataatgcgttcattgagctggctcagaaaattgctcagcaatgggatttgttagctgacagcgatcgccagcgcagagaatttattgccaatatttcacacgatttacgtactccgctgacgtcgttgctggggtatctggaaatgttgtcgctgaaagcagacacgatggcgccagaggaaaaccgacattacctcagtatcgcgctgcgacagggacataaggttcgccatctgtcacaacagttgtttgagctggcaaggctggaacacggggggataaaaccgcaacgcgaacgttttgccattgacgaactaatccaggatgtggcgcagaagtttgatctgtccgttgccacgcgtcatttgcaattacaccttgatgtggaatggccgttaccgttggtgaacgcggatttatcaatgatggaaagagttgtgacgaacttgctggataatgccattcgtcatacgcctgacggaggtgatgtatggttaaaagtctggcgtgatgaaaaccggttactggcagaagtgtgtgacagcggtccaggcgttgaagagggcattcgggaggtcttattccagcgtccgacagggttactaccgcaggaacagcggactgagcgtggtggcctgggattgctgattgtgcgcagaatgcttgaactgcatgggggagatattaatctggttaattcaacggcaggagcctgcttccgtttctctttaccgctttga

SEQ ID NO: 394630 - DNA, 723 bp, Salmonella enterica
atggcaggagcaaaaaagatattgttggtggaagatgacagcgatattgcttcacttttacagcttagcctgaaggatgaggggtacgaaattattcatgaatcggatggcgtgcgggcggttgaacaactggaaaagcaggtctgggatgcggttatcctcgatctgatgttaccgggtgtggatggtctggaaatttgtcggcgcattcgtcaaatgagttgctatttacccgttattattatcagcgcccgcaccagtgaaacacaccgtgtgctgggactggaaatgggggctgatgattatttagctaaaccgttctccgtgctggagttgatggcccgggtaaaggcgttgtttcgtcgtcagcaggctatgagccagaatttgcgtatggaggtgggtagcatcgtcgtccatggcatggagattgatccgttagcccgggaagtccgccagcatgataaacccctcgatttgacgccccgtgagtttgatctgctctattttttcgcccgtcatccgggagaggtcttttcacgacaggcgctgttagatcaagtgtggggctatcagcatgaaggatatgagcatacggtgaacagtcatatcaatcgcctgcgaaccaaaattgaaaaagatgcggctgagccgctaattatcctcaccatctgggggcgtggttataaactggctgcgataaacacggagcgccagtcatga

SEQ ID NO: 394631 - DNA, 1005 bp, Salmonella enterica
atgcaaaaaaaaagaacacttcgggaaactgcagtcacagccgaatctgttttttttatgcaacgacggcagatccttaaagcgcttgggataggtgcagccgcagcctctctctcctccccaacccaggccagtctgttgagctggtttaagggtaacgatcgaccaccagccctggcgggcaggccgctcgaattcacaaaaccggaagcctggcaaagcacactccccctgacgccggaagataaagtgacgggctacaacaacttctacgagtttggtctggataaggccgatcctgccgctaacgccggtagtctgaaaaccgatccttggacgttgaccatcagcggtgaggtgaacaagcctttaacgttggatcatgatgcgctgaccactcgctttccactagaagaacgtatttaccggatgcgttgcgttgaggcctggtcgatggtcgtgccgtggattggctttcccctgcataaattattgtcgctggttgagccaaccggtcacgccaaatacgtagcctttgaaacacgctacgcccctgatgaaatgcccggtcaggaagaccgtttcattggtggggggttgaaatatccctatgtcgaaggcttgcgtctggatgaggccatgcacccgcttacattactcaccgtgggcgtgtatggcaaagcattgccgccacaaaacggggcaccgatacgcctgacagtgccgtggaagtatggcttcaagggcattaaatcaattgtcagtattaagttgacgcgtgaacaaccgccaacgacctggaatatgtcggcaccgaacgaatacggtttttacgccaatgtaaatccgcacgtcgatcatccccgttggtctcaggccacagaacgttttatcggttcggggggaattctcgatgtacaacgacagcccactttaccttttaatggttattccgatgaagtggcatcgttatatcagggcatggatctacgggagtgtttttaa

SEQ ID NO: 394632 - DNA, 597 bp, Salmonella enterica
atgaggctgacttcaaaacagataatcgggctgaaagtactcctgcatctcgccggttttttacccctggtatggcttttctgggccacacagcgtggcatattgggtgccgacccgggaaaagatatccagcattttactggccttactacgctaaagtttttgcttgctaccctgctggtatctccgctcgtacgctatgcgaagcaacctttgttgtttcgcgtacggaggttgttaggcttatggtgttttacatgggctacgctgcatctgaccagctatgctctgctggaattgggtatcaataatttgggactgttgggacgcgaattggtttcacgtccctggttaacgctgggcataatcggctggttcgttttttttctgcttacgctaacctccacacaagccgcgcaacgtaaaatgggtaaacgctggcaaacgttacacaattacgtctacctggctgctgttttactcccacttcattatctgtggtcggtaaaagtgttgtctccgccccccattatctacaccgtatgttttattattttgttggtttttcgctataaaaagttattacggaaaacctga

SEQ ID NO: 394633 - DNA, 252 bp, Salmonella enterica
atgacgccagcggcactctctgcgctttcgctagggtatctcttcccggtgaaagaacggctcgttttgcaggttcacagtgcatttcaacatgccctgaacctgcgctcagaagagggacggtgcctcacgctgttgtgtgcaaagaaatatcaaaacctggcggatgcggcacggatcatgctgccagaacggtgggactggcggcgtgagaccgcaggctccgagtacgacaaaatcgcttggtgttaa

SEQ ID NO: 394634 - DNA, 174 bp, Salmonella enterica
atgcagtcattccctgttcatttaatgttaccaggccctgcctggcatgtactgattgagtttagtggtatggaaaatgcgctgacctgttatcactcaccagaatatcaacttacgcgggatacaagaaaatccgtggctgaaacgatgataactattgttgatggggggtga

SEQ ID NO: 394635 - DNA, 177 bp, Salmonella enterica
atggcccagttcccgcaccagtcgagtgatgatcagctcaggcatggtaccaccaagtacaatgatttgcggcttcacccactgcacgcagttgaacaccgtctgctctacctgaccacgacagcgttcaaaccagctttgcaacaggggatgctgtccggcaatcagctccggtag

SEQ ID NO: 394636 - DNA, 231 bp, Salmonella enterica
atggacgcgcgttccggagggaaaagccattccgaccccaccggcattgcagaacccaccacgcagcattttatgtccggaaataatccccgcgtcaataccgtagccgggatcgataaaagtcagatcgctgtccgcattccattcaccgctgtgcagctcacctaccgccgaggcgttgttctccccccatgtcggccacggcaggttatcggcaaacgcctgctgtaa

SEQ ID NO: 394637 - DNA, 360 bp, Salmonella enterica
atggaacttcgccagattcagcgcgaaccgccttatgacggtcacattttctgctccgtctcccggtggctacgttttaaccccggcggtggttacgccatcgacctgtcatttagtcctgtctttatcgatatgacggccgtctatcttagcgcccgccagcttttgtcattttccggagcgcatcaggaaaaccagtcgctggtgtccattttcgcgcagatcaaaaccctggtggaacagacgctgaaaaagcgccagctcctgcacgcgcatattttgggtattggctatgcggtgccgggctttctgaaagcggacgggcgtaaacgccacagcgtgcccagactggatagctga

SEQ ID NO: 394638 - DNA, 426 bp, Salmonella enterica
atgtatgaatcctgtaatgagttaacgtcgatggttgaggtttaccagcgctggctgaacgaccagacccggcttgctgttcgctatggcatcagtacacgtaaaacgcacacctggcacaccctgacgaccagttacatcactctggaagatgagcaacgggtttccatggtggtgccggcctgtctgttgccggtatcaccgatggtggagcagtccggggatgggagtgtggtttcagtactggtcgatatgaccagcctgcggacatacccacagttgcccggcattctgctgagtgaatgtgcccgcctgcagcttgctggtttacatcgctgtcttgaacgggttttcagccgtctgacggactcgacctacgtcttctttgccaactttggtttctggtcagataatccacccgcctga

SEQ ID NO: 394639 - DNA, 897 bp, Salmonella enterica
atgccacgtggcgacaaagaaaaaattttaaatttccgtattccaatcccttgtcttgataacccggaaaaatccctggctatccagtcagaaatcgtgcgcattctggacacatttacggctttgacaaacgagctgacaaacgagctgacaaacgagcttaaactacgggagaaacaatacaactattatcgcgataacatattgaattttaatggaatttcggggggggggggtaacctgtcagacaggtcttttgtgtcagatatggttatgttccacaggttgtatggtgatatcgaggtggggtggatggcgctgggggatgtggttcaatatgaacagcctggtaaatatctcgtcgaatcgagaagttacagtgatgaatttcgtgtgcctgttttgacagcgggtaagacttttattcttggttacactgatgaaataaccggaatatataaagcgtcacaaaatccggtaataatttttgatgatttcacgacggctaataaatgggttaactttgattttaaggctaaatcatcggccatgaaaatgattacttcaaaggatgaaggaagggtttcgcttaaatacgtctattactggttaaatacattaccagacgaatttattgaaggggaccataagcggcgatggattagtaatttttctggtaaaaaagtccctgtcccctgtccgaataattctaaaaaatccctcgctgtccagtctgaaattgtgcgtatcctggacgctttttcgacgctgactcactccatcagcgagggcttaccccgtgagattgaattatgccgtaaacagtacgaatactaccgggatttactgttaagttttccacggagcattaaaagtcgttcggataacgaagggtaa

SEQ ID NO: 394640 - DNA, 3120 bp, Salmonella enterica
atggaaaagcagacccgggctattgcggaattaaaccattttatcgttctggataagtacacccgtgagtgggagacctgtgactgctatcagagtgaaacggacctggagcatgaactggttcaggatttgatgaatcagggatatgaatatctgcctcatctgaccacgcgaagtcgtatgctggagaacgttcgcacccgccttcagtgtctgaataacgtggactttactgacggtgaatggttgcgctttgttgagcagtatctggataaacccggagacaacagtaacgacaaaatccgcaaaatccatattgattacatctgtgactttacgtttgatgacgggcatctggagaatatttacctggttgaccggaaaaacatggcccgaaattccgtacaggtcatccggcagtttgaacaaaccggttcgcacgccaaccggtatgacgtgaccatactggtcaacggactccccctggtacaggttgagctgaaaaaacgcggagtggctatccgtgaagccttcaatcagattcatcgctacagcagggaaagctttaacagtgacaattcgctgtacaggtatctgcagttgtttgtgatttccaatggtacggatacgcgttactttgccaataccacgaagcgggataaaaacagttttgatttcacgatggagtgggcgaaatccgataacactcttatcagggatctgaaggatttcacggccacctttttccagaaaaacactctgctcagtattctgtttcagtacacggtgtttgatgtcagccagacactgttagtcatgcgcccctatcagattgcagcgacagagcggattttatggaaaattaacagcgcgtataaaaccagaaactggagcaacacagaaagcggtggttttatctggcacacgaccggttcgggtaaaacgctcaccagttttaaagccgcccgcctggcgacagagctggactttattgataaggtgttttttgttgtggacaggaaagaccttgattaccagacaatgaaggagtatcagcgtttctcgccggacagtgttaacgggtctgacagcacggcagggctgaagcgaaacctgaccagagatgacaacaaaatcattgtcaccaccattcagaaactgaatatcctgatgaaaactgagagtgatttaccggtttaccatcagcaggtcgttttcatttttgatgagtgtcaccgcagccagtttggtgaagcccagaaaaatctcaggaagaaattcagacggttttaccagtttggttttaccgggacgcccatctttgtggaaaatgccacaggtgcagaaaccacagccagcgtcttcgggcgtgaactgcattcctatgttatcaccgatgccattcgtgatgaaaaagtgctgaagtttaaggtcgattataacgatgtccgtccgcagttcaaaagcattgaatctgaaactgatgaaaccaggctcagcgctgcagaaacccggcttgcctttttgcatccccgacgtattcgtgggataacacaatatattctgaaaaacttccggcaaaaaacacaccggacatctccgggcgcaaaaggttttaacgccatgctggcggtcagcagtattgatgcagccagagcttattacgacgcctttaaagtgatgcaacaggaagccattgccgcagaggacacatataaaccactacgggtggcgaccatcttctcatttgcagccaatgaagagcagagcgcggtgggtgaaatcaccgatgaaagttttgatgtcagcgcgatgaacggcaacgcaaaagcgtttctggaggcagcaattgatgactataacgagctgtttaaaacgcacttcagtacagacagtcacgggttccagaactattaccgggacctggcacagcgtgtcaaaaatcaggatattgatttactgattgtggtgggaatgtttttaaccggctttgatgccccgacgcttaataccctttttgtggataaaaatctgcgttatcacggactgttacaggcgttctcccggacgaacaggatttatgatgcaaccaagacattcggcaatattgtcactttccgcaatctggagcaggcaacgattgatgccattaccctgttcggggataaaaataccaaaaatgtggtactggaaaaaagctatgaagagtacatgaacggtttcactgatatcgccaccggggaggccagacgaggttttatggatgtactgaaaacattagagcggcgcttccctgataccggcagcattgagacagaaaaagacaaaaaagcgtttgtcaggctgtttggcgaatatctgcgggctgaaaatatcctgcaaaactacgatgaatttaccacgctgagagcattacagaaaattgacctcagtgacccggtggcgacagaaacgtttaaagcagaacattaccttgatgacggggagcagaccaggctaaaggcagtatggcttccgtctgagcgaaaggtccaggattatcgttcaacctataatgatattcgggactggttgcgtcgagaaaaagcttcaggcgatacccccccgtcgactgttgactgggatgatgtagtttttgaggtcgacctgctgaagtctcaggagattaatctggattacattcttgggctgatttttgagcataacaaaaagaacatgaacaaaacggcgctgacagtggaggtgagaaggctggtgcgttccggtctgagccacagggccaaggaaagcctgattgtcgactttatcgaagaaaccagtctggatgagataccggacaaggccggaataattgatgcgttctttacgtttgcgcagcgtgagcagcagcgggaggctgacgccctgataaaaagcgaaaacttaaatgaagaggcggccagacgctatattcgcacgtcactgaaacgggaatacgccagtgaaaatggtaccgggctgaacgaaatattgccgaaacagagtcctttaactcgccagtaccaggagaaaaagcagaccgtgtttcagaaaataggcgcctttattgataaatttaaaggtgtggggggaaggatttaa

SEQ ID NO: 394641 - DNA, 186 bp, Salmonella enterica
atgcgcatcgaagccttactggatttaaaaacccgacccggcgaaaacctggcctgggatgtcgaacaactgcgtctttggtgggtggacagcctcgacgggtgcctgttcgcctgtcacacgcagggtggcgaagacggaaagcgcgctgccggggatgttgttgcagctcatgatcaccgataa

SEQ ID NO: 394642 - DNA, 1197 bp, Salmonella enterica
atgagcgctttactctttagccgtcgcgtacctttattgaatatgagtctgtctgaaagggaaaatgaaaccgcagcgtcctggttgtctgttgatgaatctcaatggcaggaaacggaaaatatacggcgattacatcagcagatttcaactatctggcagactccatgggttgccagttttatggggggacgagcttctcttttcgcagtaattcgtacacttggcctgaaaccgggtgatcaaattgttattcccgccttcacctgccagtgcgttgctaacgcaatcagcttcaacggagttgaggtactgtttgcagatatagaaaccgacacttatggcttgtcagccagggggcttaaaaacgttctgacacaacgaacaaaggccattctgattcagtacacattcggccttgtatgcagggatcttgaagatctattgtcatttgcacaccagaatggattatgggtaatagaagactgcgcccatgcaactggtggtacatggaggggcaggcttctgggtacactgggtgatattgcattttttagcagcgaacgttcaaaaattgtgaatactgtacacggtggctgggttatcactgccaaccctctgcttggggaaaagttaaatacggtatatcttcattctccggctccggatgtccattacactcgtcgcctgttactgactctgcggcacgcctttgcggaactgaaaggcagaaactctgttcttaattttgaaccagtccctcagatgcagcctgctgaactttcgggattatttacacaacaatatagctggaagatgtctgaaccagtcgcgcaactgcttatccttcaactttcgaaactggagtttattctgtcccgtcgtaatcagggagcagccttctggcttgaatggaccagagaacagggtcttccacaacccgcggttcgaaaggatgcactgaatgcctggctacgttttccattattattgactgagtctaaatccagtacaattaataaactggaaaaatcactgaatgtggaagcaggtggatggtttaccaccccaatacatccacaaccctgtaacctgccacactgtcctgaagggacaaaagcctcaaggtactgtattaatctgcctacatggctatgggatgaggaaaaaaataatgccagcgcaccatttcagtaa

SEQ ID NO: 394643 - DNA, 240 bp, Salmonella enterica
atgataagtgattgttttgagaaggtatggtttaccatttttatggcaatgtatgtgctaattatgctgccactgccattctactttaatacagaatatattcctggctggtttggtgttccgatttttgtatatgggtggatgttgcatggtataacagttctggtcctgattgttgtttatgcgtatctttgccttaaacgtcctgagtatcaggacaatgtgccggaggagcagtga

SEQ ID NO: 394644 - DNA, 1533 bp, Salmonella enterica
atgagcaatctctcagaaatgttgcgtccggaacctgttccgttttacaccgtactggtattttttttgctgttactgggtcttataggctggcgtgccgcgcgttcgaccaaatctttaagtgattttctggttatgggagggaaagctggggctgtcgtgggtggtttcgcttatttcgccagtcagtacagtatgagtacctttatgggggttccggcaatgacctacagtaccggatttgcagggatgagcatctctgtgccgggactcgctttttcaatgatcattccagtactgtttgtggggcgtaagctgatgttactggggcgtcgctacaacatgttaaccatgagcgattatctgtcagatcgttatgaatcacgtgcaattcgtggcattcatgctgtgatgtcaatcatttttctgctggcgatgatgggggcacaaactgtcggtgctggtgtcattctgcatacttttaccgggttacctgagtggattggcgtagtttcgatgggcattattgtcgtactttattgtatgacaggtggtatgaccggggctatgatgaccgatgttctgcagggggggctgatggttgcaactgctgttgtgacttttgttgtttctgtccatgcaggagggggtatggaagcaatcacagctaaactggcgaagacaatgccgacacatcttagccatcctggcactgctaatgatttcccgtggcagacctatgtatccatgattgttatgtggagttttttcacgattggtcagccaacgctgttcacaaaattttttactatgaacagttatcgcataatgtttaaagcagtaattctgggcacgctcggaatgttgttttccgccaccatgattgagtggtcaggggtcaacgcttcaacgtttttacccggtctgaccgggaaggatgcggatttcattgtaccccttatccttgaaaaaaacgtatccccctggctttcggcattgctgataacaggtattgtctcggcaggaatgtccacaatttctgcattactggtagtatgtaccggtggtattacacgcgatatatatcagaacatatttaacccggtggcaacgcaacagaaaatcttaaaactctcccgtttgttcacgatttttgttggtattgcagctgtgattatcggaataatgaaacctgccgggatatttacgctgatccgttttgcttttggtggcctggggatttgggttgctcctgtgatcctggggatgtactggaaaagagccacatgcgcaggcgcaatttgttcagtgattattggtgagcttatatatgtatcgatgaaactgtggtggccagaattgtcctttggatttgatccgcttattgtttgttgggcgctcactatggtggtgatggtggtcgtcagtctggctacgaagcctgtcggagccgcaacaataaaacgccattttgacagtttcaggagcaccactcaaatcggaaatgaaaacagcaacgagcttattcgttaa

SEQ ID NO: 394645 - DNA, 969 bp, Salmonella enterica
atgaagatttcaatcgacaggacactacctgtttctatccaggcacagatcgttggtgctattgaatacggtattatggccggaagttaccatcatgatgctgcgcttccatctgtccgggcgttaggcaaaatgttaggggtggcacaacttacagtcagtcattcttataatacgctgaaaaaaatggggttgattgaaacgattccaggtaaagggacatatgttgttcacgagcgaaaagtacaggttcttgataatcaggttgaaagtttacgtcaacgttttcagcaactgcttgtggatggagaagccttagggctttctccatccttttttatcgggttacttaatcagaaaacacaggagacgttggatctgccatttaaagtcgccttcgttggtaactcaaaccgaattaaccaaagttatcttgatactattcgaaaaatactcagccttaatattgaggctgatagttatacttttcataagtttgatgaattacaggatgaggtactggcacaatacccattatatcttactattccacactgcattccccgtttgcgccgacgtttaaaggaagaaatacagatttatgctccgtatttgctcccgtctgaaaatacacgcatgcgtctggcatcgttaccggcagaaagtcgcgttctgctgatttcccggtttgagaattttattcctgcaatgctggagggggtgagaaattttgcaccgcatttaggtgaaataaaagtaattacgctggatgatgatggtctgcaaaaggcactgacagcatggccagtggtgatttacagtactggatgccatagttatctgcagcaatttcccacttcagaagtcatgttcgaatatcgacatacgccggaaccccgttatttacgggagatcctcttacctgctctccatcaatacatacaaaatcgtctaaaacaaaaaggatga

SEQ ID NO: 394646 - DNA, 705 bp, Salmonella enterica
atgcagatacaacatatgaactggtttcaggtagaagaactggttaaacaggaaaaacgggttatcttaccacttgggagcacagaacagcacgcctggcttagcctttgtactgatcacattcttgcctctcgtctttctgtagaagttggagagttgcttaatattccggtttatcccgggttgccgttcggaatggcaccttattttactgctttcccgggtaccgttaaccttcagcctgcaacttataatgctttaattcaggatttgctggagagtctttatcagagcgggttccggcgaatttttctggtgaatggtcatggggggaacagtccggttcaggcgcagattcataactggcttaatcagcatcctgacgcccgcgtgcagttgcacaactggtgggctgcacctgaaacaatgaaacaggttaagcaatttgcgaacaatgccagccatgcatcctggatggagaattttccatggaccagactggcaggtattatcatgcctgataaagaaaaagctgcgcttcatatttcccgtctggcacagctcccggccggtgaagtcagaaattatattggtgatggtaactatggtggtgagtaccagcgtagtgatgaagagatgatgaaaatctgggatgtcgcaaaaagcgaaactgtcgagttacttgaaaatggatgggtaaaatag

SEQ ID NO: 394647 - DNA, 1182 bp, Salmonella enterica
atgggtaaaatagtggacagtcttccttatactttatttaaaaacgcacgtctgctgactccggatggtataaagtcaggttcacttctgacggggtatggaaaaattattgcaacaggggaagtatcttttccgtcattcgccccctgttcagtgatcgatgtgaaacagcagttgcttttgccggggataatcgatcagcacgtacatttaattggcggtggtggggaagatggttttcacacacgaacaccggaagtgatgttgagccagctcctgaaagccggtattaccagtgtgatggggcttcttggtaccgacggagcaacccgtcatgtctcttcattatttgcaaaggttcaggcgttgcgtaaggaaggaataagtgcgtggatgctcactggttcatatgaagtaccaactgttacactgactggttccatccgtgatgatattatgtttattgagcctgttttgggtgttaaaacagctatatcagatcatcgttcctcttttcctgaatgccatgaactgattcggatggcttctcaggctcgtgctgcagcgttaatatcgcgtaagccaggtctggtggttatgcacctggggaatgctgatagtgcactcgatccgctggaagaggttctgatgaatagcgtccttccggtgaaacattttctgcctactcatgtaaaccgacagcgtcatctgtgggaacaggctttgcgtctcgccagcactcacaagctcagtctggacatcacctcgggcattagccctgaaatgggagcaaagggggcagtgaagccatcccgggcgattctggaggcccgggagaagggggtttcactaacacaactgacgctgagctcagatggcaatggcagtattcccgcatttgatgatgaggggaacctgaacggtcttaccgttgccggtttcgacagtctactaagcgaaatccgggatttattgaaagatttaccgctggagtcagtctggccattggtcagttccaatgtagccagccttttaaagctatccggtaagggagaactgaaaattggttatgacgccgattttttacttatgaatgacagtatggaaattacgtcagtctgtgctctcggtaagctgatgctccatcgcaatgaagttctggttaaaggtacatttgaataa

SEQ ID NO: 394648 - DNA, 921 bp, Salmonella enterica
atgtctaaaattaccactaatcgcttcccggcgcggcatggggcacagtggaaaggtgaagaataccataaactggtattggggattgaacaaggtcttactttagcccaacttgctgaacgtcatgagcgcacgccaggaggtataagcagtgctgtgagacgtttgtttccacctgttttgttacaggataaccgttctaattcggtgaatgccttcgcccggtatttgaatgaaactaaaaatgtcgatcgacagtctataatcaatgccatttgcccgtattctgtaactggcgaagtgctcgatcaatctcagggagcagagattcgggtgtcgcttgttgggcaaggtgtatcatcaagggcaaaagtatcgagaaaggtaaaccacatacaggaagacaggcaaagaaatacgtccataactgactcagaattcttgaattatgaggccagagacgtcgatgtgctcgtgcttgtcagtgttgctgtggcaagtttatctaaggaacgtgatcgcgacgtacttcttatgcgtctcggtgtggaggagcagccactcacacttgatgagatcggagttaagtgggatgtttcccgtgaaagggtacgacgaattcaggaacgggctttcaggcggctggcttcgcaagctcgccgtgaaggaacaccgggcgcagctctcaaaaaattgatagagtcagcttgttcttcctccgatgctgtggcggtccgggtgcttaatattgttcatagtgattttataattccgcctcgactggccacaaaatttattcttcacacggccggtttcacaaatgataatatagttgaaattatggcactttttccactatcgggcggctacagaggggtaatgttgcgtgagttagagcaacaggtcgagccaggtaggtaa

SEQ ID NO: 394649 - DNA, 450 bp, Salmonella enterica
atgaaaaggattgcatttggctgcgatcatgtcggttttatcctgaaagacgatatcgttgtgcatctgcgccagcgcgggattgacgtcgtggataaaggcgcatggtctacggaacgtaccgattatccgcgctatgccagcgccgtcgctgagtccgttgccgctggtgaggccgacggcgggatcctgatctgcggcaccggcgtcggcatatctatcgctgccaataagcatcccggtattcgggcggtggtgtgcagcgagccctactcggcgcagctttcacggcagcataatgacaccaatattctggcctttggcgcgcgggtgatcggtcttgaactggcaaaaatgatcgtcgatgcctggctggatgccgaattcgagggggggcgccaccaggggcgggtagacgcgatcggcgcgattgagcagcagcggacttga

SEQ ID NO: 394650 - DNA, 888 bp, Salmonella enterica
atgagtcagtcagaatccagttcgctccctaacggtatcggccttgccccctggcttcgcatgaagcaggaaggcatgaccgaaaacgagagccgtatcgtcgaatggttgcttacccccggcaatctcagcgatgcgccggccattaaagacgtcgcggaagcgctatcggtatcagaagccatgatcgttaaggtttctaagctgctcgggtttagcggttttcgtaacctgcgcagcgcgctggaggcctacttttcgcaatctgagcaggtgctaccgaccgagctctcctttgatgaagcgccgcaggatgtggtgaacaaggtgtttaacatcactctgcgcaccattatggaaggccagtcgatcgttaacgtcgacgagattcaccgcgcggcgcgcttttttgctcaggctaaccagcgcgatctttacggcgcgggcggctccaacgccatctgcgccgacgtgcagcataaatttttacgtatcggcgtgcgctgccaggcctacccggacgcgcatatcatgatgatgtccgcctcgttgctgaaagaaggcgatgtggtgctggtggtttcacactccgggcgcaccagcgatattaaatccgcggtggagctggctaaaaagaacggggcaaaaattatttgcatcacccacagctatcattcgccgattgccaaattggctgattttattatttgttcgccagcaccagagacgcctttattaggccgaaacgcctcagcgcgtatattacaactgacattattagatgcattctttgtttccgttgcccagcttaatattgaacaagcgaatttaaacatgcaaaaaactggcgcaattgttaatttcttttctccaggtgcgctgaagtaa

SEQ ID NO: 394651 - DNA, 936 bp, Salmonella enterica
atgaataaatatctgaaacttttcagcggcgcggctatgggcgtaatgttatccaccagtgcctttgccgccgccgattatgccgtggtcttaaaaaccttatccaatccattctgggtggatatgaaaaagggtattgaagacgaagccaaaaccctgggcgtgagcgtcgatatttttgcctcaccttctgaaggggattttcagtcgcagctgcagttgtttgaagacctgagcaataaaaactacaaaggtatcgcctttgcgcctctctcctcggtaaacctggtgatgccggtggctaaagcctggaaaaagggcatctatctggtcaacctcgatgaaaaaatcgatatggataacctgaagaaagccggcggcaacgtagaaggttttgtcaccacagataacgtggctgtcggggcaaaaggcgcagagtttatcatcgacaaactgggggctgaaggcggcgaagtcgctattatcgaaggcaaagccggtaacgcgtccggtgaggcccgccgcaatggcgccaccgaagccttcaaaaaagcgagccaaatcaagctggttgccagtcagcctgccgactgggaccgcatcaaggcgctggacgtcgccaccaacgtgctgcagcgtaatccgaacgttaaagcgatctactgcgccaacgacaccatgggaatgggcgtagcccaggccgtcgctaatgccggcaaaaccggcaaggtactggtggtcggtaccgacggcattcctgaagcgcgcaaaatggtcgaagccggacagatgacagccacagtcgcccagaacccggcggatattggcgctacgggtcttaagctgatggtcgatgctgagaagagcggcaaagtcatccctctggataaagccccgcagtttaagctggtggactccattctggtgacgaaataa

SEQ ID NO: 394652 - DNA, 1533 bp, Salmonella enterica
atgctcacgccatatatttcaatggcggggatcggcaaatcctttggcccggttcacgcattaaaatcggttgatttaactatttacccccatgaaatacatgcgttattaggggaaaatggtgccggtaaatcaacgctgatgaaagttctgtcgggaatacatgaaccgaccaaaggcaccattacgattaataacgttaactacgacaagcttgatcataaattagcggcccagctcggcattggaattatttatcaggaactcagcgtcattgatgaattaacggtgctggagaatttatatattggccgccatctgacgaaaaaagtctgcggcgtcaacgtgatcgactggaaagaaatgcgcttgcgggcggcgatgatgctgctgcgcgtcgggctgaagatcgacttagacgaaaaggtggcaaatctctccatcagccacaagcagatgctggaaatcgccaagacgctgatgcttgatgccaaagtcctgatcatggatgaaccgacctcctcgctgaccaataaagaggtggactatctatttctgatcatgaatcagctgcggaaagagggcgccgccattgtctatatctcgcacaagctggcggaaatacgccgcatctgcgaccgctacacggtcatgaaagacggcagcagcgtctgcagcgggatggtcagcgaagtgaataacgatgacatcgttcgtctgatggtcggccgcgaactgcaaaaccgcttcaatgccatgaaagagagcaccggcaatatcgcccgcgagacggtgtttgaagtgaaaaacgtcaccagccatgacaggaaaaaggtacgcgatatctcgtttagcgtgaatcgcggcgaaattctcggttttgccggactggtcggttccgggcgcaccgaactgatggactgcctgtttggggttgataagcgtagcagcggtgaaatttacctcaacggcaaagcgatctccccccgctcgccgctggacgccttaaagaaaggcatgggctacatcaccgaaagccgccgggaaaacggctttttccccaatttttctatcgcccagaatatggcagtcagccagagcctgaagcgcggcggctacaaaggggccatggggctgttccgcgaaggcgacgaacgcaaaacggcggaagagcagcgcaagctgctggcgctgaagtgccattcggtcgatcaaaacattaccgagctatccggcggcaaccagcagaaggtgctgatctcgaaatggctatgctgcagccccgaagtgatcatttttgacgagccgacgcgcggtatcgacgtgggcgcaaaagccgaaatttataaagtgatgcgccagctggccgatgacggaaaagtcatcctgatggtgtcatccgaactacctgaaattatcgccgtctgcgaccgcattgccgtgttctgcgaagggcgactgacgcaaatcctgaccaatcgcgacgatatgagcgaagaggagattatggcatgggcactaccacaagagtaa

SEQ ID NO: 394653 - DNA, 981 bp, Salmonella enterica
atgggcactaccacaagagtaaaaggcgatatggacgagaaaaaaccgtttaacttcgcgctgttctgggataaatacggcaccttttttatcctcgctatcatcgtcgccatcttcggcaccctgtcgtcggagtacttcctgacgaccaacaacattacgcagatctttgtccagagttcagtcaccgtgctgatcggcatgggcgagttcttcgcgatcctcgtcgccgggatcgacctgtcggtcggggcgatcctcgcgctctccgggatggtcaccgccaagctgatgctggcgggcgttgacccgttccttgcggcgctgattggcggcgtgctggtcggcggcgcgctgggcgccatcaacggctgtctggtcaactggaccggactgcatccgttcattattaccctcggcaccaacgccatcttccgcggtatcacgctggttatctctgatgccaactcggtgtacggcttttcgtttgatttcgttaacttctttgccgccacgccgctgggcatcccggtgccggtgatcttctcgctgattgtggcgctgatcctgtggttcctgaccacccgtatgcgcgtcggccgcaatatctacgcgctgggcggcaacaaaaactccgctttctactccggtatcgacgtcaagtttcacatgctgctggtgttcatcatttccggtatttgcgccggactggcgggcgtggtctccaccgcgcgtctcggtgcagcagagccgctggccggtatgggctttgaaacctacgccatcgccagcgccatcatcggcggtaccagcttcttcggcggcaaaggacgcatcttctcggtggtcatcggcggcctgattatcggcaccatcaataacggactgaacattctgcaagtacaaacctactaccagctggtggtaatgggcggattaatcatcgcggctgtcgccctcgaccgtcttatcagtaagtaa

SEQ ID NO: 394654 - DNA, 696 bp, Salmonella enterica
atgaaaattgctccctctttaatgtgtatggatctgctgaaatttaaagaacagatcgagtttatcgaccagcatgcagactattttcacatcgatattatggacggtcattttgtgccgaacctgaccctgtcgccgtttttcgtcggccaggtcaaaaagctggccagcaaaccgctggactgccatctgatggtcacccgcccgcaggattacattagccagctggcgcaggcgggggcggattttatcaccctgcatccggaaaccatcaacggccaggccttccgcctgatcgaagaaattcgacgccacggtatgaaagtcgggctgatccttaacccggaaaccccggttgagaccatgaagtactacattcataaagccgacaaaatcacggtgatgaccgtcgatccgggctttgccggacagccgtttatcccggaaatgctggagaaaatcgctgaacttaaagcctggcgcgagcgcgaaggactgaactacgagatcgaaatcgacggctcctgcaataaagccacctatgaaaaactgatggcggcgggcgcggacgtctttatcgtcggcacttcaggcctctttaatcacgccgagaagattgaagatgcgtggcagatcatggtcgagcaaattctggcggcaaaaaacgaggtacagccttatgcaaaaacagcgtaa

SEQ ID NO: 394655 - DNA, 912 bp, Salmonella enterica
atgcaaaaacagcgtaacgtcgtcgcgggcgtggatatgggagcgactcatatccgtttttgtctgcaaacggcgcagggcgtagcgctgcactgcgaaaagctgcgtaccgcggaggtgattaacgccgacggcctggttaacggcattaaaaacctgctacagcagcagctaaaccaacatgatgcccgctgctgcgggctggtgatggggtttccggcgctggtggcaaaagacaagcggacgattatctccacgcccaacctgcctctggccgctgacgacctgtataacctggccgagcggctggaagcggcgctgggctgcccggtggagttttcccgcgatgtgaatctgcagctctcttttgatgtgcagcagaacggcctgcaggggcaggaggtgctggcggcctatcttggcaccggtatgggcttcgcggtctggctgaacggcgggccgtggaccggcgcccacggagtggcgggcgagctggggcatatcccccagagcgatgacgccctcacctgcgcctgcggcaaccccgcctgtctggaaaccgtctgctccggcattgcgctaaggcgctggtatgaacagcagccgcgcgcgtacgaactgggcgagctgttcgttcatgccgcgcaggagctgtttgtgcaacaactgctgaaccatgccgcccgcgccatcgccaccagtattaacctgttcgatcccgacgcggtgatcctcggcggcggcgtaatggatatgcccgctttcccgcgcgacgccctaatcaccaaagttaaaacctacgttcgccgtccgctaccgtatcaggccgtacgctttatcgccgcttcctcctcggcgtttaacggtacccggggcgcggcggcgctggcgagaagccgttatttgacatag

SEQ ID NO: 394656 - DNA, 513 bp, Salmonella enterica
atgaaaaaagtcgtcacggtttgtccgtcttgcgcatcaggttgcaaaatcaacctggtgatcgataacggcaaaattgttcgggcggaggcggcgcaggtgatgctggcagtggaaatcatggataccgcctttatgaactccatcagtaaatggaaaaagtgggatgagatgctcgcctcaccgtggttcaccgtctatccggatgtcggcaaccttagcgcgtggggaaatgacgttaccgctgaactcaaactgggtatcgatcgtattgccgccatccatttaaaggatacgcaaccggtcaccgcgcaaagtccgggccagttccgtgacgtaccgtttggggaaggctgtgtggattttgtcagcattttcctgcatgaactgaactatcgtggatcatttttgattgagatgtggacggaaaaagcagaagagccggtactggaaattatccaggcgcgacgctggattgaagcatgcatgaaggaaggaggatttacatgttag

SEQ ID NO: 394657 - DNA, 213 bp, Salmonella enterica
atgcccgctaccctctggtgcggcagaatgtccaataccccggcacgcagcttcttgttgcagcagggagcgtttgccgcgaccggttttagcccggagatggtggcgacagtagaacaggacatcgtcaccagcgaacctctggcaggcactcgcacgctatcctgtttggcaattgaagatgcttacaatcgggccgggatcggtaattaa

SEQ ID NO: 394658 - DNA, 954 bp, Salmonella enterica
atgatggacgatccgcgccataaggcactacgcagattgattggtccggccatcaccaatgcccgagtagcggcaatggaggatattttgtttgcagcagcaggggctgccgtacaggccgcgctccagcaggaatgcgtcgatttcttctttgccatcgcagcagagctgccactatttgctatcgctaatttagtcggtatcacacacgatgatcgccatcaaatttttgcgtggattaacgccgtgctggactattcggaccgtcagttgggtgaaacctgcatcagtagccaacaagggatgcagaactttatggcctacgggaataagttcgtcgaagagaaacgccagaagccaggcagcgatattgtgtcacttgccgtcactggcgagctccccaaggggctgggaaaactgacgccactggaacaattgatggtgttcagtgtggtcatggtggcggggctggaaaccacacgtaatgccattgccggtggtattttggcatttattcatcatccagatcagtggctgcgcttgcaacaggacggcggtctgatgaattcagcgctcgacgaaatattgcgttggacctcaccgaccccctataaccgtcgaacagcaatgcgcgatgtggttattggcgatcggctgattcgtcgtggggagaaagttacgttatggtgggcatcggccaaccgggatgatacttattatgaacaaccttttgtgttcgatatcggccgccagaaaaatctgcatatggcatttgggagcgggggacatagctgccttggctctcagttagcgaggctggaaatgcgcgttattttgctccatctgctggaccaagtggatggatttaggctggatggcgatgttaattgggtgcgcagcaataaacatacagggattcgcagtatgctggtgcggtttgtgaaaagatactga

SEQ ID NO: 394659 - DNA, 519 bp, Salmonella enterica
gtgctgatagccgagcatgttgataagcactcctggtttgatggcgagattgaactggacgagaattattttggtgaacatcgaaaaggtcagcgtggcagaggtgctgccggcaaagtacctgttttcgtgcttctcaagcgtggtggcaaggtttataccggggttctacccgatgctaaatcgcgaacatttctgccgataattgagtcaaaaatttaccctgacagcattgtctacactgataatttcgccagctacgatgtactggatgcgagcgattttaagcattacagaatcaaccacagcactcagtttgtcgacaaaaaagaccgacaaaatcacatcaatggtatcgagaatttccggaaccaagcgaagcatcatatgcgtaaatttaacggtattccgaaggcgcattttgagctgtatatgaaagaatgtgagtggcgatttaacacaccacgtgaaaaacagcaattaactattttaaaacaggtagttaaaggtaaaatttaa

SEQ ID NO: 394660 - DNA, 276 bp, Salmonella enterica
atggaaatttactggacactgaaagcccgggacgatctggaacgcatctggtattttgctcttcaatatagtcgccagcatgccgatgtggttttagaacgcctgataaccggatgtgaggggctgaaaaggcatccggagattggtatacatcagcccagatatgaaccacgggaagtcagaaaggtattgtttgacgattacgaagtccactatgagatcaaaggttgtgacattttcatagtagatctctggcatacgaaagaggggcgctga

SEQ ID NO: 394661 - DNA, 222 bp, Salmonella enterica
atggtcataaaagaaacaattcaggaccattcacaacagaaaacgttgcctgatgtgacgaacagtgacggggaatgttcatcaggtccggaggctctcgccggtacagataaaagtgaatggccggcggtcacgcaggccatagcccttatccgtaccacacgtaagaccgcgtccttacgttcctggtggtcaggtctgaccgggaggacacctgaatga

SEQ ID NO: 394662 - DNA, 675 bp, Salmonella enterica
atggcaaatcgcggcattctgagcatttcagccggtttactgatgatgttaacggcaggattttccccgtctgccgcagcacaacaggtacagggccaactgttactgaccggcagcccggtgcctgaaggctatcgtcgcgttgcaaaagagtatggcgtaccagcagaagcgctgtattcggtgtccctggcggaaacttcccgacagttgccgcagggggagcgcccgtggccctggaccctgaacgtggcgggaaagggataccggtatgccagccgggaggaggcataccaggcgctgctgggttttatgcgccattacccgctcagacggatagatgtggggattgcccaggtgaacctggggtggaacggcggatatttccggaactatcgtgaagctctggagccgtacaccaacctgcgggctgccgcgcaaatactgcgtcactgctatgacctgaatcccggcagctggctgcaggcagcggggtgttaccaccatccggcgggcggaaaaccggcccggacctaccgggccattgtacagcggaagctggaaacgattgcttctgtggaaccccgtccacgcagcgcggctcattcatccccggtgacagcgactgaaacggcgctgcggtgggcggagcctcagataccgggagagcgctga

SEQ ID NO: 394663 - DNA, 813 bp, Salmonella enterica
atggtccatcacagtatgtctggcggaggggggattattgaagcatggtttaagtcattttctgtactgtccgctccggaaaaggtggggtgggtttttgtttttattgtcatgatactcacgctttctcctgaaataatatttattttttgtaaagttatatccggtattaagtttatcacggaaagagtcaggaatatcaaatggacctgctgctcgctctggcgcgaacggagccagcccaaaaaacagtggcgaggaatcaacaagggtgtgcaatattttctgaatcgtttgttccggataacctttactgcgaccggctttacggttcatcaatcttttcagtgtgtaaggagtttgtttatgaatcattatttttcagtgctgatgcgttccggcaggggagtactgcgctggctgatatggacagtgaaatatggcgttgttctgccgctgatgacgatgatgatcgttgtggtatttctgttctggcaggctgacatgacgccagggaagataatggtgagggaaattgagcgtacaaaggccgggacgggtgccggagagtttctggttcgtgagtgtccattaccacagactccgcccggacttccggtagctgatgttccggtcactgatttgaaaagcggtgaaggttgtctggtggtggtgacggatgcagccgggtatgccggcagggttgacaccagtctgagagactggctggcgaatgtatggctgatactggcgctgatgttcacaatcccgggtgttttcaggcgttttgttcgcgggctggatcgtttttaa

SEQ ID NO: 394664 - DNA, 201 bp, Salmonella enterica
atgacagatttttttaagcatatatatggtctgttacttgaaggtaatggcacggtacttattattttatttttaggtgttctttgtttttggtggtacctgcttatcttaactctgacaattatcagggttgtttctgtggttgctggcttgctcaggaagtttatcatcagtaacagaaataagaagattaacagataa

SEQ ID NO: 394665 - DNA, 201 bp, Salmonella enterica
atgccggagaataatgagccagagttccgttacatgaacgagtgggtgaatcaaaaccagaaaatgaaaaaattatcatttcagccctgtcgccgtgtaactctcttcaggaacctggagatcttatcagcaatgaatgctatttcaggaataaagagcgcaataataaaacaaataacaaaaaaaaacaggcactggtaa

SEQ ID NO: 394666 - DNA, 183 bp, Salmonella enterica
atgacaaattttatagcagacatcagtgccctgattagagagggtaacggagcaaccttaattattttatttctggggtttgcatatgcatgttttatggtttccctggttgtttttatggtcataaaatgggggactgttggtttccgtttcttcagaaacagaaataagaaactcaactga

SEQ ID NO: 394667 - DNA, 567 bp, Salmonella enterica
atgcgtgttatccggcaccgtatttccggtgaccataatgatacatccgggcaacaggggagagtgactgtggacatttatgtgggattactggtgaccggcgtggtgctggcactgctcagcctgattgccggtgactggctggagagtattttttgcctggacgcgctgcacccgatggtggtggcgtcagcctgcaccatgacgggcggcgcgggaatactgctgctgaaacatacggcgctggccacgtttaccgtgctggcgctggcactggccggtgcgttggttctgtccgtggcggtgttttacggctatgtgcgaccgatgaggcattcggagacctccacggccttttccatgaaagagctggcgggaaaagaggcggtggtgagtgtgacgattccggcacaggggtatggcgaagtgatggtctgcatcggggcggggcagacctttcaggtggctgccagctttgacggcacgcagattgagaaagaaacaatcgtggtgattgtcgaggtaagcgacggtgtcgtttacgtctcaccattttcattagagtga

SEQ ID NO: 394668 - DNA, 156 bp, Salmonella enterica
atgaaaaacagccaggaagatttgcataaccatctggcggataacgccgtcatgaactgctggtacgccggctcctccccggaatacaggcaggccacgctggcgatggtgcagataaaaatggcgataacgcgccggcggcgggagataaaataa

SEQ ID NO: 394669 - DNA, 288 bp, Salmonella enterica
atgaataaagaaagtctttcctggtggttgtcactgttgttttcgggcatcgtcagttattgtttctggttgcagatgagtccgggccgggaccagaaatatcttttccctgaagcaattattgcagccatgctgtccttcactgccgtgttcggggtggcgttacatatgcctcagtattcggacaggctccgttctcccgtatttctgacgctcagtattctgctctcactggttgctgtttcctgtatctggttaactggtgacagtttctactcccggagttaa

SEQ ID NO: 394670 - DNA, 288 bp, Salmonella enterica
atggccggacagagttttccctgtggtccataccctcaactggcacatgtttaccccggctgtgttttacccgatctgagaggggtatttatccggggcctggataacggacggggtctggatccgggacgcggcatcctcagttaccaggaagaccagagtaatatgacacccagtgctggcggagggttgcatggccatcatcatggtatgacctattactatcccggaggccaggaggtacggcctaaaaacgtggcattcaactacattgtcaaagcggggtaa

SEQ ID NO: 394671 - DNA, 651 bp, Salmonella enterica
atgctgataacggtaagaaataaggccgccagggcagcagccggaaccacggcagtactgatgttgctggtatcgctgatggctggcggggcacgggcggaaacaaccgcgactgcacccgggcaggaacatgacacaccggccactgagccggttgtgccacaggcgcaaccaccggaagagacggtggtccggataccgtcaccggtgacggaggccacaccgccggtgccgccgccgggcagtatcacactgggcatgctggaagacgttcagcagaaaaacctgctgctggcggcacaggtgcagactgcgcagctggagcgccagctggcagaggcgggcagcgacgcgctgccagggggcgcaacagcgccttcagcggcggaactggtttcttccgtaccgggagcgggacggacggacagcccggtcgcgtcacgggtgaaggatgcgggggcagcccgcccgcaggtactggaaatcagtggtaaagacaacacgctgtacgccctgctgcagatgccggacggctcacagccggaggtgacccgcggcagcagggtcaccatcgggaaaacctcgctgacggtcagccagatttcgctgaccggcgtcatgctcagcgacggttcggaactgtcgttctga

SEQ ID NO: 394672 - DNA, 1305 bp, Salmonella enterica
gtgactgagatgacggacgtgacagcagacacggtaactgtggtggttgccgggcggtgccagtgggcggccgggctgcgctgggaggtgcagggacatatgccggcgcgaaaaagtgccggtcagcgttctgtggtgaaaaaacgcgtcactgccgggcgcacacgccgcgacggtccggtactgaccctgacggtccggcagggacggcggggagaccgggtgaccgcgagtggccggatgagcccacgccggcgggggcctgtgtattcactggcggcggcgttcagccgggtcagcggtgataacgcttacggggtataccggctggatgagggccggtacgtgtttctgtccacggtggacggtctgccgtcggtcatgggggatgtggccggtaccgcggaggacaccggacgggccctgcagcagttcctggcgtttaacaccgtgccggaagggggctggacggtcacctccccggacagtgaaccccgggagtgggacactctgattgcttctgcgggaagccgtgtactgaaggtgtcccggctgcggccggttcgtcagggcataaagcccctgccggtggtggcgggactggcgctgctgggggcggtggcattctggctgtggccggagggggaggttgacctgcctcccgtcctgtcggaagtcattccggtcgccccggcaccggtgccggtttatctgccccacccctggaaggagatgatgccggtacgggcttttctggcgcgctgccgggaatggcgaagagtcgtcccggtttatctggacaactggatgctgggccggggggagtgcagcgctgacggcctgctgctggtttataaccgccagacaggagggacagcggcgggattcgcccgccgggcgatggacgtttttcaccgtaagccggtcatcaacctgaccgcgggtgggggtgaggggacggtacagctgctctggccaccggcatcgctcgtggatgaacaggtgccacctgctgccgtgcatctgatgcgggtggtctcctggtaccaggcacatcaggccacgctgacgctgacggcggtgagtgaggcgccgggcgtgcccggagatgacggtgccctgccgttggtgcaggactggcaggaataccgcttcaccctgacggacaaccgggtgccggagatgctggccggcccggctgacgggcgggggatacggataagcaaagtgacgttcacgcataacggggaagggcagcagtacgaaatggaggggcatatttatgctgataacggtaagaaataa

SEQ ID NO: 394673 - DNA, 1698 bp, Salmonella enterica
atgaagaaaaacagaatacgcgcgctgacggttattatcgtgacggcactgtccgtcgccctgaccggctgtaccttccgcgaaatggacaacatgtcccggaccatccgggctgacgcggatattgcgcagcagcatatggacagccagaagcgccatcaggacccgctggtctggacggacaaaccgtgggtgagcctgaagcccatcgtgcaggccgcgccatcgccgcagaaggcggggctgcccgcctgcaacatcaccatcggcagtcgtgacggactgacgctgccggaaatcagcgggcttatcacccgccgctgcggcgtgcgggtcattctttctccggaggtgatggcggccgggagcggcgctgcgtcagcgggtgtcacccgccgtatcagtggcaccctgccggtgccggatgacagtggacgtattccgctggaccagctgggtgccaccggaggtggaccgcaggcggctgccgcgccggtcacgctgaacggcctgcgctggcagggacaactggggggcctgctggacaatatcacggcccggacagggctttcctggcgcacggaccatggcgcggtggtgttttatctgacagaaacgcggacatttcagtttgcctttcttaatacccgggtgaactcgaacgccagcgtcagctccggctcaaccagctccatgggaaccagcggaggcagtggtgccggcggtgaaaattccgtctccggcgattcgtcctcgtcgcagaaaaccacgacgctccaggaccgggatgcctacgacgatatccgtaagaccatggagaccatcctcaccccggagaaggggcgctactggctctccgaaagcaccgggggactgaccgtcaccgacacgcctcaggtgctggagaccgtggcgcgctatgttgatgaacagaaccgcgaaatgaaccgccaggttcagctgagcgtgaaagtgctcagcgtcagcaacacccgcaatgagcggtttggtattgactggagccttatctacaaatcgttgtatcaggctggcgcaaccctgaacaatgccggcggggagattgccggcgcaacctcggcgggtgtgtccatcctcgatacggcaaccggcagtgccgcccggttcagcggctcttccctgcttattaaagcgctcagcgagcagggcgacatcagcgtggtgacttcccaggacagtatcgtcaccaacctgacgccggtccccattcagatggcggaccagacggtctatgtcgcgggcagtgcgacgaccacgaccaccgatgtgggggccacgaccacgctgacgccgggcatgataaccaccggctttaacatgaccctgctgccgcttatccggcaggaaggcaacgtccagctgcaggtgaatttcaatctgtcagacccgccgggtatccgcagtttcacctcgaaagatggcaacagctacatcgagatgccctacacgaaactgcgctcactgagccagaaggtgaacctgcgcgccgggcagtcgctggttctgaccgggtttagccaggataacacgtcggtgaagaagagcggtacgttcacaccgggcaatttcctcttcgggggcggccggagcggggagcatggccgcagtacgctggtgattattatcacgccggcactgacggggaacaacggtgactga

SEQ ID NO: 394674 - DNA, 1326 bp, Salmonella enterica
atgtttacaataaactcatgcacctttttctgccccggactgttactggtcctggccgggtgtgcgcagtcgccggcggcgtcttctgcccgtgacgcggcattcagccacagcctgaaaccggcctccccggcggatatctggcagcgctcaccggaggtgacccgcgaaggacgctacacgctggtcagcgtaaaaagtgccgatgcccagcgggagcccctgaaccagctgattgatatcaccatgccggtgtcgctggtcagcagtgtgggggacgggtttcgttacctgttgttccagtccgggtactcactgtgcggtcgttacggggcggatttcgcggagctgctgaaccgtccgttaccggccgtccagcgccgtctggggcccgtgcgcctgagcgaggcgctgcaggtggtggcgggaccagcctggcgtatgaccgtggatgaagtgaaccgcgaggtctgctttgtgctgcgggaggcttacctcgtgcaggcgcgcccggtgccttcaccggtcacaacgacgccatcttctccggttgtttcgtctgtggcaccggtacctgcggcggggacgtcttccgtcagtacccggccgggtcagagcgaaacacttcccctgccggcagtgccggtcctggcagcgtcttccccggggcagggggttacggtaaaaaacacggcggcttcgccttctgtttccgctgcgggcgcaacgccggcagcgacgtccaccggtggtgtggtttcgccgcctcaggtgaaagcaaaaaatacaatatcagccccgacagcggcatccccgtcaggggcaactgccgctgcccccggggctgtcacgtccgggcgtaacccgttcagcggcagggacctgaccgggaaagccaccgcgaccgccccggcgtcatcatcccgtccggcctctccggcggtatcagcctccccttcattaacatcatcatcatcttcttctgtggcgttatctgcgtcagcaccggctccggcactcaccggcaccccggtcacggcgctgccgtccggtccggaatggaaggcggttgccggtaccacactgcaggagtccctgaccgcctgggcggagaaggccaactgcccgaatggcggtcactgggtggttatctggcagactccggtggattaccgcattgaggcgccgctgacattccgcggcagttttgaatcggcgctggatcaggtgtttgagctgtaccgcccggctgaaaaacgcctctatgccgaagctcaccgggcgcagtgcctggtgtcggtgacaggccggccggtggaccgctga

SEQ ID NO: 394675 - DNA, 636 bp, Salmonella enterica
atgtcggtaagaaataaggcagtcatggctgcagccagcaccacttcggtactggtactgctggttccgctgctgacgggcagtatacgggcacaggcggcagaaaacgttccgtcgttcgcgccggcggaggctaccccaccgactgcagaagagactgtgcagctggaaggttccgtgccgcagatacaggcttcggtgacagactctgtcccgccggtcgcgccgccgggcagtatcacgctggggatgctggagcatattcagcagaagaatctgttgctggcggcacaggtgcagaccgcacaactgaagcgccagttggaagaagcgggcagcgacacgcctgctgcggcggctaccgcgcagtcagcaccggggctgacggccccctcacagggcgcggggctgccggacagcatggccgcgtcacgggggcaggggacggtccggccgcaggtgctggaaatcagcggaaagggcagtgcgctgtatgccgtgctgcagatgccggacggctcccgaccggaggtgacccgcggcagcagggtgaccatcgggaaggccacgctgacggtcagccgggtctcactgagcggcatcacgctcagcgacggttctgcgctgtcgttctga

SEQ ID NO: 394676 - DNA, 165 bp, Salmonella enterica
ttgctgttgattttattatgtaggggtgagatccgacgcccctcttttttggacgaaaccatgagtaaatttgctcttctgctgctcgggattggtgtgatcttcgcgcttattattattctgctggccgttattgatgagtatctaaacgaccatgacagttga

SEQ ID NO: 394677 - DNA, 240 bp, Salmonella enterica
atgccacgtaatgaaagcacccaggtcactatcgggaatgactggacacaaatcaccgatggtagtgctgatgaagtcgtccagttttatgttgccgtggatatttgccagagtccgacaaggcccgctaaagatgcccccagcctccgatatgaggccaccacgctaacaatcaccgctcctgacattgcgtggattcgtaccgtgtatgtcgacagcgccattgccaatatctggtga

SEQ ID NO: 394678 - DNA, 381 bp, Salmonella enterica
atggctatctacatcaaatccccgccgccaaccatccagcagttacctgatatcgacccgctaatgatagccgggttattcggttcactgtctgcaggcccaatggaagtggtaaaagacttcaacacggcgctgatgggctttatgcgctcaacagattcagtacccaatgtgccagaccccggctggccgtggggcatggtatggacggtctcatcaaaaggcactggctccacaggcaggcgatacatccccgccgttctggagccaggagaggtaacacatcaatttttttacaccacgcagggggcgctttattcgcgcggtggtatctggttaacaggctggggagactggcaaatgaggtgggctaaagaatga

SEQ ID NO: 394679 - DNA, 381 bp, Salmonella enterica
atgataataccgaacacaaacacgctgggcgcaccgtccgggcaatcagcggctccgaatctggcagattttatagcaggcaaatttgggttattccatgccaaagacgcgccggagtgcgccgatctgaatacggccagaacgggttacatgaaagttacccctaccacgaaaaacaacccgcagtctggcaaactggcctacggaaacttgcagacgtgggattcactgggttgcggtgacagtggcgatcggcaaataccgccagtgggtgagattaaagagtgggtaatgcagcttttgttcatggcagacggcagtctgtacacccacgcccgaatcaacgccggcgcatttcagccgtggatcaaacgctggtaa

SEQ ID NO: 394680 - DNA, 378 bp, Salmonella enterica
atgagcaaattcacaacccctgcaatccttgaaatgctgggccattacaactggcgcgtatacgagccgttcgccttttacctcagcgatgacaacagcgacgtgatagaagttccggcaggcttcgtcacagaccttgcgacaataccgcgcgtattctggtcagtgatgccgcctgacggcaaatacgccaaagcggccatcattcacgattacctgtacgacaacgcgctacgtacgaagcgggaagccgatcggatattcctggacggaatgacggtgcttggcgtgccaaagtggaagcggacggtgatgtattgggcggtgagattattcggcaggggaatgtacggtaaagcgcaagattactgtaattaa

SEQ ID NO: 394681 - DNA, 486 bp, Salmonella enterica
atgagtatcacaagccctgaaacaaagactgtggcttctgttgtccctgtgccggtaacgaaacaggtgagcgagccggaagtgtttcagcgtacccgcagcgagtttaaccgctggctgcaggagcagtttgataaccactaccacaccatgcgtaacggcggttaccggagcttccttgcccgtaaccatccggcagagctggagcgttacgacattgcctgtgaggccatgcgccgggaagagtttgcccgtttcgcggagctgcagaccctggggctgtacctgcatctgcaggtacagcagaaggaggcgtatttccgccgggtacgtaaccggctgctggttgcgatggctgtgactggcgtggtgacaggtgtggtgttgtacgggtatttccatccggaacaggcactgcaggcagggcacgagctgctggcactgccaggaagactggcggcattcgccggcagactgatgaactga

SEQ ID NO: 394682 - DNA, 258 bp, Salmonella enterica
atgtccggtattcacctatttccggcccggggacgacaccgcggccgtcatgccaaccgaacggatgtctgcgaagacgtccgtgccggtgacacattaaccccgcaacaggaagaccgtatccgccagctggtccgggaggagtgctatttccgtgaccgtgaagcgctgataaagctgacagccatgacgctgctgctgaaactggccggcaccgtcatgctgggccttctgctgctggcgttccggtttctgtag

SEQ ID NO: 394683 - DNA, 318 bp, Salmonella enterica
atgagtgaacagaataccagactgattattgtacatcagattgtgcgggttgagttttcagaagtggtggaagttcccgctgacttcagtcatgacgaggttacccgtctggtcagtgatttctggaatatcaccgaccggaacaaagtggtgactgctccggagcttatggagcccggtggtcagtatattgaacggattgcaccggaagataacaggcccggcgcatataaaccggacctgtcggtgacgagaagtcctgagggggaactgatttaccgtcgcctcagtgatgaagcgccggtaacggcagattaa

SEQ ID NO: 394684 - DNA, 363 bp, Salmonella enterica
atgctgacttttaaaacgttacccgacgatgtctcgctcgatttcttcggtctggctcatctcgaaggcgaaatgttaagcatgcgtgcttatcagcgcctccggcttgaggagctcccggatgatgagcaggacccctggtcggattacgtgtctctttcgcttattgaccggaggctgatatacatcgctgaatgtctgagccttcaggctgaacagggcaaaatccccgcagagaactcagcgtgtcaggcgatgctggccgatattcatacactgggctggagtatcagtccatcccggtgggagtggggtcttgataacgggcgctgtcgcgccacgctgatggacgccgctgagtaa

SEQ ID NO: 394685 - DNA, 285 bp, Salmonella enterica
ttggctttaaaccaggctgagcaggaaatactggaaagaaaaacggcccgctgggtatatgaacagggcaggggggtgacggcgaaagaagtggccagacgattcaggctgcatgttcatactgcgcgtcttgttattcacagaattatgagaagaactgacggaatacgctgcgagttactcggaacatatgagcagacggcgaaaggactgaggcaggttaaatatttttcagtgatttatcttcctgaggaatatcagccagcgggcaggaaaaaagggtaa

SEQ ID NO: 394686 - DNA, 579 bp, Salmonella enterica
atggcaatcacagaagaacagattatgcgggccgccgacgaactcgaccaggaggggcaaaatcccactctggcccgggtacgaaaaaaactcggcggcggcagcttcaccaccatcagcgaagtcatgattgagtggcgggcgcagaaagcccgctccgttcacgcgcagaagcctcctccgcaggccgtcaccgacagactggcagcattcggggatgatatctgggcgctggcgctggaaatagcggatgccggatttaccggagagcgggagtccctggaaaaatcacagcaggaaaaagaagaggcccgacttgaggccactgcgctggccgaccagctgaccgatgagctcgcgaaggcacgaacacatatccttactctggaggaaaaactggctgccgccaggaaagaaacagcagcagtggctaatgaacgggatgacgcgcggcgggaagcatcctcactcagggagaagatggcttcactgcgcggggaacttcaggccgtcacgctctgtcaccaggaaatcgtggcggctattaagcaaaagaccggccccgctgaagctgagtga

SEQ ID NO: 394687 - DNA, 1017 bp, Salmonella enterica
ttgaagaaagtcagcattattgatgtggcgcagcgggcaggtgtttcggtttccacggtttctctggttcttcgccagaaagggaagatttccaccgcaactatcggtaaagtccatgcggcaattgaaacactgggttatgtgcataacgtggcagccgccaacctgcgttccagcacttccaatctgataggtcttatcctgcgagatttcagtgacagcttttccattaaagtgatggccagtgtggttcaggaacttgaaaagcttggatacatggtgtttatcagccagcctctgaatgaggaggaacatctggaacgttgtctgttgtcgtttaagcaacagggtgttgctggaatgatttatctggctgcagactccaccatttcatgtttgccggaaaagattcgtcagtgttcgcttccccgggttgttatatcacaatcaccagttgatgatagcggggacctggtcattcgtgataaccgtcaggcggcaagtcttgctgtgcgttatctgattgagaaagggcaccgtaacattgcctatattggtggtggggctaacgacttgattcgtcagcagagactgtcaggatttcactctgtactgaagcagtacggaatggcctggcgtgaagaattaacgccctcctgtaacgatgacaccagttcagcagcagttattactcgtcagttactggagaaaaataacaccatcacagctcttctttgccattcaccggaagtaatgattggttgcactacaggtattcaccaggtcgggcgaacagtgggtaaagacgtatttctgacacagcaggtggcgctggttggtttcgaggatatagtctgcatgaatctgacatctccgtcgtttacctgcgtttcatcagccagtgaagaaaccgggcgtcaggcggcaacactgataattcgcaaactgaaagaacctgggatgcagccgcaaaaaatcacattatcggggagcctgttagtacgggaatctgcgtag

SEQ ID NO: 394688 - DNA, 1500 bp, Salmonella enterica
atgagtctgatatcaggtcttgttaagtcgttgtcaaaactatcgatgattggccgcgcattaatgctgcctatctcattactgccggcggcaggcctgctactggcttttggcgataaatttcatctgccgttaatgatgaatgccggtggtgttatatttgataatttaccgatgcttttcgccattggttcggcggttggtctggcatcggaatccggtattgccgcgctttcggcagcggtgtcggtgttcgtcaccaatatcaccatcagcaccgtgctcgggataacgccggagatggcctctcagggcggaaagtacgccatggttgtaggtattccaaccctgcagatgggcgtgtttggtgggcttatctgcgggatcctcgccgcgtggtgctataaccgcttccatgcaatgcagttgccggagtttctcggattcttctccggtaaacgttttgtcgctattgctactgccatgttgtcgttcatcatgggtctgctgttgccttatatctggcagcatattcaggcaggtatcgatgcactttctgtcgtggtcaacggggataaccaggcggcttcaacctttattttcggcctggtggaacgtgcgctcatcccgctcggtttacatcatatctggtatccgtcgttctggtactctttcggtgactacaccacccagacgggccaggttatccacggtgatcagactatctggttcaaaatgctggaagaaggcgtgaaatccttcagcagcgatacctaccagaatgccggtaagtttatgcagggtgaattcccgctgatgctgttcgcccttccggcggcgtgtctggcgatgtatcacgaagcacacagcaaaaacaaaaagattgccgccggtattctgttctccgcagcgttgacctgctttttaaccgggataaccgagccggtggagtttaccttcattttcgtggccccgatcctctacgtctttaacgccatcatggccggtctggcgtacatgagtatgtacctgttgcatgcgcatatcgccaagtcgttttctgccggattcatcgattacctgtcgttcgggatcctgccgtcgttcaacggctatcagacgaacttccttagcgcggtgattatcgggatcccgatggcgttgatctactacttcgccttccgctacgtgatccgccgtttggacgtgaaaacaccgggccgtaccgacgtgaccaccacggccgaagggaaaaccgacactgaaatcgccactgaaattattggcctgctgggcggtgcgaagaatatcgactccgttggctcctgcattacccgtctgcgtcttgaggtggcaaaaggagatatggtcgataaagatgggctgaacgccgtaggtgcacgcggcgtcgtcttcgtgggtgacaagggaattcaggtgatatttggtgcgcgtgcacaatttatcgcacaaaccatgtcgacaatgatcggtaaatag

SEQ ID NO: 394689 - DNA, 1446 bp, Salmonella enterica
atgtttgacattgttattatagggcttggtgcaaccggggtaagtttgctaagtcagattcaggacgaagtatattctttacggtttaaaaaacctgaaatagctgtttttaaccccttatgcacattcgccagcggtaacgcttttggcgatgcacataatatctataaagttaatacaccttccagcatgatgtcagtatctgccatggagccaggaaggtttgaacactggctacgggcaacatgcggttgccaagaacgctggccctctcgtcttctgtactcagaatttatacagcagacatataaagacatcaatgaaaatgaaatactgcagattacggagtttcccggtagcgtgatatccgtaatcagaaaaaacgagttcttcattattacagacgataatggaaatacagtaagtgcccataaagttgttatgtgtcttggttcacctcctgcagattcgtttccggagtttaacggtacccctggctttataaaccattattcacagtatcagccatctgttaatgatgaaataataattgcaggaagcagtctcactgctatagatgccttccgttatatccaccataaaggaggaagtagtgttcacttatgttcacgcaacggattcatcccaacatgtctgaccagaaaagagaattatacacctgtctttttaagctggaaaaatattttgtcagccatccagtatccggaagatacatttgatgttttcattcgtcttttacataaagagttttgccttttaagaaatgacggggaattcaaaatcgcaatatcactgctaaaaaaagggaataacgctgaatatttttatttccttctggaacgagctaaaaaaggaaacctgccctgtcaggatactcttgtctcaacccgaccctatatgcataaaatatggagcgtcatgacaataaagcaaaagcaaaagtttttaaaaaaatacggtgctctctgggcaacctggcgtcaccctgttccttatgaggtattttatgagttatctcaggcatcagtgaatgaaaaattaaaatttcaccaaatacaaacacctcccgtatatcaggaccaaaaattcagcataagaacctcatcaggaaccctgaaatcgaactatttatgggatgcgaccggcggcaactacaacataaaaaaaatgaggaatactctccttgaaaaccttctaattaataagctaattgaaaaccatccatgtggaggaataaatatagacccgttaacttttcaatgtaaagttaacggcaataatattcacggactttataatattggtcccttaagtaagggatgcttattctctacaaatgcattatggttcaacgttaaatgttgtgagatctgggtcagacagtgggcatccgaatacgtaaaaaatgccaaggggattatatga

SEQ ID NO: 394690 - DNA, 867 bp, Salmonella enterica
atgattattctacttccgtttgtttatctgtgtattggatggatactgggcaaaacgccatgggatttaaaatcttcagcttcgttattattaacaaaatttatcatcccgattgtgattacattcaatatatcaactcaattcagtgacatgggcggtataatttcagccacggcattaattatgttaatcatgatagccataggaaagtatacaaaccaggacccggtaatgactctttgtttcgtttatcttaatattgggtggttaggtttaccagtagccagtgcattattcggtaatgacgctgcaattattttcattgcggcatatgttggcagttccattataggaaactcagcaggggctggcatgttgtcaggaaacaaatccagcctcatgaaaattttaaaaacccctcctgtaatggcactaattatcggaattcttcttattcccttaagacaacagataattctttggtttgattatgtttatgacctcgcaaaatttcttttgaattttcttggaatgggaatactgggactttggctggcaaaaataaaatttagcgccagagattttcgtctggagatatttttctttatcaagagagcattcgtaatttcactaataatcacactattactttttattgctcatttatggcatcaaccactcttaacagataaccctgccactctgtatcttttctgttttcttcctcctgcagccaatatcatagtgctggagactcattatcttggaaccggtcgttcggcacggacaatatcatgcggaacctgtataagcattatcgcaatttctgtttattccatatttatactgggattacgcaatttttga

SEQ ID NO: 394691 - DNA, 1056 bp, Salmonella enterica
atgcatgccgtgcgccaggcgtacgggcatataccggatggtggccagcagccggggtacgtgctgtatctggagctggaagcggaacaggtggatgtgaacgtgcacccggccaaacaggaggtgcgcttccatgaaagccggctggtacatgactttatctgccagggcgtgctgtcggcgctgaatcaggatgcagcgtccgggttgccactggaagaaaccgcaaatctgccggtcacagactggcttcctgacaacagaaaggctgccggtgagaacagctttgccggcgcaggggctcattcatccggggaacgcgtaagtgggggaccgggtgggtatcagccggaaggatttaaccgccaggcgggcagggtataccagcagttgctgcagacgccggggactgcatcatcactgccgctgtcagcaacgcgaacgaaggtatcatatgataatctcatgttaccgggaacagagttctggcttctggcacccgtcaggcagagatatgccctggtgacagacggagacggtgtttatctgctgtcgctgaaaagggcgtggcagtatctgctggagagccgtctgtcagcagaaggcgataacagacccgtatcgcagcccctgctgatgccggtgaaactgaagctcaaccgtgaagaacgggaattactgcgaaagtggcagctttaccttgaacagacagggattcagttaacacaggacgctcacggcgtggtgttcagcggggtaccggcaatgatgcgggagctgccgctgacctcattgctgaataacctggtggaatggttgtcccgggagagtgagcctgaaacagcccctgattcagcccgcgtcagacgatggcttgcggcgaactgcgaatataccggcgtgaaggatatggctggcctggcggcgttatgcgggcaattgcagggagccccggatgccctgagagcagaagatggaaaactgaagcccgggttgctcattcagataccgctggaggactacacgggagtgccggaaccggcgctgccaggttaa

SEQ ID NO: 394692 - DNA, 798 bp, Salmonella enterica
atgacgattcatattctgtcaccgcaactggccaaccagatagcggccggggaagtggtggagcgtcctgcctccattgtgaaggaactgcttgaaaacgccatcgatgccggtgccaccgaaataaggatagacgtggagaagggcggcgcaaaatgcattcgtgtcagtgataacggcagcggcatcagtaaggatgagcttgctctggcactgatgcgtcatgccaccagtaaaatatccacccttgaagaccttgaggggattgccagtctgggctttcgcggcgaggcgctggccagtatcagctcggtgtcacggctgacgctgacatccagaacggcggaacaggacgaaggctggcaggtttacgcggaagggcgggatatgtccccggtagcgcagccggcctctcatccgcagggcacgaccgtggaagtgctggatttgttttacaacacgccggcgcggcgtcgtttcctgaaaagtgacaaaacagaatccgggcatacggaagatgtggtgcgccggatggcgctgtcacggccggatgtggggtttaccctgacgcataacgggaaacgtatattgcactgtgctgccggaaaagccggtgcgtccgcggcatcgcggctgacagccatctgcgggaaggagtttgccgaccgggcggtatatctggaatggccacaccacaacatgcagatgagtggctgggtggtgccgcccagccggacggaaagagctttgatgtgcagtatttctttgtcaacggtcgcgcggtcagggaccgggtga

SEQ ID NO: 394693 - DNA, 927 bp, Salmonella enterica
atgactgaacgtgtatggtgtttaggtgatgcagtgatggatctattgcctgatggaaaggggttgttaatacaatgtcccgggggtgcaccggcgaatgtggcagttggtgttgcacgacttcagggaaacagcggattcatcggccgtgtcggtaacgatccctttggtcgttttttacggcaaacactaagttccgagcaggtcaatacggaatttatgtttacagatgcggcacaacgaacttccacagtggttgtaacactcgatgataaagctgaacgttcatttacctttatggtacgccccagtgcagatctgtttcttgaagagactgatttaccgttgttccacaaaggagaatggttacactgctgctccatttcaatggcggcggaaccctcatgcggaaccactttcacagcaatggaacgcgtacgctgcgcaggaggttttgtcagtttcgatctcaatattcgtcacgacctgtggagtaatgagcaccagctacgtcattgcctgcaacaggctatggttctggcaaatgtggtgaaattctctgaaaatgaactggctttttttgctggctcaacgaataccgatgtcagtatgcagctaatagctgaacgtttttccgtccccctgctattggtcaccatgggaaaaattggagtcaaagcctgttttaacggcaggatccacacttatccaacacgtccagttgactgtgtcgataccaccggcgcgggagatgcttttgtcgccgggctactgtgggaactggcacagcacggtataccagaaaacgaatcacaactcacagctcatctgataaccgcacaattatgcggggcgctggccaccacggagaaaggtgcaatgactgccctgccataccgtcaccagttggaagaactattagactga

SEQ ID NO: 394694 - DNA, 1521 bp, Salmonella enterica
atgatgaaaaaaaacacacttgccatgattattggtttgatattaagttccggacctgtctgggctactgttcccggtatgagtaatcttgaagcccgcctggctgcactggaacagcgtttacagactgcagaacaacgagccagtgatgcagaaagtcgtgcacaggctgcggaaaaacaggcacagcaactggcagccgcacagcacgatacacaaatcacaactaatcaggtcgagcgtcgtaccgccagactggaacagaaaactatcaatgacagtggctttgaattccacggctacgcacgttccggtttgctgatgaataactccgccgccaaaacccagggtggaccgactatgactcccgcgggtgaaacaggtggtcacataggtcgcctgggtaatgagccggacacctatgtcgagctgaactttgagcacaaacaagcactgactaatggcgcgaacacacgttttaaagtaatgctggccgatgggcaaaaaacttataacgactggaccgcatccagcagcaatctcaacatgcgccaggcattcaccgaaattagtgacttaccggggttcagcggtgtatttaaggattccacattctgggctggtaaacgttttgaccgcgataactttgacatccactggatagattccgatgtagtgttcctcgccggaactggtgcagggatctacgacattaagtggagtgatgaatcacacagcaatatctccctgtatggtcgtacttttggtgatattgaaaacgacaaaaacactgcccagaactacatcctgtcgttgaacaactactatggtccactgcaactaatgagcagtggaatgcgtaccaaagacaacaacaaccgtgtggatctggacggtaataaaataaagggtgacgctgcaaatacaggcgttcatgtactacttggcctgcacaatgacagtttctatggcctgcgtgaaggatcagcgaaaactgccctgctctatggccacggcctgggcgcagaagtgaaatcgatcggatctgatggagccctcttgccggaggcgaacacctggcgcctggccagctacggcatcaccccgctgagtggcaactggcatattgcgccagccatactggcacaaagcagcaaaaatcgctacgtaaaaggcgacagctaccagtggctcaccgccaacttgcgtctcattcagggaattactgaaagctttgaaatgcagtacgaaggcagctaccagtacatggacctacgcccggaaaactacaacagccgtaaggctgtgagcggtaatttctacaaactcactgttgctccaacgctgaaagccagtgacattggcgatttctttaaacgtccggaaatccgtatcttcgccacctggatagactgggatcaccgactggataattacgccaccgatgacgcactgggcagcagcggctttaagtctggcggagaatggaacttcggcgtccaaatggagacctggttctga

SEQ ID NO: 394695 - DNA, 1371 bp, Salmonella enterica
atggattttgtacaaattgcccggttgctgctaccgttgctgggcggtagagataatattgccagtgcggcacactgtgcaacacgtcttcgtctcgtgttggtagaagacaacaaagcggacatcgctgcaatcggtaaaattgatggtgtaaaaggctgtttccgcaatgcaggtcagttacaggtgattttcggtaccggggtggtaaacaaagtctatgctgcgtttatatctattaccgggttcaacgaatcgagcaaatcagaagctgcaaatatcgcagcccgcaagctaaatctgctccagcgaatcgcccgtctgctatcgaatatttttgtacctattataccggcaatagttgcctccggtctgttgatgggactgttgggaatggtgaaaacatacggctgggtgaactcagacaatgccctgtatatcatgctcgacatgtttagctctgcagcctttattattctaccgatcctgattggtttcaccgcctcgcgggagtttggcggtaatccctatcttggtgccactctgggcggaattatgacccatccggctctcaccaatgcctggggcgtggctgctggttttcacaccatgaactttttcggacttgaagtggcaatgatcggttatcagggcacggtattcccggtactactgacagtgtggtttatgagccaactggaaaaacaactgcgccggataattccggatgccttagatctgatcctgacaccgtttttaacagtaattatctcggggtttgtcgccatgctgattattggcccggcaggacgtgcgctgggtgatggtatctcttttgtccttagcacgctgataagtaatgctggatggctggccggattgatattcggcgggttgtactcggtaattgttatcactggcgtacaccacagttttcacgctattgaagcgggattattaggcaacccgtcgattggcgtaaacttcctgttaccaatttgggcgatggccaacgtagcacagggcggtgcatgcctggctgtgtggtttaaaactaaagatgcgaagattaaagccatcagcctgccatcagcattttctgcactgcttggcatcacagaggcagcgattttcggtatcaatctgcgttttgttaaaccctttattgccgcgttaatcggcggcgcggcgggcggagcatgggtggtatcactacatgtttatatgacagctgtcggactgaccggactccccggaatggctattgtacaggccagttctctactgaattacgtgtccgggatggccatcgcctttattattgcttttgttatctcttatctgctgaaatacaaaacggactctgaataa

SEQ ID NO: 394696 - DNA, 1410 bp, Salmonella enterica
atggctgctcattctctactacccgacatattgcaggcggtaatgaaaggaatgactaaaacacttcaggaccgtcattaccccgcctggcatctcgcgccggtgaccggattactcaatgatccaaacggatttatacagtttgccggacgttaccaccttttttaccagtggaatgcaatggcctgccagcaccggcaaaaatgctgggcacactggagttcagaggatttagtgcactggcaacatgaacctgtcgccctgttgcccgatgaaggatatgaccgaaacggctgctactccggcagtgctgtaaacaataatggcttgctgacactgtgttatactggcaatgttaaatccgacgatggtacgcgtactacctggcagtgtctggcaacacaaaacagttctggtggctttgacaaacttggcccggtgattccgctaccgcacggctataccagccatgtacgtgacccaaaagtctggcgacatgaagattactggtacatggtgttgggcgctcaggatttacaactccagggcaaagtattgttactgcgttccgataacctgtggaactggcaaaacctcggcgaaatcgctggcagcgggataaatggacttagtgatgcaggctatatgtgtgagtgcccggacatgttcatcctcggcgaccactcttttctgctatattgtccacagggcattgcgaaagaagataaacgttatcttaacaattaccctagtgtctaccttagcggtactcttgactacaacagggctatctattctcatggcgaatctaacgagctggatgccgggtttgagttttatgccccacaaacaactcttaccgacgatggccgacgccttctgataggctggatgggtgtaccggatggcgaagagatgctgcaaccgactgtggcaaatggctggctccaccagatgacctgtctgcgtgaactcacaaaccgaaacggcaggctttatcagcagccgattgttgaactgcaacagctgcgcggcgacgagtatcgctggagtggtgcggcgaatcagatgcccacactggacgcatcacgtcttgaactgctactggagagccgcggtgaagtagggctaaattttgccgatatgttaatacttacgtggtacaaggatgaacttagtctcgctcgtcgcagtctgaaaaccggagagtggctgtatcgttattggtgcgggtgcgcgaagaagctacagatcctttgtgaccactcaagcattgagatttttatcaatgatggcgaaggggtcatgagcagtcgctacttcccggagcatccggctaaattaaccctgtgtggagacgcggaagtgcatgcttattactggtcgttacgcccttgcatggtagaatag

SEQ ID NO: 394697 - DNA, 987 bp, Salmonella enterica
gtgtcaaaaaccaccgccagcctggtgctcaacggtcgcggcaaagaattgcgtgtagcgcaggaaacgcgtgaacgagtgctcgcgattgcacaacaacatcactatcagccaagtatctacgcccgcctgttgcgcgtaaaccgcagtcataccctcggtctggtcataccagaaattaccaactacggtttcgccgttttttctcaagaactggaaaacctctgtcgcgaagccggtctgcagctacttatttcctgtacaaatgaaaatgtcagccaggaaacagtagtggtcaataacctggtagctcgccaggtagacggcctgattgttgcctccagcatgcaaagtgacaacgactatgtacagctgagtaaacagttaccgatgatactatttgaccgtcatatacatgacacgcaactaccgctggtaatcaccgactctctgacccccaccgccgatctggttgaacgtctggcacggaaccatcccgaagaaatctattttttgggaggacaacccagactgtcaccaactaaggacaggctggccggatttatacaggggctggaacgtgcaggagtaacgcctcgtccggagtggatcatgcacggtagctatcaccccagtagcggttatgagatgttcgctacattatgcgcccggctgggtcgcccgccaaaagcgctgttcactgccgcctgtgggctgctggaaggagtactacgttatataaaccagtatcatctactaaacagtgatatccgtattgccagttttgatgatcactatctgtacgactcactgtcattaccaattgataccatagtacaaaatgtaccagctctggcacaggaatgtttttcaatgataaaccgaatgattgatggcggtgaaccttccccacgtcagattgtcctgcctgccacgcttcaccttcgccacaatatcagtaatagtgacaacaaacttattgagtaa

SEQ ID NO: 394698 - DNA, 132 bp, Salmonella enterica
atgttgataaaagataattcaacgtattccctgcagccggaaataatcaagcatgaaattgcagtgtgtgagacaggccggttactgaagcaaaatcagggaaatgaaacccttcatctatcgtggcggtga

SEQ ID NO: 394699 - DNA, 339 bp, Salmonella enterica
atggtctccgacgcattcgcgggcggtcatgaagagtgtgaatataaacgccagcatcttgaacgccagattgattatgcccgggcgcataataacactcaccgggtggccgggttgcaggaagcgctcagtcgggttgatgaatactgcaccgacagctggcttcttaaacgaaaagaaaataaagtcgcagaaaaacagcgaaaggttgctaaacgtcagcaagagctggaacaggcccgggcatccgggaaacccaggaagattgcggacaagcagaaaaacctggacgaggcgcgggatgaactggcaaaagcacgtcttgagttgaatcgctga

SEQ ID NO: 394700 - DNA, 273 bp, Salmonella enterica
atggatataaattcgtggctgttttttgataaaatgattacacccaggatcataaaggttgtttactgggtattattatttttaacgatactcagtggtattttgggcgttttcattaatccggtcagtataatcattactgttatcagtatcattattctccggatttcatgcgaagtggttattctgatgttcaacatttatcaacagattaaaataattgcagataacatttccactgatcgtgcagaaaaatccgatatgcacaattag

SEQ ID NO: 394701 - DNA, 297 bp, Salmonella enterica
atgatgaaaaaagtgatattgtctgcggatacagatcagtatgcggaacgggtgaaggaagaagttgctgtgcttcgtaccagaatgggcggtacctgtatcacgctgaattaccggagtgcgtggattaacggtcatccggtactgatgatggattttttcagtgaacggggaaggctgtatacactgcgttatgatctgccgacaggaacgccacagcaaagctcgcgccgggtgtccctgatactggcgctgacccgcagggaactggaagataccgggcagtgtgctgcctga

SEQ ID NO: 394702 - DNA, 417 bp, Salmonella enterica
atggataaaaacaccgcgaaacgttcctgcactgcggggattcctgatttcgttccacgtaagtccacaaccgatgctgcacaccatagccaggctaaatcaacttattatgttcctgatactccggagcaaactctgccgcctgttactccctgtttcagtcaggcggatattgatgagtttctcgcccgcaaaccgaaacaatataaaatgacggatcgtgattataaagaactggggaaaaatactctcttgggcattggtgatttaatcactggtactgctgctactgcaatattcggaggctctgttattgcgcaagtaatagcggaaacgccagtcaaaccagtaccgacttataaatatggttatatggggtggggatggtataaaaaaaatggcaattttgttggataa

SEQ ID NO: 394703 - DNA, 423 bp, Salmonella enterica
gtgtcctctaatctgattattcccccgttattactgagcgtgttgttgctgtccctgtctgctcgggcggggatggtggtgtacaccgaccatgcccacccgccatccggggtgaccggtgataaccgcgtggtctggctggatgcgtcggaacaattacagcagtcgctgtttggcaacctgcctgcagaccccaaagaagcagagcgccgggcgcaggcggtgatccactctgccggctggcagcagaaacaggctgaactggctcaggattaccaggggctgctgcaggcgtggtcgctggggctgcaaaaatatccggctgtggtgtctgacgaccagtacgtggtttatggcacagccgatgtggtggtggccgaaggactgttccacagtcacagtggacgggaggggcagcgatga

SEQ ID NO: 394704 - DNA, 342 bp, Salmonella enterica
atgagaattgtttttcatgtaccagagctttcgcgcagtattccctgtctgaataatgtgagaaattatttgaatcaggcaactgaagcgcaggaagaatctgtacaggttatttttaatgctgatgcagtcatggggctggtccaaggggatgagagcgctgaacgctggcataaattatgcgaacagcacacctgtattcaactgtgtgtttgtgataattcgctaaagggatattctctttctcctgaacaaatgattgttaacataagagttattccggcggcggttgtgactctggctgaacttcagcaccaggggtggatatacattcgcccataa

SEQ ID NO: 394705 - DNA, 369 bp, Salmonella enterica
atggataattatgaacaacttttttcgtgcctgcaggtagtggaagtcaacagaaaaatgtcttcaagaaaagcgtatttgatgttggtatcgaagtgtacattcgccttcaccgaagactttcagcccggtggaatcaatcaccaggtgcgcaatttcaccccgggtctgtgttttaaagctgacgttaaccgacttagctcgtttactgacactggtgtaatccgggcagcgcaacggaacgcccatcagatcaaaaatggtatcaataaagtcctgagctgccatcagtgtcagtcggaatacacgcttaatcaccagaacggtggtgatagcgaggtcagaatagcgctgaggccgtccccgtga

SEQ ID NO: 394706 - DNA, 363 bp, Salmonella enterica
atgcttaatatggcagaatggtggatatgcctgacgatgccgccggatgagatagagcaggtggcgcgttttcgcagcctgacggaagagcaaaagcagatgctggcgtccgcgaagaaggggcagaaagtgaatggtattccctgctacacggagggggtggtgatgggcagcaatctgaatgcgctgttccgttcggtgccaccaagtctgtatctggcgctggggatgacggagaaagatgaaaaggcacagcggcgtgaactgatgaaggcgcacggctgtacggaactggaagcggcgttcatggtggcgcgggagctggacagaagacgcggaacgggagcggtgaatgagacttaa

SEQ ID NO: 394707 - DNA, 1110 bp, Salmonella enterica
atggcgttagcactggctgaaccggtctttctggaaacccgcccggaagtcattctgcgagaggttatcgactggtacgaaaaagaatccggtaagaagctgtatcccgctgatgatgaaatgctgctcatcaatatggtcgtttaccgcgagtcgctggtacgcaccattattcaggacgtggccggacagaatctggtggccaaagcccgcgccccgatgattgattatctcggtcatctggtcggggtgtttcgtctgcccgccattgcggcgcaggccgtgctgcagttcagcctcgatgaagcgcctgcgaccaacattcttattcctgcaggcacccgcgtcagcgccacggacagcgtgatttttgcaaccgacagcgatgttctgctgatggccggagcactcagcgtacaggttcacgccacctgtactgaggcgggtattgtcggtaacggctggcaacctgctcaaatcagtaacctgcttgatgatattgagggggctgattttcaggtggtggccatcgcgcccagttctggcggtgcggaggctgaaagcaacgatcacctgcgtgaacgcatcattctggccccggagtccttcagtaacgcaggctcaaaaggcgcgtatcgttttcacgcgatgtcggcgcatcaggatattgtcgatgtggccgtcacgcgcccactacccggcacggtaaaactgacgccgctgatgtcatacggcatgccggagcaggccattcttgacgcgattgccgggatttgttctgacgaaaagatacgtcccctcacagacacggttatcaccagtctgccggatgaggttacgtatgccattaacgccacactgattgtgtatgccagccaggatgaaaaagcagtgattcagcatgccacgcaatccattaccgactgggagaaacttcagtcatcacgtcttggtcgggacattattcccagccagatatcggcggcactgtccgttcctggtgtttacaaggtagcgctggattcgacttcagaacacattctggatgaaacgcagtgggcgcattgcaccggcattcgtctgattccgggaggcaaggttaatggctga

SEQ ID NO: 394708 - DNA, 690 bp, Salmonella enterica
atgaacggcgtgatatttgcgacgggtacggtcagtgccatcgatccggtgaacgtccgcgcccgcgttcgtctgccggatcatgacaaccttcgcacctggtggcttgatgtcatgcagaacaatacttacaaaaataaggattactgcatgccagacgtcggcgaacaggtaaaggtgctgatgacacctgacggcgtcgagggtgtcattcttggcgcggtatattccggtaaagatacaccggtcataagtgaccccgacaggcgtcgcactgactttgctgacggaacgtttgttgaatacgatcgcaaaaataacgcgatggccatcggcggcgtgataaagacgctgaccatcaccacccacagcgatatcaccctgcagacggatacgcaggtcaccgttatcgcccaaaacagcgccaccgtcaaaacgcagaaagccacgattgacagccccgaaactgaaatcaccggcaatacgacaataaagaaaaatctgctggttgaaggcagtattaccggcaaaggcggcatgtcgatttctggtggttcaggaggtgctgcggcgaccattaccggaagtctgacggcaactggcgacatttctgcaggcggtacgtcactgaagcgccacgaacacccgaaaggccacaacggcgcgcctaccgggcctccttcatcttaa

SEQ ID NO: 394709 - DNA, 2625 bp, Salmonella enterica
atgtccgcatcattttcattaggtgttgttatcggggcggcggtttccagttcgttctcctcggcaatgggcagcactcagcgaacgctgaacaaactcaccgataccacctcccgccttaaaacccgtcaggacgcgctcagtcgcgcctcagaacgttacggccagattggtgcaggtgttgccgaccggctgcgcggcagctatgacagcgtcggtaacagcctgcagcgccttcatcttcagcaggaaaagcttctgaaatgggatacgaaggtcaacggtgtgctgctcaaacgccagcagatcatgtcggaacttcgggggcttgttggcggagtgacggcagcgggtgcgctggcggttaaagcgacggccacgtatgccggtgaagaggcgatgctgcgctcaaccagccagggttcccgcaactacagccgcagcgatgaaaaacagttgcttgaccagatgcgcgttacgtcaagggataccacgcagaccgtcaccgagctgttgcgcggcgttgacgatatggtcgatgcgggatgggatcgcaaagcggcagcaaatctcactgatattatcggtaaggtctccacggtctataacatgggtgtccaggatacggcaaaagtagccgatgtgctgacccataacctcggttatgacaatgacaagggagcacgtcatgccttcaatctgctggccgacagcggtaatcgtgtgggctttgagttcccggatgtggctccggcgtttggcaaactggcggagtcgtttcagaagcgcggcattaccggtgatgaggccataaccgagatcatgtcctccctcggcgctgcccgtctgacgatgcgtaataaagaagacgtggtatccgggctgcagggctggatggataccagcgacggtcgcaggatggagcatcgtttcgatgtgatgggcgttgattatgtccgctcgcgcgccgactacatgaaaggcggtatgtcggattttgaagcctcgctgcgtgtgacccagcgctatcttgaggaggtgggcaacggtaagttcatgagcagatttaccgcactcaatggcgacgccgctgcgcagcagcaattaattcagtcttttggtctgggccagatagtgtcctcacctgaacagattaagtttattaacgccatgtcaaaaaactggggcgcttacgaaaataataagcaggtcattaaaaatcagggtgaccccaattacctgaatatggcttacgaccagaaaaccgacgcactcggcgaacagggtaagcagcttaaaaacgagctgagtattctgtcttcgacgttcggcgaggcgctggccccggtggtacgtgagaatattgacctgctgaaaggctggctctcaacggcgacggactgggtgaagaacaatcaggcgctggtgcagcactacgcaaggcttgctgttactgccggtaaatatttcctgatggtgcgcggtggctggcttatcagcaaactcgcttacaacagcacgcttggctggttgtttggtcttattcgtggagggtggcgtggtgtcgcgacgatagtccgtctgacccacgagtaccgcacgctgggtaaaagctcctcgctgctgtttaacctcaccatgaaggccggaggcggctttaaaaagttgtggggcaaaatgcgcggactggggccgctggcttccagactggcgaccggcgctggtcgtctcggtcgcgttctgggcggcggtcttctgcgtggtctgatggctgcaggtcgcgccgtcctgtttattggtcgcgcgttactgatgaaccccatcgggctgctgattaccggaatagccgttgcggcataccttatttaccgctactgggaaccaattaaaggattttttacccgcctgtggacgggtattgaaaatatcggtacgcaaatctggtcatccattaccggcttctttaccgaccgctggcaggatattcagacggcatttgatggtggcctgctgggtattggtgaattaattcttaactggtcgccgctgggattatttacgcaggtcttttctgaggtcatgagctggtttggcatcgacctgccgaaaaactttaccgactttggcaaaaatattatcgacggtctgacgtcgggagttaaaaacaaatggaatgccgtcaaagatacctttaaagaattaaccgacggtattaaaggcttcttcaccggtgaaataagaattcaaagcccctcccgtgtcttcatggggtacggcgggtatatcgttgagggcctgcagcttggtatccgcaataccacctggaaagcggagcaggccgcaaaggggctggccgctaaaatcatgcccgacagcctgcgctcgccgcgcattccggcagtgccgtttattgctgatattccacgcggtgccacggcaggggctggtgaatcctctccggcaattcatctggtctattccccgtcagtacatataaaggaagcgacgccaggcacattaacaacggacgcgataaagcaggcgttaaaagagaatctgccggagcttgagcgtctgcttgatgaaatcattcgccgtaaacagcgacgcagctttgatgcgtaa

SEQ ID NO: 394710 - DNA, 324 bp, Salmonella enterica
atggaaaacacacagactgcagataacaccgatcaatcatccactgaggtgacggtgacaacggccactgctgatggttacacgctgaagttcccctacaaactcgccaccggtgaagtgctgacctgcgtcaccctgcgccgcctgaaagtggccgatatgaaagcggccaaacgacagtttaaaaactccgacgagtgggacgaagcgctgattgcgcgcatgactgacctgaacccggaagatttaagcggtatggatctggaggactaccaggcgctgtcaaaacgatttcgacaatttgccgggctggctgacgagtga

SEQ ID NO: 394711 - DNA, 216 bp, Salmonella enterica
atgaaatacatttacagcggcccgccgtcaggcgtgagtctcaatgaaggcggcaacgtccgcgaagtgatgctgtttccggggcaggaagtggagtttgcgccggataatgagtacgcgatggcgttagtggcggaaggtcacctgcaggaagtgaagcccgcaaaacgacaggccacggctaaagacaccccgtccaccggaggtacacagtga

SEQ ID NO: 394712 - DNA, 342 bp, Salmonella enterica
atggcaacgcaacaggtcattctggccaccaccctgacggccaccggcgcactggtacaacagcgactggttggctatgacggaaaaacctgcaccaaaggtgcgctcgcgctcggtatcgctgaggttgatgctgctgagggcgatgcagtggccgttaacgtactgggtattattgccgccgaagcgggtgcgcccattaaccccggcgacagactgcagtccgatgataacggctgcgtcattccgctggaggcgaccggcaagcctgaacaggtcggcgtggctctcactgcggccgcagcaggcggtaacacgcttcgcgtgatgtggggtgcgtga

SEQ ID NO: 394713 - DNA, 957 bp, Salmonella enterica
atgtcgtctgaatatttaaaaggcaagcgcgttgccgacccggtattaaccagcgtggcgcgtggctacaaaaatgcggcgttcatcagccagtacatcttcccgcgtgtcgggatggaaaaggaaggcgcgaaggtgccgacctttggtaagggcgtgttcgccacttatgagaccctgcgcgccatgggtggtgcaagtaacatcgccacccgtgagaagagcggcacggtggatatcgtactcgatgagcacgatctggcggttccggtggattaccgggaacagcatgaatcgatgttcaacgagcaggccaaagctattaagcgcgcccgtaacggcattctgttaagtcaggaggtggcggcagcggcaatggcgcagaacacgtcgctgtatctgaaagactccgtgcgtaaatttaccgctaccgacaactggaaagatagcaagagtgacccggtgcgtgatgtctccgagggtatggatgtggtacgtgacgccatcggcctgcgtcctaatctgatggtgatgggggcaagcgttcttccgctgctgcgtttccatccagccctgcagaaagtgatgggtgccaacgagcgaaagcgcatcaccattgagctgatgaaagatattttcgagattgaaaatatcgttatcggttatccggtacggcttgaggacaacgacaaaaaggatgcaaaggcgaagaccgtcgacatctggaaggacaacctgatgctgtattacgtttccggtccgcagaacgagggcgacaacggcgacgaaaacgagccgtcgtttggttataccttccagttgaacggtatgccgatcgccgacacttaccccggcgagggcggaaaaatcacctactcccgctacaccgatatctacaagatggcggtggtgggcagtgatgcgggctacatcatgaccaacctgaagggggcgtaa

SEQ ID NO: 394714 - DNA, 1140 bp, Salmonella enterica
atgaacctgatccatatttttcgcgccggtacgcataccgatatgcatggccgtcgtattaacttcagtgatgccgacttaaaccagatcgcgcagaactacaatccggctctccatgaagcgccgatcgtcgtcgggcatccgaaaaccgacgcgccgtcttatgcctgggtgagcgggattaaaaaagaccgcgacggcctcaaggccgagccgcgcgatatcgatccacagtttgctgaactggttaaaaaccgtcgctacagcaaggtgtcagcctccttttactgtcctgagtcccccggcaacccgacgccgggtaaatactacctgcgccacgttggctttctcggcgcacagccgcccgccatcaaggggttaaaacaggtgtccttcgcggaggatgaggaaggcgtagttgagtttgctgactggagcctgcagactaccgcgtcgctgttctcgcgcatccgggatttcatcatcagccagttcgggattgagaaagctgacagcgtggtgccggactacatgattgacagcctgcgcgatgacgccgcccgcaccgccacgaccgaagtggcacccgcattttctgaccctgtcgggataccggcagacgaggttattcaacccacgcctgaacatcaggcccccacaccaccggaggataccgccgtggataaagagttacaggcgaaacttcagaaagagaacgacgacctgaagcgccagcttgaagaccgtaataaagccgaagcacagcgcgtgaccaccgaacgtcacaacgccaacgtggcatttgccgacagcctggtgagtgatgcgcgtctggctcctgccggaaaaggcctggtggttgccgtccttgatgcgctcggtgacggtgagtcaccggtaagtttcagtgagaacggcagcgaaaagccgctggctgaggcatttaaggcgcagatgcagaaggcccgaccgctgctcgactttggcgaggtggccaccggcgacggcgttgatcgcagcaccattccggctgagttcgccgaagccgacccggcacgccttgagacgcacaccaaagcggtggcgctgatgaaggctgaaaacatcacctacgaggctgcggttcgccgcctgatttaa

SEQ ID NO: 394715 - DNA, 573 bp, Salmonella enterica
atgagtaaacaggacctgatgaccattgaccttaatctgacggaggttaaccggatgcttggcgggctggcggaagccggaaaagatacctccccgctgatgcgcaaaattgccgggacgatggcggccatgacggcgctgaactttcaggatgagggtaatccgccgtgggagccgtcgctggccgcgcagaaacgctccgggatgacgctgtcgctcagtggtcatctgcgccggagtatcaccgaaaaatacgatgccggtcatgcaatggtcggtactaatctggtttatgctgctcctcatcagatggggctttcggtgaaacataaggcgcgggatacaatactccatcgccgggtggatgagcacggtaacctcgcggcgggctttgtgaagaaacggcatgccaactatgtccagaaagcccgcgtcggagcctggacgcaggtgtttgtggctcgtcccttcctgccggtggatgcgaacggcaaacctcagaagggactggaggaaaaaatcctcgcgctggccaccgattttctgcgcgaggcggcaaatagccccggttga

SEQ ID NO: 394716 - DNA, 1608 bp, Salmonella enterica
atggccattaaacccttagcctccacgctgcgcacgctggactgggatgacctgcccgccagcgttcgcgaaatccccgacagctttgatccgtttggtgatggcgtgctgatgaaacaccagcgcgaatgcctggcgtttgacgtggatattcttgccattcctaaaggtcgtcgtaccggtattacgtttacatgggggctgaactccgtactgattgccgccgccagcaaaagtgccgggggcgacaacgtctactacattggcgacaccaaagagaaaggcctggagtttatcggctacgcggcaaagttctcccgcgtcatcgccgaacagcagtcgcaggaaatctcctcgatcgaggagtttctgtttgaggatcaggacgagaacggtaacacccgattcattaacgcctaccgcgtccgttacagtagcggttttcaggtggcggcactctcctcgcgacctgccaacatccgtgggttacagggtgtggttatcattgatgaagccgccttccatgccgatgttcagggcgtgctggatgcggccacggcgctgcttatctggggtggtcgcattgtggttatcagttcccataacggtaaaagtaatcccttcaatcagttctgtaaggatattgaggccgggcgatacggggataatgccgctgtgtttaccgtgacgtttgatgatgccgtggccaacggcctgtatgaacgcgtcagcgccatgaaaggccagacacccacgccggaaggtaaaaaggcctggtacaccaaaatccgtaatgcctatggcccccgtcttgcggcgatgcgagaagagctggacgccataccacgcgacggtaacggggtgtgtattccgggcgtatggattgagcaggctatgacccgcgagcgtcccgttctgcgcctcaccctggatgatgattttatccatatgcctgaagaggaacgtaagtcatggtgcgatgactggattagtcagtctcttgcaccggtgatggaaagtacgctggacgcgcagctgcgtcacgtcttcggaatggactttgcccgccaccgtcacttttctgctatctggccgatggccatcacgcagacgctgaggcgtgaagtgccgttcgccattgaactgaacaacacaccatctgccatgcagcaacaaattctgttctggtttattgagcacctgccacgcttttccggtggttcgatggatgccaccggccccggtatggtgctggctgagtataccgccgatcgctttggtcgtccgcgtatcgcggaggtcacgcttaaccgcaaatggtacggtgtctggatgcccaaattcacccagtcctttgaggaaggcacgattgatattccgcgcgatgagaacattgcgcaggatttacgtgccgtcgaaagtgtggatggtgtccagatgatttcaccgctggagcgtaaggacttaaaggagccggatctggttcgtcacggtgactcagccatggcgggctgtctggcctggcatgcctcgctcaatatgacgtatgacccggtcgtgcattccaccgggcgtcgccgtatgcccggcattctgagggggtactga

SEQ ID NO: 394717 - DNA, 552 bp, Salmonella enterica
atgggccggaaatccacggtacacaagctgccggaagagatacgcagtcacattgagcgccggttacgtgagaaccgtctgacgctcgatgagctgattgaggatttgcgcaccgcgtttccgcagacatccgaactgcccgcccgcagtacgctgggccgctataaaaaatcctttgatgaggtggtcggaaggatgcgtgaacaacaggaaatggcgcgcatgctggttgatgagctgggcgagaacccggacgaacgcgcaggtcagatgctggtacagtccattaccgcgctcaccagccatgcaaccatgctggcgcaggtggagcaggagccggatattgacaccgtgcgctatctggcccgtgccgccaaagacattctgcaggcccgcaaaatcagcttcgaagagcgtattgccattgagaaacgcgcccgcgagaggctgctggccgagcagcaggaaaaccttaaagccgtggcccgcgaacgaggcatggataaagagagcgtggacttctggcgcagacgcgtactgggggtgagctga

SEQ ID NO: 394718 - DNA, 297 bp, Salmonella enterica
atgaagtttgttgattttctgcgtgaagactggcggctggtcaccctgcgtatcctttccgagatgccgggctacagctccaacagttcagtgctgtacagcgccctgacgcagtacggtcacaacctgagccgcgaccaggtgaaaacggaactgcgctggctggaagagcagtcgctggtacgcgttgaggcgctggaatccgttctggttgtctggctcactgagcgcggtgctgacgtggctgctggtcgtgccgtggtgccgggggtaaaacgtcccggcgcgggaggctga

SEQ ID NO: 394719 - DNA, 303 bp, Salmonella enterica
atgggaattagtgagcttaattttgactggaatttcctgcagtgggtggtgatggcggtggtcggtgtttacacctggctgattggccgtcagtccgccagtgcgcaggagttgatggatttgcgtacccgcatcgtgcgtcttgaagagcagatagcgcaggtgccaacacagaaacaggtcgccgacatgatgagcaaactgagcagcgccgaagcccacatgagcgggctgaatgaaaagtttgatgtggtctcgcgccgccttgagtcaattaacaattttctgctgcagaacaagtga

SEQ ID NO: 394720 - DNA, 657 bp, Salmonella enterica
gtgtggggtaaatggctgaaacgcattccgtggggcgacctgttgctgttgctggttgtaaccgtactcctcggctgggtgtgggttaagggatataacagcggccatctcgatgcacagcatgacggtgataaggcgctggcgcaactgcagtcacagtttgatacatacaggctcaggagtgccgaacaacagaatgaagcgctgcggactgtcgtggcccgctataacgcgcaggtcgccgccgctcatcaggcggacgcggattttcaggcaaaaaaacaacagctggagcgtgagaatgctgaccttaaaaaacagattgcggacgttacccgtcactgggtggatgagaaaggtaaacatcatcccattgagtgcgtgtttactcgtggcttcgtgcagcagtacaactccgcccttggggccagtaccggtgacggtggcgtgtccgctgccgcccgttccgccagcgctggcaacgcgaccggaaccactgacaccactctcgcccggttacgcgactcaggcgttactcaggccgacgtcctcgccaacgttaccgacaatgcccgccagtgccgcgtctggcgtgagcaggtgaacggtctgctggattacaccgacggtcttcaccgcaaagagggagaaaagtaa

SEQ ID NO: 394721 - DNA, 630 bp, Salmonella enterica
atgacgaagacattaaaccccaccatcactgttaccgtatcagggttgaccggtttaattgaaaatcgaactctctatcaaatcacccggattactgatgcactcaaaatatggtacggagatgaaattgctgtgaacatacagaagtcggaggacgttaacagccgttgtcgtgagctgccggagtcggcatttaatcaccatgataaacccgtcaggggaatcaccgttgacgacttagttgatcgcccggttccggtacatattcaggggctgatgagcatgctaggcatatcgtttgaagagtatcaggaaaccagcctgcagccagtcgttgacctggtgaactgggcgctgacaacctcaccagtcccggagcaaacaacgcagccagataaaaaaggaaatgaatactccagcagaaatccaaactgcctttctggagttacgaataaagacggacagaatgctccacagctaacttcactcaccccggaagatacaattcgccaggttactgaatctgttatcgccattctggattgccataaacggcaacaaatacaccgtgaggaactcattgaaaaaatcaggaaagaaatcctgaatcttcacaacaggcctggttaa

SEQ ID NO: 394722 - DNA, 591 bp, Salmonella enterica
atggataaagcctcctgcacacccgtttatctgggtaatgggctgttgggacgtgacaaacgagtccggcatgaagggcatttttatctttataaaaacagaacaaaaggacgcaagtttaagcgttcgaaagacagagcagccagggcaatgatgacgaaaaaaaaacggctggcaggcaaatctccctggttaattttcactaatacaacacagtttacggcgaagcaaattatgaagctgtacagtcgcagaatgcagattgaacaaaatttccgtgacgaaaagaatccacgctggggtcatggtcttcgtgaggggatgagccagtcagttgagcgtattgaagtattgtgcctgattggcgtactgtcaagtataataatgtggctaagtggttatgctttagagaacaaagggatacatttaaagtatcaggcaagcactatcagtggtcgacgggttctttcatttttggcattggcaaaaaatgttatcagacacacaccgaatatattgaaaaccttgtctctggataagccgctgcacaacttgcagcagcgttattcagatatgatatttgtttactga

SEQ ID NO: 394723 - DNA, 354 bp, Salmonella enterica
gtgtttcagaaaatcacacaacacataacccgtaatatgccccgggtagtcattcttatcgactggagtggttaccattctgcagattttcagcttctgcgagccagccttgcctgcgatggccgctcattgcccctgatgagctatgtagtccctttgtctcagttaggtaatccggatattcatgcacgttttctcgactcgctttccctgtgttttagtgaaaaaacggaagtcatcattatttctgatgcgggttttcagggacactggttcaggcagatacgttcccacggctgggtgtatgtctgtcgggtgctgggagcgcaatactacaaaattaatgaggaatga

SEQ ID NO: 394724 - DNA, 432 bp, Salmonella enterica
atgcctcaggccatcgggtatctgtgtcaggtatttgagcaaggcgctgtggttatcaacgagtgctgtaacccgcgcaccatcaggcatgcaggcggtttactgtttcagggacgagagtacggatggcgggatagtcgctcagggagtcaggagactacgcaggcgcatcactcaggactggcgaagcggtacgccgggaacggcagtaactcatgcaaccggtcctctggccagctggagaagagcaacccggcggtcacggagatgaagcacctgaataaagaggtgaagcggcgcgccgacgtggtgggcatcttccccaacgaagagagcatcatacgacttctgggtgcggtgctgacagagcagaacgaagaatggttgctgcaaaaccgctacctgccgcagcacagcatggcggagatatag

SEQ ID NO: 394725 - DNA, 498 bp, Salmonella enterica
atgaatgaacggggaacggaacagcacatccgccgtcccggtacgtcataccgggcggaggactatgacgacgagggcaacctgaaggcgccggtatggttgtgggcgggggtggcgtggcttctgttgccctggtggcttacggcagcagggatagtgtcacacaacacgccggtgctggcggaagcgctgtacccgacggtgacggtcacggtgataaacctggtggcggcgctgccggcagctctgctgtgcgcggtgtacccgctgcggggccggtatccgcgggtggcgctgctgacattcggggctgtgtacctggggcagacggtgatgctgttcagtacgggaggcgtgatgctgatgcaggacgactggtcgctggctgacggtgaggacctgatgctgagctgcctgtgcgtggatttttccgtcctgctggggctgctgctgacgccacggttgtggacggtgttcggctggccggaagtggagtga

SEQ ID NO: 394726 - DNA, 1998 bp, Salmonella enterica
atggacgatacgtatccggacgacgacgtatctgtcgtgtcggtcccgtcttcatcaacggaaccgcaacagccgccattaccggtgatgacactgtttaaccttgaagcctttgaatggcgtgtacacacggaacagacggaactggcctgccgtgagctggtgtttctgctgggagagctggaccggacgtacggccagtggagcgaccatgtccggggattcgcccccggacaactgtcagacatgctgaaccgccatctgtgcacccgcattgcgggtgccgtcacagcgcttttttcccggccggggttaaccctcagtgacacggggtatgtgcagctgatgaatctgcaccgctggctggcgctgatttttgccgtaagcagttaccgtcatggagaccatatcatccgtaacctgaacgcggcaggcggtggcgtggttgacccgctgacgctgaacggcagtaacctgaggctgttctgcctgtgttatttcccggattcagaaatcgccctgcagccggacgtgctgtggcagtacgaccgtgagacggtggtgcggctgttctgcgcactcatcaccgggcgtgccctgccgaccccggcggcgcacgggaagcgggagcagttgctggcctggctgccggacaggttacaggagctggattcgctggactttctgccggtggcggtcctgcatgatgtgtacatgcactgctcctacgcggacctgccacagaagcacgccatcaagcgcagcgtgaacgccctggtgcgcagaaccctgctggcacaggggttcagtgacctgacgggaccggatgcgatggctcccggtgacaccgttttacagcgggctccgtcagaacaggaggagatgccggaacaaccggaaaaaccggtgatgattgtggtgctggagcactttacctgccagcacagtgtgtaccggacacactcggtggccttccgggcgctgcgtgagcgcttcacgctgcatggtattgccatggagggaagtgtggacgcggtgacagagcaggtgtttgacgtctgccaccggatggaagccggtgatgccgtgagggcagtgtggcggcttgcacagatgctgaaaccgtcggtggtgtattacgccggcgtggggatgttcccgtacaccatctatctgagcaacctgcgtctggcgccactgcagctggttggtctgggtcacggggcgtcgacgttctgcctgaccctggacggttttgtggtggaggaggactttgtgggtgacccggcctgtttcagtgagcaggtgtgtgcggtaccggcggacagcatgccgtttgtccccccggcgcagacggagcgggtcagcggggagcgggtaccgttcgccgggcgtcagcaggcgtcctggccttttgccctgccggtacgtatcgcggtctgcgcctccatcatgaaaatcaacccgggttttctgacggcactggcggagatacaggcccgcagccgggtaccggtgaagttctgtttttacatgggatttgcccaggggctgacgctggattacctgcggtcggcaatacatgacatgctgccggatgcggaggtgaatgcgcatatggcggtacaggattaccagtcagccctggacagctgtgagctgtttgccaacccgttcccgtacgggaacatgaacggcgtggtggatgtggtccgccaggggctgcccggggtgtgtctgtccggtccggaggtgcacacccatatcgatgagggactgttcaggcgtctggggctgccggaagagctgattgcgccggaccgggagagttatatccgggcggtggtacgtctggcagaagaaacggcgtggcgtgagtcgcttcaggcacaactgcgggagaacgacccggagcaggtgctgttcacggggcatccggagaggtacgtggatgtggtgtggcgcatgtgggaggagagcagggaggtcaggtcatga

SEQ ID NO: 394727 - DNA, 8751 bp, Salmonella enterica
atgaataaaatatacaagctgaaatatgacagacgtcgtaaccaggtcgtggcggtgagcgaactgaccgccggggcagggaaggaaaatacggggcaggttgctgctctggcagggctgactgatatgtgctctttccgtaagcttctgggaaccctgacgccactggcatttctgaccgggctggtgatgagtctgttgcccgggattgcgctggcaaatccggacctgccgacaggtggccagatagtagcaggccaggggaacatcagcacgaacggtaatcagatgaccatcagccagaatacgcacgggctggtgacaaactggaacacctttgacgtcgggcagaaccacacggtgcagtttgtgcagccggacagcagcgcggttgccctgaaccgggtgacgggcggacatgaatcgcagattctgggaacactgacggcaaatggtcaggtgatgctggtgaaccctgccggggtgatgttcgggaagggagcgacggtgaacacagcgggtctggtggcgtcgacgaagaacatcagtaacgccgattttatagcgggtcactatacattcagcggtggtagtgacgcgggcgcggaggtggtgaaccagggcaacctgacgaccacaaaaggcgggtttatcgtgctggcagcagaccgggtgaaaaacagcggcactatcattacgccgggtggtaaaacagtgctggcggccggggataaggtgacgctgcagctggacaataccgggctggcctcggtgtcggtgagcggcagtgtggtgaacgctctggtggaaaacagcgggttactctcggtaacggatggtcgggtgtacctgacggcgcgcggtaaggacatgctgctgaacacggtggtgaataacaccggcacagtggaagcgagtggcctgtccggtcatggcggtgaaattgtgctgaacggtggcgacagcggggtggtgaaacagtccggacagttgctggctgacagccacgcaggtccgggcggaaaaatcactgttgaaggtcagaatatccatctggccgcgaacagcagaacgtccgccaccggcaaaactggcggcggtgaagtttatgtgggcggcggctggcagggtaaggacagccgcatcggaaacgcgtcaaaagtggtaatggacaggtccgctacggttgacgtgtctgcaacggacgcaggaagcggtggtaccgccgtactgtggtcagacgactacacgaacttcagggggacaattctggcgaaggggggcgccctggcaggtgacggtggccgggtggaaacgtcgtctcataagaatcttcaggcctttggtgatgtggatacgtcggcatctgccgggcacggtggtaactggttgcttgacccgctggatgtgacgatagtcagtggtgacacaaacacatcagtcactgaaagtggcaaaggaagcggagctgcgctggacacagacaccgaccatatattcagcccgtcagcatccggtgcccgggtcagtgcacaaaaaatcgcagaccagttgaatgccggtactgacgtgacggtggacacgcacggggatggcgcccagcaaggcaatattacgcttgccgataatgtaaaaattcaaaagacaaaagataatacagtcagtcttacgctgaaagcggacaaagatattgtgtttggaaacagaggcaatattgttgcaacggcaggtaaactgaatctgaacctgctgaccgggggaggggggcagggaggtaacgttgcatttggagctcatcctgatatatccctgaatggtggtgatttacttgttggtccggcaaatgcgtctggcggaaatgccagtatgtctttcatgaatgccggctcgattaatgctggtaatatcacactgaatacaggtggtggtataactggcaagttttatagcttaaatgcaaccgaaaacctgacagtgacggggcctttgtctgttgatgccggatataacttaacgtcaaacattaaggctggtcatcttctgaatatcacagcagactcgggtgatatcagcttcactgccacgaaggtcagcggcgaagaaaccaatggtaaaatcattattgagggtaacgatggagtaaacatccgggcaaataatggtcatctggtgatgaatgctgtcgacaaaagtaagaatacgataactgtcagcagcagtaatggtgatgtgaatttaactgtcacaggctccgcaccagtcaatatgaacaatgtgactattagtgggcaaaatgttaccgctctccttaataatactgccggaggtgttgcctgggcgcagacaaatagcagtattaatgcggctgcgggtaatataactattgaaaaccagactggcaatagtcaaaattcgtggggggcaacttttaacaatggcaacctgacggcgctggcgggaaatataacgctgaatttcaccagcactaaagcagagttcttcaaatatgaccgtcatggcgtagatattgggggatcttcgaattttactgccactaatgtcaatataacgggacacacgagaaattcgaccataggggcagggattaatgtgaatggcgccagtgtggttatcaatgccaccagcgggaatattcagttaaccggcagtgccggaccgcattcacgtgataaaagtcatagcctgtcttcatatcagaacggtatgaatatcattaatgcgaagctttttgctcaaaatggaaacattttgctgagcggtgctgcacaggagggaaccggattattaatgataggcgttacgttaaatgcctctcaagccagcattcatggcagtaacaaacagagccggacgggttttgatcttaccggattgacctggcagggtggtttgactgatgcagctaatatcacattaacgtccacaggcaatgggggagccactactaaccggctgcaaacaggcagtttcactaatgaaatgctgaaggcggttatgctcaaggaaggcacagacaatccaacttatataaacaagtcttataattcttatcttatgtcagcttttttttcaccagatgaaacttcttctgatatcaatgctaattttaaaaacgtgtggatcatgaatgaaatgacgctgaatcccgccgggaatattagcttgcagggtgtgggattcagcaacagcacggtgacagcggggaaaaatctgagcattgataacggggtgcagcgtctgcttctgaacggcacgaacgtgagtgccggcgggaatatcagtctgaaggcgggggcgggtatcagctatacgggcagcatcgataagcgtctgaacatgacggcgggcagtgatatcagtctggacgcatcggcgggcacggtggatatccggcatgccaatctgacgtcagatgccggcaatattgaggtctcgggtaacggaacagccggtgtggtgctgagcaatatgtcactgaatgccacccagggaaatattacggttaccggggaaggaaagattctttctactgtttacgagactcggggagcaacctcaatttttggtaacgcttcgttcgcggcgaaaaataccataattactgggaatgatactgttgagtataacccagctaatgcaggggtaggtgttatgataggcgatagaacccctgcgaatctgactttttccggcgggaacgtttctgttaacggaagctccatgaatggtcagggggttcacttcggatttgcttttgaacacttaacccatgtactgaatatccatgctaaaaagtttgaccttacaggaagttcagaggggaaaaaggatacgagttatgcatctccgggcgggattgcttttcaaagtgccggcaaactgacaagtgttatttttaatctttttgacggtgccaaacttcggatcaccggggatgtttccaagtcgacagctcctggttctgtgggagtgggaaagtatgtcgacggtgtgaaaaatgcttttacctttaatggcacgggggacgtggaggttattggtaaagctaaatccggtgaaggggtgaatctgcgcggttttgataataccggactgacgggaaacctgtctatcaaaggagtgagtgaatcaaaatccggggtattaatggattctgtggatattgcgctggtcaacgccactgtcaccggcgagagtaataatggggacggggttaggataaacgcggacaacgattatccggcgaagctgaacctgacgaatgtgagtctttctggtaatacgcagtcggggtcaggtattcatgtgactggcggcgaaaagatggactttgcggggacggttactatggtcggaaccgcccataataacggggtaggtgtcacaatctcgggcccgctgagcgttaaaactgaagggacgaaggtaagtattagcggggaatcggcgtccgggatcggtgttcaggtttcagacacgacctcgctgaccgggggaataaagctgtcgggaataacgcaaagcggcaccaccggtgtcaatattggcggcaagcttaaaatggatgacaaatcctcggtcaaaggggaggcgacgagggcaggtaccggggtgaatctgagtggttcactggaaggcggtagtgtatccgggaaatcgacaaccggaacaggcgtgcaactggccaataatgcgaaggtgcggagtaccgtaatgaacggcacttcggtctccggcagcggtgtttctgtcacaggaaatgtttcactggatgacaaatcggcgaagactctggcggcaaattcagggagcggaaccgggttaagtctggaaaataatgcggttgtcggtgttgtgatgaaacaggaggatgctacggaggtggcggtgacggcgccggtagtattaaccggaaaatcggagacaggcagtggggtggcgacgtcaggtaacgttaccctccgcgggacgaccctgaccggcagggcggagactgacggtggtaccggggtgacgctgggcggcaatctgactttcactgatgatatttccggggtcagcgcgagcgccacaggtagcggcacagccctgaaaatcagtgacggagtggttgatgccaaaggataccgggatgcagggaggacccttgttatcaacgccacatcagagaatggtacggccgtcagtacaacgggtaacagcagtctgattaccgtggagctgagaggaaccgccaacgggaatggcagcgctgccgtggtaaatggcactttgtccacggataaagccctgacggcagtgtcgaagggggataagggggtggggctacagctcagtggcggtcatctgcaaagcacggcggcggataatacgccggtgaaggtgacggtcagtgcaacaggaaacgggacggcagttgccgtaacggaacctgaaagcggtcagtccggcagcggcctttcgggtattgacctgaatgcctccgcagacaagggaacggttatggacatcgacggagacctgaccacggacagggacatctccgtcagtacggagaacggagtggctctcagcctgaatggaggaagcctgcagggcgctgagagtgagcatccagttaccgtgaccgttcaggccaccggtgacggcactgccgttaccgtgaagccgacagataaagggaaaccagggagttcgcttgcgaatatgacccttcatacgacatctgctcagggtgatgccctgaacgtggggggcgaattaaacacgaaaaaggtggtggtggaagcagggactaccgggacagggactgcgcttaacgtcagtgggggcgaaattcactccaggggcgaaacggacatcatagccacgtctgacagcggtcacgccgcggtgattaataacgggaagctgaccggtgattccgccggtgccctgaccgtgaaggcagccacgaaaacagacagtccggcgctggatatcagaggcacatcggatatcagtaacagtgtggtgagtggaaagaacagcggtaacggcagtgccgtaagtgtggctggtgtggtgacatcgtcgggcggcggagagataaaaggacagaccgttaacggtacggcagtggagattaaagacgggacctcagtcacgtcgtcacaggagggcggtcttctgataacggccacggccagtggtgagaagggaaccggggttgcactgagtaatgccaccctgacgggcagccggattaacgcagacgcgactcaggggaatgcggtcaccatagcagacggcagcattaccggcgggaatattgccgggcatgctcatgggggggtggggctgaatatcagtaatgctgttctcagtaaagtcgtggccagcggaacgacacagacaggtaccggtaccgtcatcaacggtacacttaccagtgatgaggcatctcagataacaggaacggccacacaggacggtggtaatggtgtgaacgtcagtggcagcgtgaccggcggaaaggtggaaggtcatgcgaccagtggagatgcggtgatggttgtggacgggagttcagtcgctgatgcagaagtgaaaggagatgccgggtcaggtacgggcgtaagtgtggcaggaaaagcgacgctgacaaacgccagcctgagcggaacgacgcagaccggtgccggtaccgtcatcagcggcacactcaccagtgacagtacgtccacgataacaggaacagccactcaggatggtggtgatggcgtgtccctgaaaggccaggtcacaggcggtacagtgtcaggccatgcgaccagcggagatgcggtgacggttgcggatggaagttcagtcacagatgcagaagtaaccggtgatgcggtatctggtacggggctgaatgtggcagggaaagcgacgctgacgaatgccagcctgagcggaacgacgcagaccggtaagggagctgttattgcggggagtctgactgcagataacaactcggtggtcagtggtaaggccacacagaacggtggtgatggtgtgagcgtgagtggcaatatcactggcggtaaagtggaaggccatgcaacaagcggaaacgcagttaatatcacgggggcggtgaatcacggtgtgattttcggtgaagccacgcagggaacaggcgttgtcgtgaataccggtagtcaggtgacagactcggccatcaatggcaatacaacagaaggtacaggggcgcactggcatgccggggtgaaacataatcatgtcacgataacgggtaacgccacctcagagactggcgtgcagatagatgcagacaccatgctgaaaaatgccacggttagcggttcgactgaaaacggcaaaggggtgaatatcgcgggtgcgctggtcaatactggcagcacaaccctgactggccattcctcaggcccggggacgggggtggatgtggctggcaatatcagcggcggcagcatcaccgggaatgcaacgggtacaggggctggggtgacagtaagcggtcaggatgtgaaggtcagcgatgtggtcgtgaaagggaatacggttaacggtacaggtatgtctgtgacgggtaatctgaccggcagtgattctgcgacagtgacgggcctggccacaggaagcggtatgggtgtggatataggcggtaaactgaccggaaccatcagcggctcttcttcatcaggaaccggtatacgtgtcaccgatggcgcagacatcgtacagggaagtcatgcggacggaaactctgagtccggcacaggtgccgtcattcaggggggtgtcacaaatcagggcagtatctcaggccagtccggcagtggtggtggaactctcatcgtgggaacggtggccgggaaaggtgatattacaggtacctcaaagggagccggagaaggggtcattctggcgggtaatgtcaccggtggtggtatcatcggtcagtctgacggaggcgcaggtctcagcatcagtgatgacagtacactgaccgacgtcacagccagtggttttactgtcaccggcactggtgtgcatgtgaagggaaacctggtcaacaagggaggcacgacagtaacgggggcagcatcaggcaacggcacgggaatgctgttgtctggcagtgtggctggtggtgtcattaacgggcattcaacagacggtgtgggggtgagtactgacaggaatctcaccctgacggatgttgctgtgaacggaacctccgtgagccatagcggagtgcaggtcagtaacgatgtgacaaacactggctccacggtgattaccggcagctcggaaagtggagccggggtgagtctgaacggcacggtgtccggcggggcgctgaaggggcattcagtcagtggcccggggttgcatgtcacgggtgacagccaggtgaatagtgtggaagtgagctcatcgtctgaacagggatcggaggtgcagatggacggaaatctgtcatctgcggacagttcacttaatgggcaggcgctacaggatacggtcaccacagatatccttcgccaggcggcttatcagcagcagggggtaatatcccatacagcgcgtcagaaacacccggccatggcatccggttacaaggagcaggataaacctgtgagtgttgaaatctgcgcggatggtcagtgccgcaagctggatgcggggatgctggctcgcccggtccgtcagtaa

SEQ ID NO: 394728 - DNA, 1815 bp, Salmonella enterica
atgcgtttttccgtggtacgtaggagaggatgtcattcatcttctgactggtttcgtctttcccctctggcaactctggtgtttgttggagtgggactgaccagcacaggtgcgtcggctgcgtttcttcctccgacaggtgccggccaactggggaaccagctgcggcaggaaacgcagaccaccccgcctgcaccttccgctccttcactgtccctgccttcgggcgaaaaaggcgtagtccgggccccggacagcgatgcgcgggtcaccctgaagcaggtgagctttgcgggtgacgtggccgtgcagggcgtcacgcaggatgctgtacaggaggtagtttctccctggctgaacagacccgtttcctttgcggacctgcaggcgatggcggatgccgtgactcagcattaccgcaaccggggcgtgattctggcccgtgccattctgccgccccagaccataaaggacggggtgctgaaaattgagattatcccgggaaaatatgacagcgcatcgctcagtaacaccagtaccctgaagggccagcaggccaaccggatggtgtcctcgcttgcaccggccggcagtgtggtgacaaaggctggtctggagcgtatggcgctcgtgctgagtgaagtgccgggggtgaatgcacaggtggccctgaagtccggctccctgagaggaacatcggcgccggatatcacgctcactcccggaaaacggttcgggggctatgtcgggctggataaccagggtgacccgacgacgggccgcagtcgcgtgatagccgggatgtatgcgaatgagttgctgggttatggcgaccagttgagggtcgaccttctggatgcgtatgagaaaagtaatctgtttaacggcagcattgactacagtctgctggccggtgggtacggcacccgtgtcggggcgaactacagccacctgaactatcactataacttccttcagcagggttttaatggttattccgataactggagtctgtatgtgaaccacccctggatacggacggcgcgcgcccgcgtggacatcagagctgagggggggcaacagtctctgacggataaataccctgcaggtctgtacggcagcacaggcagtgagggacgcaagcaggtgtcgctgggttcactgtcggtggcggggagtgtggcagatgtgcctggtggtgtgacgggattcagcgtgaaaggcaccacggggaacctggattaccgtaatgagactgcacgagatatgggattcagccgtgagctgggctcttccggtcatttttcccgcctgaactgggcgctgaaccatgaccagcaggtgtggggagctttctcggtatatacgggcgtaaacggccagatggcgaaccataatctggactcatcccagaagtatctgctgggcgggccgggcgcggtgcgcgcatacgatatcggggctggctctgtggacaacggaacggtggcgacgggggaagtgcgctggaagcatgatattcctgagacaggtctgacccggtggctgggggcgttgccttctgtgacggtggcggcgttttatgaccaggggtggggagagcagtatgcggagaaccgtaaccgtgtgtccggaggccggataacaccggataaccatgtgaatctgtcgggagcgggtctgtataccacggttgcagaagccgggaattatgcactgacgctgacctgggcgcaccgcacgggaaatgctgacccggtgtcaggtctggctgaccgcgaccgtttctgggtgtctgcagtgaagtcgttctga

SEQ ID NO: 394729 - DNA, 249 bp, Salmonella enterica
atggctgataaagttaccgaagccgccgttgtgggtggcgtggatacacataaagatctgcacgttgccgctgtcgttgatcagaacaataaagtcctggggacccggtatttcgccacaacacgacaaggttaccggcagatgctggcatggatgacctcatttggggcattaaagcgaattggtgttgagtgtacaggcacctatggctcaggtctgcttcgctatttgcagaatgccgggttataa

SEQ ID NO: 394730 - DNA, 300 bp, Salmonella enterica
atgccggaagcaaagcgtaagactccgacgttacctaatgatgagatagcccggaagctggaatccggaaagctgtggcgtagagcgatctgccgctggtgttatgttctcaccaaaacagaagatgttaatgttgcagaaaagattgttcagcatataacctggtgccgacagcaggtaccacaaaagcgccatggtgaactaatactttccgcgaatgacctgcgtcatatcgacagggtcgcccgaaaactgggatgtggtcccattgcccgccactggatagagtcgtcaggatga

SEQ ID NO: 394731 - DNA, 1500 bp, Salmonella enterica
atgaccgcgaacagtgttattgaatacattctggtgttctttggctgggtgctgaataacgcgatgtggaacataatttttggtaccgggttatatctgctgcccctggtgttcaaatgtacggccgtctggctgaagacccgggaagaaggatttgatgaggggaacaaggggctgctgctgcagccccggctggagcatgcgctgtatgtgccgtatctggtgattttgttttgtatcctgccggttgcgccggtggatatcagtaccatgaagtttgacagcagccgggcgaagcagtgccatgtgtcggtggccagtccgcagagctcaggctacagcacgctggtgaatgatatgggcgggaaaacggcgaatattcccgtgtggtggtatctggtacaccggctgtcgaaaggagggacgcaggcgatgacggcgtccattccctgcgggggcaaaatccgtcagttgcgttttgaggtgcagcagagccaactgaaggacccgatactggctcaggagctgcaggagtttgccaacagctgttatgcacgttcttactacaggctgaaaaacagcaatccggtcctgacggacaggaccataaattcgacggggtggattggcagcgactattttctgaatacagtggggtattacgacacctatacgtcaaaacaaccccggaaggcgtggccatggaatgaagccagggacgcagggtatgcgaatacgggggacggggggtatccgacctgtaaacagtggtggctggatccgaaaaagggattaaaggaccgggtactggcgagtatgtcaccgaaagtcattaatgacttacgccggcaggtggggaaggggtgggaggagacggcgctgcgctggctggtcagtccacagaatgtccgccgttcggtggggaatgacacctatattctgggcagtaatgacgatgcagccggaggcgtgggcgtgatcacccgtgcagggacgacgattggcgtgggactgaaacagctggattcgcaaccaggttttgacgcgctgaagctggccctgccgatagtccaggcattgctggagatgatggtaatcgtgggtatcccggttctgctgatgttcagtgcgtatgaaccaaagacgatagtgacgattacctttgcacagtttgcgctgatatttatctcgttctggtgggaggtggcggggtggcttgatgacaaactgttgctgatgacctacaacagcatcactgattttacgaagtcagtgaatgatggctggataatgaatattgttctggggacgatgtatatcgtttttccgctcgggtggtttgcgatgatgagctggacaggtgtcagaattggagatctggtctctcaggggataagtaaagctggtaaccccgtgcaggatgccggtgctcaggggcccaaagctgctgaaggtgcagcaaaagccgtggtcacaaaaggtaaaagcttaatgaagtga

SEQ ID NO: 394732 - DNA, 399 bp, Salmonella enterica
atgaaaacgtcttttctgatttcagtcgtttccgggacccggcgtgccggtcgctggctgcgacacggttcagcggtgtcatttcgtttaatcctctggagcgtattgctgagcatgctggtgatgttactggtggccattgtgctcagggaccctcagggggatgcagtgcgccagtggctgttccatgcccggtggtcgttactggcctggcggatggtgctgtacggtattctggccggcctctgggggtggcccggggaactgcgccggtggtacctgaaacagctcagggcctccggtcatccgagtccccgttttgctgtgttccgtacggaaattattcctgtcctgctgatagcgctgtctgaatacagcacctggacacggaaatcctga

SEQ ID NO: 394733 - DNA, 405 bp, Salmonella enterica
atgacgaatcttgatgaaaaaatgaaagccatgctggcagttcagttacctgttcaggccactaccggggaagacggtctgccggatatcggaccaaagcggtcactgcgtgtgtacaatgacaccacactgatttacaacgagaacacgggaggcaggacgctgaaaaatattcgcgcgggctcaaaaatggcggtggccgtgattgaccgggagaaccgggatggatatcgctttatctgtacaccggtgattgttgaagacggtgatgcctatcagaacgcgctcgattttgcgcagaataacggtatgcagcagccactgtgtgcggttgtcctgcagattgatgagatatacagcctgcgttcgggggcggacgccgggaaaaaaatcagtaaagcgtga

SEQ ID NO: 394734 - DNA, 219 bp, Salmonella enterica
ttgtttccagaatacagagaactgatttcgcggcttaaaaaagaagatgcccatttttcggtactgtttcagcggcacaatgaactggatcacgaggtatcgagggaggaagcccgtccggcccctgacgatatgcggctgatgaaaatgaaacgggaaaagttacacctgaaggatgagatgcatcgcattctgcgctcttactctccgggggagtaa

SEQ ID NO: 394735 - DNA, 492 bp, Salmonella enterica
atggaaaaattttcattgaagttcaaacaggaagttgcagaaaaatacctagaggatgagctgagtctgaaatctgtagtcaggatgtacgacatcagcccctgcacggtaagaaaatgggcttatgcctaccgggagcttacgggtaaaaaggggcgctactctgctgatttcaaacttacggttgtaaaagaagtcgtggatgattgtttttctattcgtgaaactgcggtaaaacatgggataccagcctttggtactgtatgcacttggcttgaaaaatatagaaaatatagcgaggatgctttcatccgaaaaaataaaaagatcatccctgtgccaaataaaagagtcattcctgttccaacactaccagcattaaccgaagatgagctagatgaacttgaacaactcagagtcgagaatgcctacttaaaaaggctgaaggccttggttcagcagaaaacatgctcagcgcccaagaaaaagtga

SEQ ID NO: 394736 - DNA, 357 bp, Salmonella enterica
gtgatcttttgtcttggcttaggctcattggcgctattgccggaagctgcgacggtgaatgatttcctgtggagagtcgccgtttgtggggtgggctatggcttgttccttccgccaaataacaaggagatgtttgccaatgtatcagcaaatcgcacggtaacggcctccggcgtgttatccgcggccaggacgacagggcagtcaatcggcgcggcactggtggctatggtcattgctctgttgaacggcttaaccagtcttgacggagcgcaatttgccgtttatatgtttgctcttgcctgcgggattgcggcgatatcctctattgccagtatcttacgtttgcatcgctaa

SEQ ID NO: 394737 - DNA, 420 bp, Salmonella enterica
atgattactcatcagaacctgtcgtgccgcctcagaccggtggcgctggccctggtgctggcagccggttttccgtctgtcaccgaagcggcagttaacaccgccaccctgattgccgggagcgcctcgccctcgtgtatcagttggcgggtgaagggcatctgctactggctgttctgcacgccctttggctgtacggtgaaaacatcggtgaaggtggagcactttattccggaagctgtgatttctgtctatcaggataagggggaaaacccctggacggagatgaaggcggtcagcagcgcatcgggatggggggagaatgccatcatctccgggctgtcgcattctgcgccccggtggcaggaaggctgtcaaaccgttttaatccgacgcagatttcgaccgtcggggtggtga

SEQ ID NO: 394738 - DNA, 261 bp, Salmonella enterica
atgagtaaccgtagcaaaaagaacaaacaaaaaagccagcctgtcacgccggacgctattctggcagtggttcggacgctggagtctcacaccagtgacccggaggatgccctgatagtactggcggctacagcgcactcactgatgacgtcactggacctacacatcactgaatcccgtacgcctgacggactgggaataacgctcacccataccgatgaggaaaataagcagaaagcgggctgcctgcaccagcactga

SEQ ID NO: 394739 - DNA, 213 bp, Salmonella enterica
atgaccacgttcaataactcaccgcacgataagttgtgggttattgaacggctgcggaatcttaatctcgtcatctttcatgccctcccgatgacgggagtgaaattaatactgcttattattgataactataaatatccccaagcgttcatttcttttctcgactttcagctcattttgacggactgcgtctgtgattatcgtagactctga

SEQ ID NO: 394740 - DNA, 606 bp, Salmonella enterica
atgcgcattgcttttgttgacggcggcacctactaccatcatgccacctatcacgatccggcttttacgccttttttctgccgcaacatctatgtatgcgatatggttaatgaaaatcttgatgacgtagactgtctgtatatcgccagccgtcagaacgcgcaggacttaatcagagtcaaggacttgctgcatgcctttcttgcgcgcggcgggatgctggtcgttatgggagaaagcggattacatcaatggctggatggcataatgtggcgaaacggcgtctgtaacttctggtggtggctggaagaaaatgcaaattccgggctgtgcctgactgcacctgatcacagtttgttccgttacctgacgctaaaggactgcacctggcaccaccacggcgggttgacgcctccgtcaggaggcaaatcgctgatagaggcagaggaagacggctgtattctgtttgacgcgccgctgggcggtgggcgagtgctggcgacgacattagacccgtgctatcaccacggcagctattttatgcctaactcaacgaagtttattgcaggattactgcgctggctgaaagatggcgcgcctggttag

SEQ ID NO: 394741 - DNA, 615 bp, Salmonella enterica
gtgagccaactgcttaatttacgttgtatttcccatgaactcccggaattttcccggttgctgaaagagagtggagcggaatctttgtcagtcagaggactggcgagagaacaacttcagcatcggacagttcttctgattgatgcgcatatcgatcagcgggcgctaatggcctggcgccaggagctggaggatcacctggtagctggggggctcattgtgtttaacggccacctgacctatccgctgtttaacggcctcgaaccttttcgcattgcggctggtcgggggcgcgacgacctgatactggaaaaagtgtatgatcacccgatttttgttgacgtggactgtgagcacctctctttccgtcgcggcgttgcaggattttatgcgcgagggggcaacccgccgcctgcaggagccaccgtaatccatcaactgaaaaaagacggcacgccggttgattggatctggagacgcccgaagggtggcgtcatcctgatgcacagcggcaacaatatgtggttattccagaacgatgacaccagcgcatcacgtatagcaccgcaactattaacatggatgctggaatatattgccagtgctcaactatga

SEQ ID NO: 394742 - DNA, 777 bp, Salmonella enterica
atgaacgagcctgccgcagtcatgctatcggtacatgacatcacctggcgctattcatcacgccactcgccgatattgaaaaacctctctttctccctgccgcagggcgctttgtgtatgatcctgggggccaacggtgcaggaaaatcaaccctgctgaaactgctggctgaaaaattatcctgccagcaagggctcgtttctcgcggcggcgacatcgccttcgtccctcagcgcacgacggtttccctggccgtttcggtatatgaaacggtgctggtcggcaggtctgcacatgtaggcttactgcgtgcacccaatcatcaggattgtcggatttgtgaagaggcgctgtgccgtgtagggctgcagcatatggcctcccgggagttttcttcgctttcaggtggagaacaacagctggtactgatggcccaggcgctggcgtccgaagcgcggattattttgctggatgaagttactgccgcaatggactggcgcaatcaggcaacaattctgcgattgttgcaggatcttgcccgacaagactataccatttcatttattacccattctccacaacacgcgctggattttgccactcactgtctactgatgtttcctgaaggcgactcgttgtttggctcaccgtcaaagattattaccgacgaaacaatgagccgactctatcgcctgccggtacgttgtacagtgatagaagatcgatgggttgttgttccacagtttatccagaaacaaggagtgtcaataccgtga

SEQ ID NO: 394743 - DNA, 978 bp, Salmonella enterica
atgaaacggtcatggtgtttattattcctgatggctcttcttattctgagcagccttggggcgttgatggttggccgtttcagtgtcccggccggtgatgtattacaagctcttatcggagatgcgccaacattacagcaacggcttattgtggatatccgtttacccagagttctgctggcacttattgttggtgccgggctttccggagccggagctgcactacagtttctttttcgtaacccgttggcggaaccgaacctgctgggcgtatcgtcaggagcggcttttggcggcatcctgatgatgatgttaattggtgacggatgggctcttattctgggcgctctggctggcggactactggcgttggcagcagtggtctggctggcgggaagctcgcagaaccaaagttcgaacgacacgttgttcttgatcctttcgggcatcgttatgagcgcgctgttctctgctggtttatcgttaatgaagctgctcgccgatccacaaaaccaactgccgtcgatcgtgttctggctgatgggcagccttgccggtacggatcggcagcgggtgctggttgccatgccagtcatcggtggcggtctgatgctgctctggatgttgcgctatcaacttatggttatcacggtacagggagcccacacgcctcgcctgatgcgggcgcggcggctggcgctgctggctatcggatttatcgctgcaggcagcgtcgcggtgtgtggtgtggtcggctgggttggcctggtggtgccgcacctggtaagaataatgctggggcagaaccatcgctactttctactctataccagcctggcaggggccagctactttattgccgtggatacgcttgcaagaacacttagtgcagtggaaattccactgggcgttctgacggcgctgttgggggcgccaatgttcgccgggttaattcagcgaatcaggagatcgcaatga

SEQ ID NO: 394744 - DNA, 1107 bp, Salmonella enterica
atgaaaaaaacattgttcattctgctgctggcctgcttaggttatctgtctgttccagagattaatgcctcgccgctaacaccgcacgctatacaggtgactgaccaaaaccagcgagaggtggttattgcccaaccgccgcaacgtatcattacgttcgttattccactggcgtccactattatggcaattgacggtagtccgggacgattggtcggtatgaaccgcgcaagtgtcagtgacgtgacggaaggtctgcttggggaaattttccccgccgcgaaaaatattgctgctgatattgccggcgacggtttcgtgcccaacgtagaggctgtagctgtagcccgaccggatgtagttttccagtggggcgatcggggagacgcgatagttgccccgctcaggacgttggggctgccgatagtcacagtaaactatggtgacacgcggcttgccagcaactggtttagactggttggtgaagtgttgggaaagcccgaacgtggatgtcaactggcccaatggtttgacgaagaaattactgctgtggaacaacttgctgccacagtcacgccagactcgcgtcccagagtcgtttacctttaccgggtgcgggcgggtctacaggtcgcaggaaatggtaccagcatggatagcgacattcggcgcactggcggcaacaatatggcgcagtctcttcctggctttaccaccgtcgatgtagaacagttgctgcaatggaatccgcaggtcattttgctcaataacttcgaaacgggattgataccagcggatctccttaacgatccccggctgacggcaattgacgcaattaagaacaaacgggtttactcctatcctcgtggtggttttcgctgggaacctcccagtcaggaatcccctctgacacagcactggttgcttacactgttccatccccatatagcgcagggaaattttcgtgctcgtgtgaaggaaacgtatcagtttctatatcactacactttaagcgaagaacagcttgaccgcattctgaagctatcggtgaacaatgatagtctgaactattgtgctcggttttgtcgtaaacaggggctgcaatga

SEQ ID NO: 394745 - DNA, 2118 bp, Salmonella enterica
atgaaaatacctaattcatcgcgcctgtgtctgggggcagcgctttttctaaataacgccgtggtatgtgaaacgctggctgccgagtctgataaagaggaagcgattatcgtacaggcgacgcggtcgaccacctcgacagaaaacttgcctcgtacagtgacgattatttcttcccaacagatcgccgaacggccaggctatgccggtatccagagtctgttagcagaaataccaggcattcagtacgctcgctccggcggcctcggcgggcaaatcatgatgcgcggatttaacagcaacgaagggcgcatggtgatggcgattgatggagaccgctacgaggggcgcaatacgctgcagtttaatatgctggatcccagcgctattgaacgtatcgaggttatccgtggtccggcctctgcattgtatggttccgatgcgatgaccggcgtaattaacgtcgttacccggcgcgccaaaatcgacgccgagcagcccttcgccctgaccccaaggctgcgcgccgcacagtggaacagtgttaataatctttacggcgggcgggccgaacttaccggcgggggaaatggctttgacgttatggttggctccagctaccagcatgcgaacgactacaacacgccggaaggaaaagcgcataacagcgattcgcagagtaaagcggtggatttcaacattggctaccgtccgggtgaactatcccgctgggagctgtccggacgttttgtcgatgtagacaccgggcgtgccggggggctgggcgctgccccaggttacccgaaccgactggtgggcgaaagccccattatcgaacgctaccttcggctggcctacgaagacaaacgggcaagttggttggcagaccagtgggaaagtacgctgtatcgccgggattttcgcactgatatctaccaaatgaatcgcaatccgaaaaaccaggcctataccgtgcaacaaatccaggtatacagccccgaggtctggggcggacacctgacagcgcaaaaacagatggacgatcacgcggtcagctacggcggcgacttctggtacagcgacaccaaaggtcgcaagacgtacaccaaagcatataactcatcaggctcacaggtttcgcaaaccccactggtaccaatggaacgggataccagcacaacaaacatcgggcttttcactaatgataactgggcgattagtgacagctttaacctgaattccgcgctgcgcggagacacggtactggtagacattggttctccgactggcttggaacagcagatccaaaaagacgccttcgccggtaaaaccaggcagaagcactatgccctgacaggaagtttggggggcgtgtggaaggtgacgccgcagtggcatctggtgggtaacttaagccgcggattccatgccccttcggcgcaatcgatggtgctgacaagcgttgcaggtacggtaaagaccctgccaaacccggagctaaagccggaaaccaatattaccgccgaattgggtcttcgatggcacggagaatcacaacagatatcgctcactggctggcaaagcgaatatgacaatttgattactctggtacccattaacaacagtggcctgaatcagcgacagaacgtcgctaaagcaactttgagaggcctggaactggaaggacaagcctacttcaatgagaactggagcagtcgctatagccttgccacactatggggtgcgaatgataccgctaaccaaccgctgccagcaatttctccgctgatcgcatcggtatcgctgcgttatgagaacagtgactggtatagcgaggcgattgtgaccgcctccgaggggcgtaagcgcatcgacaaaaagcaggagcgtgaaaccgcgggtttcgccaatctaaatctttatgccggcgcgtatcttgacgcatggctgggggaaggattcaccggctggaggctggctgcaggggtagaaaacctgtttgacgctaatcagacacctccgtccagcacggaaaacatccgtttaactcacacctatactaacccattaatcgagcctggccgggcatttgtattaaaacttacggtggactactga

SEQ ID NO: 394746 - DNA, 705 bp, Salmonella enterica
atgacaattatcaatgccggaaaagtaatgcttgctgacaccgttcggctattaaagtcaacgaggttgctggaagacatacgctctgagttgtatgaacgactcttacaggaaggtgtttttattcatctggaaaacaaacaggcgctttttcatcagggagaagaggctgatttctggtatctggtgctaaacggccaggtgaatactttacgatatggtcgtgacggtgaagagctggtttatcaacacaggctacgcggacagttgctggctacgctggtgatgtttatgccggagggacgttatcccgtacatgcctgggccagtatgccatccctggtgtgccgctggccgcgcaggatattgcatcagttttgcctgactcaacctgatatcggcattcgcctgttgtccagtgccggagaaatgctacaacaggctatggacaatattgagtcatttagtttgtgtacgctggagcagcgggttgctcgctacttgctaaaagtcagcgagatacaggggagccatatcactttgtcagtcactcaacgtctgttggcccatcagttgggaattcgtactgaaacccttaaccgtttgctggctcagtggaaaaagacaggggtaattcacggaatgggaaataacctgtaccttcacgatatggattttctcataaaggccagtggaaaaacttag

SEQ ID NO: 394747 - DNA, 636 bp, Salmonella enterica
atgtctcaaataacactccattttctggatgctaatcaaaaactaaccccccactgtgagtggcttcaaagtaagcttaccgatacctacgtacaggttacaaggttgatgccgactccttcactggatgtcgtggttaaggccgggaagttcgttatccctgaaaaagggcataccggtttctgtcctgaagctggcattatctatataactgtcgatcctgaaaatcccgcattctgcagaaacgatgcgcagtctattgaacgtatgtttgctcatgaactacaccatgccgcgaggtggacaggaccgggatacggctcaacgctgggcgaggcgctagtctctgaagggctggccgggcatttttctcttgagctttttggtggagaagctgagccctgggaaagacttcagttccacactattaagccctaccgtccacaaatgcttgaaaactggcatcgcactgattacaaccataatgcctggttttatggaaccggggatttgcctaggtggctgggatataccgcagggttcaacctgatatccaggtatctcgcagtattcccacatctgaaagcttcattgctggcgaacataaaagctgaggagttgaaggcttttatataa

SEQ ID NO: 394748 - DNA, 123 bp, Salmonella enterica
atggagactgaattcagaggtgaaaaagacttacttattgttttcgccaaaagattttttccagcaatgctggaggaagaggtcagtatctgctacttatatgatactgaattctttgagtaa

SEQ ID NO: 394749 - DNA, 996 bp, Salmonella enterica
atgaatgagaacgaaagggctgtaacgtctgtagataaaacaaagcaccttactgaacgtccacgcagtgaggctggcgtattacactcggaaatgaatattgagctgcatacccggtacgccattctgctctgggaggggcaggagacagaaaagaaagaaaaaggccgtactgtccgacatcgacgtattattggtatgcctttctttttgcatcttgtcggagtgattaacggggattcttaccgtgataatccttttgcagatcagactatgttaatgctggaagatgagttcagtcgtgggattgaggcgattaatgggttgataaagcaactggatcgtattcttcaggatattccggcgcggatctcattaacagaagttctgtcggtatcccccgttaacatttctgttttcagccgtacgccagtggggtaccgctgtgtctggttgctggtagggtttgaccagcttgctcttaaagcatttcaggcttatcactatggtcttatttcacgttcccgtcgtgatgattttttgaaccagggttcccgtttcatccgcagggcctatggccgtgcgcttggttatcgctctttaccggtcacccgacgtgatgtttttgagaagacggcggtattcctggacgcagtgaaacgttttggcgatgtcgagcctgcggtaatgctgggtacaaaacgttcatcattctcaccaccggttaaccgacgcagcattgactcactgaaaagagggtattttgaggatgagaaacagccggaagaagccgtagaaaaggtaccggataacaacggttcttctgagtacgggggggctcaggtgctgtcgccgctgcaggcagaagaagtcctcgtgccggatgacggaaagggcgtgcagacgggggataccggcatcgataatgatgtcgatattcatattgatgatttgtccgcactgttgcccccgcttgttgatactgagccggagtaa

SEQ ID NO: 394750 - DNA, 498 bp, Salmonella enterica
atgctgaagaaagaaatgactgaaaagcttaatgaccagctgaacatggagctcttttcttccctgctctaccagcaaatgagcgcctggtgctgttaccacagctttgaaggcgcggcggacttccttcgtcgccatgcgcaggaggagatggagcatatgcagcgccttttcgcctatctgaccgatacaggcagcatgccctgtatcagagcggttgacgcacctgtggctgaatttgattcgctggccgcgttatttaaaaaaacctatgagcacgagcagctcatcacgcagaaaattaatgaactggtgcatgtggccatgagcacacaggactaccccacctttaacttcctgcagtggtatgtggctgagcagcatgaagaggaaaaactgttcaaatccattctcgacaagctggcgctggccggcgacaccggcgaagggctttatctgcttgataaagaaattgcctcaatggggaatggcggctga

SEQ ID NO: 394751 - DNA, 4149 bp, Salmonella enterica
atgaacggaatatataacctcaggtgtagtgttattctggatgcctttattcctgtttcggaagtttcaagtaaaaaaggtaaattatcatcccgattattactggtggcgactgtcagcacattcatttttcccgggtatgtgcaggcaagtattgtaaatagtgagtttaattatcaggtgtaccgtgattttgcagaaaacaaaggaatgtttataccaggtgtaagtaatattccggtttttaaaataaataataaaacagatgttcctgatataataatgaaaaggccagcacctgatttttcctctgttgaccgctcaggcattgccacgttactggctccttcttatattgcatctgttgctcataatggcggatatacgggagtgaaatttgggagcgcaaattataaaattgtctccagaaatatagaaggtactgtatgggttccggattttcatgccccccgactggataagtttgtagtcgatgccgctccggctaatatgttaccatttgatatgtataaagagggtgaggaattaaataataaaaaccgttttaccaatgcagtacgactgggaagtggcactcagcaggtttccacagaaaaaggtaatattggcattagcggtccctataactacctgaccggaggaacgattaataacatctggtactcatcaggattttatcctgtatataaaggaggaccttcatggatgtctaatggtaacaataaaaataaaaaggatgttcttgatacctatccacttggtggtgatagcggttctccttactttgtatgggacgacaatctgagggaatgggaagtcgtaggtgtgcttcactccaccgatggtacaagttcgcactggtcgcatattaataaaaatttccttgaaagtcttatatcccgtgatactgactcggtggtttcactgtccgttaagcatgcggtgtggaataatagtcatatcaaaacagataataatcaatgggaatggcacggtataaaagacagttccacctcactgaatgatacgaaacacctggttatgtccggaggtggtgatattacattactacaatcggttgatcagggcgctggcggtatattttttgacgaaaataatcattatgtttttgatggtggttccggagtgttctggaaaggagcagggcttgatattggcaatggcacagttgttgactggaatgtcaagggagtcaaaggtgataatctccataaaatcgggttgggtatactgaaggttaatggttccggtattaatgaagggggactgaaggcaggcgacggtactgttattctgtcacaacatccggacagtaatggacaagtccaggcattcagttccgtgagtattgtcagtggcagaccgacagttgttcttagtgataacagacaggttaaccctgataatatatcatggggaatccgtggtggagtgcttgatgtaaacggaaatgatattgtatttcacagaataaacgcggcggataatggggctgtcattaccagtaccagtaatataccttcattgttgactattgctcctgtaaccgatttatctgtcaatgttaataactgggataataactggcgttcaggtggcgaaaaaggattgctttataaatataataacggttatacgcatacaatagattatttcgtacagaataaaaaaggatatggttatttcccgattaatcagagtaataattctgactgggagttcgttggtcatgatgaacagtcagcaaaaaaacaggttctgtccagaaggccaaaagataattttctttttcatggtaatctgaccggaaacatgaacgtcaggacggaaacgtcgggcagtaccggtgggattgcttttgatggaaatatcatccttcctgaaaatacggtctctcagtctgatggtgaactgatattccaggggcatcctgtcgttcatgcttataacactaaagctatagcagagaagcttgcatccctgggcgataattcagtcagaacccagccagtttcatttgaccagcctgactgggaaaaccgtaatttcacttttaagaatctggtgctgaaggatacggattttcggcttgccagaaatgccaccctgatgggtaatatcaatgcaaaccattcaattttgactcttggaagcccgtcactctggattgacctgaaggatggcagtggagagaaaaacagcgttcaggaaggtatttctgtcgccggtaatgaatcagatatgagtgtctatcacggttatattacgctgaataaccactccagactggatgttcgggaaaagttttccggtggtattactgctaatgacagttccatttctgtgacttcccgtcaggctgtgctaagtgaatacagcatgttcagaaaaacacctctggaactgcaggggggagcccatctgactgcgacaggcggatggtatacagacagccctgtaagtataaaccatgacgccaccttgtctctgggggggagcccgcgccccggaaataacgactatgtttcggctgcgtattatgcctccacagcattcagtctggaaggtgataactcccgactgcagatacttccatggaccttcacatacggggacatcagtgctgacgggaacgctgtgatttcggtgggtgaaggcagttcagtttctcttgctccggacctgagtttcagggaggaaattgcttacagtacattttatggttttaaaaacgtgtatggagggagtgtttatgctccccgggcacaaatgtccctcagtgatacgcagtggcagataagtggcgactccattcttggcagtctgaaactggcccgttcactggcaggttttaccggtggtaatttcatcactccattattccacactctgagtgttgacgacctgacagccagtcagtcagctttcgccctgagaactgacctgaaaaacagcgataacattgtaataaaacaacatgcggaaggaaaagataacaccctgtttgttaatttcctcagaaaaccctctgacagggatgcgctgaatattccgctggtcagcgcgcctgtgggtacagacccggggatgtttaaagcggctgaacgggtaacgggatttagcatggtgactccccggatccatacagaggaagacaacgggatgatgcgctgggtgctggacggatttgatgtcagaccagataaaaggacctccttttcagccaataccttccttaacatgggatacaagaactttcttacagaagtgaataacctgaataaacgcatgggtgacctgagggatacgcagggtgaagatggattgtgggttcgcgtcatgaacggagcgggtacaggagatggaggttattcagatcgctacactcacttccagtttggttttgacaggaaacacaggctgaatggcgctgacctgtttaccggtgtcctggttagccataccgacagccatggtggtagttcagcgttcagcggagagacgcgttctttaggggggggagtgtatacttccctgatgatgaactctggcgtttatgttgacctcatcggtaaatatgtccatcacgacaataactacaccgcccggtttatcgggccggataagcaggattatggtacacactcctggtatgccggggtggagacaggttatcgctacagattatccgatgatatgtacattgagccgcaggcggaactggtatatggggccgtatccggttcccggttcggctggtatgcagacgggatggacatgtcaatggaaaataaacattacaatcctctgaccggacgtacgggggtggcgttcgggaaaacctttacggggaaagactggcaggtgacggcacgtgccggtgtggattatcagttcgatctggtatcaagcggagaaacggcattgcgtgatgcgtccggtgaacaccgttttaccggagaaaaggacagtcgtatgctttacaacgctggagtgaatgtcagtctgaaggacaatgtgcgttttggtattgaactggaacagtctgcatttggtaagtataacgttgatcaccttattaacgcgaatttgcgttatatgttctga

SEQ ID NO: 394752 - DNA, 201 bp, Salmonella enterica
atgatgtgtacgtccagtgacgttatacccgaccggcgtcagcctgtcgggtatggatttggtcagtttttcctcttcatgctgttcagcgacataccactgcaggaaattgaaggtggggtagtcctgtgcgctcatggttacatgcaccagttcattaattttctgcttgatgaactatgctacccatacgttttttaa

SEQ ID NO: 394753 - DNA, 342 bp, Salmonella enterica
atgaacaataaaatatcaattgatatcaataacataatctcacaggaaaagaagtggataacaaaaagaagtaaggagaatgatgatttcaacaaattatttaatgaacatatcgacaaaaaaggtttcagaaaaggccccggcaggccggatgagtcaaaaaaaataattgaaaatttcatttccggaccaggaaaaagccccctgaacgctgaagtaaaaagattaatcagtgctcagcaatcacatgtaatgaaaaatcattccgatttatccggagtggagataaaaaatattttaaattacatcgattctcttaaagattattttataaaaatatga

SEQ ID NO: 394754 - DNA, 198 bp, Salmonella enterica
atgctccttaatgaaggagtattgacaggaatacatcattcccgacacgtcttaactaagactttatctaaaattaagacaaaaattttaatcatcatgattaaaacaatcaaaaacaacttacaagaacataaaaaaaaatcacaaacacccctcctgatgttttttatatttgcattatatgaatctcgtatataa

SEQ ID NO: 394755 - DNA, 546 bp, Salmonella enterica
atgaaaaagctgattttattaaatataattctcacctttgtatcattctatacaatggcaacaacaaccttatcttctgaaataaaaaaacatgaattgacacttagctgggaaggtatcgtaccaaaatcaacatttccaggagtaagcggagagtttttaggtgaaacaattgtcacttcagcactcaggtccgaaaaaatcgacaaaaatgacgattccaggaaagaatcagaacgcactgaagagttaataataaaatcattaatcaaaataaaaaacaatggaacaacatcggctaaaaacaacagcataatacttaataaaataaatgtatttcagacaaaagactctgtctcaaatactttagaaaaaaacagagaatcatcaatgaaaataaatcactacgcaagaataaatactgaaaacagtacagacagtaactacgccctgatgattgatttaagaacctcagtaatagattcagacgttcccccttctcattacagggttatgatgccactaatattttcagtaaacatatga

SEQ ID NO: 394756 - DNA, 1317 bp, Salmonella enterica
atgaagattagatttttaataattaccatgcttatggtttcagctttttttatttcactatcaaactatgttttgctgtctgttattctgtctttctttatactgcccgcaatgatatatctttccgggaagtataaggtttttatttttttactcccttttttatgggaggtgttacttctttaccctgtttatattgtgttctcgtgtgaatataatgcaattattgcttttttttatttcttagctatgtgttttattttggctttgccagtttctatttttatatttacatgtctatcaaagaaatattgttttttcgcgccttttatttatatttttatactgtatctttttaaggctgaaatctttcagaccttacctccaatattgatttttcaaaatgagtttatgcgtaaaattgcagaaggatcattttcttcatggatgactactctttcattgctttatttgtctatctctatttttgatatccttataaagaataaatctggagcgttgtgttgccttattgtctcttttttatttgtttttttccctggcaggttgcactacaattcaaatatcaacagtattaaaatagccggtgttcaattgtcattaatgatgaaggattttacagttctggaagagattatgaatttcacagatgaaatgataagaaacgatccagatattaaaatggtagtgtattctgaatctccatggttgggttttaaaaattataataatgcatcatttactaaaaaattgctttcatatttcataaagcgttctcttatcgatggtgttatctacgtatttcagatggattctatagattttaataatgagcgtataaataaggttttaacagttaaaattgaaaatggacggatttggtattcagggaaaagccatctcgtacctgggtgggaaaggggaaggggcgttaatgataattactttataccggaattgaataaaaaaatatttacggtctctgaaagaaaatttaatgctttagtttgttatgattctctttttatgccatctttgtttgaacgggattatgatgtcgtgctggttcagtcaaactatagtattttcaaagaaaaggcagggaaaaatgcgtatgaacatatggtaaaaataagtaatattttatcatggttttcaaatgcttccaacgggaagtcatacatgaatatacagaatgatggtggtagtgattttattaattcacacggagtgagaaaatatgacttttatgataagtccttgctggctaaatcactaataataaacataagataa

SEQ ID NO: 394757 - DNA, 558 bp, Salmonella enterica
gtggttttaaccggtccatcgggagaggggaaaactactttgttgaatattatgggttttttagatgatgacttttcagggagtattttattcaacggtgtaaaggtttctgctggtataaataatgattactttgaattaagaaaaaaaattggatatgtttttcagaacgctttaatcaatgattctcaaagtgtttacagaaatatgactttaccatccctgatcattcctgttccggatctgaatcagaaggtaaattatttattaaataaaacaggtctttctgggtttgaaggtaagaatgggaacgtactttccggaggtgagaagcaaagactgtcgatagcaagagcaattattcactcacccatacttttgcttgcagatgaaccaacagccagtcttgatcacgacaataagataaaagtaattgaattactggaaagtattaatacggagtataatctgactgtcattgttgttactcatgatctcgactattttgagaataaaagaaaaatagttttgaaaaatggtattttatatgaagattag

SEQ ID NO: 394758 - DNA, 768 bp, Salmonella enterica
atgaagtactttctaatttttacaattagttttttatattcctcacaatcattttgttccagtgttattggtattttacacggaaatgagacgataacttatacttctccgtttgacacggagattaaatatcttgaatcaagaacgggaatgatactgaaagacaaaattatatataccctggatgatgctgaattgagaaaagatgagaatataatgactctcaaaaaagagttgcttgataaacgtattaggatggcaagaaaaaatgtgaatactgtaaagagcggtgttgcaaaaggttttttgaccgagaatgatttagctgatgcagaacaaagtttgtatgagttaataattcaaaaaaatgaaaatgataagagctttttgattttaagcaggaagaaagatcgtacttcgctaatagctcacagctattttatattaagaaataacttcgcatatcaaaattcttttctaaaaacaggcgatgcaattgttacagttgaattattaaataaactgcaggttgaagtgaaaatagatccaattcaactttcaaccttcaaaaaaggtgatggtatcagatggaaatctcttgtcaataatgtttcgggagccggaacgatctcttatatagcacaagataatgatataagttcaggtttgaaaaaagtggtaatatctattccggaagacaggaaagaagaactggtcgatttagttgacactccatttgagattattttcgatgattcatctttataa

SEQ ID NO: 394759 - DNA, 573 bp, Salmonella enterica
atgaatataaattactctgattttaatggttgtgttgattatcaggatattcaaatgattcagcgggaatataagtatgagaaattgaaaaaagatatacatataaaaaggattgaatcacagatccttcctgatgtaacattatctacaggagcatctcccgttcatgatgaaacaaaaataaattatcaccgattagattaccaggtgtcagttgcactcacctttaatttggcatcagtatttaaattaaataatgataagcagattgaactgatgagattcaggcaaaaagaattacattatgaagatgctgtcatgatttttttcaataaaaaaaatgaggttaatactgagttgaaaaatatcaatcttcagattgacgtgttgtataaaagtattgcaatagaagaacgaaaactaaattatgtgaaagaacaactggatagtggaagagaaagttttttatattatatggatatgctaaaccgaatgctttctttgaaatccagagtgagtggactcattaatcagagggactattatgaagtactttctaatttttacaattag

SEQ ID NO: 394760 - DNA, 246 bp, Salmonella enterica
atgactatttacgccaaatcgtttactgctctcaacggcaatcagcgcctgacgggagccagtaccgcacagtttaattctcgtgaccactacacctgccacctctgcggtagcctgctggtgtttcattctgaatggagtaccaaccgtccgtggtttgaacatacacaggagaaactgacggagaacaggcgacagcattgtccgtatgtgcatccggaaccagtgtcagcgccaatgatataa

SEQ ID NO: 394761 - DNA, 123 bp, Salmonella enterica
atgaccaccatgagcagcatgatgcctgccacaaggttactcagcgataagtttgtcgatatggtcttcattacccggctcaccgatcctacgggcaaatggttctgtaagctgattcagtag

SEQ ID NO: 394762 - DNA, 180 bp, Salmonella enterica
atggctctggtaatcagatgtcgccagtggaatatgagcattagctttatcaaaaaatcagaagtatccagattacccgtgtcgattaattcattgctggcaattcgctgttgcattcaacattatctgcaggtatttcttgttattaatctttctttttcaggtgtgatgccggtttga

SEQ ID NO: 394763 - DNA, 306 bp, Salmonella enterica
atgatttgtccttattgtggttcaacgaagacacagaaaagaaatattggcagaaaaataggcggcggcattggtgcaatcgccggtggcgttgcagggatatcaggaggagcagagggtgtcacgctgggtgcggcagcaggctcagttattcccggcgtcggaacgattgccggaggtgtgattggcttcctggttgggatgagcggcggcgttgccctgggtgcaaccgcgggcggaggtctggatggggagattttcgatgagtacacctgccatgcctgcatgtcaacgtttgataactaa

SEQ ID NO: 394764 - DNA, 588 bp, Salmonella enterica
atgtttaaatacgcaattgtagtcatcgcgctggcggcaactgacgctgacgcttataccgacgtcactgatgtatttaaccggcaatacgaaatcttcgaatgccagttagacaacggcgactatttcaggatgactaatcgcgatggtttcctccagtacaatgtagacatacatgacaagaaaaaaggaaccacctggaacttccgctacccggaaaaaccagataataaattactccacatcgatgcacgttacggaaatgatgatcgctacgggtatcgcgaccgtatttctgtctcattcactggcggcggtgaaagtaagaagggggtaatgaaagtcacgctggatactaccgctattcaccagcttcatactaacgataatccgaactggaaaactggacgcggaatggttgagtattacgatgacaataaattagtcaacaggatgatgtgtaataacgatgtgtattttgcgtgggaactgcgttacctcattaagtcggagcaactgaaacccgggttcacgatggattacattagctacaaggatggtgagaaagtgcatcttccatccttctga

SEQ ID NO: 394765 - DNA, 534 bp, Salmonella enterica
atgacaaaagccagaattatcaaatccattattgcaccggctgttctggtgacgacaacagtctgtgccggcgatatgcatcaggtttttcagtgcgacctcgatgctcatcagcaggtgacggcttacgctcagaacggcgtggtctggtacagctacgttaatgaccagactcatcagtcatgggaatacccggctgaagatcagcctcataacaatagattgttaacagtgtataacctgactatgcgttcgggcgctctgccatatgtggcgtctgagttatggttcagattcaatgatggcagcaaggttggttatgcaatacttgaatccggctacaatctgaaagatggtcgtcaatccgggtcttataccatagttattgatggacagcagacatatacagcccaatgtgttaacagcaatattggggccaatactatgtcgcaggatattcagacgcactattttgctaaaggctatagcgtatctaaagacagtgcgactaatacctttcatttgccaatgtaa

SEQ ID NO: 394766 - DNA, 279 bp, Salmonella enterica
atgtctaaaatccggccacgacttgtggctgtcgcctgcgtttcccgctggccctggttaattatcgctacgctattgatggttctcgccaatattccgatagcaccaggccatgttgtttttgaccggatactggtctttgtccttataatactgagcctctcgcaacttactcgtaatcgctgtggatatcaccctgaccagctgggcctggctcagctttcattcggcattcagctatggatttgtacagagcgtactggattccagcgtggatga

SEQ ID NO: 394767 - DNA, 348 bp, Salmonella enterica
gtgagcaatgccaatgttttcttacaggtctggcaggacagccagatcatcacctccgtcaccgggaatccaccacagtacgcgccagccactcgcgataccggcattgacacctgcgtactgattattggtgaatcggaacgtactgcgaatatgcatatttacgggtatgagcgggagacgacaccggagctggaggcacagcgcaaccatctgctgctgtttcgccatgcagtcagcggtgcgcccgtcacgattatggccgtgccgctggcgctgacttcactaagtacgaaggacactggaccggatattcagttggcgttgggcaggacggtaaacgcatga

SEQ ID NO: 394768 - DNA, 198 bp, Salmonella enterica
atgacgctcgattacgccatcggcgctgatggcaaaatcatgccacacggtgggcttgtgtacacagaaactgtcgccgggcagattattcaacagcacacctgcgacagcaatcaggggctggccgggtttgctgctgcctggcataaccacaggatccacaacagttatacgctgacctctggcctgtctcgttaa

SEQ ID NO: 394769 - DNA, 960 bp, Salmonella enterica
atgaaacttggccttgaaactgagtcgtatcaccttttctttcaacagggagccatggatatttttagttttatttctaaagcaagcgaactggggcttgacggagtggaaatcaatattattccggatgaagggttacatccggaattcggcgtgctgaacagcgataatcctgaatacctggcaaaagtcagacgcgctatagaagtccatggactttactgtgagatagatacacgcttcacaacacctgaagcgatcaaaaaggcagtacatattgcttcagcgttgaacgcagatgttatcagaacctatatgttccgcagaggggattatgacccactggtatatcccaaaattgttgaacaattaaaatttctcgtaccattacttaaaaaacatcgcattcggctggctatagaaaatcatgaagacgaaactgccgatgagattatcgatgttattaaagccgtagactcagtatgggtaggggcgcactgtgatattggcaatggcatgatggcatgggaggagccggtagataccgtcaggaaactggctccttacgcattcagcacacacttcaaagatcatatcgttaccctgagtggggatgaactggttgtctgtggcgttcctgtcggagaaggcagcattgatatagacacctgctttaaaacgttagtggacaaatccagggtgacccggattaatatcgaaacctgttttccttatgcctcacgattcgcccggcaaaaaggaacgggaggagtaaaagatctcaagggtacttttacggttaagccagcaccttttgatgacacaaaaataaaacctctcgagtattactacccggcaaaaatctctgaagaacggttgcatgagttaatggaggctcaggaaagatgcgttcaggtttctgttcagacacttaaaaacctgcgcaaaaaacactgctaa

SEQ ID NO: 394770 - DNA, 378 bp, Salmonella enterica
atgattatctgtacacagcacgcaccagaggctatcggcccttattctcaggccattattgccggaaatcttttgtttatatctggctgctgcccatttaaaccaacagatggttctgttaatggagccaatattggagaacaaacaaaacaggctatgaataacctcaaatctattgtcgagtcagcaggaacagatatggattccgtggttaagacgacctgtttcattagcgatttaaataatttccagtcgtttaattcggtatatagcgtttttttctcaacagggaattttcctgctcgttcatgtgtagaagttgccagattgcccaaagatgtgctgatagaagtcgaagccattgctgttgtcaaataa

SEQ ID NO: 394771 - DNA, 1230 bp, Salmonella enterica
atgaataaatggatcaagctttgcttcctcatacttggtgggggtactatcttcaaactgtccagtatgaaggacgtattttacgtccccatgcaggccgactggggtctgactaatactcaaattgggtttggttttaccgtttatgccattatccagactatcgggttattcagttctttatatattgccgaccgtttttcaaaaaaaatactcctgcctgtgggcctgactggcgtcgggttatgcggcgcttacctggctacgcttccgccattcacgggctatctgatagcatttggggccatggctttttttggcgaagtggtttactggccagttctgctaaaagccgtccgtctgcttggcaccagggaagaacaaggacgcatgtttggctttctggaggctggaagaggtgtcgttgatgttgtaattgcctcaggtgcactctttgtcttcgttcagtttggcgagggaaaagccggaatgcaggctggccttatctattacacgctggtgactatttttgtgggtgttattacctattttatcgtggatggcgatgacaaagtcaatacagacaatgccgtggatgccaataaacaggtattcatgggaattaaaaaagtcattaaatcccctaacctgtggctggcttcattttgtattttctttgtttactcagcgtattgcggactcacctacttcattccattcctgaaagatatctatgcattacccgtcgcactggtcggtgcgtatgggatcatcaatcagtatggattaaaaatggtgggtggcccggtaggcggttacctcgcagataagatagctcattcacccgttgtgtacctgaaatggacctttctgatctcagctatcgctatggtgcttttcatccagttgcctcatgactccatgaacgtgtaccttggtatggcggcaacgctgggatttggtgccatcatcttctcacaacgtgccatcttctttgcacccatggatgagattggaacaccaagggagtttgcaggatctgcaatggctttcggttgtatcattgggtatatgccgtctatgtttgcctacacgctctatggttctttactggataatttcgctggcataaagggatataactatatcttctctgtcatggtcgttttcagtctgcttggctttgtttgtgcgacactattgaccaaaagaataagaagcaataattaa

SEQ ID NO: 394772 - DNA, 504 bp, Salmonella enterica
atgactgatatgattcgactgtccgtactgcaacggcattatcagcgcctcctgaaccagtgcattgcctgtgatgacacaactggccgtctgttatcccgtcaccgtgacctgctccggctggctccggcggatatccccggggctggcatcatgctggttccggcattcttactcctgacatcgcccgtggattgtggtggtcagatggtgcctctccctgtaatccggtttacgcctctgtgcccctggaacagcattctgacaaacgaggtacggcgactggggatgcgggatgatacggcagtatatcgtcatttaccgccgtatgagcgtgagacgctggcgctggtgatattcagcgagttactcgccagccatcatcatcagcctgtacctgatattatcgactggcagcgtaccaacccggaacatcactggctggtggaggaatatctgttcttcgctttctatgaccagtggggttatgcgccacagatttaa

SEQ ID NO: 394773 - DNA, 210 bp, Salmonella enterica
atgaacagccttcaaaatacattactgaacgaccagttagtcgatatgaaattcatcactgcatttaccggcctgacggataagtggttctataaacttattcaggatggggtatttccaaagccgattaaattaggccgatcttcacgctggctgaaaagcgaagtggaaaactggctgcagcagcaaattgctaaatcccgtggataa

SEQ ID NO: 394774 - DNA, 582 bp, Salmonella enterica
atgaaaaaccatccagccacaaactctaatcacccgacataccctcacctggaaaactgcctgcatcagcatgtagataacctcttcaacaaatactcaaaactgattctgctaagaatcgactttgcctatctgagtcactcacctgcatttactcatcaggatgttcatggcctgtgtgctgatatggttcagatggacagtgaattaaaacgtatccatggtattgccggctatgcctgggtggccgaatatggagaatgtcaccgatatcatgtgcacggcgcaatatttatcaatgcgcagttacgcaataaagcctggccggtatttcaggaaatagctgagttctggcagcgtattaccgatgcagagggctatgctcatcgatgtacgccccggcagcattataaagtcagaggagaggaggtgactgaatacgatgataaagcgggtataaatgccatgaaatacattctcagctatatggcaaagactgaacaaaagccggatggcataaatgcaatattcagcgttatccctgagaggagtcgacggggaagacgaaggcagcgtacctga

SEQ ID NO: 394775 - DNA, 318 bp, Salmonella enterica
atgaattactgtgatcatgttaaagataaaagcatcagaaaatgccagttttatgttcgctacatggaaagcagaagacgttcagggataaacatttgcgatgaatttgaatgggatagcaaatctggaaataccgatgaaatatgccgcaggattaatattgaactcgatgattatttctggggaaatgagaggaatatagaggggttcgtgaggaaaatggaagcggcctgtaatgatgaaatattatccatggcagaattcgactggtttaaaaatcagggcaaccgcatgaatgctcatttattgttcgactga

SEQ ID NO: 394776 - DNA, 873 bp, Salmonella enterica
ttgtgttttattaactggatacagtctcttcacgaactgagccagggcgagctggttgtactggaaggtaagacgcttcgtggctcttatgaccgcgatgaccgttgctccacgctgcacatcgtcaacgcttatgccagccgtaatcgtgtcgttctgggacaatatgcaacagacagtaaatcgagtgagctgactgccattccggaactcatcaggctgcctgatgttcgtggaaccctggtatcaatagatgcactgggttgccagaaaagtattgccaccgacctgataaatgaaggtgctgattatctgctggcagtaaaaggaaatcagccccggctggagcaggcagtaacgcaggctttcagaagcatcatcgcagcccctctgaatgctgagcgaatccggacagataaaggacatggccgcattgaagcgcgtggttactgggtgttgcccgtgaccgcactggaaaaggacttcgatacatcagcctggccgggcatggcgacagtgggcgtgactcaaagcaaccggcaggaaaagggtaaagccccgagccttgaacagcgttattacatcagttcagccgacctggacgaagaacgcttcgcggaggtcgtccgggggcactggcaggtggaaagccttcactgggtgctggatgtatcgatgaacgaggacaactgccagatttaccgggaccacggagctgcgaactggtcacaactgcggaaaatgtcactgaatatgctgcgggcggagccagccaaagccagtatcccgacgaaacgtaaaagagcatggatgaaaacggcttatctggagaaggtgttaaatgccggtctgaatcagtcgaacaataaatga

SEQ ID NO: 394777 - DNA, 888 bp, Salmonella enterica
atgaaaatacaacagagcaacagatccctggcgtatgaggtatacacaaccgacatggacgaatgtacgttttatctgaactggctttacgacagggacattatcagatatcaacacacggaggatttcgatggcccggcagatatttgcagatttattaatatcagccttgatcgttattaccgggaagatcggataagtatccgggaactgatcacagatatgcactataattataaaaaaaacataattacggatgataaaacattctggtttcgtgatgataaacgggcatgcttctgggtatggacacacttattctgcacagggagaaccaggatttatttcaataaaataaaatctgaaaatcccgggagtcataccatcagatatcagcgcatcgtgaccagaatgcaggagaggaataaccgtcaggacagatatgatgattttatggatgaatccagagggatctgggcagatactctgaacaatgcttcattctttaattttctagacccaggcgatgcagattcagttaactatgcctggaagtatctctgtgacaaaaaatatggcattgaccagatttatactcccctgaatgaagaagagcgctggttgtccattatgaattacctggactcagtgacagcgaaagaaaataaaggtgggctgtccacccgtcttaaagccgcgctcgaccagcgcaaacatcgccgtaaaaaacagcagaacagcagcagtcgacgcttttatctgaaaaatgaaaatgacagcaaactcaaatttctgttgcagcagaacagaatgacgatggatgaatattttaacctgcttgttgaacgcgaataccagcattcaggtaaaaaaaaacctgacgtgtga

SEQ ID NO: 394778 - DNA, 297 bp, Salmonella enterica
atgccattacgtctgtgtctgggcatgtcgacgattttcggtctgcttgtggcctttggggatgcccgtatatcgggtttctggttcactttatgggccgtggttgccctgtgtggtataccgggtctgggagtatggctggggcatgtgataagaaaactcattatgccggatgctgtttatggcagcactggcggcgtcatcaaagcccgcctgttctgggcctgtgtcccgcagtttactggctggtttatcggtatgctggctgcaatgggtgccctgggtattcggggctga

SEQ ID NO: 394779 - DNA, 819 bp, Salmonella enterica
atgcgattagccagccgtttcgggcggattaaccagatccgccgtgaccgtcccctaacccgggaagagcttatgcagtacacccccagcgtattcggcgaggataaacatgcttccaggagtgaaaagtactcttttattcccaccatcaccctgctggagaacctgcagcgcgaaggctttgaacccttctttgcctgccagtcccgcgtgcgcgacccgggacggcggggctatacaaagcatatgctgcgcctgcgtcgcgctggtcagataaccggccagcaggtgccggaaatcattattttgaattcgcacggaggcgaatcgagttttcagcttttgccggggatctggcgccaggtatgtgcgaatggtctggtctgcgggcagtcctttggcgaaatcagagttccacaccggggcgatatcgccgaaaaggttattgagggcgcttacgaagtcctgggcgtgtttgaccgggtggaagaaaaacgtgaaaccatgcagtcgctgttacttccaccgccagcacaacaggcatttgcaagagccgcgctgacgtatcgctttggtgaagagcaccagccggtgaccgcatcgcagatactcacgccacgtcggtatgaagaccgtcaggatgatttgtggtcagttttcaatcgatgccaggaaaatttaagtaaaggaggacttaccggtcgcaccgcacagggtaaacgtacccatacccgcgcagttaaaggtatcgacggtgacgtcaggctcaaccgtgccctgtgggtgatggcggaacagatgcagcaggcgctgagctga

SEQ ID NO: 394780 - DNA, 3375 bp, Salmonella enterica
atgaaattaatttcagacgcagccaaaaaaataggtctcaaaatatcaaatttagaaattctagaactttataacgtccatgaagatgatattgtcaataaactatatagttcttttgatggcatggctcttccatttccaaataaaaagatagatcctgctagttttgaagactataaaaaagagtattctttccctctaacagatcttcaatatgcttatcttattggccgtaacgccgctcttcctttagggggtatatctcctatacactattttgaaattgaagcatttgatatagatataaaaaaactaactgatgccttaaatcggataatcggaattcatccagctatgagattagtattatcggataatggacggcaacgatttattccaacttatcaacaatatattattcaagaagaaaattatagtcatcttgagttaaattcccttaatgataaattgaagttgttacgtaatagaataatagaaaacattaataacggaaagcaaaatatttggtctttcgatatacatgttactattttaaaagataattgtattcgattacacttatgcttcgatctaatgttttttgacatgcatagcataaatgtcataatgaaggattggtggagtgcttataacaatgaaccacttgattataacaattcagaatattatttcccgtactttgttgatgctgaaaataaattaaaacaaactgagttaggtttgaaagataagaaattctggatggaacgattaataaaaatcccatcttcaccagaattgcctttatataaatcgccagaattaattaaaaaacaaaaagttatctcgcttactaaaaatttttcccaagacttcttaaataatcttcaccaacaagccgttaatcgtggatttacgttagaaactctttttcttggagcgtatgttgaagttatacgccagtggtcccgcaatcaaagttttacactaacattgacacttaatggtcgacgtaattattctgatgaaataaaacaaactataggtaactttttgcaaccatctcttttatgtgtcgatggtaatgaagataaaacctttattgaaagacttattgatatacaaacagaattattaatgaatcgttggcattctactttcaatggaattcaagttttgcgcgaaatgactcgtttgcaaaatgatggcagggcaatcagcatgcctattgttttcagtaatacattaaatagtgaacttagcgatattataaaagagcattcatgtgaaggttctgctcatactatttatacggctactcaaacgcctggagtatggcttgaaaatcaattaattcgaacgaatagtaatttagtaatgtgttggaactatgtaaaggacctgtttccagaaggtatgccggaagcaatgtttgatgctacattaaaattacttaatgactgttgcgaagttcctaatatatggtctcagaaagggagtgttgtcccattaccacaacaagataaattagaacgtgtgaatgcaaactctacagctaagtcattcaaattagaactattacacgaacccatacttgcagcagccaagagtactcctaaaaaagtcgcaattatacaaggagatacaaaagtaacttatagtgaattagtaaacaccgcctgctatttgacaacaaagctcaactctttagttacagtaaatcctggagatattattgcagtctcgattaatagagggccagaaatgttggctgcgttccttagtatcctgctctctggtgctgcatatgtttatattgatccactattgccagaacaacgaaagattaaattacttgaccgctgcaatgcgaaagctttttttacttcatcggataataaaatccctcatcctataactattgatgatataaaaatcattaatgtctcagataacatcatatgcagacgattttttaattcatctttaaatgatcttgcgtatgttatttttacatccggttcaactggagaaccgaagggtgtaatgataacacatcataatgctgccaatactataatggatatcaattctcgctttggagttaattctcaggacaccatttattctatagtaccgcctggatttgatttatctgtgtacgattactttggtgttctaagtgtcggaggcactgttcttttccctaacgataatgatccatctgatcctgaactatgggtgaaaaatatcattaaacataatgtcactctttggaacacagttcctgcacctgctaaagctctttttgattctaccaatcatcagttaaagtatagctctttgagattagttttgatgagtggggattggattcctgtagatcttcctagccagataaaactaatatcggataagatccttattattagtcttggtggcgcaactgaagggtcaatttggtcaattatatacccaatagtacatactgatcctgtatggaaaagtataccatatgggaaaccgctatctaatcaaagatttcatgttcttaatgagtggctttctgattgtcctaagtgggttacaggtgaactctatattgccggggatggcgtagccaaaggatacttaggagataaaatcaaaactaatgagcgtttttttgaacatccttacactggtgagcgattatataggactggtgatttagggcgttacattagcaatggtgtaattgaaattataggacgtgaagataatcaggtaaaaataaatggttatcgtatcgaattaggtgagattgaagctgcgattttaactcatccttctgttaagagtacagtaattaatgcattttctcatcccaaaacaggacaaaaacaactggctgcttacatcgtattattagattcaattgataataatagtgtcaattttgaagatgaactcagaaattttttattaaatattttacctagttacatgatgccaaattggattttgcgattaactgaaattccgttgacagcaaatggaaagatagatcgtaaagcacttccatccatatggggggataataatgaattcatagataaatgtatgccagaaaatgaaaacgaaagtcggttatattcaatatggattagccaactccaacataatgattttggtgtcactgatggcttttttgatatcggtggagattcattacatgctgttagtattcttagtattgtgcggcgagaattcagtattacaccttcttgtgaacaaaatatgatcgaaagcctattcatgaatgcctcaattcgtgatttttccaaaatcataacaaatatgtctaatttaaacaaggaagaagacgatgaatag

SEQ ID NO: 394781 - DNA, 1617 bp, Salmonella enterica
atgaatagcaacgatattaaattacattataactatattgttgttggaggtgggacttctggttgtattatggcatcaagactttcagaaaatgaccataagtctgtcttattgttagaatctggcccaagttcaaatgctgccgattcaaatagtcctctaaatgatgcatcacgtcttgtcttagaaggctataattggcagtatatagctaatgtacacggaaccgatcaatattctcaatttttagagagtaaaaactcttcaaaatctatcctagatcgacgaaaaccttttgattatcgtcttggtaaagttataggtggttcttccgcaattaatggtgcagtagcattaagggcattacctgatgacttttcacaatggacctctatggggtgttctggctggacttggcaggaagctattccttggtattgtaaaatggaaaacgattgtgatatcaaatattctaaaatacacgggaattctggtccattactattacgcagacccaaacaacaagagatacttcctatagaaaaaattttcgcagatgtttgtataaataaagggactccttgggttgaggacctaaatagtggtgtcgctcatgcagttggaatcgttccttcaaacgtgaaacaaaatgcagaacgtttcgatttttatcgtgcttatctcatgccagctacagaacgatttaatcttaaaataaggacagaatgtacagttaatagggttatattttctcatggttctgctattggtgttgaaattgtagacaacggaaagcaccatgtgataaaagctgacagagttatattatgtgccggagcaataggttcagccattcttttacaaagatcaggagtcggtgattctcagttgttaaatcgtctaaatatacctgttatcttagataatcctgcaattggaaataacttatccgatcacgccactgtagttatgtgggcattaccaaaaccaaataatagtaaggttaaaacaccatggagacaaacagcagcacgattgagtagcggattcgataatagtgtagatgtattattagggttaatgaataatgttgcaagcagtaccgttccaggattcatcaatcggattgaatatccttatctagttggagcgtcagttatgttgatgcgtccagtagcaaaaggacgtgtatttatccgttctggcgactgcacagaaaatccgactatctttttaccgctttcccataacgaagaagatatacaacgtcttactggtggtgtacgaaagatgtggcaaattattactagtaaagaaattagccactatattgaaggcattcagttttggcgtgattcaatgattgaaaatgataaagtgatgcatagtgcaattcgtaacctggtaagccctggctggcatccatcaggtacaatccgtatgggaaatccgtccgatgtaacaactgctgcagatgaaaaaggtaatgttcatggcttggaaaatctaactgtagctgatgcctctctttttccttgtataccatcaatgccaacaaacttaaccacagctatgattgcagagcgtatagctgcttatcttatgggaaaagaataa

SEQ ID NO: 394782 - DNA, 723 bp, Salmonella enterica
atgataaaatcatctaaaagtattgtttatgcttttccccatgcaggggcaggaacaggaatatataatgattgggtcaagcagtccagaaatgataagaatattatcattgtacccgtcggcatccctgggcgcgataaacttagcagagaaaatataattgatgatttattttgtttgacagatcgtatagcaacagacatctatactgatttcatgcaacgtagtaaaaatgaatatttaaattttgtaacttttggtcatagctttggcggtgtacttagctttattgtatcccaaaaaattgatctgaagtttaatttaacacctttactctcaataatatcgggatctataccacccagtatccaacaagaagatgagcgtcatttatggaccgataaagaaattctttctaagatgcgcatagataacgggacacctgagcgcattctcaacgaaccagctattgcgcggaggcttgttacatctctcagaacagactatatactccgtcatcaatttctcgaatatagacatactaaagttcatcaaccattatctattattgctgccgataaagatgaacatgtctctaaggacattcttttagcttggcaagaacatagttatcttccaataaacattaccgaaatcaaaggtggacatttttctatctatcaaaactattatacggtagtatcattgttaaatcaaaattaa

SEQ ID NO: 394783 - DNA, 1131 bp, Salmonella enterica
atgaacagcaaggaattaaatatatttcgtaaatcttgcagaaagtttttagagcaagaggctaaacctctgcttactaaatgggaaaatgatggttttgtaagtcgagatttttggatacgtatgggtaaagaaggcttattgggtattagtgtgcctcaactatggggaggccatggtaaggaagattataatttttcctctgttctaactgaagaattaattcgtgctgatatggtagctccagtcataattgcacacaatgatgttatcacaagttatatttatgctcacggaacagataagcaacgtgaacgttggctaccaaaactctgtcgtggagaacttattgctgcgatagcaatcactgaacctaatggtggatcagattcatctgatttagaaacaacggcagataaatatgggaatcattatattgttaatggtaagaagtcttttatcacaaatggcttcaatgctgatcttatattaacggcagtaaaaacttcaaaatcacaacgtggacgagaaactagtctactgattatagaaaataatacaaaaggttttacgcaagaaaaaccattgaaaaaattaggatggcatgctagtgatactgcaaatcttcatttttctaactgtcatgttcctgtagataatttaattggaaatgagagtatgggaggtttttattttattggagggatgcctcgtgaacgtttgagtatatcgacagtcgcagtttcgacttctgaaattattattgaaaaaacattagaatgggttaaaaatcgtaaagcttttggacaaccaataggctctttccaacacaatagattccgccttgcagaacttgatactgaagttaaaattgcacgaatttacttaaatgatgcaatagataaatttaataaaaacgagttaagtgtaactgatgccgcacgattaaaggtttggactacagaactccaagtaaaagtggctgatcaatgtatgcaattatacggtggcacaggttatttgagagattcatttataggtaaaatgtgggtaaatagccgtgtgcaaacaatttatggtggtacaagtgaagtattaaaagagtttattagtaagtctttaggtctttga

SEQ ID NO: 394784 - DNA, 465 bp, Salmonella enterica
atgtctgaaaaaacacctaccctttttgaatggatgggaggtagagaggttctattgaaattaatgagaactttctacgcaaaagtggaaaaggatgaaatattggctccaatgttcgaacatatgagttcagatcatcctgaacatgttgccatatggttagaagaggttttgggcggggaagctaactatacagcacatagaggtggatttaagggaatggtttcaaaacatcgtggtagagcaattcaaccggaacaacgtaaacgctgggttgatctgatgatggaaagtgcagatgaggttaatttaccctctgatcctgaatttcgctcagcttttgctgcatacattgaatttggttctcgtagagctcaagcgaattcacagcctaaggctccaaggcctaagcgagaaacagtaaaactttggggatggggggaagctcccccaggtacaccttga

SEQ ID NO: 394785 - DNA, 555 bp, Salmonella enterica
atgcagaagaaacgtattttacttggcgtcactggttcaatagatattatttttctcccacaattattgaagggtattaaaaaaaatatagattgtactatcacagttcttatgagtaataatgcagttaaatttatatctccagaaactctttctttatggtccgactatgttatagcaggtgaaaatccttcaaactggccaaaagagaaaccatcaaaaattgtttccgaacatgatataatgctaattttgcctgcgacagctaacactattgcaaatgtagctcatggtttagctccaaatcgtctcaccactgttattttagcatcaaattttcaagtgttatttttccctgcaatgggggaaagcatgtggaataaaccagcaatgaaacgcaatattatacaattgcaagacgatggttatgaagtaataacacctgtatggcatgaaggctttgatactgctttgggaaaaattgtagggcatccttctattccctcaattgaaaaaataatagatattttaattgaaagattaagtattgtataa

SEQ ID NO: 394786 - DNA, 501 bp, Salmonella enterica
atgaatgttattttagaaatagtaatgataggtattggtgccaccattataatggatttatgggcgatcattcagaagtttttattcaatataccgtcactcaattatatgtatgttggacgttggttaggacattttttaaaaggtgaattttttcatgatacaatacttatagcaaaacctataaagggtgaaactgtaattggctggctaactcattatactataggtataattttctcgtttatattaattgcgattgtaggttctgattggttagtaaaaccaactttcctgcctgctatgatgataggcataataagtgttatagctccttttttcataatgcagccaggatttgggtttggtcttgcaggatcaaaaacaccacaaccaaaagtaactcgtagacgtagtttagttgctcatctttcatatggaattgggttgtatttttccgctcaactattattaattatcaataattcattatcatcttaa

SEQ ID NO: 394787 - DNA, 273 bp, Salmonella enterica
atgattttctccggaaaagaaacggaaaaaacattcaccggctgcaggaaaaagtttccctgcaaaggcgtaagagtcaaaaaacgcctgaagtcacaatgcttcagtaatgtaatactacgcccccgttacaacagaaattcctgccgcaacgtctgtttccagaggttaacagacgtaccgtccaaagacgccacctttcaggcttcggtagcattggcttgggtcgcccgaaggcgtcagtctcagacccgaaatgactttggcttgtga

SEQ ID NO: 394788 - DNA, 1386 bp, Salmonella enterica
atgaataaaaactccaggggtttcttttggctttcattaggaatatgttttattattctgatctcacttgtttgcggtgccgttatttataaagtagatatagttattatactgttaatacttcttatttttgtatgtgcggtgagcttatttactgataacaaaattgaaaatctaatcgaatatatatctgacagtcttaaacacgcaaccggcgcttttcttatatttattctaataggggttttaatcagtgtatgggttgtatccggcactgtgccttcactgatatattatggattatattttatatcggggaaatatttcctcgtaatgggattcttgatttgcgcgtgtgtatcatatgctacaggaacatcgtggggaacggctgccactataggtgtagcaatcatgggaataggtaaaggcgttggtatacctgatgccgtaaccgcaggaactatcatttccggtgtttattttggagataaaatgtctcctctggccagtaccaccattttatgttcgagctcagcaggcacaagtccagaaaagcatcttcagtcaatgtctttttcaggattcctgacttttttcatctctgcgtgtttatattttattttaggattatatttttcttcagatactggtattcctgtatctgatatatcttatattaataactatcttagttccaattttcatataagtattatatccttgcttccaatattaacaactcttgtattgagtattatgaaggtatctccatttatatcaatgacattaggtattgttatgggggttatagttgctgtagtttttcagggagcaaatattactggtattttcgatattatgagtaatggatacagagtggctgatggcccaggaataattaaaataatgttagaccaggggggtgttcaacccatgatgtggactttttcattatcctttatcggattcagtcttggaggggttctcgacaaagttggatatcttaatgttgttttatcaagggccaccgcaagggcacaaggatgccgtaaattatcgctgataacatatgttaccgggtggttgggctgtgcagttacatcagaggtttatgtcgcccaaatgctaaatggtagaatctataaggatgtctatgaacgcgagggaatagataatgccatgttaagccgatatattgaagagagtacaacagtatttgatatgtttttaccctggactacagggggagcttttatggctacagtgctcggcgtagcaaatttacattatttaccattttcctttttctgtttgcttacacctgtggtatcaatggtgctgacaatcttcggtattggtataataagaaaacggagtatttga

SEQ ID NO: 394789 - DNA, 210 bp, Salmonella enterica
atgcttgaacacattaaagatagcctcttactcgcctcacggcaaggagaaaaggctatggagccattaaaagcggcgctaatggcgctgatcgttgttggcgtagtgtgcttaggtgcgctactgcttggcaataaacatctttgtgacgtcagcttccgcagtgacaaaacagagatagtggctcacatggcctacgaatccaggtaa

SEQ ID NO: 394790 - DNA, 339 bp, Salmonella enterica
atgacaagactgaataaaattcatttcttacttatggatatcaacagaaccagaccaggaaaaagtaagatcgataaaataacttcacttattgaatatgtagatctattaaacgaagatgtaaaaaacatacgcagcaatcttaaacatccttatttagatgaaaataaaatcattcatgcgttacttgaaattcagatacagacaaggctaatgcagataggcgaggctaaaagttttcaggagttggccgtgtatcttttcaatattcgggtgttgatagaaaatacagcgcaactactcagagaccgcccacaggtttacatcgtcaataaatag

SEQ ID NO: 394791 - DNA, 528 bp, Salmonella enterica
atgaataaagcagaacaacagaagcgactaaaaacactgatgatccacgcaatcaatgaagcggtaataactggtgttattcccttaacgttcagatacaggaaaatggcaccggaaggattcgcagggatcaccgtatgcggtaagcacaccgctattaactggaaagaaacagaacacgatgaattaaggattacggtatggtgggactaccagccggagcacatccctaagctgataaacggcagacctgaaaaccttaaagctttattacctgatgttgatcgtaatgctttccggttagtcgttggcgcgtgtgcgagtttctattttgactacaaacacaaagggatcttgtcagacagagggaaagaatttttttctgtttatgttcgcgagtctacggccagcgatatagacaagataggagaggtaaagcctttttgctattccatatcagaattgtcacgaccattacagagacttatgccaccagcaggcgggaagcgtgggaaatatttcaaatga

SEQ ID NO: 394792 - DNA, 186 bp, Salmonella enterica
ttgaaaagcgatgaacatgaaatgctgcgcatcattgcgaggcaactaaaaaaaggggttgcttatatcaataccggtagggtggcgattggtaaaacatggattgaagactcagtaagagatttaaacatgatgattactatggcgggggcagaaaatggcaaggaatcgcctgataatgaataa

SEQ ID NO: 394793 - DNA, 360 bp, Salmonella enterica
atgacaagactcacagagatatacaaccgccttgacgtcatagacgaccttatagagctacagaaaccgcacttttctcacggtcagattatcagcgatcaggtgacagcgctgattgggtatgtggagcacataaccgccgttatatgggagcggcagcggcggcacaggctaacagattttgaagcctgctatattcttccggcactcgatgaaatttatatcctgatgggcgaaaaactcagtaagggggagaaacccggagaacggttaagcaacaatataacggattttatagggcttgttggctggtggatgcttcacatagaaaaccacagtgtagggagagcaacccattga

SEQ ID NO: 394794 - DNA, 447 bp, Salmonella enterica
atgagactaaccagccgtaagaaagagatattaagttacttcgatccagccaaccgcgactgggttacaggcgagattggcgcaccgccttttgatgtgtccggggttgcctggctgattaatgggctggaatctcacgataagcggcattgtctggaatccacgcgccgcacgcttgaagcgatggttaaagatggattgcttgagaagtccaccagctacgagcaacgccaaaacagaaagtacgccagtagcaacgacggggtgcggtgtaaggtgtcccgttatgggttgcccggtcagtgcgttgtaacgcgggatgatttgggcgtggatggcgctatcgatggtgagtgtgttcgcctgcctgaacaatcaggctttgattgtattgccgtagggttattgcatgatataagcgcaccagacagaaaggcggctgtatga

SEQ ID NO: 394795 - DNA, 198 bp, Salmonella enterica
atgaaactgctggagcggtggccgctttgcgcgaaatggttcgttgtcttgctggtctttgcgccaatggcgctcctcttcctggagtgttgccgcgtgagcagtgtcgccctttctgtggtggccggtcttcattctggcttgtgtgtatggctggtggatcgtgtgtttttcttcctctgccagcgccggaagtag

SEQ ID NO: 394796 - DNA, 369 bp, Salmonella enterica
atgacaaggatcattgagatttactcacggcttgacgccattgacgagcttttagcgcttatgctgcaacggcctgatatttgccgcgaacgggctataggtgctcacgttggctcactggtggaatatgtagatcacattaacgccgtgatgtggagacagcaggaacggggtaggctttcggattttgatgcacgctacatactgcccgccgtttctgaaatatggctacaggtaaaacaggagctaaccgtaaacagcaggccagtatgtgagttagccggttgcattacggggttaatcagcctgaccagtttttacctttcccgcatcgagggcaacaacgataaaaacagggtgctacattga

SEQ ID NO: 394797 - DNA, 1002 bp, Salmonella enterica
atgactttgaagcattacatttatatctggatagttgccctgacgttattgtctggcatggtttttatgggcctgacttatggggctacagaaataacttaccgtgaagttttaagctctctgggggtggagagcagtcatgtgtccccggttatcaggagtgttattctggaattacgcatcccccgagtcatttccggcatactgacaggaatggggctggcattatccggagcgctgttgcagaccgcaacacgtaatgacctggcagacccgtttttgtttggtctttcctcgggcgcatcggcaggagccgtgtgggttataacccgtgcaggtgacaaactgggagactggacgctgcctgtggctgcgttcaccggaggtgtaatatctgcagttactgtaacttcattatttatttatcaatcatacagaggaacatcaacactggtgataacggggcttgccgtatcttttcttttcagctcactgaccagttatcttatttttaccggtgatcagagagccgcaagtagtatacttttctggtctctgggagggcttggtctggctaaatggggcaatttaatacttcctgtttcaggcgttatgctaatgtcagtttttatcgctgtcagatggagagattttgatgctttactggcaggggaacagacagcacattcactggggataaatgtgaccagactgcggtgtgaaatatttatttgttgcgcactgacgacatcatcactggtggctttaaccggagtgatcggctttaccggtttgatggttccgcatgtggcaagagtttttagcggggttcttcatctgcgtatgttacctctggcggcattattgggggcgataacactgaccggggccgatattctcagcaggacgttaatgcctcctcaggagttacctctcggtatcatcaccgggggaatgggaggatttttcatcctgttaatgttgttgcgtaaaaatttatag

SEQ ID NO: 394798 - DNA, 966 bp, Salmonella enterica
atgtttctgtcaaaaattttattagtatcaggtctaattgcagcattttctgtcagtgcatcaggatttccggtgactgttgataattgtgggacccctttaatatttgataaaccaccccgaagggctgttattcatgatattaatatggccgaaatggcttttgcccttcaccttcaaccacaaattgtagggttaacaggaatatcaggctggtataaaatgcccccgggttttcagaaaaacagaggaagtattcctgaacttgctcctaagtatccctctctggagactctgatgactgtacagccggatttctttttcgccggatggaattatgggatgagggtgggaggtgatgtaacaccggattctttgaaaaaatataatatcaaaactctgatattaacagaaagttgtattcatgtagataaaaaaagaccacgggccagcatggatttattatacggtgacacagaaaagctgggtaaaatatttggtaaagttgaagaagctgaacaattaatcagtgaatggaaatcccgtttatcatctttaaagaaaaagacggataagcatcaggcagccagcgtttttgtgtatgattcgggtgaagataaaccttttaccagcgggaaatatggaatgccaacagcaattattgaggcagcaggaggtcgaaatgtgatggacaacctggaagcaagctggacgacggcaggctgggagtcagtggccatcacagagcctgattatattatactggttgattatcaagttaatggagaaaacagtacgaataatttacaacgttttctggaaaatcatccattgatgaaacttactcctgcagtacagcatcatcgttacattaagttaagatacgaagaactgacaccaggccccgcaaatattgatgcaatacagcgtctgtcatcagccttgtacccggatgattttagttaa

SEQ ID NO: 394799 - DNA, 783 bp, Salmonella enterica
atgaatggtgaaaattatccagttgtaagttttgacaatgtatctgtaagaggaggacgtggcagagaccctcgtctgatatctgtttcatttaatgtagggaaaggtgaatcagttgttattattggccctaacgggagtgggaagtccacgctgttaagggtacttagcggggagttaaagccccatgatggaatgatcgctttccagggagaaacgttaagtaaaatcccccgaaggatacttgcccgacagatagctgttcttgctcaggatgaatatgctgatccccgactgaaagtcagtgagtatgtctctctgggacgcattccttatatggaaaagtcggatcacaggcataaagatatctgtgaagaatcaatgagagatgctggtatttctcatcttgctttcaaagcgcttggaacactttctggtggcgaaaaacaacgggtggcgctggcaagaacgtttgctcagcagccggttttgttgttactggatgaacccacgaatcacctggatcccgttgcccgggaacaattgctgaatattgtcaggagaaagaagataacaactgttaccgttctccatgatctctcgctggtcagacttcttgcggaccgggtcattctcctgaataaaggaatgcttgtcggtcatggagggatagatgaaatgtttgactcaaaatattttcaggaaacatttggtcttcgtcgcataaagtttcgtcatccttttaatgattcatgtattcatttttttgaagtgacaccataa

SEQ ID NO: 394800 - DNA, 213 bp, Salmonella enterica
atggtggtgaaccactggaggtgtcatcattacgacagtgatgaacgggagctggtttacagatattttcaggggatacccggaacgattgttatccggcagcggaagcaaattcccgtaaactttatacgccttcataaaataatgacattatgttactgtaaccctgagttatcagttaagactgcaccagacagtttcctggtcgtatga

SEQ ID NO: 394801 - DNA, 246 bp, Salmonella enterica
atgacagagtttaaatttatgagtaaaagtgaacttgagttaatgccggacatagaaaggatggttagagatagtgagtgtgaatggttaacgggaatatcatggtgtatacgggtagacatggagataaaaggaaaatttccaaaacgtgtatatcttagtacgaaatcagtaggctggcgtctttctgaggttcaggcatggataaaaggagaatggaaaccagaagacagccagacagaataa

SEQ ID NO: 394802 - DNA, 1311 bp, Salmonella enterica
atgtacctgtttgttttcatgcattttcacttgtgcatcgttctgtgtattgcaatgtgtatagcttttgtgtttgcagaggttgaagaaatggcagcagaaaacaagttgagtgataagcgaattaaggcgcttttaggtaaggcacaggataagcagcaggtgatttccgatggcaggggcttatcaatccgggtaagcaaaagcggcgcggttagctttgttatgttctatcggttggggggaagggaaacaccgccagtttggttaacgctggggaagtatcccgatatgagtctgaaaatggcaagggaaaagcgcgatcagtgccgtacctggctggcagatggaatagacccccgccaccgtatcggatttgttaccgatgaatcacaaaggccggtaacggtgaaagacgctttagaatactggtttgaacattacgtcaggcagaaacgaaaaagaccgcatgtatatcaggggcgttttaataaacacatatacaaatatatcggtgatgttcctttaactgagtgtacggcggctgtgtgggttaagcgttttgatgaaataaagaaaaaagttcctgtaatgtcagggcaaatttttctcgatgttaggcaggcgttaaagttttgcagagtccgtcgttttgctatttctcacgagcttgatgattttaccgtcacagatatgggagagcggcaaaaaaaaagagacagagtattaacagaaaatgaaattagggatgtgtggaaatgtttaaatacgaatatcgagaatagatatttagagtcaggttacaggattttttttacaatattgttagtttttggttgcaggtgtaatgaagtaaaaaaatcacggcttgatgaatgggatcttgataactggatctggacagtaccaaaagagcacagcaaaaacggttgcgaaattatcagaccaatcccgccacaactgagacaatggattttaactttaaagacaatcgccagtatggaaaaaagcgaatatttggttaacggcataagccggtactcgacgagagtcagtatagtaggggggcgtttatggaaagaattcgggcatagtaatccctggacacttcacgatttcaggcgtgtacttgctacaaatctaaatgatatgggaattaataccgatgcggttgagcagttgcttggtcattccttatcaggtgtcaggggtatttataaccgtagcaagtacatggatgaaaaactaaaggctttaactatatggtgtgattatcttaattctttattggctgaggaggtggcggcatga

SEQ ID NO: 394803 - DNA, 1245 bp, Salmonella enterica
atgtttcttcctcagttttttggtaacagaaacagtggcggcaataaaagcgactggaccattgccccgggtggaatgagcagcagtcagagcgcagcgggcattaatgtgacaaccgaaacagcgctggcgctgggcgctgtccgggcgtgcgttaccctgctggccgagtctgtggcacaactgccctgtgagttgtatctccgggataagtccggcgggcgtaaacgcgccattgatcaccccctgtacgacatcattcattcacagcccaataaaaaggatacatcctttgagtattacgaacagcaacagggcgttctgggactggagggaaacagttacgcgctgattgaccggacgggaaaagggtatgtttcagagcttatcccggtaaacccgaagaaagtgattgtgatgaaagggcctgatggcatgccgtattaccatcttcccgatctgggcgaaacactgccaatgcgcatgattcaccacatcaagtatttttcaatggacgggtttgttggaacgtcacccctgcagacgaacgctgatgtgatagggctgggactggcggtggaaaatcacgccgcgcaggtatttgcgcgcggaacgacgatgagcggcgtcattgagcggccatcggaagccaaaaccattcaaagccaggagatgattgaccgtttgctgtcccggtggactgagcgttattccggtatacgtaatgcgttttcggttgcgctgctgcaggatggtatgagttataaacaactctcgcaggacaacgagaaagcacagttactgcaaagccggcagtggaccttcaatgccatttgcgcactctataaaataccgccgcacatggtgcagatgcttgagcgctccaccaataacaacattgagcatcagggcctgcagtttgtgatgtatacgctgctggcctggctgaaacgccacgaagcggccatgatgcgcgatctgttgttgccctcagagcgacgggatttgtatatcgagttcaatgtgtcctcacttctcaggggggaccagaaatcacgttatgaatcctatgcgctggggcgtcagtggggatggctgtcggtgaacgatatccggcgcatggaaaatatgccgcctgttaagggaggggatacttaccttacgccgctcaacatggtgaacagtcatttatcttatcaattaggcaatatttggcgtgttcttgtgtttactgtaatctcatga

SEQ ID NO: 394804 - DNA, 174 bp, Salmonella enterica
atgttaatcagcattattgtgtttctggtggggttatcgggtgcgctgctggtatcggttggggcctggatgatttaccctcctgccgggatggtggtgggcgggcttttgctgatgattacctcatggatggcggcgcgcggcgtggcgtctgctggtggcgggggtggttaa

SEQ ID NO: 394805 - DNA, 1728 bp, Salmonella enterica
atgagcagaaaaaaataccctaatgttaacgcagcgaatcagtacgcgcgcgatgtggtcaggggaaagatcatcgcatgtaattttgttattcaggcatgtcagcgtcacattgatgatatgaccgcaatgaaggacaggacattcccttacagattcaataaggacagcgcagagaaagcggcaaaatttattcagttattaccgcacaccaagggggagtgggcatttaaacgcatgctgataacccttgaaccctggcagcgtttcatcgtctgcagtgtgtttggctgggtacacaagaaaacgggcctgcggcggtttcgtgaggtttacacagagatcccgcgtaaaaacggtaagtcagccatttctgcaggcgtggcgctttactgttttacctgtgacagtgagtttggcgcggaggtttattccggtgcaacaaccgagaaacaggcatgggaggttttcaggcccgcacgtctgatgtgtaaacgctccccaatgctggcggaggcatttggcgtcgaagtgaacgcctcaaacctcagccgcccgaatgacggttcccgccttgagccgcttatcggtaatcctggcgatggtgcatcaccgcatctcgcggtggtggacgaatatcacgaacaccagacggatgcgctttacaccacgatgttaacggggatgggcgcacggcgtcagcccgttatgtgggccattaccaccgcaggttacaatattgaggggccgtgttacgacaagcgccgggaagtgatcgaaatgctgaacggctcggttcctaatgatgagctatttggcgttatttacactgtggatgagggggacgactggacttctcctgacgtactggagaaagccaacccgaatataggtgtgtcagtctaccgcgaattcctgttaagccagcaacaacgcgcgatcaacaatgcgcgtcaggcggggatgttcaaaaccaagcacctcaatatctggacatcggcgcgggcggcattctttaaccttgtcagatggcaggaatgtgaagataagaccctgactcttgaggattttgaagggcagccgtgcgtactggcttttgaccttgcccgcaaactggatatgaacagtatggcgcgggtattcagcagggagattgacggcagaacgcattactacagtgttgcgccgcgattctgggtgccgtacgacgcggtgtacagcgttgagcgcagcgaagacagacgaaccgctgaacgttttcagaagtgggtggaaatgggatgcctgacaatcaccagcggcgcggaggtggattatcgccacatcctggaggatgcgaaagaagcaaacaggcggaatcctgtaaccgagtcgccgattgacccattcggggcaaccgggatatcccatgaactggctgatgagggactgaaccccataaccattacccagaactacaccaatatgtcagatccaatgaaagaactggaagcggctgttgaatccgggcgttttcatcatgacggcaacccgatcatgacctggtgtattggtaacgttgtcgggaagcatctgcccggtaacgatgacgtggtcaggccgattaaggagcagagtgaaaataaaatagacggtgccgtaacgctgattatggcgatcggcagactccagctaagtgccggtgaagagcaggaatcggcttatgacaggtacgggataacatgttaa

SEQ ID NO: 394806 - DNA, 471 bp, Salmonella enterica
atgtcgggaaaatctaccgtgccagggcgggggcggaagccaagacctgtcgcccgtaaggcgttggcaggcaaccccggcaagagagcgttaaacaaatgcgaaccacgattcacgccaattaccagcgctgaacctcctgaatggttcgatgataccgcccgccagatgtgggacaccgttatacgggagttatgcgatcagcgaattctttatgttactgatttacacaacgtcgcggcgttctgtactgcatttcgcaactggcatgaagctcagatggaagttatgcgggttggcattaccgtgcaaaccgaatccggcccgaagaaaaacccggctcttacagtggtgaatgaagcggcccggcaaatggtcaccttcggcagcatgctgggactcgatcctgcaagccgacaacgtttaattactccaaaacaggacggcgataatccgtttaaaaacctatga

SEQ ID NO: 394807 - DNA, 465 bp, Salmonella enterica
atgaaccgcataaccacaggcgtaatagtctcgttgctggtggtggtcgcggcgctggcatggacaacggaccattaccacggtaacgccgtgaagtacaaagaccagcgagacaccgccactcacaacctgaagctggcgaacgagacgattgacgatatggaggtacgccagcgtgacgttgccgccctcgatgccagatatacgaaggaattagccgatgcgaaagctgagaatgatactttgcgcgatgacgttgccgctggccgccgtcgcctgtacgtcaacgcaacatgccccgcagccgtgcgtaaagccaccgccgcccccggcatggataatgcagccagcgccacccttacagcaaatgctgaacggaattactggcgtctcacggatggaatagccacagtgacaaagcaactggaaggggcgcaggactatatcagaacgcagtgcagataa

SEQ ID NO: 394808 - DNA, 570 bp, Salmonella enterica
atgaatacgatgactgtatcgttctacggaagttctctctatgtggttaaccacaatggcgagccttatacaccgatgaagcccatagttgaggggatggggatggactggatggggcaattcagaaagttaaaatcacgatttgctacctctatagaggaaatatctattcagcttcccggtgatatccaacgccgtaacgtcgtgtgcctgccgctacgcaaactcgctggctggctccagaccataagcccgaacaaggtgaagccagaaattcgtgacagggttatccagtatcagaacgaatgcgatgacgttctctatgattactggactaagggtgttgcggttaatcctcgccgggtgaatgtgatggaagaacttaaccaggcgtgcgccgatatgaagcgcgataaaggtatcgccagtctattcggtacagggctgaatgaatggaaaggcgttaaagtcgcccacgtgtcaaaaattcgagccctggtggatgaggctaacgggctgattgaatttgtactggcagatacaggcaaagggaaaatcaccagaacatga

SEQ ID NO: 394809 - DNA, 489 bp, Salmonella enterica
atgcagataaaagttaaaagtattatcgctggtggcgcgggcgcaattgccatagctgcggcgttaattaccggaccgaatggtaacgatggcctggaaggtgtgcgttatcagccttatcaggatgtggtcggcgtctggacggtgtgttacggccacacgggtaaagacatcatgcctggcaagacctacaccaaagcagagtgtcaggcgctactggataaagacctgaacacagtcgccaggcagattaacccgtatataaaagttccgctccccgaaacgacgcgaggagcgctgtactcatttgtgtataacgttggcgcggggaatttcaggacctccacactgctacgcaaaatcaaccagggcgatattaatggcgcatgcgatcagctacgtcgctggacatacgctggtggtaagcagtggaaagggctgataacccgtcgcgagattgagcgagaggtgtgtacatggcagcagtga

SEQ ID NO: 394810 - DNA, 810 bp, Salmonella enterica
atgtttagattaatagcttttgtttttttgtttatgtccgggatatcatatgctgaggttccgtcagatttatttcgtagagatacccgggggcctgatataatatttaatcaggggtttcttgcccgtggaagtaataccaatttgatccagcatgttagcggagtatcgttacatggagacagaggcactgttccgttaagcggatgggtctcaacttccgcatcactgcgctggacaacaattccacggtatccgatcactgaattctgggtatatacaataacacctgactcacgtgcatacagcgtacaggcgtcctttgagcactatatcaacaccaatcccgattcatctggtgcagcttatgtccggcgtttgctggagctttatggggatcagcacgaatggagtgtgttgggcggaataccggcatcttcagttcgttttgctacaaggtatgtttttactgagggggagttccgtgctgatgaaatcagacaaaatccgggatatcgctcttcaataccatcagcaaatcctgagccatatccactggtgccagcgtcctcaggtgaagtaaatgctattggaggtggtggtgctcctgctgccagcagtcgatggacggggttgtcattatctgcctgctggggagctggctcaccatcgagaacaccacgagatacacaagtgaagcctgtggctccggaatgtgccattccggcagagagtaaagtaatacacgggataccacttcgtaatagggtaatcatgcctgcatcgtatttttatcaccacgacctttaa

SEQ ID NO: 394811 - DNA, 405 bp, Salmonella enterica
atgaaaaatattatactgttttttgctttttctattgccctggtaagttctgcatttgcagaatggactggtggtttttcggagggaatgtattcaaacgttgccattaaaaacattactactggtcagattgatactcatccttatttttgtatagaagcatctaatggagcaagggcatgttcaataaaaaacctttccatatggggaccatcttacggaacgttatatgatatggcattgtatttctatatgacaggggagtctgtacgcgtgtattatgatcctggagtctggtacgatgagtcattcagtacagagataacagcaaatgcactggtaggtttatccacatgtgggacggataaatgttttggaccgaacagacaaataccatcaaagtaa

SEQ ID NO: 394812 - DNA, 150 bp, Salmonella enterica
atgactgaacaggagacaagccgccttattcgggggttacagaagcagagcgaggaatggcgcagcagcaccagagcgaacaggaagcccgcagagcaacgcaaccccgaacgcgagcgggagctaatggaatgcttccgcaaccgctga

SEQ ID NO: 394813 - DNA, 315 bp, Salmonella enterica
gtgctggtgggggataccgtgatcaatccgagtgatttacttgatgatgcaaaaatgcattgccgcgttgataacgatcaggaggacagtcttttactgatttatatagcggcagcgctggaggcgtgtcagatgcacacaggcaagcgctttgataacgggctggagtttacgccagctatcagagccggatgcctgatgtataccgggatgctgtacgagaaccgcgagacggtcagcgatttgaatctgaaagaagttccttttgccgtttcgtcattgtggtctgtctatcgtgatgtgggggtgtactga

SEQ ID NO: 394814 - DNA, 255 bp, Salmonella enterica
atgaaaaacacaggcatgttattaaaagagtatcttgacgatcgtcagatgaaacccctggaattgatgacgccggaggaatacaaatatcatcttgagtccgaacattttttatttgtggaaggtcataacatactggttgatgattttaccgggcggcactttgcagcaacaaaagagcagcttgatttacttattggctggttgcagggattaagaggcgaattattcgaccataacccgaaagatatttaa

SEQ ID NO: 394815 - DNA, 438 bp, Salmonella enterica
atgacagcacaaatagcagcatacgggcggctggtggccgacccacagacaaagaccaccagcaagggaactaacatggcgatggcacgcatggcggtatcactcccatgcagcgcatcacaggacgggcaggcgacgctatggctaggcgtcctggcattcggtaaacaggccgaagcactggcgaagcacaccaaaggcgatgtagtgagcattgggggaacaatgcaggctaaccagtggacagggcaggacggcagcgcacaaagtgggtataccgttatagccgacagcgtgatcagtgccagaacgtcaagacctggaggaggcaggacaaaacagcagccagcaggtaacacgccaccagcacagacaggagcaccacagacagccacaccgcaggagggtgatccattccctgatgatatccctttctga

SEQ ID NO: 394816 - DNA, 1815 bp, Salmonella enterica
atgaagaacgcaccaaaccttaaacaccttccccgcgacaaaatgacagaagcgatcatttttgcgggtaatgaggcctatgcacacgccagcgcatgggaggaacaatacgggcagaaggtagcaggagacaaaaccccgccgatctacctggggaaaaagcagcttgcagatctggctaacattcggatcgttgatgacggtcgtcactatgcaagggtgtaccgcagcggagaactgaccgaatcacagataaccactatagcaaccaaactcgcgattgccggagtacaggaagcccgtttctattctgagggttttaagttgctggagaactggacagagagactaccggcactcaaagaggcggcagaacgcggcgaaagcctggtgattgatttccccgttactcaaaaggcatcgcaagctggtggagaactacttgcactaaaccagatgggggcaagccagcggggagaagtattatttgcacactatagcggcaatctggcaatacaccaggattctgacattgtgcataactataacggcgttatatgggaacctttaacggataaggacttatgccgggaactgacgcagatatttataaacgcgggggttgcctattctgaaaacatgattaaatcagccgttgatacaatgaaactcagattgcccgtaatggggggaactgcccgtaatctgatagggttcagtaatggcgtatttgataccagaacgggacaattcaggcagcacagcaaagaagactggttgttaattgccagtgttcttccgttcagtccaccggcagaaggcgaaacattagagagccacgcccctaatttctggcgatggttgcgccgttcagcaggtaataatgatcgtaaaaccgatcgcatacttgcggcgttatttatggtgctggctaatcgctacgactggcagttatttattgagctaaccggaccaggtggaagcggcaaaagtataatggcagaaacggctaccatgctggccggaagaaataacacggtatcggccaatatgaaagcattagaagaagccagagaaagggcgctactggttggttattcgctgattatcctgccagatatgaaacgctatgtaggtgacggtgcaggactgaaagcaataacaggcggggataaagtaccaatagacccgaaacataaagccccttactcaatgcgtattcccgcagttgtgatggctgttaataataatgcgatggctttcagtgaccgcagcgggggaatatcccggcgcagggtaatatttaacttttcggaagctgtaccggaaaatgaatgtgatccttatctggcagaaaagatagaggctgaacttgctgtaattattcgccatctgcttacgcgcttttctgatcaggatgaagcaaaaaaacttcttcatgaacaaaagaaatcagaggaagcgctggcggtaaaacgtgatacagattcgatggttgatttttgcggctatcttctttcgtcaatggaatgcgacggaatgtttgtaggtaatgcggaaataataccattcagcccccgcaggtatttatatcacgcatacatggcttacatgagagcaaataatcttggcaacatggtgtcactaacccgcttcggtaaggatatgccaggagcaatggcagagtacggcaagaagtacatgaagctacggggcaagaaggggataaggtcaaacgtgacgttacacgaagactcggaggactggctgccgtcgtgcggtgatacgaacagcggggaaggggtacaaaaataa

SEQ ID NO: 394817 - DNA, 192 bp, Salmonella enterica
atgctttgtatagtcccgccgtcccgggtcgcgcacgcgggactggcaggcaaagaagggttcaaagccttcgcgctgcagattttcgagcagggtgatggtcggtatatagctgtagcggtcagagcgggaggcgtgtttatcctcgccaaacacgctgggggtgtactgcatcagctcttcgtgggttaa

SEQ ID NO: 394818 - DNA, 924 bp, Salmonella enterica
atggcaaagcaaaagtttaaaatcaccaactggcccgcatacaacaaggcgctcagacaacgtggttcgctgacggtctggcttgatgagtcagccattgctgcatggactgacagcgcacagcctgaaggtcgtggtcgaccactgcattacaccgatatggctattaccacggtccttatgatgaagcgcgtatttaccctgtcactccgggcattacagggcttcgttgattcgatttttcagttgatgggagtggctcttatttgtcccgattattcactggtcagcaaacgtgcaaagaccgttaatatcagtattaaaacccccacgcgtggtgagattgaacatctggtgattgactccaccgggctgaaggtcttcggtgaaggagaatggaaggtccggcagcatggagcagataaacgcagagtatggagaaaactccatctggcggcagacagtgtcacacatgagattatctgtgccgatttatctctcagtggaaccactgacgcacaggcacttcccgcattgataggccagactcaccgcaaaatcaaagagacctcagcggatggtgcttacgatgtctgttactgccatgatgccctgataaagaaaaaaatcaggccactcatcccgccgcgaagcggtgcgcaatactggcccgataagtactatgaacgtaaccacgcagtggcgaatcagcacctgagcggaagcaatgacgtctggaaaaagaaagtgggttatcaccgtcgctcagtagcagaaacggctatgttccgtatcaaaacactgccgggaggtcatctgagcctgcgggactatgacgcacaggtaggtgaagcgatggcaatggttaaagcgctgaaccggatgacgttgttgggtatgccggacagcatccggatcgcataa

SEQ ID NO: 394819 - DNA, 1068 bp, Salmonella enterica
atgaataaagtatatgctttgaaatacagtccgtgtagtgaatctgttgttcctgttccggaattttgtcatcgtaagacaaagtctgcagtaagaagttgtcaggcaggagtgttgttggcattgttgtttaccgcttcccctgtggtttactccagcgaggtcagcaatcaaataacctatcagacatttcgggattttgctgaaaacagaggagaatttactcccggggccagagatattcgcatttataaaaataatggagaagtcgctggtgaactgaataaggcaccgatgccggattttagtagcgcagattttggttatgcagttgccacgttagtttcacctcaatacattgtcagtgtgaaacacaatgggggttacacaggtgtcaggtttgggaatggccagaatcattatgatattgtggacagaaataaccatccctcactggatttccatgcgcctcgtttaaataagctggtcactgacgtttctcctgtctcaatgactaacgccgggacagtcagcaatatctacagaaataaagagaggtttcctgttttctatagggtaggatccgggactcagtatattaaggatgaaactggaaaacttactacaattgcggggccgtacagctttttaacgggaggaacggtcggctctccgggctcttacgacaatggtaaaatgataggaagcaggacaacggatacttttagtccattgcagggaccgctgtcttctcatggccgtccgggggacagtggttctcctctgtttgcttatgatctcagtcagaatgcctgggtactggtcggaaccctgagttctggtggtggtggtgggtctaactggaccgttatcccggttgattttatcactcagatgatgacagatgacagtgatgctgcggtgatctcctcaaccggagaaggtccgctgacatggcgattcaactcagccaggggagtgggttcactgacgcaggggagtacggtatatgctatgcatggtcagcaggataataaccttaatgcagggaaaaatcggctttgttga

SEQ ID NO: 394820 - DNA, 471 bp, Salmonella enterica
atgatttttggtcatatatcacaaccagatgcctgtcgtttcccggcagtgattgaaaagggactctattttttacgcactactgattttcacaatctttcacccggagtgatagatattgatggcggtaaaatttatgccgagttaattgaattaaccacccaggacagcctgcaaaaacagcctgaagctcacaggcgttatctggatatccattatctgctgagtggtgcggaaagaattggcgtagttactgatgatggtaccaatgaaatagcggaatcttatactgaagaccgggatgttgtgtttttcagacgggtgaaaaatgagttttttctcgaaatgatacctggaagttatgccatcctttttcctcaggatattcaccgtccggcatgcaatcaaaccagtagtacacatatacgcaaagtagtggttaagattgcagtcagtgaactggattcataa

SEQ ID NO: 394821 - DNA, 663 bp, Salmonella enterica
atgagccgaccattactgcaactggcgctcgatcataccagccttcagacagcgcttcgcgatgttgcccggttacaggatcatgtcgatattgttgaggctggcaccatcctctgtttaaccgaaggacttggtgtcgtgaaagcactgcgtaagcagtgcccggataaaatcatcgtcgccgactggaaggtggctgacgcaggtgaaacactggcgcaacaggcgtttgctgccggcgctaactggatgaccatcatctgcgccgcaccgcacgccacggtggaaaaaggtcacgccgtcgcacagtcctgtgggggagaaatacagatggagctgttcggtaactggacgctggatgacgcccgcgcctggtttcataccggggtgcgccaggccatttatcaccgtggacgtgatgcgcaggccagtgggcagcagtggggggaagcggatctggcgcgtatgaagtccctttctgatatcggtattgagctgtctgtcaccggtggtattacgccagccgatctaccgctgtttaaagatattcgtgtaaaagcgtttatcgccggacgtgcgctgacaggagctgcgcatccggcacaggttgccgctgagttccacgcgcaaatcggtgccatctggggagaaaagcatgcgtaa

SEQ ID NO: 394822 - DNA, 861 bp, Salmonella enterica
atgcgtaataatccgttagggatctatgagaaagcgctggcgaaagacctcagctggccagaacggctggtactggcaaaaagctgcggttttgattttgtcgagatgtctgttgatgagaccgacgaacgtcttgcccgtctggactggagtcccgttcagcgcatatcgctggtcaccgccatgctggaaaccggcgtagccattccgtcaatgtgtctgtctgcccatcgtcgttttccgttcggcagcagtgatgaaaccgtacgtgagcgggcgcgggaaatcatgagcaaagccattcgtctggcacgcgatctgggtattcgtactatccagctggcaggttatgacgtctattacgaagaacacgatgcaggtactcagcagcgatttgccgcaggactggcgtgggcggtagaacaggccgcggcggcgcaggtgatgctggcggtggaaataatggacaccgcctttatgaactccatcagcaaatggaaaaaatgggatgagatgctcgcctcaccgtggttcaccgtctatccggatgtcggcaaccttagcgcgtggggaaatgacgttaccgctgaactcaaactgggtatcagtcgtattgccgccatccatttaaaggatacgcaaccggtcaccgcgcaaagtccgggccagttccgcgacgtaccgtttggggaaggctgtgtggattttgtcggcattttcaaaacgctgcatgaactgaactatcgaggatcatttttgattgagatgtggacggaaaaagcaacagaaccggtactggaaattatccaggcgcgacgctggattgaatcacgtatgcaggaaggaagatttacatgttag

SEQ ID NO: 394823 - DNA, 147 bp, Salmonella enterica
atgaaaaacggccttgaagttgatgcgccagtaacggacgaaatcaccggcgcagtagcctttgctattaaatgggtggcggttggtgttgctgtttccccggtattatacggtctggcaaaactgattatcgcactgaaatcataa

SEQ ID NO: 394824 - DNA, 465 bp, Salmonella enterica
atgaaccgcataactactggcgtaatagcctcgttgctgatagtggccgccgcgctggcgtggactacagaacgctatcacggtaacgcagtgcgctacaaagaccagcgagacaccgccactcacaacctgaatctggcgaacgagactatcagcgatatgcaaacgcgtcagcgtgacgttgctgcccttgatgccaaatacacgaaggaattagccgatgcgaaagctgagaatgatgctttgcagcgccgccttgatgctggcggcagggtgcatgtcaaaggccgctgttcagtgccagcccagaacacatccgccatccccggcagcgtgggcgatgctgccaccatcgaactctctcctgttgctggacgaaacgttctcggtatcagagccggaattatcaacgaccagggagcactgaggtatttgcaggactatatcagaacgcagtgcaggtaa

SEQ ID NO: 394825 - DNA, 339 bp, Salmonella enterica
atgacggggatagcaattaccggcgatcagatgattatccacgacagcgaaggcaggccgaggattgttactggctgcctgagtgatgcagaagtgatggacagggagccgccagagccattaacacctgaagaagaaatctacggacgcgggctttattcgttacccgaaggctgggaggatttatccggtgatgagcgatggcttcatcatctgagtgatgaactccgcaacatgtggccgcatttttcccgcgagcaaaagatggcgatagcttactcagtgaatgagatggttgatgatatgttcgatctggaatgttcgttgcgtgagaggtga

SEQ ID NO: 394826 - DNA, 396 bp, Salmonella enterica
atgagggtgctgattgttgaggtaaggggcaaggatgaaatagaggcgatcaggtcgcagggtatctggcgataccgtattgcgacaatcccccgaccctgcccccagggaaccgtcagatggccgggagtttattcatttccagatattgagactctcattcggataatgctcgcaccgaacaggctgacaatcattaaagccctggcggggaaggaagcaatgtcgatacacgctctgacaaaacgagtggggcgactttactatgccgtataccgtgatgtgcaaacgttgttagcggcgggcgttattggccttgatgataaaggaaagctcacttttccgtacgatgaggtacgtttcaatttttctgtttccgggggaggcttcagttaa

SEQ ID NO: 394827 - DNA, 462 bp, Salmonella enterica
atggcgggaagaagaccaaaaccatcccggcttaaagaggtcgcgggcaaccccggcaagcgaaaatccaccaaaaaagaaccagccccaaaaagagaaattcagccgccaccggcacatcttactgagtgggggaaatccgcatgggtgagagtcgcagaactgctcgatggtatgggggttctgacccttgccgatgcaatggctctggagcgtctttgcgatatctacgcagaaatcctgcaactgaagaatcagattgccgctgagggtaacacctacatagtgcagaccagcggtggatttctgataaagccgcatccggcagtggctatgctggcggatgctgacaagcgttttaaggggtatctgactgagtttggactgaccccggcagcgagatcaaaggtgaatataaatgacgaaggtgaaaaagacgaagcagacgggttctttacctga

SEQ ID NO: 394828 - DNA, 423 bp, Salmonella enterica
atgcaccggaaaaacgcagccttaaagtttaaggcgttcggcttcgacgtgaaggctgtcagtgatgacggccttttttctggctacggatcggtgttcgacgtggtggattcatacaacgaggtggtagcccccggtgcttttcttgaaagcattgaagaggtgaaaaagaaaggccgtaccttcccggtattgtggcagcaccgtacgggtgagccggtgggtaactgggacatcgacagcctgaaagaggacgatcacggcttattcggtgacggctggctgtggctggatgatgcggcctatgcccgtaccgcctggcggggcatgaagagccgcgccattacgggtttgtcgattggatatttattatatgcactcagcaatagcgaacgtgttcttgtgtttatcgtaatttcatga

SEQ ID NO: 394829 - DNA, 1215 bp, Salmonella enterica
atggcagcagaaaataagttgagtgataagcgtatcagggcgcttttaggcaagccacaggataagcaacaggtgatttcagatggcagaggcttatcaatccgggtaagcaaaagcggcgcggttagctttgttatgttctacagattgggaggcagggaaacaccgcctgtctggttaacgctgggtaagtatcccgatatgaccctgaaaatggcaagggaaaagcgcgatcagtgccgtacctggctggcagatggaatagacccccgtcaccgcataggctttgttaccgacgaatcacaaaggccggtaacggtgaaagacgctttagagtactggattgaacattacgccagacagaaacggaaaatcccggctgaatctgaaaggcgattcaataaccatatatacaaacatcttggtgatgttcctttggttgattgtacggcggctatgtggattaaacgctttgatgaaataaagaaaaaatcccccgtaatgtcaggatcaatttttaaagatattaagcaggcattaaaattttgcagagtgaggcgttttgcagtttctcatgagcttgatgattttaccgttacagatatgggtagtaaagcaaacaggagagatagagtattaaccgaaaatgaaattagggacgtgtggcgatgtttaaataccacaataaataataaatatttaccgcccacctatagaaattttttaacactgcttttggttttcgggtgcaggtgtaacgaggtaaaacaatctcgcctggatgaatgggatctagataactggatttggactgtaccaaaagaacacagtaaaagcgggcgtgaaattatcagaccaatcccgccacagttgcgacagtggattttaaatttaaaaacaatagccagtatggaaaaaagcgaatacataattaacaatatatccagaaaaccaacaacaacagcgggggaacgtttgtggcaaaagttcgggcatagtaaaccctggacgttacacgatttcaggcgcgtacttgctacaaacctaagcgatatgggtattaatgccgatgcggttgagcagttactggggcatacaatgccaggagtaagaggaatttataaccgtagccaatacatggatgaaaaactaaaggctttaactatatggtgtgattatctgaattctctaatagctgatgaggtggcggcatga

SEQ ID NO: 394830 - DNA, 246 bp, Salmonella enterica
atgaaagaatttaaattcatgagtaaaaatgaacttgagttaatgccagaaatagaaaggatggttgccgagagtgagcgaaaatggttaacagggattgcaaaaactacatgtttagatatggaaaaaagaggtgtatttcccaagcgattacgccttggggggcatgttgtaggctggcgtctatctgaaattcaggcatggataaagagagaatggaaaccagaagacagccagacagaataa

SEQ ID NO: 394831 - DNA, 213 bp, Salmonella enterica
atgcgcgtgggcggaaatggttgtaagtcccaggtaattcaggacagtgtgttcgcgagtcacggtatgaccagccaaagactcaccgggaggcacccggcgccgcaacacaaatcggaaattaggctcgtactcaaaggctgcttcggtagccttttctgtatgtcacactggcgtagtggggatcgtctcccgcatttttactcgccgtaa

SEQ ID NO: 394832 - DNA, 927 bp, Salmonella enterica
atgaaagtcaaaagcttaggattctccatttccaacaccaacccccatattagtaccgctgatgccatgctagcgttgattgcatcgtcaagccgaattcacaatcgtacggactattcgcgtcagatcctgatctctgatgataatggcttttacagtgggctagttgttacatttcgaaatcagaagaagaattgtaaatccaattttaaagatggaaaattcaagttgacagtcgaggacttaacagacggggataaactggcaagttttaactttttttgtataagtaaaaaatcgatgaatgggttatatatgtatcatcatggctcatgttcgttaaatggcctatttactcacctgcaaactgtgagtaatgagttcataagaaatttatgtgataaagatataaaaagtctcgggagtaaatcatctcagaaagataaagccgaagtaaataaaaaatacaacaaccgtttttctttcagccttataacaaataaaaaagatattgctgatattttaagagaatttaaagaaataaaacatgcttcctttaaatttgattatcttgatttcaaagatggtcccatgaccgctttagaagccttttctaattctactgatattaatttcaatatagcgccatcagatagaaaaaagacatcggcactatctcaaagtctttctgatgcttacaaaagcttaacaggtataaccaaggctaaagtaactgccgttgaccatttgaacaatgaaaagattattgactttatggcctgccctacattctttgaaacctatgagtttgattatatagcagaaatggttgatggtgtaacaaatgataattatacaaccagtaagatttttgatatcataaaggaagagatcatgaacgggaaaaacaaaaatgtttttatatga

SEQ ID NO: 394833 - DNA, 540 bp, Salmonella enterica
atgtttttatatgattggatcataagaaaaagaatatcaattcaatatcttatgctagttatgttctctattctgtgtctggcagggttgtactttctttatcggaattcgccggatgttagtactaaattttttgagtttcatcacaaaaacctaaggggctatttgttttcaggttttatttccgttggctcttttttacttagtctgcatacgtttgttatcgtaaatctaaaagataaagttttctcgactaaagaatacaaagaggcttatacgcttgcttatggaatcactgaggcagacataaaggaaagcgaactatataaaccattagataacctttcatcatttattaatacgtcaataatactatctttaactactgcaatttcacaattcacattaggtttatctacaaatctttatgcttgcttgttttgtgtatggctagcaattcttactgtatgcttcctcctgcattgtttaataatcattcgaatcaatataaggattttccttaagcaaggaatacggtag

SEQ ID NO: 394834 - DNA, 1380 bp, Salmonella enterica
atgacgccagtatggagaagcgatgatctcgaaggtgcggtaattggcgcaatgttcttgcgtaatgccgaccctgaagttcttgaaatcatttcccgtcttccggcgaatgtattcaacgtcaggcagtaccgggatatttacgcgggtatctgtcggcaggcacacagtaacggcgtgattgacccgctgctgctgtgtgaggtgatgcctgactacagcgcaatcatcatggaatccagccgtatagcgtgggccaaatcctccctcgattattacgtgtcagtcctgttgcgaaatgccaccattcgcgacggagaggcggcactggtgaaagcgctggaaggtatacgtaatgccggaaacggtgaaatggctgtggtggcgcttgaggcagcaaagaacgtcatggcaactgtgggtatcgaaaataacacggtacaggcggttcctgttgccgacctgctgcctgtagtggcagacaggcttgaggccagcaatcagggcaaaacagagagtcgtagcctgatgacgggtattgatgaactggatgcaatgaccgggggtattgacctgacggatctggtgtttattgctggcagaccgtcaatgggaaaaactgagctggcactggatatcattgacaaaattactgaacagggacacggcgtactgtttttcagtatggaaatgtcaggtattcagataacagaacgaatggtatcggcggcaggtgggttgcctgtatccagactgaaagcggctaatcagtttggtgatgaggagtggggacgcgttttcggaggtatggagcgcctgatgaaccgtaaaatctggattgcggatgccgcaaacctgactgtggagcagatttgccagaccgctacccgttactgcatggaatatccggaaatagcggtggtagttgttgattacctggcgcttatcaaaattaagagtacggcacgttacgatctggcggttggcgaggtatcgaaggggttaaagaatctggccaaagccaacaaaacccctgtaatcgctctcagtcagttatcacgcggcgtggagtccaggccaaataaacgcccgatgaactcagatctgaaaaactccggtgagatagaagctgacgcagacatcattctgatgctctaccgcgacgaggtatataacccggactctccggcaaagggtatagcggaaatcaacatcaccaagcagcgcaacggggcgctgggggtaatttatcggaggttttacaacggtcatttcatgccgattgaccaggaagaagcaaagcgactgtctgcaccacagccgaaaacacaatcccgacgctatgcaaagagtaaacagactggccattcagatttttaa

SEQ ID NO: 394835 - DNA, 879 bp, Salmonella enterica
atgttaaattttaaacaacgcgaagaacgggatgcccttcagacacgtcgcgataatctgcgtgaggatctggaatttgcgcagggtggaaaaaaaccgtggcttcatgaatcctgggcagaaagcgaaaagacgattgcctgtgacaaacatggtgaatatctggcgcgggttctgactggtccggaatttcgcggtgttccggctgttaaacattcctgctgcccggcatgtcttcgtgaagaacaggcgcagattaacgccggattgcgcactcttcatgttaccgacctgctggatgaagccgggatcgcccgtcgctttgagggctgtgagtttgaaaactaccagaccgtaaatcaggatgctgcgaggaaccttaccgcctgccagcgttatgcggacacctggccggagcgctttaaggccggcacgagcatgatcatgattgggaactgcggcacagggaaaaaccaccttgctgtgtcgatggtgaaaaacatcatccgtaatcatctggccagcgtggaaattaccgatgttatgcgcctgactcgcgcggtgaaaagcacatggcgccacaatgccgacagcaccgaagaagaggtgattgagcactttgcgtcgctggacctgcttatcatcgatgaggttggcgtgcagttcggaagcccggcagaaacgacgattttgcaggaagtgataaacacgcgttacgaaagcattctgccgaccatcctgatcagcaacatgacatttgagcaactcaaggaatccattggcgagcgtatcgtggatcgcgtcactgatggtggacgtaaccgcctggcgtttggctgggaaagctatcgtgcgattgctggtggagtgactgcatga

SEQ ID NO: 394836 - DNA, 882 bp, Salmonella enterica
gtgagcaatttcttacagctcgttgatcgtccaatagcctttcaacggtccttcgttcgccttggcgtgggtatcactggtgcgttgctattgtctcagattgtctactggcagaaccgcatggaagggcaatggttctacaaaacccaggcagatctcgaagaagagactggattaacgcgttacgagcaagagggcgcgcgtaaaaagctggtttcctgtggtgtactggaagaagcaaagcgtggcatccctgcgaaattatatttcagagtaaaccaggagcgtttggaagagctcctcatcggtgaaaaccagcatgcaggtgtgggggaaatcaacaaactaggatgcggaaattccgcaaacagggatgcggaaaaccagcatgcaggtgtggggaaaaccaacgagcagtcatgtggaaattccgcatccattcatacagtagattaccaggagactacgcagaagattaatacagagaataaatctcttggtgcatcggctgaagccgacacaccgaaagtgaaatcttcaactgattattctcctgcattcgaagaagcctggcaggcatacccaaaacgtagcggtggcaattccaaatcggcagcctggaaacactggaaggcccgtctgaaagatggggttaaagctgaagacatgctggcaggcgttaagcgctacgcagcctactgccagacaaccggtaataccggcacacagtacgtcaaacaggcggcgacgttctttggtcccgatcgccacttcgaagaatcctggcagactccatccgctcccggaggtgggtgtcgcaatgtactccccatatccggatttagcgaacaggactatggcaacgcagactgtaactggtaa

SEQ ID NO: 394837 - DNA, 198 bp, Salmonella enterica
atgtcacgcgctaacacgtcaccagatccgattaagacactcgatatcgattatcgcgatccgcgaggtgttgtcgtgcacgtcactgggtggaaccgggagaagcaacaggtgtatttcaccagacagaattacccgcatgaatgcatgcagccagtctggaagtttcaaaattatttcaggagggttggggagtga

SEQ ID NO: 394838 - DNA, 243 bp, Salmonella enterica
atgaatactgagattaaagataggatcttaaaactctctagccaaagctcattggctaaacgtatggggtgcaagcagcagacggttagtctctggctgaataatgatgtaccagccagtaaggtgctcgctttgtgctcttccctcaattggcgcatcactccacatgaggtgcgcccagatctgtacccaaatcccgctgacggacttcctgcggaacctaaagcaacaacagaggtgtga

SEQ ID NO: 394839 - DNA, 450 bp, Salmonella enterica
atgaacaattcagttgaatcagtctttcagagacgcttaaaggaagtgcttaacaagctcgggtatagccaatccgagctagccaggcgcatgggtgtaactccgcaggcagtgcaaaggtggtgtaacggcttaggtgaaccgcgcaaaagcgccttggaaaaattgtcgagcgcaaccaacatgcctgctcactggtttttcactccctatgaagagagcgaagatcggggtctctatatcaatacatcattcagtcacgtagacgagctccatagcagtgcaaaacctgtgctcctgtccccagatgaagaacaacttattaatatttatagagatcttcccggagaggagagaaaaaacatgctgagagtttttagccatagactaaaagagattaatgactttattgagaaatttctaagacactctcatgagaataaaaaataa

SEQ ID NO: 394840 - DNA, 417 bp, Salmonella enterica
atgaaagactttaatgggttgtcccttatgccacaggatgtagtaagaaactcgctaaatataatctctactgctggaacactcagcaccagttgtcagtacagccaacttgctgatgaattgattgatatagcactccaatatctcaatgaggcttgtgtaaaaactgatgcggaattgcacacttctgacgatggctctacccgtctaagctcccgcatccagctcgcccgcgagaacttcggactcaccgaagccgatctcgcccgcaagttgaatacctacagcgaccatatttccgactgggaatgcgacattaccgaaccaccagcaagcatgattatcccgctagccaacgccctgaaatgcgatcctctatggctgctgactggtaataatccggaggtagtggaatga

SEQ ID NO: 394841 - DNA, 195 bp, Salmonella enterica
atggctgatatttctttagaacaagcaaccgaaaaagcatatcaggtcgaaagtctgttacgaatgttcgagagctatccggacacgttgagcgaaacagaattatcatctgtaatcactttaatccgtcgcttatctggtgaagtacatgcatggcttatcgaagagcaggcagacagggggaaggataaatga

SEQ ID NO: 394842 - DNA, 210 bp, Salmonella enterica
atgaataaaaaccctaatgcaagttctatcaccattgtacgcgccattcgggtaatgaaagccctcaaaggtcattctctcaatggtctgtcaaacaaagaactggctgcagcactgggcgaatctcccgcaaacatcacccgtgtactaggtgcgctggcaagcgaagggatggcgcaacgccttgaatcaggccgttatccacaatga

SEQ ID NO: 394843 - DNA, 378 bp, Salmonella enterica
atgccgataagaaaccacgacctgtttttatgtaatgattccaccctgacttccatgcaaaggttactaaaagaaaaagaacgcctgggcataagcaatgaccagatggcacagattctgggtttgcctgaatctttcaacgtctccgcttctgacagatgtcctgatttcctggtgggagatttgccttccaaagcgcgggcgggccttttaaatgctggcgtcgatttattctatgtattcgctggtgcatctgcgcatagtgatgaagtcacgaagatgcgtatgttttatcgggcagcagcagaattgtcctccctgcagcagcgagagttgcgttatcttatttatactttgcctagagtgcttgtgcgttaa

SEQ ID NO: 394844 - DNA, 348 bp, Salmonella enterica
atgaaagatgattatcacctgccagtaattacccgcctcgaacgtgaagcgcgtcgcaagggggttaagaaagcaaagctggctatggtgctggggttaagtgaacgccaatacaaccacattagcgatggctgggaagctcttagcatgagcctcctgacgccatatacttacaatctgttctcctctatgggggtggatttgttttatgtgctgacaggcgtgttcggtgaaggattatgcccggactgtagaaaagcatttgtcacacgatggctgaatgatctatcacctgatgagcgttttcgaatggagttctttgcatcccgtatgcaattcgatatgtga

SEQ ID NO: 394845 - DNA, 288 bp, Salmonella enterica
gtgaatcctttgcatcatccggcaccctcaaaaccccgtcactggcgaacccgggcagatcccttcgcagacgtctggaacgaaatagaatgctggctgaaagatgagccgcagctgggcagtaccgaattacttctcaagcttgaagacacacatccgggtaaattcactgaaggccatcgtagaacactgcaacgcaggttacaggaatggcgggtcagagtggtaagagaactggtctacggaacccgtgctgatggtaacattttagctgaagcaagaaagtaa

SEQ ID NO: 394846 - DNA, 387 bp, Salmonella enterica
atggtatctttgtggagaaatgaacttgtgaatgatggacttttagaaccatatgaaaatccgaatgagagcaataacaggtctccggagaaaagatttactgctgtaatagaaacctcctctatgactgaactggaacttgttgaatattgtcgtagtaaaggaatatttgtagagcagattaatgaatggagagcactggctattcaggcccaggatgtaaaaaacaaacaccaaataaacaaagaactttccagcgaacagaaaaaagtcaaaaaactgcaagctgaaatagcgcggaaagataaagctcttgcagaaactactgcgctgttagttttgaggggaaagttcgatgccctctgggacaacagcgaggaagactga

SEQ ID NO: 394847 - DNA, 384 bp, Salmonella enterica
atggttgcaaaaatgcaggatcttggcatattgagttcttattcccgcccaagaattagcaatgataatccatattcagaatcattgttccaagttttaaaatgttgtccgaaatggccattgcctggttttgacggggtcgtgaaatctcgtcattgggttgccgaatttatacaatggtataatacaatacataaacacagtggagttaaatatgtcacaccagatgagcgtcacaaaatgcttgatattgacattttaagacaaagggaattggtatacgaaaaggccagagatatcaatccatcccgatgggcaagaagttgtcgtaactggaagttcatcaatgaggtttatttaaacccaaagaaagaggtcgcctga

SEQ ID NO: 394848 - DNA, 3045 bp, Salmonella enterica
gtgaatcagggggcaggctcacttactttcaatgacagttatatcgtgtcacctgaaacaaaccagacctggaaaggcggtggtattgatgttgcaagggatgcggttttgacctggaaagtaaatggcgtcaaaggggataacctgcataaaattggtgaagggacacttaagataaatggtacaggaattaatgaagggggactgaaaacgggggatggtaccgtaatactctcacaacagccggacagtaaagggcaggttcaggcgttcagttcggtcaatattgccagcggaagagcgaaggttgttctttctgacaaccggcaggttaacccggacaatatatcatggggatttcgtggtggggttctggatatcaatggaaatgatattacgttccataaacttcatgcggcggataatggtgctgtcattaccagtaacaatgaatctttgtcattactggaaattcttcctgtaagcgatttatctgtaagcattaatgactgggatgctaatcatcgttcaggtggcgaaaaagggctgctttataaatataaaaatggttatacgcgtacaaccgattattttatccagaaaaagaaaggatatggctatttccctgttaatcagagaagcagtgctgaatgggaatatgtcgggcatgatgaaccggaagcaataaaaaaggtgttatccggaagaccggatgataatttaatattccatggtaatctgaccggaaacatgaatgtcagaacggactcgtcagccagtaccggagagatagcatttgatgggaatattaatattccggcgggagatttttctcacacaggagaaaaaggactgacattccaggggcatccggtcattcatgcgtataacagtaagggggtggcagagaaactggcttctctgggagataattctgtcagaacgaggcctgtttcatttgaccagccagactgggaagaccggagtttcactcttaatacactgtcgctgaaggacacggatttccggcttgccagaaatgccaccctgacgggagatattaacgcagatcattcagttgtcaccctgggaagcccggaactctggattgacctgaatgacggtagtggaaaagaagcccgattacagaagggaaattcagttgccagtcatgaatctgatatgagtgactaccacgggagtatcacactgaacaaccagtccgctctggatatcagagaaaagttcgcgggcagtattatggcaaatgacagttctgtttccgtggcttcaggacagactcgtctgacgagtttcagtctgcttaatcagtctcctcttacccttgtctccggggcaaaattgacagcgaccggagggtggtatacgaacagcccggtcagtgtgtattctgatgccacactggctctgggagggagtccccgcgggaatgaaaatgtagtttcaccgacgtattatgcctcaacggcgtttaatcttagaggtgatggcgcccgtctgcagatgcttccgtatacttacacctatggtgacatcagtgctgacggaaaggctgttatttctgttggtgaagggaattcagatgagctggcctcagacctgagtctgcgtgaaaaaattacatacagcctctttgatggttttaaaaacgtttacgggggatggataaatggttcccgggcacaaatgtcagtcagcgacacacaatggcagatgagcgggaatacgcaccttgatgggatgaaaatgacccgttcgctggttggtttcaccggtggtaatgacagagcaccgttatttaataccctgaatgttaatacactgaaagccactcagtctgcattttcactgagaaccgatctgaaggacagtgataaaattgtgattgcgcaacatgctgagggaaaagataacgtcctgttcgttaatttcctcaggaaaccttccggaattaattcccttaatattccactggtaagcgccccggctggaacggatccggcgatgtttaaagcaggagaacgtgtcaccggattcagtcagataacaccgttgatccatgcagaagataaagaaggaatgatccgctgggtgcttgacggattcaggacacacccggacagagagacgagccgctcagcgaacagttttcttaatatgggatataaaaatttcctgacagaagtgaataatctgaacaaacgcatgggagatctgagggatacgcagggagatgacggtctgtgggtgcgcgtgatgaacggatcaggaaccggtgacgctggttattcagaccattacacacatttccagtttggctttgacaaaaaacacaggctcactggcgcagacctgtttactggtgttctgataagccatacagacagctatgccggcagttctgtattcagtggtgaatcgcgttctctgggagggggactgtatacgtccctgatgctggattcaggtgcttatgttgatgttattggtaaatatgttcatcacgacaataactataccgcccggtttatcgggtcgggtaaacaggattatggtacgcattcgtggtatgccggggtggaagcgggataccgttaccgactgcccggagaaatgcacattgaaccacaggcggagctggtatatggggcagtctcgggatcccggttcagatggatcgcagacggaatggacatgtcaatgacgaatcgacattataatccactgaccggtcgtaccggcgtggcgtttggaaagacattcacgggaaaacagtggcaggtgacggcgcgtgccggcatggattatcagtttgaccttgtgtcaaacggtgaaacggtgttgtatgatgcttccggagagcaccgttttaccggagaaaaggacagtcggatgctgtataacgtcggagtgaatgcgcggctgaatgacagggttcgttttggtattgagctggaacagtcggcgtttggcaagtataacgttgaccatcttatcaatgcgaatctgcgctatacgttctga

SEQ ID NO: 394849 - DNA, 141 bp, Salmonella enterica
atgttccgtatcaaaacactgccgggaggtcatctgagcctgcgggactatgacgcacaggtaggtgaagcgatggcaatggttaaagcgctgaaccggatgacgttgttgggtatgccagacagcatccggatcgcataa

SEQ ID NO: 394850 - DNA, 258 bp, Salmonella enterica
atgattattaacggaaaaaagataaaagcaaaagattttgcaaaaatggctggagtgtctcgtaaaacgatagttaaatattatgctatgcctcgtgaacagtatgaaaaagaagcagcagaaaaaagacagcttgcttttgaattaagatcatctggtcttaaatggcgtgaggtagctgaaaaaatggatactaccttagatagtgctatggcttattatcgtagatatttagcattacaagaaaaacaaatatag

SEQ ID NO: 394851 - DNA, 396 bp, Salmonella enterica; identical to SEQ ID NO: 378715

SEQ ID NO: 394852 - DNA, 507 bp, Salmonella enterica
atgtgtcctgacaatacacgcgcaaagaagcaacttatcttaccggctgacgatatacattatcccggacaggcaaaccatgatgcctgttttattccggaatgtgttcgccagtacaacggagaacctctttatattcttgttgcgcactggtgtctgctgcaacaaaactgggttcagcgaagccagatatctgaggcctttcacatcaccccgaggcgggccagctacctgatttcctacctgaggaataaagcgtcccgggtggtttgtgtttgccgttatcagacgttgcccaataaagcacagcgctatgaaatttatgtcgtgcgtgttcttgaaaacacggcgccggtccggcgtgaacggacggtaacaccaccggtctcacggcgacgggtggggaacggagacagggcacaggcgaatgaactgtggaacaggctgtgcagtaacaggaacgcgggaaaaatcctgaaaaaggaggatgatgatgacggcgtataa

SEQ ID NO: 394853 - DNA, 153 bp, Salmonella enterica
atggagccattaaaagcggcgttaatagcgctgatcgttgttggcgtagtgtgcttaggtgcgctactgcttggcaataaacatctttgtgatgtcagcttccgaagcggcaaaacagaggtagtggctcacatggcctacgaatccaggtaa

SEQ ID NO: 394854 - DNA, 144 bp, Salmonella enterica
atgtcgcaaaaatcgttaatcacggtcgcggtctgtactgcgatggtcctcatcatctggatgttacgcggctcattatgcgagtttcatctgacgttatggggggcggaatttgcggcaagcctgcagcactgtaaccggtga

SEQ ID NO: 394855 - DNA, 906 bp, Salmonella enterica
atgagaaaaacgaagttaatgttatttggtattatcctggcggcgttcacctcgggtgccgcgtatgcggcggagaagtttaaagtcatcaccaccttcacgataattgccgatatggcaaaaaatgtggcgggggatgcggctgaggtcagttcgataaccaagcctgatgccgaaatccacgaatatcagccaactcctggtgatatcaagcgtgcccagggtgcacagttgatactgtccaatggtatgcatctggaaacgtggtttaagcgattttatgagaatatgaagggcgtgcctgaggtgacggtcaccacagggattgttccgatggggataactgaagggccgtataatggcaagcccaaccctcatgcctggatgtctccggataacgggctgatttatgtcgacaatatccgcgatgcgctggtgaagtacgatccggcaaatgcggacacttacatgcataatgctgaggtttacaaacagcagatcaccgccaccattgagccgctgcgtgagcaggtggcaaaagtaccggaagagcagcgctggctggtcagcagtgaaggggcgttttcctatcttgcccgtgatttagggcttaaggaactgtacctgtggccgattaactctgaccaggaaggcacgccccagcaggtccgcaaagtggttgaacaggtgaaaaagtaccatatcccggcggtcttcagtgaaagtaccgtgtcagacaaaccggcccggcaggtggcccgggaaaccggttcgcactacggtggtgttttatacgttgattccctgagctcggagaacggacctgtaccgacgtacattgatttactgaaggttactaccggcactgtggtgaaaggactgcaggacgggatggcgaaagagtaa

SEQ ID NO: 394856 - DNA, 135 bp, Salmonella enterica
atgcgtttcattaactttctcaaaaaatcattcaagcataacatgcaggaatttatttcactctcgttacacggtcgttcattaagtaaaaaaacatttaaaatcaaagcgattgctatagaaaaaataacctaa

SEQ ID NO: 394857 - DNA, 609 bp, Salmonella enterica
atgaaaaaattagttttgacttcggcgctcacactcatgctggcatcgggttctgctatggctgctgttacaaatggacaactgacatttaactggcaggctgttgtgcctacagctcctgttacaagcacaacatgggcatttgtagatggacttgatatgccttttgtgccggggactgaacagttaaatgtcacgagaactaccactggcattaaagccgtttctttgaagccctatgatttcttcatcgtacctgttactgggactgggacgttaactgccggaacagctgtaaaaagggaaacaacaaaaccattacttgcaaccaaagtattcctggggagtgttccggtttcaaatggtctggttggtaataagcagcttgccttaagcactgcaaaagaagctagtgatggagagattgccattaatgtcaatggacagcctctgaaagtcggaaatgtaggtgctattacgataggttcagctacagatcacgaagagcatattgctatagatatgaatgcttctgttgttaacgctgatgttcaggatggtgcttcgctaagcttcgttgcacctgtaatatttgcagtagatatctga

SEQ ID NO: 394858 - DNA, 693 bp, Salmonella enterica
atgagacttctccttttttttattagtttaattccttttacttcaagtgcatttaatgttgatgcgatgataaaggtttctgaaacagaagacttttttttaatcaacggtagcggcagcggacgcgaatatttatatgtcactctttctgaattaattagcgataaaaacaataaataccatgaagtgatgtttgacgcaaataacgtgacaatctggcctgtaatggcagaaccttcagaggttatagtttctcaaggtgagcaggtaaaggttaagattattaaaaactataattctgcgggtgctgacaggatcttcggtgtcacatttacaccagatataatagaaaccaataacaataaagagaataagaatgaaaaaatcaatcttcctcttgggtataagtcatggtttatagttccaggcaaagaaccgatgactggtagtctgaatgtgagaaaaggggagcattcaggtgattatattattaataataacaccaacaaagtgatgaatgtaaaagttaactactgtggtttttcaggtgaaagtgactgtgtggctcaggttatatccagaccatacgcagataaaaaagtgtctttaggggcaaatgtgaagtcagcagaaatggatttttatcctatttcgggagaccaggataaacctgtaaagaaaattaagctatga

SEQ ID NO: 394859 - DNA, 1677 bp, Salmonella enterica
atgaaggtgattaacctggcgcagtgtgagggacttcccgacgcactgcagccgggctggcccttacctccacaaccgtcggcgaaccatggcgttatttcgcgactggtgaccgccagcggcataccggtggtgttccgtgaaggcgctgaaccggtgtaccggccgctgcatgaccgtattgaactggcgccggcgcagtatgacgacagttcatatggtacagaaagcagcatgacatacgggaatgagatgctccgccttctggtacaggcatccggtcacccgcaacggctgaaccggtacggactgacagtcgatgaacgtaccgacagtgtgtatgaagcactggtcacggatatcgggacggcgttccttgccgcccgcctgggtctgccggacagccgggaaacatctcattgtggacaacctgacggtaacgccctgcaggctgacccctggcgactgttccgtgccgcggatgacgcgcgcagggcggcagaatggctcctggtccgaagacccgtgatgagtgaggtggatacctggctgaagatggccgcgtttcttctctcgtatcattacggtctggcgccggaagacacactgctgacacgtccggcactggcacaacggcatatcgacagcggcattacaccgctgatggcggtcaacgcgctggcccggatttaccggtgggaaagaactgaccagcctcagcgggcgctgtttgcggatgaactcggtccggacagtgaactgctggcgctggctgaaacccggcctgagctgttgtgctgtctgcggcagagtgtggcggtcagttctgcagctggcgttacaatgacctcaacttctgcactgccgttattgccgccaccggtggcagaggagggcggagaagcagccaacgatgacggtccggacgaaccggatgacaatgtggtggcgctgccctgggcggcccgcagggggaagacaaacccgcatatacaggagtttgtcagtctgtttaacagtattgctccgcaggaaaaccgctggcaggtgttcagtgattttgcgcacatggcggcggctgcgttgtataacgccatccaccgtgaccccacggttgaggcggactacctgcgccgggttaaacgctattcgaaagaagacgcggtccggatgtccggtctgctggctgccgttactgacgggctggaattcagcccgacggattttctggggcagctgcttatgacgctggaactgggaaatcagtatctcggacagtatttcacgccttacagcctgagctatacgatggccagactgaacatggcgggcaggctgccggagctgaagaacggcagcagggaatatattacggtctgcgacccggcctgcggcgcgggaggcatgattgtggcgacagcggaagccatgctggaggcaggttataacccgcagaagcagatgcttgcttactgtacggatattgacccgctggcggcgatgctgtgttacatccagctcacgctgatgcatattccggcggtggtttccatcggcaacagtctgacgatggagattacacgggagatggcgacgccggcataccggctgggcctgtgggacctgaagctgcaccggcagcagactgaacgcgaaagcagacagcatgcggcgtga

SEQ ID NO: 394860 - DNA, 912 bp, Salmonella enterica
atgccggaaagtatttatattcagcggcagtttatgacgtttctgggactggacgttcaggcggaggaaatcttcttccgcgtggacgaccgggacaccgattacgttaacactgacatggtgctgcaccgtgactgcctgctggcggtgatgcagtttttacttgatgaggtgacggaacagaacccgcagcagcgggagaagtgccgccatgctgaacaggtcctgacactgtggatacggggtctggacgcgctggcgcagtcgatgaacgacatggccattctgccccggacggtatcagagttcagcgggcgggtggaccggttattacccggtgaccctcatgcgctgttgtccctgccggatgaggcgtttctgcgcctgaccgcgcaggggcatctgatgtccggtgagcagatgagccggcagaatctggaggccaccctgccgtactgggaccgtttcgtgacccggatatccgcccggcttgcggcagcgtgtgactactgcctgctacagttgagcagactgtaccggaatctgaacacggaaccacgacagttacggtgctttacgctgcagtctggccgtctggagctgcatatgcagccgcgggatatgagcgactgtgaacatcttatggagtatgacgatgcgtcggtggctgattacctggaggaggttatggcaggcagactgacgccggtacgcatggaggccagggtgatataccgcaatgacgcggaattgtgtgtcttcagacacaatgctgacgtcatcgacgttcaccatccgcacgtcagtgactggcgggagcctgtcactgatgcgcttgactggatacgccgtgagcgcacatcgctggttcagagcgtgccgcgcagaccggtactgaaactggcggcctga

SEQ ID NO: 394861 - DNA, 900 bp, Salmonella enterica
atgatttatgactggtatatacagcagcatatgcaggcagccacaggtcttgagctggacgatgacgatttcacctggcagttcaggagcgttgcgtccgaccacgttaacacgtttatgctgtttaaacgtgagaagatgctgacggtgatggaggctatgctgggttcacttgagagcgacgaggccacggtgacacggtgccggcaggtactgacgctgtggataaccgggctggatgcgctggcccgtgaacgtaataccgctgagatactgccgcgggttcacccccacagcagcgggcagtgtgaccagttgctgaacggtgatatccggctgctgcagcagtgcagcggggaggagtatcttcgcctgaccggccagacggatttaccggagaaccagcgaataccgcagaagacctttaacgccacggaaaaatactggcaacggtttgaggcctggctgggacgccagttgcgggagacgacagagcactgtttccggcagctgagccggtttgtggaaaactgtaacttcgaaccctggcagttccgggagtataagggcgagtacggaaccatcagggtgggcgtcatgccacaggatatcggtgccattgatgtgatggagtttgaccctgattacatcgtgtcctgggtggataaagtggcggacggcgtgttcacgccggtgcagtttgtggcgaatgtgtactacaggaacggtgtgctgatggcatcgttccggggagacacggaggtggaggatatcgaccacctgacggcgaaagactacggtgacgttgtggcgcaggcggttgagtgggtacgggagcagtttgacgaacccgcagcaatcgaccggcccgtcgcacagttaccacgtctggccgcataa

SEQ ID NO: 394862 - DNA, 189 bp, Salmonella enterica
atgaagattaagttcatggatacagccagacaggccgctgatatggagcgcatgaaagacttcaggcaggctggtcagttatggagtcaggctttgtttgtggccagaaatgacgtcaatgcagagtattgtcgtctccgggctgatttttgtctgagcagcatgtttacacgaaatgctcagcaataa

SEQ ID NO: 394863 - DNA, 162 bp, Salmonella enterica
atggcaaaaaaagagaaaacaccggttaaaaaaagacactggatgacgtcgggtgaaattctggcaagggattatgcaagctgtgagatggcccgtcagttctggagcctgctttacggaacccgaatgaaggacagctcgcgggtcaacggaaacgaatga

SEQ ID NO: 394864 - DNA, 747 bp, Salmonella enterica
atgaaaaaattaacagtggcactatcagcagtggcagtaacggtcatgatggcaggaatggctgatgcggcagaggtttataataaagacggtaataaactcgatctttacggtaaagtagatggtctgcactatttttccaaagataaaggcgatgatggcgaccagtcatacgttcgcttcggtttcatgggtgaaacgcagattaatgaccagcttacggggtacggtcagtgggaatataatattcagggaaataatactgaaggttctgatgcgcaaaacggtaatgccacccgtctggcgtttgccggtctgaagtttgctaatttgggttcagttgattatggccgtaataatggtgttatttatgatatcggtgcctggactgatgtgcttcctgagttcgggaatgatacctatgaagacgctgacagatttatgaccggccgtgcaaacggtcttctgacatatcacaataccgatttctttggtctggttgacggactgaacttcagtctgcagtatcagggcaaaaacggtggtgatggtgaaagcaataacggcaagggccgtgaagcaaaacaccagaatggtgatggttacggtatgtccgtgacctgggaaggtgatgccggatttggcgtgggtacagcatacagtaattcccgtcgcacatatgaacaaaatagtggtgttgctaaacgggcagaagtctggactgcgggcctgaagtacgacgaataa

SEQ ID NO: 394865 - DNA, 303 bp, Salmonella enterica
atggccatggattttggaacgacggatctctttgctcataaaactgacagctatgaaattgtcgcacagtatatgtttgatttcgggcttcagccgtccattgcttatctccagtctaaagcaaaagatacgagttatggtgacttcgatcttgtgaaatatgttgacgttggtgccacctataacttcaacaagaatatgtccacctatgttgattataaaatcaacctgctgaaagacaataatccggcaggcctgaacactgacaacattgtggcgaccggtttggtgtatgagttctga

SEQ ID NO: 394866 - DNA, 228 bp, Salmonella enterica
atgaacagtggattaatgaagtgtgttgattgcggtaaggaactgagtgttacggccataacgtgtagtcattgttgttccacagaccctttcggtcttgcccgcaaaaaagagaaacgtgaaatggcaatagcattgactatgtgccttttaatgttgttgttttttgtattgtggtatttcagtattctggatcctttcagtttactggacagagtatttgattaa

SEQ ID NO: 394867 - DNA, 420 bp, Salmonella enterica
atgctcgtccaccaccatatcggttttatccggaagaacacgattgtggaaaaaagttactatcagattgatccaaagatccagcgtctggttacctgcatgaacacctgcggcatgaagacttatgcctcctgtcaggggcatggtttccctattcgcaaacgtctcccctatgtggcattcacggcgcccctgcccctggcgcaatgcctggcaaaacgggtcagggaagatgccgaatctttatctccccgactttactggggctgggaagtcactgcccactttaacagccagttccggctgtgctggcgtctcgctccggagaacccccgtctttacgggtaccgctactggcgtaaaacactggataaagactttcagcaactttgtctgttaatcaaatactctgtccagtaa

SEQ ID NO: 394868 - DNA, 219 bp, Salmonella enterica
ttgtttccagaatacagagagctgatttcgcggcttaaaaaagaagatgcccatttttcggtattgtttcagcggcacaatgaactggatcacgaagtctcccgggaagaaaccagaccgtctcccgacagtatccgtctgatggagatgaaacgggaaaagttacacctgaaggatgagatgcaccgtattcttcgctcttacacggcggaggagtaa

SEQ ID NO: 394869 - DNA, 564 bp, Salmonella enterica
gtgatcattggctatgtcagagtatcaacaaatcagcaacatacagatttacaacttagcgcgcttaaaaaagcaaattgtgaactcatttttgaagataaaatgagtggtgcgaaagctcgccgtccgggcctgataaatgccataaaacaccttaaagacggagacactcttgttgtctggaaactggatcgtctcggacgttcaatgagaaatttagttttactgacagatgagttacgtaatcgaggtgttcagtttttgagtctcaccgactcaattgatacatcgactcctatgggtagatttttcttccatgtaatgggggcccttgcagaaatggagcgcgagcttattgttgagcgaaccagggcagggcttgctgccgccagagataaaggcagaacaggaggacggccccctaaattgtccaatgacaaatggattcagataaaaaatttactttctgaaggccactctcgtactgaactggccagaacctttaatatatcaaaaaatactatttatcgtcgctgtcctgtacataaaaaaagtgtgggctga

SEQ ID NO: 394870 - DNA, 150 bp, Salmonella enterica
atggtttccattgtccattattacaccaacctgacaggcatttaccccagtagttcttccttcgataacgcgaccatcagccatatgaaccctgatatcaacacattgtttaaagcatttattgcaaatagaaaagaaatccatttttga

SEQ ID NO: 394871 - DNA, 504 bp, Salmonella enterica
atgttatggcgtatgttgttgtggggagtcaataacggtgatggatatgctccgggatggcgacgtgattacaacacatccaaccctcagcgggatattgcgggcaatgccgctacagctactaaagctaatgcagctaatacagctactaccgcaacaaaactgaaaacacccagaacaatagccggggttgcatttgacgggactacaaatattgacctgggatttcttggatatggtcagttgttaaatgacgtaatagcctcacgcattaaaaatgtgttatacaccaattacacatcaaaaccgattattgtgtatgtccgttttaataatgaaaataacactaaccgtaaaatttacgtaaataactatttgttgatagaaataaacaatgttacagggtatgaccagcccgggtcatgtacgttcatcgttcctgcaggggacgtatatcgggtggaaacaaccgggacgctagttggctgggtggagatgagataa

SEQ ID NO: 394872 - DNA, 420 bp, Salmonella enterica
atgaaaaaaattgtttctgtctgtgctttgttaattacagcatgccctttgagttcatgggctgaatggacaggagatagttctataggcgtagtctattattctgatgaggttatttctgattttcatgtcggtcagtatcacagcagtgcatatttttgcataaaaacagttaaaaaatcaggagaagggacaccggttatagcatgtgcatttgaaaaggagtctacatggcgcccttcatttaatactatgttaggacaggcaaggaatttttatattacagggcaatctataagagtgtatgttgaaccaaatacctggatcgatcaatcctttgtgaacgcgttttcatccaatgcacttgttggactttcttcatgtagtactggtagtactgaatgtttcgggccaaagtga

SEQ ID NO: 394873 - DNA, 459 bp, Salmonella enterica
atgaaaaaaatcacttctgtttgtgcgttattaagcctcatttgttctttcaacgccagtgctgagtggacgggagattacgaaaacattagttatttttcacacgaagttatcagtgagttccatgttggtcagatcgatgggggagcttatttttgcataaaagcggttaaagccgatggtagtagtagtactcctcttattgcatgctcagtatcaaataagagtgtatgggctacttcttttaaagtactcctggaacaagcaaggtatttttacgtcaccgaacaatctgtaaggatttattttgaacaaaatatctggacaaatcaaccctttataaatacattttcaaaaaatgccctcgtgggattctcgtcatgcaacacagcacccgactgctttggccctggtaagcctaagagtgagagtaagagtaagagggatgtggaacaatga

SEQ ID NO: 394874 - DNA, 375 bp, Salmonella enterica
atgataatcacaggaaaaagcttgtcgcttcccggcgtaatgccgacagaacagcaggggaacagaagtgatggcggacccaccactgtaaaaacagacggcgccaccattaccggagacggaaataccacgccgttagcgctggggccgagtgtaactgattgtgtgggaggttatgttctggcgaagattgtcggaggagtatcgggtatcaattacggacaaatttttgcaggtggttatttatcggcggcatcgtaccacccgtcctatgggatagtattcactggcgataccttaccgggggcgtacagatgctgctgcacgccgtcgtttcttgaggggagtatgggtttatatatacgtgtagcgtag

SEQ ID NO: 394875 - DNA, 522 bp, Salmonella enterica
atggcaattggttcaggctggattggttcgcaggctgtggcagaaacagggcagcggtggatgtctgccgcaggttcggcggtgaaagtccccgcacctttctggatgagtgcacttgtcggaaagtcggtggtgagtgttgcgtcgtacgccaatcccgcaggccaggggtatgatacaaggaactacggaatctatgattcaaattatgtcgatatcaccctgacagtgccattttccggtgtggttgcaacaagcaacccaaaccttgtggtatccacttctgatgcgctctttaatgataatacgacggcgggagtgagttacgggacaagcataacggcgaccagcaggcaaaggttcttcattggattaatgtttgatgtcagccgactggatacagaaagaaacatgccaaatactcagtggcagttattgcttaatggcagtgtcgtggctacttatgcatcaaacttctcggcgtactacacatttgacacatccacagatgatgactggtaa

SEQ ID NO: 394876 - DNA, 2115 bp, Salmonella enterica
atgccaataatctcgggcgtcttaaaagatggcgcagggcaacccattgccggttgcaccatccagctaaaggcagtgaataccaccagtgcggtaattatgaccaccacggcgagagtgggcgcaactgctggcgaataccgtattgatgcgttgccagcccgctatgaagtgacgctggcggtagaagatttccggccgcaaaaagtgggcatcatcgatgtttacgccgattccccggatggttcgctgaatgattttctgacggcagcaaaggtggagtacctgacgccggatgtgatgaaccagtttaagttactggcgcaacagtccagggaggccgcagaccaggcaaacgtcgcatctcagggggtatccgcgataaaggacgccgccgaagaagccgccagtggggctgcgttgtcagaaaaaaatgcagcaggttcagcgctggcagccaggacaagcgaaatcaatgctgcggattcagtgacaaaagcagcggcatcggcggccgcagcgctcgccagccagaacgcggcaaagttatccgaaacgaacgcagggcaaagcgcatcagatgcggcgttaagtgcgactaaagccgctgatgcagcactccgttccggaaagtctgcaacagacgccgcaggtcatgcaactgacgcacaaacagcagcaacaaatgcagccaccagtgcaaccgccgcgaagggcgacgcaacgaaagccgcgctgtccgcgacaggcgctacagcggcaaaagatgcagcggtcgctcaggtgacgggttttgatacgcacgtcagccagcaaataacggtaattacacagacagcaaccgccgccaccacaaaagcgaatgcggatatcgatatcaaccgcaacaacgcaatactggcgattaaccagaagcaggcagaagcgaccagtgccattcaggtgagtaaggatgcggcagcgtcaggcgcacaaacagcgttatcaaaggcgacggaggccgctaacagtgcggctgattcgaaagccagcagcctgagttcagattcttctgcgggcagcgcatcggtatcagcatcgcaggcggcaacctcggcggcagcggcacttgccagtcggaacgcagcgggctcatctgaaacaaactcggcagtatcagcagcggcagcgctggcatcacagaacgcggcgaaattatcagaatcaagtgccggtacatccgcagcctcagcacaggccgcattgcgtgcagccgaactgatagccaaaacgccggggccgactggcccacagggtattcagggtctgaagggtgacacggggccatcaggtccacagggcctgacggggccagtcggagcgcagggtccggcaggattgcccggggcaaaaggtgatactggtccggctggccccgccgggccgcaaggtattcagggtattcagggtataaccggcgcaccaggaccgcaggggttaactggtcccgcaggtccacaggggttaagaggattaacaggcgctcagggacttaaaggtgataccggcgcacccgggccaacaggccctgtcggcgctacaggtcagcaaggattaacgggtttaacgggtccggctggcgcaccaggaccaaagggtgatatcggtccggtcggtccgcaagggctcacaggtccggcaggccctgctggtccatccggtcccgttggtccgatgggaccgcgcggttttaccgggccggctggtcccgcaggtccgacaggttcattcagtggaacggtttacggcgatttaacggtgacgggtaacacttatgtcaatgatacctatattcgttctgaccgccgcagtaaacgtaacttccgtacaatggataacgcgctggacagggtggataaactgaaaggccagttgtacgaggttcagactggcggaaagttcgtacgttccggtggtcttatcgctcaggatgttcaggccgttctgcctgacctggttacggcagatgaagatggcggacttttacgcctgaattataacggcgtaaccgggttgctggttgaggccgtgaaggaattacgggcagaactgcgacagttaaaaggagttgcgtaa

SEQ ID NO: 394877 - DNA, 276 bp, Salmonella enterica
atgataaaagaaaagttgaaaaccctaaacggaaagcggtttctgttctctgttgcgatggtgttcatcattgctgcaagtgttatgacacgggctacaataggcggtgttatatggcagtataatattgaactgaaagactggacgctttctatgtttattattcagtcagcaatgatattttttacagcgtggtctttactgttttgttttcgataccgctcgggatttttttcccaagtgatgataagaattgaagaactacaatttatctaa

SEQ ID NO: 394878 - DNA, 1389 bp, Salmonella enterica
  misc_feature (1351)..(1360): n is a, c, g, or t
atgacggccccaaacaacgcaagctatcccattcctgctgattggcaaaatttcgagagactctgcatcactttgatgagtgaaatctatgtttgcaagttccaggtctatggccgtagcgggcagcggcagaacggcgttgatgcgcttggcattcttccaaatggagatgtaatcgcagttcagtgcaaaggtaggtatcaaggttatggtaatagacttaaaccaaaggatattcataccgcagttagagaaactaagaatttcaagaatagaatcgctcacttctacattctgtcgacctgcccaaatgatgtcgcccttgaagatgaagccgtgcagattacccagtcacatttgcttcaaggacgctttccggtaacgttttgggggtggcagacacttgaaaaccaaatcaggaggtttgaatctgtacagcgggaacattttgggtattggttcaagcgtccatccactctacagtgggcaatgcgaattgctattggatgtctgttgagcattagcagtatttatgtagttcatcagtatctgacttatcacaatgcacaggttgatctcagagagaacacggataaagaaatctctcagtttctaactctgaacaataaactggatcatgcatacagcacatgtctgaagacccttaatgaaaaagcatttttatcatcatgggaactggatacattctgtgcaaaacctgtgtcaacatcgttggggaaaattgaatctcaagtgacagaaactgggttaaatatagatgcacgtgcttttgataatctgtccgctattttaaagatatttcgtgaagattataggcaagtgctaattgcgtctgaaagaacccgttcatttgaaaaaaatgtgctacataatatgaaagctctttgtccgccattaaaggataaagggataatagatcgtatgttcatagagttaagagaacctgcagaagctgcacaaataagccagcttaagttttactttattctcagagatttcataatgccaagtttagatgcggtaagggcacaggttcttgtatctactaggcagataaataaccaggagataccacaaacccttatggaagaagcaaaagaactgaaccaacttatcagtgagcgaaataattataatatcgaaccaccacaggtcccatttagtctggcagtagttaagtcaatgagctcgcgggaagtaacaatgactggagagatgcttgatcaagtagaggaggctcgttgggccgatttgatgttgggaagtatgacttttgcaatggagggcaatccaaaagaggttgacgaattggttcagtgtggtttatatnnnnnnnnnnatataaaccagaaatacataatattataa

SEQ ID NO: 394879 - DNA, 573 bp, Salmonella enterica
atgcataaattaatactattaagcctttctgtttcactgttagctggttgtggtgagaaaggcgattttgaacaagccattaacgaaaaaatcagtaaaaagcctgtttgttatagctttaacacacaagaaaacaatgaagatgcctacaataggtttagtaatgttggcgtcgttgtaaaagtaaacgttcgtggtaatgatgtcagccctattttagctggtctcaaaaatgctggtttgttaaatattgaatacgaacaagaaatgtttagcaaagtggctattttatccgctacggaaaaaggtgttaaagctaagttttgggataaaaataatggtgcttgtgtcggccataaagttgttgatgaaataaaagagtggacagaacccagcaatgcaggtagtcaaaaagtgacgcgagtttcatatacatggaaattaactggtgttccgggatgggtagataaagaaattttttctgatgtttttggtatgaataaaccagaagaagaccagatcatattagtgaaaacaaataaaggttggaaagccaaagggatatttgaatag

SEQ ID NO: 394880 - DNA, 1047 bp, Salmonella enterica
atgaaagagaaaattgataatctaattaaagatgggttgctttacttcatggggaataagcttccagatgatttttactctggttttattgagtggaatgagatagcaaataagactaatgatccacgagcacattataacatcgcatattgctatggttctggtgaaggcattaagaaagatattgatttagcaactaagcattacttagttgctttagatggtgggataaaagaagcgtcaactcgtatcattagaatgcatcggaataacattctaacggggctgccagaatcaatccatctatttaaacgctcaaacattaatgaatctcattatgttgatggtttaaaaagattaatatcattgtctgatatgcttattgagaaaggatgtgaagatgtaaaaaaattaaaatcaagatactttgtttttttgtcattgattgaacttcatgttttatattctaaaaaagattttgcaggttataaaaataaatgtcgaattcttatagaacaagggcatgattgggttgagcagttattgaaaatcattgattgccatgttgagacgatagttaagtatgaggagaaaatggatgtaaattattatgattatgttcaggatggaaattcgcgagtaggttctataaagactaaatattatgttgagtcaaaagaatatgagtttattaatacatcagatataaatttaagagtatggacaactaattttcccggaggcagatctgcaaatgtttcgtcgggaagttctattaaatttcaggggtatgtttttaacaaaataaaatccattcctgaaacatacagtaaagaagaaatcatagatattgagttatatccattggacggtattattccttatggagaaggtattattccaaagtttaggttatgctttgtattaccaaatagaataaaaagagaagtgaaatatattcctttttcaatatctattggtaatatcatagggatgataatttttattgctttcttggcgctatgcgcatcacaaattatgcgttaa

SEQ ID NO: 394881 - DNA, 1413 bp, Salmonella enterica
atggctatatatagttttcaatgtaaagttgtagcaagaacaaaacatttaaataatgctattgcccatgcagcatatattaaccgtattgatcttgataataatcgcgatggttccaagtggcgttatagtcatagccatgaagatgtatatcaatctgctgttcttcttccagataatgccgataaaaaattttctgacccagcttatttatggaatgaagtagagaaaaaagaaaatagatctaatagtcgtttggctcgctcttttattattgctttaccaaatgagctaacaccagaacaaaataaaaacttgattgaagattacattaaaacccatatgacaagcgaaggcatgattgtaaattatgccattcatatagataatactaataactttcatgcccatttgatgagcacgacaagggagctagatcctaatgggttagagttttccaagaaaaacgtaatcggcagaacgtggaacgatgatgattttcttgaaggattgaggaaaggctgggctgatactactaatactcatctggcaaagcttgatcatcaggtcaggattgaccacagaacactatcagttcaacgtgatgaagctctcgatcaatttgaaaaagctaccactgcagaagcaaaagcagaagctttatcccgtgccgtaagccttgatagaccagcaatccaacgcatttggcgtagtaagctgaacactgaagaaggtagggctttacgtgaagcacagcagtctataagagatgaacagcttattcttgccgttgaaacaaaaaaaagcatattgtctttaccacaggaaataatcattaataattttgagaatgtggaatccagtattgtaatagaaagactaccaaaacctgacaccagacgaataggtgttaaatcatatcgtgataaaacaaaagtaagtaaagttaaaacattgtcgggtattcctgacgctgatgtaaatactattctgaaaacctcatcttctaaaaaaaatggggaatctaaaagcgcccctaacaaaattaaaaaaagagctactcaacatcaaaataatatatttaaacgtttcacgctcatggttgttgaaatcgttaaatatgtatggtctaagaagatgcagaataatatcgatagagatcatgacaagcgtgtagctgaaaactatgtatttgacgaagtattaggtcgtcatgttgctcgagctgaatatgagaaacaagctaaatttaaccaagatgactataagccaacacatgatgagatcaggcgttttccaagtcgtccgaagaacgagcaggccaaagatgatatcggtatggatctcacctcctccataccgccagaacgctcaataagcaacaatccaaggttgagaccaccacgttattaa

SEQ ID NO: 394882 - DNA, 318 bp, Salmonella enterica
atgagtagaaagatggaaaaaatagaagacagggttctgtatcatcaacaacagcttgcccagctaaaagctaagaaaaaagaagaaattagcaaaaataaagaagttgaaagaaaaaaaagagcaagaattcttattgaaatgggcgctaatatttgtaaagtgcttggtataagctatttagaaaaagatgagcatttaccttctgttattggttatttagatttgaagaaacagaacttaaaaaataatgtatatgctgacagaggtaatgaacttttagacagttggaaaaatggtggcgacagaaacgagtaa

SEQ ID NO: 394883 - DNA, 435 bp, Salmonella enterica
atgcgcactgcgcatatcgtgccactgtcccgccaggccatcaccattctgaaacggattcaggatatttccggtcatcatgagctggtgtttcccggcgaccataacccgtttaagcccatgtgtgaaaacacggtcaacaaggcgctgcgactgatgggctatgacacaaaacaggatatctgcggtcacggattccgggcaatggcgtgcagtgccctgatggagtcggggttgtggtcacaggatgcggtggagcgtcagatgagccaccaggagcgtaatactgtgcgactggcttatattcataaagcggagcatctggaagcccgcaggcaaataatgcagtggtggtctgattacctggatacgtgtcgggaggtttacgtgccgccgtatatcctgagtcaggaaaaaagcaacagggtatcctga

SEQ ID NO: 394884 - DNA, 459 bp, Salmonella enterica
atgaagctctactggacactgaaaagcattcctgaacttacagaccttccggcgaatttaaggaataaaaactttaaagatgcttataatgcgctttatacccattttgaatactgggctggtatagttatctttttcatttgttacataatcttctccagggcatataattatctcttccccgctcagcttatctttccttatagtataatcagagatttacttaccttatctcccggactggttatctggtatcagtttattatttatggcgtgagaaaacattatcgacacatactggaaagaggaaaagaaacaggtgaagaaaatgactcagacaggctgatacgggaagccgacaccagagaatgccaccagtggaaaaatgttcgtcgctttgtcttcttgctttccattataacagtaattttatcttcactgatactggcaaaaatataa

SEQ ID NO: 394885 - DNA, 279 bp, Salmonella enterica
atgcacttcccacgatcctggtattcgcagtatgtgccgtgggtgtgcgttacatcaggggaaggactaaaatgcgcacagcgcacactgttccggcagaccatgagtgaaaatacggtcaacaaggcactgcgtctgacgggttatgatacaaaacaacaggatatctgtggtcacggtttccgggtaatggcgtgcagcgacctcatggagtcggggctgcggtcacgggatacgatggatcgccagatgagccgccaggagcgtaatagtgtgtga

SEQ ID NO: 394886 - DNA, 1128 bp, Salmonella enterica
atgaataaaaaaattttccttgttatgtcagtactactgaaactcagtagcggttatgccaccacaacggtaacatcaaaatttgaaattactaacagagtgatagaaacagcggctatcacaagcacagataatacaatgtcatactctgatgttggtaatggattgtataaattaacagattcatttaacgatgcaaatgcaacaatttctggtacttctgcctctggtggtataggtcttaacagacttggaagtttgtttagtatcactatggtaggaaaaaatctaggccacagatttgttttaaaaggtaaatattcaaatgccagtttaactatgtcaggaattggtagttcagcggtttatggatacggagtgtttaagcctgttggtggttgttctttagttgacccttcgagtgcagtgtttagtggtgcaaccagttttagcaatacaattaattctaacagtaatgtcaatgctgattgtattgacagggttagtgcatcttattggactgggtccgtacgattaaccggggtatccagggatatttatcttgatgttggtgcgctacaaaaagatgcaaattatcgcaaggctccacctgatgattatgtcgggagtggtatttatgcactggacaggatttccacgtatggcaatgacttggttcgtaactttgtatatgttaataatattgaaattattaagaatccttattttgagaagattacattatcatccggtgataatttttttgatgtaaggacaacaggaaataaaattattggtaatctaattataccttatgttataaatggatattttacgccgtacaacaggattattctaaatgttacatcatcaaatggttttaagttgaaagatatcagctcaaaaaatagtataccatattccttatctacaaggataggtggacagaaaatgtattctctcgcgacctccggggtgagtaatggtactgtcactattggtaatctttcgaatgaaagctatgcattacagggtagatttgattcggacttttcaatcgataaatcgactgcgcaagccggagattacagcgatcaattgacagcgatttttcaggttgaattataa

SEQ ID NO: 394887 - DNA, 660 bp, Salmonella enterica
atgttgcatttaagattacttttttttgttgttattgcttattcagcaccaggcagtgcttttcaggttgatactctttctaaaataatcacaaaagacaatgaatctcttttacttaccggagatacaggaagggaatatttatatacttctctgagtcatgttcaggtcgacagtagtggaaagattatggaaacttatctttctccggaagatattgagaactggccagtgatagttgagccaggggaggtggttcttgacaaggaggatgaggtcagagtcaggattaacagaaacggacagcagagtcaggaagatatagttcttggactttcttttattccagaaagtacaaaagataaagaaaaaaaaggatttggtttacaaatgtctgtggggtataaaacatggctctttattcctggaagttctcaattgacaggtagtgtcagtgcgtacaggaaaggtgataaaatatttattaataattcgaccaataaaatattaagagttgtggttaatagcaataaagatagcaatggaatctttatgtctatacctggtgcaaaaaaggagtttgattctgtaaagggaaattttattcttgatttttatcttgcggataaatcagaaaaaataaaagagataaagctatga

SEQ ID NO: 394888 - DNA, 1044 bp, Salmonella enterica
ttgggtagttaccccgacctttcactaaaagccgcaagggagaaacgcgaccagtgccgaacatggttagcggaggggaaaaacccgcgctaccagataaacgtagccatacaggaaacgctaaagccggtaacagtcagggaggctatagagtactggatagacaactacggcaggaacaaccgcaaagaaatagaaaccatcattcagcagatcagtaagcacatttacccctacatagggaaaatcccccttgctcaatgtgaaacctatcactggttagagtgcttcgatcgcattaaccgccagtgtgaaaccgtatccgggcagatgctacagatttgcaaacaggcgctaacgtattgccgtagccgtcgctatgcagtaagccacgcactggacgacctgaaagggatagacgtagggaaaagagcaaacaggagcgacagggtacacacacagcaggaaataggcgagatatggcaggcggtcaacaatctgacatttcacccgtactacaacgaaataatgcggttattgattgtgtttggttgcagaacgggagaagtaaggcaatcagagattaaagagtggaataccaaagaatggctatggacagtacccaaagaacacagcaaaagcgaaatagtgattttccggccagtaccggaacccctacagcctttcatcgagcggttgattaagcagaacaagcacaccgggctactgcttggcgaaatcaaaaaagataacgccgtaagtgaatgggggcgaaccgtgccacataacaaacttaaacaggctaaatggtcgcttcacgacttccgtagaacgttcatcaccatgaacaacgacatgggcgcagcaccccacatcatcaaccacatgacaggccacagcgtaggcacgcagggcgcggtatacaatcacgcccgctaccttgccgaaaagctggacatactaaacaagtggattgatcggctggatcttcttgctggtggacatgagaatgtcatcgtaatgagagaagcaaggcaagcgtaa

SEQ ID NO: 394889 - DNA, 195 bp, Salmonella enterica
atgtcaaaaaaaggcggtgatcgcattattcgcgaaaaggaatgcagggagctttccggcttgtgccgcactgcaagatacataagggaaaaagccgggacatttcccgcgcgtcgcaatatcggcggtcgttccgttggctggatgttgtcagaaattcaggagtggcagaaaaccagacagaaacagacgtag

SEQ ID NO: 394890 - DNA, 489 bp, Salmonella enterica
atgaaaaacacagaacacagacagattacccgcttatgtgctggcggtcaatttatagccactactggaatcacaggagcgattaacgctcacacacaaggcaactacacagcggaaggattgaaccagaacggggcggcacataaaacaaaggcgaccccgaaggatcgccaatggcttcacactaaacaggcacaggatagccgcaatagcaccactacgccagcccttaatgtttgcctggctggtggaggtgcttactcctgctctttgggcttccggcgctggcggcgtttgatctcgccttcgagcgctgcgactataaattgccccgtactttctccaggctctttcaatttttccactgtatcagcaatgtcgtgcggtacgcgagcctcaagttttttcgactttgcatttattgcttttgttgccatgactgaccccattgaacttaggtggctgacagtatacgcacaaaaaaagtaa

SEQ ID NO: 394891 - DNA, 543 bp, Salmonella enterica
atgaaaaatcatatcacacaatctcagatcgtctatttaccgtatgtatgcgccgttaacccggataactaccagcttgcccgctggatgcgggaggcagaaaacgagctgcttgaccgcgtaaagcgtacgcttgatgaagctggcgtagcctggatcgatacgcgcaccaaagagcgcagcaagcccgccgacactgacacaggtcaaattacgccaatggcggaagttggaaatactgacagcgtggagggatgcgaagatattcgctacgccatacgtcaacacctgtactacggcgataagctaacccgtaccttctacaattcgcgtgtattcatctgtaagaacgccgcgcaggaatatgcggagcggtacaaccatgaatttaaaaccgggcagtttactactcagagcgaagtaacggagttaacgccgcagattgtcaacgagatacgtagcgaatacggatggaacaacccgacaacggtttaccgggcattgcctgataactggcgggaggcttccgacaatgcgcaataa

SEQ ID NO: 394892 - DNA, 225 bp, Salmonella enterica
gtgctggcggttcaactgacgttcgtgacgcaggcgggcgtagaaatagccgctttcggtgttattgctgtccgggcggttgtactggtcgccttcgctcaggaaaccatcggtatagtggtaatcgttgccgtaagtggttttgtcatcatcgtgggtcaggtccgcatccgcgttcatgatggcgtcagcggtacggtagttatagtcatgcgtactgactga

SEQ ID NO: 394893 - DNA, 363 bp, Salmonella enterica
atgcggcgtggagaggtggatattctcttttccgcgctcatcctgcaggcgcatttcattggctgcaggcgtgagaaggatgttgcgtttgtaattttcgatggtgacgtggtcgggatgacgcgagtcatgcagcgaccaggcaataaatggcttgtccgggtgaccgccgtcaaacatcaccgccacttcggtgccctgtatcagcggcaggtgcagaccgaaattgtcaccggcataatcgcgggcacggcgcagccacgggctttcgccgccctgcggccacgaatctttatcgaagtcaaaacgcacccggtagcggcccattttgtcgatatggctgtagatatcactggtctgtga

SEQ ID NO: 394894 - DNA, 732 bp, Salmonella enterica
atgaatttaaacaagatatatgaaatcccacctactttgaggctatataatttagatgcttacaaacgagaagaacatgctaaggttttgtatgttgagaataatattgctgtgtttgaccaaaccattttttatgctgagtctggaggacaaatttatgatacaggctcgattgatgggaatagggttgtttctgtgaaaaaataccttggagaattaagtaaagtaaaaagaacagatattaatgttccctcggtaaagataaatacacgaatagttcatgaattttctcaacctattaatttcaatgttggagatgtggtttcaatgtcgattgattgggagagacgctataaaattatgaaaaatcatactcttgctcattttttattttctggactaaatagtttttttattaggaaaggcatagacctatttataaaaggttgtgccataaacgacgaaaaaggaagcttttcgcttaataataagataacaagtgaggatttgggttatatagaggaaaatatttcatctatttatgaatcaggagttaatataacaatgacacctgaaaaaaacaatgatgaggtttattattggacatataaggatgttattatcccatgtggtgggactcatattaaaaatactgatgaaatttctgattttagaatatggaaaaaatcagaaggtaaaaacaaatcgaaaatatatataaaagaattgtaa

SEQ ID NO: 394895 - DNA, 885 bp, Salmonella enterica
atgaatatactagatcatatggggaataccccgatagttgaaataaaaaacatttacaaccaaaaatttggaagagtatgggttaagcttgaagaattcaacccaggaggtagcataaaatcccgcgtcggacttaagatgataaatgatgcggaggaggcagggttactgtcaaatggttcacgacttatagaacctacaggaggtaacacaggaatagggttagccctagcttcagctattaaaggctacaaactaactctcgtaattccagataactttagtgaagaaaaagttaatacactaaaaagatatggggttgatattcttcgttcagatcatcgaactggtcctggctctcacataagaatggtacatgatatattaaaagaagatagtcaatatattttcttggatcaattttcaaatatatctaatccaaatagtcattatttatttacgggtaatgaaattattatgcaaatgaaaagtaaaatatccgcatttatttgcggagtgggaagtggtggtacaattgctggtgtaggtcggcgtttaaaagaattaaatacggaaataaagatcataggagtacaaccaaatggctgtgatattaaaaatggaatttttacaccacataagatagaggcaattgccgttggcattattcctccatttattgactttgatcaaatagaccattttatcgatgttgacattgaagaagttcaagaacttagagattatctaacacggaaagagagtatttttattggtatttcatcaggtgcgaatatacttgccgcaatgaaactttccaaacagttcaaaaatactgagaatatagtaacagttgctcctgatagtggtagaagctacatatga

SEQ ID NO: 394896 - DNA, 636 bp, Salmonella enterica
atggataaaatatcgattaaatttataattaatggattaatttttaaaattctttatgataataatatattttatctaaccaatggagatataagtttaatatatagattatgttatgatgacctttatgctttgtcggaaaaagatcccgcaggaagacaggatttaaactatattgctattacttattcatcctattttgcagttctttcatatagaatatctcattttatttataacaaaggattatttatagatgcaaaaatcataagtgaaattgccaaaataaaaaccggaatagaaatacatccagccgcaatcattggcaaacgttttgttatagatcatggaactggaacagttataggggaaacatcaataattggggaggactgttatattttacaatcagttattattggttcgtctggtatcgcaaataatcctatagggaaaagacacccagtaattggtaataatgttgaaataggtgcatttgttaacttattaggtaatattaaaataggtaacaatgtaaaaatatcacccagattaacaataacaaaatctattccagataattttattgtaaccaagaaaacagaaattgaaattattaaagaaataagaggttaa

SEQ ID NO: 394897 - DNA, 549 bp, Salmonella enterica
atgaataaatacatattttatgtgattttatcattttttatttttccctcattatctttcgctgaaaatgaaataagctacacaccttctgtgactgtcaggggggtgttcacggggtttgttttcgaaaataatttgcctattggggggagaggtgagtctttgcgctatgatttagtggaagtgagtgatcccgacttccctttatctcagtatccgtatgggatagtccagttcagaaaaaaagggggcaggggcggtgatatttgtgctcagtcagagaaaggtaaaataatcgtgtttttctgttcatctggcggagataagagtttctcagaaacatatttttctcttattccaacaaacacaggagctgttttaataaaaaatatcgtaacagggaagtgtctgtccgctgacagtggagatattggcttccctgagctggaacaatgcatgctggatcagccacaatcaggcgagatatacaagcaactatggttcctggctccggcattttcttcctccagcatgtctccacttttataa

SEQ ID NO: 394898 - DNA, 831 bp, Salmonella enterica
atgaaaaagataatttccgctggtctctttttagctatgacaatgttcagtatgggtgtaaatgctaacattggtgattataagataatgacatggaatttacagggatcttctgcagctggtgagaataaatggaatattaatgtaaggcaactggtaacaggaacggatggtgcagatattcttatggttcaggaggcaggatctgttccggctacagccatgctgaccggtcgtcagattcaaccagtaggagtggggatacctattgatgaatatacatggaatttaggaacgacacgacgtcctgatatccgttatatctatttctcccgtgttgatgtgggggctaacagggtgaatctggctattgtatcccggcagagagcagagcaggtttttgtcatcagacctgcgaccgtggtatcccgcccggttattggtatcagcctcgcgaacgatgttttcttaactacgcatgctcttgctggcggggggcctgatgcacttgccatagttcgtacggttaatgaattttttaaccagtcatcccggttaggtttttcatggttactggccggtgattttaaccgtgcgccagccagacttgaaaatgatttggtgctggagcgtctggacagagcagtcacggtcgttgctcccgccgtggcgacacaaagtagtggagggattcttgattatggggttatcgttgaccgctcaccatccgcaactttactgggagcgactatttcgtttggtaatatggcatcacaactgtcatccgatcatttaccagtgctgtttaacagcgcgtcgagtaataaataa

SEQ ID NO: 394899 - DNA, 648 bp, Salmonella enterica
atgaaattcaaaggaatatatctttctttatttgttctttttttaattagctgctcctctcatcagcaacaacatgaagataaagggaatatttatccttcagaggattttcctgtacctccagcattgtctttaccatctgctggagtaagaattacgcccgaaataaactctaatggcggggtatcttacacgtcgctgagaactattatggcacaaaacggtagggtactgaccgtatgggcactggctgaaggtaactggttatgggcatatggtccatcagcatcatccagttttggtgaagtaaggaactggcatatagttccgattaataaaaacggtaaaaatattttcaaatttgtgaatggtgtgacaggaacatgtatagaggcatataaaaatggactaattcattcctcctgtaattctgaaaatagcgcgcaggattttattctcattcctgcaaccaatggtggcgtttttataaaaagtctgtcgcagaataaatgtgtaaaatacgatattgtcacgcacactatctattccactgtatatctgacggaatgtgtttctttgaaagataaaacttatgaccagatatggtatatcgcacctgccttaacaaataccattcctttaccttga

SEQ ID NO: 394900 - DNA, 993 bp, Salmonella enterica
atgacgcgtcacagtctgtcataccggctgaagccggtggcgtttgccctggtgctggcagccggttttccgtctgttaccgaagcggcagttaacaccgccaccctgattgctggcagcgcctcgccctcgtgtatcagctggcgggtgaagggtatctgctactggctgttctgtacgccctttggctgtacggtgaaaacatcggtgaaggtggagcacttcatcccggaggcggtggtgtccgtctaccaggataagggggaaaacccctggacggagatgaagacagtcagcggcgcatcgggtggggtggagaatgccgtcagttcagggctggccggactgagtgccggcggcgggcagtccacggcaaaacggccgcagggcagtgagagcctgctgagtacccgcttcaagtatgccgatgccattggtcatccggccactgctcttattggcggacagataccggggtattcctgcaaaagtgccgccaccccgctggttccctacttcctgagtacgctggacagcctggtctggcgtacgggcctgccggaagccctgtatccggaggcgctgatacccggaaagcgtgacatcggcagtatgaccggcagaaacatgtggggcaacgtttacccgcgcagtggttttgtcacccagcaggatgactataaggccggggccgtcatagcccagcgggtggcagatatcattacccgcaatggacaggttcacgtctaccagccactgaccggaaaacgtcgaccgggatactggccgccggaaccggtgacggaaaacaccggcacgaaaaaccacaaatggcagagtcttacccccgcagcctcgcagtcctgcgcagtattcccggatacgggcggaaaggtggctgaagacggcaactacgcctggacgctgtggcagccgtacagttgctgcaaaccccgcggacagacattcctttacagcaccgatttcagctga

SEQ ID NO: 394901 - DNA, 423 bp, Salmonella enterica
gtgtcccgtaatcctgttattccatcactgatactgagtgtgctgttgttgcccctgtcgtcccgggcggcgatggtggtgtacaccgaccatgcgcatccgcccgcaggcgtgaccggcgatacccgcgtggtctggctcgatgcgccggaacaactgcagcagtcgctgtttggttccctgacgtcagaccccaaagaagcagaactccgggcgcaggcggtgattcattccgcaggctggcagcagaaacaggctgaactggcgcaggcttaccggggactgctgcaggcctggcagacaggactggagaaatacccggcggtggtgtctgacgaccggtatgtggtctacggcacagcggacgtggtggtggcggaagggctgttccacagccacaaaacccgggaggtacaacgatga

SEQ ID NO: 394902 - DNA, 579 bp, Salmonella enterica
atggatcgcacagcatttaaccccgaaccaacgtcaaccggcattcggtttggaaatcgcgtgattggatattccgcagctattcgtcagctcgacaacggtcactatgacaaaagcattgcggaaggaatggaactgctggcctgcatcatggaggcggtagaaagcaactggataagcctgagtactgaaaaacaaatcattatcttccgctggctggttgtcgcggtgttcatcgcggaagaacaggagaaaaacggaactgttgatgttccgaatggcgacggcggattcgacacagccgttatctattcaggccagcgcggttcaatcagtgtctatccctgcgccgaacgtttcgcactcgctaaccacgttgagagactcgccatcgagaagtatggacgggaccctggtcagcaactggcactgagaatgtatcaggacatgattttttctgatgatcaatacagtttccggctatctgcaacaggccaggaaggtttcgcactgctgcacgacagctttatcgaacaaatccagaccgaaggcatgccagacatgccggttatgcactag

SEQ ID NO: 394903 - DNA, 402 bp, Salmonella enterica
atgcagaaaattgactacatcgtaacatttatgggtgattacccatgcggtggccgccatccacttacagtaaaaacgaattccgctgatgtctcaggtgctatctgcgctacaactgaagctatcgtagacgaccgcattgaggctaccaacctggtgctgatttccgtcgttcctgagtcccatccgctggccactgaggaagtaaacagcgacgggacactcaaaccctgtccgttctgtggtaacccacatattagcctggtggagactctcagtgagtttgatggggaaaacacctggttcgttaactgcggatgctgcaacgcttcccaactgccagatagtaaagaaggtgctatccgcaactggaaccagcgcgacgaggaggataaagcatga

SEQ ID NO: 394904 - DNA, 402 bp, Salmonella enterica; identical to SEQ ID NO: 379236

SEQ ID NO: 394905 - DNA, 312 bp, Salmonella enterica
atgaatacagaacaaagtctgcatgaaatgaattatacctggttaagcctggctcaaaaaatgctgctgaaagacaaaagtgtggccatgttcaggctggggctgaatgcccggattgccggtattattggcagaatgacagagaacgaactgcataaattatcggcacatccacattttatctttaccctgcgcattcaggaccccgacgctctggagtgtctgctgcaggattcccgggttgaccatctggccccaatgcatgcagcaatgccgtgcctctcagacacagggggacgccatggcatctga

SEQ ID NO: 394906 - DNA, 1446 bp, Salmonella enterica
atgtctcaatgcctttatcctgtagttattgcaggaggaacaggaagtcgtctctggccactgtctcgagtactataccctaaacaatttttaaatttagttggtaattctacaatgttgcagacaacaattgcgcgtttgaatggaatcaagtgtgaaaacccaattgttatctgtaatgaagaccatcgatttattgtggcagagcaattacgacagatagataaattaacaaaaaatattatacttgaaccaaagggtcgtaatactgcacctgcaatagcattagcagcatttattgcacaaaagaaaaaacctaaagatgacccattattattagtccttgcggcagaccattctataaataatgaacaggcattccgagaggctataataaaggctattccttatgcagatgctggaaagttagtaatgtttggtattattcctaatgtagcacatacaggatatggatatattaaacgaagcgtttcagttgatgctgataaacattccacagcatactatgttgctaattttgtagaaaaacctaatattcaaaaagcacaagaatatattatgagtgagggttattattggaatagcggaatgtttctatttcgcgccagtaaataccttgaggaactaaaaaaatttagaccagatatttataataaatgtgaatctgctactgctacagctaatatagatatggactttgttagaattaacgagactgaatttattaattgcccagaagagtctatcgattatgctgttatggaaaaaacaaaagatgcagtagttctaccaatagatgttggttggagtgatgttggttcttggtcatccctctgggatataagtcaaaaggatgtccatgggaatgtgtgccaaggagatgtgatcaatcatgatagtgaagatagttttatttactctgaatcaagtttagtagcaacacttggagtaagtaatttagtaatcgtccaaacaaaagatgctgtactagttgcagatcgcgataaagtacaaaacgttaaaaatatagttgactcactaaaacagagaagccgtactgaatactacatgcatcgtgaagtttttcgtccttggggaaaatacgatgcaatagatcagggtgataggtataaagtaaaaaaaataatagtcaaaccaggagagggattagacttaaggatgcatcatcatagggctgaacactggattgttgtatctggtaccgcgaaagtatcactaggtaataaaattaaactattggttccgaatgagtcgatatatattcctcagggtgcaaaatacagtcttgaaaacccgggcgtgatacctttacatctgattgaagtaagttctggcgattaccttgaatctgatgatatagtgcgcttcactgacaggtataacagtaaaaaattcctaaagtga

SEQ ID NO: 394907 - DNA, 450 bp, Salmonella enterica
atgtttattccttcagataaatttagagaagttatcaagttaacaccattaatatcaattgatatattaattgaaaatgaaaatggtgaatatctatttggtctcaggaacaaccgaccagctaaaaaccaattttttgttccgggaggaaggatccgtaagtctgagtttattgaaaatgctttcaaaagaatatcatttatggaattaggtaaagagtatgatatatcagaaagtttatttaatggtatatgggaacacttttatgaagagagtttcttttctgataccgatgcaacacattatatagtgctctgttacaaacttaaggtgcttaagaatgaattgaatctaccagctgatcaacattgtgagtacatctgggtatcagaagataaaataagcaacttaaataatattcataagtattcaaaggattactttttgtaa

SEQ ID NO: 394908 - DNA, 1029 bp, Salmonella enterica
atgaataaaatcagtatagttatcgctgggccagcatatagagaatttgatatttattactctatcaagttacttcgaactcatttccccgaatcagagattattcttagctcaaatgaccatttactattaacacatgctaaccgattaggcgtttttgataaaattgttactgttgaaaattctggggaattaccaagcctaaaatttgaatcagtgtctgatagaggtcaacctattgtttgcaataacataaacaagcaaataaagacatctctccacggaatacttgaagcaagccatgatcttgtattaaaaataagaaccgatcagattttgatgcagaatcatatcatatcactatggaatttaataaaagatattcctaacgataataaaaaaacaaaaggtcgaataattacatccagcattttctcaataaacccaagatttagtgagcggatgccttatcatataagtgatatgcttcagttcgggtttaaagaagacctaattcggtactattcagcgccagaatatcctttcgattattctgtatggtatgaaactcacatatatgcttctcacagcaatcgtaacgaaaatatttttcgttccaggtatgcagtagaacagtggcttacaatgaattatatttttggtgttaatacgccctttccaattaaataccacaatgatatatcgcataaaatcatcaaagattttgaatatatctttcctgatttttttattatcgcccatccaaaagatatttcacttcgcgcatctaaattcaattcagcaatgaattatgtcaataatcagtgctattcgacttatgactcattgatatttttgaaagaaaaatacaaattaagcgagcacattctaagtaattataaagccatggggttgaataaaaaaatatataagcacttaaatgcaattcttaattcatatttaatacatatagttatacgtcatttaccagtcagtatacggaagtttttaaagcgaattttacgttga

SEQ ID NO: 394909 - DNA, 972 bp, Salmonella enterica
atggatccgataaagaaaaaaacagcagttatattatatggttacatgaggacatttaaggatactgcgccacatttaattaagaatatacttatggttaataatgctgatttgtttattttttgctatgaaaatgaaggcacatcgaatatcattaatatggaaaatgtaaacaatgaaaaaaataaaaatgctgtaaaatgggattcagaaggtggtttaataacagaaactttggtaagaagtatttacgaggatttccttgttgagtttagcatcaataagtataaccgtaatttctttatggaagagtcaaaaaatatatttagcccggttctacctattgaaagattttattcactttactggaacatgagtaattcagtaaaaatgcttaatcgctattgtgaaaaaaacaatatcgaatacgaatcagttttaattactcgtcccgatctaattttttacgatatagtcgatctctctgtatgtgatagaaaaaaaatatcagttccgactcatggcggaaactttttgtttggggaaaagcctaaaccatactttgcttgctattataagaatgttgagcgaggtgagttgataccatggaatacagtggtcttttctgatcaatttatatactcaagctttgataatattattaaattattaactctgtatgagaatttatcattctataataaaattggtgtgccagtatgtcacccggaaacagtactatattatcatctatctctttctaataaaattcccgtaaatacaatagatattgtatatgaaattttacgttctactactgtaaaagtaagtaatgaattactcttggcattcccacctcagaaggacagccttgatatacatagcaatactaagcaagtaaatctgcctgttaggtctctttttatccgttatttgaagcgcgttgctaaaactattttaaatcaaaactaa

SEQ ID NO: 394910 - DNA, 1167 bp, Salmonella enterica
atgattacatacccgcttgctagcaatacttgggatgaaaatgagtatgcagcaatacagtcagtaattgactcgaaaatgtttacaatgggtaaaaacgtcgagttatatgaaaagaattttgctgatttatttggaagtaaatacgctgtaatggtgagctccggttctacagccaatctattaatgattgctgctcttttcttcactcataagccaaagctaaaaagaggtgatgaaataatagtacctgctgtatcatggtctacgacatattatccccttcagcaatatggtctaaaggtaaagtttgtagatatcaataaagagactctaaatattgatgttgatagcttgaaagatgctatttcagataaaactagagcaatattggcagtaaacttactgggtaatcctaatgacttttcaaaaattcatgagataataagcaataaagatattatattactagaggataactgtgaatcaatgggggccaccttccaaaatcagcaggcaggtacattcggaatcatggggtcgtttagttctttttattctcatcatatagctacaatggaaggcggatgcgtagttacggatgatgaagagctataccatattttattgtgccttcgagctcatggttggactagaaatttaccaaaagaaaatatggtcacaggtactaagagtgatgatatttttgaagagtcgtttaaatttgttttaccagggtacaatgttcgcccacttgaaatgagtggtgctattgggattgagcaacttaaaaaactacctagttttatatcaaccagacggtccaatgcacaatactttgtggataaatttaaggatcatccattcctcgatatacaaaaagaaattggtgaaagtagctggtttggtttttcattaattataaaggaagatactgatatcgaaaggaaaagtttaataaataagctaatcacctcaggcattgaatgccgaccaattgtaaccggaaattttctcaaaaataaacgagtgcttagttatttcgactactctgttcatgatactgtagtaaatgcggaatatatagataaaaatggtttttttgtaggaaaccatcagataccattgttaaatgaaatagatttcctgcggaaagtattaaaataa

SEQ ID NO: 394911 - DNA, 210 bp, Salmonella enterica
atgctaaaacagcaggatatgaacgaaacagcccgtaaagtatttaacgagttaagcaacgaaccggcgacggttggggaaattgcacagaacacacacctgacgcgtgaacgatgccagttgatactgacgcagttagtgatggcggggttatcggactaccagttcgggtgttataagcgccttccggaaggagggtatccgttgtga

SEQ ID NO: 394912 - DNA, 420 bp, Salmonella enterica
atggaaataatcccgataattgaattgcttttagctgctgccgggatatttatacctgcatttattggtatctgcttatcccgaagaagtgcatttaaagcagcatcagcgccattgttgataaagctccttgaagaaagaacgatgatatccaaaggctcgtatccatttcgaacccttacagaagatgagttatttaaagttttcccgttcgccaccaaaagaaaacaaaagcgactgctggtggcgtttcaccgctatatgaatgctcatgataaagtcgcaaaaatcaggcactatcacagtgagcgcccgtatgacggtgggcccttttttgcatttagctttactgtgtccaatcatgatgaagtgcttaaagagatagacccacttatagatgagcttacgctacgttgttga

SEQ ID NO: 394913 - DNA, 129 bp, Salmonella enterica
atgtttaatatgtataattttatccatgaaaccctgccaatatttggcctgggattatcatgttttgggcttgggtacatcctcggctatgtgcgtggatgtataatgttctactggcatcacaagtga

SEQ ID NO: 394914 - DNA, 282 bp, Salmonella enterica
atgaaagtctacatagcgggtccgatgagcggactccccaacttcaaccgggacagatttaacgagatagccgggctggtggttaaaagcggcaatatcccgctaaatccggccattctccccgatggtctgccggaacgtgactacatggctattggtattgccatgctgcaatgcgctgacgccatttgcctgatcgagggctgggagaactcagcaggcgcaagggctgaaaaagcgctggccgataagctaaatattcccctcctcagcttctggtaa

SEQ ID NO: 394915 - DNA, 591 bp, Salmonella enterica
atgaaactgaccgtaggtgatataagattttccgaatccggttacgcatctgcgaccgttggtgtcgggatcggaacatttccctttttgcttttttcaatatgcaagatggatgtttctgttccggtggtggatggaaaggagattaaggactacgacgaagatttaaggaataaagcccgtgaagtaatcaccaaaatatataaagagattgtttgcggcgagaatgatgttggcgagcagagtaccatgctgatacaggcagcaaattctaattccatacaaatgatgcaggcaagcattgatgaactgaaggagcaaataaccaggcttcaggaagaaaagcaccccaaaaaagaggcaatgaaatcttttctggttgaagatgaaaagatagtgatgaacgcgaaacgttttacgattatcaactcgccagtccgtgataacctggaagaacgcgttgctaatctggagttgcagcttgcggaagtaaaagaatctacaagctgccatatgcaattaatgcagaataacattcaagaaataaagagcagaactattcagccccatctcagcaatcgcagttgttga

SEQ ID NO: 394916 - DNA, 645 bp, Salmonella enterica
atgattccactattgcatgctaaaaaaccgtattatattaaagcaatagatatatctgaaaatatgattaacatagcaaggaaaaaatatccgcttattgatttctatgtcgcagatataacaaatctcccctttaatgacaattcttttgatcttgttatatcaaattttggagttcaacatttttacaatatcgaacaatccttttctgaaatatcgagaattttaaaaccagatgggatattctcttttactatatgggcacctgataatctaaacctagcaggctatgtccttaataaagcaattactgattgtaaaatctcaagccaaaatttacctgctggccccgactatcatatctttaatagtgataacctattgaaaaaactggtttttcattgtaattttgataagcaacatataaaaagaacacttgtacaaaaaatttgggagttaaatgatattgatgacttatttaattctgaaaaaattggttctgtaagatcaggtgctcttcttaaatcacttgacaaggagaactcagagaaactgaagttaacaatgagacatataatattagagaataaatggattcaacttccaatggctgcctatataattaatgtgagaaaaagaaaatga

SEQ ID NO: 394917 - DNA, 720 bp, Salmonella enterica
atgaaaaatcgcctcttagattttaaattaggaataagagattgtctgccaacgatctttggttactggagtattggattcgctgccggagctattggctcaatttcgggtttctccttgactgacataatattattatcagcatttttatatgccggttctgcccaattcttattctattcattatacacaggtggagctgagatagctgctattttagttgctgttttattggttaatattagatatcttttaatgagttcttatatggctcgtttttttaatggcgcatctataacagaaaaatttattagtggaatgctattaactgatgaaacatttggtgttgccgtgcaaaaaaccaataaaaaaaatgaattatcgttttggtggatgcttggcctgaatgtatccgcatatataaattgggttatttcaaatatttttggtgcaatatttgcaaattttatcccatattcattttcacagaaacttggttttagccttactgcaatgtttattggtttacttgttctcaattttttcagtagtaatcgtaaaaggttggagttaaccgcgataataatagcatccatcttgataattttattaaatacacatgccaattttgatagtaacttattggttattggttcaacaatcatatccgctactatatgtgcaattattatgagagtaaataaaaatgagcaatcatag

SEQ ID NO: 394918 - DNA, 984 bp, Salmonella enterica
atggcaatacgcaaactcgatgacgggcgctacgaactggacaccagaacgggcgggcgcggtagtaaacgtgtaaggcggcttttccatcgaaaatctgacgccgtggcctttgagcgttacatgctgggaaaaatcgagcgtaaggaatgggacgacagaccacaacgcgacaggcgaccactgagcgaaattttagaatgctggtggctgtaccacggccagagcataaaaaacggtgatattgagaaaaggcagcttaccgggacgattacggcgatgggtaatccgtcagtgtgtgaactggataaacgcctgttagcacattaccggatcgccaggatggggcggggcataaaaccgtcaaccattaaccgcgaaatatatcgcctttccggtatgttcaccgcactgattaagatcggcgagttcgccggggaaaatccagtacatggtttaccgccgctggcagaggctaaccctgaaatgatgtacctgaccacggacgaggcgcgggtgttactttctgccctggagggtgattatcgccgcgtggcgttgttgtgtctgagcactggcgcaagatggggagaagccagcacgttaaaagcgccacaggttatgcatgggcgcgttacgtttctggaaaccaagaacggaaaaaagcgcacggttcccatttccggcgaggtggaggaagaaatcaaaacccacgaaaacggccagctttttaacgtggattacaaaacgttccggcgaaagctgcacagcgtaaagccggatttaccgaacggccaggcgacgcacgttctacggcacacgttcgcaacgcatttcatgatgaacggcgggaacatcatcacgctacagcggatattaggacacgccaccatacagcagacaatgacctatgcgcacttcgcgccggacttcctgaacgaggcgataaggtttaacccgctgggaggaaaagcgacggtttga

SEQ ID NO: 394919 - DNA, 255 bp, Salmonella enterica
atgcaggagcataacaggccgatcctgagcattaagcgcaatccgtctttgatgtaccagaaaccgccacaaaagccagagagtgaacagaacgtcgcgcaggtggatcagcagcaggccgcgaccgccagcagcacaaaagcgaagcccaaatataaagggcttcccgaatggaaggacgttaaacaccgatttgatctggaatgtctaaagctattcattaaggttgggctattaactggcaattcaaagtaa

SEQ ID NO: 394920 - DNA, 1248 bp, Salmonella enterica
atgaacatcacggggctttatgagcgttatgttgaatggtacctgagggagaaagctcctcatctgctggcggtggttgaccagcaggtggcactattaagccaggtgaaccagaacaggtcattacaggactatgtcctgcgccgcgctgccattacacaggtgctcgaaagcccggaagggcaggccctggaagataccgtcctggagagcctgagcaacgcggtccgctacgaccagaagtacttcgataaaatagtggcttcccttttgccattactggaaaaactgaccagcggaaaaatggccaagttgctgtctcctgactatcgtgacatgaatgacagtcgtccgcttctcgactggcaacaggttattcgcaggaagggtattgtgtatatcggccttgatgcgatgtcagatgcggatgtggcgtctgccgtcggcaactctatgttcgctgacctggtgtcagtggccgggcatatctacaagtttggtcacgacggagaccagcctgagagcgtaataaaagagaaaaaaccgtccatcagcttgcactgtgatgagtttaacgaactgatgggaccggaatttattccgatggtaaacaaaggcggcggtgccgggattgaagtcacggcctacactcagacctggtctgacattgaagcccgtatcgggaacgcggcaaaggcggcccaggtgaccggaaacttcaacaccctcattatgctaagggtgagggagaaaatgacggcagaactgctgaccagccagttgccggaagtggatgtgtacaccaaaaccctggtttccggcttcactgatatctcgaatccggagcagggggcgcacttcacctcaaacacccaggaccgggtgagcagcgtcaggatgtcgctgatttcgacagcggagcttatcagtctgccgaagggacaggcattcgccctgctggagggggggcggctgtggaaaatcaggatgccgttgccgtctgatgccggtgatgttgtgatgccgccggatatgctggcgatggttacggatatgcagaagggttaccgtaccggtgacgcctggtggccgccgataacgacctttgcggacctggtcacaccggtcagcgaaaatacgcagccagacccgacaactgtgatcccgagagctgaagcggcagtacaaccgccggtgcctgacaaagccggggatacggagacagaacccgaaggagacgatgagtaa

SEQ ID NO: 394921 - DNA, 1311 bp, Salmonella enterica
atgccggacggtgaagttatcggggagcctgaaaaccccgtcatgttcaacggcggcagcgcggcggcttccggttatacggtatcaggcacgccggatagctggcgggattctgtagcccgtcttgctggtggcaatccgatgatgatgcttggcgttgccgcatcgctggcagcgccgctaatcggcctggtgaatgctgatggcttcggggtgcatttgttcgataactccacggcaggcaaaaccacaaccgcagatattgccgccagtgtatggggctatcctgatttgttgcgcctgacctggtacggaacggcattagggatagccaacgaagcggaagcccataacgacagccttttaccgatggacgagataggacagggatcgagcgctaaggatgtcgctacatcggcctacacgctgtttaacggtacggggaagctacagggggctaaggaagggggaaaccgtgagctacggcgctggcgcacagtggcaatcagtaccggagaaaaggacattgaaacgtttctggcggaagaagggatcagggctaaagccggtcaactggtgcgcctgctcaatatcccgatggaaaaatcaacggttcaccatgagcacggcaacggagaacgccacgctaaagcgctaaaggccgcgtatacggaaaactacggagctacagggcgcgaatgggttaagtggcttacccgccaccagcaggaagctaaagacgctgtaaaggccgcccgtgagcgctggtgcggtcttatcccggagaactacggcgagcaggtaaaacgcgtggccgaccggttcgccattctggaagcggcgcttattgcagggcagtaccttaccggatggagcgaacaggccagccgcgacgcaatacagcattgttttaatgcctgggttggtgagttcggcacgggcagcaaggaacaccaacagatgattgcgcagtgtgaagcgtttttaaacgcctacggttttagccgttttgcgcctttgccctatgatccgcgtgatttgccgattaaagaccttgccgggtatcgccagaagaagggcgacgatgaaagccccacgattttctacacctttccggcagcgtttgagaaggaggtagccgcgggctttaacgccaaaagcgttgcggaagcgctaaagattgccgggatgcttaccccgccaggtagcggcagaggctaccagaggaaaagcccgcgcatcgacgggaggcaaataaacgtttacgtaatcaaccacatgccggagggagaggaacaaacggaaaattaa

SEQ ID NO: 394922 - DNA, 384 bp, Salmonella enterica
atgcttgataaccgcaccgccagcgccattgatctggcattcaaaagaaaacccctgcccgtctacgtggtaagccgtcatgggtacgttaagcgttgttttagtcgtgataccgccctgcagcacctggcaaaattcatggcgactaaggtgttttggtgcgccgggttaccagttgaatatgcagcagtgcgcgaaatgcgcccggagggtgaggtctgggttaggcagggaagaaccgtcgagtttaatcaagcccaccagcgttgcatccgccgactacgccgcattctgacccgtaagcgtgaaattcagaaatggaatgagaaatacgatgcatgggctgtccggtgggacgatctgatgaagcagaaaccgtattga

SEQ ID NO: 394923 - DNA, 219 bp, Salmonella enterica
atggcaaagaaacgcagcagtaaaacccggcaaggtttatgcggcctcacgctggcacaaggtcaccgactgacactggaccctgttaatgaaaatgcccagtgtgagcagtttgtagctcagttcagcaccagtgacggcaacgtgcggatgccgctcaaccgcagtatgcgccgttatgcaaaacacatcggtattgaactgaaagaggctaaataa

SEQ ID NO: 394924 - DNA, 855 bp, Salmonella enterica
gtgaattctggtaacggtgcagctggccctgtcattgatgatattgaggaatactttttacaaaacaacattcctgttacatttgtgaaaataaataatacacctgatggacatttccctaatggtattcctaacccattgttacctgaatgcagagaagatactagcaaagccgtaatagcacatagtgctgattttggtattgcatttgatggtgattttgatagatgctttttctttgatgaaaagggaagatttatcgaaggatattatatagtcggtttattagcagaagtatttttgggaaaatacccaaacgcaaaaattattcatgatcctcgccttatatggaacacgatcgatatcgtacaaaaccatggcggaaaacctataatgactaaaaccggccatgcatatattaagcaaagaatgcgtgaagaagatgctgtatatggtggggaaatgagtgcacatcattattttaaggactttgaatactgcgatagcggcatgattccttggatcttgatctgtgaacttttgagtataagaaataaaagtctgggggcgttggtgtgtaattgcataaatgcttggccagcaagtggagaaataaactgtacattaagtaatccacaaagcgaaatcgataaattgtttgtttattataaaaagaatgccctatcagttgattatacagatggattaagtatggaattttctgattggcgttttaatattagatgctctaatacagaacctgtagtacgattgaatgtggaatccaaaagcaatgtgcttcttatgcaggaaaaaacaagagaaattttgagttttataggaaaacgtgtttaa

SEQ ID NO: 394925 - DNA, 516 bp, Salmonella enterica
atgagaacaacacctccacatcttcatccggcaatgtccggtatcaggcgctatgtcgagcgtatgcccgaaggagcaacgcttactcaggtatcgcagaaggtaagggcctatgcccggctggataaaaaagacaaagaaacgctaatcgggattatccgcgacaacagccttctggttgtcatcgatgatggccgcgccacaactattcatcaccctaaatttggtcataaagcgatccccgttatgacacctgcaaaaccaatggagccaccagtgataaaccatgacgtcaccccggaagagttacgcaaacaggccgaagaactgatccgcgccgccgaagaagctgagaaaaaagcgattggccgtgccgaagtgaaaaagcaactggacccgctgaaactggaaatacttcagtcctatgaaatggcgagccgtaagtttgacgacttcgtggatgcgatggcagacatgggtaaagcggttcagaagttaaagcagatcgttctgtag

SEQ ID NO: 394926 - DNA, 297 bp, Salmonella enterica
atgaaaaagaaattttctggcttaaccgccagcggccacactcgacctaaaatctttcccggtgatatttaccgggacaacaaagggcgattagtcactgtagaaaggtgcgaacgcgggcgggtttattttatccgtgacggcttttcgttctctacagaactgttagcgcgtgtattcatggacaagttcaggctacaccgccgaaagaacgcgccagcaacgagcgccagcgccgcaacgaaggtacaggaattacgcgcaatgattaacgccagccgggaggcagggaaatga

SEQ ID NO: 394927 - DNA, 222 bp, Salmonella enterica
atgcgtaaaaataaacgttgctcagtcaagaaattatcccctgaattacaaaagcgccttaaccgtagtaaagatatttcgctcatactggaaatggaaattagaaagggagggttaggcgagctttcatcctttgcttttgctgcctgtattttaagttatatccatgatgactttaaagaaattaaaaatgaattaaatgaacgtgggttattgtggtaa

SEQ ID NO: 394928 - DNA, 183 bp, Salmonella enterica
atgcttaaaacattccgaatcaatggccgtgcagtcaacaaacgcggccttacagtaggcattacccaggacgtgacagccaccagcgacaaagaggcggtagccgaagttacccgcctgaccacagtcaaaggtttttcccatattcgtattgttttagttcgtgaggtgttccatgcgtaa

SEQ ID NO: 394929 - DNA, 732 bp, Salmonella enterica
atgaaaaagttaatattactgaccttcataatagccagttttgatatctatgcgatagattttgtttatcgtgtagatccaaatccaccggatgttatttttcgtgatgggttctctctacttggatataatcgggacctacagcaattgatcagtggaagatcgtgtgctggtggaagtagtgacagtcgttatattgtaacgacatcagatattaataaaacatacgctatagccagagcgtactattctcattcaaaattcaaaggtaatctgtacagatataaaattcgcgcagacagtaacttttacagtttgactccatccgtcaactacctggaatcgcaaggcggtcactttaatgcttatgaaaaaagcatgatacgattacaaagtgagtatgtttccacattgtctattttgccggaaaatattcaaaaggcagtggcgctcgtttatgatagttcaacaggtcagataaaggatggtacaggtacaataaataccgattatgtaagtataagcagtgtgtcgaatccaggagtgataccttttctccccgagccgcaggctaatacacagcaacggattgatgcatttggctcgttaataagttcatgcttttcaatttatagcgtgtgtcagacacatagaggtcaaaaaactgaagtgtacaaaatgccattttatgatgcaaggccagtaatacaatttatcatttcaggtaattga

SEQ ID NO: 394930 - DNA, 333 bp, Salmonella enterica
atgaataaaagccagaacagcgcggatataaaaagacttaccgcagccgtaacagatattgcgattatttcatattctgcccttagtgagattagcgccatcgggaaattaattcttttatggctggaaagaccggaggcatacagagaccccgaaacaatatcaagtgtgcttaatggtattatttatactgcacaaaatacgatagataatataacgcaagatgccgaatcggtagggtgttattacattgatcaggatgcgcaaagacgccagcgagcggcagaagaataccgcaacgccataatgagcgaaaaacagaacaaggaataa

SEQ ID NO: 394931 - DNA, 183 bp, Salmonella enterica
atgagtgatatgactatgcaaaccgcagttgttaaagcctgtcagttatcatcaattattgcggttatggatgaatacagccccgaaaaaggccattgctgtaatcttatcgggttggctaatgaaatagccggaaatctggcatctttccttatggagaaagagggcgaacaaaatgaataa

SEQ ID NO: 394932 - DNA, 189 bp, Salmonella enterica
atgcataacagaacatttcgcattaatggccgcgcagtaaacaaacgtggcttaacggttggcattaactacgatgtaacagccaccagcgacagaaacgccgtagcggaagctaaccgccttgcaaccactaacggccttaaacacattcggatcgtctatgtacgtgagggggtacgccatgagtga

SEQ ID NO: 394933 - DNA, 162 bp, Salmonella enterica
atgcgcaataatcgcccctgtttcgtctggcgcttctggtcatgccagaacgtcacctacaccacaaccgccgccagcgaacgcgaagcgcgtttacagcttcccgccgttcgcctggtattcgttgctcgtatccgtatggaggttcaaagccatgcataa

SEQ ID NO: 394934 - DNA, 456 bp, Salmonella enterica
atgcgggaggcagaaaacgagctgcttgaccgtgtaaaggccgcgcttgatgaagctggcgtagcctggatcgatatgcgcaccaaagagcgcagcaagcccgccgacactgacgccagccagattccccccaatggggaagtagagaacgatgacagcgcggaggaatcgcaagatattcgctacgccatacgtcaacatctgtactacggcgacaagctaacccgtactttctacaattcgcgtgtattcatctgtaagaacgccacacaggaatatgcggagaagttcaccgaggaatttaaaaccgggcagtttactactcagagcgaagtaacggagttaacgccgcagattgtcaacgagatacgtagcgaatacggatggaacaacccgacaacggtttaccgggcattgcctgataactggcgggaggcttccgacaatgcgcaataa

SEQ ID NO: 394935 - DNA, 501 bp, Salmonella enterica
atgcaatcgacgacaaacgccgcgaacgcggggaagcagaagcgatcattgtctgggaaaacgtcccgggtgtgctcagcagcaaggacaacgcgttcggctgcttccttgccgggctggctggagaagatgaagcaatcgaacctggtgaacgacctgcagcaggtaaaagcaaccgatactggcgctggaacaaaaaaaccagtaagcacgttgcagcatggccgcagcgtggttgtatttatggacaacagcgctcagtggcctgggttatcagggatgcccaatacttcggagtggcccaacgccgcaagcgtgtgttcgttgtcgcaagtgctcgaaagggattcgatcccgcagaagtactttttgagttcgaaggcgtgcgccgggatactccgccgtgcagagaaccgaaaacggcagttaccaccgatactggaaacggcgctgaaggcggtagtcactgggacaacccggccaacccacacccaaccctga

SEQ ID NO: 394936 - DNA, 486 bp, Salmonella enterica
atgagtctgttagcaaaagtgcaggcgtttatcgagcttaatccggggctgacaacccgcgagattgccagtgctcttcctgaatacgaacgctttgatgttcaacgtgcagcaagccatttgtgccttcgtgggcgcgttacccgccagaaggaaaagggactggctcgttattttgcaagtgaaagcgaagcggtgaccgcaaagcctgcacagaaaagagccaattcaacatcacgccgtaaaggttccggtgatccgcaggtgatcgcaacgctggtaagtgacgccgaagaactggagtccagaggcttattcaggcgcgcagcgacggtgtggatgcaggcgtttgatgaaagtctgttgatcggggagcgcgaagcatttacgcggcggtgccagaagtgcattgagcgttgcagaaagccggtcagaccgggcgagcaggtttatctggcagggcgatttgtgggggacgtggaatga

SEQ ID NO: 394937 - DNA, 393 bp, Salmonella enterica
atgaaactgacactgccatttccaccgagcgttaacacctactggcggtccccgaataaggggccgctcaaagggtatcacctggtaagcgccagaggcagaaagtatcagagcgatgcgtgcgcggcagtaattgagcagttacgccgtctgccaaaaccctcaacagcaccggcagcggtagaaatcatcctgtatccgccagacaaccggatcagggatctggataactacaacaaggcgttgtttgacgccctgacccacgcgggagtctgggaggacgacagccaggtaaagcgcatggtggtggagtgggggccggtcatcccgaaggggaaggtagaaatcacgatcacgaagtacagaccaacggcgggtgcagtcgccgcataa

SEQ ID NO: 394938 - DNA, 324 bp, Salmonella enterica
gtgaacattaagctaaccgaccgccaacagcaggtactggatctgctgatcgctttccggcaggagcatggattcccgccaactgtacaggaactcgcagaaatgctgggctgtcgctcccataacgccgctgcggaacatcttcgtgcgctggagagaaaaggcgtgatcacaagagggcgtggagtatcacgcggtatttctgttaatgcgcttaatccggagtacgacgcgacagagttactacgtgcgctggttgccggggaagaggatgcgagggagcgggcgatcgcatacctgcatgacaaaggaatcacggtatga

SEQ ID NO: 394939 - DNA, 324 bp, Salmonella enterica
atgagcctcaggcagtggaagaactttaagtacatgcatcgcgtgctggcattctggccggaactgtttaacctggacagcccaaagccgctaaaggttggcgtactgaatgacatacagcaggatatcgccgcacgcggtctgactattggcgctggcgtactaaaagttgctattgccagctatacgcgccgtatccggtataaaaaagctattgccgctggtggagtgcgctacaacctgaacgggcagccatgcggagaaataacgccggaacagcagcaggaagccgcagacgatatcaacagggcaaaaggtaattag

SEQ ID NO: 394940 - DNA, 474 bp, Salmonella enterica
atgataaaggacgctataaacgatgcgccaccagcacaggacgtatcaccgaaaagaatcaggccggagggagtaacccgcgctcaatggaagaagagaaaacgggttcagaaaattacggcattctggccggatcttttcgacatcaacaacccgaagcccttaaagataaacatcatgccggacatggcgaaagacattcaggcgcgggggcttgatatggggatcggctccgttcgtgtcgccctgaacgcctacaccagccatgctaaatatattcgttgcgtcgccgctggtggaatgcgctacgacctgaacggggagccgtgcggggaagtaacggaaacagccataaaaaatgcgaaagaacggtataaggttttagagcgacaattcagggcaggccgtaaccgggcaggcaatggtaacgtagacagtaagcaggcaacggagaacgcgacagatggcagatga

SEQ ID NO: 394941 - DNA, 213 bp, Salmonella enterica
atggcagatgaagcggatatagcaggcgacatcgagcgcgaacgccttgaggtgctgatactgaatcgggatcatcactcattaccggagaccggacactgctacaactgcggcgacgttgtaccgtgtggcctgttttgtgatgctgattgtcgggatgattatgataagcgggaaagattcagagccatgaagccgcgcaatagtgagtaa

SEQ ID NO: 394942 - DNA, 234 bp, Salmonella enterica
gtgtgccactacagtatttattcacagaaggtgcgtgcagctactgaggatggtgttattgactcaagggaaagagaggagattgatgaagaattctaccgcgtaattaccaagctggaagagcataaagcactgctttacatgattcattgccgctcaaaagaaggtgatgcccgcgagtgtgcagctccgggcaccgtggcgtcatatggtatggagaaaaccaacgcatga

SEQ ID NO: 394943 - DNA, 207 bp, Salmonella enterica
atgtacctgcttaaccgatggtttaaggactggaggggaagacgtgttcacgttatccgctgggagccggaaaccgagcgcgttatctacatgcgcgaaaggtatcctgaagagtgtttcagcccgctgcacaagttcatggatttgttcacggaatgcggcccgccagatgagaaacaacagcgccccgaagggcgcggtgattaa

SEQ ID NO: 394944 - DNA, 348 bp, Salmonella enterica
atgaccacactaaacgtccgtgtgacaaccattgacgaaatcaactcccgattcattgccgcaacggagggagatgaatcagccagggggcattccctctcgtttttgagctgggatcttctccacgacacgctatcccctggccggatggcgattctcaaatccatgaccgggattggcgaggtgtctatacgtgaagtcgctcgccgggttaaccgcgatgtaagagcggtacattccgatattaaaaagctgattgcccagggagtgatcgagaagggagaaaatggcgttatcttcccgtacgatgacatacacttcgaatttaccctgaagcatgtagcctga

SEQ ID NO: 394945 - DNA, 282 bp, Salmonella enterica
atgccatctaaagcactcatgagggaggtcgttcctctctccgataactccagggctgaactggttatatgggaggttgatccggcagtaagagccagcaaccacaactacaaataccgcctggcctatattgttgatagcacctgcgttctgcgttacgacaacgaggcgggaaaaggcgaccacaagcacatcggcagcgaggaaatagcgaccacatttactaccgtccagcagcttctcgctgatttctgggctgatgtcagaaagtacggagggtaa

SEQ ID NO: 394946 - DNA, 312 bp, Salmonella enterica
atgcacgttgtttcaagggttccatttgatgacgctggcaggcagtacccgaatcaggcagcagcgatcaatgatttgtataaaacccttaaacgggagaactaccgctcaccggatgatatgaaaaagcgatttgccagcctggacagaatgaaataccgggctaaatggtgggttattgatattggtggaagtgcgttaagagttatgtttttcgctgattttgagagggggaaaatttttataaaacacataaccacccacgccgaatacgacaagctaaccgacttctaccggaggaataaagaatga

SEQ ID NO: 394947 - DNA, 417 bp, Salmonella enterica
atgatttacgccgacgccataaaaaccgcgagcaaccttgccgagattatcccctttcttggggggagcacttcacgcagtgactacgatgacgctatgaggctggttgaatatcttcttgaacatgaaccagatagcccgctggtggatatgttgaccgcgaagattgagaaatacgaggatgaagcgccggaactgtcagagtttaacgaacgtatagccaatctgccagccgggatcgcgcttctgcgtgtactgatggatcaatataatctaacccaaagcgattttgagaatgagataggtaaaaagtcgcttgtttcccgcattcttagtggtgatcgttccctgacgcttgaccatatgcgggcgctggcaaaacgttttgatatacctgttagtgcatttgttgactaa

SEQ ID NO: 394948 - DNA, 279 bp, Salmonella enterica
atgaagaaatttatatacccgacatctgagcagcgtatgcagattttgaaagacaacgacgcacctttcgatcggcgcatacgcgaaaaggaatgcgcagcccgtacagggttatcacgttcccgtcgctggcaactggagcgagagggcgctttcccgaaacgttccgcaatgggtagcaattccgtatcgtggttgctttcggatgtgctttggtgggtaaacaacccgccagatgttaaagacgtcaacaacccccacagccgcaaatcagcttag

SEQ ID NO: 394949 - DNA, 306 bp, Salmonella enterica
atggctacaggaaacgtaaacaacaagtcacaaatgaaaaacatccgctttccacatgatgtaatccaagaaatggaagcgcttaaacgagatgatgaaagtacggcaggctttatcgttacagccgttcgcggggaaatagcccgacgccaaacagaaggaagccatgaaaaccccctgctttcgtcactcgatgcgctggagcgtgtagaagcgattggcacaaaagccgctgaggagatcgggcaactggtcaatgtagcgcgtgaagaactccagcgccggaagcccaaagagcaggagtaa

SEQ ID NO: 394950 - DNA, 324 bp, Salmonella enterica
atgaaccgcaggcagtggaagaactttaagcacatgcgccgcgtgctggcattctggccggaactgtttaacctggacgaaccaaagccgctaaaggttggtgtactggatgacatacagcaggacattgccgcgcgcggtctggttattggcgctggcgtactaaaggccgctattgccagctatacgcgccgcatacggtataaaaaagcaattgccgctggtggatctcgttatgaccttaacgggcagccatgcggagaaataacgccggaacagcagcagacagcggcagatgatatcaacagagcaaagggcgattag

SEQ ID NO: 394951 - DNA, 468 bp, Salmonella enterica
atgacaaaggacgctataaacgatgcaccaccagcacaggacgcatcacagaaaagaatcagaccggagggattgagccgcgcccaatggaagaagagaaaacgggttcagaaaattacggaattctggccgaagctgtttgacatcaacaaccccaagcccttaaagctaaacatcatgccggacatggcgaaagacattcaggcgcggggggttgatatggggatcggctccgttcgtgtagccctgaacgcctacaccagccatgctaagtatattcgttgtgtggccgctggtgggatgcgttacgacctgaacggggaaccatgcggggaagtgacagaaacagcaatgagacacgctacagaaaggtttaaggttttagcgcaaaaattcagggctggccgtaaccgggcaggcaatagcgacagtaaacaggaaacggagagcgcgacagatggcagatga

SEQ ID NO: 394952 - DNA, 231 bp, Salmonella enterica
atggcagatgaagcggatatggctggcgacatcgagcgagaacgccttgatgtgctgatactgaaccgggatcgccattcgttaccggagaccggacactgctacaattgcggcgagattttaccttgcggcctgttttgtgatgctgattgccgggatgattacgataagcgggaaagattcagcgctatgaagccgcgtaatagtgagcaaagcagaatatttcactaa

SEQ ID NO: 394953 - DNA, 195 bp, Salmonella enterica
atgccattaaccactgaagaaggcctgcagatcctgatctgctggctgcaggacaatatcgactgtggtacggaaatcatcttcgacaacgacgatgccctcaccggttccgctgcactgctgccctgtattgagcaggctctgaacgatgtccggagggtgaactgcctccggcttttactttctccgcaataa

SEQ ID NO: 394954 - DNA, 492 bp, Salmonella enterica
atgaagctgtccatgacggtggaagacgataccgtcaacgttcaggctctcaatatgggccggatcgtcgtggatattgacggtattgaactggccgacctgattgatgtggtctgtgataacgggtattcacttcgcgttgtcgacggggccggtaaaccggcaactgaagccacgcagccaccgtttacctccctgccgggcatccagtgtagtaccgcgcatatcaccggtgaggataacgctatcctggacctggcctcacttcagcagcacgacggcggtaacagtgactgggtactgtacaccggctacggatttttgctcaggctcaatgcccgccggtaccccgcgctggagctgaaacggatgggaatgtcgaaagcctgccgccggttagtcgtgacgcttattcgtcgttattccatcagcatcctgcaccttgatgcctccggtgaactcctgcccggctttgaggttttcaactggtaa

SEQ ID NO: 394955 - DNA, 333 bp, Salmonella enterica
atgagcagcgaaccgaagatcgtaaaccttacccccgctattgctggctggtgggcgaaattcacagatgaaacggaatggtattcgcctgtagcagcctgggcgctttgtgaagtgaaagacgacgccagcaggatgacaggcggcaaacaccagttgattttacctgtactgaccagcgaggcgggaatgaccccacatcatgaggatcagggttattgcgagttgctttatctgcctgatgcgaaatttaccaggctggagggcgattactgttatgcgtgggtgctggtggacggagtgaaaaaagatggcaatacgcaaactcgatga

SEQ ID NO: 394956 - DNA, 672 bp, Salmonella enterica
atgccaactaaaaatgaaaatatatacaatcctattttccaagaatttgctgaaatcactagatccttaggaaactcacaccgccttattctcttagaacatatatcccaaggggaacgttctgttgaaaggcttgctgaactcacaggtatatctgtagctaatgcatcccagcatcttcaacacttaaaaagagcaggttttattcagggaagacgagatggtaaaaatgttttataccgtcttggaaatggtccagtccaaaatcttctaatagcaattagacaatacgtcgagtttagacataacgaagtaaatagctttgtttcgaaaacatttggtttgcgtgaaaatttagaatcaatatcacgtaaggaacttctccatcgacttaataaaggtaatataattttattggatgttcgcccatttgaagaatttcgctacggacatatttccggagcaataagtataccttttgatgaattgggagaaagattatcggaattgtcaaaaaatctagatgtagtagcttactgtagggggccatattgtatactttcagtaaatgcaatgaaaatgctacgcttacatggatttaaagcaacctgccttgaagatggttttccagagtggaaagctgctggtttggatatttgtgaagacatataa

SEQ ID NO: 394957 - DNA, 204 bp, Salmonella enterica
atggcacatcatcagctattacggcttaaacaggttgaagccaaaaccggaataaagcgcgcgcagatctatctgtatatgcaacagggcttttttccccgctccattaaaatcggtcctgccagcgtcgcatggcttgaatcagaaattgatgagtggattaaccggagactggctgaacgaaaccagaaacattcttattaa

SEQ ID NO: 394958 - DNA, 573 bp, Salmonella enterica
atgcttccgtcaattaactatatgacactgatctttgcattacaggctgtcagggaggggaatataaaatactgtaacaccatcggactcacgctggatgaaatgagagagattaataaactgtctctggatgaactgttttttatcagcaaaacatccctgatgtttattgatgtttccgttaatcatgaacgtttaaaaaatatccttatccgctcacgtcaggaattacagtatcagcagcaaataaaccgggcggttcgcctcggtgcttcacacgaaattctttatacatattttggtctcaatacggttgacgttgccgcaaggcgaagattacttggcattaccatccccaacggacgtaaagttatcccggacgaaaatacagatgccagaatatggttactgtggaagacaaaacacctgaataatactgagtcactccaggccctggatgccatgatgcaaatcacggaggaattatataatgaaggttatacattttcactgaccgttatcagaagtcgtataaaactttttgaaaataatattctgaaaggaggtggttaa

SEQ ID NO: 394959 - DNA, 210 bp, Salmonella enterica
atggctgatgagatcgaccgtgatcaggagcattatgacagttatcttgaatcgctgattgaaaagaaacgttttcgccctgcatcatctgaatctttatattactgtcggctttgtggtgaacccataccggaagaaagaagaaaaattctgccgggcgtggatacctgttttgattgccagtctgaaaatgaacgccgccagcgttga

SEQ ID NO: 394960 - DNA, 390 bp, Salmonella enterica
atgggacgtagttcatccggcctgcatttgaaggttgccgaatggatattagaacggggtggcgctgtttgcatttacgatgtagcgaaacaattcggcgtgaccgttcgccaggctacagggctgctttcctctgttgtgacagatagcgccatagaaacgcaaacggggcgggttattcctgaccgtcctgacggtcgctataacactaagcacgttagatccgtgctcgttctctccattgactacgaaacaatatcacgtcgcagaaacacgcaccggcatcataactaccatatggaaagccaccagccggaaacaggcagggaaatgtcccgcgctgaaaaatgggattggttgatcaggaacgccagacggcgaaaaagatga

SEQ ID NO: 394961 - DNA, 474 bp, Salmonella enterica
atgagtctgttagcaaaagttcaggcgtttatcgggcttaatccgggactgacatcaaatgagatcgctgaagcatttcctgaatacgatcgccttctggttcagcgctcagcgagcaaactgtatcgggggaagcgtgttaaccgccgcctggatggaaatgtattccgctattacgcaggtaaagacgaggcggtgattttgacgctacgacagaaaagatcaggccgcactggttcgggtgatccgatggtgctggcaacgctggtaagccgcgctgaagaactggagtcaaagggctcttttaatcgtgcagcgacggtatggctggaagcgtttaacgaaagcctgttggtcggcgaacgcgaagcattttcgcggcggcgccagaagtgcattgctagttgcaaaaagccggtcagaccgggcgagcagatttatctggcggggcgatttgtgggagatgtggaatga

SEQ ID NO: 394962 - DNA, 171 bp, Salmonella enterica
atgttcggagatgcaatacgacgctatgacaggggtactggtgcaatgcacctcgcgaatacccctgtcgtatcgccggaaagcaaaaaccccgcgctggcggggttctcgttatattcaaattattcgcttttcgtcgctgccatcgtggcgcagctctgccaagcatga

SEQ ID NO: 394963 - DNA, 459 bp, Salmonella enterica
atgagcggcggagctgcgccacgaatgcccagggaacatgaatgctggaatgtactgaggggcggtcgctggtcagataaggcactggagcgttttactgttgctctaaaccaggcacgcagcgaaggatttaaggggcagcaggcgctgaatcgcgctcataccattctttggccccaggcatctaccagcataattgatgaggcattgcataatgacgatgttgattttgttgagcaagccgtgctgatggcgcttgatgtcaatgatcctgtgtatgtggttggtcttcagtattacaccacacggaaaaaaatatcagacataacccgggaactgcaggcgattgcgccctggctgacacaagaaaaggccagagagcgagtaaagtggtgtttacagattttcagggcaaaggtgttcctgtcagcgaagatacttttggaaaacgaggaataa

SEQ ID NO: 394964 - DNA, 303 bp, Salmonella enterica
atgataaccgtattaagtacagatatctttgataggtggattgatgaacttaaagacgccagagcaaaaacaaaaatacaggcgcggatacgcagacttaaaaacggtaattttggtgatatagagccagtgggcgaaggtttttcagaaatgaggattcacgaaggtaaggggtacagggtttatctgaaaaatcacggaaaaatcatagttgttattttgtgcggtggagacaaaagcacgcagcaaaaagacatagccagagccaaagagatttacaaagagatcgagggggatttatga

SEQ ID NO: 394965 - DNA, 279 bp, Salmonella enterica
atgaaggtaagagaatacgatatagcggagcacttaagtaacgaagaagaaatgcaaatgtatctcaacgagatcgcagaagaaggcgatccggcgttgctactgtctgcattaggcgatattgccagagctagaaatatgagccagctttcaagggaaacgggaatatcgagagagggcttatacaatagtctttcaggtaaaggcaatccgacgctcagtaatacaatgaaaataataaaagcactcggtttaaaacttaattttacaggggcttga

SEQ ID NO: 394966 - DNA, 153 bp, Salmonella enterica
atgaccagttcggggcatatcgttcaggtactgctggtggataaagagacccagaaggtggtgtgtgagccgctgggcttcggttatcagttatcaatcccgcttattgcgtttcacacggatcactatttcagacgtccgggggctgtatga

SEQ ID NO: 394967 - DNA, 645 bp, Salmonella enterica
atgagccgggtcatctccaccactgtgtatctgtctgatgaactgtcagaatctgcccgcgagaaagcacgctcctggtactgcgaaggggggctggagtatgactggtacagtgatgtttatgaagatttcatcctgatttgcaacatcctgggtataagactcaacacccgcaccgtcaccaccaccggcggcagataccacgaaaaagcctgtatctggttctctggtttctgctgtcagggggacggagcctgtttcgaaggtgattaccgctatcagcccgctgccgcacaaaacatcagaaagcatgcgccgcaggacgaagaacttcaccgtatcgctgacgtcctgcaggcaatccagcagcgtaacgtctggcagcttcaggctgatattcagcatcaggggcgctactaccatgaatacagtatgcacattactgttgagcgtgactcccccaccggtcagcaggccaccgacgacgcagacggtgtcctgagtgacgcgttacgcgacctggcccgctggctgtatcagcaacttgaaacgcaatacaactggctgacctcaccggaagccgtggatgaggcgcttatcgccggcggttacaccttcaccgaaaccggccagcgcttcggttaa

SEQ ID NO: 394968 - DNA, 648 bp, Salmonella enterica
atgagccgggtcatttccaccactgtatatctgtctgatgaactctcagagtctgcccgcgagaaggcccggacctggtactgcgaagagggtgggctggagtatgagtggtacagcgacatttacgaagatttctcgctgatttgcaacctcctcggcgtgaggctcaacacccgcatcgtcaccaccaccggcggcagataccacgaaaaaacctgtatctggttctccggtttctgctgtcagggggatggtgcctgtttcgaaggtgattaccgctatcaacccggggccgcacaaaacatcagacaacatgcgccgcaggacgcagaactgcaccgtattgctgacgccctgcaggccatccagcagcgtaacctctggcagcttcaggctgatattcagcatcaggggcgctattaccatgaatacagtatgcacattactgttgagcgtgactcccccaccggtcagcaggccaccgacgacgcagacagcgtcctgagtgacgcgttacgcgacctggcccgctggctgcatcagcaacttgaaatgcaatatgactggctgacctcaccggaagccgtggatgaggcgcttatcgccggcggttacaccttcaccgaaaccggccagcgcttcggttaa

SEQ ID NO: 394969 - DNA, 333 bp, Salmonella enterica
atgtgtaaaagccagagtaacgcggatataaatttgcttaccgctgccgtgaaagatatcgcgataatttcatgttcttctcttggtgagattagcgccatcgggaaattaattcttttatggctggaaagaccggaggcatacagagaccccgaaacaatatcaagtgtgcttaatggtattatttatactgcacaaaatacgatagataatataacgcaagatgccgaatcggtagggtgttattacattgatcaggatgcgcaaagacgccagcgagcggcagaagaataccgcaacgccataatgagcgaaaaacagaacaaggaataa

SEQ ID NO: 394970 - DNA, 189 bp, Salmonella enterica
atgcaaaccgcagttgttaaagcctgtcagttatcatcaatcattgcggttattgctgaaaacgatcttattcatgtgcatcaaactaatcttattgaacttgctaatgaaatggctggaagtctggcggctgaccttatggaaaaacaatatgaagagaatataaatcaagggggcgataatgtgtaa

SEQ ID NO: 394971 - DNA, 372 bp, Salmonella enterica
atgtcagagaacaaccgtaaacaaccggataatcattcagtcccctgcatccggggccgtctgctgcaggacggctgtctgttccgtttacagaccagcagggacgatatcagggcggccttcaccaaagaggaagcccggtggctggagcaggccttcccgctgatattacagcagatggtcacgatggctgcccccggctcaccggaggcacagacaccgcatgtctttcaccacaacggcctgacctgtgaatcagaacccggcccacagggcgctgtctgcctgatgatttacccgacgtctgttgaattaaccccgtcagaggagcccgttaatgacgaagaccacaaccacgaccacagtacatga

SEQ ID NO: 394972 - DNA, 291 bp, Salmonella enterica
atgagaaacgatgaaacgcaggttatacccgctgatattttcagtggcgtgacccttattatcctggagaacggagatgaagcggtttatatacacggcctctttctggagtgtgctgatatcgcgcagggcgacaggcctctcagtgatattgctgcacgcctcgccggacttctgaagatgcctttcatacagacaacgttacctgtcccggatgatgaggagtggtgctggaatgatattgttgatgccctgctgacaggcaccggctcaggcgggtccgccatatga

SEQ ID NO: 394973 - DNA, 198 bp, Salmonella enterica
atgttgaataaaattctgttttttaaaaagtcgggacaccatgctgagatactgccattcctgattttcaactggttgatggttgtcgtgcaggttatctgtcttgcggtgttgctggttggcacgttcgatattgttctccacaacgtaggagagcctgtagagggctcactcggtacaattaccagaagtgaataa

SEQ ID NO: 394974 - DNA, 357 bp, Salmonella enterica
atgagagcgggaaagatgcgccatcgtataacgatacaggcggcaaatattacgcgtgacgcagcaggggagcagattaaagaatggtatgacgtggctaccgtatgggcggatgttcagtcaataaactcgcgtgagtatctttccggcagtgttgagttcctgaaaataactaatcgcatatggacgcgctacctgccaggaataaccagcgataaccggattatttacaactcaaaaaatgcccccggcagcgtttttaatattgatgccgttttacctgatgccagattaacaaggcttgaaattttatgcagtggaggcggacaccgtgatcaacccaaccgaattacttga

SEQ ID NO: 394975 - DNA, 267 bp, Salmonella enterica; identical to SEQ ID NO: 391635

SEQ ID NO: 394976 - DNA, 198 bp, Salmonella enterica
atggctacaaaatctgttaatgcaaaatcagctacaaaaaaaatccgctttccgcacaacataatagaaagcgtagaggccagcgtagaacgggaaaaggaagataaccccggcgcgaacttttccgcatgggtgcttgatgcctgtggccgcaaactcaaagcggaacaacgcaagaagcccaaagagcaggagtaa

SEQ ID NO: 394977 - DNA, 297 bp, Salmonella enterica
atgacgttaaataaaactggcttcatcgccagcggatacgctcaccccgaaatcaaacggggcgatatataccgcgacaacaaagggcgattagtcacagtggataaatgtgaatacgggcgcgtttattttatccgtgacggcttcacattcaccacagagttattagcccgtgtattcctggataagttcagattacaccgcaggaagaaagcgccggtaatgaataccagcagcgcaacgagagtacaggaattacgcacaatgattaacgccagccgggaggcggggaaatga

SEQ ID NO: 394978 - DNA, 162 bp, Salmonella enterica
atgtcatttgttaacatggtggagccagccgggaaaattctggccgtgtcgcctttcggtaatgaattttttagccgttcgctggaacagtttatattgcacattcagaaaaccaccagcggcagcggcggcagtaatccggcaaaacccgttattcactaa

SEQ ID NO: 394979 - DNA, 195 bp, Salmonella enterica
atgcctaacacacgcagaacatttcgcattaatggccgtgcagtcaacaagcgcggccttacggttggcattaactacgatgtaaccgccaccagcgacagaaacgccgtagcggaagctaacagactggcaaccactaacggccttaaacacattcggatcgtctatgtacgtgagggggtaagccatgagtga

SEQ ID NO: 394980 - DNA, 246 bp, Salmonella enterica
atgcataaagcaaaccaactaacccgaagtaagcaaattgcgatggagcttattttttcacttgttgagatttcaggcgttgcggaagtggcgctaaaaaacgcagatggcgaaacagaaagcgcggggcatatcgtccggcactcactggcgtttattcaacaggccgcagacatcgcactacaggaagcatcaaggcaaatgctaaaagacacagaacaaacgaaggctaataaccatgcctaa

SEQ ID NO: 394981 - DNA, 144 bp, Salmonella enterica
atgccggatgtcattgctcccaccaaccgcatcccgcagcagggtttccatcgtttcaaaacagcgatccggtggtttgtcgtaacggggatggcagaaggtatcctggttcagcagcaacagatgcctgcacgcctgacctga

SEQ ID NO: 394982 - DNA, 468 bp, Salmonella enterica
atgtggcgccaggtatgtgcgaatggtctggtctgcgggcagtcctttggagaaatcagagttccacacaggggcgatatcgccgaaaaggttattgagggcgcttacgaagtcctggacgtgtttgaccgggtggaagaaaaacgtgaagccatgcagtcgctgttactcccgcctccggcacaacaggcgctggcgaatgccgccctgacgtatcgctttggcgaagagcaccagcccgtagccgccacgcagatactgacgccacgtcggtatgaagaccgtcaggatgatttgtggtcggttttcaatcgaatacaggaaaatttgctgaagggcggtctgtccggacgtaccgcgaagggaaaacgtacccatacccgcgcagttaaaggtatcgacggtgacgtcaggctcaatcgcgcattatgggtgatggcggaacagatgcagcaggcgctgagctga

SEQ ID NO: 394983 - DNA, 390 bp, Salmonella enterica
atggcatttttatcgctatgggatgtcgggggaaacgtcggtttaacggatacggtaaatcgcgcccttcatgtaaacagcgacggagatgttagaggctcattatggggtgactggttgagtcactggatatacgggcagtttgccactcgcgataacaacattaacgcccgcgctactgttgactgggttcgtcaaaacttcctttcaggtttcaggttgggaggtgtcgaaagcgccaaggtatggagagcgtatggatataacgatacgccaccttacgttattacaggggtgataaatggaaacactgacgacctgattgataacatcactcgccgcccactccagatgtatatcaacgggtggcgtaacgtagactggttataa

SEQ ID NO: 394984 - DNA, 444 bp, Salmonella enterica
atgccgtggcaaccattaaggcgctgtactgagccgggatgtaacaagcgcgtgaagtccggcaagtgtgacgaacacaaacgcgcggcatcgcgtgcagcagatgccaggcgagggagccgccgtgagcgtggctattctgccacatgggataaataccgcattcactatctgaaacaccacccgctatgtgtggagtgtgagaagcgcgggctttatgtacccgctaagatcgtcgatcacattatcccgattaacggcggcggtgatgttctcttctggccggagtggaaccaccaggcattatgccagacatgccacaacagaaagaccgtgcagcaagaccccacgaccaaacagcagcgcaaggccggagtataccgcgagcaggaagaacgtgcagcgcatcgtaacgactggatatatgaggccggcaatgactga

SEQ ID NO: 394985 - DNA, 444 bp, Salmonella enterica
atgccgtggcaaccattaaggcgctgtactgagccgggatgtaataagcgcgtgaagtcaggtaagtgtgacgaacaccgattacaggcacagcggcgggatacagccagacggggaacacgaacgcaacgcggttactccagccgctgggaacaataccgtttgttatatctgaaacgtaacccgctatgtgtggattgtcagaagcgcgggcggtatgtacccgcccggattgttgatcacattatcccgattaacggcggcggtgatgttcttttctggccagagtggaaccatcaggcgctatgtgcttcctgtcatggacgcaagaccacgacacaggaccccataaccaaacaacagcgcaaggccggattgtaccgcgagcaggaagaacgggcagcgcatcgtaacgactggatatatgaggccggcaatgactga

SEQ ID NO: 394986 - DNA, 324 bp, Salmonella enterica
gtgaacattaagctaaccgaccgtcaacagcaggtactggatctgctgatcgctttccggcaggtacacggattcccgccaacaacactggaactatcggaaatgctgggctgctcctcccctaacgccgctgtggaacatcttcgtgcgctggagagaaaaggcgtgatcaccagattcagaggaacatcgcgcgggatttatatcaatgcgcctgaccctgaacatgacgcagcggagttattacgtgcgctggttgccggggaagagaacgccagggagcgggcgatcgcatacctgcatgacaaagggatcacggtatga

SEQ ID NO: 394987 - DNA, 225 bp, Salmonella enterica
atgaaaatcgaatatcaggactacggtgccgtggcgaacatcatcatcaccagcactgtgtttgaattccgtaaacataaccgtgtggtagacgcaacactgctctgcacaccaggaatagttgcaaaccgtagtggaatattcttcatgaagtcggttttgtccgataaatcccgcgacatgctgcgtgcgcacaaaacagtatcgcgggaggcgacacgatga

SEQ ID NO: 394988 - DNA, 225 bp, Salmonella enterica
atgaaaatcgaataccaggactacggagccgtagcaaacatagtgatcaccagcaccttgtttgagttccggaaacataaccgcgtggttgatgctgccctgatctgcacgccggggatcgttgcaaaccgtagtggaatattcttcatgaagtcggttttgtcctgtaaatcccgcgacatgctgcgtgcgcacaaaacagtatcgcgggagacgacacgatga

SEQ ID NO: 394989 - DNA, 279 bp, Salmonella enterica
atgaagaaatttatatacccgacatctgaccagcgtatgcagatcctgaaggacaacgacgcacctttcgatcgacgcatacgcgaaaaggaatgcgcagcccgtacagggttatcccgttcccgccgctggcaactggaacgggagggcgctttccctaaacgttccgcaatggggagcaactccgtatcgtggttactttcggatgtgctttggtgggtaagcaacccgccagacgttaaagacgtcaacaacccccacagccgcaaatcagcttag

SEQ ID NO: 394990 - DNA, 183 bp, Salmonella enterica
atgcacacaggcaaacgctttgataacgggctggagtttacgccagctatcagagccggatgcctgatgtataccgggatgctgtacgagaaccgcgagacggtcagcgatttgaatctgaaagaagttccttttgccgtttcgtcattgtggtctgtctatcgtgatgtgggggtttactga

SEQ ID NO: 394991 - DNA, 387 bp, Salmonella enterica
atgtggatcacctgcatttggcacatttctgtttacctgaagcgcccctatactgacgaaagcaataaaggccaaaacgatgttatgccggtctacgccgccccgccagcgccggtgacaccagaaacgctaccgtgttcggttaagttaaagcctggcttaataatcggcaagggttgcaaaacagaaacactactgacagcactgaaacgtcgcgctgactattacgctgaactggaggccatgacgccggaacagagagcagagcatgatgcggggattgctgagtttaaagcgatgctggaaggcaataacagcgctgccatgcagttgttcggtaattccgaacaactctccggtaactccggatggctggataagctgtag

SEQ ID NO: 394992 - DNA, 126 bp, Salmonella enterica
atgcggaaattaacagttgaacgactcattacggggattacagaggacgggcgtcttctgtgggagcgcctcgaaataaaagatgggaatagtggattccatgatgttcgtctggtgcgtgagtga

SEQ ID NO: 394993 - DNA, 2415 bp, Salmonella enterica
gtgaagaaattattagcgcttttggtgttgtcagcacctcaggcgaatgccgtgacttacatagatacgttgggtaatgaatacaacagtgataagaacctatttggatggttatatgtagggaaagattcgccatatggaactcccaaaccatcatctctgaatatcactaacggtgccactgtctctgttaatagggatcctgcagattcgtcgtatttaacaggtacaggcagcgtaagtatcgaaagcagtaatttaactgtcgaaggtaatggcagcgctctgaatgttgaagatattttgtatgttcgtaactctcagcttaaaattgataacaaggctatattgactgcgggttttcaagtggtaagccagttagataactctcatattattgtttctggtaattccaagctgaatacaggtacattagttcttaatgccaacacaaactcaacgatgctgattagtggtggttctgaggttattgcaaataccttttttatgtcatctgctgatgattataaaagttcatatattaaaattgatggtgccgatagccgtttaaatgtcagcgacgcttacctgggatatattggtaatgcctcactggttgtctcaaatggtggtgaggttaatgtcagaaatgaaattgaactggccgaaagcgcagggcaaaatgcaaccattacaattggcggtcttgatgagtcagcgccagaagcaccagggtatgtaaacgcatcagaaattgtattcaaatccggagtcggggagataaggtttaatcacacctctgacaattatgatttttcaacaccaatttcaggcacgggtgatttaacatttattaacggtacaactaacctgacaggtgataataagagtatgtcaggcaatgttaatgttggtgggggaagtattcttaatgttttaaatgataacgctttgggtgatagttctgtaactatcgcttcaagtggccaactggcattactaacagcaaatgattttaaatttaataatgatctggttaataacggcactattaccttatcagatcaaaacacctacggtaagttggtgactgtttctggtaattactccagtaataacggggcgttagtttttaatggtgctctggctgatgataatacagtcatagataaactgttaatcaaagggaattatgacggaaccactaatgtggcagtgaataacattggtgggattggggctgaaacactaaacgggattgatattatttccattaacggaaatgttaatggaacatttaaacaggctgggcgtatagttgctggtgcatacgattatagtctggttagaggtgaaggggctaatgaaaatcattggtacttaaccagtcaaaaacaaccgacaccgggaccggatccagtccctacgccgaaacccagcttaaatattctgcgtccggaagctggtagctatgtagccaataattatttttccaatactatgttcttgaatgattttcaggacagaagtggggaagtaaagtattttgatccgatatctggtacttataagttttctagcctatggatgcgacaagagggggggcataatcgcttcaatgacagcacaggacagttgaagacacaaagcaaccgttatgttctgcaactggggggagacttatttaaatgggcaggcagtgacgatgagtcaattcgtattggtattatgggggggtatggtaataaccatagccgtactcattcgtcaattaccgattattcttcaaaggcatctgttaatggatacagcgctggtttatatgccacctggattaaaggctacgatgataaatcatggtcttatgtagatgtttggggccaatatagttggtttgataactcagtaaaaggggagcagatttccgaagaatcatattcctcaaaaggttttactgggtctattgaaggggggtatgcttacaaggttggtgaaagtggccgtacttcctattggcttcaaccagtggcgcaacttgcactgatggatgtcagaaccaagaacctcaatgaaaaaaacggcactaacgtttcattcaacggaagcggcaatatcatgtcacggttaggtgtaagagcttatgctaacggacataataaaatagatgataatagtggccgtacttttgagccgtatgtagaggtaaattacattcataacaccaaagactttagcgtcaaaatgaataatgagacagtaagtcagtctggcgccagagatgcatttgaggcgaaaatgggtgttaatggacagctttcagaaaacaccaatgtttgggtgaatgtatcccagctagtaggtagcaatagcttttctgatacccaagctacgttgggtataaaatacgcattctaa

SEQ ID NO: 394994 - DNA, 402 bp, Salmonella enterica
atgagggcgattattaccgcactacagctgatgaaagcgcactggtggtggtggctgattatctgcgcactggtgatcttctcatggctctggagcgaaaacacccgcatcaacgccagcatgaataccctgctggctgaaaatagcagcaaccgcgcggtgatagataacgtcctcaaaacagttgccatcactaacatcattcctggaaccaatcagtatgcaaaaaaccagatcgcactggactcacagcgagccaaggcagatatcaaggtggctgttgcgaatgatgattgtgctacacgtcctgtgcctgctgccgctgctgaccggttgcggaagtacgcggacagtttacgtgacaaccccggtagcgccactaccagcaagtttgaccgctga

SEQ ID NO: 394995 - DNA, 300 bp, Salmonella enterica
atgggtaataacagcccgggtgatggctggaaatatcgcggtcgtggcctgcttcaaataactggccgtgagaattacaccaagtgtggtacagcgctgaaacttgatctcgtcagtacaccggggctgcttacgcaagagctacatgcggcccgttcggcggcctggtactacaccttacgtggctgcttgctttattccggtgatgttattcgcgtcacccagattatcaacggtggtcagaatggtcttgctgatcgacaacgtcgatatacgttagcgttggcgactctggtatga

SEQ ID NO: 394996 - DNA, 336 bp, Salmonella enterica
atgatgaaccccttttgtgtgggaactgttgccagtctgggcctggccagtgttggaaggtcaagcgtaatctcaggacttacagacgctttgccagtccatggcgacgaggacggcgcaataccgcgccggctcgctatcgtcaggttgtccaatcatatgcagaatggggcaatctggcagcgcgtcgccggcgcggcagtgaatcatcgccttaaagatttgcgcaatgtgctacatattctggatgcgcctgaccagctcatcgataggtgtctgcgccaggcgtttgacgtcaacactttgccgcgactggttattcccaaaattcagtag

SEQ ID NO: 394997 - DNA, 285 bp, Salmonella enterica
atgagtcagccagaaaattgtcacgacgcgattagcttacttattgaaggtatgacttgcgtgtcgtatgccgctcgcgctgaaaaaggtattaaggctgtacctggtgtaacggacgccagggagaatctggcgacggaacgcgccaccgtccgagggacggcatcggcggacgcagtaatcgcggcgccagaaagcagcgtatgggcagatgacgtttgtcggcgatggcaaccctatcctacacaaccacgacatgaggagaagcgtcataaacatcggtaa

SEQ ID NO: 394998 - DNA, 654 bp, Salmonella enterica
atgaatacatcagaaataagtcaaattgagcgtattttctaccccggctggctgatggccagccagctgcggggcggacaggaggttcgtgacggggaaggtctctatcgtcgggcctgccgcttggtgcaggaggcaaaagcggcgctcacggaggcaggctacagcgacatcagctgtgaccatatggtgtatgccctgtgtgcactgcttgatgagagcgtgatgaaccggggaaccaccgatgatggctatctgacctggcggcgtgacccgctgcaggcacacttctttggcactctcaatgccggtgaggagttgtgggaaaggatccgggatctgctgaaagaaatcgcccctgacgccgccgtcctgacctgtatgcaccggactctgcaactggggtttgtggggcaatatcgcgcccaggatgatgagcgtcgggaagatattgttcgcgcgcttgcggaacgggtaccggcctttacgctggcacaggacgctcccattgttgcccgggcatcacgcctgcgcagcggccgtcgcgggtactggctgagctgggttgtggccgctgtcgccctggtggcgctctggttcttcctttcgtcttcgcttaccgaactggtaagccagaccgtcaggccggggtaa

SEQ ID NO: 394999 - DNA, 2346 bp, Salmonella enterica
atgaaaatcagttacccgctcagggacaccagcggcaaagaatttcgctcactggaagatgttatgcggcttatcgacggggaagcgcacgggacgtggctgctgggtgcgaacggcctatggcatggcgggatccatatcagtgatatttctaatcccttttcagccctgaaccctgatgcgatcaataccggggaacctgtgccgctccagtttatggcagacggtattattgtggcgtaccggttaaacaatgaatatctgaccgctccgtactgtggacaacagctgcgttacagcagcagctttgtgctggtgaaatcgcagtgcaaacccgacccgcaaaaggaaaagagctggctggagttttacagcctgtatatgcatctggcgccggtcgctgattacccgaaatctccctgctataaagtcagggacggtcacagtggcatacggttacgccagtataaaaacgggcaacacgggttaccggaaggggagccggacaagggggaagccgggacatatcccgctccagcgaaaacggaaaagagcctgaaggcagacgaccgttttgtatcctcccggacggggcgtttttacgtcacgaagaatggcaaagccaccctgacaacctttggcctggtccgtttactgaaagagaatattccgggcaatgaacagtactgggtaactctggatccggagttgatggagccggatggtgaaattcaggggctgatgccggaatggatgctaaaggcaaaacaaaaaggtgcttatggttccgtggaactgacggaaggaacggaagaatggaaggtcagctccggaacacctgttggatttatgggatgtacggaatccccgggtgaggggaataaacttgtggacagggaatggtttgtccatctggaggtgctgagtacggacagcagaatgcccggatttttagccaatccggagtgtgttaagggtgaaaaaaggtcagtgctggcacccaagggaaaagccctgtttaccctgcaggatgcggcgggacaaccggtatttaccccgatgtcggcgaggctgagcgcgcagtgcctgctctcccgggagtcagcaacgcctgtcacggatgagtcgcaaaaatggtggtataaaatcaacgggagtggctggttatcccaaaatgatgttgatgaagttaaccagtacgatttagagaaactcgggtttcaggcgctggaggagagtagcggcggcgatgtgatgaacagcccgtatgagagctggatcccccagacgtttgggacgataagccggatcgcagaacagggagcggattatcagtacggcctggtgccacaattttatcgtgacctgatagctgagatggacagcgatcgtgacggaaaagtgacgggagaagaaatcagacaggcaatggcggtacgtgatcctctggtgaaagatgtggtcaaccggctggtagtcaaacatcacagtgaatggtttggtggtcgttcaacagggcgctgggaagggttttataaggatctggactcgctggaagtgaaatactgtgagaaatggcaggcggatctggaatggatgagtaaagtgccaccctttgataaggatgaggctgtgtggcattttcatccggtggtgtttttagtcgagttaaatattacagatgaaatggatataagttggcttactgttccttttggacagttaacattcaattccgaggggaatgataaggaggaaagtatctacttttccagacgtccacatgtaccaaataacaatggtgtcgttgtcggtatttctggtgttacatttggacgaggcttagatctaggacagcaatcgagagcatatataaatagtctttttttagaactggaaaaagatgccgagccattatctgattcattaaaagagtggcttttgggtagcgtaggtaaacaaggtgctttagctttagcgtattgcaatgaaataaacaataaagtacctaaaaatgagcaattacttactcgaaagcaacagcacttcctttttaaagcagtatacaagcatcaatatgaagtgacaaaacgtgttcttgccaatggggtagatattgacgatgtacgaatcacagcagatcttgattatttcgagcaaaaaattcaagatgttctggtcgatttaacatttagaggagataatgcccctagaacaagacgttattttattaaggacctaaatgaaagtaggcaagctttcataaataacttatccaatactcattggcgaactgcttttggggtccctcgtgaaagatttgatgcgagaaaagattatctataa

SEQ ID NO: 395000 - DNA, 405 bp, Salmonella enterica
atgaaaattatattgaatgtcagtgtgtttttattaaatttcgtgttaaatcaggctcatgcagaagttagtgatgagcaagagaattttaacataataaacgaaaactatgttaaagcagataatgaactgaacttgttatataaaatgcaaattcaacaatataaaaaggagggggctgatttctatggtcaaaaagaatctcgcgatgtttacctgaaaaaatcccaacaagtctggataaaaatgagagatgccagttgtaactatgaaacatatgagtcaagaactggcactggtttttcaagtatatatactcaatgcttattagataaaacaaaagaaagaataaagtatttaaaaaaaataaataaagagtggcgaagcgaagttaatagaaaatga

SEQ ID NO: 395001 - DNA, 303 bp, Salmonella enterica
atgaaattttcgattgatgataaaatgggaaatagcattacaggaacgttggttcttgtgttactcttctttttaaatatgatttatgcgtgcggtgataaccctaacgcccttgttcaggggccatttgaagataactcttttactaatggagttatttgttttcaatatgcgcctgataaaagggatatatatttttatctaggtcgtattaatgacggtgagttatataactctaaagtcgatatcttctattactctgatgctccagtgaaattaatgactatttctttatgcaagtaa

SEQ ID NO: 395002 - DNA, 192 bp, Salmonella enterica
atgagtgcaataatgttcaattatctgatcggatatttctttgtgcaaaaaatatatgagaacaatgatgttgaacttaatcaaatttataaaaatattatgaaaataatcgccgaagaatataagtcacagccagaattaaaagccgaatgcattgaaaaatacaaacatcacaaagatcatctcctgtaa

SEQ ID NO: 395003 - DNA, 684 bp, Salmonella enterica
atgggcgtcaatattaaatgtaattgtgacgtgggcgggtcgctatcgctggcgcaactcaaagccgaatatcgcgccgtgctgatgaccgtcgggatgtcctacggctctgatttaccgttatttgagcaagccagtcacgtagaaattgccgttgattttttacagcgcgcccgtcaggccgacggcgatattagcgttccgcgtagcgcattaattattggcggcggcgacgtagcgatggatgtcgccagtacgttaaaaattctcggctgcccttccgtcacctgcgtggcgcgggaagaattagccgaattccccgccagcgaaaaagaatttaccagcacgcaggcattaggcgtatcgattattgatggctttacgcctgtcgccgtcagcggaaataaagtgacctttcaccatgtgcgccattcaggggagctgacgctggaagcggagcgtattattttggcagtgggacaacatgcgcggctggatgcctttgcagatataaaagcgcagcataatattatcaacaatcacgattatcaaaccgccgacccggcgctatttgccgctggcgatattgttaaaggcgataaggccgtcgtttatgcggtaaaaaccggaaaagaagccgctcaggctattcatcattatttagaggaggactgctcatgttaa

SEQ ID NO: 395004 - DNA, 393 bp, Salmonella enterica
atgggtcgaggtacgatactccacgcccggatgcgtcagcgccgcttcccataccgttgcatgaatatctacccggtgaattactgcatatggcccgccaaaatggtcacggaacgcctgtccggtttcaatgcgtaccacttcttcggcattcacggcatccatcatggtaatgtgatcggtaaacaccgcacgctggcgggcaacatcgtccacaccgagactatccagcgccaagaaagcgttcggcccaagctgaatgccagcgacagcgcgatcgccgcgccgccgattccgccacctacaataattgcgcttgtcactttagttatggttattctccttttcaggccgggattttatcttgttgattttccggcgcggcggcaataa

SEQ ID NO: 395005 - DNA, 330 bp, Salmonella enterica
atgaatgttaatacagactttaatgggcaaatgtatagtcttactggacggcgtgatgaagaaaaaccagtagctgaaattgttgagtttaacgcttacggcaataaacccacgtgcttaatgtgtctgggaatctctgcatcggctacaggtgttttaggtggggtatgctcggcagtcgtcgctagtgtaagcagtggtgctgtatataataccgccttgacggttttaggtgcatcgattggcgtggctggtattggtatgatgggaatatgcaccggattataccttggcgcaaatgccattagaacatatccagcttatccataa

SEQ ID NO: 395006 - DNA, 1122 bp, Salmonella enterica
atgaataaaatgaacattgttattactggtgcaaatggttttattgggaagaatttacgtttttttttacaagaaaatggctataatgaaataaattgtattgagaaagaaactacatcagaacagttatatcaggctcttaaaaatgctaattttgtatttcacttggctggtattaatcgatcaataaataggtctgagttttacgagggaaattcagaacttacagagtctattacgaacattttagaggatataggaaataaaactccactattaataacctcttcaattcaagccgggcttgataatgattatggaaaaagcaaggcagctgccgaattcgtagtaaaaaaatatgccgaagatactggggctaaagtttttatatttcgtttaccaaatgtgtttggaaaatggtgtaaacctgattataattcagtaattgcaacgttttgctataacattattaacgacaaagatattataatcaataatcctgatacaaagctaaatatagtttatattgatgacgtctgcaaaacctttgtaaactgtattaagggccttatagctccagagaagtcagaggttaaccctgtttataatacaacagttggtgaaattgcatctataattaaatcatttaaagagaagcaacacagtttaaacgtggataaagttggctcggggttaataagagctctttatgctacttatttaagctactattcaacgaatgacttctcatattcagtgccccgttatgaagatcctcgtggaacatttgttgaaatgctcaaaacaaaggagtctggtcagatttcattttttactgctcatccggggattacaagaggtggccattatcatcatactaaaaatgaaaagtttcttgttattaaaggtcgagcaagatttacgtttcggcatatagataccaaggagtactatgagttatttgttgatggtgaggagtctaaaatagttgaaacagtacctggatgggctcatgatataactaatgtcggtaatgaagaaatgattgtaatgctatgggcgaatgaagtattcgattccctaaatccagatacagtaaactataagaattttgaagagtaa

SEQ ID NO: 395007 - DNA, 1131 bp, Salmonella enterica
atgaaaaagttaaatgttatgacagttgttggtacacgccctgagataattcgccttgctagagtattggcgaaaatggatgagtattttgaacatactttggtgcatacaggacaaaactatgactacgaacttaatcaaatattctttgatgaccttgcggtccgcaaacctgattattttttgaatgcagcgggtaaaaatgctgctgaaacgattgggcaaattattatcaagattgatgaagttttggaatctgtaagaccggatgctttattggtacttggtgatacaaatagctgtctttctgttattccagcaaaacgccgtaagataccaacttttcatatggaagctggtaatagatgtttcgatatgcgtgtgccagaagagattaaccgtcggattgttgatcacacagctgatattaatttaacctacagtgatatagctcgcgaatacttgctagctgaaggattacaagcggatcgtattattaagactggcagtccaatgttcgaagttttaaattattatgctgatggtattgacagttccgatgtattgaggcgcctcaaactcaatactggggaatattttgttgttagtgctcatcgagaggaaaatgttgactcggacaagaatttgttcaaacttacggattccttaaataagcttgttgaaaattatcaattgcctgtaattgtatctactcatccgagaactcaaaaaagaattgatgagaaagacattcgttttaatcccatggtaaaattgataaaacctttaggttttaaagattatgttaaacttcaaaaagaggcacatactgtgctttctgatagtggtacaattactgaggagtcatccattctaaatttccccgccttaaatattcgtgaaactcacgagcgtccagagggtatggaggagggaactgtaatgatgactggagttgatccagaacgtatactacaggcccttgaaattataaaaaatcaaccatgtaatgctaatcgtttgctacgaagagttagtgattattctatgcctaacgtttcggataaggttatacgaattatcctgtcctatactgattatgttaagagagttgtttggaaagagtattaa

SEQ ID NO: 395008 - DNA, 1218 bp, Salmonella enterica
atgaaattagcgttaataatagatgattatttacctcatagcacccgggttggtgcaaagatgttccatgagctggcgcttcaattaaattcaagaggtcatgaaattacagttattacaccatctcataaccaaagagatgaattgatcattgaaaaactagataatatttttatctggcgtttcaggagtggtattctgaaggatacaggtaaactcagaagagctataaacgaaacattattatcttttcgagcctggaaatcaatacgtcgggaaatacatcacatacattttgacggaatcgtatactactcaccatccatattttggggaggggttgttaaaaagttaaaaaaacatttccaatgtcctgcatatcttgttttgagagatattttccctcaatgggctgtagatgcagaacttataaaaagaggttccttgactgaaaagtattttaaattttttgaagttcaatcttataaacaagcctcgaaaattggattgatgtcgcagagaaatttagaaatcttttcctcggaacatcgtaattatccttgcgaagtactacataattgggctgctctagaagaagttaataaatttgaaaaagatttttattcgattcgggccgaacttgatctgcatgataaaattatttttttctatggaggtaatattggccatgcacaggatatggccaatttgatgcggttagtaaaaaaaatgagtgccgtacaaaaggcgcatttcttgtttgtcggtcagggtgatgaggttggcttggttaataggctggcaaatgaatggaaattaaaaaattttacatacctaccatcggtaagtcagaagaaatttaaaatgattttatctgaaattgatattggattattttcattatcggctaaacacacggcccataatttccccggtaagttattaggatatatggtggaatcggttccgatactcggtagtattaatgctggtaatgatttatttgacattgtgaattttcattcagctggaattattcatattaatggtgaggatgagaaactgtttgagtctgctaggttgcttttaaataatgaaagcctgcgaaagcaatttggcaagaatgcttacaaacttctcgaaactgagttttctgtagaatctgcagctagaattattgaagaatgtattgaggcagatcatgataaaaataaataa

SEQ ID NO: 395009 - DNA, 411 bp, Salmonella enterica
atgataaaaataaataaagatacaattgataagctttatttaaaagcatctctatcaaatagaaaacgagcacatttgccattacattcatctcactatgaaaaggttcagagaatcattattgcttttattgaggatagttacgtagatcctcattatcatgaattggagcatcagtgggaaatgtttgtggttcttgaggggatgctagaggtttgtctatatgatgatttaggtaatattgtggatacgtttagagttggaccttcaactgatttatcaattattcaattcaatccgggggatattcatagtgtaaagtgcctatcacccaaagcattaatggttgaagttaaagagggcccttttgatgaaaaactcgcgaaaaggttgccagattggtttacttag

SEQ ID NO: 395010 - DNA, 1239 bp, Salmonella enterica
gtggcgagtactaaaaaaaatatattatatttggcaataagccaaggttcaaattatttgctccccttgcttatttatccagtaataattcgcgccattggtattaatgcgttcggtaaagttacttttgcaattgtgataatgcaaatgttttttttaattattgattttggctttggttatagtgcaacgaagcatgtagcattaaattatagaaataaagtttttctttctcattattttgcaaagattactgcggctagatttttattctttacaggaacggttgtaatattatttataggactattagttccaccgctaaatgaaatccgaaatcttttatttatcgcgatgattgcggttttttttaatatcatcaatcctaattggtttttgcaaggtttaggaatgatgaaaataatggctataaattctctaatttccagagggattagcattgttttgatttatttatctataaaatggataaataatatttattatattatagtggtgttggtttttccttatatatattattcttttgcttcatttttatttgtacttaaaaaaggttatattgttctgtacaaaccaaaaattcatgaggttcttgatgtaataaaagatagtgcatacttctttttttcgactttagctacaagtgcctatactatgttaacaccgataatacttggaagtatttcggggacggtgtctcttgggatctttaattctgctaacttgattaagcaaggatttgcaggtttaatatcccccatcattcaagcattctatccaaaagttaatgttgtctataaagaagaaccgtctaatgcaagaagattggtttataaattgctattgtgtattgtttttttattctcattagcttctttaccgtttgttttattttcatctgaaattgcttcgttactttttggtaataaagcaggggatatactcgaaacattgagattaatgtctttcctgccattattaattgctataaattcaattgtcggacttttgatattagtacctgaaggagaaaataagaagtattttaatgttattatttcgggaggaattgtttgcttattatcagtttatcccctttgtttttattatggagcaagtggagcagcgattagtttaataatagcagaaatagtggtgtttttgggtatgatcaaatatcttataaagggtagcgtgtggacaaaaagaaaatga

SEQ ID NO: 395011 - DNA, 987 bp, Salmonella enterica
atgaagttatctattatcattcctatatggaagagacatgttcagttagacattattcttacaaaattaaatgagcaggctaaagcgttaagtataacaccagagatcgtattgtgcgacagtcatagtggtaacgagatagatgtggttgtagaaaaaggtataaataatctgcagtcattgtctattatccatacacatactaaaaatatacttgctgcaaagagaaatcatggtgtgtctgtatcaactggtgactatttgatttttctagacgatgattgtattcctgatacctcatttttagaatcagtttttgaaattattcacgatatgaatgttaatacaatttattgtggcgaagttagattcgaaccagagcttgttaagtcaagtaattattatagatatcgtgactctaaacatccggaatataatgaatttgccccgatatatttcaatgaatggacatttgtggcaatgaactgtttggtagccagagaaacttttaatcgtcacaatgttttttataatgaaaacttcctcggatatgggtgtgaagatcatgagtttgcttcgcatctgaagaataggggcctaataattaaattttcgaaacaaaaaatatatcaccatgaatatgatggtaatatttcaatttatgctaataaaataagggcaacggctagagatggaatgtttgttttgttaaaaactaccccggatattatcaatacaaacactaaattacgtatgattgaaaggttttttagtaaaggcggcttcagagcaaaatttattaaaaatttgttttttaatgaatttattagtaatgcggttactgattttttgctgaaatatgatgatgatagtaaattttattttccacgattgtacagatatgtacttatctgtgcttatattaagggcgcatgcgagcgagggagtatagataggaataaattatatcaaaactggtatgtttaa

SEQ ID NO: 395012 - DNA, 1158 bp, Salmonella enterica
atgttagtttctatgataaccagctttcttatcttttttgtggttttttttaggctatcattattttatccatatttttatttcgcattgatccctgctgtttttggattttttgtgtttattaaaaatatcaataataaatcttctgtaataataagaaatcagtcacagttatttgtttttattatgctggttatgataacaattttttgttttgcatatgatttgtttcagaaatctattgacgtacaaagttctttttttattagaatgtcgatgcttgtggttctgtctatattgcctgcttattttttggtatataatttaaaaggggatgagagtaggcttaaaaaaataattatcttatcaatttggatacagattgcattatttttattaatgtattttagcgatggtgcgaaacatactttgtatagtatatttggcatgggcgactctgttaatctgcttgatcaaaacgatcgtgttagggggtttggtctttctaccgaaattaactatatgtcaccatttttaatgatttttttatgtttttttattttacagaataagtattttttattgctgatgacttgtttgacgcaaatagttaattctaatatggccgtattagctattgtgactgctcttgttttttcgaaaataaaattgtctactaaaattattgccattatttttttatctattattgttttcagtattggatcaattcttttcccacggttttatgatgagttcataaatagtggaggcacccgaacattagaaattttgattcaacaacatgtttttaccattggaactatagattggtttactagtttcttcggttttcaacagaatatctcatcttctattccagatctctctgtgagttcagatatgggctgggtaattatgttcaattatggcggcgggctatttattttacaatttatattattattagtcgcattgtctatagcggcattcggacatactaaattagcgtttgtttggttcttggttggcatcctttttaatactaaaggattagccttggggcctaatggttatatgtttatcacatttatctatatatttatgcgctgctatcgggcatatgaagaaaaatttttattcaaaaatatatactga

SEQ ID NO: 395013 - DNA, 129 bp, Salmonella enterica
atgagcaacaaaattgagaaccctgtcgtgcttggcggtatgcagtgggggaacattctacgccgaactgtcagcaccctttattctgctgcgatgatcgctggtgctgtctatgcagccagtctgtga

SEQ ID NO: 395014 - DNA, 396 bp, Salmonella enterica
atgaaagagcgtggaataaccgatggcttaaccatgaatcagcttgcagaacgtaatgctgagtatgtgatgactatcgctgagctggaagaaaaatgcgcggcgatgactgcggagaatgccgggctgaaggctgcgattgattcaactatcggatggcagcaatcaaccgatccggtgaatgttgaaagcatcagaatgctagtcgacattgaaaccccggctaccgacgcttttctggctgaagtgcgggcgcagggtgctgatgagcttgcagaattatatttcacactggcagcgcatgaggctaatcgatacatagctgatagttggcgcgagtccgctcgattcgcaaaagactacgccgcccaacttcgcaaaggcggtgcagcatga

SEQ ID NO: 395015 - DNA, 330 bp, Salmonella enterica
atgagagcttcaattagttatgtcgacgattgccacctaagcgtgcgtgttgatgaaattgtgtcatccgtgccaacttttccgacaaaaaatgcagccgttaatgcaggcgcgccattcggatggaggacggcagttcgtattgagcgtcgattcgaaaacgtttgggtggtaggtaagaaatgcttccaaagcgatcgctctgcagggcttaattttgaagcatatcgattcccgctcctccgatgggagaaagagggcgggattacaaaatgcccaattctttccgtacgcagattcaagcaggaggcaaccagtgagcaagattga

SEQ ID NO: 395016 - DNA, 525 bp, Salmonella enterica
gtgagcaagattgactatcaggcactgcgagaggcggcagagaaagcaacgtggggagactggggctcatataaaccacaccgtggcgcacgtggttatgaggtccgactaagtagtcaggccattgcgcaacacgttctgaaaaacaacgctgaatttattgctgcctttaatccaaaggttgctttggcactactggatgaacgggaaagaaaccagcaatacatcaaacgccgtgaccaggagaacgaggaaattgcgctaacggtagggaagctgcgtgttgagcttgaggagacaaaatcaaaactcaacgagcagcgtgagtattacgagggcgttattgctgatggaagtaagcgcatagcagaactggaggcgcggacggtggtagtaaagcaattctatgacttccaaattgtccgctatggcgctactgaggattacgcgaaaggctatatcgactgccagagaaattataacaaagcaatttacgccgctggcatcaaggttaagggggagtga

SEQ ID NO: 395017 - DNA, 258 bp, Salmonella enterica
atggctactttgacgaaacaggaaaaagcctgggtaaagaaactcaataagctactggcggagtgtccctcaaatcggatcgcgtttgcgacgactggcgattgtgaagtatcgctatttgatgtgacgcgttacggggatatctgcgacctggtagataacgagcatagtgaatttatccccgccgctatgcgcatcggcgcagcatttaatgagtgcctgacattccctaaccaagttgaaagcacggctggctga

SEQ ID NO: 395018 - DNA, 387 bp, Salmonella enterica
atgaccactattaccagagaacgcctgcttaaaatccagcagtggagcgaaacatatggcgctggtagcaacgttatgctgccggcagaagaagcggaagagctggcgcgtatcgcgctggcatcgctggaagcaaaacctgtagcgtgggagtgtggagaaaacataattctatttaatcctgacaccgttgaggcgtatgcaaaacgtgtggaaatatcacctaaaccactatacgcggccccgccagtgcctgaaaaaatgaacttttccaccgcctgcaactttgtgcaaatcaacggaatggcgaaggaggaccgggcaactcttgcaatgagagcatggaacgcctgtagctccgccatgctcaacggaggtaaatcgtga

SEQ ID NO: 395019 - DNA, 378 bp, Salmonella enterica
atgaatacctacaatatcactctgccgtggccgccgagcaacaatcggtattaccgacacaatcgcgggcgcacgcacatcagcgcagaagggcaggcgtaccgcgatagcgtcgccagaatcatcaaagattcaatgctggacatcggcctgaccacgccggtgaaaatccgtatcgagtgccatatgccggaccgccgccgtcgcgacctcgacaatctgcaaaaggccgcgttcgacgcgctgacgaaatccgggttctggctcgacgatcagcaggttgattactacagcgtcaagagaatgccgatcgttaaaggcggcaggcttgagttaaccatcactgatctggaggcagcgtggaaatatcctttttag

SEQ ID NO: 395020 - DNA, 138 bp, Salmonella enterica
atgacatttcaatcctaccttgccgatcatctccgcgttcgttggcagcggctgcgcatgttccgctttgccggttcggttctcgttgattatcggatcctgaggaattacctgaaaaccacaggcggcaaagtatga

SEQ ID NO: 395021 - DNA, 681 bp, Salmonella enterica
atgaatcagcaatatttacagtacgtgcgagaagagctgatggtggctacctccgacctgagcggggcgacgaaagggcagttggttgctttcgccgagaacgcgatattcaccgctacaggacgtagccgggggcggaagaaggtctatgacccgcagaaaaagcgcatggttaatcctgatgggccgccgatgagcgggaatcagtctcatgctaaggggtcacatatcccactggtacagcctgttgagtacagaacggcgacctggcgccgcgccgtcctgtcactggaagagcaccagaaagcttggctgttgtggaattacagcgacgatacggcgtttgcccatcaagtggcattagtgcaatgggcgtgggcagaattccagaaggccctggctgggcggaagctggctgccaaaacaatacagcggctgcggcagctaatctggctggcggctcaggatgtgaaaaccactctgcgcggcggcgatccgtatcagtatggggatttggcgagcctgtgcggtgtgaataaaaccaactggtcgcagaattatgttgagcactgggggctgatgctaagtatttttacccggcttgatatcgatgcgcttataactgtttcgcgatcacgttcacagcaaaaagcagcaaattatcagcaatgtattgcataa

SEQ ID NO: 395022 - DNA, 474 bp, Salmonella enterica
atgtttgttggcctgttgctcgtctctctaattgttgccggtcggctggcaaatcactaccgcaataacgccatcacctacaaagaccagcgcgacaccgctacccacaagctgacactggcgaacgcgacaattaccgatatgcaaacgcgccagcgtgatgttgctgccctcgatgcgaaatacacaaaggaattagctgatgcacagaccaggaatactgatttgcagcgccgccttgctgctggtggccgggtgcgcgtcaaaggacgttgtacagtgccagccagtaccacatccgccagcttgggcaatgcagccaccgtcgaactctctcgggattctggacaaaacgttctcagtatccgatccggaattatcagcgaccaggcaaaactgaagtacctgcaagagtacgtcaggacacaatgtttgaagcgagggctgaaatggaagaagccagaattctggtaa

SEQ ID NO: 395023 - DNA, 153 bp, Salmonella enterica
atggaagaagccagaattctggtaatcattatgttcctttgtggtctggcgttagggttcgtgtttgggatgatgtgcaacagggataaggctgatatcaggactttcgagaacaacagggcaggacaaaccgatggcacgattaaacgttga

SEQ ID NO: 395024 - DNA, 378 bp, Salmonella enterica
atgaacaaatacgcaagcgccgctttaaaggcacatcattatttagttgtgagtaagtcaatgcctcctcgcgaggcatgggctacggctgtagctgaggttacagaaagtgagtctgcaagaaagaaagtatgcccaaaaataacatttcttaccctggctgattgtggttatctgaagaacatagaagcacggcatgaggagaaaaaaggaggaaagctgtaccagagagcaatcctggttgcaaatctgatattagatttccctgcaatcagcaaagccgagttggctgataaaacttgctatcgagacaggcaagggtcttatgacattgttatagcacttgctcaaaaaggattgcttcaacatccaaagtaa

SEQ ID NO: 395025 - DNA, 513 bp, Salmonella enterica
atgaaatatccaactgttattgtcaatggtgtgtctgttcgtgttgacgaagaagggcgctatagcctgaatgatcttcatgctgcggctgtagctgaaggaaaagctaccgagtcacagcgaccaagtaactttataaaaagtgggcaggttaaacgatttgttcatgagttgaccaaagctacaaaaatagcttcggtcaagattatcaaaggcggaactcaatcaggcatatgggggcttgaattagtggcgatccgttatgcagcatggctgagtgttgagttcgaaattaaggtttaccagactttccagatggttatgagaagcggtattgatgccatgtctcgcctgaacaaaattgaccacatcatcaacacggaaaccaaagcgataagccagtgcgcaagtcaaatggctaagtggggcgttggtgggcggaaaagattgcttcacgttgctcgtgagcgagtagtgaatgaagtgcaaatgtatttacccggcatggtgtga

SEQ ID NO: 395026 - DNA, 390 bp, Salmonella enterica
atggcgaaagaaaaactggttactatccatgttcacaccccgtttacgctgacgctcggcgatcaatcaaaacaggcattttgtacagggcgccataatgtaccggaagacgtcgcgtcgcactggtttacccgggcgcacgctgagctttccgaaagcggatcgaatgaaactgatgaccagcaactcattatcgacagcctgcaagcgcagattgccgacaaagataagcagattgtcgataaagatcagctgattgccgatctgaaagaagctctgctcaagctgcaggagcagaacgacagcctgcaggcgcagattgctgccgcccggactggcggtaatggggcgaaagatgccaaagaatcaaagcctgccaacagtaagtga

SEQ ID NO: 395027 - DNA, 582 bp, Salmonella enterica
atgaaaagcggtgtaaccattcgtgccgataatgctcagtccattctcgatgcgctcaaatcgttgaccaaaaaagatgttctggtcggcatcccggcggaagacagcgatcgggatgatgttccgttcggtaatgccgggattgggtatatcaacgaatacggctcaccagcgcaaaatatcccaccacgtccgcatcttgtacccggcgttaaatcagttgaagaccagacgatgccacagcttaaagctgcggcacaagccgcgcttgaaggggacgcatcgggggcagaaagggccctcaatcaggcggggtcgttggctgctaatggcgtcaggcgttacatgactattaccggccttactccgctcgctgatagcaccgttgaagcccgcgcacgccgtggtcgcaaaggggcgaaagctgagttagctcgcagatcggcagatggaaggcttaatgctatcaacccagattctggtcaattgataagcaatgagaatgtaaggccgttgattgataccggacagtaccgcagatccattacccatgttgtgagggataaagatgccgactcttga

SEQ ID NO: 395028 - DNA, 723 bp, Salmonella enterica
gtggtaaaggcaacttgtctattatttgtatttttacttagtggttgcggccttttaccacaaaaccgagctgtaacagttaacgaatggattgcccagaaaaaatctgagcaacaaaaactagaccaagaaaataaaatcgccaatcaaaaaagaatagatcagcaaaaagccgagtccgatgccttcgagcaatcacatccagaagtcatactgtccgatgttggtaatgccttcgaaggggataaattaaaaagtctaagaaattcatttaataagattgtttttgttacgaggtatccggacaccgataaccctaagcaagtctatacctatgttggtagctataagttgtctcttgaccagataacaaggtcgattacttcatattttgatgattgtaagaaaatatcagcatactcaggtgctgattataacaaggtgtgttttgattctgtatccgaggacttatctctatttgcagacattattaatgaccaaaagatccctgacttaactaaaagcacctcattaggacagtctacctatgggtataaaatcgattttggtcacgcagctcgcttggcaagaatgcactttaaaatgtgtcaagatcaaaacaataaggggtatgtggaaatggttaccgtagctgtaccctgtagtgggcatggtgacgttttaaattcatggtccgcgcgcaaaataggggcaattgaataa

SEQ ID NO: 395029 - DNA, 519 bp, Salmonella enterica
atgtgggatgcattaaaatattacacttttatttttttcagcaaaaaagatgccagagttgcaagggttctcttcaatacatgtttaatctctaagcgcaagagactaaacattcttcgtaaagctgggttggtagttacctataaaactacaattgtagaaccattttattttgagcaagggaatattaatctggcaggaagggtttttataaatgcaaattgtgtttttcttgatgcaggaaaaataagtattggcaacaatacggcaatcggccctaatgttgtgctaacaacagttacacaccctatccagccagaaaaacgccctaaagaaactatctgcgcgcctatacatattggagataatgtatggataggtgctaactcaacgatattacccggggtgtctatcggtgacaatagtgttattgccgctaacagcatggtgaatacaaatgtaccgcctgacacactttatgcaggttctcctgcaacgctaaaaaaacatttagtataa

SEQ ID NO: 395030 - DNA, 408 bp, Salmonella enterica
atggatacgctgaccccagccgaacgaagctatgttatgtcccgagttaagggaaagaataccagtccagagcgaatcgtcagacgcctcgtttatcatgccgggtttcgttatcgtttatgcgatccgcggctaccgggcaagcccgatctggtcttttggggaaggcggaaagctatcttcgtacatggctgcttttggcatggccatgagggatgccgacggaatcgcaggccaaagtcaaatcaggaatattggtctgcgaaactggaaagaaatagagcgagggattcgctgaacttactaaagctacatgaaatgggctggcaggtattggttgtatgggaatgcgaacttaaagagactgatattcttctgggaaggctgaaagcgtttttaaaagaatga

SEQ ID NO: 395031 - DNA, 5838 bp, Salmonella enterica
atgttagatccgattggcggttttcgccgtattcaggacttctttatttcatatattgaaaccagcttccgaatcgccgacccttcggtcgcggcgtcgaggcgcgaactgctgaacagcaacggggagttcgccgcggaaccttatattgaacccgttttacgatacgcgtcttcgaataagacccttgaagatttggccgatatggaaaacgggccgttaaataatttatcgccggaaggccgaagtgcgttcgtcgaactggcgttatccggtttgttcgattcgaaatccggcgacgcggcctggccgcgtcgttcagtccatacgccttatcttcatcaggtgaaaatgctggagcgcggcattcgccccggttgccccggcatagtaacatcaggtacgggttcaggaaaaacggaaagctttatgttgcccatactggccgcattatcgaatgaggcaatcagttggcccattccctgcgacggttacctgcgaaaccgatggtggaataacgaggaagcgaactgggtttcgcgccgtaaaggagaaaaacgcccggcggcggtcagagcgctagtgctttacccgatgaacgcgctggttgaagatcaaatggcgcgtttgcgtaagacgctggattccgatgaggcgcgacagacgatggaagatcatttcgccggaaaccggattttcttcgggcaatataccagcgccacgccggttaccggttacgccagccatccccgtctttccggcgatcgctcggagaaaaaccgccgcgcccgtaatcttgaaaaattacgtaaggcgttaaaccggatcgattgcgatcaacaggccgcgcgcgcgttcgacgaaaacaaaaacgaaaagtcgtcggaaaagacccgatatatatttccttccacagacggcggcgaaatggtgtctcgctgggatatgcaggccgcgccgcctgacgttctcgtcaccaacgcctccatgctgggagcgatgctttcacgggaagtcgaagacgttattttcgacatgacgcgcgaatggctgatgaacaatgacgacgcttacttttatctggtattcgatgaattgcatttaatgcgcggctccgcagggacggaaaccgctatgctgattaaatcgctgatcattcgactcggacttgacgatccgaagcatcgctacaagctgcgtttgctggcgtcttccgcgtctctgccgatggatggcgcggatggagaacaatcgagaaagtatctgcgcgatctcttcgcccccttcggcacttatcgcgattctcgggataccggcagcgatgcgccggatttctggcgtaactgcgtcattgaaggagctccgttcatacctgaaccagaaagaaaagtcgacgcgcggccttttgccgccctgatgcgaacggcgctggcagggcaaggcgacgctgtccgccgcgtggagatgacagacgagtttgagcgagctttgttcaacgcttttcaggcccttggcgtgaaggagcgagatagccgtcagggtattaagccggcggcggaaatcgcagccgcgttattaacaaacgcctgcattgaaaaaaacggcgacaaaccgcgtgcgacggcccccaagcacatcatcgacaagatttttctggagaaaagctggaacggagaggaagagtctgaacttgcgttacgcgggttaatgttgttgcgcgcgcttccggattctggacttgctagcgaaaaacctgacgccgctacgccggcttttcgcgtgcatacgttcgtcagaaatatcgagggtttcttcgcgtctgtctggcccggagagcgaaaagcgaaattcgccgatttttgcctggaacgcggcctgtcgcacgcgccttcagcctcaggagaaaaacgcggtcggcgtttattcgaaatgctttattgcgaagcttgcggcgatttactgcttggcggccagaggggacaaagttgcgaaggcgctacggtagagctgttgccctcggcgaccaacctggaaaatcttcccgaacgccccggcgcggaatattacgatgatatgacgctggatgagtttgcggttttctggcctgttgaaaaaacgcccgccgccagtgaaaaagggtgggacgtctggcagaaagcggcgctgaatcctgtcacaggcattgtgactgtcgggcaagaaacatcggcgacgaacgccgagacggttcacggatatctctatttccagaatccgcccccggcgaaaaaaggagagccggtaaaaccgccttccgcgcaacctttctgttgtcctaactgcggtatcgattattccagccgaccggcgaccaatcgagccagaacgcccattcgcgcattccgtaccggcgtgacgaagtcatctcaactggtggcgacagagctattcgaattgctgcacgcgatcggcgcggacgcgaagagtattgtcttttcggatagccggcaagatgcggcgtcgatggcgctggagattgaacgtctgcacttacgcgatttgcgcagggaaatactggtcgcagccgccagagagatgatcagcgacgcggaaaaagaatatattccagaagaagaatttaaagaaaaaagagacaaagcgatacaggccggagacgatgataggctcgaaaggctgtatgagctcaaaacaaaccaaaaagggattgcgaatctgtgtaaattcaggcgggtaaagatagatagcttattggagtcggaaggcgattctatcggaaaaatatcctccgaattggcagggttgggaatatcgccttataaatatcgcccgagcgctgatggagacgacaaagccgtctggtacgacaattttataaaagacaagaacatcgtaaaataccatgaaaaactttctttgtctgacaggctggcgatcaaacagaggataatagacgatcaatccgaattaatagacgacgttattttcgccaatactttttttgcgttagaagaaaccggtctggcgtatccatgcgtctcggataatgagaatacgcccgaacttgacgcctggttaagggtattcgccggcgtctatcgcgttaaagaaaacaaatatgtcgatcccgaacaatccgacggctggcatgttggaaaggatgttaaaaaagcaaaagtcaagcgcctcgccagagccttattcggcgacgataattatctggataatttgacgcaagtcttaaatcagttcgccgctcgaggacatacggcaggtttactcaatattggcaaattgttcctcaaagtagcgaaatcaggcgatccctactggcaatgcggcaactgcgggcggatccacttacatttagggtttaaacgttgtacccgttgctcggaaccgcttgatatcaaccccaaaggttttgttgaaacgctatgggaagagaatttccttggcaaacgcattgcgcgcggcgaacgggacggcgttaagcgcttccggctaaacgtcgaagaattaacgggacagacggatgatttttccgatcggctgcgtaaattcaagggcattttcgtcgataagatgagcgaacttgaaaagctggacgccgagatcgatatgcttgccgtcaccacgactatggaagtcggcatcgatatcggttcgcttcagtcggtttatcaggccaacatgccgcctcagcgctttaattaccagcagcgcgtcggccgtgccggacgacgcggtcaggctttttcttttgtcattacgttttgccgcggacgcacgcacgacgcctattatttcgcccatcctcacgccattaccggcgatccgccgccgccgcccttcctggcggtagatcatgacgctatcccattaaggcttttgcggaaagtctggctcagaagcgcattcaatttattgcgtgaagaagattgcgaaaagaaggtggatttccctggagataaacttgtcccgcctgacgttcatggcgaatacgtttcgacgcatgattactattatgacgataacgcaaactgggctgaacgattgcagggcgcgctggaagcgacgcagagcatacgcgagcgttttatcgaagcggcgacgttcgatccgaaacagcgtcagcgtctttattccgcattgaatgcgaaaaaaataatcgatgaaatcgccgaactgagcgcttacgcgcctgacgataacgtaggacttgcccgttttctggctgaacgcggaaaactgccgatgtatggaatgccgacccgggtacgcaatctgtatctgggattacgtgaaaaaaaaggtctgaacaaccagactgaatacgaatggtcgacaatggatcgcgaccttgacctcgcggtttttgagtatgcccccggctcggtattaattaaggataagaaaaaacacaaggtgatcggcttcaccggaaattatcgggaaccacaaatccgggataatcgcgtgttggacctctctacagtgggttcgtggcaggagtcatccagtcatgtcgcattttgtccggcatgcggttccgcaaagctggagttgcgtcaaccggacaacgacattgattgcaaagattgcggcgcgcctatcaaacctgacgaattcaaactctatatcacgcctgccgctttccgtacggattttgaacccaaagacgatatggatagttttacccgcatgtctttaaggactaccgcgacggtattaaatgaagagattccgacgcgctgcgatcctttgattatacgacgtggcgaagtcactattttgcgccttaacgatggacccattaatggggagaaagaaggagaacgttttactatcgaccttgcgagcgatcaaaaggcgccagttcctttcgccgcttaccgcccgtcgattaaaggcgagcaggcgattgactcaaactggttaagagagcgcgataattcacgttggcggcgtaaaggcgagaaaaaaaatttcggcctggtatccggtaaggagactgagtcgcttcacctcgaattaatacggttcgattcccgccttaatctgaatatggtcgccagatacggcgagtatatgcacttgcctacgcgagcggcggccatcagcgcgattcagatattgacgcataaggccgccctctatctggatgtctcgcctgatgagttcgaaacgcttgaaccacgattgcattttggcaaacctatactgcaaatcgcggacgcgttaatcaatggttcaggattatgcaggcgccttgccgaaccggctgttgccggcgattctcctttaataatcaaattgctgcatgaaatcctggaggatgagcgcggctggccgatggtcgattttctaaagaaggatcatcctgttcaatgccggacagcatgttacaaatgcatacaacgctacggcaaccgccggtatcacggcttactggactggcgtttaggaatagcctatttacgcgccatggttacgccggaattcgcatgcggcctgaatcccgaagactggaaccatccagagatgaaaggatggaaagaaagagcatttgaacttgcggaggatgtcgaggcgttacgaccggggactatcacattgttaaaggaacattctttgccggttctcactgaaataaaggatggaaaagaactttggcgcgcggctgtcacgcatcccttatggcgatggcgagacgctgaacgcgacgctctgattgacgcttttggattggacgataaaggggcgccgctacgatttatcgacacttttgaactggaaagacgaccgttgcgcgcgctggcgcagcttaaacgaggctaa

SEQ ID NO: 395032 - DNA, 2097 bp, Salmonella enterica
atgaaagatattccctggtatattggccggtacgatcgacgaaacgatcggttttcttattttaaagtcgtcgcgcagcaaacagataacggttggcacgcgatcgacaaccccaaaaaaatgtttcctcgtaccggggaggtcgaacttactggttttgacgcatcaaagctacgaccaaatgattggattgtcttccaggttgattcaggcgcccgtagcaaattagcgagagccaaaaatccttgtcgtatttatccttactatgatttatccccggcgcaaaccctccttgagtcgcgtcgccgtcttagtttagaaggcatcgaaacatgcggcgaaccggggctatgggctatccgcttcgaagcgggcggcgtcattctggcgaacctggcagagtcgaaaccaggttgttttattctgtcaaggaatcagaacgttgctgaatacgcgttcaatgacggcggactcatcgccgtatccgggctgtctaaaaataaccaaatgttttatatgcccggcgcggatgcctcgcccacgcggctccatgactggaccccggataaaaactacattgaaaatgccgctcagcttatcgccgatgccgattcgtctatgatgatcgctacatggcttcgcaagcacgccgacgggcaaaacggaaaattaaaatccggcgtcgacgatctgttggccgccgctcaggccctccgctccggggaactggcgaaaaaactagaagaagaggattctctgtcccgggaactcgctaaagcgctattgaatgacggtcatatcgccgctctgcttgaacgccagatacaaaacatcgcggaagaagaacggacccgattgcgctccgagcagcgaaaagcgctcgacgaagcgttttccgacgaacgtctgcgccgtcgcgaagcgattgaagcggaaatgacgctttttcagacggagagaaaaagcgagatcgaacggcaaatcgcgcaatcgcgtttggacgaagaagaaaggttgcgcgcagaattcgcagaaaagcggttaagcatagaaaaaacgctaaaacatgaaaaagacgctttcgaaagcgaaatcgaccggctgaaaaacgccgccgctgatttatgccgtcaaaacgagagtcagcgccagacgttgtcttctctggaggctgagcgcgcagcgtcttcgagcgcgcttcgggatgccgaagagcgcgtcgccctggcgcgaagcgagcttgagaaaatcaatgccgctattgttgaaaaagcgcgccgaatggcgcatgcgacgatacctgagatacgccttcccgccgaagccaaaacagtttcccgcatagaacttgaccgtatcgtcagcgaacacaagttactgacgtccgagggaaaaatactgatggagaaattcctgacgttaacgctggccggcgaatgtccattgctgtacggccctgaaacacaggactttctggctatcgccgcgtcgcttatttcttcagggcgcgctatccgacagattgccgatccgacgatgattacctatgaggatctttgggttcgcgcgggaagcggtctggcgacgccgctttaccagggattgttgctgagcgacgccttacgacctcgcacgatcttcgccgttatcgaacgcgtcgaatgttccgccgcgcgcttctggttgcctgcgctgaaagacgggttgcgcaatggcgatctgccccggcgatttctggtctgcggcacaatggcgaatgaagatggcgaagaagcggaaaagataaaggaagaacatcttttcctgcgggtggaaaacatcgtcgatcgcaatgcgattacgcgcgcgccgctttatctttccgccaggcgtcatagcgaactggatcccggcgccgcgccgccagaatcgcttgcggaagaactcgctatcgcggaggaaatgtcgggcaatcgtctgaacgcggtaaatacgctgcgggcgactaaagcggcgctggaggtcgccgtgtccggcgataaagacaagacgatacgccaaaagcgattagtcgatttgttcgtgaacttacaaaatagcgaaatctgcgccccatag

SEQ ID NO: 395033 - DNA, 2553 bp, Salmonella enterica
atgaactggacgcctcccgtgaccttcgatggctgggaaagtaagctggtcgggtattttctccggttcggaactgacgacgacgcgcgtgatattcgctggttcgaagtcacgccgtcgacgctcgcggcggcattctccgacagcggagccagcgcggatgaaatagaaaaagcgtttcaggcttatatgtcgaaaataccggatctgccgctgcgccttgaaagcggcatgatggaaagatccaatgacaaatcgcccgggtattttacttatcttgtcatgacgctgcttgtcagcagtcagttcgacgcacaggaagaaagcaatgattttcgcctgaagttacagagctggctgcagacagaacatagttatcaaaatctggcgggcgtgaacgcgatgtggaaagcgttggccgggtggcttgagcggcgaatagagcgcggcgagccgtatcgccgactcaatctaccggaaatccccgcaagctggagccatatcggctataccctgcgtctggcttttcccgggagagcggatctgcgtttgatgcgccgtgttcttacgagccatccgcaaaccgtttcaagccccagactgctaattgattattttcaggcggcgattcaaaaagagaacgcctctcatcatgcgctgaggcaggcgtttagcgagttcagagatgcctggttttcagggcgcagagcgcttgccgacatgcctttctggcgtttgcgccagcgggctatggcgttgtcctccgatattgatacgcgtaaagcgatcatcgatatgcgcgtcgatttcgacggttcgcggtgttatttcagcgccgccggcgagaatgacgaaagcgttttcgccccttcgttgtcggacgccttattatcggcgtctgcggaaaatagcgacaatctgggaagcgccgcgcaaagcggcttactcttttttcatcaggtcggtcacggacgctggagagctatcgccgctcccgatgcgttttcgcccaaatttcacatcgcgttatcctgtcaatacgccgcgcgcgcaagccaatattttgacgatgcggttacagaaaacgactggattctgacgccgcgtccgcagagccgtcatgcggcgatggagatatttcgcgcgctgaaagcgtcgaccgcgctggatgaacacgtctctcgcccacagttttccgacggaatcagagtgccgggcggatggctgggattacccgcttttttgccgaccatcaaatcagacacgcagaattacagaatttacgcgccccagggaaacggcgcggaaatcagcgtcaggaaggcggatggacgtttgacgtcgtcaattcctcttagcggcgagtttattatcgaacctgagccggaaatcggcgagaaaacggcgccatggcggcggcgggcgcgtttttacgagcgcgccgttccgcgcccggctcaggaagaaagcgccagatatcgtctcgaacgtcttaccgactggagcgcgtctcccctgagcacgccgatattccgcgccgatatccccctgaaagcagaaagcggcgacgcgcctgtcgatcatctccttgaagcgatttacgcaagcggcgccagcggctgggaggaaatcgaattagtcgcgcttctggaacgcgccgcagacggcgtcaacgtatggcatctgattcgctgtttgcatgacgctggtctgatagagccgcgcttgcgtcagggctggaaaggccgcgtatggacgaccgtcagcccctcgttgttgcatattagcgccggagaaaacagcctcgtcgttgtggaaggcgccgtttgcgccagccttatcgatgattttcaaaccgcggttttagcgctgggcggaaaatattttcgtcgccgcggcgtcagcgtctggtcccctcccgtattcggcgcgaggatcgatgatcccgtcgcgttatcgcggattatgggatggcagcttgtcgatgcgtcgtcgacgcctgatatgacgccgctcgcgttaacgtccacttgtcgtaccgacgaattacacgcccaggcggcaatctgggactggcgttcagaacgcttctctgcgcatgcggcctccgataacgccgcggcgctgttaacgcgtcatgtccatccgggcgggcgcgatcacgatgtgtacaaggttgtttcccggcgcaaaacggcgtttttcttatcccgaaccgccgcgattatcgccgcatgcgttagcgcgcgtcgcccgatgttcagacgcgtcggggggcgtcgcttgatttgtcttttcgacgattgcggcttgcccgacgcgctggcggcgggattgcggcgcggcgcgctcagaaacggaggtccgacggaggacggatatgtttatccactcgacgacgtcgctttccgctggctgaatcgactgcttcccggatgcttcttttcgcgccagtctgatgacggcgatgacgcaaatcgtttagtttccgcagcgcgccattccggcgggaaagcgcgtctgatatggcgaaacggacgcctgacgttatag

SEQ ID NO: 395034 - DNA, 1236 bp, Salmonella enterica
atgaaaaaagaagccgttacaagcaaggatgagacaaaagaaacgcgcgaggcggaattcggtttctatgagtttttcgcgggcggcggcatggccagggccggtctgggaaaacggtggcgatgtctgttcgccaacgatatggacccgataaagacggcgaactatatcgaaaattggggaaacgagcatttcgataaccgcgatgtgcgtgaagtcaatcccggcgatctggccggacgcgcggatttggtctgggcctcatttccctgtcaggatttatcgctggccggcaacggacttgggatcggcgaaatcgacgccagcgaggatgaaaccacgcgttccggcgctgtatggccttttctggatttgatggacaaacttggcgaggacaaccggaagccgtcgatactggttctggaaaacgttcttgggttattaacgctggatcaagggcgccatttcgccgcgatatgccgccagttaagtaaaacgggttatcgttacggcgcgatgattattgacgcgaagcattttctgccacagtcccgtccccgcgtatttatcgtcgcgattgaccgtcagttttccattcccgcaggtttatattcacaagagccgctggcgcaatggcattcctcttcgctccttcgcgcctgtaacgcgctttcggaacaggcgcgcggtgactggatctggtggacgcccggcgacgcgccggatacccgaaccagagagcttgccgatattattgagtgcgaagataaaaacgcgttatggcattccgccgatgaaacccgccgattgatcgacatgatggcgcaggcgaatctggcgcgtctggcgaaggcgcaggaatcaggtgagacgatgatcggcagcctttatttacgcatgcgcaaagaaaagggcgttaatcggcaacgggcggaaattacattctcgacgattcttggttgtctgagaaccccgaaaggcggggcttctcgtccgcgtattatcgtcgtccgcggcaataaggtgagaacgcgtttattgtcagtccaagaggctgcggcgctgatggggctgccggaagattttatcctcccggcggcatatcagtcggcttttaaaatcatcggcgacgggcttgccgttccgtccgtccgttttctggccgaacgcatactggagcctctggcggaagcgatacgaaacgatagcagtcagacggaggacatgcaggtatga

SEQ ID NO: 395035 - DNA, 1011 bp, Salmonella enterica
atgtcgtttgcgatccatccctggtctgaacttgcgcaaggctacgatgggacaatcttattaggcaatggcgcgagtatcgccgtcagttcgcgttttgcctatggctccttgcttgaacgcgtcagacagcgagagagtctggcggaagatgcgcgaagactgtttgttttttttaaaaccgaagattttgagcttattctccgtatcgtctggcaggcttccaatgtaaataaatatttacggatagaggacgcgcgtacccacgcggcctatgtcagtattcgtgaatgtcttatccagaccgtccgcgacgtacatcccgaacatcatgacgttagcgggcaactgccttatatctatgattttttgaaaagattcgatacggttatttcgctcaactacgatcttatcgtttactggacgatgctatatggtctggatattccggatcgacatacatttaaagattgttttctgggcggcggcgtctttgcggaggactggcagcggctgagggcggcgtatggcgatgaacaatccagtacgttggttttttacccgcacggcagccttgtattatgccgaaaccgtgttgaacaggagcgaaaaattcatatccgtggagcaggtttgcttggctccattctggaacgctggcaaagcgaagaagtcgtccccttgttcgttagtgaaggaacgtacaggcagaaggttaacgctattcaaaacagcttttatctttcaacggtttatcgggaggtgctcgccgagtcgcgagaaaatctggttattttaggctggggaatgggggaacatgacgttcatctgctaaaacgcatggcggggagcgggacacggcgagtcgccgtgtctgttttcagaagagatcaggcatattgcaacagagctaatttgttaattaaagataatctgggacaggacgttcaggtagagtttttcgacagcgaaagttccggttgttggaataagcctccagaaaataggtga

SEQ ID NO: 395036 - DNA, 462 bp, Salmonella enterica
atggctacgatcctcacccagacacacccgttattggccgtcccgtttaatgccgccacggacttcaccgtccttgccagccactgcgaatccttcgccgaaaccctgattgaaagcaacgaccccacgctgaaaatggcgctctgcggcaggatcaacgcctgtctgacgctgctccagcccacgctgttggaacccgttccgacccatcttatagaaagcctgaccgttgacactctccccgcgaccacttcccgtttcgatcctgaatgtacggagctttgccactactgccttgctctcacgcaaaccctgtcggggctgggatttgcctctgaaacggagaagcatcttagctgcctgctgtacgagctgatcaattacttcgtcgcagaaatgaaagctccgcgctggctgcgcaccgccgacggcgtaaagtttattgacgaggtggcggcatga

SEQ ID NO: 395037 - DNA, 207 bp, Salmonella enterica
atgatgcaaccggactggcactctgccgacattatcgcggcgctgaaaaagcagggaacgtcactggctgccgtttcccgcaactcagggctggcgtcctccacgctggcaaacgcccttaatcgccgctggcccaaaggggaaagactgatcgccgacgcgctcggcgtttcacctgaacaaatctggccttcgcgctatcgctga

SEQ ID NO: 395038 - DNA, 414 bp, Salmonella enterica
atgaaaaaaatcactcctgtttgtgtattattaagcctcatttgttctttcaacgccagcgctgagtggacgggggataatgcaaatggctattatcaatatagggttatcagcgagttacacgttggtcaggtagataagggagattatttttgtataaaattggttaaggctgatggtagtggtactcctgttactatgtgctcagtatcaaatcagagtgtatgggcttcttcttttaaagtgctccaggaacaagctcggtatttttacgctactggacaatctataatggcttattatcaggttaatgcctggacatataaaccctttctagatacattttcaaataaagtccttataggattttcgacatgcagcgcaacaggatgctttggccctacgcctaagtaa

SEQ ID NO: 395039 - DNA, 252 bp, Salmonella enterica
atgagtgggtttctacatgatgtactgggggccttggccgaaatggagagggaattaattgtggaaagaacccgtgccagacttgccgctgcgagggcgcaagggcgtatcggagggcgaagaccaaaactgacgccagagcaatgggcgcaggccgggcgcctgattggggcaggagtaccgcgacagcaggtagcgattatttatgacgtggggctgtcgacgctgtacaagaagtttcctgcttcataa

SEQ ID NO: 395040 - DNA, 1092 bp, Salmonella enterica
atgaataaaagaaaaacactttacaatatacaagtactaaggtttattgctgcggccatggtggttttggcacatgccgaacttggacaatatggcattgggaatattgaaattcttgcatctctggggggatttggtgttattatattttttataattagtggatttattataccttacgtagcatatggttattctcaatcagaaggcgaattcaaaatatccgcagggattttttttatgcgaagagcaataagaataatcccggtgtatgctttaattaccgccctttgcgttctatcagccttcatagtaaaacattatatatacaccccaactccaccaattgcttattggtggcccgagataaaaataaatcttgaatggtatattgagagtattacattcactcactggcatcgcgatgctattctaagtatagggtggacattacaactggaatttttgttttatacttcttttgcattttttatcgccatcaaattatcaagattagaatatatagagatatcatttttaactatatccatagtggctaatattttaacttaccaaaacagcagcctcatatccgaaatttttccgttcatgaaaacactggcaagaccagaaatggttgtatttgctatgggtatgtttatgtatcgattgtacttactgggcgcaatgttaaaaaaaacaatagcacttacaatattaacgttgttcattcctgtgtttttattatgtgaatactttgatattacaacaaacatgggaggcgaatggcatcgccctctgatatggggttttttcgctttttatggtgtttgggcagcattgagtcttgaagggaaaataaaaccgaccaaaattcttgttttcctcggtaacgcttcatatagtatatatttaacacatggcttgattactgcctgggtatcatatatgtttgtagttttcggacttgttaattattccaatgtatttctatatattggaatctactttattataagctgcacgcttggcagtgccattcacatatatatagaaaaacccatcgcaaagtttttaaagcgttttgtttga

SEQ ID NO: 395041 - DNA, 147 bp, Salmonella enterica
atgccttgcaaaccgatgcaaagctttgtgtgtcccgtttttgtctcatttgcagctgataagcatcaagttaacaacacagatgatttttataaaaaacttctcttagttaatgatatttatatgtttttattatatcaccattaa

SEQ ID NO: 395042 - DNA, 1188 bp, Salmonella enterica
atggattacgataaagttttatcgcataatcatgttaatgtcattaacatgaagataattggtttaatagtgaacaataaacttaactcagttcagatacttagaggattagctgcattatctgtagttctctttcactacagattttggttatctccattgtatggtgatttaactattcctaataaatatttatcgtggggttctgctggtgttgatttattttttgtaatcagtggattcataatgttccatattaccagcaaaaaaccatctggtttaaagcctgctttatttttttccattgagagacttacaagaatattgccaacatatttcatagctttattcattgcattttactacacatgggaagttggttattttgttgatcctcaaaaattacaaaatattattagcgcattaactttcactcctttcgttgatgcctatccacctctttatattgatgctggtggtattttcgtgatcaggtggacactaaactacgaactatatttctatttaatttttgcactatgcattctttttaacaaaaaaataccaggggtgattctttggatattagctacagttatcgcaggtttgtctatgactggcaaggttacactttctactgctggttatgaaactggatcgcctgttcttagcttcctgactaaccctattatatttgaatttgcacttggaattctggcaggatacactgtaaaacatgctgaaaaatggagcggcaagacaaaattagctttctcattgtttactgcaattatttttatttacgcagtacataacagattgattgagggttatagcttaaaaacaggggttatctcttattttattttagtaactttcgttataaacgataggataattaccaaaataactccatcattctttgttatgcttggaaatatttctttctcatggtatctgcttcataaccagataggtagttacatttcatggaaggttgaggctaacaatcccggtgtgatgcacaatgcctatggcttcactattttactaattttatcaatctgtattgcgtggctttcacataaatatattgaaggaattcttactaacaagattagaaacaggatattcatgagtaggcctggtaagctagtagatatgaggaaagtaaatcagggggcataa

SEQ ID NO: 395043 - DNA, 1779 bp, Salmonella enterica
atgtcagatattgatgcttttgttgttgtaaccaatccgcgtcctgtttttacagattctcgcacatttaaggcattgcctaatggcaaaatttatataggtgatgttgacaccgaccctgttaatccatccaatcaagtacctgtttatattgagaatgaagatggctctttcgtacagattacgcagccactaatcatcaacgcggcagggaaaattgtttataacggacagcttgcaaaagttaataccactggtgcgcacagcatggctgtatatgatgcttatggcgttcaggtagattacattccaaacgcactggaatacgatccggatcagttcagtaaacgcctgtcaagctatgctgacggacagggtgatgccttaattgctgtgaaacaacctgtagcagggtcggttggtataacacagcatgataaaaacgcacaaataatcaacctaaaagattttggtgcaaagtgcgatggtgtaactgatgacacagtggcaattcaggcggcagtggcggccgcgcagacagggatccgtattgttcagcctgcaggtgtttgccttacatctcagcctctatcatttaccaaacctgtatattggcatggcgaagatggagctcgcattaagctcactggtggttgccatgattatgttatgcagattgatctgcgtggacctagcggttcattctggggttatggatcacatattgaaaatattatttttgatgggggtgttaatgcaaatgacggcctttctttgcgtggtgttatcggaggtattttcaaaaacattcgaggaacgaatatatcaagagccgcagttcatgaatggtggactcaactttgctactatgaaaaaattcaatgcagtaataatattgaaacattccaaataattcctgctcacggaattttatccgattgtgaatttggcactgggaatgatcggggatcttctgcaaatacttacataaattgcactatagagcatacttctggtagtggaatttgtggcgtgtttatgtctaactgtacatttataaatgggacatcagaagggaacgacattggcattgagtttggtcacgctacagatgatagaaaccaatcagttggtaatacagttattgggatggatcttgaagtaaacacttcgactgatattttattacataaaacaacatatgctaacgattttattggcctaaaggctggttattcatctcccgctattcaggttcaaggttcatacgctaatagctttcttggtggtgtaagtagtggtatcgattttgacttttcatcgcatgataacaaagtaatcgggatgaatattcttggtaatgattctataattgttgataatggaacaagaaatacatatgagaaaattttcaacatttcttctggaactcaaaaagaaagcactaacccttatccatcccgcagtaacaattttgttgccgcaaatagtactgtgcaaataaacccatttttatcatcgtactttgttgtgtcagccaatggatcaccaattaacgttacatcgaccgcaaaaaaattagacggtgcgattattgatatgactattcataacatttctggcgttgatacattgaccgtaaactggtcttctgacttcagggtttcaggatggaaaagcccggcaacaggacgtcaccggtctataagatttgcttatgatgcaaactacggatactggacagctatatcaatgagtcaggcagatattcagagctaa

SEQ ID NO: 395044 - DNA, 729 bp, Salmonella enterica
atgttgtcatccaataaaaatagtgaagcccaacggtggctagaccgtcaggcttcggtatcgaacaaatcctacgacggaaatatcgacatgaatattgtagcaaaatcagattataactttcaaggattcacctttaacccagtaacagagggcgggtctatctggtttacctccaccgaactagctaaggctctcggctataaaaaaactgatgccatcagccaaatttatgcccgtaatgctgatgagttttccgactcaatgtcattgaccctcaatatgaaggtcaacgggataaacaatagcttacgtaataaatcggtcagagtttactcactccgaggcgctcacttggtggcgatgtttgcttctacgcccaaggccaaagagttccgccgctgggtgctggatattttggatcgtgaagccacggattcaccgatcgccaaacagttcacagatgatgagttaatcagcctttgctatctacagttctggatggaaaagagccaacgagttagccagcagctttacccggcaatgaaacaggctaagtcagaatacgcagggatgctatacgacatcgcccacgacattcgttatatgaccgtggaaaccaagaagatcctgcttcgtgaagtacaggaaatggataacagcaatattgtcgtgaagcatgcgcagccaatgttggcaatgcttcgcggtgaggaatggattcattga

SEQ ID NO: 395045 - DNA, 174 bp, Salmonella enterica
atggctgaaaagatatcttccatcaagccgcgtcaggttcgttttgcagaaaacgttgattcgcacatccgcgaatcagcaaaaagatgtcatagatcaattcaggcagagattgcttatcgaatggagttattgatgaaacttgaggcaaaaggcgatgttgtcatccaataa

SEQ ID NO: 395046 - DNA, 606 bp, Salmonella enterica
atggccagacagtccagaggtatgacgcaggcgcagttgtcaaaattagcaggtgttgttcaacgtcaaatagctgcatatgagggtggtgaggctaaaccacggctccgtgtgttacaggcattagccaacgcattaggtactacggctgagtggttagctctgggtgaaggtcagggtccgggaaccaaaaacgtcatgcctgacgttctggtaaagcaaataccaatcctcaaactagatgaagttatgcactacctaaacacaggtgaacattcatcgtctagatttcacccagcaatatacaatgttggtgattctgcatttgcattaactattgaaggtgaggctatgactacaagttcaggcattagctttcccagaggatcagttgttacgttcagccctctagtaaaagctaaaagtaaagactatgtaatagcatcattggataaagagcaaatattgagcttcaaacaggtttacattggtgaaatagagacaaacctcgtatccctaaacccaatgtatcctaatattcttgttagaaatgaggatgttagtattttggcaaccgcagtttaccttgaaatcccgttgctttga

SEQ ID NO: 395047 - DNA, 1965 bp, Salmonella enterica
atgcaacgggctggtgacttactcactggcggccagtcagcaggccagattgcagagcaggctgggcgtgggctcgtaaatatcccgtttgatgtattgcagggcggcgcgagtctcattaacgcaatcagccaagggttaggcggcccgaaagtgctggatgatgtataccgcccagttgatcgcccaacagaccctttcgcacgggcaggggaaacaattggagggtatcttctgccaattggtacagcggcaaaagttgctggaacgcccgcaaagctcgctgtagatataggttccgcaggaaacatgattgcaggctctcttgctgatgctgcaaatcaggagggcgattttgcacaaaatgctgctatcaacggtggtatcaatatcggtgctcaaggcgttctttcaggtgtcgggcgcgttattgcgccaagagtttcacaggctcttggtggtgcagcactgaattcggctaatgatgtttccatgatggcaaagtcaggtcctgggcgtcagtcaattgccagtcaggccgctaatgtgtctgaagatgtagcaaaagctgctgagtctgctggaattgatatgaatgcattaacaccaggaatgcgatctggaagtcgtggcattgcacaagccgaaggtgccttagcatcaacatcaggaattgttcaggatgcacatcaggcagcatttaacgaaatatcctcaaagttaagtcgaaaccttgatgaatttggggctgcatctggaacagcatcagaaaaaagtgcagcgataaaacaaagggttcttcaaaatcttgatcagatgaaggatgccgagcgcgcggcatgggatgatgtgcggtcaacaatgccacatcaaaaagcaagaatgccaaatggcaattccgttattcaggcagagcgatctgctggcataccgcttactcctgaaatgaaacagtttgttcaggcaaacaatcaaggtggagtaacatttgatggaatgaaagcatggagagctaaatttgctgatgcggagcaaaaatataagcgtagcggagaggcaaatgcggcaaggagggccggggaaatacgccgagcaattactgatgatatgcgcacaatggcggaaaatggcggctttcttgatgactggaaaaaagccaatgatctgtctaaagcgaggttatctgcccaggagagtgcagagtctgtttttgggcgtgatttggcaacagatgcactgattacgaatggagtaaaatctcttcaatcatcatcagctaaagggcttaatggtccttctgggttccattctatgattcgctcgctaccagaatcagagcgtgttcctgctatatcatcaatgttacaggatgctatttcacatggtgtacgtggtggcaaagctgatgcagcaggcattaaccatatcgcagggatacttactccacaaaatgtaaaagccattagcagatattcctcagagcttggaagaattgctgatgcatatggcactcttgcaagagcagcggtgaaacctcagcagtatattgaaagaacagggagaactgccaatgtactacgcgatctggacgctggtttatccaacgttacatcaacagtgttaaatgcaattgcaaactcaacatcaggtgccattgttggtgcggccggtggagggtgggcaggtgctgccgcaggcgctttagttggagctgggttaaaaggcgcagtatctaaaattgccaccactcgtagtggtcgatatgcgatagagaaagccgttcaggaagccacaaaagcagtaagatctggcggaagcaaagaagcattagcggcggcggaacgcagatttatggcaaataaagccgccgtaaaagcaatacgtgatgcagtcggaaacgaagaattccagcgcttagcgagggctgggattgtggcatcgctaagcggaatggtgcaggattga

SEQ ID NO: 395048 - DNA, 201 bp, Salmonella enterica
atggctataacgcgctgttttccattctggcgatggcgggcgttgatcagctactggaaggtggtgaaggtaattacctttggcatttccttaacaattgttgccggaaaagtcgtgttctatctgttaggctatttaatagcggtaattgccggggttatttttacctggctgctggggttcaacgatccagaggagtaa

SEQ ID NO: 395049 - DNA, 282 bp, Salmonella enterica
atgtcgcggtacaaagaggtaatttcatgcattcatccgatgaatttaattaagagaattattatattaatcaatatgttatataatattatatcggagtggcagaaaggcgttaaggcgaattgtgtggagaaaagcgtggccaggcggccacgcagacaagaactatttcttacggccagtaatgcggcaccactcttctttttcgacgaccgggtcgagagtgaaaagctcggcgtaagcatcgcagacgctttctgcctggctggcgagaatacctga

SEQ ID NO: 395050 - DNA, 1317 bp, Salmonella enterica
atggccgctaatcttaccgagactgctatacgtggattgaagacaaaaagtacatcgtactatgtgtggagcaacagcgctcagcgtggcaccggcagacttggtgttaaggttcagccttcaggcagtaaggttttttatttccgttattacgttgagaaagggaagaaagagaagttcatccagttgggcatctggcctgagatgaaactggtgacggccaatgagctggcgaaaaagtacggtgcctggcttattgaaggaaaagagccgcaacaagaacttgagcaacaacgcctggccgagcagcacatcatgcagcttcatcgttcgcagggatcgtttaaagaactggtgcatggctacgttaacaagatgaagcttgacaataagcggacttgggccgatgttctgaagcgtcttgaaaaagagtgctatttggttattcctcgcgaaaccaaagcgaaggatgtcacgccattacagatcaaaacgatcttatctggcatcatccagcgtgatgcagtggtccatgcgaatcgaattcgttcctacctgatggcggcttttaactacggtcttaaagccgataacgatccgatgaataccagcgtgggcattacgttcgggcttgaagttaatccggtatcggccataccgaagcagtcctcagcggagaaagtgggtgatacatggctaacgctggaagagcttcgttttgtcatggagcagttcgcagaggccaccaacgttgggccgttgatgcagcaccttatccgcttctgtgtttatgcaggcgggcagcgcccgtttgaaatgattgccagccagtggagcgcgatcgactggcagcaaaagacgctattggtcatagccgatgtatcgaaaaacaagcgtgagcacctgatcccgctgactgaatcggcactacaggaattagcctcagtgaaagagctgacgaaggaaagtaacagtccctatattttcccgctatcaacaaacggtgagcgcccagtgcgcaccgatagtctggcgcgttccatcatgtattttcgggcttttaatccggagtttaaagtttttacggcacgagatttacgtcgcacctgtaaaacgctgatgggggaggcggggatcagtaaagagatccgtgaccgtatccagaatcacgctttgaacgacgtcagctcgaaacactatgaccgttatgattacctgcctgaaaagcgtagggcgcttgagatctgggaggatcgggttaacaactatcagcgacagcaggaaaacaacgttgtgaacttgtttgggcggaggtaa

SEQ ID NO: 395051 - DNA, 615 bp, Salmonella enterica
ttggcaaaatatgagcttaattcagcagaagagcggtatcaaccgggctctggagacctggtgctggctaataaattagggattactgatgaacaggaaatggaggcgctggagtctggcctgctgctgatgctttatgaacagctatttatcgaaggccagctgccagcggcgctggcttttgagcatatcagtgggtggcatcgccaatggctggggaatgtgtatgactgggcagggaggttacgcaatgccaacctgactaaagacggttttcagtttgccgctgccgacaggattccgctgcttcttgatggtttcgagaggcagtttctctccaggtctggtgaactgaaatccatggctcgtcaggagctggttagctatctggctgaatgtcatgtggagtttattttgatccacccattcagagaaggtaacgggcgtctgtcgaggctactttgcgatgcactgtcggttatggcggggaagggcttactggattacagcctgtgggatgagcacaaagcgttttacttcaaggcaatacaggcgggtgtctcagggaactacagccctatgatgcaactggtgagcgatatcttgccagattaa

SEQ ID NO: 395052 - DNA, 159 bp, Salmonella enterica
atgacaaaaaaatcagcacatagccagatcactaaaactcaaatctatcgcgccgttgccagctcaaccgcaatcgaaaccggtgtttctgtgcaaaaaattgagcagcaactgaaacaaaatcaggcacaggcgaaagccgttggcctcgcccgttaa

SEQ ID NO: 395053 - DNA, 1050 bp, Salmonella enterica
atggcgcaagatttttactctctggaggagatggcccctcgctttggtgtggatgctgatgtgttcattaaggcgtggcttgacgaaaggctgcctctttacattcacttcggtagtggtagtccacggtgtacgatcaggcgctgtatttccgctaaagtacatgaacacgccatggatgacatactttatggccgtgatctctatcagagcaaagatagcccagaccacaattccttgatttttataccggaacacccgttaagtgctcatctgaaagtcaaggcccgatatgaactcggtgaaggagctggaccgaggctgggagggtattacgaatataggtatcgggggagtgctcgaggctattggcttgctaagccaacctgtgttgctcatttaagccaagggaggtacttattgacggataaagattctgttgaacgtaagtcgtctttcgttggtgatgtgacggttcatgctcgtgatgtatttgattatcttattttttctgacaaaacgtatgtcgaaaaacaatcttttatgatcagagaagatgatatcaagaacaacttccccgaactaaaaaaagccagtattcatgttattgataatgaaatcaccactgaagagtcggggatagttaattccttcgcagaataccccactccaaaaatcaaattcgctttgtgtttgatgattcacgtcctcgctccaaaacggagcgatgacacaccaattatcacaaaaataacttcggattttaaccagttatgggatgaagggttttcagaaagcactgttaacagttgggctaagaagccagatttacaaagtaagaaaaggctgcggccatcattcgcccaagaaactggaatctacatcctcctatcaacttactgcgcccgcaaaaatatcaaaaaaaacgcttcggacgttgctacacgactcaccgagttggctgtatctacatcgttgaatttaaatgttaagttttctgctgatgatgtaaggccttggtttaaaaggccttctaagaaaagaaagtag

SEQ ID NO: 395054 - DNA, 237 bp, Salmonella enterica
atgaacacatcttttactcaacctacagcgcaacagcgtctacaggctttgcagaactatggagagccatcagatcgcctggtgcgtgaacaagagcgtaagcgcataacatctatagctcgttccactgcatggaaacttgagcaagcaggcaaatttcctttgcgtaaagctattggggcaaagtcttgcggctggcttctgagcgacctacttttttggatcagcgtccgataa

SEQ ID NO: 395055 - DNA, 204 bp, Salmonella enterica
atgtcacaaaaaatcacgttttctactaactacgactcaacaattgaagcttataaagaatacagtaaaaatgtaggatgctcactctccgcgaccatttcgaaagtgttgtacactgctgcgccatcatttttgagaaaaccaattctatcgattgagggagaatcgaaaaaaacagatacggagtttcttctggatgtttga

SEQ ID NO: 395056 - DNA, 408 bp, Salmonella enterica
atgagtaatcttgaaaaagaggagattaaaaaaacgttaaggaattgtattgagggaactgaggcgaataatgctatttatatttacacggatagaaaggtgagttatgcaaaacgattggcaactggaattgcgattatccagttgatcaaagataccaagtatgaagggaattttttcgatattaacagaattgtgttgcttcctattattgagttaatggaatacgggacagatagtgtacttaaaaggcactctgtaaacacctcgttcccgcatatttgttggattccgattttttatataaacgataaggcggtgatgatcccagtgattcaagagcgtgacgttccatcttccttaaggtcagtagggaattttattataattaatcctttttctagttag

SEQ ID NO: 395057 - DNA, 564 bp, Salmonella enterica
atgtcagtctttttttaccatctataccgaaatatggaggaagttgaggatcagagccttaagtcggagattgaagaagttcgcaaaaatctatcgataagttcgggacggacactgattgacagtcaacgctcacccaacaaatcggattttttggagattcttatcaaccgaggaatggtcagaggcgacgatctgattgtattagacctaaattgtctggggagtaacgttgaaatgattcaggagaacataatacgttgcgctaagaaagccatacgcattcactgttactttccccaaaagaagctaacaacggcgaatggtggatacattcttacgttactgctccctatgattcaaaatgaatgcagaaggatgaacttggctgcttttaagacaaggaatatcactaaaccattagggagaagagagggcagtaagcattataatgatattcagacagctaaatttagaggattaacgcaatcacaaacggctaaatatttgagagtcagtatatcgacagttaaacgccactggaatagtggaattatcggttaa

SEQ ID NO: 395058 - DNA, 627 bp, Salmonella enterica
atgaaaacttatgaaggatcacatggtgaacatattctggaatattgggtaaagattaatagattgctttgtcgcttgactgaccgttatcccaggctaacggctgtacgtgtggatctccactatccaaaaatagtcgataacggtgataatatctgttgtttccctaatctggaatctggggtcatttccaggatgcgtgaatcccttggggccaagctggaagctgaccgtattcgtaagaaacgtgaaggtaagcgtatataccgctgccctttgtttattatgtgggcgaaggagtattctaaatcagggaagtgccattaccacatttgcttacttttcaacaaagacgcctactaccacctcggggactatgagcaggaagataacctgagagggatgattacaggtgcttggtatagcgccttaaagctcctgcgggacgactgcccagaactggtgacattccctgataactgccgctacgtactggataacgaagcccctgactttgaggatcattaccaggcgttgctaacccggctggactacctgaccaaagtcgagtctaaagtgtttggtgaaggggatcgtaacttcggttgcagccagatagatctgtaa

SEQ ID NO: 395059 - DNA, 876 bp, Salmonella enterica
atgcaaaaaactgaaggcctacaggccattgagaaaccattggcttctctgccccaagctatccgcaaccacattctcgaacgtctccacagtctgacccaatacgagccggtgatcggtattatgggtaaaactggtgctggcaaaagtagtctctgcaatgcccttttccagggggaggttacgccggtcagtgatgttgaggcctgcactcgtgatgcgctgcgtttccgactgcaatgcagcaatcacagcatcatgctggttgatttacctgggattggcgaaagtgaacaatgggatagcgaatatgaatctttgtaccgccgtatcctgcctgagctggatttaatcctgtgggttatcaaagccgatgatcgtgctttctccgtcgatgagcgtttctacaagcgagtgatgactgaccaccaacagcgaatactgtttgtcgttaaccaggctgacaaaatcgagccatgccatgaatggaacactgccagcaatactccttcacctaagcaatcggctaatatcaaggctaggctggagtccatttgccagctattttcagtgtctcatcctgtgtgcgttgtctcagcccgaacaagctggaatctaccatcaatggtagaaaccatgatgcgttgccttccggatcgtgccaccagcccagtggcgacgcaattgcatgggaggctatgcaatgagctggtaaaaaagcaggcacgtgagagtttcggcagggcagtaggtgaggtgtttgattctgcggaagcggcatcatttattgccgcgccactaaaagcggtcgttcgtacaattcgcgatgccgtagcatccgttgcccgtgccgtttgggactggattttcttctga

SEQ ID NO: 395060 - DNA, 702 bp, Salmonella enterica
atgactcaggctgaacgccgccatgaccggcttgccgtcaggctgtcgttgattatcagccgtctggtggctggcgaaacactggatttgcgagcgctggcaatggaatttggtgtgtcggttcgaactctacgccgggactttcgggaacgcctgatgtatctggacctggagtatcgcaaaggccgatgccgtttgttatccggtagccgccaaagagaactcgcggtaatgacatttgcccgccagtcaggtgttgaagcactgtttcctgatatggataaccatctggtcagttcactgttgagcggatcaggggagtctccttgccttatctggcagggaacagcccaggtttcatccccagactcaggcgtattcactcggttggtgagcgcggtatcagaacatcgaaaggtgactctgctcggtaacggttgccgctgtacaggcctcgctccctatcgactggttctgcgtgaaggcgagtggtatctgacaggcgagcatcagacccggatagcagtatttcccttgagggatattcgtgcagtcacgcttcacaacggcagcttcactcctgatgcagcgatgcgcgatatcctctctcacccggattttcttcaggctttaccccactttcgctttttccattcattgcttgtcgcaactgacggcgggcttatacctcagaaggaataa

SEQ ID NO: 395061 - DNA, 648 bp, Salmonella enterica
atgaaattatttaccactacattgctggctgccagcctttgcctgggtactgtttttccggctgacgctggaaatatcgtcggctctgtcaaagcctggcagtacatgcaggctaatggctggaaatcagctgatggtatggatgacaacacactgcacaatatgctctatcaggccagcgtaattgataactatccatggacgaagcagtttcttctacgtacccgtggtggtggtgcaattttcctggccgataagaaaacccacactattcgtcaactaaaactgagtcctgccggtgaaacctacaacgatattgaaacggtttatcagggagatgataaaggggaaggctgctactttgccgttattgataaccaggcttcggtacgtgataaggctatcgatgctcttatataccccgactggtctgcaccccaagatacggatgctgttcttaaggctaagattgcaaaagtcagacaacagatagccccaaaagtcattatggtgatgccagataattgtgtgaataaacaacagcaagccacattggcggctaagcgctcggaagaggataagaaactacagcaatgggtcgcacagcaaagcttagcggaattgtgtcgtcgcacaggcaactgctga

SEQ ID NO: 395062 - DNA, 546 bp, Salmonella enterica
atggaaaaggattgtcagaaagatatagatataccttctttcacaatagtaagggtatgggcaaaacctacttacagcaaaatcatgccactcgtcagccgattggctaaaaccttgccagccattgtcgttttaatgctgtgccatccgtcatctgcttacgcagatgaacaacgctatatcagtatccgcaataccgataccgtgtggactcccggtaatatctgtgtgtatcagttccgtctggataatggtggtagcggtgtgggttttggcccgttgtctgtttcgctggggctgaaagacaaggcgggcaacacgttggcgacgggaacagtggacgtagccccctttggcgacagcgatgctactcgttctcaggaagcttttcttgagcatgaatgtgtcgaaaacgtcagcgctattgaaatcatgacggcgaccgaagagcgcaacggccatcaggctatgctgccactgtccgttttcgaccctcagtattatcagccactgtcagtatcggttgctgtgaataaggcatcataa

SEQ ID NO: 395063 - DNA, 147 bp, Salmonella enterica
atgactcgtttagccagccgctttagggcggtcaatctcattcgccgtgaccggccactcacccgtgaggaactggcacactatgtgccgagtgtcttcagcgaagataaccgctatatcgcccgttacggtatctataagccataa

SEQ ID NO: 395064 - DNA, 471 bp, Salmonella enterica
atgaacaccgaaaccaaccattcatccgatgttttcaccctggtggctgataacaactctgtagcgctggctgccactgttgtacccgatgaacagcgcctccgtttctggccgcagcacttcggcgctatcccacagtggattttgctggagccgcgtatctttgcctggcttgaccgcctgtgtgtcgattacggcggcggcatctggcagttttataccctcagcaacggcggcgcatttatggcacctgaatgtgatgatggtgaaaaatgggcgctgtttaaccagatgaacggtaacggcgctgaactgagtgcgcaagctgccggtatcgccgcctgtctgatgacgtacagccaccatgcctgtcgtacggagtgtgatgtgatgacggagcactattaccgtctgcgggattatgcactggcacacgctgaatgccgcgccattatggcgataatcgactga

SEQ ID NO: 395065 - DNA, 474 bp, Salmonella enterica
atgtctgagctcgccttatctccgtgttttccacttaacgagcaacgtatcatccgccgcgctctgcgtttgctggagaaataccagcgccagccgggggaagcatttacctccaccgtctttaccaaaacctggttgcagttgcagatggcgaaccttgaacgggaggtgtttatcgtcatgtaccttgataaccagcactgtctgattgagcgggaaacgttgtttaccggtacgctgagccataccgaagtccatgcccgcgaggtggtgaagtcggctctgcgtcacaacgcggcggcagtcatcattgcccataaccatccgtccgggaccaccgacatcagtcaggccgaccgggctgtaacaaagcgaatagcggaggcgctggctctggtggaagtgcggttactcgaccacctcgtgacaggaggcagcgatgtggtgtcatttgccgaacgaggatggttgtga

SEQ ID NO: 395066 - DNA, 222 bp, Salmonella enterica
atgaaaatcatcagtaagcgccaggcgatgacactctaccgtcagcattcgggttcccgcctctttcgcttttgtaccggtaagtacaaatggagcggaagcatctgtcactacgctggtcacgaagtacaggatatttctggcgtgctggcggtatttgctgaacgccgtcaggaccgcaacggcccgtatgtcattctgcgtagcgtcacgctcaattaa

SEQ ID NO: 395067 - DNA, 369 bp, Salmonella enterica
atgaaatctgtcgccctggccggtacatcacaggaggccagcccctgccagcaatggggattgaatcgcgaagttacccccgtctttggtgcgcgtctggtgcaggaaggcaatcgtctgcattttctggctgatcgtgctgggtttaatagtgcattcagtgaggatgacgcgctgcggctcgaccaggcatttccgctgatgctcaaacagcttgaaattgagctgcgctcaggtgagctcaatcctcgtcgtcaacattgcgttacgttgaaccacaatggcctgacctgcgaagccgacaccctcggttcttacgggtatgtttatattgctatttacccaaccagcctatgctcacctgtgtga

SEQ ID NO: 395068 - DNA, 384 bp, Salmonella enterica
atgcaaactttacctttaaccccgcaacgggcggcttcgtccagcccgtcacctgttgaaatatggcaaaaactgctgacgcatctgctcgaacaacactatggtctgacgctcagtgatactccattcagcaatgaaaccaccattcgcgaacatatcgacgcggggatctccctcagcgatgcggtgaactttctggtggagaagtatgaactggtgcgcactgaccagcctggtttcaccttaatggagcagtcaccgtttatcactccaatcgatattctccgcgccaggcaagccaccggtctgatgaagcgcaggggttataaagcggtgagtgatattacccgtggcaaaatgagtcggatggagaaaaagcattga

SEQ ID NO: 395069 - DNA, 513 bp, Salmonella enterica
ttgaaaatcttgatgaatgttgaagctgatgggattaacgtcctggcgctcaacatgggcaaaattgccgtcgaaatggatggggttgaagtcgatgggctgattaatgtggtcaacgacaatggttacacactccgcattgccggtactccagatgacattactgtcgaagctcctcagcctgtaactgccagaactaactgtattcagtgcagtacagcccatatcatcgacgaagataatgcgttgctgcactcactttcccagcaatatctggattatggtgatgcagaatgggtccattacacgggctcgggttatctgatatgcctcgatgcctgggcattcccggttctgcgactgaaacgccgtgggctgtcgaaagcctgccgtaagttgcttgtgacgctgatacgtcgctatgccatcagcaccattcactttaactccattggcgacatttccccggctttaccaccttcgactggtagttggcgctcattcttaacctga

SEQ ID NO: 395070 - DNA, 849 bp, Salmonella enterica
atgtctgagatacaagccaataacgaccccgacgtaataactggtcataccgaaatcatcagctctaccagcattgaacgtatcgtgacaggccgcaatgcggcactgttagagattgaagaactcatccagcaacttgccgacatctcgacgctgaccagtagtatcggtggaaaaacggcccgtgactgggctatgcgtcaggactttcgttgtggctgttggctcatggaaaacgtgaaaactgcaatgggtacgattacctgtaatcttgatcgcagcatctggcgtgatctgatgcaaaaatcagggatgatctcgttgatggacgctcaggcgcgtaagcaatgggataataatctcgaaggtgacaatattcctgagatcagcgaagccaacattcttagcacctttgagcaattacatcacagtaaagcggatgtgtttgagcgggggattatcaacgtgtttaagggattatcatgggattacaaaacgaactcgccttgccagttcggcaaaaagattattgtaaataacctggtggatcacaaccgctggggctttaagctcaactggggatggcgtagggatcaactggctgatctggaacgcatgttgtttctgctggatggaaaacccattccggaaaatcgtaacgatgtgacggtcagactaagtgagcacattaaccataaaaacgtatcggaggtcttcgacgatgagtatttttcgatacgctactttcagaaaggcacagcacacatcacttttaaacggatggatctgacagaaaagatgaatgatatcgtggcgaagcactatccggggatgcttgcagcgagatga

SEQ ID NO: 395071 - DNA, 450 bp, Salmonella enterica
atgaacacttcagatacaattgcgttatggacagcattaggaacgtggttagctgctattgctacagtaatcactgctgtaattactggattggctttgtgtgtcgcgtttaagacattgcattcatggaaagataaagaaaaatttatgcagttagtgagggtcaaacgttctgtttttgcatacaggcaaaaggtagagagtatgccaaatatgaagcatgataacgccaagattaatgattacttgcagaatgttttgcagccagcattaactgacattttccatgaaatggagttggctggattaaagggagaccgctgtacagaggctcagctattcaatgagctgtttgctgctcaaaagaaatatgaggaggatcatcttgattgggcgtatttgtttaaatgcagtataaagttgcaagaagcgattgatgtttctttctga

SEQ ID NO: 395072 - DNA, 879 bp, Salmonella enterica
atgagcaataaatattgccaggcgctggcagaactgcgcagcaaatcagcacacgaactgaaagaagtcggcgatcagtggcggacaccagacctgcttttttggggcattaatgcgatgttcggtcccctaacgctggatctctttgctgacgacgataacgctaagtgccctgtgtggtacaccgccgatgataacgcgctggtacaagattgggctgaaatgctggagtcaatcggcggggccgcattcggtaatccaccctatagccgctctcagtaccacgagaagcaggcgatcaccggcatgacccacatcatggatcacacaatggcgatgcgtgaaaagggtgggcgttacgtgttcctcattaaagcagcgacaagtgaaacgtggtggccggaagacgctgaccacatcatgtttatccgcggtcgtattggtttcgatctcccagtgtggtttgttcctgcggacaataagcagaaacccactggtgctttctttgctggcgccattgcaatcttcgataagtcctggcgcggcgagcatttcagctacatcagccgtaccgaactggaagaaaaagggaaggcgttcatgtcgctggtcacatttgccgcttgcaaggcccagcaggcagaaacagtacagccacctgcgccgctgacattaccagaagttgaatcgcgtatttggcctctcgaggttggcctggtgtttaaccaggtggaaggcgttgatgtattgagcgaggcccagcagaacaaactgaaagccaacatcaatcaactctggctggagcggacggccaccagcgaaattatcgcaattgcccgtggccttgttggcagcatgcagggggtaacccatgcgtga

SEQ ID NO: 395073 - DNA, 1881 bp, Salmonella enterica
atgattaaaaaagctacgctgctgacggcgttctccgtcacggccttttccgcttgggcgcaggatactagcccggataccttggttgttaccgccaaccgttttcagcagcctgtgaataccgtgctggcacctacagacgtggtcacccgcgaagatattcagcgctggcagtcaaaagatctcaatgatgtgatgcgccgtctgccgggagtggatatttcccagactggcgggatggggcagagttcatctctttttgtgcgtggaactgaggcgcgtcatgtgctggtactgattgacggtgttccaatggcacggccaggtatttccaacggtgttgatattggccaaattccggtatcgctggtgcagcgggttgaatatatccgtgggccccgttctgcggtatatggatctggtgcaattggcggcgtgattaacatcattacgatgagtgatgatgaacgtgcgcaaattaacgctggaatgggtaacaatggttatcagacttacgatggcgctattaataagcgcttcggcgacacgatggtgaacgttgctggcgcatatcagacgacgaaaggttttaacgttcaacctgactctccttacaacggcgatagtgaccgagacggctaccgcaacaagctattctggggcgtggtacagcataagttcgacgatagcttttcgggttttttccgtggttacggctacaccgctaacagcgattatgatcagggggcgtggggctatccaggcggcaatgacgaagctcagaactacaaccagtcttgggatacgggcttgcggtacaactctggcatttactcttctcagttaatcgctaactaccagcgccttaaagattacaacttcagtaacgagcttggccgctatgcaggagaggcctctctggatgatatggagcagcgttatatccagtggggtaatagtattgaggttgggcatggggcgatcagcggtggtgttgactggaaacaggaaaagctgacctccagcagcacgacattgtcggatagctataaacgtaatacgaccgggctttatctgactggacagcagcagattgatagcgtcacactggaagcctctggccgtgaagaccatgatgagcattttggttggcatgggacatggcagaccgcagcgggctgggagtttgttgatggttatcgggcgaccatctcctacggaacgggtttcctggcgccgtcgcttggacagcagtatggcgcaacgcgctttgcttcgagctacgggccaggtatttctgctaacccaaatcttaagccggaagaatctaagcagtgggaagccggtatcgacgggcttatggggccgctggactggcgtctttccgtctaccgctatgaaattcaaaacctgattgattataaaactacgaataacgtcaaccagtatgtcaacgtgaagtcggcaactatcaaaggactggagtggaccgggaacatcactacgggtccggtagatcatcacctgacgctgcaatatgttgatccgcgtgacgatgaaactgataagacgcttgtccgacgtgcaaaacagcaggttaaatacgaactggcggggcagatatacgatctcggttggaatgtggtttatcaatatttgggacaacgctatgactgcgcctatgataatgcaaccggaacttctaatacggttaaattaggcggtgtgagcttatgggatatcggactatcatatccaatcacctcacatcttacagttcgtggtaaaatagccaacctgttcgacaaagattacgagacagtttatggctaccaaactgcaggacgagaatacaccttgtctggcagctacaccttctga

SEQ ID NO: 395074 - DNA, 189 bp, Salmonella enterica
atgatattttttatgcttgcgggttgcacaacccactatgtgatgacgacgaagagcgggcaaacgattgtgactcagggtaagccgcagttagataacgagacgggaaagaccacttataccgatcaggagggcaatcagcgggaaattaacagcaatgaggtggcgcagtttattgaggctgattaa

SEQ ID NO: 395075 - DNA, 258 bp, Salmonella enterica
gtggtgttggcggcgacgcgtattgatggcttttggcaccatcgtctgtggatctttgcactcgccggcagtggtattgccatcaagcggctggccggttccgagaaaaatcgttcccaccaccaggaaaataactgtggcagggttttgcacggcgaatcccaaccagacgcaggggataatcaatattacggtacaaaatacggtccatttacggccaccgaacagaggcaccacaaaggaccagggaacgcgtaa

SEQ ID NO: 395076 - DNA, 399 bp, Salmonella enterica
atgttaagggttagaggtaagcgttatcggcgtaaattaattaaatcaaggccactattcagaaagcgctctttacgttctctcatatcaacgaaatcctccaacgcatacagaaagcatacgaaaaatttttaccgggataacgatgtgcttggtatatctttgtttgtgatggctgttgcgggtgttgctgttggggctactgcatttgctgttgctgtgggtatcgttctgttcggctatctaattgtcaccagaagaaaaacaaaatcagtcgagtcggtgagcgatagtgcagacgcaattaaattacgcgaatgggatgaacacgtaaaaaagagcggaggttatagcggtgaagactggatgaaggccatgaaaaaccgggaaaataaatga

SEQ ID NO: 395077 - DNA, 282 bp, Salmonella enterica
atgaaagttaagggcgtgacatttgatgaagtgagggccaaagccctcaacactccagaggctcaggctgcatatgaagaagccaagcgcgaagctatgctttttgacctgttgcaggaaatgaaaaatcaggctggtatcaacagcaagcagcttgccgaaagaatgggcgtcacaccaccagcagttacacggctggagaaaaacccaacaaaagccagtatcgcaacacttgaccgatacgcagccgcctgcggttcgcatcttaaaatcagcttctga

SEQ ID NO: 395078 - DNA, 321 bp, Salmonella enterica
atgttcactttgatatttcaccctgacgcagatgaagaaattcaggaacttgacgacaggatgcgaggtaaagcaattcttgctcttgagctactatcagcgcaagggaaccagctacgctaccctcacaccgaacctctaagaaatggattgattgaactgcgtgcaggtagcaaggatataaccagaactatttttgcattcgcaaaaggtaaaaaaatctacattctcagaacgtttgttaagaaaacacctaagacccctccggcagagataaaactagctttaaccaggctagaggagatgacaaatgaaagttaa

SEQ ID NO: 395079 - DNA, 939 bp, Salmonella enterica
atgaatgaaaaatatctggccgcattgatggcgcagctttttaccgaagctcaggtaactggcgcaatgccgggagtcaacaccgatgagcaagggctaatttttgcccgtgacctgatttccatgtcgaaggatgtatacatggaagaaatgccagcgcccgttgcattaaccatgttccaacaggagccggggattaatgagggcgcaaaatgggcgggctatcgcatgtactcggctgagggtatggcgaaaatcatggcagcatttggcactgacatgccaatgatgagcgccaaaggccgggaatacttcgcccttatgtacgatattgggttgggttatggatatacctacagtgatgtaatggcggcggcaatgtccggtacaccgcttgataacagtctggcactgaatacccgcgaggcccatgaacgtacagtttctaacctgttatggcgcggtaacaaagaatatcagattgttggattcatcgagcatcccaatatcccgcgagttgcggtagccggtggatgggcgactgctgacggtgataaaatttgcgacgatgtttcagcgattatcgctgccgttaacacaacaaaaatctacgaagtgaatgagtttcatatgccgtctaaggcatgggcgcgaattcagggacttcgtctgagtggtgtactcggtactgtcctgtcattcctgcgaactgcttacccggaagtgactttccgcaaaaactccgatctggatgatgacggtatttgtattgcactgtcgaacaaccgtcgccacttcgcccaggctactcctgtgctgttccgtcagttgcctgttcagcgtagtgggcttgacctgtctattccgtgcctgtcgcgctccgctggtgtaatcgtccgtgcgccgctggctgctgctaaatcctctaaggtgatgtaa

SEQ ID NO: 395080 - DNA, 255 bp, Salmonella enterica
atggctgagaaagaaaaagcttttctgacaaacacaactcaagcaccgattcatatcggtgcaaaaaacagtgaaggcactgttatcactatctccattgctccacttgccgctgtagaagttgatgtagcaactctgcaaatcggcggtgttaagcagtttcttgacgaaggatgcctgaaacaagtttcagccgcagaggccagaaagctcaataaagagcatgacggcgtagttgcatcagacgacgaataa

SEQ ID NO: 395081 - DNA, 252 bp, Salmonella enterica
atgccagatagaaaatccccatctttatatgaaattcttactggcttcggtctgacgcagaccgtcacggatggcacagtcagcatcacgaaatccatcttctacaagaaaattaaaacgctgcatctggattttaccccgcgcacggccattaacgccgatggcgcacagacgccgctggcgacgatggtgagagtctatcagcttaagtttagccggtgccgcagcaacatggccatccgctcagcataa

SEQ ID NO: 395082 - DNA, 216 bp, Salmonella enterica
atgacagcctcatataaacagcttaatgactatactgaaaatcacgctttggtatcaaagttcgaagagctggttcaacatccaaggggtaacggccttatttattatccagaagacggtgaggacgattcccctgagggaattgtccaggcgatcaaaacatggagaaaatctcaaggcctcccgctttttaaaaactctgaagctgattcgtga

SEQ ID NO: 395083 - DNA, 2463 bp, Salmonella enterica
atggataactggttagcgctttttgacggacagacccgatattttctggatatcaatgacagttcagtgaagccggatgttctgcgcttttacggcagggaagcactgagcgaaccattccgctgggacatcgagttcaccacgcttcaggcgaatatccccccggaacaggtgctgatgaaatatgcgtcgttccggatgcgcagcggcaaaaacgttcacggtgttgtcacccgcctggagtggctttccactacccgggaccagtctctctaccggcttacgctcagttcccgactggcgctgctggagcacactcggcagtgcgccgtatttcagaaccagtcggtgccggaggtggtggagcaggtactgcgcaaacacgggttggagggacctgattttgaattcagactggagcgcacctacccgccgcgtgaacttatcacccagtggcgggaaacggacctcgaatttattcagcgcattctggctgaggtgggaatttactggcgcacggtgatggacgacgtgcgcggtctggatacgtacatcctggccgacagccagcttaactaccagtttgatgtgcgcctgccgtacagcgagccatcgggtctgttcgacggcgcggcagaatcggtctgggatgtgcggacctggcacaacatagccaccggcactgtcgtcacgcgggattacaactaccggaccgccaccacgccgatggatgcggcggtgagtgtgcgcagtgatgcggtcaccaccggggagcattaccgctacgcggcaccttatcgtgaagcgggcgatgacgccagcccggagccggaaaccgaatctggcgcgttctacgcccgacttcaccacgagcgggagctcaacaggtcggcccgcattcacctgttcagcaatgctgcacacctcactcccgggcaggtgctggagccgcagggcgacgtcattacggccctgcaagaaggcgtgttcctcacgctggtgaccttccgtggcgcccgtgattcccgcctgcacgtgtcagtctggggccagccttacaccgaacgttactgcttccgtccggtagagatccctcgcccggtcatcccgggtacgcttccggcccggatcgaaagtcgcgaaaaaaatgatacctacgcacacctggacgagcaggggcgctatcgggtgaagctggacttcgaccgggaggggacggaacccggttacggctacctgtggctgagaatggcaaagccttatgccggtgacacgctgggctggcatacgccgctcaccgacgggaccgaagtggcgattgcgtacagcaacggtgatattgacctgccgtacatcgcgtatgcgctgcacgactcggagcacccggaccacgtcacccgcgacaaccctacccgtaacgtgttacgcacaccagcgaacaacaagctgcggatggaggataagcgcggtgaggagcacatcaagctcgccacggaatacggcaagacgcagctcaacagcgggcacctggtggatgcacaggggcaacgtcgtggcaagggcaccgagctgcgcaccgatgagtggggaaccctgagagcggggaagggactctttgtcgctgcggatgcgcaggcgaaagcgcagggcgaagccctggacatggatgccgcgctgaaggaaatcgacaggcttaatcagcaactgcaacagctggaaatggccgcagaaaaagcgcaggccctgaaagcggacgtcgatagccagatacagatgtttgagcagcggctgaaaccgctcaatgaagctgtgtttttctcggcgccggagggcatggccctgaccagtggtgaagatatgcagctggccgctggccggaacctggcggttaacgccgggggcgatatcagcgtcggaacgatgggcaatgcgaccctgcttaccggggagaaactggggctctttgcccgcaccggacaaatgagcctgaaatccggagaaggaccaatagatgtgcaggcgcaaaacgccagtatgcggtttttcgctgagaagaagctgacgctgagctcagcgagtgacatctcctttgtcgggaaaaaacgtatcacgctgattggtggcggaagctatctgcgacttgaggccgggaaggtcgagtatggtacgacagcgtcgtatatgcgcaaagtgaagcggactatggctgcgggaagtaattctcagactccagaactcccatttttaccagggcctagtgatgtttttcgaaggagttttattcttgtagatgatagaactcaagaaccaatatcaaatattagatatgaattgacctctcctacaggttcggtccttaaaggagtttcatgcgagaagggcctcacgagttttataagccattcaaaagaagctgatatcgagttaaccattttaaaacaagattcattatatatagggtag

SEQ ID NO: 395084 - DNA, 2325 bp, Salmonella enterica
gtgtctgtgttacccaaaatagtctggccgatcccctcaaatagccggggaatcgagttcagcaatcaggaaagcatcctctctcatttagcaggcgagtctaccgggcagtacacgattggccgcagcgggatgtggcatggcgggatccatatcaccgaagcgacaaccccgtggtgtgcgctgagtggtaaatctcctcttgaagcgatagatttccctgttccctttaaaggtgagcaggcggtgcgatgcatggctgacggggaagtggttgcctatcgtgtctgcagggattatctgacgattgcatgggaatccggtccgctgaacttttccggctcgtttgttctggtgaaacactatattcaaccgggtgaaaaggaaagcagcgggctgcatttctataccctgtatatgcatcttgcgccttattcagcttatgaggccgaagcagaaaatcagtgggtcattcaggacacactaagagcatattccgaaatggactggctgacggcaaaacttacttcagaaagcacttctccacaaattgccgggcacatgcctaaaggtgccagagtggagtgggacccggcagacagtaatcttaacgccacaggaaataacaagcgaaaatatggtcttgtgacgcttaaaggtttaccggaagataccagcagtactctcacgccgggtaagcgctattgggttgttgtggataacaacaatattaagtcagcgccgggggccggtccaggctggtggcgacagttgcttcctcctgcaaaggaagtcatggtatttgataaaacggtcagcctcagttcaccatttgctattaaggccggtgacccgattgggcacatgggctactatcaggcaccaaaggatgggggttatgaggcacgataccaggtccatatcgaatgcacgagtatggatgataatctggagaaattcctgaccaaccctgaacgggtgggagaaaagaatccgctctggctgaaatacgctccgggacttgctttgtacaaaaaagatattgcaacaggaacattcactaaggatacgagggtgaccacccgaagcgggatccttccactaagtcaggtgcaaacggaagccgataagtcgaccagacaggagtactggcaactgagaccagaaaatgcctacgtgcccaaagggcaggcggaacctcagcttctgtcgcagtatgatctggccaggctgggcttcagaactgaaaccgcagagcctgccagctttgattacctggatggaaaaaaccagcctgttggtttcttccgcagccttatcaactcgctctatgaggctgcgaccggtgatccccgaaccagtcatgccctggtgaagcataattaccagcgtctgctggataaaatcgatagtggaagcgaccgctattctccaatggaatactggagagcgctccacaaccccgactatcgagatgtcattcaaaaaacaatcgtaaaacatcccagcgactggtacttcaaaaaaggcgatgctctctggcaaccattcctgaatgcgctgaaaaaagacgctccggaatggaagaaatacagcgaagattttctcgataagatggcatggatgcaggatgttacaactgaaaaacttggtccttcgttatggcacatgcatccgctcatgtttcttggcgcattaataaagaaaaagacaggttgggcacacagcaagtttgcgaattttttgggacatgtcgagtctaaaaatgattacaccgcttataatgttcatgtcacctacaaatcacattacaaaacaaaactaacgagtatgacaatcaaagaagttatgacttctcaggatgatgaaacttctaatggtatgtttgctactggaagattccagatcgttcctaatactttaaaggaagctgtggataaacttaacttagatgttaatgctttatacgatgaagaaatgcaggataaaatatttaacgaatatcttataaaattaaaacgtccggcaattataggttttctcgagggaagtggaagcgttgaggatgctatttatgattgggcaaaagagtttgcatctgctggcgtaagaaaaggtaaagagatcagtccttcgaaaactgagttcgaaaaaaatccggatggttcttttgtaagggataaaaaaggtcgcaaaatacacaaaaaaagatatgcccagtcagagggggtgtcttactattcgggtgatggtataaataaagctcatgttaagcctggtgatatggttagaatacttgaggaatcaaaaaatgaaggttgttaa

SEQ ID NO: 395085 - DNA, 303 bp, Salmonella enterica
atggcgacggacgtcaggcagaaatcaagcgagcaggcgaacgctaccgggcaactgctgaagcaagagttagacaggctcgggaagtgtgtcagcgaggcactgagcttaagcgggcagaaaatcagcgacgacatagccgcccggaaccgggagctgagcgatgcccttaggcaccacagcaacggcatgacagaggccatgcagtcacaccgggagagcgtgatgcgcctggcaacgcgccggtggctgtcagtgctcatgacctcgctgctgctggcgggggcgtgctgtggctcctga

SEQ ID NO: 395086 - DNA, 195 bp, Salmonella enterica
gtgactcgtctcgcacaagacagttaccttcggaataaagagttggtagctctgaactccggcaaacaaaccaccgttggtagcggtggtttttttgtttacagcgctgaagactacgcgcgaaaaaaaagatctcaagaagatccttttttcggtacatatatcgcctatttcattgacagcaacttgtcataa

SEQ ID NO: 395087 - DNA, 189 bp, Salmonella enterica; identical to SEQ ID NO: 375319

SEQ ID NO: 395088 - DNA, 315 bp, Salmonella enterica
atgaaaaagacccgttataccgaagaacagattgcatttgccctgaaacaggctgaaaccagcacccgcgtcggggaagtctgcagaaagatgggaatttctgaggccacattttacaactggaagaaaaaatttgccgggctgggcgtgacggaactgcggcgtctgcttcacgagcttgatcaatactcggaaaatcagacacattcccgacctttacttttaagacagaactgggtttcttaccctcactcacactacgatcaccagaagacactcttctctggattacataggtttttttcgtcaaactga

SEQ ID NO: 395089 - DNA, 648 bp, Salmonella enterica
atggacattagatttatcaatatattaaaatcaattgagttcgaagagaaacgggccaagaaaacagaaagtaagagtaaattagaattcagagcatttatattagtaatagaattagtggctatttccatattattagcattacttagttacgcttttgaatataaaacattactgctatactcactgattttattaataatgagctattgtgtccttataatggcacctttcatttccgcatatcaaaacagaagtaagataaagaaatctttcagtttaccattcagttcagctatcaataaaaacgtaaaaaaagagtttattatagatcaacgttatcttccgaagcttattgcattagataaaaaagaacttgagctagggttactggagataaaatatgaaagaaattttctagagaaaagaattctccttataactggtcctgtagataaactaggtatacttcctggtattatttccacattagcagccgcaacaaaattagccgatccaaatggttggctaatagggatcacctacggatacattgcattagttgttctttctttattcttttatcaaataatgatgcgttatgatcgaatgatagcacttactgaattggccacatcaaagaaatag

SEQ ID NO: 395090 - DNA, 204 bp, Salmonella enterica
atgtttgagataaagctccagaactatttcagcaaaatcatcgttaaccgtgtaaaagtaacattcaggcacattaagtacttttgcgaacgaacacaccatctcaaatgtcgggcgatgtattcctccttcgtactgagatatgcgcgaacgcgcagtttcttcctcaataccagcaagaacgcccaatttttcctgagttag

SEQ ID NO: 395091 - DNA, 216 bp, Salmonella enterica
atgattgataaggactgtcacccggcagatatcatcgccggactgagaaaacggggcacctcgctggcggcgctgtctcgtcagtcggggctggcgtcctcaacgctggcaaacgcgctgacaaggcactggcccaaaggtgaaagactgatcgccgaagcattgggcgttgcgcctgaaaaaatctggccttcccgctatctcagaccgcgttaa

SEQ ID NO: 395092 - DNA, 207 bp, Salmonella enterica
atggaacgcttcttcaggagtctgaagaacgaatggatgccggtggtgggttacgtaagcttcagcgaggcagctcacgccataacggactatatcgttggatattacagcgcactaagaccgcacgaatataacggtaggttacccccaaacgaatcggaaaatcgatactggaaaaactctaacgcggtggccagttttagttga

SEQ ID NO: 395093 - DNA, 1470 bp, Salmonella enterica
atgccatttacatttcatattgggaatcatagttgtcgtatatcagaaagctatttaagagatattgttgagaataaaagagagcatattttttcaacgttggagagattcttagattttttcaggagtatatttactaatcggagtttaatttccgattataatgagatatataatctgctatgtaaaaaaaaagagtgttcagatattaaggggcctttctcaccaagactattttcgaaacgagatgttgatcctacacgatggggacccattctcggatgtattaaacttattgatgcctccagacctgaaacgaggggtaaatacaccgtggaagtattcgcatatcatgaagatacgtcactgttaaaaatgtattacgatgggttattacttgccgagacggagtgttctgagcgttccctcgaatttttaaaagaaacgatgtttaattgtaatacgggtgagattacgcttgccgcggtgggtaacgataatctgcctctgagcgaagcaggtgaaaatggactctatgatgcttttgaggagcgtttgatagagtacctgtcaccgccgcccagaccggcaggtgataatggcgctactgctcaggctgcttccctgcaagcggcagagacagatgtgtttgatagcggggctattgatcagactgattcccaacaagtgccagagccagagatagataggtttattaactcggaacactttaagaaaaatatttgcatggctgatattgaaaaaaataaaataggtagcgggagctatgggacagtttatttattaaatggcgaatttgttgttaaggtcccaattaacgaacggggaatgaaagttaattttacatctccagaacatggtaattgtcatcctgagcgtgttagtaaatatttgaatcaggccaatgacgacagaaatttttctcgttctgccatcatgagtattaatggcagcgatgtcatggtcttagtttcaaaatacattcatggtcaggagctcgatattgaagatgaagataactataatatggctgaagagctgcttgaagaaagaggtctttatatgcatgatatgaatgtctttggtaatattctggtcaaagaggggaaactttactttgtggatggtgatcaaatggtgctgtcaaaacaatcccggcatcagcgggcggcttctcttgcgacaaagaaactggaagaacaaattatgacccatcataagataaaattaaagcaggccgagaccgaaggaaatgaggaagatattgaatattataaggcacttattatggaccttgatgagttaatcggagtggaaccaccggcacctgagccagcaagacaatctgagccagcaagacaacctgagccagcaagacattttaaaatagccccacctgaggaggggacccttgttgctaaagtattaaaagataaatttaaaaaataa

SEQ ID NO: 395094 - DNA, 846 bp, Salmonella enterica
atgtgtcaggggggaaaacacgcgctaagtgggaggaaaacgagaaacactcacggaattgatcgtctttttagctatatgagtaatgtggaggatcatacattacagcatgtatatatatcatgtaagtgtacaagcaattcttacccatcaaacccgatttctacatttaaaaatcatctaaaagatcttgagcaaggaatggaatgctttaaaagatcgccaactaaagctgatatatctaataaattctcatcatattccagacaaaatgaaactggagttttattttggatttcttatgataagaattcatatgaggatgttatctcgaaagtcagttcttgccggatagatagcgaatttgactatggtagtattcatttaatagataatgatgtagtaaattttcatctgaaaacgattagatttatcgagaataaattttgtggtagttggaattattatttacatgaaacatctattaactactcagataaatctattacaagaaaaacaaaaatactgccagtagaatacctaaatgcaaaggcagtctgttttcttattgataagaaaaatcttgaagtttcaaagccaatttttattattcaggttaaagataaatttagttatgaagctcttgatatgtatgtctccgcggcaagggagttaacaggggaaataacaaatcattattgtatagtgttccctgattatgtagcccttgaacatttatccgaagtaaaaaaggtgattatgaaacagcctgaatcattgaatattgagttgatggttgatagttataatgatcacggagttagaggtgtttacaatgaacaataa

SEQ ID NO: 395095 - DNA, 132 bp, Salmonella enterica
atgggagagctttcaaagttcgttggcgaggtaggtgaggatgttgcgaaatatttttttgaaaaaatagtctggaagaattcattagcaaatattgagttagtatgtgtcaggggggaaaacacgcgctaa

SEQ ID NO: 395096 - DNA, 699 bp, Salmonella enterica
ttgggaaagacgtttcctgcacagacgctattagagctttctacggctagcctgatcccgcagcatgttctggatgatttgcatcagcggtttggtgaaaccttcgatcagcttgatgattttgaacaggtgattgttgcaacggcggcgattgaaggctgggttaaccatgaacgcgcttgccagttaacaacccgtcattcccgcgaagtcacgctgacacttccccgactggaaagtaaaggttttctggtcgcagggggggagcagaaaagcaaatattacaccttgcccggcgtatcggtcatgacgccgggtgaagttttctcgttgggggcggttgtgagctccacacataacgaggggaactccgcatataacgagcagaggtccacacataacgaggggagctccacatataacgagaagaggtccacacataacgaggaaaactccacttataacgccggggacgatcaacccgcgtcccgggatgagtatggacgtttgcttaaccgctttatcgacagaccctatattgatgatgttgatcatctcaccgaagctttcagggattcgttgtttactttagcagcggttccgcgtgaaaggctgcgtcttggggataaggagctgatgaagagtgtgatcctgaatgtgtgtcaggggctgtatatttccgttgctgcgttggggtag

SEQ ID NO: 395097 - DNA, 420 bp, Salmonella enterica
atgcagatcgctctcagtggcttctggttgctcttccaggaactgcatcagcgggtcacttcccaggttggacgtcatcaggatcacggtattgcgaaaatcaatttcacgcccttctccgtcccgcataaagccccggtcaaagacctgataaaacaggttcattacatcccgatgggccttctccacttcatcgagcagcaccacgctgtaaggccgcttacggactgcctcggtgagaatgccgccctgaccatatcctacatagcccggaggggagcctttcaactgcgagaccgtgtgtggctcctggtattcagacaggttgatggtaatgagcgatttctcaccaccatacataacgtcagcaagcgcaagcgcggtttctgttttgcccactccgcttggacccaccagtaa

SEQ ID NO: 395098 - DNA, 342 bp, Salmonella enterica
gtgctgtacggcgtcgatgatatttttcagacgctgttcgaattcaccctttacaccggcacccgcctgaagcaaacccagatccagtgtcctgacgatgacgggcttaagactttcgggcacattgccctcagcaatacgcagcgccaggccttcaaccagggccgttttgcccacgccgggttcacccacgaggatcgggttgttcttacggcgtctggagagaatatccaccatctgacggatttcgttatcacgtccaaagaccgggtcaatctttccttcccgggcacgggcggtcacatcgaccgtaaagcgattgagaacggactcttcctgtga

SEQ ID NO: 395099 - DNA, 123 bp, Salmonella enterica; identical to SEQ ID NO: 374846

SEQ ID NO: 395100 - DNA, 366 bp, Salmonella enterica
gtgcagcaccgcctccggctcgccgtggcgcgtcaccccgatgagggccacaccgccgcggtagttgggcccggtgatgtcccgcacctcccggaaggtgaaccggtagttgtggatattcacgctgtcgcccgccctcatccgcacatcgcgctcaatgctgtaattctggctgaaggcgatgccggtaatcgtcaccgccagcccgaggtgcgccgccaccatcccccagtagctgaaggaggttctggtgccgcgggagacgcgctgtacggcttcggccaccgccagcaccgcaatccagcaggccatcgccatgcccgccaccgtcatggcggcgatgcggtcctgaagcagccacggtaa

SEQ ID NO: 395101 - DNA, 300 bp, Salmonella enterica
atgcccgctgacgcgatactgcgcgttcagaatgcgttcgtgacgcaggcgggcgaagtatgccccggtctccgggctatcagcgtcacctgccgtcaggaagggttccgcgtaatgatacgtttccccggtcgtgatcccctctttgctgaaaatactttcggcgctgtcctgaggcgtcagtgcatcacggtagttgtagtcacgggtggcgacacttccgctcaccacattgtaggcagtctgaatatcccagatgctctcctgcccgctgtcactcatcccggcctggttgcgtaa

SEQ ID NO: 395102 - DNA, 1050 bp, Salmonella enterica
gtgcgtaatatcggtgcagcaagagcattcagtggcgggattaatattggtggtgacagtggaaactggactacggcggaatttatcacctggctggagtcgcagggcgcatttaaccatccctactggatgtgtaaggggtcgtgggcctatgccagtaacaaagtcatcactgacacggggtgcgggagtatctgtctggcgggcgctgtggtggaggttctggggactggcggtgcgattaccattcgggtgacaacacccaccacaacgtcaggtggtggtgtacccagcgctcagttcatctatatcaatcacggcgatggatatgctccgggatggcgacgagattttagccgtactggcgacgggatgaccggcaacctctaccttaaaaatgagggtcgtataaatcttgctattgtggatgaagccgaaacgccccgcatgtggctcttcaaggataaaggcggcgacggtgttcatattaacaatggtaatgatggcggcggggatttcgttttcggtaaagaaggcagtttttatgcaccattagcagtccgtgcaggtggtagcaaaatgctttctgttcgttccgataataattcggcactgagtgctcactttaatttatgggggggcggaaatcgccctacggttattgaactggatgacgagcagggatggcacctgtatagccagcgaaatccggatgggactatttcattcactgttaacggtattgtctactgcacagcgttaaatgtaggcggcgctatttatcagaataacggcgacatctacggttctgtctggggaaatagctggctgagtacgtggattcacaacaatgtagtaagaggggtcagacttggccccgtggcgctttctggcggtctgtggcgtgattttcaactcggcggcggacaggtggtgacgggcttccatactgacggtaaatgggaaatggaaggtgatgatgacaaggtctattaccgtcccgttcagtatctggttggtgatacgtgggtaacggccccaagtgtataa

SEQ ID NO: 395103 - DNA, 189 bp, Salmonella enterica; identical to SEQ ID NO: 380330

SEQ ID NO: 395104 - DNA, 873 bp, Salmonella enterica
gtgctccgcgccagcctgatttgcgacggacgttcgatacccttgctgaggtggatagttccttcggagaaacagcaaaatgcaaaggtacagcaggcctttcttaatactcttgccgaagcggtaaacccagaagcaagagtgatcatcgtcactgatgcagagttccagaatgcctggttccggcacatagaatcactcggatgggattttatcgggcgcataaggggaaatatccagatgcggcttaaggccaaaggcgaatactggttcagacgtcaggaattgcaggccagtagcaaaccggaatatctggggcctgggacgcttgcccgctcagaatatgcgcggtgcgatggtcatttttatttgcataaaaaagagccgaaaggccggaaaaataaacgctctcgttgcggtatagccagaccatcacagataaaagatgccagcccggcggcaaaagaaccgtggttaatattcagtagcactgatgactttaagccgcgagtgatcatgaagttatacagccgccgaatgcagattgagcagcacttcagggatgaaaaaagtgagcgctttgggttcggtctgcgggccagttacagccgttcggctggaagagtgctggcgctgagcctgctggcaacgctgagcacaatagtcctgtggcttgtaggttatcacgctgaaaataaaggattacatttaaggtatcaggccaacagcgtcaggacacggcgggttatcacgtatctgacgttagcggagaatgtcttacgacagtccccgctaattttaaaacgaacggtgctgcgcaccgttctgaatcacctcgccagaacctaccagaatatggtgttggtttattag

SEQ ID NO: 395105 - DNA, 921 bp, Salmonella enterica
atggcggggccttccgtcccccgggatgcccgggcactgcacctggcggtcgctgactggctgatgcctgcacgggagggggaaccggaccctgcagacagatggcatgcgtccggacaggaagataacgccgccgccttcagcctcttcctggacaggctgcgtgagacggaaaacttcgaaaaggacgcgggctttaaggcacagatatcgtcctggctggccctgctggctgaagatgatgtgctgagagcaaaaacctttgccatggcaacagaggcaacatcaagctgccaggaccgggtcacacttgctctgcaccagatgaagaacgtacagctggtacataatgcagaaaaaggagtatacgataataatctcccggggctggtttccacggggcgtgagatgttccgtatggaaatgctggaacggattgccctggaaaaggtcagaacgctggcttttgttgatgaaattgaggtctgtctggcgtatcagaataagctgaaggaatcacttgaactcaccagcgtaacggcagaaatgcgtttctttggcgcgtccggcgtgacggcttcagaccttcggagcgctgagcgtcaggtgaaagccgccgaaaacagcgagttcagtgagtggatactgcagtggggcccgttgcacagcgtgctggaacgcaaagagccggaacgctttaacgcgcttcgtgaaaagcaaatatcggactatgagcacacgtaccagatgctgtctgacacagagctgaaaccgtccgggctggtcggtaataccgatgcagagcgcactatcggagtaagggcgatggcgagtgcgaaaaaggaatttctgaatggcctgcgccctcttgtggaggagatgctgggtagctatctgaaagcccggtggcgtcttaactga

SEQ ID NO: 395106 - DNA, 486 bp, Salmonella enterica
atgctggcaagaatacgcgtggcagagtcagacaaccattttttgttggttttgtgccatgccagagccactgctttaaaacacttttccggtgaagctgcggctttatcagccatgcgctgttgggcggggttgatattctgcgccagtagtttacggataccgtcgcgctgttgtcttgcttcagcaagagaaaccagcggatacgcgcccagactgacgcgggactctttaccactgaagcgatacttgagataccagatacgcgaaccgccgggattgaccagcaggtacagaccgtgtgagtcggagagttttacaggacgagaagagggttttaagttgcggatttttgaatcatttaaagacctttgggggtcactccagaatcgaaccaacctgaccccaaatctgaccaccaaattaaccagatgcggagggaaaactgagtacgcatcgggaaagatttttacgctgacctgttga

SEQ ID NO: 395107 - DNA, 219 bp, Salmonella enterica
atgaccgaggcggcgattgacggcggactgacccgcgacctgtacgccgcgcttggtgaagaactggataacggggcatgggcggtacgtctgtattacaaaccgtttgtccgctggatatgggccggggggctgctgatggcgctgggcgggctgctgtgcctggctgacccgcgctaccgccgccgtccgcgcagaccggcgccggaggccgtatga

SEQ ID NO: 395108 - DNA, 162 bp, Salmonella enterica
atgctggggctggatttaggcgtttacggcgcgccggaaaccttcctgatcgacgggaaagggatcattcgttaccgtcatgccggcgatcttaacgatcgcgtatgggagagtgaaatcaggccgctctgggataaatacagtaaggaggccgggcaatga

SEQ ID NO: 395109 - DNA, 462 bp, Salmonella enterica
atggatggaaggcggttcagattgtttaacgtagtcgatgattttaatcgggaagcgctggcagtcgaagtggacttaaatatcctggcgcatcgcgtagtgcgcgttttggagcggctcagcgccgaaagaggctatccggcgtttatccgaagtgataatggaccggaacttaccgccgcagtcctgtcggagtgggccgagcagcatggagtcatactggattttattcaaccgggaaagccaatgcagaacggatttatcgaacggttcaataagacattacgaacagaaatactcgatatgtatctgttccgaacgctgtctgaagtccgagagttaacagaaaactggcgaacggaatataacgaggaacgcccgcatagctcacctggcggcataccgccggttacctatgcaaggcaaaaactggccggagactctaactggcaatggtactaa

SEQ ID NO: 395110 - DNA, 711 bp, Salmonella enterica
atgcacgacaacgtagccgtacccggtgcggcggaatttctgacggggattctggaaaaaggtctgccgctggtgctgctgaccaattacccgtcgcaaaccggccaggatctggcgaaccgctttgccaccgctggcgttaacgtgccggacagcgtgttttatacttcagcaatggcgacagccgattttctgcgccgccaggaaggtaagaaagcgtatgtcgtaggcgaaggcgcgctcattcacgaactctataaagcgggttttacgatcaccgatgtgaaccctgatttcgtcatcgtcggtgagacccgctcctacaactgggacatgatgcataaggcggcatttttcgtcgctaatggcgcgcgctttatcgccaccaatccggatacccatggccgcggtttctacccggcctgcggcgccctgtgcgctggcattgaaaaaatctccggtcgcaagccgttttatgtcggcaaaccaagcccgtggataatccgcgcggcgttaaacaaaatgcaggcgcactcggaagagaccgttattgttggcgataacctgcgtaccgacattctggcgggattccaggccggtctggagaccattctggtactttcgggcgtatcaacgatcaatgatatcgatagtatgccgttccgcccgagttggatttacccttccgtcgctgagatcgacgttatctga

SEQ ID NO: 395111 - DNA, 210 bp, Salmonella enterica
atggccgaaattttgctttttacattactggccgcggcttttacgtcgcctgctatgacatcgtcagatagtagcgccccatggttttttgatatcgatttttctggtcattggctttttgtaaaatataactctctgattctatgggattatctccaccctttggtgagtttttctggcattaataaatctataagcttccagttgtaa

SEQ ID NO: 395112 - DNA, 153 bp, Salmonella enterica
atgtttgatgtcactctgctgatcctgctcggattggcagctctgggatttatcagccacaacaccactgtcgccgtttcaattctggtgctgattattgttcgcgtaaccccactgaatacttttttccgtggattgaaaaacaggggttaa

SEQ ID NO: 395113 - DNA, 2115 bp, Salmonella enterica
atggctcgtacaacacccatcgcacgctaccgtaacatcggtatcagtgcgcacatcgacgccggtaaaaccactactaccgaacgtattctgttctacaccggtgtaaaccacaaaatcggtgaagttcatgacggcgcagccaccatggactggatggagcaggagcaggagcgtggtattactatcacctccgcagcgactactgcattctggtctggtatggctaagcagtatgaaccgcatcgcatcaacatcatcgacaccccggggcacgttgacttcactatcgaagtagaacgttccatgcgtgttctcgatggtgcggtaatggtttactgcgcagttggtggtgttcagccgcagtctgaaaccgtatggcgtcaggcaaacaaatacaaagttccgcgtattgcgttcgttaacaaaatggaccgcatgggcgcgaacttcctgaaagttgttggtcagatcaaaacccgtctgggcgcgaacccggttccgctgcagctggcaattggtgctgaagaaggtttcaccggcgttgttgacctggtgaaaatgaaagccatcaactggaacgatgccgaccagggcgttaccttcgaatacgaagatatcccggctgacatgcaggacctggctaacgaatggcaccagaacctgatcgagtctgccgcagaagcttctgaagagctgatggaaaaatacctgggtggtgaagaactgactgaagaagagatcaaacaagctctgcgtcagcgcgttctgaacaacgaaatcatcctggtaacctgtggttctgcattcaagaacaaaggtgttcaggcgatgctggatgcggtaattgattacctgccatccccggtagacgtacctgcgatcaacggtattctggacgacggtaaagatactccggctgagcgtcacgcaagcgacgacgagccgttctctgcgctggcgttcaaaatcgctaccgacccgtttgtgggtaacctgaccttcttccgtgtgtactccggtgtggttaactctggtgataccgtactgaactccgtgaaaaccgcacgtgagcgtttcggtcgtatcgttcagatgcacgccaacaaacgtgaagagatcaaagaagttcgcgcgggcgacatcgcggctgctatcggcctgaaagacgtgactaccggtgacaccctgtgtgatccggaaaacccgatcattctggaacgtatggaattccctgagccggtaatctccatcgcggtagaaccgaaaaccaaagctgaccaggaaaaaatgggtctggctctgggccgtctggcgaaagaagacccgtcattccgcgtatggactgacgaagaatctaaccagaccatcatcgctggtatgggtgaacttcacctggatatcatcgttgaccgtatgaagcgtgaattcaacgttgaagcgaacgtgggtaaacctcaggttgcttaccgcgaagcgattcgcgcgaaagttaccgatatcgaaggtaaacacgcgaaacagtccggtggtcgcggtcagtatggtcatgttgttatcgacatgtacccgctggagccgggctctaacccgaaaggttacgagttcatcaacgacatcaaaggtggtgtaattcctggcgaatacatcccggccgttgataaaggcatccaggagcagctgaagtctggcccgctggcgggttatccggtagttgatctcggcgtgcgtctgcacttcggttcttaccatgacgttgactcctctgagctggcgtttaaactggctgcgtctatcgcctttaaagaaggctttaagaaagcaaaaccagttctgcttgagccgatcatgaaggttgaagtagaaacacctgaagagaataccggtgacgttatcggcgaccttagccgccgtcgtggtatgctcaaaggtcaggaatctgaagttacaggcgttaagatccacgctgaagtaccgctgtctgaaatgttcggatatgcaactcagctgcgttctctgaccaaaggtcgcgcatcgtacactatggaattcctgaagtatgatgatgcgccgaacaacgttgctcaggccgtaatcgaagcccgtggtaaataa

SEQ ID NO: 395114 - DNA, 1269 bp, Salmonella enterica
atgtcagcaggaaccttaactcttaccaatagcgctgatgctgttactggtagcggcacatcctttacaactgaacttgctgccggtgattttattgtcgtaactgtcggtggcgtaccgtacacgcttccggtaaaggctataaacaacaacacatcactgacacttgtcagtgcttataccggtccaacgcaatcaggagccgcatggtatgccgttccccgagtcgctttgaatatggttactgcagcattggttgcccaaagtaccgaggcgctacgtggtctgaattatgataagcaaaactggcagcaggtatttagtgctcccggaacaataaatgtaaaactgcctgatggctcaacctttagcgggccatcatggaaataccttgctacgcgaaaaataaatctgaacagtgaagatacgtcaggagtactgcctttagagaaaggaggctcaggatatagtacaagagaaggtttaagacaagcatcgataattaatggcgtagagggggtatatgggagtataaataatttacttaccaattttaataattatgccaaaaatggggggtgtttttcatttcgcgatgcagacaccgcagcaacatcgacttacgcttttagcgcatctatcctctcaagaacaagcgatacatattctatatgtagtgtgagccatagcaacggcaatcttcgcgtatctggtggagtggttaacggaggaatagcgactacaaattatattaacgatatttggggttccattaacactactgtagatagtaatggttttattaaaaaggcatcacctgtagtcattatttaccatgatggttcttatgagactaatcatgaatcagaagggtgcgtggtagagcggatttctgtgggtgaataccttatcaccggctgcgttggtcttaattctgatgctgcatggggggggattgatggcggttttgaaatcccggtcgacagaaacaagcagtcccgtatctggctggactacaaagtcaatgctgatggttctgttctggtaaaaacgtaccatcgcacatatccgcaatctccagaatttgccagaaatgagattgataatcttaaaagcggagagccgattgatataccgtcagactcatttgtgtctgtacgtgtggaaatgccggaaaacagcatctggaatcagaaacaggaagccggccgtatcgttatggaggaaaccatgatgaaagaagagcggacagatggcaataatgtgtag

SEQ ID NO: 395115 - DNA, 207 bp, Salmonella enterica
atgtggattgagttcgacaggcaaagccctattggcgatatgcgcggtgatattcaggctgctcagatcgtctcggccgtctacggatcacagggggcaaaagtaccgctgaacgatgcaattctgcgctgggtgaatgatgtgcaagatgaagagaaagacccattcgcgagcctcgaggctgcattaatagcagcaactcagtga

SEQ ID NO: 395116 - DNA, 327 bp, Salmonella enterica
atgattgctcttgatgtggtgaaacaacactgccgcattgataacgacttttccggcgatgatgctttgctggagttgtattcaggagcggcggcacgatatgtccagacatggacacgaagaacgctctatgaaaatgaaggcagccatggttacgctgaagaccctgatccgattcttctcaatgatgatgtgaaggcggccatgttattgctgatagggcactggtatgccaacagagagtctgtatccgtaggtcagacggtagcagaggtcccgtttgccgttgaagccctgcttcagccataccgaatttacggggtatag

SEQ ID NO: 395117 - DNA, 183 bp, Salmonella enterica
atgaagctgattgcactgaaaccaatttattttaatggtgttgttgcgatggagggatattcactggaaacgctggagcaacatggtcgtgagctgattacaaaaggctatgcgaaactcgatgaaggcgggaaaacagcacagcaggaaactaaagcagccaggaaggtgaaaaaggaatga

SEQ ID NO: 395118 - DNA, 411 bp, Salmonella enterica
atgaagcaaacaatcttcctccgaagtaagcaacaacagcaagccgcaataaatgccatcctcgcaacaccactcgataaagacaagccagtcaccatccgcattactgactacaagcgcaaccttgaccagaacgcaaaatttcacgcgatgctggcggatatcgctcgtcaggttcaatggtgcgataaatggttaaaaccagaacaatggaaggttttgttgatcagcgggcatgcagtggcaacaaagcaggaagctgatgttttgcccggccttgaaggagaatacgtcaacattcgcgaaagcagcgcgcagatgagcgtgaagcgcatggcaagtctgatcgagtacacaacagcctgggctattggtcagggtgtcagatttaccgacaggaggtacgaatga

SEQ ID NO: 395119 - DNA, 207 bp, Salmonella enterica
atggttaattggatgctcgtcgcactcaaatgcgttggcgttggatggattcttctgacgttttttattgttctgcatagctacattcgtcttgtgaatgacggtaaagacccattctctacgttgtttggtgctgcgtttacctgggtacttatcggaattgtacctgtagcgatagcaaaaatggcgtggcgttttgtgagttga

SEQ ID NO: 395120 - DNA, 489 bp, Salmonella enterica
atgacggttatcgaaacgaactggcatgaactttttgagtacagaaaaggccgcctgttatggaagcaaaaaacttgtaaaagggttgtggctggcagagctgccggcagtttcggtggtggatatattcgaataatgatttcaggaaaggcgcatcaagcacaccggattatctgggaaatgtttaacgggcacattcctcccaatatgcaaattgaccatatcaaccatgttggctgggacaacagaattgaaaatcttcggttggttgatggttttgaaaaccagcaaaaccggtctaaatcgaagcggaataaatcgggtgtttccggggttcgtttgcggccagatagaaacaaatgggaagttgcgatcactgcaaatggtaagcgcaatttcattggttactacgagtcatttgttgatgcttgcgaagcaagaataatcgctgaagtttcaaatggcttccacataaatcatgggtgctga

SEQ ID NO: 395121 - DNA, 627 bp, Salmonella enterica
atgaacgaattttttcctttagtaagcgccgccgggattaccgtcggccttgccgtttgcgcgctgatcattggcctcgcgttagctatgttctttgccgtctgggagtcgataaagtggcgtccgattgcctggattggctcagcgctggtcaccattctgcgcggcctgccggaaattctggtcgtgctgtttatctatttcggctcctcgcaactgctgcttacgctgtctgacggtgttacgctcaacctcggttttgcgcagatcccggtgcaaatggagattgaaaactttgatgtcagtccgttcctgtgcggcgtggtcgcgttgtccctactgtatgcggcctatgcgtcacagacgctacgcggcgcgctgaaagctattccgtctggtcagtgggagtcgggtcaggcgctgggattatcaaagacggcgatttttttccgtctggtgatgccgcagatttcggggtttccgccacctatcccccgtttgaatccctggatgcgagcaataaaattgtgggcttcgatatcgatctggcaaccacattatgcaagcaaatgcaggcagaatgtacttttactaatcatgcttttgatagccttatcccggcgctga

SEQ ID NO: 395122 - DNA, 762 bp, Salmonella enterica
atggtcatgatcccaccagtggtgacagggggaattggcggggctgcaaccggaagtgtcggtgtggcgggtggctcaaccggaacagcaacatttcccggagcaggacgcagccatggcggctgggaagaagaggatatgtcatatccgggagcaggaaatgcgcagtcccgtagtcaggaaggatttgattatcggggaaaacagtatgatccagttctgaatgagccgatggccgtcagcgcggaaacgcacggtgatttctgggaagatgatatggattactcggaagccgtgagttatgaaggcattaataccaaagctggggtacaggcaaaaacagatgaaaagacgtgtgagaactgcccgccggaagggaaagtgatgccgatggtgagacgctgttcgcgctggagcatggtcacaatcagttatcagacgcgtatctgcggcacgttttataatcctgaaacacaacaaatacaggaatttaaatactgtggcgtgtcgtttgacggctggaaagataagttgtgtcagttctgggaggcgaaggcgcgatatgatcagttttttgatgcgtttggagacccaaagggttggtggaaaggttacaaaagtggtttaagtcaggcggctcgccaccaggcggttgcaaccatcaatcaaccattaaaagtagtctggatttttatgcaaccagtgagttatcggtattactcaagaatatttaaagattttaaagatataattacaaggtag

SEQ ID NO: 395123 - DNA, 234 bp, Salmonella enterica
atgcaattcatagaaacggaactctttactgaagatgttaaaaaactgctcgatgatgatgaataccataagcttcaggtttttatggctcagcatccagattgtggtgatgtaattcaggaaacgggcggcctgagaaaaatgcgctgggagcgcgaggcaaaggaaagcgcagtggcgtacgaattatctattttcatcgtagtcaacggtatgagattcgcttgcttctga

SEQ ID NO: 395124 - DNA, 249 bp, Salmonella enterica
atgatatccctaaaccatcatcttctggctattttactgttattttttagttttagcgatgtttataaagaagaaaagaaatatgacagactttgctttgatgatatgaaaaaagtaaattgtatcagaaaggatgccattttttccgcagataaaagcaggaattttggcataactttcacggtgtacgatggtgataattatcgtttaggccagaatggtgacattataaaagtccaatccgattag

SEQ ID NO: 395125 - DNA, 3897 bp, Salmonella enterica
atgaacaagcattactatacccaaacgcctaatttcacgagccatggaacggcagatgttgatacccgtacacgcgcatttggttttaactttacccttgctacgttaaatggtaatcaaggcatggggccggagctggaaatagccctaaattataataactcagacacaagcaacgcttgggcaatcgggaacggttttagctatggctttacagtctatgataaacctaatggtagtcttgtactaagtagcggagaaagttataaagtcagggataatggctctcagccgatcttgctccagcaaaaaatcccctctgtcatttttaaaaaaaagaccatgtatgaatatcaagtagttgataaaaatggtaatattacttatcttaaggaccacttacaaaatggtattttttttccagtaaaaattgtttctgcgctagggcactctctcactcttcactggaaaaattcaaactcaggttttgtcctttcttcgattactgacgatagcaatactactttgtgttcgcttttttacccaactggtaatggcagtacggaaataacactctatcctgatactgcagagacatttacagttatactgtatacaacgaataattatcttacaaaaattacccataccctgctcgggcgccaattcccatgggaattgtattatcaggacgttggaatgggggacggcgttcaaacgctcgttaaggttaaaacccctacggggttgattaaaagagcaatctataactatggtcagaagaaaggattaatccactttcctcaggctgcaaatttatctccactcccggcagtgacacagctcattgtttccccgggtctgggacagcgagatatgattacaaattattttgctactgatagtaacaacgacgctgccagcccttttaaaaattatctgggttatgattataatttaggtagcggttggtcacctgatagtgacttcatgtatgatattttcgatcctaagtatacttaccagactatcgttactcagcctgcaactgatggtaatagcgaaatcagaactgtttatacttataataattttcatttgcagaagtcagttaagactactgaaggtgatacgacgcacctgattgaagtaaaatactatgttgatgactatccttataagccatataacgatctccctgcacaattccaatcaccaagaatacaaaccgaaacttggattaaccgggctaaagaatcctttactcaacggactgggtttgaatacgacacctttggaaatttatgtcgacaaatttcgctttgtgatgaacgtggtgaagtcactaacgaaagtactgttatttcatccagttattatccggcccaaggggaagaagatagtatagatggtcagagcggttgtcccgcagatccctggggatttacccactggctgaaaagtaaaacgactacgccacctattcttcacaattatgaagatgttccggttcgaacgcagctttatcgctaccaatcttctgaggtcctggaagatatgccggtcacctatgccattattcccgacatggaaacgctaaaaagcagtgatatcatcggtgatagaattcatattctgatgcagcaaaaatcagagtattttacggataagaagtcaattcatttcggccgtaagagaaaaaatgcaattagtgtttttgatgtcaatggaaaaagttttactaaaacgaacacttttgcctggtcatatactaatactagcacaacatgctcggaaacgctgacgacatatgataatttaaaagcatcaacaacggttattcgctctgcttatacgggaaggatgcaatcctatacgaacagagcgggtaatcaggagaaatttttctatgactcactagggcgtatcactagaattatatgtaatcctcaatcgaaatatgaaaacataaaagaatttacttataatttactcaaaaatgataatggcgagattacggaaatatctactcagataaagaatttaaacaccggtatgattgaggtttatttttttgatggtgcgggcagaatttattctgagtttaaaaatgctgctgacttcgatcaacctgatacattttatgaagtaaaatctattaagtgggatgctcgtgggcgtaagcatagcgaaattaataaagattattccagagatgtacataaggagttgaacgaatactctgtcactacacaatatagctacgataattggggggggaattatttaacaactttatcttatggccgtcaggacattgatagccacgatcctgtacgtcgttgtgatattagtcagacaagatcagaaaatggtaaattagtgctggggtcaacgaaaattgaatatgatgtccagggaaatgccatcaggaaaattattcgcgataaaaacgatacggattatgctattactcggtctgagtacgatggtttagggcgccttcgtaaatttatcgatacatctggatatgttacggcgttaacctacgatgagtttgatcgcatgctgtctaagcgactgcctaataaagctctaattgagtggacctacgcttcatacactcctgaaaatcatccagtcaccattgcgttaaatggtgtacaggtgggtagccaaacttatgatggcttaggacgtctgacggcaatatcctctggtgggcgtgtcagtagcgcgacctatactggggcaaatgacacgccagataccaccatggatgcgatgggtcaaaggattactcatacgtggatccctgagcttcatagcgtacctgataccattgtgggccccgattttatgcaatccttctcctacgataatattacaggtgctttattggaaagctctgaaacgggaagtcgttcaacgcaattcaaatattatccctctggcctggctaaatcagagaaaataacagatagtgatataccgatggttgaaatggagcgatcatggtcattaatgggtatgactatgacttacagggatatctccaataatatcgttaatattgcttacgataattatggtcgctatttaactaaaactgacccagatgttacttctaccgtgcgctatgatgatgttggtagactgtattaccaaaaatctacaggctattcagacgaaattattattgagcttggactggatgatttcagccgtgaacatacccggaaaataacttcatcttccggcgaggtaatgaatatcacccagaattattatccaaacaatcagttaaaaacgcgtgtaactgctgttggcttaaatgtaattcgtactgaaaattttgaatatgacgaatgtaatcgcctgatacattattactgtgaaggttcatctcctgtagtcgatgcgtataataatgctattgcgcaacaagatttcactttagatgattataataatattacctgctgtgttacgacgctagttggaggattgaaagataccgcaatatatgaatttacgaatccagacgatccttgccaacttatcacggtaacgcattcgttacatagccattatccagccagctataagctggagtatgaccataacggacgaatgacaaaagatgaagcgggtcggaccctacattatgatagtactggacgattagtccaggtattgagtgatgatgaggaaagttattatggctatgattcagctaataaaattataaagcaaatctctaatcagggtaaaaatactgcgctgtattatctggacgatggaataatcagcgaaatggatacgcattcaaataaacatacacgcttggtttctggcgccatgggaattattggcgttaatgacgacgctaaataa

SEQ ID NO: 395126 - DNA, 393 bp, Salmonella enterica
atgcagaatcatacacgcgaatggacagtaatactaaacccccgaacaggtaagccattggttattccggggcgcgccgcaaaacccaaaagccaattcacgattcgctatagcgccggaagcgatggcagcctgcgcacaaatacttccagggagggccggatatgcgaaaaaacaggacacctataccgagagatacaggatgcccgcgcattgctgtttgaaatggcgcagcgcgcgcctcagtatggagacgaaccgaggacgttagcagaacaactgaagcaggaaggttgtattgaagggatgcaaactggcgaacgtgaagcctcatgtacaatggcccagacaatgctggaaaaggcatcccggaaaccgatgtcattgacatga

SEQ ID NO: 395127 - DNA, 771 bp, Salmonella enterica
atgcagatacaaaaggcagaacgtcgtttaatttttaaaactatcaaaaaaattaatgacttcactgctgatgatatgcgacatggagatatgaccaaaaagcagatactcgctcaggggaaaatgaataaaattgatatttggggacgggagttaaagattaattttttcaattttgacaatacggttgatgagcattttggtaatatggctagcatggcaaagtggactgcctggaagggggaatatcccccacttattcaaattatgatcgagagattcaaaaataatgagggtggggttttaagacacgatttactgaataaagcatttctagagctttcaacgacaattgagtgtgtaaggagaatcaaagaatttttatctaatttgttatataataatgggtttcgttcattatcaatagatgatttacaacagttggctttgaagataagagacccaaaggatggagttaaactgccaaaattcgatgactatgactgggttaacgggttggggattactatccacgatacttacgccacgaaaatctatcttgattatattgatataaaagataatagctttgaagctagtttaagttttagaattcaagaccattttggtctggatattgcagatttaaatggtaaatggtttgaatattcgcaatggttttgttcttggtttattttgcagaggtataaggtttatgattacaaaccatttataaatgaagctaatttcagttgcgtaataacgggatga

SEQ ID NO: 395128 - DNA, 1134 bp, Salmonella enterica
atgaatcatcacgatttaaaatttatagatagcgtgagagggttggcgacaatttgtgtaatactctctcattgtcttctgatgttttatccagcggctcatactggagttgggttttcaggaaggttagattctttcctttttaacagccctatttcttttatttataaaggtgaatctgctgttctagttttctttgttcttagtggttatatactttcatataactgcatgaagcatgggttctctgaacagtacatacgtagtagtactataaagcgatatctacgccttggaattccatgtgctgcatcaattttcatctgctatttacttatgaaggtagacgccttcccagctgcaaggcttggtttaacggacctccctcttgctagtatgtacagcaatagtcaatcgttcttcagcatgatctactcatcattgtatggcgcaatgattttctctgatgcaagatttaattatgtactctggacaataagtattgagttcttcggttcgatgttaatatttgctacggttatattgctgggatttaataaaaacattctccgctactcaacaattctaatgaccgtactgttcttgtctatcgataagccttattcttattatggaatgttcaccgctgggattgctatctcaacattcaagattgataacgcaagaggatttgctgtgaaattatgttcactgcttacattactacttggtctttatctgcttgggtgtgcaacaggaagcttttcatatttctacatagcctattatcttgacggtttaattccatggtggaggttaacacttgatattggcgcaatccttatcatggttgcggcggtcatgcacagtgatgtactgaaaccaataaagaataaattcttttattttttagggagaatatctttctcttgttacttacttcactcatttgtgttatccatcgttgggccatacgcattcaaatatacagaaagtagatttacaggtcttgtgatctgtacctgcgtagttatttcaatcacagttataatttcaacgctgttttataagtatgtagacaaagcatccataaggatttctaactgggttggcctgatggcggttccaagataa

SEQ ID NO: 395129 - DNA, 435 bp, Salmonella enterica
atgagttcaatgtatatatgggatgcaaaaaatattcgcttactggcgtatattcttaaggatgaatatgaagctgctggaatgtggcctgagaatggaatggatgtttctgatgaagtatcagccgaatttaccggacagccaccggaaggcaaaactattggtgtgggtgctgacgggatgccagcctgggtggatattccaccaccatcgcgggaagagttgatttctgccgcagaacagatgcgccagcaactactggtccatgcagacgctgttatgctggactggcgtacagaattgatgctgggggaaatcagcgacatcaacagggctaaattgtcggcgtggctggcgtataaaaatgaggttaaagcgattgacgtgacaaccgaccctgagcatgttaactggcctgttcctccggaggagtag

SEQ ID NO: 395130 - DNA, 1056 bp, Salmonella enterica
atgtctaagattgcacgatatcagggaaatgttcgggcttttgcctctgatgcacagggaatggaaagaaccgtttttggtggaacaaatcaggcagatgacctgacctcgcagatcacggcatctttccttcgcggatggggaattgttggcgcttccgaacacccctcgcttgaggacttcaatgcggcaatgtatgcaatgagtcagttcattgcgtatcagcaccaaatgggggttccagagtggcatgcagaacaggagtatcatatcggttcgatctgcacacataacggtgaatcttatcagtccttacaaaatgcaaatattggtagccagccgccatcagcaaaatggactcctgtattaacgtcaaaaaacggtctcgcaaaccttcaattgggagaagcggcaaaaagcggcgtcgttcagacaacaggtaagtcagaaaaagacgttatcagccagaagggagcaacagataactttgctttaaagagcctttttgatcactttggtggcgcaacgctaatgtttagtgcaggccgggattactctctgcaattgagtgattcaggagtcttatctctttacagcttagctctcaataaaatggttatgtcgtggtcttcatccggagagttggttgcaggaactatcgggtttgaacatgtaaaggaactgaagtcagcggcaaaaagagacgtgggtaacagcgcaggtcagataccggatatgagttatttcgaactgtccgggatcggctctgataacatgattgcaaaatttcctaatggtctgattatccaggtgttcaggagaagttttgttaactcagcaacagttgctgttccagttattacgccaacaacttatccaacaccattcccttctggtttgtggggtgtttttgcaacaaagtcaacttacgcgcaagtctccatgtcctgcgagtcagccacctctactgggtttaacattgtaaccgtgctgaatactggagcaggaggcgccgcgacagcatccagtgcttactttattgctttaggatattaa

SEQ ID NO: 395131 - DNA, 363 bp, Salmonella enterica
atgaaaaaattagtttttattttgggattagtcactgcaacggcatcacatgcaggaccttttgcagacgttgctaaagcgaaatttgagagcgagatgatgcaggcgatacaactcactgatatgagtgatacggaaaaatcaaaagcaatatcacgacttcctgccgctcaaaaaacacttcgtgaagttgttcgtgacggtttgaacgataaaaaatcttgcctcaaaataaaaaaagacttcgttaatgaacaaaagaaaattatgagcaccgaaaaaatagatgatagagactttgcggctacatctttaacggctatgggcgattatatcgctacagtttgtctcgatatgaaatag

SEQ ID NO: 395132 - DNA, 951 bp, Salmonella enterica
atggaaactttttatcgtgactatcgtctgacggttgggatcggtaaccaggctgtgattattcagccaccgataactatttcatttaaagcgcttgaatcggtaagtaaaaagtctctgggtaagttgagtgtgtccatcaacggtttaaagccctcctcgcgtctgcaattgctcaagtctgaagatgaagagaagtacatcccggtaaggctggaggttggttacgacggcaagctgcgtcaggtgtttcagggttcagttaaaagtggggcggtaaagcgtgagggtgcgatccacatcgtcagcctggaatgtgaagacggtggccacgactatatcaacgccttcacatcgcgcacggtacgcgggaaagatcaggtcgtcgattctgtcttgcaggacatgccgaacacgaagaaaggctctgtgacgaagcaacaggctcttatcaggccgaaggttctagtgggaagctccagtaaaattcttactgatatgttgtcaccagatgagagctttttcatcaaagatgaacgggtgcatatcctgaaagcgaatgaagtaacttcgggaaatatcccagtggttaacgctcgtagtggtctgctaaacaccccgcaagccacgaagattagcgcgcaggatgacggcggacagaaggggcaaaagcctactaacgacccggagactgatccgggggggagtaataaagaaaaggtcgactcaagcacgctagcccctcaatcgaaagggcagatagtattcgatacgaaactgaatcctatgctggtaattggcggcctttgtgcaatagagagtgtcacgaaccccgcgctaaacggggtttataagatataccaagttgaaaccagtgggcagaataacggggcggcttggtatcagaaggtcgtctgtcagccagcagggaattacgcggtaatcaagtga

SEQ ID NO: 395133 - DNA, 336 bp, Salmonella enterica
atgaatcagatctccaatattaccgacgagtctattcagcgccacgttctgatctttgaccgtggtgaggctgtcgttatccttcgccacctgccaacggttgaaatgtggaagatgcgcgtggaatacaatggcgattatattgatggcgtaaagttgtcgctgggaacgttgcattttcgacataaaaactggccgtttgatattgcggtgcttgctacagataacaccggtatagacccgtaccgcgcagatgatttcgccagcggacgatgtgagctttacatggtaacaccggaagaaatgattgaaattcgcgggggagacgtaccgtaa

SEQ ID NO: 395134 - DNA, 633 bp, Salmonella enterica
atggtgaatgaagatgatcgccggccgatgccatcacctgcttttgtttctgagttcgccccgtatatccgactgatgccagccgaagggttatgggagtgggtacaggaacaaatcatcgccgactctggccacctgcataatcccgaccacgcacacctcgcagatgctgacatagcgtttatgtgggcagcgaccgcattcaccaaaaaaggacgaacggttcttggtcaggcagaggaagtgatgatgcgtgctggtggatggcaaaaagcccggatggaacagcagatgcatgagtggttcggacataagccggatttcattatcacgctggccggtgacttctgcatgcaatgctccgacatcgaattctgtgcactggtagagcatgagctttaccacatagcgcaggagatcgatgaatacggctccccgaagttctaccgtgactccggcctgccgaaactgtgtatgcgtggtcacgatgttgaagagtttgttggagtggtccgtcgatatggtgccagcgccgacgtgcaagaactggtggacgcagccaatcaacctgcagaggtggcaaaacttaacatcgccagagcgtgcgggacgtgcatgttgaaactggcataa

SEQ ID NO: 395135 - DNA, 192 bp, Salmonella enterica
atggaatggattaacgttgaagaccgtaagccaaacggctttgaaatggtcattttagatactgacagaggtatcgctgtaggttgcttcgatccatttggagaaccaaagcaggcaatatttggatttactggcactgtcgcccattcgcgatatgaagtaaagcgctggatgcctttaccaaaagcataa

SEQ ID NO: 395136 - DNA, 327 bp, Salmonella enterica
atggtacggaaaatcatcgaacccgcttccgacttgtttaagacagttgggacaataaaccgcgctgatatacccacccgcgggattttttctaaaggccgcacccatgtgctcgacaaactcatcctttgcccgataagctgctatttccttctcaagttctacgttcttggctttcgcctcggcaagttctttttcggtggcagcatgggatttctcaagtacgtcaatttgctctccaatgaaagcgatgcgctcgcgaaggacctcgttgctttgaaccgcagagagcgcaccgacagcacttttgatagaactgataaatag

SEQ ID NO: 395137 - DNA, 255 bp, Salmonella enterica
atgcacaagcacaagccgctaaatctgctgccactgctgctggcttgtctgccactgttagccagctgcgcaccgaagcaacaaaactcgctacccgcctggacgccgcaaagcacaccgcaaatcttgccgctgccgtcagaagcaaaacagccggagccgacgccgctatgctcgccgacatgctcggaagtattgcagaagaggctaaacgatatgctggaatcgctgacgaccgctacaacgctggaatga

SEQ ID NO: 395138 - DNA, 549 bp, Salmonella enterica
atggctatgccaccaaagctgaggaataaactgagcgcagcggtcgttggtttgattcttgccggtgcgtctgcgcccgttattctcgatcagtttctggatgagaaagaaggtaacagcctgacggcatatcgcgacggcggcggactctggaccatctgtcgtggcgccacgatggttgatggaaagccggtagtgcagggcatgaggcttacgcagtcgaaatgtgagcaggtcaacgctaaagaacgcgacaaggcactggcgtgggttgagcgaaatatcaaggtatcgctgaccgaaccgcagaaagcaggcattgcgtctttctgcccatataacatcggccccggaaaatgtttcccgtccacgttctataagcgtattaacgcaggcgaccgtaatggagcctgtgaagccattcgctggtggattaaagacggtggccgcgattgccgcctgaccaaaggccagaaaaacggctgctatgggcaggtagaacggcgagaccaggaaagcgcgctgacgtgctgggggattgaccagtga

SEQ ID NO: 395139 - DNA, 279 bp, Salmonella enterica
atgaccagaatgagcaccatttacagcagactttcatatggaacaggcaccacgctgaccggctgcggtgtatcagcgaaggcatatgccgaaacagccaaaacagcaaaagaggtgtcctggatgttggccgacagaattgcagggttaagcctgagcgactgggcaattattgtcggtatcgcatgcactgttatcacctgtgcagtgaactggtattttcgctggaaagaacgggaggatcggcgcaatggctatgccaccaaagctgaggaataa

SEQ ID NO: 395140 - DNA, 1035 bp, Salmonella enterica
atgaccagttatttaacgcctgtaacttacggctctgtttgttcaggaatagaagccgcatcagtagcctgggaatcgctcaaatggaaggcagagtggttttcagagattgaaaaatttcccagtgctgtattgcagaaccactggcccaacgtccctaaccttggtgatatgacccgaattgctgttcgaattcgtgacggtgaaattgtagcgccaactatactggttggagggacgccttgtcaggcattcagtgttgccgggaagcgtaaagggctggatgacgaacgaggtcaacttacgttgtctttcgttgaactggcaaatcagatcgacaactctcgtatggaatccgggcaagagccggcgatcattctttgggaaaatgtaacaggggtactaaatagccatgacaatgcattcggttgctttctcggtgcgttggccggggaaagttgcgcactacagccagcagggaaaagatgggcaaacgctggtattgtctctggaccatcgagaacagttgcctggcgagttctcaacgccgaatttttcggagtgccccagtcgcgtaagcgagtcttcgttatggcaagtgctcgacaaggattcgaccccggagccgttctatttgagttcccatctttgccgccgcgcactgaaaaatattacggaaaacagaagaaatccggcaccaaaacttattcaggcattgaaagagaattccatcgatattgcctgagcgctattcccgaaacggcagggactctgctcgcaagttataatgggacatcgaaccaggatatgcgtatgcggggtggcctaattgtcgaatccactccaaagttgagggttcggcggcttactccatctgaatgtgaacggctccaaggttttcctgttgggcatacaaatattccgtggcgatcaaattcacccttgccacgttataaggcgcttggtaattcaatgccggtacctgtaatgaaatggttaggtgaaagaatacagcaagcaatctcatcaacctaa

SEQ ID NO: 395141 - DNA, 690 bp, Salmonella enterica
atgaacactcaatttcttgaatacgtgcgccagcagctgatggtggccaccgccgatttaagtggtgcgacgaaagggcagttgatggcgtggcttgagaacgcacagttcgatactggaacgtttaaacgtaaaaagcctcgagtgctggatgaagtgaccgggaaaattattacgctggataacccaccgataccgggcaaacagtcgcatgctaagggatcacatattcccctggtacagccggttgaatactccacagcttcgtggcgccgcgcgctaatgtcactcgaagaaccccagaaggcatggttgctatggagctacagcgaaaacacctgttgggacaatcaggtcgccataacacgctgggcttgggagcagttctgccaacagcttgaagggaagcgagtagcgaagaagacgatagaccgtttacgccagcttatctggcttgctgcgcaggatgtgaaaagcgagttagctgggagggatgtgtaccagtttggtgaccttgccggattggtgggggtcaagccagataattggagtaaaaattacggtgattattggcgcgctatgtgcggcatattttcgacgttggatagcgaggcgttaatactggtggttagaacacgatcccaacaaaaaactgctttttcgcagcaaggtattgcaaaagtcaattaa

SEQ ID NO: 395142 - DNA, 294 bp, Salmonella enterica
atgaccactattaccaaagaacgtcttgagcagatttacgccgagtgtgaagagcgcgacccggcaatattcgaaattcgcgagttagtacgtatcgcgctggcatcgctggaagctgataaacaagaattaaaaatcgctgagcttattaataaattctacgagcgctacccgcttgcatcattcaataaagatacagatagagccgaggcgttaggttatttcctggctggcgctgaattgcagtgttttggtgagtttattaaatacgaggaattgttcggagatgaataa

SEQ ID NO: 395143 - DNA, 210 bp, Salmonella enterica
atgaccactattaccagactggtcgcgctaatcaccctgtttgttatccccgcagcaatggctgcggatacccctcactgcgttgtcaaggaagagtggccgctcatcatcactcaatgcgatgacgggacggtaactgtggctaacgcgagtaaaagtaaggcttccgtatgtcgcaagggtgaggattgcatggagatttcactatga

SEQ ID NO: 395144 - DNA, 294 bp, Salmonella enterica
atgagcatgaccgtggcactaagagataaacgtcgtagtgggcaacgaattcccggactggatatggcaaatgggacgtggtttgcggtgctggatattcccggcatggaaaagcttgttgaccagcaacacaccaatgacccgctcaatgtgactccagccaaagcgaaaaagatggctgacatcgtagaagcatggacaccacctgaaggatggtccggtgatatggatgaaaaaatgaagggctatattgtcgaatttcttcgcggttgcaacggattcaggagccactaa

SEQ ID NO: 395145 - DNA, 1062 bp, Salmonella enterica
atggatagcttaaggtatgaaactttttctcaatttgatcataacgatcccttttttgattcattgaagagcgattacaaggagttccctgattggctcaagaaaaaagccgatgctaatgaatccgcctacattctctatgatgaaaatcacaaaatagaaggattcatgtaccttaaggaaaatgatgacgccgacgacataaaccccaaattgcctcaaggtcgtcatttaaagataggtacatttaaattcgagtcaaaaggaacactaagaggacaacgtttcttaaaaaaagcctttgaccatgccttttcatctggttctgatgacatatacgtcacggtatttgataaacacgctcacctaataaaactcttccagacctatggtttttatgttcatggtgaaaaagaaactcataatggaaaagaatatgtatatgcccgctcattgcatgatgtttatggtgatatcctgttggattaccccagaattttaacaaagaaagtaaataaatatcttcttgctatatatccagattatcatacaagactattccctgattctaaacttattaacgaatcaccagatattgttaaagacatctctcatgcaaatagtatacataaaatttacatctgtgggatgccaacagttacccgcatgaaaagaggcgatattattgttatctatcgtacaggagatgggcaaggacctgcacactaccgtgctgtcgcatccactctgtgtgtagtcgaatcagttaaaactatcgacgattttcgaaacgaggatagctttgtcgaatactgccttcgttttagcgtattctctgaagaggagctcagatgtttttacaaagacaagcgttacccttatgttattcgcttttcctataacatatctttacctaaacgtccaaatcgtgctagtctgattgatcaagtcggtttaaatggtgctcgtggatttagatggagtcattttcaacttactgatgagcagttttttaagatcatagagttaggtcgtataaatgaaagttttattatccattaa

SEQ ID NO: 395146 - DNA, 378 bp, Salmonella enterica
atgaaagttttattatccattaagccagaattcgcagaaaaaattttggacgggactaagcgatttgagtttcgaaaaggtatttttaaaaatcaagagatcagcattgttgtaatctatgccacaatgccgcttggtaaagtcgttggtcaattccagatagaaaccatcctttctggagagccagagtctttatggaaagaaacgaaaaaatatgccggtatatcaaaacagttttttgatagttactactcgggcagggacaaggcatacgctataaagatcggcgaagtcgaacgctatgaagagcctatccccatctctgacttaggcggaaatattaaaccaccacaatcgtatctctacttacccgcttaa

SEQ ID NO: 395147 - DNA, 228 bp, Salmonella enterica
atgatgagtgaggtgatttttagctttgataactccagtgatgcagcgcgtgccgggattttgatgaaccaggtcgacccatcgctgcgctatacgcagatgcgtacaaccgtgtgtgtcctctggcatgcaaacatcattgcagctacgcaagctgttttggacgcaggcatcccctgtacttttcagtactggaatgacatcaaaaatagccatcgcaggggttag

SEQ ID NO: 395148 - DNA, 834 bp, Salmonella enterica
atgttaagaaaagaaattgttaagcacccagcaatccgttatcacggcggcaaattccgtctggcttcctggattatccctctgatgcctaagcacgtctgctacgttgaaccattcggcggagccgcaggagtgctactgcaaaagccacgcagttatgcagaggtctataacgatcttgatggtgaggtggtaaacctgttccgcgtcctgcgtgacccggagatgaatcaacgcctacgtgatgcttgcgcattaacaccctactcacgtgatgagttttgcgcagccagggaggctgtcacagagcctgtagagcgtgcccgccgtatggttgttcgtgcctgcatggggtttggttccgctgctggtatcggggggcaatcaggattccgcagcgacagtaagcgcaaatacgccacggcggcgcacttgtgggagcgttatcccgaaaatctgtcggcggtctgccagcgcctgcagggagtcatcatagaaaacaaagacgcgctagcagtgatgcgcgcccatgacacagagacaacactgcattatatcgacccgccatatgtgccggaaacgcgcgtacaaggtaatcgctattacaaccatgaaatgactgttgaaggtcacgagcaactgttggctgtagccagaacgatgtcgggaatggtgatgatcagcggctatgacactgagatgtataacgacatgctggttggttggaagaaaacggaaaaatcgtcacgcattagcgcaggaagagggacaaaagtcagaactgaatgcttatggagtaatccctcagcacaacaggcggagcatgcagcatga

SEQ ID NO: 395149 - DNA, 240 bp, Salmonella enterica
atgaaactgattaaccgcagtaaacaatccccgttagcgcgtcaggcatgcgacatagcactggcaactcatgcagaacgttacggcgactacgggcgcagcaagatgaaggagacatacacagtgagagttgaaggtgtgaaggtctgggtggaggtagtgaaccgcaaggcgagctacgtggccacggcgatgacaggtatgcgccggttgcgcgcgctgccagggcaagttgcctga

SEQ ID NO: 395150 - DNA, 1257 bp, Salmonella enterica
atggccgatgtgcgtcagtcacctctggtggcgctgatgaacaccctgaacgcgcagggacgtaccggacagaccggcgaggcgatttcggattcactggtgaaatcagcgaaaaatctgctgggtggtgacaacaaggatgccattgaccagagcgtcggtgttcatggtccgctggatgcggcctttggcccggtgctggcgctggtggacaaaaaccgcacaggggcacaggaactgagtctgcagtcctatctgacccgtgtgacacaggtgcgtctgcgcctgcagcaggtgaccaatgccgctgacccgcaggcgatgacccagaccatcgctcagaccgtattccagggtcaagccgttgacctgaccgaaacccgcgactacggcagtttgattgcagcaggcctgggtcaggaatggagcggttttggtcgtacgatgtttgtgaacccgatggagcaggcctggcagcaggttctgaccccggccgccgacagcctcaacgcccagtggcagcaggcagtggtgagtgaatggaactccgcctttggcggacgctatccgttcagcaactccagcagcgatgtgtccctgccactgctggccaaatacctcaatgcggattccggacgtatcgctcagttcctgcagaaccgcctcaagggcgtgctgcataaagagggcaaccactgggtaccggacagtatcaattcgcaggggctggcgtttagcccggcattccttaacgccatcaacaccctgagctatatctcggatgtggccttcaccgaaggcaatgctggcgtaaacttcgagctgcgtccgggtaccgccgacggcgtgatgcagaccgacataattatcgacagccagaaactgacctatgtgaaccagcttccggcgtggaagcgcttcacctggcctgcggatactgaagcgccgggcgcgaacctgagctggattagcacgcaggcaggcacccgccagtacgcggatattccgggcagttggggcctcatacgcctgcttgataaagcgagggtgaaggcgtatccgggcgtcggcagcagttacagcctgagctggaaagcccaggatggtcgcacactcaattacaccctgcgaaccgaagcgggagagggacctctggtattgctgaaactgcggaatttccgcctgcctgagaccatcttcagcactaccggcgtcgcagtcgtcagtgcagccagtgatgcagaggaggtctactga

SEQ ID NO: 395151 - DNA, 264 bp, Salmonella enterica
ttgctctccgttccattaaccattattgttaaagtcgccctggaacagactactgacaggcaaagtatcgccattctgcttagcgatttaaacaaaagacaaaacaattataaaagcggcctccagaaaggccgccgcatatttaaaagcttaaagcgctttcagaatcgcatccacactggctttggcatcgccaaacagcatttgcgtattttctttaaagaacagcgggttctgcacaccagcataaccggtattcattga

SEQ ID NO: 395152 - DNA, 132 bp, Salmonella enterica
atggcaagacaaaccaaacctctatccgttaaggaaatcgaatctgctaaacccaaagaagcggactacgttctctatgatggcgatggccttgagctacttatcaagtccagcggggatgcgggttgctga

SEQ ID NO: 395153 - DNA, 324 bp, Salmonella enterica; identical to SEQ ID NO: 374567

SEQ ID NO: 395154 - DNA, 183 bp, Salmonella enterica
atgagcatgaaatacgaaatcccagaatcagaagatattgagtggcagcaagatatgcttcgtgaaatagacaaggctcttgacgtcttgcgtgattatcatgagcacacaggggaggtggaagaaatcatcaatgacattaccgcgagaatcgcatcactccgcgcctattctggatattga

SEQ ID NO: 395155 - DNA, 291 bp, Salmonella enterica
gtgagcaagcaacataaattagaaattctactggcttggcttgaggacaacatagagggcggaacctccattgagtttactgatggggttgattcagcagcaatgctgccagcggtacgcggtgcggttaaattgctgaatatgccgaaagccaagcgtgatgccgcgccgtggggtgagtattggcataccgaagcagcgccatcgctggagatgcgcaaagacgaggctgaggtatggaacgaagcgcatcgatacgtcatgaacaaacttaaaggcggtgcagcatga

SEQ ID NO: 395156 - DNA, 234 bp, Salmonella enterica
atgagcaacccattttttatcaaatgcctcaaagatactgagggttactggacagaaggtaacatgtacctcgcgcgtgttgttggtggcggttttgttgtggtcggtgatgatgacgaaccaaccagcgaaggctggagcgcaacccctgtggaatatcgtgaagatggttcgatcctttatcagattggcgggattgaaggtgaggttttgtttgaggaggccgcacagtga

SEQ ID NO: 395157 - DNA, 462 bp, Salmonella enterica
gtgaaactatacgaaatggaaggatttcttcgcggtaagtgcatcccgggagacctgaaggttaacgaaacaaacgctgaatatctggtacgtaaattttctgaagcggaggccaagatttcggcgctgacggcggagaatgagctggctcgtaaagcagttcaggcattctgcgatgttgttggcgacaacatcgaggttatctccgaggaggttgggcgagatggcgttctggttattttggaggccatgaaggcaacaggaaatatgccagctaccgacgctttcctggctgaagtgcgggcaagtgctatcgatagcctgataggtatcaagactaagcagttggcagatatgcatcccgatactcatgcttttggcgcaacagccatgtctatccgcagccagattaacgaactgcaatcgttcgccgcccaacttcgcaaaggagtacagtcatga

SEQ ID NO: 395158 - DNA, 330 bp, Salmonella enterica
gtgctggataagcggctgccggtacgtatccagacggataacggcagcgagtttatctcaaaaagtctggataaatgggcgtatgaacacggcgtcacaatggacttctcgcgccccggaaagccgacagataacccgtttattgaatcatttaacggcagtctgcgggatgaatgcctgaacattcactggttcctgtcactggaagatgcgcaggaaaaactcgacaactggcgcagggaatacaatcatgagagaacgcattcatcattaaatgacatgactccggctgaatttatccgaagtctccggaaagacgaagatctctga

SEQ ID NO: 395159 - DNA, 516 bp, Salmonella enterica
gtggaagaagtactgcgcgaatggtattcaaacgcgccagaagatcgttcgttgactattattcgcccgaccgttatttttagggagcgtaactgggataatgtttacaacctactgaaacagatcgcaggtagtaaatttatgatggttgggcttggcactaactacaaattaacgacttatgttggaagcatagttgagttcattaagtacaagctcaagaatactacggagggttatgaagtttataattatgttgataagccggacctaaatatgaatcaattggtgtctgggatcgtgaaaagtttaaggaaaaagattccacccaagcatttgccagaccctttgggcatgttaggtggatattgctctgacgttttgaacaagataaccagtacaaagtatgcagtaagttctgttcgggtaaaaaatttttgcgaaacaactcagtttgatgcaacaaaattacatattctagctttgttgctccttgtttcttattacaagggctga

SEQ ID NO: 395160 - DNA, 1014 bp, Salmonella enterica
atgttgattttagttactggtggggcgggatatataggttcacatactataatatcgctgttagaaaataattataccgtcattgtgcttgataatttatgcaattcatcattggaatctataaagcgggttgaaaaaataactaacaaaaaaataaaattttatttaggagatgttcgtgataaagtttttttagaaagtattttttgtgataataaaattgatgcagttatacattttgccgcattaaagtctgttggagaatcaaataattatcctttggattattattctaataatgtaacagggacacttagcttacttgaagtaatgaaacagtttgatgttagtaaaatgatatttagctcatcagctacagtttatggaacaaaaaatatctcgcctaataaagaaactgatatgattggcggaactactaacccatatggctcatcaaaatatatgatggagttgattctccaagatttttgtaaaagtgagtcaaatttctctattatttctttaagatattttaatcctaccggagcgcattcctcaggtatgcttggtgaaaacccaaatggtatacctaataaccttataccttatatttcaaaagttgcgcaaaaaaagatatcaaagttacaaatttttggtaatgattacccaacaaaagatggaacagggattagggattatatacatgttactgacttggctttcggtcatgttaaatctctggattatattttttcaaatgatattaattatgaggctttcaatttaggaacaggtcgaggttattctgtacttgaagtaatacgtatgtttgaaaaagtttccaatactacaataccatttgaattttgtgaaagacgtgctggtgatatagctgaatcatgggcatgtgctgatttggctaaaaataaactaaaatggcaagcaaaaaaagatttaaaagaaatgttgcaggatgtatggcattggcaaataaaaaacccaaatggctattaa

SEQ ID NO: 395161 - DNA, 756 bp, Salmonella enterica
atgatcgattctgaatctagggaaatgatcactccatttttaacacaacgagatactttaatcaaagaaattgttagcacaaaaaaacaacgagaaaatctcgtatcaagcctgcgagtaagaaaccatcaagaagaaattctagttaaacaaaaaacattaattgataacttagaaaaattaaatgaggagttggatcgactaagatctaacgctccaagtatagatggtgtactatcagatttagctgataacctaaacgatttccttactaaaattaatattaaaaacagaactgggatagatattaacaagacccatttttcggcaattgttagagggaaggactacttcaatattacctcaggtggattgagaactatagtctccattggatacatgtcctccatacttaaaagctcaattaaaaatgatattaatcacccacgtcttttaatgctcgacacagttggaaaatatttagggaaaaatttaaaagaaaaatatgtcgactttactgatagaaaggaagatgcaattgagggtgcctctgaccccttaaaatatgaaaaaatatacttcaatcttattgatatttgcaattatgcggaaaaaaacaaaaccccaattcaaatcatagtagttgataatgacgtgccagaaaatttggccgaaaaattgagggagattactgtcgcacaatacagttcaaccggtgaaaatggtttacctattggtcttattgatgatatttag

SEQ ID NO: 395162 - DNA, 303 bp, Salmonella enterica
atggggctttacaggagttcatcacatgtatattggcgttgcaaataccacatagtctggacgcctaagtaccgtttcaggatcctgagagataagttgggcaaggagctttacaggacaatctacatactctgcggtataaaagattgtgaggttctggaattaaatgtacagccagatcatgtacatcttgttgtaattgtcccacctaaaatctcgatatcaactctgatggggcatctgaaaggccgcagtgctatcaggctctacaatcgttttacacatatacgaaagaagctatag

SEQ ID NO: 395163 - DNA, 588 bp, Salmonella enterica
atgctgcaaagagcagtgcaggtgataacctccctcaataataatggtactcttgttttacccgctgtagatctccgaatgtcaagtacagagcgaaagaatcttgttgattactataaaagacttgttgatatttggttgctggaagataggccaggttcctttgtggtttttcaatgtaaaggtgatgtttcggatttaaatgtcgaaatgcttcttaaaaacatgagcaaattttattttcataaaagaatgtttggtggcacacagggaagctggctgggaacgctgggagcatttgatattgaggttagccgttgggtagaaccagagctggctatttattacgagggtgataatagtcttacaatttcagaaaaaattagatctaagtttatggcgtctggttttagtgtatcagccagaaatttgtatctgcggcataaagctataagaaaaaatagttactcgaaaatacgatattattctgcccttttactgaatcagccatgcattctcccttggtaccttaatgacaacagttattacgacatggctttggggtttgatggttctgaaataaggtaa

SEQ ID NO: 395164 - DNA, 531 bp, Salmonella enterica
atgccagccgcaacatccgtacagaaagcagcgtttgatgctatcgacagtcttcactttagtcaggtggtgatgagtctcatatgcgcagaccccattgcagaagagtggtatcgccgtatttttggcagaatcaacagtatccttcagaaggcagggatcactgggaaacagacccagatagccaagcattatttgctgggtgctcttgaaatctacttgtctattgatagcaactatttttcggatacagttgagatcaataataaagatgttgatgatggtattccttataatagagagcttcacgagcaatttgttgaacacaaccgaaattatagtatcgctttactttgcaatattgctgattgtaatggtgtcgacagagagttgttttttcaggcaacggaagagttatttagtgataagatattatctaccattccgcgttttattagatatcgtcttaccgagtgttgctatgcactggaatatcctgatgctcctctcttttttatcgggagttggtga

SEQ ID NO: 395165 - DNA, 213 bp, Salmonella enterica
atgaccacctacacccagacggtaaaagtcctgcgcatgcgagcagttgcggccaaactcggcatcgctcgttccaccatctacgactggcttaatgctaagtcgccacgtcatgatccagcattcccgaaaccctaccccttgggtaagcaatccgttggctggctggaatccgaactggatgaatggattctacagcgccgggcagcatag

SEQ ID NO: 395166 - DNA, 1566 bp, Salmonella enterica
atgagctatttaccgttgattcctgtattccagcatcgaaccattcctgtcccaaccatccctgtatgggcgtttacatctgtgatgcaaaatgccattaaccatctacaggatggggggaagattccggtggaattagctgtcaatgtaactttggccgctgtatctgaagcctgtcaacccctggttaaagtgatcaatccttttactaatttgcctgaacccgatgcactttacatcctgactctggcagattcaggtacagggaaatcgaccgtaaacaaactgctcagggagccattcgacaagctgaaagctgagttggatgaagcctttcagaagaaattggctgcatacgagcgtgattatgccgtctgggagacaaaacttcaggccctgaagagcaacctgcgtaccgcagtcaaaaagcgcctctttcccagcgatgctgaagctgaactggcattacatacggacctgaagcccaataaacctgtattgctcacccttgcctacaacgatacttcggtagctgcactcattgaaggattaagtgaatatccaactgcagccgtgaactccgatgaagcgagcggcttttttgaatcctgcgtgaaagataatccagcattttttaataaagcctgggatggtgatctctatgaacacaaacgtagccatcaagccacccgcagttttaaaccgacactgacattatcgttaatgttgcagagacctctctttctcaatttcatgaaaaagaatcaggacaagcttttaaatagtggtctgttagcccgtttcctgtttacgaatatccccactaaaaatgtcactaacatgggccatcgtcatcactcgaatacatctttccgtgatgaaactgcaatatctctttttcatgagcagattaagaagctactgaaaaagcagaagcaacaaatcatttcgggtaaaactgagaagaaaacactcaaactttcccctgaagctgcagagttttggggaaataaacgtgatatctggatttctttaccaataaatgatcctcgttggcgttgtattgattacatgctgcagaaagccaacactaatacattacgtattgctgggttgcttcactacttctctgaccaagaaacagaaattattccactcagtgttgttcagagtgcatcccttatcatggattggtatctcaaccaagcagtatcttggttttatcagttcactaatgaatataagttttatcaggatgtggaagaactccgccagtggattaataataaatttactgccaatggctggctcccattcaaaaagaatgacatcatcaagtatggacccaataaattccgccgcagcgacaaacttgaacctttgatgaattacatcattggtcaaccaggaacgggggtttttaccacattccggacaagtgctcattcagccgagtatattacctggcgcatgagcaatggcttttacgccccactcgctgcacctccggttcaatacttgccacagcaagcgcctaagctgattaattcgtctggcattgtctaa

SEQ ID NO: 395167 - DNA, 636 bp, Salmonella enterica
atgaaaccctacatcagtagattacatggaccatgtaaccaacttcatatcaaccgtatccatgacacgttgaataaatcacttagtgaatacccaaggacatacgttcgcagaatagatttaagaatacccgatgaggtctatgaacaataccgtgatgactcaacactgataacgcgttttatggaatcactaaaggctcagattaaacaaacacagaagcgtaagcgaagtgaaggtaaacgagtccatccctgcaatgttcgttatgtctggtcaagagagtttggtgaggtcaaggggaagaagcattatcatatcgcattaatgctgaataacgatgcgtactacagtaccggtacatattgccctgttgggaatgtatatatacataatctggcattgatgatcatggaagcatggataagggctttaaaccttcatacacaagttgattatcaacggcattaccggtcggtgcattttgtacttgagggtagcattatgctggatactaacagcaaaacctttgaacttaattatgctcagatattccagcatctcgagtatacggctaaactctactcgaaaagccatgttgatggtaagcgtaattttggttgtagtcagtactga

SEQ ID NO: 395168 - DNA, 435 bp, Salmonella enterica
atgctcagagaccatcatgcaacactggcaggattactgctgcttagtcacagtgccagcgccgtacaggctgaccagcaatggagtgactggtacgggaacatcagtgccatggagtttgaactcaatactcaaaataccgcaggtgaagtgctcacactgacctgcacaagtggaaagctgtctgctgcttacagcgtgcctgcggaggattaccgcgtctcgtcacaaacagggctttctgaacctggcgtcagtatcaatggtaagaaccatcctctggatgaaacagcctttactgcgctaaaagcgacgggtgaaaaagacgtaataaaaatgacctctatgaatgctgccatatctaaaaaattcagcgccaaagggctgaatgaggcgctggctggtaccacatggcaggactgtattaatcattaa

SEQ ID NO: 395169 - DNA, 804 bp, Salmonella enterica
atgcgtaaactcgttgttttatctctcagctccgcagcactgtttattcctttggtctcgtctgcaatgacaattcacggcgacatacatcccgaacgctataccttctttctgactcaggaaggcagcaatcaactgaaacaggcaaatgaccggatagcgaagaacccgcaggcttatacgcttgatgtgaatcataccggcattcaaccctttgacgctgttcgctgggatggaaaacctataaaggccgtcacctgtgttctggtaggcggcgtgatgatgggacaaaaagctacgtggtcacaatgtaaagacgagagcgggggtgagtatttcggcaataaaggctggctggtacgtgattatgtggcaaaggcctgtgaagtcggaaaatcagattgtcctgtttatcttgtgcttcagacagatccaccaacaatgcgcagcgatatggctaacttcgtacctgctcctaagaactttaatgcttcggcaagcctgacggatgaaattaaatctgaaggttgccagatggcggataactcatttgaacatgccaaaagtagtctgcgttgtcgtgccattaataccgtgcgtttcatccgcaaacaaaataccgaagcggcatatgaagctgacttaaccaccacgacgggtgaagcactcactatgacagtagggtacacctacggtaatgcctccagtaaagagccgggctggcgcacaatttcagtcaaccagggagacatcattactgatatccgtaagcagggccagtgggttcccaatggttataaataa

SEQ ID NO: 395170 - DNA, 180 bp, Salmonella enterica
gtgggaaaaaaattacagcaggaaacgccaccaaccgtggactgtacctggcaacttgttttgagtgttgccggtgtgacattgatgcgcagcacttcagttggggttaaatcactgggggccagcctcactacactgagtctgattcgcatcattaaaaaactcgctactcttgcctga

SEQ ID NO: 395171 - DNA, 429 bp, Salmonella enterica
atgtctgaaaatacccatggaaaactcaagggactgaaagagaaattaaatctgcgccgaaacgtctcccccactgataacaaggatgagcaggtagaagaaaatgtcagggagcaaactacagaagggcaagaatcccgtactacccgatataagcgattgctcgacagtatcgttatcagcggtttgctgaccattgccgaggataaactcagtgacgatgtgtttatcgagtcgatgttcagtaaggcttatgagcttctgcctgtgccggtcagactggttgtccgaagggaatggtgcctggattatctccagtcacggaaagccccgttactggcgcaactcctgctctatcgggccgaaaggcacagctcagcagaaacggtgccgcctgccctggaacccacgttaccaccatcgacctaa

SEQ ID NO: 395172 - DNA, 822 bp, Salmonella enterica
atgacccgtttaaccagccgcttcggctcagtcaatcttgttcgccgcgaccgcccgttaacccgtgacgaactggcgcactatgtgccgagtgtcttcagcgaagacaaacatgaatcccgcagtgacaggtacacctatatcccgactatttccctgctcgataagctgcaacgcgaaggcttccagccattctttgcctgccagacccgagttcgggaccagagcaagcgagagcacaccaaacacatgctgcgcctgcgtcgcgaaggccagatcactggcaaacaagtgccagaaatcatcctgcttaacagccatgacggttcaagctcataccaaatgttgccagggttattcagatcggtttgccagaatgggctgatttgtggtgagagctttggtgaggtgcgcgtgccgcataaaggcaacgtagtggagaaagtcattgaaggggcttatgaagtgctggggatttttgaccgggtggaagagaaacgtgatgccatgcagtcgctgatattaccgccacctgcacagcaggccatggcgaaagcggctttaacctatcgctttggcgaagatcatcagccggtgacggaatcacagatactttctcctcgccgctggcaggacgaaagcaatgatctctggaccacttaccagcgtattcaggaaaacctgattaaaggcggtctgtcggggcgaacgaccaaaggtcaacgctcccatacacgtgccgttaaaggcatcgacggggatgtgaagctgaaccgcgcactttgggtgatggctgagaatatgctgcagcttgcttcatga

SEQ ID NO: 395173 - DNA, 471 bp, Salmonella enterica
atgtcggcactcaatttatccccggtattcctgccaaatgaacagcgcgttattcgtcgggcgttacgactgctggaaaaatatcagcgtcaaccgagtgagtcttttacctccaccagcttcaccaagacctggcttcagctacagatggttcatcaggagcgggaagtatttatcgtgatgtatctcgataaccagcactgccttttggggcgagaaacgctgtttaccggcacgctcagccataccgaagtacatccgcgcgaagtggtgaagtcagccctgaaacacaatgccgctgcagtaattctggcgcataaccatccgtctggtacgacagaaatcagtcagcaggataaacacatcacccagcgaataatgaaagcgttagcactggtagaagtgcgagtgctggatcatttggttgttgggaacgaagtggtgtcttttgctgaatgtggctggttgtga

SEQ ID NO: 395174 - DNA, 222 bp, Salmonella enterica
atgaaaatcatcagtaagcgccaggcgatgcatatttatcgtcagcatcccgaatcccggttatctgccttctgtacaggtcactaccagtggcatggcagtgtctgccattactacggacgtgaagttcaggatatcagcggtgtactcgctgtttttgttgagcgtcgtcaggatcgggcaggccaatatgccatccttcgcagcgtgacgatgaattaa

SEQ ID NO: 395175 - DNA, 366 bp, Salmonella enterica
atgcaatcgaccaccttatccggctcatcagcggagaacgcatcctgccttcagtggggaataaaacgtaatatcacgccgtgcttcggcgctcgcctggtacaggaaggcaaccatctctactttctgactgatcggtctgggtttgatggctcattcagtgacgatgaagtattgcgtctggaccaggtgtttccactgttgatgaaacagctagagcggatgctcaccactggagagcttgatccccgctgtcaacactgcgtcactctgcatcacaatggactcacctgtgaagctgacactctcggctctcatggctacgtttacatcgctatttatccccagtcagccgtaaccaggtaa

SEQ ID NO: 395176 - DNA, 321 bp, Salmonella enterica
atgcatatttcaactgtaccggccacggtgccggtttcgccacgcctgtcgcccgttcaggtctggcagcaactgttaacgtacctactggaacatcattacggtcttacgctcaacgacacaccattccatgataattcagccatccaggaacatatcgaggcgggtatcacacttgctgatgcggtgaatttcctgatggaacgctatgaactggtgcgcatcgaccgtaaaggattcacctggcaagagcagacaccattcctgaccactatcgatttactcagagccaagcgagctaccggattaatgcacacataa

SEQ ID NO: 395177 - DNA, 1779 bp, Salmonella enterica
atgtttctttcaccagatgcccgtccgtatcatcaatggattaatgaattaaaaataaagggctttgatcaatataaaattgctcaaactgtgctcggcctgcgtctgaaactacattttttagataatgccggaaagtattttgatgtaagtcatggggcctataatagcgaaatttttctgggtgccgtcgtacaaaaagaagagccagacaagagaggaaactattacgtcgatgcattgcaaagtgaccttttttacagcccggattatggcgacctcacttttaccctgaaagggatctgcttcagagctaaagcggaagagcttggtgtactctgcgattatggtcggattctgattaagggcaaaaaatcattgcagttgcttgagaaagtagatggtagaaaataccggaaaatgccctatatgcgttttgccagtaaagcttactcaggctgcaaaaatcatgcagaaaatctggttcagagcgtgctcggtgatatcctatctcaggctgacatcactttttcaccacgtgttttttgtgcaacccacagtcagttagactttttaacgaccaatgtcaaagtacttcagcgcccgttagttattatagacaatcttgataatggcgaagaaccagaagcgcaccaacgatttattcactatctgaaaaaagaattaggtgcagtagatataatttcacctcgggaacttattgatcttgataaagatgttaactatctggtactgaatcaatccaaaaaaataaatgggtccagcatttcccttggtgaagatacctttttaaactctacctggcaggcactgaatgaggtaaaagcgggtaaaaaagatctgttagattattattcaaggctaaaagtggattttatccttgattttgaaaaaaatcatcagcgagtctttcaaggatgtaatattgaagccatagagcagaataaaaaggatcctgttacccaggtggttaaaaaagttcttaatcctgtatctgtcgctaagttggaaatgatccgcagcgaactctggctaaaagaagctgtgctggtgagaaagaaacttaccggttttagcattaacgatggtgagtatattcttgtctcaattcggtgttcctcttccggaaacagaagagggaatgatttttatggcgttgctacgcccgtagtattcagccatggcgtaatgaacatcgcagatccgaaaatgtataccgatgagatcgatttccgtaataatgttccagggatgaatatcaactgtattgataaattgcgtgatgataatttctatcttgttgatacaataaatcaggttgtgattaagcgatacaatactgttcgtattccgagattattaggttctgcagagcgttgttctcttcaggtagcagaagagaatcaggataaaattaataaatttggtgcagcggataaaacatgtttgccttactatttaacgccaaaacctaaaagtcatgctgtcagccagtatcaacaactctttattgaaaaacgaggtaatgaagcattacttttttgtactaaaagcaaccagcccaaccagattatggacagggcaaccttagtttataatctggtggcgacaacatttgacggtaaagaggttgatgtgatgacgcaaccagcagctgaattactattgcgaactttaacttacgataccacccgttataatgaagtcagtcagacatctcttctggaaaagatatcgcgtttgatgctgcataactaa

SEQ ID NO: 395178 - DNA, 4854 bp, Salmonella enterica
ttgtctgatacgaatctgagcggtccctcaaacggtggtggcgcggcaaccagcagcggtattgtctttcaacaacaattaggcgcgtttttcgccgctcagatcctgagtaatgacccgctggatccttcattggtactgggtgatgcagcacctgttcggcttcgtttcgaaactgaagcgccagttgacgatattcttgtggcaacgtctgtaggcggatttctcgcaattcaggtaaaaacaaccgtcccactttcagacaaagaaaagagtcctttttaccggacaattgaacagttcgtccaacactggctaacctgtcgggatggtgatggttctctggcgtggaaccgccctctgtcgccggagaaagatcggctaattttagccgtaagcaccaaagcatcagcgactgttcggaccgatctttccgccgcgttacgccatctttcccagcaaggccgcggagctatgaacaggaaacagaaatcagcgtctgatattttcgaacgctgtgtgttgaccgcgtggggccgaattaccacggagccccggccatcagatctgttagccgaacttgcccgtctgattgtcgttcacgttgttgatgttgaaaatatcgcatcaacacttcagatgcgacttagccgcagccttgccagagaaactgactcagcagcggccctgagtattcttgtcaccacctgtggggagatgatgtcccgacgtgatggctgtgatgcattattattacgtaacatgctggcaggaaaaggaattaaactggccgcaccgccacaatatcaggcggatatccatcaacttatccgccattctcagcacgttgctaatgtcttgcagcagtatgaaaccatcgataatccctccggccaaccgcttactttgcacagggaatgccaggatgcagttgagcaggctgtgcagtccggctcgttattaattattggtgaacccggagccggtaaaagcggcgtactgaatgcgctggcacgtagcctgcgcaatcgtggggacgatgttcttgaactggcggttgatcactattcggttgagtcgctcgaaggactgagccgtgaactccggctagatcattgtctgactgaagtgcttgaagcatgggatggtacgtctcacggctggctgattattgatgcactggatgcgacccgtggggggaaaggtgaggccgtttttcgtcccctgattgaacaggtactgaatcaaaaggggcgatggcgcgttattgcctccattcgcagtttcgatttacgtatgggggtgaagcttcgcgatctgtttaaaggacatcctccagtgtcggaacgtgccgatacgcagttttcttcggttcgccatattgttattccacgctggtcagataacgaattcagccagttactggaacaatcttcggcgctgaccgcagcacttaagcagctttctgacaggcttcgcgatttagcaaaagtaccgtttaatacacgattgctggccgacctggtttcgcaatatgcggatattaatctgagtcgtatttcatcccagagcgaattattaaaactctactggcagtatcgcgttgagaaacatgggctgaacgcccggcagtgtcttaaggctctggttgatcatatgattgccactcgttcactcagggctccatccctgttgacgggcactgatgccgatatgattgatacactctctcgtgaaggcgttgtcgtcagggaggctaacgatcgctgggtacagtttcgtcatcatctgctctttgactatgctgcggcaaaaatatcattcgatcctgacgcactcattgcgggaaccttgcgtttccctaaacagcaggctcagggattgttgctttctcccgcactgggttttgtgctccaggaaatctgggattataacgaagatcatcacggtttctggcaagcggtaagtcatctggttaatgatagcgatggcgatcccattatccgtagttcgacaagccgaattgcggctgaatatcctgttgcacaaaacgacctgctctggctcgctaaacgtgtggcaatggacgatcagaacgttatttccacgctcagtcatctctgcggcgcgctggcaattcggtttgaagatgaaaaagaagtggctctgcttccatgggtatacctggtctctgctttaacgcctgacgtcaataaagtcgcggagacgttgcgatttttgctgcatccgcttactaagcaggtgactgatcctgatctacgcaatattctgggtacagcctgccgcgccgtactttcttatggccttaagcagagtgagccgggctattttgtcagaaatgctatacctctcgttgcagatacgatcaataccgatgttgatgcatcttgccgtttactggagcaaattatttccgtcaaacgtctccagcattttggttcagaggaaattcccgtactctgttacaacatcaagaaaatcgcagatcgtgcgcctgagtttgttgcttgcgtattcgagtttgtctacaggtacgatgtcaccgaagaacgggaaacaacgctgggaaacagtagaattctgcctctgagatcaaacgtccgacaggactatgaatcggctcgttattccctcggtgagtttttctcccattttctcgaacaacatcccgaacaggctgttgatgctgccgtcaacgctttaaatggatacgttgcccggcgccatcctgtcgatgcccctgtgatgcatttatccatttccgggaatgatatctctcttaaagccgaccacagccacatctgggcgtacaatcctacaggcgaacacgcgcatgacggagaagtactggttaagaaactatttcagcatttgaaaagcgcgactgaaccagacatgttagttctcgcagaacttattcgtcaaaaagcctcactggcaatcttctgggccaggctctttctggcggcaaatgaacgtaatgatagcctggttgattttctctggcccattgcagcgcaggaagcgtttatccggaacgaagatacttgtaaagatgctatcgatttggtcagcaaaggaattgcccgacgtccactggaggaacggcaaatgctggagaatgcagcattccagtataatttctctggctatatttacccggaagacgcaaagaaacgactgttatatcgccttttcaacgcgattggatcagataatctttctactgaagccgcccgggactttctgaaaaacacgcaggggaatgatgaaatatcaggcaataaaaggcttttcgatatttctccggtcaacattagtacggatataccttatgattttatcgaaggtctggatcgaaatgagccagccaatgccatgcttatcagtgctgtcaaaacagcgaaaactgcactggggttaacgacaaataatacactctcctctgagttatcgctggaagatgtttttggcattctcgagccgcttcgtgaacaactcaatactgtaaatattcatacctatgtgcgcacaaccgcagaggatgttattgttcgggcctgcgctgcggctgttgaacagaaattattaccacctgccaatgacaaccaggtagatgaactgacccctcattttttggacttattgcatatgacttctcgcgcgatatctccaactgtcaatgaagataccgaggataactttgccaacagcgttagctggggctctccttcaccgaggattgatgctgcacgaatttttctggatgtaattcctttacgtcctgacctgtatgaccgactgaaacctgatatcgaaaggatgctgattgaccctcacccggccgttcgtcttcaggcatcaacacgcctgttaaggttgtggaatattgctccggagagcgtatggcattacctgaatcaacgcgtggagcaggaaatcaataccggcataatagagcatatggttggggatggaatcagaagtctgctatataccgacccgacgcgttctttctgtcttatccagaaactgctgggacgttttagtaacgatcctgaacgtcagcaccgtattcgcaagatagttagcatcgatctggcaattctctggggagtccatgaaatcagggaagcacatgatattattcaatgctggattgtcgatcccactatttatagccatgaacttgaaaaaattttattcacattaagggatggattcgttcttggctttgccgaacagagtacaccgaaggacattggaatcagacgacgggcgttagatatagcctatagcattattgatgctgccggaaaaaaactggaagagtattcatcccgtaccgatctgacagagattgaactggaagacgtaaaacgctgttttgcaattatagacggagcatgtctgcaacttcgctttgtttgtgaagggaaacataatcctgagaaaccatcaggaaaagaagaagttaagagatttctaaacgaaactgaactgcacatgcggcgcattggtgattgcagcacgccacacactatttactaccttctggaactgctggaaacgtttgttcctgtcgatcctgcaaaatgttttgatctgatggcccatgccttacgtcacggaacaaagtttggtttccagaacgaacatatgggaatggagcagctggtaaaaatgatgggggtgtttcttgctgactataaaatcatttttgaagaagaacaccgacgtacctgtttgatagaaagtctggatatttttatggatgcaggctggccatctgccaggcgtttgctttataggttgccggaattgattcagtga

SEQ ID NO: 395179 - DNA, 330 bp, Salmonella enterica; identical to SEQ ID NO: 395158

SEQ ID NO: 395180 - DNA, 1206 bp, Salmonella enterica
atgacaatgctaaaatggattcgacaggaaaaagcctctaatttagtactatttattcatggactgaatggaggtggtgatacctggaattacagcgatgaagtttcctttccaaagttactaaaatcggatgaagatttagcaagttttgatatttcatattttgaatactttacaaacttcacaagtaaatttaatgtagcgaaaggcttcttgaggaagttatttaactctacaaataaaatacaaatgaacttgccggttgacgaattatctgagctcttagttactgaaattgatgttaacctttcagaatacaaaaatatcatatttgtagctcacagcatgggggggttagttgctaaatcatgtattttaaaaatgataaaatatggtcgcaacgataatattaaaggttttatttctcttgccgttccccatgctggctctgaacttgcgtcctactcatcaatgatatcatcaagtgcacagataaaagatttgaaagtatttagtgatgagactgattctttaaatagagagtggcttgcgtcaaatcaaacgccaagttcaaagttcatttatggcacaaatgatttaatagtaaataaaaaaagtgcattaccaattcaaattctagcaaaagattcagtagcagttcatgaagatcacggtacaatctgtaagccttcagatactgataacaatgtatataaattagtaaaaagatttattttagaaattgatcgtgacaatcgagagccattagttataaatgatttcgtcgatgaaaatcaatatgataatgaatacttcgtattaaagatgattgttgctgatgtacacgatgacatttctaatcatgcaaaggaatattattataatgcggaattagcaagaaatttctttacaagcgatcgtgacagagcaatattagatggattgtatcgtaaaattaaagggttatatcaaacccaatttcaatcagccatagctaaccatcttacttctgatcagttattatcagcgatccataaaaaaattgaagatgaagatcgtgttgcattaaatgttttactttctgatttcgataatttgcataaaaaaggtatgcttcatcagttagccaacaaatcaaatagagatgtaatttggtctgctgatactacacttgaatcgctcaatcagctcaggagtagtcagtga

SEQ ID NO: 395181 - DNA, 507 bp, Salmonella enterica
gtgaacagtttaccttatattccattagatgaagagtttagtctcaatctatgcatattaataattatcactgagggcttaggagagaataaaaattctgacgctgtgatggatattaataaagcgcagatattcatgtacttgataaaaaacccatctaaaattgagcgggcgatgtttttagctggtaaaaaaataccaataattgatagagaggagacgtatacgataaaaggtctctctctaaatgttgacattttatttaacagtagaaaaataaaagaattaataaaatacctaacttgcaaagggcttattgaggctttaagaaatgatggagttacattaattaaactatcagagaatggaaaactcttcttcaataatttagattctgatttttttaatcaggttaaacaacacgtaaaatcaatttctactttaaaatcctgcacaacacccaagctcaataaattgataaatgacctagtaaggatatcagaatga

SEQ ID NO: 395182 - DNA, 330 bp, Salmonella enterica
gtgctggataagcggctgccggtacgtatccagacggataacggcagcgagtttatctcaaaaagtctggataaatgggcgtatgaacacggcgtcacaatggacttctcgcgccccggaaagccgacagataacccgtttattgaatcatttaacggcagtctgcgggatgaatgcctgaatattcactggttcctgtcgctggaagatgtgcaggataaactcgagaagtggtgcaggaaatataatcacgagaggacgcattcatcattaaatgacatggctccggcagaattcatccgaagtctcaagaaagacaaatatctctga

SEQ ID NO: 395183 - DNA, 1425 bp, Salmonella enterica
atgaattatattcaaccagttattctttgtggggggaatgggacgagattatggcctttgtctagagaactattcccaaaacaatttcttaatattaatgcaaatgaatcgatgcttcagcgtaccctaagtcgattagaagggttgcctgcgggggccccagttttaatatgtaatgaaaagcatcggtttattacggctgagcaaatccgtgctactaatagaaagcccgaaagtataatacttgagccttttggacgaaatacagcgccagctatagcattagcagctttgaaaaatattaaagatgaaaaagatccattgatgttaatacttgcgtcagaccatgtgttcagcgatgaaaccgcttttcgacgagcgataatgtcagcttgtcgttatgctgagagtgataagttagttacatttggaattgttccgactactcctgagaccggttatggttatataagacgtggagattcggttaatacatgtgcaagttgtttagctttcaatgtttcagcttttgtcgagaaaccagatattgaaaaagcagccatctatgtttcaagtcaagaatattattggaatagcggtatgtttctcttcaaagcaagcaaatatattgaagagttgaaaaaattccgcccagatattattgaggcttgtacaagagcgttagcactttctcatgccgacttagattttattcgaattgatcaggaggcgtttcaaacctgcccatcggattctattgactatgctgttatggagaagacttcagatgcgattgtcgttcctatggatgctggttggagtgatgttggttcatggtcatcagtatgggatgtggcagttaaagatattgaaaataatgtaattaatggtgatgttgtagcattagacactataaacagttatttgcatgccgatggctgcttactgacaactattggtataaatgaccttgtaattgtttgcacaaaagatgctgtattagttgccgaaagaaatgcttcgcaaaatgtcaaagatattgttgatactcttaaaaaaaatggccgatatgagcatcaaaaacatcgtgaagtatatcgtccttgggggaaatatgactccattgattccagtgaacggtatcaggttaaacgaataactgttaaaccaggtgaaggtctttctgtgcaaatgcattaccatcgagctgaacattggatcatagtagctggtactgccagagtgactattaatgaagaagttaaattgcttggtgaaaacgagtccatctatattccgattggagcaacgcactgtttggaaaatcctggaaaaattgcattagaattgattgaagtacgttctggagcatatcttgaagaggatgatattgtacgttttgcagatagatatggcagagtttga

SEQ ID NO: 395184 - DNA, 789 bp, Salmonella enterica
atgaataatgatttagtttcaattataactcctatatataattccactgcatgggttgataatttggttaaaacagtcaaggaacaaacgtatcagtcgtgggaaatgattataattgacgactgttctactgataatacttttgaagttctgaataatgtcgcaaaaaatgatcatagaataaaagtttataagaatgactccaatcaaggtccaggaagtacaaggaataatgcgattaagctcgcaaatgggcgatttattgcatttttagatgctgatgatgaatggtgtaaaaataaactagaaattcaagtggctgaaatgttgagaaatcaatatcatttctcgtatcatgattacaggcatatgagtagtgatggtctgctggttggggatattgttcgtagtgccaatatattagattggtatactcttcatacccgacgtggattaggttgcttaactataatgtttgatcgaactttgggagacctgccctttttccctagcattgaaaatgttattgcagaagattttcttgcatggagtgatcttttaaaaagaggctatgtaggacatcgtattccatacgatcttgctagatatagactttcagataatacccgctcctcaaataagcttaaagcagttaaaacagtttggcatatttacagaaaggtcgaattgatatctttccataaatctttatttttttggatcatgtattgcaaaaatgcttttttgttgcataaacgttcagcaccttatattaatgttgagaaataa

SEQ ID NO: 395185 - DNA, 252 bp, Salmonella enterica
atgaagaccaaggttgctgaagctttatctcatggactgcatatatatgctacagaacatacgatgataggatatgaagatattgttaatgataaaaactgcgttacagttataaaaaatgttaacgaaccgatagcatattcaattaaaaataatatttttaataaggaggttatcagctcaatgcaggataaacactattctctaaaaagatttaccggtaaagagttagatgtgctcttaaaaatgtaa

SEQ ID NO: 395186 - DNA, 1341 bp, Salmonella enterica
atgaatatttatgttgaatatgatcatgcaaaattaccattggcagatgaaaaaactgtttctgtgcagatttattcgcgtgatggtgtagttattaaaaatggaattaagcctagagatgatattgcaactataggtaagccaatatttgatgctataaaaagactgggagtaagtatatcagatgaagttatggactttttaactatctctcttgcagtaactgctgccgatacatttattataagagataattgttttgatggctggacaagaaatataaatatatttgtttcattaaataacccagtaatttgggaaaaaaacaaaccacttttagaaaaagctttacaatttttgagtggtgatgtatggaatttcaattttaaaggtgatggtcctaagccaccgcaaccattcaaagctgttaatgggcgaaaattgattaatttagaggggttagattgtgtgtcattattttctggaggtcttgacagtgctataggtgttatagattttttatcttcgggaagaaaacctttgctaatcagccattcgtataaaggggataaaactaaacaagatcaaatagcccataaaattcgtgagaagggcaccttttcaagacttcgttcaagtgccaaccctattggcagggggatgacaagagacattactatgagaacgcgaagtttaaacttcttagcgtttgcacttgtaggtgcatatgcggtaaaacagattaataatcataaagatctatcaatatttgttcctgaaaatggttttatctctttgaatgcaccattaacgcatcggagagttggctcgcttagtacccggacaacacatccgtatttcattggaatgattcaagaactttttaataatcttggcttcggtgtaagattgattaacccttatcaattcatgaccaagggtcaaatggtgagtaattgtaaagattctaagatgctttctgaaattgtggatcttaccgtttcatgtagtcattggaaaagaaaaaatcaacagtgtggatattgtgttccatgtatgattagaagagcagctttaatgaaaggtactctaaaagaatctataagttatcatcatgcctcatatccaaccctacgtgattttgttaaaaacaaacaagatggtcgtgatgatgttatcgcggtaacagtagccttagataaatctaaaaaaataaatttgaaatcatgggtattaaagtcgggaaagcttaaatttgaggatcttgataagtatgagcaagtgttttcagatggcttacttgaagttgaagatttcttgaaaaaggaaaaggtgatttga

SEQ ID NO: 395187 - DNA, 726 bp, Salmonella enterica
ttgaagcttgatatgcactgtcatttggatctttataaagatccaagtgatattatccaaaagtgtacagagaaaggactttatgtcctttctattacaactacacctaatgcctatattggcactcatcgactgtctgctaataacagtagaatcagaacggcattaggccttcatcctgaactagcccatctaagacaccatgagttagatattttcgatattttactcccacaagctaaatatgttggagaaatcggacttgatggtgggaaagattataaagagcattcggaagtacagcttaaagtatttaaacatatacttaaaaaggtacataaccaaggtggcaggattatgtcaatacattcaaggggttgtgctgaagaggttgttgcacaacttaaaggaattgatggtattcctgtatttcattggtttacgggttcagaatctgaattaaggagcgctattgatattggtgcatggttctctgttggcccggcgatgttaaactctattaaaggacgacggatattacaattgatacctaaagatagattattaactgaaactgatgggccattcgcaaaatatgctagtaaacggctattcccttgggatgtagatatagctattgaggggatttcgaaaatatggggatgtagctcagagtatgtagaatataaaatcgaagaaaactttaggaatatccttcagttatga

SEQ ID NO: 395188 - DNA, 840 bp, Salmonella enterica
  misc_feature (786)..(795): n is a, c, g, or t
atgatacgaacttcggtttctgaatactttaaaggtacatctgcaagacaccatattgattatttggataaacttattcaggtacctataagagtgccgagaacaggtcttctggagattagatcatatctttttttactccatgcagtaaatgcaggaatagaggaagatttaattgaagatctacgactggctttagagaaatctttacaagagtcatggcatgaagatccgatgaagaaagaagatgctcttaaggttctaaaatgtgaaggaaacatagagttagctattgcttttgatcaagttgatcgaatcgcacctattttcgcaacatctcctataatccatggaaatccacgtattgtaaaaagattactcaacatagttaagatgagatcaaatattgctaagagaagaaagatttcgcttgatgaaaatgttataacaaaacttgttatatttgaacgttgtgctggcgaggaagccgcaaatgcactctattccatgatcgatacaaataaaaatttcaaaaagataattagtgaattagaaagtaaaaaattagatgaacttcctgattcagtgccttcggtatggaggaaagatgatacaacaagtgattttattcttaaatggcttgagcttgaaccaaagttaagtgataaggatttacgtgcggccgtatatctttctcgtgagactatgcctgcgggacattatgttcttggtctttcgccaaaagcaagggaagcattgaatattctggtagcaaccaaaagaaannnnnnnnnnaaaaagttcacaagcggcttcgagagctttgaaagatatttctaa

SEQ ID NO: 395189 - DNA, 189 bp, Salmonella enterica
atgcctgctcgccaggtatgtcagaattttttccgcgatgcgttagcaccgcttcacaaataccgacaaaatgctttgctggctgccaccatcgtactcatcaatggcgcatctctgacgctgacaagtatcgggcgttatttacccggtacggctcaggtcaaaaataaaatcaaacgcgttgactga

SEQ ID NO: 395190 - DNA, 543 bp, Salmonella enterica
atgctcaggcgtaccgcgttcacatcttccggcaccgtcacccggaactccggacgcacatcgttggtcagattgtcatccggcacgccggtatcattgaccagtacaatgctgttaatctccgtctgcgtatcgatggtcactgccagtggcatggactggtttatgttccccgctctgtcctcgactttcaccgtcagggtgtacttgccatccgcccagtcactggtcggcgtaaagtgccactgccccccgctctgggtcagttccacctccttgctcgtgccattatgcgtaacctgtacagccaccctgatcgcatccgcatcaatgccgttaatagtaaaaccaggcgttttttcgttggtgatattgtcgccaggcacaccactgtcattcgcggtatccagcgtgatggtcgggaccaacagggtggtatcaacggtaaagtccagcgtccgcgtcgccgtgttccctgcgatatcggtcgcctccaccgtcagcatgtgtgccccttcagtgaggtctgttgtccagctataa

SEQ ID NO: 395191 - DNA, 807 bp, Salmonella enterica
atgacggaacatcagaccagcgagcgacgcgggtgccgaattattggtattagccgaagccttttgcattatcgcccgaatgccgaacgggatattccggtgatcgaggcgctacaggatctggcgcatcactatccggcctatggatttggcttgatgttcaacaagctgcgtcaggcagggttatcgtggaataagaaacgcgtttaccggatatattgtcggttaaaactaaacctcagacgcaagggtaaaaaacgcttgcccaaccggaacccgcagcctttggcggtccccattaacatgaatcactgttggtcagtggattttatgagtgacgcgctgatggatggaaggcggttcagattgtttaacgtagccgatgattttaatcgggaagcgctggcagtcgaagtggacttaaatatcccggcgcatcgcgtagtgcgcgttttggagcggctcagcgccgaaagaggctatccggcgtttatccgaagtgataatggaccggaacttaccgccgccgtcctgtcggagtgggccgagcagcatggagtcatactggattttattcaaccgggaaagccaatgcagaacggatttaacgaacggttcaataagacattacgaacagaaatactcgatatgtatctgttccgaacgctgtctgaagtccgagagttaacagaaaaccggcgaacggaatataacgaggaacgcccgcatagctcacctggcggcataccgccggttacctatgcaaggcaaaaactggccggagactctaactggcagtggtactaa

SEQ ID NO: 395192 - DNA, 360 bp, Salmonella enterica
atggtagccagttattctcaggcaaaattgcaaattgacgattttttgctgaaaacgcgttataacatcgattcccaactttcaaagtacagtgcagaaaaagaaacatatttagtagctgaacgttctcataaaaatgctttgcaacttactgggttatatgagcaagaatttcagttaggacaaaaaagtttgcttgatttaatttctagccgtaatgaagcatttcaggcatatgtaagcatggtagatagtaaatatagcttatatatgctgaaactacagcaactatctttagtttttcatttaattgattacctgaaaggaaattcagctagtgagttgaatataacaaaatga

SEQ ID NO: 395193 - DNA, 543 bp, Salmonella enterica
atgctcaggcgtaccgcgttcacatcttccggcaccgtcacccggaactccggacgcacatcgttggtcagattgtcatccggcacgccggtatcattgaccagtacaatgctgttaatctccgtctgcgtatcgatggtcactgccagtggcatggactggtttatgttccccgctctgtcctcgactttcaccgtcagggtgtacttgccatccgcccagtcactggtcggcgtaaagtgccactgccccccgctctgggtcagttccacctccttgctcgtgccattatgcgtaacctgtacagccaccctgatcgcatccgcatcaatgccgttaatagtaaaaccaggcgttttttcgttggtgatattgtcgccaggcacaccactgtcattcgcggtatccagcgtgatggtcgggaccaacagggtggtatcaacggtaaagtccagcgtccgcgtcaccgtgttcccagctatgtcgatagcctccacgacaagggtatgtttcccctcaggcagcgcgtccggccaggtgtaa

SEQ ID NO: 395194 - DNA, 243 bp, Salmonella enterica; identical to SEQ ID NO: 375390

SEQ ID NO: 395195 - DNA, 483 bp, Salmonella enterica
atgaaatcaattaaacttaaagtgttatttgcttttattacatctgtttctactataagcgtaatttatctttgttttttttattatgtaaaaattgatgctatttatcaaggagaggattacgtaaaactgattcatgaaaattgcaagtcaacagttatactggtaagtaatatccctattactgccagaggtaggctgagtttatggaagaaagaaaaagataatgtcatgatgaatatgccattacaaaaacaatgtgatgtagtgtattttgtgaagaatgatccagagcctcctttatttagtgaggatgtcaaatattggcaagcagatgaacaactatgttttagaggggaaatgaatggtgcgtgtatatctaataaaaatattttcatgtcagtttctttattctccttagctactgatggggtttatagggatacttacaaagataaaattatctatgtatcatataggtaa

SEQ ID NO: 395196 - DNA, 513 bp, Salmonella enterica
atgaaaaatgaatctatttatataaatacatttaatatgcttaactcgcattccttaccagaaaaactttcgtttgatatatttagtcaacaatccgatagagataaaagtatttttaaaagaagtcttaatgatggctatatattcaaaggactcgtaggccatggggtccaaagttggtgctggcgcattatatgggaaacatcacaatgtggtgtcgctttagatatacctattcgaggcatatactcagatattgacacgactgataatatgccagcacaggatattggggagttatttgttaatgcttgcagcagtgcaatggaatccgaattttacttccaaaaccaaaaagcaaaaatatatataataatggacgctgatgaattcaaatttaagatagtcaataccagagataataaaacaatatatgaaggttcagtgttagcagaactgttagatatacttgaaagtagtaataaaaaacaaattcacggtaaaaatatatga

SEQ ID NO: 395197 - DNA, 1056 bp, Salmonella enterica; identical to SEQ ID NO: 388225

SEQ ID NO: 395198 - DNA, 963 bp, Salmonella enterica
atgaagaatattgctgttatcggattaggaagtattgccgcccgacatcgccgaaatctgaagttattatttccacaggcattaatatatgccatttcggcttcaggaagaaacgtaacatatcctgttagcgattgtgataggatagctagttcgattgagcaactgaccgggcttgttgatatggctattattgcttcgccagcaactaagcatgctgaacatgcgatcccttttattgcagcaaacatacctgtcttaatcgaaaagccgattgttgcttcagttgaggatgctcaacgtttgatcgaggccagcagaaagtacaaaacccctgttgctgttggttattgtctgcgctatatgccttctgcccgcatgacccagcaagccttggcaaaaggtcttgctggtcaattattaaatgccaatatttgtattggccagtatttaccagattggcgggctacaaaggattatagagacagtgtctctgtaagtaagtttcttggtggtggggcattgctggagcttagtcatgagttcgactatacaaggtggatgttgggagagttgcgcatacataatgcaattatccgtaactctggtacgttgaacattgaagttgaggaccttgttgatgttgttgcgatgacaaaccaacaggctgtgatccatcttcatttggactttttacaacgtaaagcatatcgacattgcaattttattggaacaaaggggcggattgagtgggatttgatactcaatcaagtattactacatacagaggaagggaccgagacgctttatagcgatgttgcttacgataaaaatgagatgtatttggatatgcttagagattttattcagttcatagtggggcggccacaccaatgtattcttgtaaatgatgcggttgccacaattgaactaatcgagaaaattaaaaacgttgctggttaa

SEQ ID NO: 395199 - DNA, 762 bp, Salmonella enterica
atgttaaataataaaaaaatattgattatgggtgctggcggactgcttggctctcatctggtgcaggaatgccttgcacaaaatgctatggtaatcgctattgattcgaaactagagcaagccaaatcaaaacttgaaggtataggtgttaattatcggcacagttcgcttgactgtcgatctcttgatgtgacaaatgaattcgcagtaaagaattttttcgctagtctggatcacatcgatggcgcggtaaatgcaacttatcccagaaataagaaatatggtgcacatttttttgatgtaacaatgtcaagctttaatgacaaccttgccttgcatttaggaagttcatttctatttacgcaacaatgtgcaaactggttcagaaagcatcagataccactatcagttgttaatatctcatctatatatggagtcattgcgccgaagtttgagatctacaaaaacacgttgatgactatgcctgtagaatatgcggctatcaaatcagcacttcttcatttaaataagtatgttgttgcttacgttaacgatagccgtttccgtattaatgcggttagtccaggtgggattttcgataatcaaccggaagtattttgcgaggcttataagcatcatactaatggtatgggaatgttgcccgtatcagatattataggttcaattatatttttgctttcagataatgcaaagtatgttacaggacaaaatatagtcgttgatgacggtttttctttataa

SEQ ID NO: 395200 - DNA, 1782 bp, Salmonella enterica; identical to SEQ ID NO: 381649

SEQ ID NO: 395201 - DNA, 1209 bp, Salmonella enterica
atgttagcggtctttatgaccgttgctgctttgattgtttatatttgtgtggcgaaaattgatattgtctctcctggtactggcgtgataaccggtgcttcagataaactagtaatagtcagtcctgattcaggctttattaataaatttgatttaagaactggctcaaacgttaatatcggagatatacttttttcgtatacgaaccttgatgtctttcaccaggaaaaaacacttaatgagttagtattatttgcagacagacggatcgttagcctggaagaggatcagcgattgcttaaaatactcctggctggagaaatatccgaggaaagtgagtttagtacggaaaataaagatttcttcagtcaggaacttagtgcttataagcttttgaatgagtatttttctttaagaaatgaagaaaagaatttaaagctcagagaggagaagatgattgaagaaaaaaacgatcttcacgatcgattgcttcttttgaaaagaaaaggaaatttacttaaatcggcccgcgcgccagaaatagagataataaataataaaactgaaataagtcaaattatatctcaaataactacaggggagatcagtttactctcattacaaaatgacattaagctggcaaacaataggtttcgtagtagcgtccttgagcaactcaataacaatgctgaacaactggaacagttacgtagagaacgtcttgaaaatcgggggcaattggaactactaagaaataaaattaaggctaatagtgttttatcaccgacgaatggcataatattaagtattgaacgtagctttgagaagggttcttatgtcgaaaactcacagccagtaatgacaataaagaaaagtaatgaaagtaaagtcattgatgctcgtattttagcaaaatacaggccttttatctttatgggcacaacggcaaaaattactgtgaattcacctggctataaaaaaacactctcaggtgaaattacgaggataagtgctgattcgttctcagatgatgaaaaaaatggtgctgaacgttattacaaagttgaaataaagccagatgataaaattatagtccctcctgagttagagggtgtccaggttaatgtatatgcgctaagtaagaaagtgactctgttaaattacattacagcgttagtcggcgataatattgtatttaatgtatggtaa

SEQ ID NO: 395202 - DNA, 1170 bp, Salmonella enterica
ttgtttattttttatccccctaaatatgtaatatcaccactcacgatcctttatgtttactatggcttatggttcttattagctccactttttgctcagcgttatgtgggtattaacaacgagttatcttattcatattcttttattttgctttcggttacttttggtattggcgtaatatttctttatgataaaaaagattttagacatttttcagattctacaattagcagtaaaaatgttcggataccatccaaaaaaacactgttactcttatttttaatatcaaccttatttgttatattgattgtggcaaattctggcggaattgataaatggattcattcgcccggtgatgcttttctgaatcgcagcggttcaggggtatatgttgttggtagtcatttttcatcattagcattagctgcactctgtggctaccatgctttcgttacccgtcaaaaaaagatcttgtgcttatttatattatggttgttgctgacatcccctgtgcatggaagtaagtttcaaatttcgcttttattaattatgtcgttacttccatggttaaaggaattacgtttctatagtaggggaactttgatcttagggatagctcttctcgggatcctgtttcttgggctttattttcgcaatatatcttggatgacatggcatgatctagttccctacactctaaattactttgacacgcttgataacttagcgctgtctttgaaggaattatctcctggattaaataaaacattttttatgccttttaataaattgcttactcctttcggaaatgatggcggtatcatattttacgatatgagtcagtggctaacttcgatctacgatcctgacgcatggaaaataagagcaacaatacagtttcctgttgaaactgacatgtatcttaatttttatttttatcttggaattcctatattaatgtcttttttcttttttattgcaaggatatattcagcagctcatagtaaacaacatttgggtgcatggtttgcggcaatgctaatgacattatttatgatttcacatttgcggggtagcatttataaccatactgatttttatatgtatccctatattgcagtgatgttcttccttttcaggaagtataaatttccatcgaaacggatgtga

SEQ ID NO: 395203 - DNA, 1224 bp, Salmonella enterica
atgagggtgttgaagagatatatagatttgtgtctaaaatgcattcgcaatgaatcagatattgatatgtacctcacgccagttgaatacagaggatcaaagttttttcctaaaatacctaaagtttcacgatggattgtctactgggaaaaaagaaagataacttttctattaggttattacattctggtgatagtatggttcttaggcgtcggtgttttgtatattctggcaaagcatatggtgtacctttttaataaaatattcggtgatggcttttcaaatgatgtatttggaaaaataaatgctgttattttcttagagagtaatacaattggatatattaaagagtcgacaaaagaaaatacaccacttatatggttgatcccgccgaagtataaaaaagaacgtgcaagttctttttcggagcaggatatatatatagatgttgagtcagttgtttcctttaaagatattttattcaatttatttgtgtgtatttatgtactctacagatatgcaattaaaagtaagttacagatatatgctatgccagattgtttactcactagtttagctttagaaaaattaaacattgttacgctgacatgtaccgcacactttgatagatgggctgtaatggcaaatgagttttgtaaaaagaaaaatattaattatcgttttgtacagcatggctcaattaaagggattacagttaaaagtaatcaacattgttatgtaacaaataaacttacaacagttaaggaattagttgcttatgatgatattgaagcagatttactacttaaacatataatagcacctgagaataaacttatctgtattaactatattaagcctagttttagtgtttcagttaatattaagggggatattttatttattggacaccctctatatgaaaaactacatattgccatttataattctttatccgcggaaaattttgaaatttactataagccacatcctaaagcaccatcatcggctaaggcaaccgctattggctggcattttattaatgatgtacatgtttttccaaatgtcacatgtgttatctcataccattctacgttagcattaatgtatgaagaaatcggggtaaaaactttcatccatgagtgtatggaagttaactcttccgactatgtttattttatttgtaaaattagagagtctctgaggcgtcatgactactactga

SEQ ID NO: 395204 - DNA, 183 bp, Salmonella enterica
atggttatctttttagccggaaattcatatccgctattaatgatcgcactgcgtacccgatcacgcgcctcttttaccgtggtttccggtaggcctaccatagttaatcccggtaacccattactgatatgcacctctatagtgataggcggcgcattgacgccaagtgcggcgcgggtatga

SEQ ID NO: 395205 - DNA, 759 bp, Salmonella enterica; identical to SEQ ID NO: 381652

SEQ ID NO: 395206 - DNA, 210 bp, Salmonella enterica
gtggaaggtgttactggcaccaaagtacaaaaaatagccgatggtggcagtgccaccaaagtacaaaaattagccgatggtggcagtgccaccaaagtacaaaaattagccgatggtggcagtgccaccaaagtacaaaaattagccgatggtggcagtgccaccaaagtacaaaaattagccgatggtggcagtgccaccaaagtataa

SEQ ID NO: 395207 - DNA, 363 bp, Salmonella enterica; identical to SEQ ID NO: 377731

SEQ ID NO: 395208 - DNA, 378 bp, Salmonella enterica
atgaaaaaactgtttatcgctgcgttggtgatcctgcctcttaccgcttgcaccacctatggcaacaaatcccttaaagacgaatcccaacaaaccgtaaaaaccaaactcgttaaagggaaaacgacccagcaagatgttattaatgcattcggtgaacctcagacgcgagccaccaatgatggtcaggagatgtggtcctattccagcatgtcaggcgagagtcagatctcgaactacatccccggtctggccttgctgaagaacagcaacacggctcacatgaactctcttgagatctggttcaaagagaatgttgttgaccgatataatttcagccagacggcgagtaaggtttcgaaaggattgttggattaa

SEQ ID NO: 395209 - DNA, 258 bp, Salmonella enterica
atggaagaaataaaaaatgataacaatgtaaatggcttaaaatttacatactcagggaatcttgaaccatttaataactgcggaccatatagtcgcataatatcatcagtcttcaaccaactcacaacagatatatcaggaaacgtatccagccttagtttagatatcgacccgatgatatttaatatttttgcacctaaagactatcaaagcgagatactaccgattctaagattacatatttctcacgataactaa

SEQ ID NO: 395210 - DNA, 603 bp, Salmonella enterica
atgaaaaagaaaatcagagacccggaaaaattcgatgctttcgagttattttcatctctttcattgaaacatagttataacattaatgattcatcagctttgaatgattttatttctcgtgttaaaaaatcacttgagtcttctgttaaaaataaaacactagcttacggaaaaagaactgaagcactttttgcctacgttgctggagctttaggtgaggttaaatttctcaagcaagaggactctggagaactatttttttcaggtgatgaaattcaagcccctgattatcagctgatattaaacaataaagaaaaaattcttgttgaggtaaaaaattgtaataacaagaatcccgaccagaaatttatgctaaaaatggattatgtcgagaaactaaaaagatacgctgatataaatcaactacctcttaagtttgctatttatttttctaggtggaaaatgtggatacttatcccgctggaagttttacaaaaaatagataacagctatgtcatagattacacaacagcagccccatactctcaaatgaataggctgggtgatgcatttatcataacggatattttcagatggaattga

SEQ ID NO: 395211 - DNA, 498 bp, Salmonella enterica
ttgccaaccattaatgtcataaaagaagaggctattaagtttcgggaattgatagaaaaatgtgataaaaacaacaataatgttttaacagacagtttccctgtaatgaattgtaaaatttcttcgatacttctttcttatcatttcctaacgttgtggcccgaaattatgataaaaggaataaatgctgcggcaggtaaaaatggaaaaataactcactactggcttgaaattaatgatgttgtggttgatataacaggagatcaatacaacctaattgatgacagagaactaaatgaaaatattatacaaagcagaccatttcctgctgtacatgtatcatttaaaaaagaaagttatctatataaattatttaagatccaaggagaagataacttcgaaaaaggctttccaacgattggagatgactttattgaagaaattcatcttgggtatagtcaattgattgactttaaaagaatagttcacaaacgataa

SEQ ID NO: 395212 - DNA, 3189 bp, Salmonella enterica
atgtatcaaaatagaaaaaggaagtggggttgggtatttgttggtagtggggtttgtattgtgactatctcatttgtaacttatggacttgttggaaatgaaaaagatgtaaattcttctcctgttgtaaaatatgcagaagacgatcccactgacactgatgtcgcagaacagaagatacggagtattttatattcaaatggcccagaaaatgcgtctttgaatgttgcaagaccaggagaaaaaataatttcaaaggtagatcaagacgaaatgcgcagccagaaaatggctgcaacgggtgaaatgccagtacctacgtatgcgaaaattgagagtcagcctgttcagcaagctaataataacttgcataatatttttttatctggaaacgccaaaaattctaccggaattattgttccgttgaaagagcatgatggaaaaaaacaagatacttcctttgatgctatgaaagcagcatcattaactacacttgttcaacgtgaaaaaagtaatgatgtctttcgtgatgtacataaatcggttctcaaagagaggcaaccaggctcatcttttccaaagcaaattagggcttcaaagcggtctattacaggtgatgacgcaggtacgacttccagatctgttgttgctctgaacgaacttagtcggagtgcgcaagagcctgacatatcgggtggggatgaaaaagttgagtttgattcacgctttctgaatggtaatgctaaagatgttgacgtaagccgttatgccgaaggtaatccagtgatgccgggaaattacaatttggatgtccttgttaatgatcagctaaagttaaatgcaacgatcttatttattgatgatggtaataaaaacatttctccctttgttactgaaaaaacactgacgcagctaggtattaaatattcacttaagtctcaggataagatgaagaaggcgggtgaggattattacaacttactaaaagtcacgcccgggataaaagtacgttttgatcaggaaacgcaagagttaaatatcagtatcccacaactttatatagaaaacagaccggatggttatattgacccaagcctatgggatgagggtatcactgccggtacattttcatatgacgtcaatgcctatcattcagacaacgcggatgattcaagcgacagtgtgtattcagggcttcactatgggctcaattttggtgaatggcggtttcgcagtcgtggtgctctgaactgggaatcaggcaataaagctacctatgatagtcaagaggcctggttacagcgtgatattgcctccctgaagtctcagttggttattggtcaaagcagtacccgtggcgatacatttgattctgtagcagtaaaaggtattcatctttataacgatgatcgtatgttaactggagctgagtctggttatgctccgactatcaaaggggtagctaacaccaatgctaaggtcaccgttaaacagaatggtaatatcataaaacaggtcactgtaccgcctggcccatttgaaataacagatattaccccctccgggttcggaaatgatttggatgtgacgctcactgaggctgatggcagggagcaacatttttcggttcctttctcctctgtttcacaacttttacgtgaagatagcctgcgttgggaggttgccttaggtcagttagaccaggatggattgtaccattcccctgatattgcgaccgcatctgtctattacggtctgactgacaaactgactacctatgcaggattccagtcaacagaccaggactacgacgcatttttgttaggaagcgccgtcaatactgctttaggcgcttttgcgtttgatgcgacacagtcctatgccacgctgcctgatatcggaaaatggaatggtacgagttaccgtttgtcctatagtcagcaattagcgcaaagtaaaacctcagttaacgttgctgcatggcgttatgctacagagcattatttatctttgagtgatgcaactaatatttatgatcaattaaaacatacccaaaatcaggctcaatgggtgatcagtgactatcaaagattaaaggatcaattgcaagtcaatattacccagcctcttgacttttataatgaatattggggatcgctgtatgtgtcagggagttggaatagatattggtcagagcagagcaacacccaatattcattagggtacagcaatgctttccgttggggaacatacagtattaccgctcaacgcagctatgatgagaataatgattcggatgatagtgtttatctaagttttaatttaccgtttgaaaaattatccccaaattttaagaaaaaatatgggtttactgatgttaatatggggctgcgaagcgattctgacggcactacccagcttgacgccagtaccaatggtaattcaaccgataaccgattcaattatagtttgaacacctcatattcggcagactctaaccagtcgggtaacaatctcacgcaggttgggggaaatgttaattatgcaagccggttcggtccatggaatgcatcactctccggcagtgaccggggtgataagcaaatgtcattgggtgctagcggaggcatgatcctttaccatggtgggcttgtttttgtcccggataatattgatagcgcaaatacgatagcattagttagtgcgcctggggccgaaggaagtcatgttggatcttctgataaccaaatcgatcactctggctatggtgtagtcactaatttatctccctatcatcgtaatatggtaaatgtagatattagccagcttgataactccgtttatttggataatacctctgcaacagttattcctgatgccggtgcggtagtggaggttagttttaagactaaagtgggaacaccgtatgtctttgacattatgaccgaacagcattctcatataccattcggtgctgacgtgtatgatgaaaataatgaatggcttagcgcggttggacagggtggtaaagtgttacttcgtgggatgaaggatactggcacattgcatattaaatggggggaagatacaagccagcaatgctatgtcaattaccatttgcctgcacggaatgataaaaaaaataccagtatgctgctatctgcaatgctttgtaagcagaataattaa

SEQ ID NO: 395213 - DNA, 1173 bp, Salmonella enterica; identical to SEQ ID NO: 377921

SEQ ID NO: 395214 - DNA, 432 bp, Salmonella enterica
atgtgtaataacattactctttcgcaggaagaaaaatttatccagttgattgataaatatatcactcagcatcgtgatgatgctattaatgctgtgttttaccgaaagctgtatgtgcttttcgtcggatatcaccttaaatattattactcacgtaagcaatactgtaactcgtgttttcatgtcgataatattatgcagatgttcacaggtgtagtttcatcactcagggctaatgtgctaataaagctcaacaacagccatacgatgctttattgcttgaatgggcttgtggattatatttctggtaacctcatggaggttgaacaactctatgcaaatttgctggcacagtatgaaaggaagagcatttcacattcattgaattacgtaccaccacctataggtggcaggaaaaggctatggggataa

SEQ ID NO: 395215 - DNA, 555 bp, Salmonella enterica
  misc_feature (512)..(521): n is a, c, g, or t
ttgctggcaaaaaaaattgaacagccattgcatcttggaattactgaagcagggggatttcgggctggagcggtaaaatctgctatcggtatcggattattgcttgccgaaggtattggtgatactttacgtgtatctttggctgcagatcctgtagaggaaataaaagtaggatttgatattctaaaatccttacgtttacgttcacgagggattaattttatcgcttgcccgacatgttcacgtcaagaatttgatgttatcagcacggtgaatgagctcgagcaacgactcgaagatattgtcactcctcttgatgtgtcaattattggttgtgttgtgaatggtccgggagaagcactggtatcaacgataggagtagccggaagtaagagtaaaagcgcactatatttacatggaataagacagaaaaaacgtctgaataatgaaaatatgatcgatgaacttgagaaggaaatccgaatgctacttactcaagacagtcatgagannnnnnnnnntacattcaagtgtattagctcaaacctgatctga

SEQ ID NO: 395216 - DNA, 696 bp, Salmonella enterica
atgtcagtctatgacatcaatatgctggtaaaacatacagaatcatcgattattgcagctatcaatgatgttaaaaaaaccggagcggtaagctgtcatgttgttgaaggcgattatgatgaagaacatagctactaccatgaaacttattattatttgagcacatcaggagattcagaacaggaggtaatagataaatattctcacttaatatcacaaatgtacagacgatcagcatttatgaatatttttggtctatttgaatatcgcatgaatagatgcagagaactcatgattgatatctcaaaaaagtcagaaagcaaaaaaatatctgagcaaggaatattacaaaaaacacactggatgctttccaaagttataaataacaatgtagatagagcagtcaatgatgtagactatctaagagtaattagaaattacattactcataataacggtcatttacccgactttcataaaacactaaaaaaacaaagtaggaaaaccaaaaaagaaaagttgatgcttaaatcagtgaagaaagcaacagaagctggagtcctacaagttaatcagtttaacgacattattctcaatgaaaatttccttccatttgtagtaaatgaatttggtcgttattcaaatgaaataaaagaatcaattatagattataataaaagaactgaatctgcttga

SEQ ID NO: 395217 - DNA, 843 bp, Salmonella enterica
gtgagttatctttcgaaagttaatttcttaggtataactcttttacctttcagcgaacagcaactttataaattcatcacctcatggtttaaaaataatgatgtgattcttggtgagcgggtaattgaaagcatcaaaggtaaagagattgctgaaatagttaaaactcctcttcttgcaacattgttatgtgatcttgctgaaaaaggtattgatataccacgaagtgaaagtgaaattttcacaaaaagactcgaacttttttgtggtgtatatgatacatataaagctatacgtagaacgactctgtcgcaaagtattttgcaaaaagcagcaataaaaattgcgtatgctttgcattctcgaaatcttcgttcaggtacaaagagtgatattataaaattcatcgctaatgatagtagctttaattatgacaatgaaacctgttctactgctgtaggagagctaattgatccgtgcaatatgcttgttcatgatgcaatatctggaacttactctttcggtcatttacgatatcaagagcatttagcatcattagagcttttacagaatagatcaattgaaatagttccttatttaaagaatgactggtggaggggaactttgtgcctttatgctcaaaattgtgagtttttctcacttattgaagaatttacattgaaatatcataatatccagtcagcattaataactctacgggaaatgactaagtatcgtccaaaaaaagaacaagctaatctattatatttgattggtaaatatgaaggtactgatgattcattttatgttgatcccgattgggagcatacatctcattggtag

SEQ ID NO: 395218 - DNA, 357 bp, Salmonella enterica; identical to SEQ ID NO: 377728

SEQ ID NO: 395219 - DNA, 201 bp, Salmonella enterica
atgcacttgaaccggcttcacaccacaaaactgatcccaaggttgttggtggcaatatggctggcaaccatatcgttgaccttattcgcgagtttggacaaacaaaaattttacgacctgatatcaaaaaaccggtatggcacaactctcttcgcttaccgcatggagaaaaattatcagaagcacaatgggcaaccgtag

SEQ ID NO: 395220 - DNA, 1782 bp, Salmonella enterica; identical to SEQ ID NO: 381649

SEQ ID NO: 395221 - DNA, 729 bp, Salmonella enterica; identical to SEQ ID NO: 377705

SEQ ID NO: 395222 - DNA, 357 bp, Salmonella enterica
atgcatcagatattacagcaagatgccaggcagcaagatttttctaatccacaatctgatgttcatttgaaggattttgattttgagtatgatgagcagatggacaacgtcgagcagcgcgaatttatggttttatcagacccctcaagctcagtcagtgctcctcctgagacaccgagcagcggtaatttgccttctatcacgttggagttggttgacagtagtgatagtggtattgcacgtgataatgttaccaatgatatctgccctatggttgcaggaaaatcgcaagcggacagtattgtctatatttcaattaatggggtagtggttggtgaaacaacaacggacgcttaa

SEQ ID NO: 395223 - DNA, 225 bp, Salmonella enterica; identical to SEQ ID NO: 377879

SEQ ID NO: 395224 - DNA, 1083 bp, Salmonella enterica
atggcgttttacactattgaaaagaggaccacatcaaggggagagattagataccgcgtgactgtgggtgtaaaggaggggggaaattacgtttatagagaaagcaagacattcccaaaacagcctctagcgcgaacgtggggaacaaaacgggtcgcagagatagaagagcacggctgggcaaggaagaagcccggaacaacactgctggagctgatgacacgctattttaatgaccataccgtcaaaaaaagccagagcaagaagtcgtcactaaaaacaatcatgaactcatcgctgggcgacacgctgttgacagatttaatgatgaatcgatatgtagaatatgccagagcgcggagggcgtcagtgaaagcgggtacggtagcgacggagctgtcttacctaaaaacggttcttgatttggcgctgcctttctacgatataaaaacgttaccagaagaactgaaagcagcaaaaatatatttacaaaaaatgaacgtaatcggcccgtcaaataaaagaacgaggcgaccgacgcgagaggaattcgagaggcttcacacggcacttacggctttatatgaaaactcaagactaaaaattagatatcatgatttttttgagttcgcagttttttcatgcatgaggcgcggtgaaatatgcgggctgcggtgggatgatatagattataaaaataaatcagtgctcgttagagaccgaaaagacccaagaaaaaagattggaaatcatatggttatacctttgcttggtagggcgtgggatattattattgcgcagccgaagataagcgaaaaaatattcccccataaaattggaactttcagtgaagggttcaggcgcacgagggatagattagagattcctgatatcaggtttcacgatatgaggagagaaggggccagtcgtttatttgagatgggattttcaatagaagaagttgctcaggttacgggacataaaaacctaaaaaccctgtggacagtttaccgggaaatctacccgcaatccctgcatgacaggttcgcagagctacaaaaacgcaacaaaacagacgaataa

SEQ ID NO: 395225 - DNA, 498 bp, Salmonella enterica
atggcaagcaaatcatcacgacaacgcgaactggcacgaaagaaacgcgccgccgcgctatcgctgaatcagaagcgggtcgataaacagaacgcaacccacgcaaatcgcgagatgcttctggtgtccgaggcttccgcgctgatcgcagaaatgcgtgaagcgggttttgctccacctaaagggcttcccactcaaaaacaatttctacgttatgcggcgttccgaaaggctcgcgccatggctcgcgcttcctcactcgcagaggatgaactggcagtggctcaggccgagggcggtcttctttcccgcgtctatgagcgcctcgataagcccggattgaaagacaccgctttcgcaaacctggtggccgtggcccagcgctcggtaatcgctgcgtctgctcgtctggatgttgacgaagccgccgccgagcttgaactgccggaagatgatcgcatcaatagcctgctcaagcggctgggtggtgcagcatga

SEQ ID NO: 395226 - DNA, 1701 bp, Salmonella enterica
atgagattcactacgcctgaataccgtcagaaccttctcgccgctgctcgcgccctctctaactccaccatggaggatatccgaaacaatctcgatgtgattgaggctgctgtcgccatcaaagagcagtggaaagtcgagggatttacgccttatgagtttcaacaaaagtggttcgactccggcctgaatcaccgcttgcgctacctttcagcggcgaaccgaatcggtaaatcgttttgcgcagccgttgagttcagctatcacgcaaccgggctttatccagattggtggaggggctaccgcgtcaccaataagctgatcactacagcgcgtgtgctgtgggcgattggtgtttctgctgactccacgcgaaccacgattcaactggagctattgggagtcgatgatgctcgccagcggcacctgttcggtacaggctcaatccctcgcgaacgaatcaacatggattccttcgtttgtgatggtcaggccgtgagatcgttccgcgtttatcacgaatctggtgaagagtctacgtgtcgtctgtactcagcaatgcaggacgagaaggtattcatggggcaggccatagtctatgcgtggattgacgagcaatccacaaaagaggacgagcttgtctctcaggcccagacgcgaaccatgacaacggacggcgtagtcgctgtcaccgcaacgcccgaacacggggagactgaactgtacacacgctgccgggatgacctgtcaggggaaattcacttccaaaaagcgtcctgggatgacgcgccgcacttcaccgaagagaaaattgctgagcagctcgccctcacgccgtactaccagcgcgacatgcgccgacacggtgaaccggttctgggtgtcggcaaaatttacccattcagcccggacgctatcacctgtgcgccgttcgccatcccagatcactggctggtcgttgcggcgcttgatttcggttacaccggaacggcatcatccgacccctctgtgattgtgttcgttgcctatgaccgcgataccgggaagcgatacatattcagcgagtggtacaaccataactccgtcgcaccgcgcatcactgagcgtgagatttacccgaacgcccacatgcctgattacatggcctgcaagatcaccgggaacaagcctaaagactgggatgccgccgccgctcatgctccggcagagttgcgcgagttctccggcctgggcttgccatcaatcccggttgttgcgcctaatgatggcgatggcattcaatccggcacgcagtttacccgctccgaaatcatgcgccgcctgggcgcaaaaatgaccccgaaagtgtggaagctccaccctagccaaatacccatggagaccaacagaacaagcaaggttggctctatcgcgctgctggctcagtggttccaggacggggaattgttcatcttccgcaactgccgtgaaaccttacgcgagctgggtctgtaccagtggacgaaagaaggtaaacgcaccatcccttcaccgaaaaatgaccacttcatggatgcgatccgctacggctccacgcgcgttgagtttgacggcattccgatgatgcaggcacgccgcatggttagcccggtagagattcaggaaacgccataccagcgcaccgcgcaggcatataacaagaaaatggggagaaaactgtga

SEQ ID NO: 395227 - DNA, 2010 bp, Salmonella enterica
gtgaaagagtccgaactgttcagcacagtgatgacgcagatgggcgcggcaaagcagattcacgatgttctgtcagcgcgttatacgctggcgtaccaggcttatcgtggtgaattccctgcaaaggtcgatgaaaccgatatcgctgcatcgcgcgtgatgtggcaatccttcgaaagtgtctatccgtcgctggtggagctgttcaccgatagccagcaatccccggttaagctcgacagcgatcgcatggttggcggcaagctggcggcggcgatatctcgcgccctgcacgcgtcagtgctgaaaatcggcggttactaccgcctgaccatggaagcgctgaaagagattttgataaccgggaaccaggcggttcgtgtcggctacgaggaaaaaacctatgaaaccgataaggcgagctttaccgacgctccgatagaggcgatcgcgctccaggctgaggcgattatgaaggccgggtacaacatcgagcatgagctgactttcaacgaagatgatcgcactggaacgggctggattcagggtaaacgtgtcatcaaggttccggtaatcaaccttatcgacttcaaagatttctatcttcacccgcgcgcaatcgacgtcgagacgtcgccgtacgcggcgtactcagagacgttaaccattgctgaggcagtagagcagggattaccaaagaacaagctcacaagcgcgtacaagggcgatttagacgaatcagccggagaggataaacagcttatcgttatcaacgatatgtcaggcggcattgaagcgccggacgccgactacggcgatgacgaactgaaccgcactattcgcatctatcaccactactggcgcggagtctacaaaggcaataagcgcaagctctggtatgtcgtgacgactgatacgcagcttgtcagcgttaaagaggttggctggtgtccgcttgtctggggcgccatgagcatcgtttccggctccggttacagtgaatctctgttcgatatgaccatcaacgagcaaatcaacaagacacgcgccatgcgtgccattcagcgcagcgctgacggtgcggcatacggtgaatacgtctatgtcgatagcctgatgacgcctgacggcctcgccacccttgaaagtgatcgcggccccggcgcggcatacgccgttaaagaccttggcgcagtgcagaaactagggggtactgatgttccccaggctatgcagctactgaacgaagaaatcaatgcagacgttgagtctgttattcagggcagtgcaggccaggcgcaagcgctggaggaaaacagcaacgccagtggaacggctatccagctcacccaagataagcaggagctgaacgaaaaccagatcgccagcaccatcgcggagacgttcatcaagcctatttacaaaatcatgctgctggtgcttcaggagatgggagaagtgctcgaactggatggcgcaaccatcccgtttaaggtgatccgttccgacctgggcatgagtatcagcattgagtcgccatatgaccgcacccgcgccgcgctgaacgtcaaaacagcctatgaaacctcagtgcagctcggaacggcccctaaaaatatccagccgcagaacgtctacaacatctacgcaaattactaccgcgccgtcactggctcggaggatgtttctgaatacatcacgccaccggaggagatgccaaaaccgtcgccgcttgagcaggcgatcacgaaattcatcaccgtcaacaaactacgcggagagattgccgcaaccgaactcgcagaggcaaaagtgaaggatatgcaggcagacgcctgtaagaagttgaatgacggcctttacgacattgcaaaaatcaaccaaatagccgcgcaaacacgtatcagcatgattcagaccatgctcgacgcgaaaaagctagagcaggacgcggcgaacgccgttacccagaacgcccaaaaccaagaaaccatcgataaacaggattga

SEQ ID NO: 395228 - DNA, 906 bp, Salmonella enterica
atggaaaaccagaatgaacaaaccaacaccgaaaccaaagcgcctgccgtgggaggaaagcgagagccaagttttgcggcggctctttttggggctgcaaaagaaccagcagcggaaaaaggaaacaaaagcccagaagagggagcaggagcacagcctgaaagcgcagagattgacctgctcgccggagccgacgacagcaccacgttggcgggaggcgctggagatggcgaaggcgaaccagaaacggtagacgtctggcagtttaacggcgtcgattacaccgctgaccaggtagaggaagcgctccgcgagcgtgagagctatcagagacacaatcagagtgtgcagccattagcggaagccattcaacgcgcagaggacgatacagcgcgttttaaagagatggcactcaccgagacggaaaagcgcattgcccagcttcaaaaggccatcaagtcaggacagttagacccgcgccagaaagcggcggcatacgaccagatagaagaggcgttagagcgtcaaaaggtgcttaacagggcggcagaggaaaacgcccaggcacgcgccgcagcaatggcaaaggtgcgcgagcagcgagcacgtcagacagtgaacgccatggctaaacagggctggagccgcgaggatattttatcaattggcgcacacatccagaaagtggtgggcgaaggcgtgggagatgtgatctccccggcgttaatgcaggtattcaaggatgccgcagagcttcaccgcttacgcaatgagcatggtaagcgcctggcagcgaaaaacgtgaacgcactcaagatgacgcgccaggctccgcagacaaaagaaaccaaagcgccagccaaaaaagaaaagaccttcggttcaatgattttcgggggtgagtaa

SEQ ID NO: 395229 - DNA, 912 bp, Salmonella enterica
atgtttggagggggatcgtcatcctcatcatcaaccagccatacatcatcgtggctggccccgtacgttgagccgattgttgaaaactttatcaatgattacagcggtatcaactacgaaaacagcgtggtggcggggcttactccggcagagcaagcggctttagaccgcgcaggaagcggcgcggctatcactaccgggcagaatattgcaaaaggtggggctagcctgattgagcaagccgtggggggcattcaggggctgttagagggcaacggtaaagcgcagttcatgagcggcgtcaccgggctgtacaacggggccagcgactttatggcttcgcaagataacgcgattgaggacagcgtatacagccaaatgggcgcggagtttgggcagtcggcacagtcaaacatggcgagcacatcagtagctggcagcagcgcagcgcaaagcgctactaacagcattctggcgtccggcgctaactccatggttcagcaggaaagcgaccttgctatgcagattctgaagggttccgtggggctgacttctggcgcgatctccggagaggttggattgctcgaccagttgatgagcgctggtggtgcgatcgcaaaagctggtggaacgatggcggcgaacggggagaaaaaccagttcaatgccgggatttttgaacagtggttcaatcagaaggtggataacaacaaccgccgaaacgacatgattaacaacaacatgccagcgctggattttgcattcctgatgaatgaaatcctgccaacggcaggcatcgataccacgacaaacaccacgtcaaaggtaaagtctgacggcagcagcggggggattggtggcaattcgttcatcaacggcgctgctgccatgtctgcactgatgtttatttaa

SEQ ID NO: 395230 - DNA, 405 bp, Salmonella enterica
atgagtttattgcagtcttttgaaacgtttatgggttttggtgataccgcaggccaggctggtgaggcgattaatggggtggttaatgccatcccgtcagttgaggaaatgcagggtggggttggtgctgctgtatcgaacgaaccagtaggcgttagcgctggggcttcggtaccaggagctagccaccacaagccttggtctggaaaggcgcttgagccaattatggcgaagcttgtagcggcgtcaataatcacaaaaaggacgccgacagcgccgctaggtggggctggtcatggcgttcaggttaataccagtgggtatgacagcattcttaagggcgcggaaaaaattggaaataacgacccactgcaggggttgtcagggtttaaaaatctactgtaa

SEQ ID NO: 395231 - DNA, 507 bp, Salmonella enterica
atgaatataaacaaacagtttgacgagatgtttaagcgctacagcgccgccgccgatgccatgctggcgcaatacatgccgcagtcggtacaggcagacgaaccagcaaaaattagctgggcaaaacaggagggattccagcccgagtacgatccgaacgctgaccaggttgattgggttaagaaaccgcaaccagcatacaacgtgcccgacatcatgaaggttcgcggctcaatgtcgccagagacgtttgcggagagcttccctgaataccaggtaaaaacgcagcacctggacgagctgttacagcagatttatcagaacgtactcgacggaaatattacccagcagcgcggggaggagctggcataccagcttatggcggacacttacgacgaagcgctaaagcagggcaagccacagggcgcaggcgttaaatcatcaagcgagcagcagaccgcaagcaaggtcatgaagggacagaaaatcgtaggggcgacaaaatga

SEQ ID NO: 395232 - DNA, 1419 bp, Salmonella enterica
atgacggcagtaacagatcttcaaaagcaacgccagcaagaccaggcgcaaaccaacttagacgccgcgcaaggctattcagttacaccgaatcagggtagcgtcgtgccgaatgttatgcaggcgcagaagatatatgaagcaatgctcgcgcaaaagaactcaattccgaacattgagccgcctagcgagggggaaatcagaagagagtcatggattgcgtccggcgtaatgggcctacttggcgcgttggtaacaggaaatccagcaagcggcatcgcaattggcatgcaagccgcactggcacttcatgaccatggttacgatctgcgccagagggccgagcatgttggggagctgcatcaacagggatacagcgcattagccatcgagaagtggtacgaaacgggcgacaactccgagctggacaaggagcgtcagaacatggaagcaatggcgcgtgacgaagtcagcctccaaatgcaggggttgaaaatggaccagcagaacgaccagttcaacaagcgcatggatcagcaggataagcagtttgacctgcaaaaccgcagacttgaccagatggcacagcatgagggggtgatggaaaacatagccctacaaaatgcagccagtgctcgaatggcggcaattgtaaaaatgggggcgcaggcaggccagcaaatggcgacacctggcgcatcgggtggcgctcctggcgtgcagcttgccagctttaacccgaatagtgttcaggttccagcgcagattaccgacccgcaggaaaaagccgcttacatcgccgcagtaggccaggcataccacggacaaatgcttaaagacatgattggtcaggtatcagcagcaaagaacttacgcacgtcagaatcacaacaaacggcgatgtttgacaagattttagaagccgcgcaaaaagtggcgcatacgccagcgaacaaggcaggtgatgagcagttgctaatgcaattccaggttggtgagtctccgaacgtatcaccgcgaacaacgcagattgatccgctcatgaagtcgctaacaaccgggcgagttgatgctgctgaaaactggttaaaccgtaaaacggggggcgggctaactgaatcggaacgagagcaggcgcgagacttgacccgcagcaacgcccaggcacaggcagagtcacacatggagcatgtgaaaaacgtggttacaaccaacggatttgacctatctaacccggaagtgatgcgcgaccttgtagccgctttccacgtatcaccagagacgattaccgggctttctaacggttcgctaactccgcagcaggcagctaaggacgccatcgacaaagtggcaccaaaaacaactgatttcggcgatgtgccggagcataacgctaaagctacatcgggggcgtggtaa

SEQ ID NO: 395233 - DNA, 1734 bp, Salmonella enterica
atgactcacagtgttattttgccgaacggcttcacaatgacgggcgtaccagatgacgcgacccaggagcagatcgcagcgcacgcggtacaaaaggggtacgccactgctgatgatttcgctgattatccggcagcgtatcatgctgctggtggcaagcagccggcagaccaggtgaagatgctgaaaaacctaaaagacgtcgaaagcacgccgttagcgcgtgtgggtgatatggctcgcgagctcggcggcatgataatcgcggcgccagaaacgggcgccatgtcgtttttgccgggtgcggcggttgatgctgtatctcaggctggaatcggagccgctcagcaggctgctgataatttagacccggtagcggaacatggcagcgtgtcaggttcggctgcgtcaggcttaattggcggtggaattgggcgcggcgtgggtgagttagctaaactagtgcttgagcgcttcacgccgtcagcggtgcagtacctgaaagggcgtttagggcatgttgattttccggaggacgttgcaaacgcagagaagtacaccgacgaggcaccaataagtgcggaggggagagagcaggaagcagaaaaggctgttaaggctgcaaaggttaataccgatcgcgttgacgccatgacagcgcagcagacgcaatggatggacacctataaccagaaaatagcgcggcggctggtgggcgttgaggcagaaagttacatcctgaatgtgattaagccgcaggaaaccgggcgcgtcggtgagtctgcagaaagggcgcttcaaacgttccgatcattcactgaggactacgaaaacccacatttgccattccctggcgaggaaaggccggagctttctggctacgggcagtttgaacaggtaatgagagcagagcatgagccgacgaacgcgatcataaaccgaattgatgcgggggaagaggttccggcccagcagttctatgacgctatcgcatcgtacgttaacggcacgcggttcgaccttgagcaatacctggctaccgccccacatatcaacataaaacgcttgctggcggcagtgaaagaggctcctggaatcctggaatggttggacgccaaggggattatgaaccctgaaacgcgcagctacgtttctgcaaagcaggccgcagcgcaccgagcggggatttctgatgcatatgccgcatcaatggaacggctaaacgatgaattaaccaaggaacgcgtcctaacgtctgccgaataccaggatgcaagggcggcaggcgagcgaaacaggcaaacggcgctagagcacaaaataaagctcttagggaagatgcagaagaacgtacaggcgatcatgaatgacgccaagggaatcaaggtaaacggcgttacgtgggccgacattccagaggatgagcgcggtatttattgggcaatgacgcatacccacgatgcagcacagcgcggagcaaaagtcatgcgcatgtatgagcaactggaggcggtacgcgcggcattgccaggggtgagggcggcaacggcaatggataaggccacagacaacgccgcaggcgctgctatggctggttttatgattggcgggatacctggcgcggtagccgcaccgatagttaaagcagcgggagagcgtgcaaaaagggccgttgttcgccgcgtggtggcgcgagccgaacgagcagaaattatggcagcagcaaataaataa

SEQ ID NO: 395234 - DNA, 975 bp, Salmonella enterica
ttggcccaactttactcgtacgagcacgtcggcgtaaaagacgacgtcgcaaaccgaatttataacctgggcgtagaagaggtacagcgtttacctttctcaaactcaatcggcaaatcaaaagcgaccaatcagaaacatgaatggcaggttgattttgacgaaaagccgggtgagaacgcctatccggaagactacgaatattcagatgttactgattcgtacactccgacgaccccgatgtataactactgccagaagctggtcgtggcggtacgcgtcaccacagaagcccagctccaaaaatattgggcgggtgaagatgacgatcagttctcctaccaggcaagaaagaaagctcgcaaactgttgcgtgattgggaatgggcgtgcctgaacaacaaaggctatgttgccccagcaactgatccggatactggcaaaccaaccgccgcgaaaatggctggtgtgcaggcgttgatctcttccactgacaacggcgtcaccatttctgccgatccgctttccggcgcgatcacctttgccacttccgcatcaaccacgccaaccgagcaggacatcctcaacatgatgggacagctatgggaggcgaacgccaccgctgaaatcatgatggttggcccgagcatgaaagaaaccatttctggaatgcaggaaaaagaaccaactcgcgtacgcgtgtttgagaatgacgactctatctcctttgaggtgtcatccatcaaggacgccatgggtaacatcgtcaaagtcatctatcacaagatgatgcctgccaactgcgttttcttctacaactccaaaaactggcgagaagccgtttggcaagcgccgaagccggaagaggttccaaaatctggcggttcacgcaaggcgattatttccaaaattgcaactctccagcacgataacccgtggtgctcaggatggattcagggaaagccggcagcgtga

SEQ ID NO: 395235 - DNA, 318 bp, Salmonella enterica
atggattcagggaaagccggcagcgtgataagcaaaataaccccacccaccattggggaagtgtgggaggggatcgcatttagccaggtgcttacaccaactctggttgatttggatgacggcacatacacctacaagtggtcgctaaatgcggggcttaccacgctcaaaataagcagcacaacagcagcaaacccaacgttaagcgcggagagcccggtagtgggacttgcgtatctaaatttaatagtaaccgactcgtctggccgctcggtggcaatggctgagcaggaaattggtgtgggagaatcagcgtga

SEQ ID NO: 395236 - DNA, 609 bp, Salmonella enterica
atgagcactacctacgaccaattaacagcaaatatcaaggcgtggtgcggaagaaccgactctacgaccctaaacaatattcctcaatttatagcagcagctcaaacggcgttagacagtgaattaacaataggcgaaatgatttcaacagtggcctataacactgacaccacgtcaatagacgtatcggaatttatgacgattcaggaagttttgatttccgggctggtggggacgtcaacaacctacgcagatattacagctctacgccaactggtgagcgacagaccagaaaccacgggatacgattttcactactcgctatcgggaaacggcattgaactggtaaaacccgcacaagtttcagtgaccgggactaaaaaacctgtccgcctgtccaccggaactcagaccaacgcctacacggacggcgcagaaaatgccctcctgtggttatccctgttttattgcgcagcgttcgctaaggacgaggaagcggcgcatggttggtctacgctggcgcagggggagattgcgaacctgaacagcgttcgtgagaaattcaccaaaacagggactgcgagggtaaaacgccgtggatatttctaa

SEQ ID NO: 395237 - DNA, 249 bp, Salmonella enterica
gtggatatttctaaggaccggagtcaccaattgattaaatttctggggtttactggcgtagctgcaataatttcaatagctgtttcactgggtaaaacgcagcaggttatagaagatacaagcgcacaaacaaaacagtcgcaacaccagattgacgaactcaccgctgatatcaaagttgaacagcaggaaataacagacgtggatcgccgcgttacacgtctggaggacaaacagaatgcccattga

SEQ ID NO: 395238 - DNA, 813 bp, Salmonella enterica
atgcccattgaaaacgcaacctatattagtgacctgaatcccgactggcctgtcggttcgtctgattttgtcagtcagggcgatgatcagatgaggatgcagaaaaaagtcctgcaaaacacgttccccaatgccaatgcgccgattactggcacgccgacgcagttaaatcagctagctgctggtatttggtatcaaatggcgtcagacaatcctctggtacctaatatctaccgatttttcaccgactcgacaggggaagtgcaggcggcgatagcaactaaaatccctacactggaggaactgagtgtttcgacaaatatcgcggttgtctggcaaacaataattgattttatttacccggttgggtgccagtacgtgagctacaccgacaaccgaaatccggtagatattttaggcttcggaacgtgggaaccggtatttggcctgattgctggtgttggtgctgcgacagacagcaacggctacactcaaaactattcagcaggctatcagcctggattctggcgagtgcaaaacgggcacattgtagcccagacgttcaacctcgacggagggacaacaaacacagcgggagggcaccaacacggacacgcgacagcaaatagttattggggtgacagcaaccacaccgcgttaatggccggagacggcggagcacagggcggtagcgcaggagatcatatccacgtggttacgggtacggtaacaatcggggcaggaacagcaactgattcgtcagcgttctataacccctactacggggcttatatctggaggcgtaccgcgtga

SEQ ID NO: 395239 - DNA, 1737 bp, Salmonella enterica
gtgacaaatccaaaaatacagcaattaggcgctgttgggctaatgctcgacggagacccaacgcagttaccagaccaggcatttacggacgttttaaacgtccgttttaacggcagagagattgaaccgtatctgggtaatcaatactgcgcctactatacgactgatgccgcaggcaatgttggtgccgaaactcactggttaatccaggtgatcatgttcgacgcgttcagcgccaacgcgtctctactgttttttctgggggtagataacggttcggtaaatatctggcaacagtcactcgctacgccggaatatgggaaattatgcgtaggagaggaggggaactacgatactggatttaccgctgacagcaaatggaccgcctacaaatgccaaatcaacaactgtcagatattcggcacgctggacgcagctcctgtaggaaaacaatacgactggacggggtttgattcattaaccgggtggggtgaacagacaatagtagacggttcgggaaacccaacggtagaaacccgccgctggacgtgccgtaaactggttcagttcgataaccggttgctaatgctttccactgtagaggagtcacagggcggctcagatatcccgtatccaacccgcgtccgctggtcagggtttgcgcaggaaaatgcgtttccaatcaactgggacgataccgcactaaaccgtacaccggaggatgcggccgctgccgtgattgacggttacgccgggtggcaggacctcagtagtaactttgaggtgatggacgccgccgccaatggtgggacactgtacgtctacaccgagcgtgaaacctacactatgtccccgtccggtaacgaccagtcaccgtttattactaaattgctctacagcgatttgggatgtctggatatcgggtgttgtgtcaacgcccacggctataactacgtgttcacgggttcggacgtcgtgaaacacgatagcgtttcgtggaaatccgttgctgacgaacgggtcagagactggctgtcagattacgttgaaaaccacgaaacaggcatggtcaggatgaccaacttccctgagttatcagaaatctgggtcatgatttacggcgaagaccagaatgacggcgactacagcaaaacaatagcgatgacctacaactacgtgaaaaacacctggagccgtaaaaccctgccgtatatcaatgacgtcacgttctgccagatggctcctgaaacgttcccgccatcgtgggactccgttaacgttgtgtgggacgactataatgttgcgtgggatacaggtgacgccaaaacagcgcagggtacgctgattgggtgctgtaacgctggtggcatctattacctgaactatggagatacggagacgcgcagtatcgttactgatggcgtggtgaatatgaccactcaaaacctccagtgttacgtagagcgccgggggctggattttaataccggataccgggagatgattagcgaggtgtacctgaacggacagggggttaacgatataaccctgtcaatcgcctacgccgataaccccgactccggctacagatgggacggccagacatttaccctggtgaatcagcgccgaaccacgtggagagccgagggcgagagccacggatacagactggagattgccggacaggggagtattccggtagggataaatttcacaatcaggaaaacaggacgatga

SEQ ID NO: 395240 - DNA, 681 bp, Salmonella enterica
atgaacagccgcgaactcaaactacaggcgctggctgacgcccggcgccgcgcaaatctcaacgtgagaacaaccagtaacagcagcacagagaacacccagagcgagataaccgaatccccgcccgcagtatatcaggtgcctaatgtcaacgtgccggaaaatctggaagaggccgcaaaactaatccagtcagaactacaaaaaatctcccagagtcaatccgtcctgttaaccctgtgggagaaactgaaatcacaggctgcaaccgctacgggggttgagtttactaaaccagtcgtatttgacgagggggtgaaaatatacggagttccagtatttggctcagaaacggtaaacaatgagattgttgacgacgttgcgtggaacgaggcgagcgggatatataataagtggttcgacaccggtcacggctctactagtctggtgattcagtttttccagagcgtgacctcaagcacgccagcggctcaaattgaatttctttacggaaacggcggggttagatatagaagcgcgagggactcttacgggtttgagaacgactggtcagagtttgcaatggtgagccagatagagagcgcgaaaagggaaatatacgccgaactacaaaaactaaacgacggactaatagttcctgtggtaataaacaaagattaa

SEQ ID NO: 395241 - DNA, 393 bp, Salmonella enterica
atgaaaattaaaaaaatgattatgtgcttgggggggctggtggtgggtggggtatctgcaaaagatttgccattaaacggtagggataacatgaaccacgactatacatgtattggggttagtacagggagggatgccgctctaacggtgcaagaaatgccgggtggggcaagcaccgtactgattgcagaaaatacacccaaaccaatagcgattagcatggtgccaatggatgatcagacgcgtgcgtcaaggcagtataagtttacattcagcaacggagcggaagaggtgctgcttctatcaagcataacggggattgctactgtaacgatgcttaatgcggtgggtatggaggtatttacttcgctggtgtgtcatgaggataggtga

SEQ ID NO: 395242 - DNA, 363 bp, Salmonella enterica
atgcagcatattgaatggttagtgctaccgattacgtttttctgtattggacttgccgtggacagggcgataaacaagcttaagaacaacacgcaatccaaggtagagggcatatataggcacatgaatgacttagaagaaagaatgatgaggcattctgattggaatagggctatatgccaaaaagaggcatacgacaagattaggtcagagtgggaagatgaaaagatagcggcagtggagggcgccgagtcactggaaggggaaagcagggctgaggaaatgtttaggcggttcgatgtgataaggaaaaggtcatttgagatatacccagaaaagaagatagaagattttttagagtga

SEQ ID NO: 395243 - DNA, 594 bp, Salmonella enterica
atgatttttgtctatggtcgcgtttcaaccaaagagcaaaaaatagaccgtcaagaggatgcgtttgacggtattcagtttgatgagtctttttatgatgagggggctagtggtaaaaatctggatcgacctgaatttcaacgcatggttggaaaattgcgccgaggtgatgttgtcgtagtgaagtcgatagacagactgtctcgctcgacaatggactttgccaacttatgggatgagtggaagaaacaaggtgtaagcctgaaggtgttggatctgggtattgaacttactccgggcaatgaaaacggaatgagtgagttcattatcaatatcatggttgctgcggcccagctcgagcgcgggatgattcgccagagacaggttgaaggaatgaaggccgcttacgccagaggaaagggcaagcgtggcgagtcaaagcacgtcacagaggcaagggagcggataaagcagatgaaagatgcagggtttactgatggggatgccatgaagatgctgggcgtgtcacaagggacttactacaaactaaagaaagaagtaatgaatttagcaaaaagtgccgagatagaatag

SEQ ID NO: 395244 - DNA, 177 bp, Salmonella enterica
atgaaactaactgattacattgaaaaacattacgacggaaacaagacggagtttgcacgacaggtcggcgttaaaccaccgcaagtgcatcagtggattgaaatgaaatgcatcgttattgatggcgtcatgtacagcccgcgcagagagctaccgccaatagaactcaaaaaataa

SEQ ID NO: 395245 - DNA, 324 bp, Salmonella enterica
atggaaaagttaattcagcagtttaaccaggtgggtgagcgcatcatggctcaactggcggcagagtacggtaaaaacgcctcttatgtatcagaggcccagctccagcgattcaagcgcgacatgcagcgccgttggcttaagacctgcaacccggtttactcggtgctggtgtcctgctgtgaagtcgaggagacgaaccgtatttttgctggcgacctcgcctggttagagttgcaaaaaaataatgatctcaagctggtgggatttgcagaaagcgagctgggggatagggagccagttttcagcggggttacgctctaa

SEQ ID NO: 395246 - DNA, 285 bp, Salmonella enterica
atgaggaaggcggaacgcgagcacgtcaccaaggtgtcggaattgggttgcgtggcctgctatgtgcaggccggggtttggggaacgcctggagagattcaccacatacgcgaaggtcagggaatggcgcagcgtgctggatggaatcaggttatttgtttgtgtacgaaccatcacagaaatagcggtaatggaaaaatagcaatacattcaggaaagagatcatttacagatatgtacggaagtgaactgtttttactgaatttaacactggataacatttag

SEQ ID NO: 395247 - DNA, 162 bp, Salmonella enterica
atgaatactttacataaaatattaggctcaatgagtttgaatgaactattaggcttaagggatttctgtatgaagcggcagggtaacaatgccgtgactattgcggcaattgataaagaggtgcgactgagaaatgaaagcgttaatcaaaaaaattattga

SEQ ID NO: 395248 - DNA, 453 bp, Salmonella enterica
atgaaagcgttaatcaaaaaaattattgatgtggttaatattagaaaggaaatagcatcccttaaatcttggtcaaaatatttagaaaatgaagttgattatcttaataagaaatcagcaagagacgccattgctattaatgatttgattcgtgaaaacgagttgatttcaggtgcaaacactcagcttatcaagcaagcggcagcagcccgcaacgctgcaaaccggatgcgtgataagcagatgatcaccgcagcaacaccaaaagaacatgagtttcttaatgtctgcgcggctatctacgatagtggcaaggtcatcaagggacgcacattcgcgaccatgatggaagcggcactcaaggagcgacggaacgcatcaacaaaccgcttcgggggtaataatgaaatcagtgcattgtggggcgagcgggttagctcaaagggtaattaa

SEQ ID NO: 395249 - DNA, 225 bp, Salmonella enterica
atgcgaaaagtacggattttaacgttattggcagtcgtggctttatctggttgcgcggtagttaaaagcgagccgaacctgaacgagactgtagcgcttggcggtgcatgtgcagtcaacgtccaggccgactcttatcaggtggcttgtgcaagctctgacccggcaaaggtagtcaaagccatccagtctatcaacacaaaaattaagggtaatggtaaatga

SEQ ID NO: 395250 - DNA, 207 bp, Salmonella enterica
atgaaagttgtcgcaggtttcacggaaagcgccattaaagcgaccgccatcggcgttgctattagagaagcaaaagccccgtcaatggttgatgactggtcgcgctggttcgaaaagcaaccgtgtgatcactggaattgccagggtgatgataagaaaaaacgctgcaccggatgcactgacaagcagcagtgcaaaggcaaataa

SEQ ID NO: 395251 - DNA, 228 bp, Salmonella enterica
atgataagaaaaaacgctgcaccggatgcactgacaagcagcagtgcaaaggcaaataacgtgtttaaaaaggtcgcggggcttggtttcccgcgctacggacaaaaggccgtagcactactaaacgagcgcatcgccaaattcggcagtattcgcgcttaccacgaacacctttccgggaaaacgaaaaatgaacaaagcacagcaggcggtaacggacgtatttag

SEQ ID NO: 395252 - DNA, 393 bp, Salmonella enterica
atgaaaaaatacgaattagtaactgaattatcagaagaatttttgcgcaaaaaactgttccgcattcgcgcactggtatcgttcgaaggggttgaagcgggtgatttaggtggttgggttgaaaaagaagagaacctagaccaggcaggcgatgcgtgggtgtacggcgatgcgcaggtgtacggcaatgcgcgggtgtccggcaatgcgcgggtgtacggcgatgcgttggtgtccggcaatgcgcaggtgtacggcgatgcgcaggtgtccggcgatgcgtgggtgtacggcaatgcgcgggtgtccggcgatgcgcgggtgtacggcaatgcgcgggtgtacggcaatgagtgggtgtccggcaatgcgcgccgctggcatcaaggttaa

SEQ ID NO: 395253 - DNA, 255 bp, Salmonella enterica
atggctggatggtggttgcctgttcctcagttaagggtactaagggcactagaggcgggttttgtgttgcttcattatccgcaaacagacgtttattggtgggtggttggtggcaagtgcacccagcaaggaagggcgctacgaaataaagggctaattactgtcgcgtcggttggttgttcgccagaaacgatgcgcctgacgccaacgggaaaaaacgaactcggatacaaccgacaccgggagattgattaa

SEQ ID NO: 395254 - DNA, 147 bp, Salmonella enterica
atgaccaataacaaattaccagaatggcgcaaagcgttaaataaagctgtagaaaactatcaatctacgcaggcttggtatgaagaaaacccggataacccatcagccgagcaggatgtttacgagcgtctggcatgtgaggactaa

SEQ ID NO: 395255 - DNA, 285 bp, Salmonella enterica
atgaccactatcaccaataacaaactaacagacgaagaaatcaccgcgctggccttgaaattattcgatggttccagtttttattttcaaagtggccgacgccccggcgcaaaaactatggctgaattgctgaataaagcggccagcgctgtcgcagagctacaggaacgccgcaaggctgatgagatgatggttgcagtatgcgaggtatgcggtaggccgtgtaacaacccgaatcacccacaaaaggcggtacgcgcaagcgaggcatataaagccagatga

SEQ ID NO: 395256 - DNA, 258 bp, Salmonella enterica
atgaacacgctctatttcctgatggccgagtttgaaaccgttaccccggcgctatcagatatctgtgaaaagtacctgggaatgaagcccaggacggcagaggataaggcggcaatagggaagttgccgatcccgacattcaggcttggcgatacgcagaaagcgccgcgcctggttcacttggaggatctggcctttcatatcgacaaaatgaggcaggatgccagggatttgcacaataaatttttcccatcataa

SEQ ID NO: 395257 - DNA, 231 bp, Salmonella enterica
atgcggtgcgctttttattctggagggcggatattaccgtctctgagactaaaaaagaaaacgataacaaaaaactacccattatggtgggcttacgctgcgttatcgctgtcattgtacataacgttacaagccgaaaacatagcggcgcttttcaatgagttacatgcggaaggggtgctgtatggggtgctgagcagcaaagaaaaaccccgcaatgcggggttatga

SEQ ID NO: 395258 - DNA, 372 bp, Salmonella enterica
atggctgagattaacaatattattattgatggttcctttgaggatggtttaacagaacaatggcaaattggctcactggttgaagtagaagaaaatgacagcaaccatttttgccgtatcgatagcgctaacgccttaagccagacggtaacgctggagacattcatgacttacgcgatatcttttttaatcacgggaaaccttgttggaaaaattatcgttcagaccacagacagaaccacgacgttttttgaacatgatatcaatatgactacgcaagatgaatggcacacggaatcgctggagttttcgacacaggcggtagcaggcggtagcaggcgaagccgttgtcagctttatcgcgccgggtga

SEQ ID NO: 395259 - DNA, 354 bp, Salmonella enterica
atgaggcctgtgcatttcttcagatatccagacctaccgccacaaactggattcgcacaggccgccttcaggcaacacgtaaagatcccaataaacaaaaatctccttaacggggcatcgttcgacccgcagcacggaacgattcacggcaccattcccccggcgatacagcatctgaccacggaaattctggcggaggagggacagtatcaggtactggcgcgctgggacacaccgcgggtcgttaagggcgtttctttttcgctgcgcctgaacgtggcggcggaagacggcagtgaccggctggtaagcagcgcagagactcctgacacgcagtaccggttcaggggctga

SEQ ID NO: 395260 - DNA, 267 bp, Salmonella enterica
gtgcaggactcaaagctggtttttaaattaaaagtgatacggccttttattaatatggtgacgatccccagccagacgatgtttaccgtctatgtgacgacctctaccggcgacgcgttgagcacgccggtgtataccattagctacagcggtaaagtggaagtaccgcagaactgtgaagtgaatgccggccaggtagtggagtttgacttcggcgatattggcgcgtcgttatttagtcaggcgggggctatagtgaaatattaa

SEQ ID NO: 395261 - DNA, 462 bp, Salmonella enterica
atgaataaatgcaagcttcgttctgtttataaagggggaggtattaatatgaaaaggattgtttctgtatgtgcttttttaattgcagtatgccctttgagaacatgggctgaatggacaggagatagttctgtaaactattattctgatgagattgtttctgattttcatgtcggtcagtttaaccgcagtgcatatttttgcataaaaacagttaaaaaatcaggaggggggacaccaattatagcatgcgcactttcaaatgattctaaatggataccttcatttaaaactatgttagaacaggcaagacatttttatattacaaagcaatctataagagtgtatgtcgagccaaatgtctggagcaataaacgctttattgaagcgttatcatccaatgcacttgttggactttcttcatgtagtgcatctgaatgtttcggacctgggaggccgtag

SEQ ID NO: 395262 - DNA, 1179 bp, Salmonella enterica
atgaaatcgatgataagcccacagttatccaagttgttgtctgatgctaatgatattgcacaatggttacgacacagcgcatctgagcgggatcagacccgtcatatcagcacggagcaggtggatgcctacgcgtcatccggactctgggctgtgacggtacccaaggagtatggcggtcctgattttggttataaagtgctcagtcagataacgcgccttattgcggcggccgacccctcaatagcgcaaattccccgcggccattttcatattattgatctcctcaaggccgtagctcttccttcccagaaaacgtttttctttcgtgaaatcctggcgggtaaaaaattcgctcaggcggcatcggaaatcggcggtaagaatgtagctgatattcagacgatgctgacgcaggaaagaggaggctggcgactgaacggcaagaagtattatgcgacgggctgcatacacgcggactggataggcattgttgccaaagatgacatcggcgtatttatgcatgcatttgtcccgaaagatgcgccgggtttggatataaaggcggactggtcgggctttggtcaaaaagtgacggcaagcggtaccgtgctgttgaatgatgtcgtggtaaatgaagaacatatcattccgtttaccgaagcatttcttgatgtccatccgttaggtgctgtctcacagttgatccatgcatcaattgatatcgggattgccagggaatctattgatgagacgataaaatatatcaggcaaacggcccgcccatggattgacagcggtgtggaaaaggcgagtgatgacccctatcttatttcgggaattggcgatctcgaaattcgttatgccgccgctgttgcgatgctggatcaggtagccggagaactggatgaaacagtaatcagcaccgacgccgatcttgcccggctttccgtgcgcgtggggattgcaaaagtactggcaaacgacattgcgttattggccagtaataagctttttgaatttgccggaaccagttcaacccgggaatcacttaacttgcaccgccactggcgtaatgcgcgcacgcatacgctgcatgatccggtgcgctggaaggttaatgccatcggccagtactatttaaacggcgtttatcccaaacggcacaattacatttag

SEQ ID NO: 395263 - DNA, 2358 bp, Salmonella enterica
atgagcagtttcctctccaacaaggctaccagcctggtacatcagcttttagggcaatcacggtaccgggttgatgtgcatgaatgcagccatttcctggatgtgttgcgttacagtgcggtggagtccctcagccagccctggcgctatgatgtggcggtgacctgcacctctgcggatattgcctgtgactcgttactgttgaagcccgcgtcattcactttccagacacccgtgtttgacggaacaccggccctgcctgtaaggacggtattcggcgtggttgagtcgtttcgccgcgtgtctacctcgaatgatgagacccattacgcgctgacgatcgttccccgtattgcccttctgggctatacgaaagggagcgagatctacctcaatcagtcagtcactgaagtggttgagcaggtactgcgtaaacacggtctggaagggcctgattttgagttccggctctcccgcgaatacccctcccgggagctcatcacccagtggcgggaaactgaccttgagtttatccagcgcctgctggcggaggtgggcatttactggcgctatgaaatggacagccgtcttgaacaggacgttgtgattttccaggacagccagcagcagtatgaatttggtgtcacgctgccattacgcaaccaggccgggatgagtgacagcgggcaggagagcatctgggatattcagaccgcatataacgtggtaagcggaagtgtggccacccgtgactacaactaccgtgatgcactgacgcctcaggacagcgccgaaagtattttcagcaaagaggggatcacgaccggggaaacgtatcattacgcggaacccttcctgacggcaggtgatgctgatagcccggagaccggggcatacttcgcccgcctgcgtcacgaacgcattctgaacgcgcagtatcgcgtcagcgggcattcctccagccctcatctggcgccggggcaggtactggaaacagatggcacgttgccggatgcggtgaaagacggaattgtcatcacgaccgtacgtaccagcggttcacgcaaaagtagctttacgctgacgtttgagggtatcccctatagcgaaactgtctgctggcgccctgcgttgcttaatcgcccggtgatatccggctcgctgcctgcccgggtggaaagcacacagaaaggcgacacctattcctggctcgatccgcagggccgctaccgtgtgaaactggactttgaccgcaacagtcctgaacagggttatgcctatttgtggctgcggctggcgaaaccctatgccggtgatacgtacggattccactcaccgcttatcgaaggaacggaagtggctgtcgtttttgacggcggagacccggatcgtccctacatcgcttatgccctgcatgattcagagcatccggaccacgtcaccagtgacaaccatacgcgtaacgtgtggcgcacgccggcgaacaataagctgcggatggaggataagcgccaggaagagcatatcaagctcgcgacggaatacggcaaaacgcagctgaacatggggcacctggtcaacagccagcgtgaaaaacgcggcgccggttttgaactgcgtacggatgagcatggcgcagttcgtgcagcaaaaggcctcttcctgacagcagatgcgcaggccaaagcgcaggggccggtgcttgaaatggccccagccatcaaccagattaaccaggccaacagccagatgcaggcgctgaacagtgccgcagaagcggccggagcgctggtatccgatatcagcacccaagtcaacctggtcagggacaggctgaaggatcttcagtcggcggtactgctggcgagcgccccgcagggcgtggcatttacctcaggtgaacaccttcagctcagcagcgcccgcaacacgatgattaatgcaggccagcaccttgatatcggagcgatgaagaatctgtccgtgagcgtggaaaaagccctgggaatgtttgtgcataaaggcggggcgaaggttgtcgccaaccagggagacatcgagctccaggctcagcacaataccatggcattgttttcagaaaagcagttgacggtgaccagtagcgaagacgaaattattatcagcaccccggaaacactgacgcttaacggtggtgggtcatatctgcgcctgagtaagaacggaattgaacatggatctgaggggataatggtgatgaaggttgcgagctacctggtgccgggcacaggtgccagccagcagatggaaacaccggactttaaaacgacggacgtgacggtcactagaaaaaattctgccaaatggacgagtgaataa

SEQ ID NO: 395264 - DNA, 2715 bp, Salmonella enterica
atgactgcaaagatgcccaaaatcagctttcccgtgccctcaaacaaaaatggtcatcccttttcctcagcggaagagctgttatcggcgctcggcggagaaagttcaggactgtatctggtgggaagtcagggaatgtggcacggcggtatccatattaccgatgcaaccatgccctggtgcgccctgagcactgacagcgcagcagagagtgaatatcgccctgagctttataaaggcgaacaatttattcgttgtatggcggatggtgagattgttgcctggcgtgtatgtgagagctatgaaagtgccgggattgactggcgtggtgaaaaacttctcctttcaaactcctttgtattagtaaaacattatattcagccgggagattcagtagagagtgggctgacgttttttacgctttatatgaatatggcaccctatcttgcctacaaacaacagggaaatcagctcgacagaaaagtggcaggtgttcagcgctattacaccagtgtggaagatttacaggcaggacacgtaaccggaaaactggagaaagacacggtagtcacgctgagtgacaccattgtgacccgcagcagtgacaagcgccagtttactgaagtgaccattaccagtgagacaaaaaatgcagcggggaacacacttgccgcaggcactaaagtctggacggtatctgaccagggttctctgaaagttgcggcgtcagcgcctgttccgtcctggtggacaaaatgttcaccggcttacactaatcagtcagaaagcgtagtgaactgcacttcgcgtacaaactgggcgtactatcttagcagtgacgatgttctgcaatataaaaatgcaggcagcctggtagccgatttcccgctttcatacgagcccgataataccgcacaacaggtcatccgccccggcaagaacgccggtgatgcagaaagaacattcagtctggtcactctgggccgtgataaggataagttgaaaaagggcgaccgggtatgggtagtctcagacggcgacagtctgacgccggttgcaccggcggcatccagtagtgaacctgtttttaatggggtgtatgtacctccaacgcctgtacctgtcagtgccggagacagccttggacatttgggtttttatcagctcccggaagaaaatggcaaacgctcgcgttatcaagtgcatattgaatgtctgagcatggatgatatggagaaattcatcaccaatccaggaagggtgggggaagatactccggtttatctgacgtggcaagccgatgcaccgttgtttgaaaagggtgagcaggggatggttgcgggcagtcgtaaaacaaagatatcgggtattgttacgcttgcaaaagtgccgggtgttgatgctgcgggaactgcactgtccgataacaaagatgcggcttattttcagatacgtcaggaaggtggctggttacctaccgccagtgttcagaaagtatcgcaatacgcgttaggcgaactgggctttgccacgctggataaagcccctgcgagctttgacctgattgatggtataaatcagccgaataatgtggtgaaagggattctggagcagttatataaagcggcgcaggaggaaacccgcaccacccacgcactcaataagtacaactacaagcgcctactggagttgattgacagtaaccaggatgggtattactcggagcaggagtaccttcaggcgattcacaatgtttcctaccgtgaccatctgtaccgggtgatagcaaagcatgccagtgaatggtactacggcaaggacgatcaactatggaagacctatctggatacgttaaccacggatgcgccgttgtggaaaacgtatctggaagtgtttctggataagatgacgtggatgaaagcggcatctgaaaatggggttgcgctgggggcggagccgtggcatatgcatccgattgcatttttaaatgctataaagaaaggaaaagccaaaattacacgagagatgctcaggagaatttggcctgatccaagaaatgtttctgactctgtccttgatgttgttgctgaagaattttcaaataaatttgatatgtgtaatattaatactaggagtagactatatcatttcttcgctcaaatatatcaagaagtagggcctgctttcaatttgaatgagggttttaactacaggccacaagtgcttatagataaatttgcatattatcgtaatcactctcaagatgctcaagtggatggttttattccgggaaggcaagcagcaaataaacaaaacattgctaacagggcatatggtgggcgagaggggaatgatgatattacaagtggagatggatggcgatatcgtggaagaggaatgaaacagttaaccttcaagaataattatagatcttttacaaattatcacgaaagagtttggggtgaacgtattgattttgtaaccaaaccagattttttagttgaaactgtttatgcggcaaggtctgctttgtacttttgggatcagaataatttatacagtagagctgataatggggttagtagaacagtgtcggactcaataacgcgaattgttaatctttatgataatcactatgaagatagacataataatttaataagattcttgcaagaggggatttttgatgagatatgtttaaaacattggtgttga

SEQ ID NO: 395265 - DNA, 855 bp, Salmonella enterica
atgtttaaaacattggtgttgatatttgttttttcaacagaattatcacatgcaatagattttaaattatcatcatctgaccaagttggggatgtaaaatatttttcgttgcgagtgcaaaatgataatgaaattaaaaatatagatgtgggacttgaaggtaactccaataatgctgaaataaaacaatactatagtttttcttgtcagtggggaaaggcttatggagtcagattaaacatggattcatcctctattgatgggccgttattatttgatagcatatatgtgctagatgagaaattaaatatagtttttgcaaaatcctatattcgcatgagtaaacaatgggttgatccagtcagcttaaatagtgcggtttgtaatcgttcaggcggtgatttaaaaaatgatccgacaactaaaaaggattatattgcaaacttcgaagctatacagcagggaccttttgttttaaaaggcattaatgatatagtgattaaatatatcagagatgattctttaaatcttattcgtgaagatgcaaatggtgaggttgttatcgatacaataaaaaaccatgacaacaagtcgccttcggttcgcaccgttttttttatgaaaattagttcagaaatgaatgttattagccttgtctcctggggaggggatatagacgaaggtgattattataaaatatatggatatacatatgatgaaacagggcatttacgtcggaatactaccttagataaagattctaatttatcaggttataatacaaatcaatcttcatttaaatataaaaatgcgaactccataaaagaatacttgattaaaaaatatggttcctaa

SEQ ID NO: 395266 - DNA, 177 bp, Salmonella enterica
atgattcattgtatgaatgcagttgaagatcaggagcagttgttgtcacgtattgcagaaaccagaaaggactattaccgttctttaaccataactaacggtgaacccaatacacagattagattcctcgatggctggataaatagagttaatgattgtttgggggttgacatatga

SEQ ID NO: 395267 - DNA, 1215 bp, Salmonella enterica
atgaaaaaaatattatttattttagcttttatttcatttcattcaatggctaatttttccggtcattgggttaatgagaacgactcacaatcgctaacattggatttagtcgaagatagtactcatcttgcaggtaaatattgttttataactaaccacggaaatagaattgactgttctgagggtaatgatagaaatattaacggtgtaatcaaagataatgttggagttgtggactttaaaagtacatttggggggattggtcaggcaactatatcaattgaaagggatcttcttaaatataccattactaatcccactccatttgtaaatgctaatatgtctgtacctaaggtgatattatttaaaaaaacagtgcaagtcacaggaaaaaaatcctcagcacatgaaaaatacgatgctgatgttataattcgaacaccaactggagggagtttgactttctcacagaaaaaaaatggtgaacattatgaggataattcatggggcaaaattttattttccaataaaaattactctgctgatctcagtcgggatgaccgtttttacattgaggatggctcttcaaaagtctcaccctcaggaaaatacctgattgttaatagtgtctcaggtggaactgttgagttcggagatggaacgtcgaagtatacagaaagggcttattgtagtgttgttgatatgagcaatggttgtattgtaagtgactgggatggagaagcatgcgagtatacctgggttgaagggaaggatgtactggccagttctgaagaagttggcgctgatatttttgatttcaattctatgcgaccttcaatcattaaaatgaaagacaaactttctttgcttgatgccagaggtgtaagtaatttgctccgttgtgatgccccctccatagaaaatatagataaataccaacaattagcaagggagaataaaagtaataaaaaaattgcattagatgcaatattatcattcttgcacagccgtaaagaagaatcatcagttattgaaagggcaaatttatttgccgccccgaacaatagcagccaaactaaaaattacctgatccccggtgataaaataaaagtaatacagtactcatcagataggaaatgggtgaatgtaggttacattaatcccaaaaacatccccctaatcacttggatcaagtccgatactatagcccaatga

SEQ ID NO: 395268 - DNA, 264 bp, Salmonella enterica
atgctccagattatccgaaaaggcgataaaaccactcacggtggttcagtcttgaccggttctgccacaatgatatttggcggggttggtgtgtcacgtaaaggtgacaaagtttcatgcccaataccaggtcatggtcctacaacgatcatagaaggtaacccggagtatcttgataacgggatcccagtagcctttcacggccacaaatgcggttgcggctgcacactaatcagttcttttgtacaagcgaaggttgcctga

SEQ ID NO: 395269 - DNA, 1209 bp, Salmonella enterica
atgcccgtcttgctggatgccatccctgagaaggcgacgaaggtgcagcgacccgatacccgccgctggctgctgttcctggcatttgtcatgttaggggggattgcgttagcgctctggaactggacgacggagcgaacaggttttattttctggtttactgcgctgggattgcccttctgcacatggggacttcttttctcccttcgacggttcgcatataaagcagagcaggttgggtctgagtccaggaatgtggaacgagagaaattaattgaatgtgaaacgcgccggggtcagcgctgcgcgtggatactcggtacttgcattcaacatatttccggcaataaaccaggtatgctgggtaatgcggttatgcatcccacaccgacaaccggaatatccacgccacgtggaggtaccgctgccgtcagatatgcagccctcacggcctttcagaccgacttagagaacgaaatcatttctaccgcgtccacgctcgttgcccatgtaaaaaaaattaccgacaccctaccgaaggatattccctgctgtctgatgctggactgcgacgacgatatcctggaacaggtggagaaacacctcaaaaatgaactcgctgcaaaaacaggacgggttttcaggcttcttgcgggcaaaggtcttgcagcgtttgatgcctggctggataaccgatgggagcatccgggcattcttgtcgcagtgacgttttcattgccaacgcagcctgatgaagatgacgctgatgcaattactcttgtggtactcagcaaccgtaaggctgctggctacccagatgcagtatgccttcatcgtcctgaaaagggtcttgaacacacgctgggaaaaacactgcaacgggcaatattgtgggccgggaagagttctgaagcactaaatgctggctggcataccgggccagtcacatccagaggaagcgcgtggaataaagcctgcgaagataacggagtgacgtttagcttgtcagaagacaatcgcagtattgatccggctctgggatatgctggtcgtgcaggtccctggcttgccatcattcttgcctcggcagtctgtaaaaagaatggcgatcaagttatcgccgcacaacccgccgctgacaaagacgacgtctgggtagccgtcatcaccaaagaagaagttcgcaagggaacgcccaaaaatggctaa

SEQ ID NO: 395270 - DNA, 444 bp, Salmonella enterica
atgaaaaaattctttttccttgtactaatcccagcattttgtaatgcaaacacttctactgtgttcaaatcttcatgcagtggcattcaatacagtatcgaatcattttgtagtgtaaataatcttaaggatgaccaggataaacttgatataccaatttgcagcaaacaaacgttcgtgcttggtaaggaaaatcatgatctatcaaagtctacaggttttgtagaacaaattaacagcaaaggcgaaaaaataaaaatgatgaatttcgtcttctacggagcctcatgtaaaaatgacaggattattttatccggctcaggcggttgtaattcatgtggtgaaacgttcaagacttttaatctatctggaaaagaaataaaagagaaatccaccacgctagatttagagcctatgcaggatatcatccccaatttttattaa

SEQ ID NO: 395271 - DNA, 252 bp, Salmonella enterica; identical to SEQ ID NO: 395081

SEQ ID NO: 395272 - DNA, 936 bp, Salmonella enterica
atgactaatcttgaatacacttcagattattcacatcctcattattattcaggcaatgtgttccactcaaatcgctatggtcgttatcgcattcttggcaaactactcaatcacaaccgccgtggttattatgtcattcagtttgaagaaactggacacacaacagaagcctattgctcagctatcaaatcaggaaaggttgcagaccgttcatatgacttcggcaatgaagatgaacggcgagaagcgttaatgcgtcctgttattcatggtgtgggctatatcggaattggacagtatcgtacctatattccctactctcctgagacttatgggcaacgaacaaaagagtatgtactctggcaaaatatgattgctcgttgctattacaccataaaaggaaagcaggttcacaaaggatacaaaggtgttgatgtgtgtgaacgctggcattgcttccagaacttctgctcagaccttccggcaattccgggatatagcaactggaaagataatccagagaagtatgaatttgacaaagattactcccatcgtcgtcattattcatcagacacaatgtgcttcattccagtgagtgataatgcaaaagaagcgggcttgagaagtcaggcaatgaggatatctaaatcagattactactccattaacaagaaccgagaatctcttgtcgaagaagcaaaagaagctttgacgaaggactggattccattctcaatagtgatgaacggcaacactcacaccattatcactgacacaccatatgggacagtaatcttcttcccattaacgaagaagataatgcgtcattgtttcctcattgatggtgacgttcatatcttcattcagtatatcgactggctgaaacagcaatggagagaaagaaatccatccatagattgttacgaactgagatag

SEQ ID NO: 395273 - DNA, 258 bp, Salmonella enterica
atggcactttccagagcgcagcatgaagccaataaagccaatggctcatatcaaacagaccgacacggaaatcgtgttgctcctgctcttgcacgttcagctcgctccactgatgtggtggttggtgaacgtcatcgcccttctactggcatagacaaagatacgttccatgacccattaaagcttcaaattgcttctctccgagcatgtggccgacaggcggaagccgaccgtctggaaggtattgtgagacgctaa

SEQ ID NO: 395274 - DNA, 336 bp, Salmonella enterica
atgaactcacctcactacttttcagcaaaagcgttgaatgatgaaattattgcccgtcttttaaaagacgaagaccgtctggttatcagcaaaagttttagcggcaacaatcattgtgggtggcatatcaccgcaccacgttatctatggataaaagcaggtattcatcctgtctggattcatgaagcaaaaggcaacaagttacaatccaaagttggaacaaagcggatgaaacgagcacgacaattactttctttatctttgcaagaaaataaatcaatctctttcacccagccacttccggcacaagtattccattccactctcaacgtataa

SEQ ID NO: 395275 - DNA, 408 bp, Salmonella enterica
atgaataatctcatgccttcatccccttcttctcaagcatccagcagcaaagctgtaacagatactttcatgccacctgatgaaataattaatgagacacttatctcattattctaccttaccagtgaaggtggttttatgagtaaagatactcgcatcgttaatcatcgcgaactaaataaaaaagttcagattgaattggtcattaatggctattcattctggatggatgcgaaggaaatctcactccgacttaatcaaatgcagcaacgccgccttatgtcagaccgctccatttatttcatttcaggctctaatggaaagttccgctgtaatcatcggattaaatcatggaaagaaatgcaactggaacaataccaggatatgtccagaggttttatgcaatga

SEQ ID NO: 395276 - DNA, 522 bp, Salmonella enterica
atgatgaaaagagttaattacagaattgcatttcttctggcaacactttgtctaacgggatgtgctgggtgtcagtatatctcaggtggaattgtttattgcccagataacaaggctgaaaataaatctgtaccccataaatctcaggattcagcaccaataccagccaaagcagtaacagcgccaaagcccaaggagttgacgcaagagcagaaagagcaaattgaaaagctaaagaagaaagcagataaaagatgtgctgtattaatgcaggatttccaaagtaaatatgatgtgaatcatcctcgacttctttctgtccatggtaataaacaattagtggtttgctccattcaatacatggcacctcaatcttatggtgccaatgcgccagttacgataatccttcaaggtaactcttgtgggagatgcatacccttcgggggcagccactatggaaggtcggtctggaacagacgaattgtattacgattgtcagtgtctggaatcttccaattgtaa

SEQ ID NO: 395277 - DNA, 1626 bp, Salmonella enterica
ttgggggggaattatttaacaactttatcttatggccgtcaggacattgatagccacgatcctgtacgtcgttgtgatattagtcagacaagatcagaaaatggtaaattagtgctggggtcaacgaaaactgaatatgatgtccagggaaatgctatcaggcaaattattcgcgataaaaacgatacggattatgctattactcggtctgagtacgatggtttagggcgccttcgtaaattcatcgatacatctggatatgttacggcgttaacctacgatgagtttgatcgcatgctgtctaagcgactgcctaataaagctctaattgagtggacctacgcttcatacactcctgaaaattatccagtcaccattgcgttaaatggtgtacaggtgggtagccaaacttatgatggcttaggacgtctgacggcaatatcctctggtgggcgtgtcagtagcgcgacctatactggggcaaatgacacgccagatactaccatggatgcgatgggccaaaggattactcatacgtggatccctgagcttcatagcgtacctgataccattgtgggccccgattttatgcaatccttctcctacgataatattacaggtgctttattggaaagttctgaaacgggaagtcgttcaacgcaattcaaatattatccctctggcctggctaaatcagagaaaataacagatagtgatataccgatggttgaaatggagcgatcatggtcattaatgggtatgactatgacttacagggatatctccaataatatcgttaatattgcttacgataattatggtcgctatttaactaaaactgacccagatgttacttctaccgtgcgctatgatgatgttggtagactgtattaccaaaaatctacaggctattcagatgaaattattattgagcttggactggatgatttcagccgtgaacatacccggaaaataacttcatcttccggcgaggtaatgaaaatcacccagaattattatccaaacaatcagttaaaaacgcgtgtaactgctgttggcttaaatgtaattcgtactgaaaattttgaatatgacgaatgtaatcgcctgatacattattactgtgaaggttcatctcctgtagtcgatgcgtataataatgctattgcgcaacaagatttcactttagatgattataataatattacctgctgtgttacgacgctagttggaggattgaaagataccgcaatatatgaatttacgaatccagacgatccttgccaacttatcacggtaacgcattcgttacatagccattatccagccagctataagctggagtatgaccataacggacgaatgacaaaagatgaagcgggtcggaccctacattatgatagtactggacgattagtccaggtattgagtgatgatgaggaaagttattatggctatgattcagataataaaattataaagcaaatctctaatcagggtaaaaatactgcgctgtattatctggacgatggaataatcagcgaaatggatacgcattcaaataaacatacacgcttggtttctggcgccatgggaattattggcgttaatgacgacgctaaataa

SEQ ID NO: 395278 - DNA, 402 bp, Salmonella enterica; identical to SEQ ID NO: 380884

SEQ ID NO: 395279 - DNA, 363 bp, Salmonella enterica
gtgaaacaccatcaaataacagcatcaatggcgaaagatattgcttttaaacttggcgctgaactgaacaacgaagaagcagaaattttttccgatggttataacgctgccatgcagtcgttcggtaattacgaacgactcaatcaagcaccagtcaagcaaccatcaagcgatgaggttattggctggttgcgtagcgattacaacagcgatgacaaacgcgatcctaacgctccgctatttatgttgggcagtaataacccgtctgaaacgtggggagtgaaatatatgcctctaactggcaactctccggtaattccgggtgtttatctggctgatattaataccgaccaccagcactga

SEQ ID NO: 395280 - DNA, 180 bp, Salmonella enterica
atggcagattttagcgcaacaaaaagaaccgcgtcccttgaagattggggcgaagcactggaatgcatggtcgagttaaacggtaaatcattcgacattaccgaaatggagattgaagccgcctatgaggcatataagcgggttgatgattttttctatgacgaatggggcgacgaataa

SEQ ID NO: 395281 - DNA, 1314 bp, Salmonella enterica
gtggataaagttatatatccaacaggcgtcgaaaaccacggcggcagtctgcgcatttggtttaattttaaaggtaagcgtgtcagggaaagcctcggtgtccctgacaccgctaagaacaggaagatcgcaggggaactgcggacatcggtgtgttttgccatccgcacaggaacctttgattatgcaacccagtttcctgactcccctaacctcaaggcttttggtgtaagtaaaaaagaaattacagtgaaagaacttgaagaaaaatggctggatctgaaacggatggaaatctgcgcgaacgcattcaatcgctatgaatctgtcgcaaggaatgtagtgccgaggatcggaggtaatcgactggtgtcaacagtcaccaaagaggaattgctgtatctcaggaaagatttgctaaccggttatcaagttccatcgaaaggccagccaccagcaaaggggcgaagcgttgttacagtgaactattacatgactacaatagccggaatgtttcagtttgctgcagatcacggttacttagaggtgaacccattcgagggaattaagccactgaaaaaagccagggcagagccagatccactaactcgtgatgaatttattcgcctgatagatgcatgccggcatcagcagacgaaaaacctgtggtcattagcagtatacacaggaatgcgtcacggggaactggtctccctggcctgggaagatatcgacttgaaggcgggaacaattaccgtcaggcgtaattatacgaaacttggtgaattcactctaccgaaaacagaggcaagcacagatcggttagtgcatcttatccagcccgcaatcgacatcctgaaaaatcaggccgaaataacccggttaggtaaacagcatctcattgatgttcagttgcgcgagtacggacgttcggcgacacatgaatgcacgttcgtttttaatccgaaggtggtcaggagatgcgagcaggtcggttttatttataaggtcgattcggttggcgatacgtgggaagcggcacttaagcgcgcggggatcagacacagaaaggcgtaccagtcacgacatacgtatgcgtgctggtcattatctgctggtgcaaacccgagtttcattgccagtcagatgggtcatgcgagcgcccagatggtgttcaatgtttacggtgcatggatggctgacagcagtgcagagcagatcgcaatgctgaatcagaagctggcagattttgccccattgatgccccatagccaccagagcagtaaaggagcattattaaaatcagtaagttaa

SEQ ID NO: 395282 - DNA, 546 bp, Salmonella enterica
atgaaagttatcaagactgatattcctgatgtgctgatttttgaacctaaagtatttggtgataaacgtggctttttcatggaaagttttaatcagcgagtcttcgatgaagctttagggcacaaagttgagtttgttcaagataatcattctaagtctagtaaaggcgtgcttcgtggcttgcattatcaacttccaccatatgctcaaggaaaattagttcgctgtgtagtaggagaagtctttgatgttgctgtggacatccgtaaagattctgaaacttttggtaaatgggttggtgtaaatctttctgctgataataaaaaacagttatggatacctgaagggtttgctcatggattttatgtattgagtgaaactgctgagcttttatataaaacgactaattattataatttactatcagatcgagggatcatttggaatgatagaagtataaatataaactggccaatctccggagatatacttctttctgaaaaagatatgaatcatggaactcttactgaaacatccaatatctga

SEQ ID NO: 395283 - DNA, 900 bp, Salmonella enterica
atgaatattctcctctttggcaaaaatggccaagtgggttgggaacttcaacgctcattagcgcctcttggaaaaattattgcgcttgatgtccactcgaaagattattgcggcgatttcagtaacccagaaggcgttgcggaaaccatacgtcgaatccgcccagatgtgattgtgaatgcggctgcgcacactgctgtagataaagctgagtcagaagttgagtttgcaacactgctaaatgcgcgaagtgtcgaagctatcgccaaagctgcttcagaaacaggggcgtgggtggtgcactattcgactgattatgtctttcctggtacaggggaaacaccatggtgtgaagatgatgctactgcaccgttaaatgtttatggtgaaacaaaactgacgggggagaaagctcttcaggataattgtgcccggcatctaattttccgcaccagttgggtttacgcaggtaaaggtaataactttgcaaaaaccatgcttcgtttcgcaaaagagcgcgaagaaatgtcggtgattaacgatcagtatggtgcgcccaccggagctgaattgctagcagattgtacggctcatgctatacgtgtagcgcttaaacagcctgaggttgcagggctgtatcacctggtggctggtggcacgaccacatggtatgaatatgcagcactggtattcgatgaagcacgtaaagcgggaatagaactggcaattaacaagctcaatgctgttcctaccagtgcatatcctacccctgcgcgacgcccaaataactctcggctaaacactgataaattccagaaaaaatttgatctggtattacccgagtgggagattggtgtaagacgtatgctggctgaattatttacaactacgacagtttaa

SEQ ID NO: 395284 - DNA, 1086 bp, Salmonella enterica
gtgaaaatacttgttactggtggggcaggtttcattggatctgcagttgttcgtcatattattaaagatactcaggataccgttgttaatgtcgataaactaacctatgccggtaaccttgagtcccttactgaagtcagcgaaagtcatcgctatcacttcgagcatgcggatatctgtgataaagcggcaatggagcgcatttttgtcactcatcaaccagatgcggtgatgcacctggcggcagaaagtcatgttgatcgctctataacggggccagcagcttttattgaaacgaatatcgtcggtacttatgtattactggaagccgctcgtagttactggaacgctctggatgtggaaaagaaagcggcgttccgtttccaccatatatccacggatgaagtatacggcgacctgccacacccagacgaagtatctgccggtagcgtgttgcctctgtttacggaaaagacagcatatgcgccgagtagtccgtattctgcttctaaggcatccagcgatcacctggttcgcgcatggttacgtacctatggtttcccaacgatagtcaccaactgttccaataactacgggccgtatcatttcccagaaaagctgatcccgcttgtgattcttaatgcgctggaaggtaaggcattgccaatctatggtaaaggcgatcagattcgcgactggctctatgttgaagatcatgcccgagcactgtataccgtggtgacccaaggtgtagtcggtgaaacctacaatattggtggccataacgagaagaaaaacctggatgtggtacaaactatttgcgatctactggatgagattgtacctaaagaaggggcttaccgcgatcaactgatctacgtcactgaccgccctggacacgatcgtcgctatgcgattgatgcagcaaaaatcagcgatgagctgggctggaaaccgcaggaaacatttgaaagtggtatccgtaaaacagtggagtggtatttgaataatacccagtgggttgagaatgtgaagagtggcacttataaaacctggattgaacagaattacggagagcgtcagtaa

SEQ ID NO: 395285 - DNA, 288 bp, Salmonella enterica
atgcgtaagttgatgttagcagtaggtctggcagccctgctgtcagggtgtggtgatgatggggtttatggcaactacgtcaaccagcagtatggcatccagcttgatattcagaaagactcgatcaagttcaaaggaacgacgtataacgtaaaaagctgggatgagagtaagaaaccagtctacattgccaagacacaggtagagggggttggtccgtggacttttaaaatagaaaaagtcaaaggcggtgtcgtttatcttggcgcagtgtttaaaaaggactga

SEQ ID NO: 395286 - DNA, 330 bp, Salmonella enterica
atgcatgaagattttgaaagtaggttgtctgtatatacagataaagattacttattagaaagtgatgcttttaatttaaatgatgaacaatataaaaaagcattaaagatgtatttatatcaaagatgctttttttacatacaagcgaacgcagagttagatgttaatatagatagtctttttgatgtatatactgattattttgtagagcaaagaataatcaagaggatatatgattttatatgtaataacgatactgatgaacaatatgctgaacttaattttatttattctgatttgttcaataaagacggagggaaaatattatga

SEQ ID NO: 395287 - DNA, 291 bp, Salmonella enterica
atgaatgtagaaaacttaatgaatagtatgactatagaatataagctcgaaatactagcaagatttttttattacatagaacaaaacaaagatatttcatttaatgaaatcaatagtgatgagcgagagttatgttattttgtggcaaatagatacattacagaaaataaagctgatgaacttattgaagcattgattattgaaaatgataacgactacataagagcaacagatgattacattattatgaggaataaagaatgcgaacagatagaaaaagagggcgtatag

SEQ ID NO: 395288 - DNA, 387 bp, Salmonella enterica
atgcgaacagatagaaaaagagggcgtatagaattaaatcacgaagaacgcagagatatatctatacagtttagagtaaacaaagcagagtttgaatatttaaaatcgttagtggaagcctctgggcttgaaagaggccattacatacgaagagaaatattaaaatctgaacctgttgtaagaaggaaaattccagaagttaaccagaaaacatatatacaactttcagctattggcaataatataaatcaatcaactaaaaaactaaatagcaatgagtattttgataaaaatgaatttgataaacttatgtttaatataaagcaagttagcagaaggatattagaaataagcaaggatctaaattatgaaggcatacgtagctaa

SEQ ID NO: 395289 - DNA, 1470 bp, Salmonella enterica
atgaaggcatacgtagctaaatcaggtaaatcatttaaaaatagagttgattatatattaaaagatgatcacagttttatttgtagtaatatgtcagcagataaaaataatgttagtgatttaactgatgagttcaagactgtaagcagctttagacaagatataaaaaaaccagtgtttcacgcttttttatcagttcctcttaatgaaaaattaacagatgagcaatggcaagagatagcaaaagactatttgaaagaaatgaatattgatatagaaaaacatcaatatatttgtgtgcgtcataaagatactgataaagaccatatccatatagtcgctaatcgagtggctttagatggttcggtatggcttgggcagcattcagcatttaacacaatagcagcttgtgaacgtttagaggtaaagtacagcttaaccatcaccaaaggcttacaggggcaaaaatcagaggtatcagcaccaaccaaagcagaaattgagatggcacttagaacaggagagaaaccagctcgtatagttcttcaacagaccttacaagcagctatgactgataaaccagacttacagacttttattgaaagaatacaggccgtaggcattgaaccccagttcaatgttgccagcactggcaacgtagcgggttgttctttcagtgtgggagatgtggcatttaagggatcttcattaggtaaaaaatttagttggaacactattaaaggtaaggtgaaatatgacaaaaatagagatgatgaactcgttagaagattctcagcaagaaaagcagatgacgaaaatagtattggacgatcacctattgaaccaaatatcaatgacgatagaaccattatcagaatcgatgatgatattatcggaatcggtcagcacagtattaaatcagacacaacagacactaaccagagtgaacaactcattagaagcaacaacaaccgctttaaactcagcgaaaaatataatagaccagcaagccataaagttagaagaacaacacaaaaagctgcacaaatactcaacagagttaaaaaacagtactataaagaatcaatcaaaacttataataaaagtcgcttcaatagtgggcgtgatacatttagtggcggttctatcagtaggatacttgatcatgcagaaacagccacaacagccacgagtagatttagactcaaaagcggtagcagtttcaatagtagagcagctaagatcgaagaaataagagataggcttggaataaaaaaaccagttattcagccaaagaaaatatttaaagaagaaataaagaaaaagcctttgggattgagtatggatgaaaatagatttaaatcgaagataaaagaagcgcttaaaaaagaaaagccaaagaacgaaacaacactactacagcaggaagacaatcagcatttaaaatctcttggttttaaaccgctataa

SEQ ID NO: 395290 - DNA, 1275 bp, Salmonella enterica
atggcgctgactgacattcagattaaaaacgcaaaaaccccagaaaagaagatcaagctcactgatggtgcaggtatgtatcttctccttcatcctaacggttcaaagtattggcgtatgcaataccggttcgacggtaagcaaaaaacctatgcaattggtgtctatccctccgtatcactctcagaagctcgtacaaagcgtgatgaggccagagcgatgattgccgctggtgtagacccttctgaaaaaaaacaggctgtaaaggctcaggagagcgatcattttacgtttgaggccgtagctcgtaactggcacaaaaaaatgtctgttgctgagaggtggataccgaaacacagcgaacgcattttaaacagtctcattaatcatcttttccctgccataggctcgcgagatgttaaatcgctgaaaactcgtgatctgcttttacccttgcgaaaaattgagacgaaaggccaacacgaaacagcttcacgtttaaaacagcgtattaccgctattatgcgttatgctgtccaagaggatatgattgaacacaacccggcggatcaacttgacggaacactgacccctcccaaacgaaaacattatccggctcttaaacttgataaaataccggacttattaagccgcattgatgcttataaaggccgtagattaactgtattagctttaaagctaacaatgcttgtatttatacggtcgagtgaattacgcttcgcccgctggcctgaaatagatcttaaaaaccaactttggattattccgccagagagggaagaaataaaaaatgtaagattttcagaacgtggttctaaaatgcgtattccgcattatataccgttgagcaatcaggctattaatgtattaaaagagttgaaagagatcagttatgatatatctgatggtaaagggttaatttttattggttgccacgattataaaaaaccaatgagcgaaaacacaataaataaagccttacgccagatgggttatgatactaaaactcaaatttgtggacacggtttccgcacgatggcttgtagttcattggtagagtctggaatatggacagaggacgctatagaaagacaaatgagccataaggagcaaaataatgtccgtgctgcttatactcacatagcacagcatataacacagaggcgtcttatgcttcaatggtgggctgattatctcgatgctaatcgagaaaaacatattatgccgtttgattttgccagaataaataactga

SEQ ID NO: 395291 - DNA, 1578 bp, Salmonella enterica
atgacagacaatattcataaacatcgcattctcatcctggatttcggttcccagtacactcagttggtggcgcgtcgcgtgcgtgaactgggcgtttactgcgaactgtgggcgtgggatgtcacggaagcgcagattcgcgaatttaatcccagcgggattatcctttccggcggcccggaaagcaccactgaagaaaatagcccgcgtgcgccgcagtatgtgtttgaggcgggcgtgccggtgtttggcgtctgctacggtatgcagactatggcgatgcagcttggcggtcatgtggaaggttctaatgagcgtgaatttggctacgcgcaggtcgaagtgctgaccgatagcgcactgattcgcggtattgaagactccctgaccgcggacggcaaaccattgctggatgtttggatgagccatggtgataaagtgacggcgattccgtccgactttgtgacggtcgccagcactgaaagctgcccgttcgcaatcatggcgaacgaagaaaaacgcttctacggcgtgcagttccacccggaagtgacccatactcgtcaagggatgcgtatgctggagcgttttgtacgcgatatttgccagtgtgaagcgttgtggactccggcgaagatcatcgacgatgccgtagcccgcattcgcgagcaggtaggcgacgataaagtcattctcggtctctccgggggggtagactcctccgtaaccgcgatgctgctgcatcgtgcgatcggtaaaaatctgacctgtgttttcgtcgataacggtttactgcgtctgaacgaagccgagcaggtgatggacatgtttggcgatcatttcggtctgaatatcgttcacgttccggcggaagaacgcttcctttcggcgctggctggcgagaacgatccggaagccaagcgtaagatcattggccgtgttttcgtggaagtgttcgatgaagaagcgcttaagctggaagatgtgaaatggctggcgcaggggactatctatcctgatgtgatcgaatctgccgcctccgctaccggtaaagcgcacgtcatcaaatctcaccacaatgtcggcggcctgccgaaagagatgaagatggggctggttgaaccgctgaaagagctgttcaaagatgaagtacgtaagattggtctggagctgggcctgccgtatgacatgctgtatcgccatccgttcccggggccgggcctcggcgtgcgcgtactgggcgaagtgaagaaagagtactgtgacctgctgcgtcgcgcagacgctatcttcattgaagagctgcgcaaagcggatctgtacgacaaagtgagtcaggcgtttactgtcttcctgccggtccgttccgtaggcgtcatgggtgatgggcgtaagtacgattgggtggtctccctgcgtgccgtcgaaactatcgactttatgaccgcacactgggcgcatctgccgtatgacttcctgggacgtgtttccaaccgcatcatcaatgaagtcaacgggatttcccgtgtggtgtatgacatcagcggtaaaccaccggcaacaattgagtgggaataa

SEQ ID NO: 395292 - DNA, 786 bp, Salmonella enterica
atgaatgtttatatatctgttgtctctcataatcatgctaaaatgattattgagtttgattgtttacgtaagcttgctaaaagatataaagtagttattaaaaacaattctgaacgcgaaagcgttattttgaatgattattgtaggaagaatgaaatatatataattgataatgcctataatactggctttgggaaaaacaataacatagtattccaatactgtgaaaaagagttagggatgacaagtgatgactattttatccttattaaccccgatgttataattgatgcgattaatatcaataagcttatttccataatcgaaaaggatatgattgacatctccggaatatctttatataaagatgatgccttgtcgataagagattactcaatacgtaattacccttctttttacactttttttatgtcgttcttccgattttataaaaaatattgtgtattaccgcctaatgacgattgctctagtttagatatggattgggtcgcgggttcttttatggtttttaaaacaaaagcatactcaagtctattaggcttcgatgagcattacttcatgtattgtgaggatttagatatttgttttagagctaagagtaagggcttaaatttaaagtatatacctagtatcactggaattcacaaggcccagcataataatagaagactatttagcaagcatttttattggcatgtcaaaagtgcgctaaggtttttaataagtaaaaaaattaaactgcaagtgaaatccatattgaaatga

SEQ ID NO: 395293 - DNA, 1023 bp, Salmonella enterica
atgaatggagtagccaaacccattataatttttttgttcgcctgttgtactcttgtgacttttctttcatgtaatttaaatttatttcctgattattattcatatctaaattggtatgagttatcagcatccacaaatatgaataatgattgggtcttttttaaagatcctggattttatctgttgtcagttatatcaaataattttggctttggtgtcattggagtgattttttcgctttttataatatcactttcgtctaagatttttttttgtattaagttacttaatagagaaactctattctgggtgctacttttatatctgtctaggctctttattgttcatgatcttgttcaatatcgagccggtgcgtcaattggtttgtcagcattatttttgtatttttatttagagaaaaaaaagtttaagtctttttttttcttatgcctcgcactttctatccatctttctagtttgctgattgtgtcagttatccctatagtgtggtatcttaataggaatataggtaacaatatattcaaccagataataataataagtttactattgtctgtgattttactttttgacccttacattaatttgctaaggttggtcgcagagtttcctatgatgcatgaaagaattgctccatatttggatggttcatatgctgttaataatgcaccaatgtttaatagctttgtagtaattaaaattatatcatatgtaattttttttatatggatctataaaaataaaaaagttggtttaaccatagaaaactacttaatttatctatgtttctttctgtctattgtaggattgtttcttttttggtgtttcagaagtaatgactcgctatccattagattttctgactttttcgccatatacgatattattttttttgctctattattaaatgtttttgatgtgtttgggaaatttatctatagatactatcttttagttatgatgattgttttttttatatcttcatttaagttgataaattag

SEQ ID NO: 395294 - DNA, 591 bp, Salmonella enterica
ttgagttcacttatcaattattctgaaagatgtacggatgatgtgtgtttagttgcaccatcctattatgatagagctatagataaaaatgctgaatttatattatgtactgataaaggtattattaggcagccagctattggaaaaaatgcgattgaagcatcctatgttataacttctggatctgtcttgagactttcatctgtttctaatattggactaatgaacgatgatttgtttatagattttgttgatattgagtggtgtttaagagcaaattctttgggatataaaatcttaggtttaccatggctaaaaatgtcacatgagatcggcgataaacctattaatatatttaataaaaaatatgttaaccattccccaataaggcactactactactttagaaatatatttttattgatgcgcatgagtcatatccaccctcaatggaaaaaatgggaactgataaaactattacctagattttttgtttatgcatgttttacaaaaaataatatgaaacatatttcctatatgttaactggtatatatgatgggttacttgggcgagtggggaaaaagaaatga

SEQ ID NO: 395295 - DNA, 870 bp, Salmonella enterica
gtgaataactctaagccagagagggttattgcctctgagttgaatagaagagggattactgcagagcatggcactaaatggacaagaggaaagatccacgagattttaactaacgaaaagtatattggtcataatgtctataaccgaacatcttctcgtttaaagcagcgtcttatccacaacccacagcatgaatggataagatgtgaaaatgcttttgaagctattatttctcctgagttatttttacaagcgcagactattattagtaatagaagtattcatcttagtaatgatgatttacttggtaaactctccgatctttttaaaacaaaagggaaactatccggcataattatagatgaagatgatgatacaccatcctcatctgtttataggaaacgttttggtggtctattacaggcttataaattaattgactataaaccaaagcacgattatgattatttgcgaattaattccttgctaagagaaaagtaccatagtttagttgaaaaactcatttttgatattacagaacaaggctgttatgttgattatgatgaggaatctaaattatttactattaatgatgaagttaaaatgtctgtagttatctcccgttgtttcatgaataacacgagaaagcgctggagaatccggtttgagcgaaagtttagctatgatatttgtatcgttgttagacttgatagtcaaaacgtgaacaccaatgattactatgtattcccttcaatagagttattagataatcagtttgtttttgaagagttaaatccttaccagttagagttttatcgatatgatgacttgataccttttttgcaaatccttaaacgtgatgttttttaa

SEQ ID NO: 395296 - DNA, 903 bp, Salmonella enterica
atgaatgaatatgaagaaataaagcttatagatatctcagagatcaggatcgttaacccacgttcaagaagcaaatctattcacgatgaacttgttgaaagtataaaaaacatagggctaaaaaaacctattacggttaggttatctgactcaacctgcaagacgtatgtgtacgatttaatttgtggtcaagggcggattgaggcttatgaaatattaggtgaaaaacaaatcccagcaatagtaaagtcagtagatcatgaagatggtcatatcatgagtcttgcagaaaatattgctcgaagaaaaccacgttctactgagcttctcaacagcattatagaattaaagaataaaggtttttctgagtcagagattgctaataaaattggtcgctctaaaaattgggtagcttctattgtatcattaaaagaaaatggtgaagataaattactttctgctgttgagtctggcagaatccctatatatatagcggtagaaatatcaagagctaaaggagttgatatacaacaccttcttttagaaggctttaattctggtgagcttaactcaaagcagataggcgcaattaaaaggctcttatctcagagagagacatcaggtaagggaagtgataataattcttttattcagggggtaaaaaagaagcggattacttctgaagagctaaaagaactttatcaagaaaatgtcaaaatgcataaaattattcatacaagatctgagtttacaatatctagcctaatggttgttaaagaggtaatggttaatttattgaggaatagagagttttcagaacttctatctgttgagagcctgaattctgttcctgcatttattatggataatgttgaccccgaacgaggtcttgaaaatgaataa

SEQ ID NO: 395297 - DNA, 999 bp, Salmonella enterica
atgaataaacctaacttcggtaataagtgttttattattaatgtttctgatctgctatatgagaaagagttgcctattaatgtgaaatcaagcgtaaaatatcatcagatactttccacggtgaaaacagttggtatcatagaacccatagttatttatattaataatttgtcagaaaagataatacttgatggtcacttaagagttgaagcatcaaaggatatagggctatccactgtgccttgtttgatttctgaggatgaagaatcttacagctataacaagtatgtcaatcgattaccagttattcaggaatatcgtatgatattacaggctgtggatgctggtgtttcagaagaaaaaattagtcaatctctgaatatatcagtagatacactcagggcaaagtttagattacttgatgggattagcccggaaactaccgctttattagcaaatcaacatgttccacaagcaatattcgctattttacgtaaaatgaaaccagaaagacagctggaggcggtatccacgatgatgagtataaataatttcagtcgtaaatttgctctatcgttattacattatacccctgatgatatgctaataaatccgaaagattcgaaactaaagcaacaagacatagcaaaaaattttgccagaatggaacgagaaatggctgctatggaaatagagactaaacaactcgagaatatatatggaacatataatttaaagttagcagtgattattggacacataaaaaaactactttctaattattctgtattaaattggttggtagataataatccggattatttagctcaactaaagaaaattgctgctattgactcattgccagcgtacgaagacgaagagtgcgttaaatactatacggaccactatggacaatgcattttatgttgtagtgtgttgttcatagttgtgctatataattatttattgtttttaaatctgaaagttttagagaaataa

SEQ ID NO: 395298 - DNA, 1032 bp, Salmonella enterica
atgagtaacaaaaaaatcaaaccaagaatttatcataaaactgatctaggtaaaatttttcttggtgattcattggatgtcatgagtacattaccagatagtagtgtcgatctaatcatgacgagtcctccctttggattggtaagaaaaaaagaatatggaaatgttcattctgatgattatcttgactggttcaagagttttgctatccaattcaaacgaatcttaaaagatagcggaagtctcgtgatagatatcggtggtgcgtggaatcaaggactgccaacgagaagcctttatcattttaaattgctaattatgttatgcgaagagttcggattcaatcttgcacaagagttttattggtggaatccttcaaaattgcctactcctgctgaatgggttacagttagaagaataagagttaaagatgcaataaatactgtatggtggttatcaaaatccccttggccaaaggcaagtaatcgtaaggtattgcagccatatagcccaagtatgaggacattattagagaaaggatacaaagctaagaaaagacctagcgggcatgacataagtgaaaaatttagtatcgataatggtgcagcaataccacctaatcttctggctatacccaatacagaaagtaatagctcttatttacggtattgtcaagatgaaggtataaagtcacatcctgcacgttatccatctgatttacctgagtattttatcagaatgttaactgatgccggtgataccgttattgatccatttggcggtagttgcatgactggtgaagtatcggaacgtttaggccgaaactggatatgctgcgaaatggtggaagaatatctacaaggcgcagtaggccgcttcaaatcggtaatcacaactgaaagaccgaatattgatgaagattcatcttattatcgagttcctcgtcccggattatattggggacaagaagaagaaaaattagatgaggatggtgggaaaaaaagaaaacccaaatccgatgaatcaaaataa

SEQ ID NO: 395299 - DNA, 1368 bp, Salmonella enterica
atgagccagcgaagcgatttaccatttggaagtgagttttctccgtcccaaattgatcttgtcgggcttttggacatgatcgcgcaaaatgagaacaataaaactttagaagaggcaattagaaatgctttcttttccaaacatggtaatgggaatataagaaaccagtataaacttgccatgaattgtcggctgggcttgaaggcatatggaataattaatgcagatggaaaatttactgattttggtagaaaattacttacgctaaaattatcatcatcagatttatataaagaacttgcgcgatatatattactgaacttgaatggtatgactcttgtccaatgtataaaagacatgactgttgcaggcgaaatagtcaatctgaccaccctccgaaaagggttagccgagcgaggagtgcattatccttcaggtggaaagcatccgagtatgatgcgtctttggttagctaaagctggggtgtttgtcggtagtcgttggcaagtaaatgatcaagcgataaaagatatacttggcttggattccgatgactttcctcagttagcgtctttaacgtctcagcaaaaagcgtttgtccttacgcttgctaatattgatagtcaggatgaaatacccgcaaaccatatagtaaagttggcggaggctacttatggaattgagtttcctgaaaaaagcttacctaagcaagtgttgaataaattagaagagtatggctatattcttgctagaaaaacgacagaagggcgaggggcgaaaccatttatgattacagcaactgataaattagttgcagaaataatcatgcctttattgaatcagttagagcaacaaacagatcctaaattaattgagttactaagaaagcctcttgcagaaatattagaggaaatcgattcttctgatcgctatattagcgggctcgcattggaagctttagcgttcaaacttatgcgactcttagcaatggactatgcagctacacggcttagagcacaatccactggtggtgctgagattgatatcatatttcagtcaacccgccttgtcttttcaaggtggcaagtccaatgtaaaaatacatcacgtgtatctttagatgatgtagctaaggaagtcggattaactcatttcctaaagtctaatgcaattgtaatggttagtactggagatataggaagcgaagctcgtcgctatgcgaacaaaattatggcagaatctaatctttgcgtggtaatgatcgatagagacgacttgaatatcataagggataatccatcatatatagttgaggctttcaatagagaagcttcacatgctatgaatttgaagaaacttgacatctaa

SEQ ID NO: 395300 - DNA, 306 bp, Salmonella enterica
atgaaacttttaaatacatatgaagataaagaaaaagctgaatattatctttcaaaaatcactggtgaaaaaagactagctagtgaaagggatggaacagaaactatttataacctgtttggagacgctacgtggacaaatttatttctgttggatatgtttgaattaaatgagttgaaaaatattttagctgcaaaaaataataaattagcctacgataaagaaaaatatttaagtattatgaaaaatctcacatatgctgaaagtgcattttcattaactatccccaaacattggataatataa

SEQ ID NO: 395301 - DNA, 1251 bp, Salmonella enterica
atggctcttactgatatcaaagtcagaacagttaagcctgcagacaaacctttcaaacttaccgatggtgaggggatgcacctgttggttaaccccaatggctcaaaatactggcgtcttcaatatcgttttagtggcaaacagaagatgctggcgttaggggtttatccaatggtttcattggcagaggctcgtaagaggcgcgatgccgcgaagaaactggtatctgatggtatcgatccctctcaaaagaaaaaagaggacaagattgaagaaagcggagcactaacctttgaggctgtagcaagagattggcatgcatcctgtagcaaaaaatggtcggagtcccatagtgagcgggtgcttaaaagcttagtggataatcttttctctgcgttaggtaaacgtaagatttcggaactgaaaactcgggatctactcgctccaataaaggtagtagaggcgagtgggcggtatgaagtagcttcgcgtctccaacaacgaacgactgcaatcctgcgttttgcggtacagaatggtctacttgaatataatccagctcaagacatggctggcgcaatcgctgtagctaaacgtgtgcatcgcccagctctggatttcgaacgcttctccgaattgctcgatcgtatcgaatgctttaaaggtcgaaagttgactaaattggcagtgaaactaacactgctggtattcatacgttcaagtgaactgcgttttgcaagatgggaagaaatcgattttaaaaatgcgctttggacgatacctgcagaacgagaacctatgaagggcgtaaagcactcacatcgtggttctaagatgcgtagccctcatcttgtacctctaagccgtcaggcactgaaaatattagaagagataaaacaaatcagtggggattacgagttggtcttcattggtgatcacctgccggataggccgatgagtgagaacactgttaacaaggccctgcgctcaatgggttacgacaccaaaacagaggtttgtggacatggtttccgctctatggcctgtagtgccttaatcgaatccggcttatggtcaaaagatgctgtagaacgtcagatgagccatcaggagcgtaaccatgttcgcgccgcttacatccatcttgctgaacatctcgatgagcggaggctagtgcttcagtggtgggctgactatcttgatgcaaatcttaacgatatggtaaggccatttgatttttccaataaataa

SEQ ID NO: 395302 - DNA, 1134 bp, Salmonella enterica
atgaacaataaggataattttttgccaacaagagattttttgcggcaattgataggacaaaattatgtaaaacctggcgagttgaagagtattttaagggctcgcggtgttttctgttccagcgatgataaaaaattactaggtggtattattataaaaacagggatctctgctgaagaataccttttattaaaagaaacatataagtctaaggaagacaatcctaaaattagtactcggcaaattcaatggcaatcagatatatcgcttttcaatgcgttagagcacgattttgattttcaatcattaattgatgatgattttggtaatgttaggcttgttagatctccttttttcgttatgactgaccctgctaatccaaattctgttagattggatgttatgattgagaggagagatattaccaaaaattggggggatgatatttcctatcataaagggtatgtagaatttaataaagaagataatacatctcatgtacaaatgacgttgtgttattcatccaaggaaattaaaaactttgtaaataacctaaccaaaaaagtgataaaaaaatttaaagaagatggttatgttggagctaaagaagatgttttgttgataagatttcatgactttgataatactggaagggttaatttcttttatgagttatcaaataactggcgtaatgataatttatactttagtgatactaaggatttacagttttcacctgataaaatagatgataaaacgccggaaaatttaaaatggatgaaggatacgattgatgacctaaaacttaaaggaaagggaattcattcgacatttttcttttcaaataaattatgtcataaatatttaaaattatataaaatatcttgtgattataatttttaccataatgatattgaaggtacttgtagagttaattatgagtttccagatatcgaatcaagaaactccgaattgagtgttgatatcgggaattttaatctatcaaaaaatgattcaaatttgaataaggatgttataaaaacaaggttactaagaatattagatgaaaagaaagtggaattgtataagaaatataaaatcagaactacgtctgaaaatttagtggttagttaa

SEQ ID NO: 395303 - DNA, 468 bp, Salmonella enterica; identical to SEQ ID NO: 380257

SEQ ID NO: 395304 - DNA, 468 bp, Salmonella enterica
gtgtcagataatctgtttaacgggcggcgttttcgggcgctgactgtagtggataattttagtcgggaatgcctggcgagccatgccggaaaatcgttaaaaggcgaggatgtggtcagaataatggaggcactgcgggtgctggataagcggctgccggtacgtatccagacggataacggcagcgagtttatctcaaaaagtctggataaatgggcgtatgaacacggcgtcacaatggacttctcgcgccccggaaagccgacagataacccgtttattgaatcatttaacggcagtctgcgggatgaatgcctgaacattcactggttcctgtcactggaagatgcgcaggaaaaactcgacaactggcgcagggaatacaatcatgagagaacgcattcatcattaaatgacatgactccggctgaatttatccgaagtctccggaaagacgaagatctctga

SEQ ID NO: 395305 - DNA, 453 bp, Salmonella enterica
atggtaacaacaaataatctaagagaatttattaaaacaaacgattatgtctctttattgaatgaggtaatcgagcgtttaaatataaatgtgagtaaagatgaaccatctagccagatgtttaatattcatgcagattgtgtaaataaatccggcattaacttgaatgaattaaatgagttatgttactcagagaaagagcgtcttgtagtattcaccaaattaaaacttgctgaaatagaagacgatgaagatgattataatgacaatgacgataagtctaaaacattagagatactgccatttcccagagcatttttaatcggatatatcattgagttttattttttaaaaaataatccatacgctcttgctgactacctgaaaaaattaagggttccaagttccataaaatatgcaaaagaattaaaatcaatatatagtcgtctttaa

SEQ ID NO: 395306 - DNA, 222 bp, Salmonella enterica
atgaaagttgaagtctttaactacaaaacagggaaacttgaagttaaagatgtatcaatggaaattcaccataggagcttgccacaaagaggaggttcaccaaaagccaatgagcaatggaacctagaaaaagctactccatggggacatgaggcaatggatccatacaggcacacaggttatagattagaacaaattatattagggcctaactcatggtaa

SEQ ID NO: 395307 - DNA, 282 bp, Salmonella enterica
gtgataaaaattagtctttgtcgggatctctcactcgagccacaaaccaaaatcttcacccgctactcacaaagccccagcctgcactttaagggtgactggctgaaagaggcggaatttgataccgggcgcggcgtgaccgtgaggattacagtggggtgtctgaccatcatcgcggacaacaacgaggtgcaggaactgcgggaagagctttataaggtaaaacaggtggttaaagggatgcgtgacggtgtgtttagtgtgctgaacgacagcaactaa

SEQ ID NO: 395308 - DNA, 417 bp, Salmonella enterica
atgagttttcaggctttttcgactgataatgctacgttaatgacaatgctttctgaggttagccttgaatcttggatatttagcaatcaacgtcttgatataacactgttatccgataatgatgatgatatatcattatatgcggaaacagatattgttgtttctagtaagttaaatacagaaagacatcttaatatttgccatatggaaatacttaaagtaagtgattttttgactgtaaaaagtggatattatataccgcaggataattttaacgatttaatgaaatataaacatttgtcactgttttatggaagaagtattggatttgaatattgtatttcatttgtagggtatagtaggttattgactttccctttgaaatcgctttctgaattaaagtttaatattaggtga

SEQ ID NO: 395309 - DNA, 279 bp, Salmonella enterica
gtgataaaaattagtctatgtcgggatctctcacgcgagccgcaaaccaaaatctccacctgctactcgcaaagccccagcctgcaccttaaaggcgactggctgaaagaggcgggatttgataccgggacgggcgttaccgtgaagatcttggaggggtgtctgatcctgatcgcggagcgcgacgaggtgcaggaactgaggaaggaactttatcaggttaaacaggtggttaaggggatgaaggaaggaatatttagtgtgctgaacgagggttaa

SEQ ID NO: 395310 - DNA, 228 bp, Salmonella enterica
atgaatgaactgactcaaaaatttataaacggaataaattatcttgttgataatgaatatgaaccgcgagctattgcaagatatgcatatgagttttctttagataatagaattaatgataggcaactaaaatatgttgtttattatattagaagcatggatgctggtccagaattcgaattaacaaaagaagaattattggaatttatcaatcaaaatattacataa

SEQ ID NO: 395311 - DNA, 282 bp, Salmonella enterica
gtgataaaaattagtctatgtcgggatctctcacacgagccgcaaaccaaaatctccacccgctactcgcaaagccccggcctgcaccttaaaggcgactggctggaagaggcgggatttgacaccgggcgcggcgtgacggtgaaaatatcgcaggggtgcattgtgctgatggcggataataacgaggtgcaggagctgcgggaagagctttataaggtaaaacaggtggttaaggggatgcgtgacggtgtgtttagtgtgctgaacggcagcaactaa

SEQ ID NO: 395312 - DNA, 4203 bp, Salmonella enterica
atgggtgtcaccgccagtaaacattttgacccaatgttaggaattgattttcactcctatgttttaccgccagggatctggcctaccccccatatttctctggtttttgatgtaatggactacgttccctttttgggaatgggtgcaaccgtaaaaatccacggtctgagacgtaccgttgctggcaccgagggaaaagcattccatatccttattggtgtgccggttcctccggtaaaaatccccggcggtcctcagactgatgatgaactgtttatggggagcaggacggtcattgtggatggtgatccgctttcacgtcgcctgtcgccgacattgagctgtaatgtggttggtatcattccaccatttcgtctgaggcgggcaaaaaaaatgcccatcctttccctgactgcaccgttgacgataaatatggcactccctcatcacgtttatgttggtggaagcgagaccatcagcatgtcaacaatactacaaaagacagggctgactttctttaaacgcatcgggaaaagcaaagcatataaaaaatttatgcggaaatttaaagcgttccgcaaaaacctttttaaaaacatggaacccggattcctcaagtgcagggtgctgcgcgctgaacctgtcgatattcgtgatggcagcgtcaggctggaacaacgcgatttcctgttgccgggccgcgtaccgctggactggatacgttactaccgttctgcggatgttcaggaagagggggggctgggatatggctggaaaacgctgaccgatacccggctgattcaccatacagaagatgattaccatgaacttgtactggctgacggttccctgttttttgcagacatcccgggacaggcaggtctgtcccatgccgtcagcagtctgccgggtggcgcacggctgtggtatgaggaagaagaaggcgttcgccactggcatgcagaaacggaggaaaatcgtcgatggcgctttcgccaggagacggcgtctccggcttctgtcctgcgtccggacagactggaagacaacaacggcaacggctggcgttttcgttatgaaaccggacgtatcaccctgacggaatacacgtcgcaggcgctgaccgggcgcagggtggaagctgactgcctgcaccagcgcattatccgcgttcgtctgtgcgacagtcatgctgatatgggaccggacggcaatgaagcgcaaagcgacctgacgcagtacgactataccccggataaccagctggctggccagaccgacggttgcggacaccgccgccattttgcatggcaggaacgggtttacatgcagtatcacgctgaccgcctcggacagcgcttccactatgaatacgatgagtcatggcgtgttatccacgcatggggcgatggcggttactacgactaccatttcgcgtgggatgacttctgtcatgagctggaaatgaccaactcgctggggcataccaccgttatccgtttcagcgaagacctgctcccgctgtgtgaaattgacccggagggcggggcgacgtttttcctttacgacgaattcgggcagacggtcagcattacatcgccggacagaagaaccacccgttttgaatatgatgaggcaggcaatatctgccgggaaatcgcgccggacgacagtgagtttgtgaccgtctggcagggattgcacataaaagaagcccgcgacccggaaggcgcctgctggcggttcgggcatgatgagcggggcaatctgacggaagtaacgaaccccacgggcgtgcagcagcagtatcactatgatgaactggggcagatggtgcgccgcgacaccgccgggcagggacacgagttgctggagtatgaccgtcttggctttgtcagtgcgatgacggcgcgtaccggggcgaaaacggcctacctgcacgataaccggggcaatctgttgtcggaaatcaacgcgctgaaagagcagcggcactaccgttacgacagcgccgacaggctgactgaggcaaagctgccgtaccgtaacgccatccggctggagtacgatgccgaaggccagcttgtggcatatgatgacggccagcgcgtcacccggctggactatacccccacaggggaagtctccggctgtaccctgccggacggtagtcgcaccggttacgagtatgacaccgaagaccagctggtggcggtcatcaaccagatgaaccagcgctggcagatagtccgcgacagtctggggcggattgtggaagaacgtgactggcggggacagagcacgcgttatcagtggagcgccgacagtctgctgagcgccagaaccgcaccggacggcagcaggctggactaccgccacgataaacaggggcgtatcaccgggcagtatcacaacgatgcgctgctggcgcgctacgaatataaccggcgggggcaactgacggcctgtgataatccgtaccgcaaactgagctggcgctacgacagcggcggcaggctgacggaagaggtgcaggacgggtttcgcatacggcatggctatacggaggctggtcagtatgcggggcgggagagcgacagcggcaaccgggtgcaactcggttacaacgaggcggggcagttaagccggatacagataaacgacgaaccggcaaccgcgctggcgtatgacgcgctggggcgactgcgtgaagagcagcttacgccggagctgaaacgtgaattgagttataacgataacggctggctgagcgcacagcgagtgagccgggatgccagaccgcttttcagcacagagtggcattatgatttaaacggtaacgtgcggcagcgcagtgacagtctggcgggcagggaattctacaaccatgacgtgatggacaggctgacaaagcacgttgacgtgctgggccgtgtaacgaattttgtgtacgacgcagcggggaaccggctgcgtgaagagacaagcggcagcggagatgagtggcagtgttatggccgggtggaagaagaacggcaggtgacgctggagcactggtataaccgcaacgggcaactggtaaggcgtaaacgcagggcggattacctgtggtcgcagaaggttgtcagcgagtcgctggaatgggatgtcagcgggagactgaaagcactgcacagcgacagcgccacgacgcagtacggttatgacgggctgggccgccgggtgtttaaaaagacaaccagagcgggtgaagagatcgccagcctgacgtggttctggtgggacggcgatgcggtggcgggggaagtgcaggaaacgaccccggcggaggaaacgctgacttcggcatgcgatatgcgaagaccggggagcagcgaagcgcgggaggcgcggctgatgagtctggtcaaaggccggacggtacaggagtacgtgtattacccgcagagttttgagccgctggcgctgataaggtacgggcggcgctggagcgaaaaggacggattcagcgagccggagaagcggatatatttttatcacaacgacgtgaacggcgcgccgctgaggctgacggatgagacaggcggcgtggcgtggtcgcagagcgcggggccgtggggggcgtggagtgaacagacaggctcggtgaggaatccgctgcgttttcaggggcagtattttgatgaagagagtggtttacattataatcggtaccggtattatgagcctgagagcgggcggtacatctcggcagacccgatagggctggcggggggcattaatctctaccagtacgttccgaatccattgggatggatcgatccgctggggttagatagagaaccaattatattcttacctaaaggcggagatgttttacaccccggaacggtagatccggttaagaatcctgaggggttatttaaaataaaagctactggtagctactatgatgataaagtagctttatataaagctgctggattaaacgaaagcccatctcgaaaatggatttctcatcatgttggttacgatccaaaaacaaatgaaatgctaatgcagcttgttaatcctaaatatcactcacatccccatgtaggtggtgctcatgagtttgaatctattactggttttaaatatggctcagaagatgccataaatgaagcaacaagaagaaataataaattatccaaatgtgggtaa

SEQ ID NO: 395313 - DNA, 225 bp, Salmonella enterica
atgaaaataggttatggagttaagcgttttctgcaagagtggtggaaaagtatgctttcttataatggaatatcttattttaatatacaaaaatacatttccagttggctgattgtattgctgatcggcgggatagtttttggtgcaatctattgcttttatggcaatgaatacagccatgaaataaagattttcctgcgaacgctgcgcagagtacttttttaa

SEQ ID NO: 395314 - DNA, 1614 bp, Salmonella enterica
atgtcaggaagcaaaaatgctgttgagcgaaagctggcagaactggaaagcctttggctggaagccagtgacgacgagaatatccgtatctttatctggcgcacgcctgctgattcagatcgcctgatacatgtattttttgccttgcaggaagaaagacaaaacgggtttacaactcccgatctgttcattcgcttcaatacgccgtttgaaacccgttatggatattctcatgagctggaagaagaatttattgaaagggtgaatgtgacagagtttcccgagtctcgctggcagtctacccgtctgcgcccctgttaccggacagatacactttacaggttactgagtgattttgctcattaccatcaggactatctgcgttatctggccgtgctcctgacacctgcttctgtcagtaatgccgattcgaaccagcggtttattaacgaactgagccagcacatagttactgaagcgtcccgttttcgtctgcttcttgttgatactcatgagaaccctgactggcagtggcttctggaacggttcccggaaaatacgcgccttttgacgccagatatcagtgaagatgagctgatgcgccagacgttgaatgaaacccccacgtccgatggcaccgcaatgttgcgctttcgtcaacgcatgacggatacctttatttcattaaaaaagggcgcagccgcacaaactgagcaactggcgcaaaaagcgctggagcttgcccgtcagcagggatggggagagcaacaggtcattatgctcagtatggcagccggtgggtggctacaggaaaaacatgcacaaaatgccatcaaaaactaccgtcttgcagtgcagacctcggcagatctaccgccagaatcccgccattcccttattacccagaacctgatgggcgagggtaacgcatggtttatggacaaaaatcataaacaggcatcggatgcgtattaccgttccgcacaggaagcgctgaatattccttccctgttactggcaatggaaggataccggatggcggggttcagcctgatgtcagttacgcctccgccagctgagatcgcgcaacattattacgctgcgttgaagacagggttatccatgaataatgaggaacggactcagtcgggatttatgcagattttccgtgatctgctcaactggctctcacctgaagccacatcccgaagcgacgatttttccaaacggtacctgaaggggcaggcagagcttattcagcaggccgaagaggcggtgaatcaggccggacatagtgatattaccgctactgtagtacagcacgataatgaactgacgaaaaagatggaagttctgtttcagaacatattactggagcgggaaagcatgctcagtcaggaaaagccgatttatcagcaggtgctgcgccttgctcgtcagtacagtcacgctttctggacaccaggtatagaaattacgcatccactgaataaaccagtagaaacatggtcatttaaatctcctcttgtaatgctgaaaacaatgctcttagaggagggtatttattcactattcgtgaatgtcgtttcaggcaaacagagaatgaaatcatga

SEQ ID NO: 395315 - DNA, 2007 bp, Salmonella enterica
atgcccgcatatggaacacattttacgctggatgttgaaggacaggaagatgaaacctttgccgtggtggagtttcatcatcatgagtccttctcatcgctgtttacactgaacgtgaccgctgccagcatcaatcctgctgtcccgctggatcagcttctggaaagcaacgccacgctgagcattttccgggataacatcaaacagcgcagcatacggggcattgtcaccgcttgtgaacagggcgatagcggcaaacatcagacgctgtactccctacaaattcatcctcctttctggcgcagcgccctgcggcgcaatagccgcattttccagaataccggcattgaaggcatcgtttcgaccttgtttgatgaaatgctggtcacccagtggcaatcccgtctgtccgacgatcatccgaagcgtgagttctgcgtccagtttatggaaaccgattatgactttatcagtcgcttgctggccgaagagggaatattcacctgtgaagaagaaagcgacggcgtgcagcagcttatcctgtgcgacagtgctgaaagcctgccggatattgaacccattaactaccatccggaacccagtgaggacacaaagctctaccatgttatgcagtttcgccgtagcgcacagatccgcccggcggcggtaaccacccaggattatactttcagggcgccttcatggccgggaagttttaaccatatgggcgacagactggattctcagtatccgatctatgaaatctttgattatccggggcgcttcaaggatgagggccgcggtcaggcgtttacgcgttaccagaccgagggttggcgcaataatgcagaaatggtctccggcgtaagtgattcgccaaagctgtatcccggcgtgcggtttgaacttaaagagcatccctgtgccgacctgaacgtacagtggcaggttgtgagcagcgaattaatcggtgagcagccgcaggcacagattggtcatgagggtgaaggtaccatgctgactaactattttcaggtgatacctggtcagcagacatggcgccccgcgccattgcccaagccgcaaatggatggccctcagacggctgtcgttactggcccgccgggagaagaaattttctgtgacgagcacggacgggtgcgggtgaagtttacgtgggacaggtacaacccggcagacgacagcagttcctgctggatacgtgtctcgcaggcatgggccggggctggttttggtaatctcgccattccccgcgtcgggcaggaggttatcgttgattttcttaacggcgatcctgaccagcctatcattatgggccgtacctaccatgctgataacaaatcccccggcagtcttcccggcaccaaaacgcagatgacgctgcgctccaaaacctataagggcggcggttacaacgaactgatgtttgaggatgcgacgaatcaggaactgctgtcgatgcatgcgcagaaggacatgtataccgtagtggaaaatgaccgtactactgaagtgaaacacgacgatcataccactatcactcatgatcagacgcttgacgtcaacaatgagcaacataccacggtaaaaaaagactgtacgagaacggttaccgaggggagtcatattgttacggtcgaaaaaggcgaacagcatataaaggtcaatactggtcagcgctccctttttgtcgctaatggacacagcgtaacgataaaagatggtggggaaaccaacaccgttcaggctggagggcaaaacaacaccattacgggcgacaggttcctcactgtaaaagaaggcaatcagacgacagatatagccggagagctgaaactgacggtaggtaatgccatcacgattacctgcggggaggcaaagcttgaaatcaaaaacgacggttccgttacgctgaacggggtgaaattcacgtttattgcttcaggtgaagtgaaggtcgaaggtaaggaaatcacgttaaattga

SEQ ID NO: 395316 - DNA, 309 bp, Salmonella enterica
atgaagatctttttctacctttattattttttatgtctggcaactatatggtccttatcttttcttgatgatatcggaacgtttggtgatgatgcggtacatcacttttgtgatgttgtttctgatgaaaatacagagagcatgagggctgtaacagcacctgtttcttttttgcttattctcccttttattgtgcattctgtcattattgtaagaaaacgacggaatttttggcagttaattctaacggcggttatttctatattttggttttttctctttgttggtaggtatttaaaatgttattag

SEQ ID NO: 395317 - DNA, 702 bp, Salmonella enterica
atggggaaaagtaacgctttctgcacaccaatagactcagcctttccaggatggaatggtgctgatattttgatctggaagctaatgaaagataatccctgtgaatataaagggcaatcatatttatacttatacaaagacgcttatattaagtttcataaagatcttatcatcaaatatgccaaagaggccgcaatatctcctttgttgctggctggagtcgcttggcaagaagctggagggaaaccagaccgattaaaaccatttgttttaaccttcagacaggctgttgattacttcaaggataaaaatgattactctaacagcgtgtctgttggcatcattgcaatgcagatccgggctgcagcagagacgttaagagtggacccaaaaatgctcaccagaaaaatgcaggtgcaactaagtcgttgtctgcagagtgatgacttcaatataaaagtagttgctttacatttaaaagacttgatattgttcgactatcctcacgctgatacagaaaatcttactcatgagcaaactattttagctggttctcgatataaccgtggagtggaaaggaaaaaagaggattttgttaatgcaatatctgccgacgaacatgcctctgagcgtgattacatctcttacggtttggcaataataaaaagagaagaacgtgtgaaaaaactaatgggaatgtga

SEQ ID NO: 395318 - DNA, 666 bp, Salmonella enterica
atgcccgcatatggaacgcattgtacactggacgttgaaggccaggaggacgaaacctttgccgtggtggagtttcatcatcaggaatccttctcatcgctgtttacactgaatgtgaccgccgccagcatcaatccagccatctcgctggaccagcttctggaaagcaacgccacgctgaccattttccgggataacatcaaacagcgcagcatccggggtattgtcaccgcctgtgagcagggcgataccggtaaacaccagacgctgtacaccctgaatattcggcctcccttctggcgcagcgccctgcggcgaaacagccgtatcttccagaataccgacattgaagatattgtttcgacgctttttgatgaaatgctggttacgcagtggcaaccccggttgtcctttgaccatccggagcgtgagttttgcgtacagtttagagaaatactaggcaagcagacatggtgccctgcgacattgcccaagcagcaaatggatagccttcagacgtctgtcgttaccggtccgccgggagatgaattttctgtgacgagcacggacggggcgtgtgaagtttacgtgggacaggtacaacccgacaggcgacagcagttcctgctggatacgcgtctcgcgggcatggggcggggggtatag

SEQ ID NO: 395319 - DNA, 498 bp, Salmonella enterica
atgagcagcagtataggtgacggaagcgttgcccctaaagaaagaattaatatccgctacaccccaaaaacgaatggtgaaatctcagaggttgagttaccactaaatctgctgatcgttggtgatacaggtaaaacagaagatacgccgttagatgaacgaagcacggtttccattaataaaaacaattataactcagtgattgctgaggcaggtatcagcctgaattttaatgtgccgaatctgctcggtgataaacctgatgaagagcttaatgtccatatggacattaaggcgctgaatgatttttctccggataacatcgcaagacaggttcctgaaatgaaaaagctgctggaactgcgtgaggcgcttgtcgccctgaaggggccgatgggaaatcttccggcatttcgcgcccagattcaggctttgctgaatgatgaaagttcgcgcgaacagcttctcaatgaactgagtgttatgaataaagattaa

SEQ ID NO: 395320 - DNA, 1485 bp, Salmonella enterica
atgtctttacaggaacaggaattatccgtggcagagccgctctctgcgccccctgcctcattgctggatgtcattatgtcgcaggcgcgtattgaaccagaatcagaaggttacgatattgcccgtcaaggggtggctgcctttattgccagtatgctggaaagcagcaaccagcaggaacccgttaacaagcttgccgtggacagcatgattgccagaattgacgaaaaactgagcaagcagacggatgccatcaatcacaatgaaaattttcagaaagttgaatccttctggcgttcagtgaaaacaacggttgatcgcaccgacttccgggaaaatattcaaatacacatactgcacgcaacaaaagaagaactgctggacgacttttcatttgccccggaaattactcagtctgcgtattataaacacgtttattccagtggatacggccagtttggtggcgaacccgtagctgccgtgattggcggctacgcgtttaataacaccacgccagatatgaagctgctcagctatctcagtagcgtcggagcaatggcgcacgcgccttttatttcatccgtttctccggcattctttggcctgaaatcatacactgaattgcctcagatcaaagatctttacgccgtatttgaaggtccagcttatgccaaatggcgctctttacgtgagtctgaagattcaaaatatcttggactgacagtaccgcgttttctgctgcgcctgccttattctcccactgagaaccctattaagtcgtttaactatcatgaagatgtcactggcagccatgaggatttcctctggggaaatacggcatttttactggcgtccagcatgactgagagcttcgctaaatatcgctggtgtccgaatattattggtccacaaaacggcggagcggtgaaagatttacccgtacatctgtttgaaacgatgggtcaaattcaggccaaaatccctactgaggtactgatcaccgatcggcgcgagtatgagcttgctgaagagggttttatcactctgaccatgcgcaaagggagcgataacgctgcgtttttctctgccaactctgtacaaaaaccgaaacgtttccccaacacgccagaaggtaaagccgctgaaaccaattacaaattgggtacacagttaccttacatgtttattatcaacaggctagctcattacattaaggtactgcaacgcgaacagattggttcatggaaagaacgttccgatcttgaacgtgagctgaataactggatcagacagtatgtggcagatcaggagaacccgcctgctgatgtccgtagccgcaaaccactgcgtgccgcaaaaatcgaagtacaggacgtcgagggcgaccccggctggtatcaggtggcaatgtctgtacgacctcactttaaatacatgggggccagttttgagctttccctggtaggacgtctggataaggaatag

SEQ ID NO: 395321 - DNA, 426 bp, Salmonella enterica
atgatcaaggaacgtgaacgtaacagcatcgcaagtttatttgatcgtctggatgaagcgacggggctgcgttcaccttccttcggcgttcaggctgtgcgggactcgattaaacgcaatttgaataacgtactgaatacccggcccggtagctgtcagagcgcgccggaaatgggaatatccgatccgggaagcgaggagcaggcgcgtggcagttttcaggacgctcagatagaaaagataaaagcctgcattgagcattacgaacctcggatcgatcaggtcgatgtaaccatgagcgaacaggatgaaaatagcccgctggatctttgtttccgaatcacggcttttgttgatatcgaaggattaaaggacgtgctggaatttaatgtgcaccttagcagccagcattacaggatggattaa

SEQ ID NO: 395322 - DNA, 1830 bp, Salmonella enterica
atgacaatggaagaacgctattttcgggaagagctggactatattcgtcagcttgggaaacttcaggcaaaggaaaaaccccatctggcgcggtttctggcggaaaaagggaccgatccggatgtggagcgcctgattgagggatttgcatttttggcaagcactacgcgtgcaaaaattgacgatgagtttcctgaactgacgcacagcctgattagcgcgctctgccccaactatcttcgtccgacgccctcaatgaccattattgaatataccccggacacggacactatcaccacgcctgtcagggttgcacgcggtgagcaggtgaaaagtcagtcagtggcaatggacataaccgatgagctttacagtgatgacgagcgcgaatgtccaccagcctgtacgtttacactcagtcgggacgtgtggctgttgcctcttcgggtaacatccgtggtgaataatagtagccatgcgctggggaccattgatattacctttgcctgcaatcccaaaatcagtttagcgtcactggatctgaataaattgcgcttctggctgggcaatgacgataattatacccgctggcagctttatctgtggttatgccgctacaacagcggagccgaattgattatcaataataaaaccatatcactgcccgatttcagcctggctcctgtaggtttcgataagcaggatgcgctgttgccttatcctaaaaatgtttacagcggctaccggattttacaggaatatctgtgctacccggacagttttcttttttttgacgtctgcggtattcagacgcttccggctgaactgacggcgaattgtttcactcttcgtctccacttttcgcagccgctcccggttgacagcaaaattcgggaaaactcaatgcgcctgtactgtgcgcctgcggttaatctgtttgttcatcatgcagaagcgatagcgttaaaggatggccgtattgaatacccgctatgcgccagcctcaggcacccggagtgctatgatatttttgccgtaaaacaggtttccagcaaactgcgctctgtcagtaaaggccgtgcggagatggtgacaagggaatatcccgaatttaacggttttcagcatcaggtcgagtatgcccgccagcgggaggtcatttattaccagcaccgtaaaaaaacgtcgctgtttcgtcagggatttgatcacttcattgctttcgtgctagcggatggcaataagccggaagactatttgctgaaaaacgaggtggcgtcggtcaacctgatttgcaccagtcgggagttgcccataaaactattgcccggggatatctgcatcccggccggtaaaaaaaccgccgccgccccgttccgtaatgtgactaaaccgtcaacacctctctggccggtgcaggacggcagccttcactggtcgctgctttcatgtatgaacctgaattatctgtcgctactggaccttgatgccctgaagaagatcctgcatatcttcgatttgcctggtgttcaccacccacagtcagcgaggctgtcacaacaaaaactggatgcgatagaacgtatcgatacccagcccgtcgatcatttgtttaagggcgtccctgttcgtggtcttgccactacgctgcatatcaatccgcagccgtttgtctgtgaaggcgaaatttttctgctgggcaccatgctttcttttttcttttcattatatgccagcgtcaatagttttcatgaactgagcattatcaatacccgtactcaggagagctatacatgggcggacagaaccggccagcacgccctgatgtag

SEQ ID NO: 395323 - DNA, 1059 bp, Salmonella enterica
atgggcggacagaaccggccagcacgccctgatgtagatgcggctgatggtgtttatggcgaattttctgttgatgacatgaattttcgtcgccagaacttttttgcgctggttgattcaatttatcggtttaccggcaaacatgatgacatttcactggcgacagaccctgataaggatgttgtgcgttttgaagccgatacccgtatcgcatttcccggcagtgatgtggtgaaggtggcacaaaacgctcatggtcaatatgtcgtaaccgtggcgttttccgggctacacggcagtcagtcgccattaccaggctactatctggataagatcgcatgggacagttttcagggtgaaagcggaatggcggattttttcgatctgttttcccaccggatgatccagtttatctggcacatctggcgtaaatatcgctggcatatctgttttaacaacggcggtacggatgaattcacgcaacggatgtatgcccttgtcgggctgggcagccagacccagcgtgaccgtctggccattaatcacagcaagatgctggcgtatgccggggtactggcaggcccaggtcgatcaccggaaattatctgcgacctggtttcccactgttttgaccttgaggatgtggtgttagagagctggcagttacgtaaggttgacgttctgccctcacagcaaaacaggctgggaggttacctgcaacgggactggcaaaaaataccgcgttccgtgctggggcaaaactttacgctgggtggtcgcgtgctggatcgcagcggtaagtttttactacgtatccggggactgtcacgcgagcgtttcctttcatttttacccaatggcgacagttttctgccattgactatgttcgtggcatttattttacgcgatcaactggcatgggatctgcgtctggaaatggccccgaaccagattggcggtatgcaactgggcgaggagaaaacctcccgtcttggctggacaacctttatcggccaaccggaagtatgccccggcgtcacgattaaagtccgggcataa

SEQ ID NO: 395324 - DNA, 1272 bp, Salmonella enterica
atgccagaacagaaccagcgtcaacacgctcagccaatactgacattacaggtcatgaacggaaatgaactggaaagcgggcgcgccgcaaaatgtgtgtttaccccacaggggggggacgtgggccatgccgggcagtgtcactggtcgcttcaggatcgcaggcagtctgttgccgaaaaagcctttgttgtttgctggcaggacggtacattttgtctgagaagccatgtcgcgaatctggagatcaatcaggctcctattgcacagaatgcaggtctggtacacctgcgacagggagatgaactacggctgaacacccttatcctcaaagcgtttatcggtagcgtcgcacagtataatgaacagatggcgtcgccggaaaccattgtcaccaacagcgatcgcctgacagatttgctaaccacggaaggccaaccggaatacgaggataccggcgtttacagggagattgcgccaaccgttgccaacggtttcacacaggatccgcttgccgcgctacaggctgaaagtctgacgacaagtaaccatcgttctggacatgatcccctgtttcttaagcctcctatgtccgacctgatggaaaacggaggattagacaatcactttatggatttgccacccgttgatacggatgagcagccggatctggttgatatggcgcggcaacatgtggctgtaacaccattgatgagggggcttgactgtgctctgccattgcgtgactcaaaggatgccaacgattttctggaagaaatgggacgggctgtgcaggcgaccgttaaaggattgctgaatctgcaacatcaaaaaaacagcttgtctgataaacacttgcgcccactggaagacaatccatttcgtctgaatctggactatgaaacgacccttagcgtgttgtttgctgaaggtaaaagtccggttcatctttctgcacctgccgccattgccgagagcctgcgtaacgttcgccatcatgaagacgctaataaggctgcgattatcgaagcgttgcgcgtcatgctggacgccttctctcccaccagcctgatgcgccgcttcgctctgtatcgctgcagccatgaacagcgtcaggaaatgaatgatacatgggcatggcagatgtactgcaactactacgatgaactggcttccagccgacagcagggttttgagatgctttttaacgaggtctatgcacaggtgtatgaccgcgtactgcgtgaaaaacagcaggagccggaagcatga

SEQ ID NO: 395325 - DNA, 531 bp, Salmonella enterica
atgaaacggtgcggtctgtccggcatgatactgctgttgctggcgggaacgttgagcggttgtgaaaccgtgaagaaggtttctcaggtgatttccaacccggatattcaggtcggtaagctagcagaacaaccatcagagctgaccatcaccatgctgactgaaccggataccaatctcaatgacagtggagaagcgacgcctgtcgatgttcagttgatttacttaagtgacgattcgaaattgcaggctgctgattatgacctgatagccaccacgcccctggatgacgcactagggaaaaactatctcgaccatcaggactttaatctgctgccagacacaatgaaaacgctgccgccagtaaagctggatgagaaaacgcgctttgttggagtggtcgcctacttctctgacgaccagaccacggaatggaaacaaattgaacctgtagcgagtacaggacatcactatcgcctgctggtgcatgtgcgcaaaagcagcattgagatgaaaaaagaggaacaataa

SEQ ID NO: 395326 - DNA, 1341 bp, Salmonella enterica
atggcgatgaaaaacaaagtcatctggcaggaaggtctgttcattcagccacagcattttcagcaacagcagcgttttaatgattatcaactgaccagccgcctgacatcaatagcgggttttacatggggattcagcgaattatccattaaccagcagcatctggcacagggcaaaatcgtgctggataaagcggtaggcactatgcctgatggtaccgtgttctccctgcccgatcaggatgtactgcccgcgccgtatcaacccgtagcgtttgatacacaagagagccggacgctgtatctggcattgcctgttaaccatgatgcgattaatgaaatcgccgggcgccacagtaccgggcagggaaacgggcgttaccgcctgaattatacggatgtacgcgaccagcacacagatgaaggcaatgccatacaactggcgctggggcagctgttaccgcgtatcgtcagcggtgcagaggatttaagctcctttactacactgcccctgtgccggatacaggctcgcgatacagacggttcactgttgcttgactcctcttttatcccaaccagccagaccatcaaggccagtcaggtgcttacccgttttctggatgaagttcaggagactatcggcaaccgcgcaggagatcttgcaaaacgcattggctccccagagcaaagtggcattgctgacgtggcggaatttatgatgttgcagatgcttaaccgcaatcagggacgtttttctcatcgtaagcgcctcagaattctgcatccggaaacactgtatctcgatctggccgaactgctcggagaattgatgacgtttacgtcagcaactcgccttccctgtgaatatgatgcatacgaccatagcgatttaaccaccacgttccacaggctgctccccgctgtacgcagggaactcagtattgtactccggccacgtgcgctgaatctgccactaacgaagagtgaggggatctatcagactacgatcggcgacacacaactgttgcaggatgccagtttcgtgctggcggtttatgcacagacgccccacgatcagcttatgcgtcagtttgttcaacagtccaaggtgtcgtcaccggataaaattcgcaacatggtcagcgtacaggtaccaggcatacagcttataccgttgtcttccgcaccgcgtcagttgcctttccatgcaaattatatctatttcagtttggacaaaacgggcaaagcatggaccgatgtggtcaccagtggtgcgctggccctccatgtgtcaggtactttcccggcgctggatatgcaactgtgggcggtaagagggtaa

SEQ ID NO: 395327 - DNA, 759 bp, Salmonella enterica
atgagcgaattatcccctcttctttttgaaactgaagaggcagaacgacaataccggttgccgtttcgcggtcacagtctgaataacatgatcgacgccgctaccccgctgttaggcatggcgatgcgtctaaagggcatggaaaatcagccactgccggaatatctgtttagtcaggtcgtaacggatgtgcaggccgtggagcaactgttgcaggagcagggctatgagccgggagtcattatttcgtttcgctacgtgctgtgtacctttattgatgaggtggcactggggcatggctggtcaagtcagaatgaatggataaaacagtcgctgctggtgcattttcataatgaaacctggggtggcgagaagatattcatcttactggagcgccttatccgcgaaccaaagcgctatcaggacttacttgagtttatgtatctgtgtttttcactcggttttcgcggtcgctataaggtcagtgcccaacagccgcaatccctgaatgaatttgagcagatatttcgtcggttacatcatgccatccatcagttgcgtggagacgcgccatttcccattttgcatcaggacaaggtgggaaccggaagtcgctacagtctgattaaacggctggaaattaaacatttactggctggcggtctgggatttctgattctggcctacctgttctataccctgcggctcaatacgcagactcaggatattttgcagcagttgacgcacctgttgcgctaa

SEQ ID NO: 395328 - DNA, 2709 bp, Salmonella enterica
atgattcagattgagttgtcttctctggttaaacgtcttaatccgtttactaaacaggcattggaaatggcggcgtcggagtgtatgagccagcagtcggtggagatcaccgtcgcacatgtgttgatacagatgcttgctatgccacgtagcgacctgcgggtgattgctgaaaaggtagatattggtgttgatgagctgcgtcaggcactgacggtagaacattacgccacgaccagaacggcagacagctatccttctttttctcctctactggttgaatggctaaaggacggctggctgttggcttccgccgacatgcaggcgacagagctgcgcggaggagccttactgctggccctgttgcattcaccgctacgctatgtgtcacctgccgccgcacggttattgaccgtcattaaccgcgatctgttgcagcgggattttaccgtatggacgaaggaatctgctgaatccgtggccttaacgaaggggcagtccgagcagcgcgctgcgatggccggtgaagaaagcctgctcgcccgttacgccaaaaatatgaccgaagatgcgcgtcagggaaaactcgacccggtgctgtgtcgggataacgaaatcgatctgatgatcgacatcctttgccgtcgccgaaaaaacaatccggtggtggttggcgaggccggggttggaaaaagcgctctgattgaagggctggcgctacgcattatcgcaggtcaggtaccggacaagctgcgcgataccgatatcatgacgctggacccgggcgcattgcaggcgggtgcatcggtaaagggtgaatttgaaaaacgtttcaaagggctgatggcagaggtcatccagtcgccgaaatccgtcattctttttatcgacgaagcgcacaccctgattggcgcgggtaaccagcagggcgggctggatatctccaacctgctcaaacccgcgctggcgcgcggcgaactgaaaaccatcgccgccaccacctggagcgagtacaaaaaatactttgagaaagacgccgctctgtcgcgccgcttccagttagtgaaggtaagcgaacccaatgccgccgaagccaccattattctgcgcggcctttccgcagtatatgaacagtcccacggcgtgctgattgacgacgaggcgctacaggcagccgcctgcttaagcgagcgctacctctccggtcgtcagttgcccgataaagctattgacgtactggataccgcctgcgcccgcgtggcaattaatttatcctccccacccaaacaaatttctgcgctggagacgcagtgccgccagtatgaggctgaaatcaggcaactggaacgagagcaacgtatcggtctgtttcataatgcagcgtaccgtgacgaactgcatcagaaacatgaaaccgcgaaaaaagatcgtcaggatctggaacaggcatggcagcatcaacgtgaactggtacgacagattatcgccctgcgccatgatttgctgggtgtcagccaacatggtgacgcggactccccctcagctatggcagagcatgcgccagctacactgccagagaaacgcaatcacctgataaaactgatggcggaactggacgtgacgcacaacaagcagcgtctggtctctccccacgtggataagatacaaattgccgcagtgattgccgaatggaccggggtaccgcttaaccgcctctcacagaacgagatgtcagtgattactgacttaccgcagtggttgggggacaccattaaaggtcaggaactggcgattaaacacctgcacaaacatctgctgacggcgcgcgcggacttacgccgtccgggacgtcccctcggcgcatttctgctggctggccccagcggtgtcggtaaaaccgaaaccgtgctgcaactggcggaactactctacggcggtcggcagtacctgaccaccatcaacatgtccgagttccaggagaagcataccgtttcccgcctgattggttcgcctccgggctatgttggctatggtgaaggcggcgtgctgaccgaagcgattcgccagaagccgtattccgtcgtgcttcttgatgaggtggaaaaagcccaccctgatgtactcaacctgttctaccaggcattcgacaaaggagaaatggctgatggtgaaggccgtctgattgactgcaaaaacatcgtctttttcctcacctccaatctcggttatcaggtgattgtcgaacatgcggacgatccacaagctatgcaggagtcgctttacccggtgctggcagacttctttaaaccagcattgctggcacggatggaagtggtgccgtatctgccgctgtcgcgtgaaacgctgacgactatcatcgcaggcaaacttgcccgacttgatagcgtattgcgctcacgctttggcgcagaggttattatcgaaccgacagtagcagatgaaatcatgctaagcgttacccgtgcagaaaatggcgcccgaatgctggaatccatcattgatggtgaagttttgcccccactttcattgttgctgttgcagaaaatggcgtccggcacagctatttcacggatatgtctgaccgttaaggatggcagatttatcgcagaaatcacggatgcacaggacagtaatatcgtcacccaagtacccgagccagaaattgccacggaggaagccgaagcgtga

SEQ ID NO: 395329 - DNA, 690 bp, Salmonella enterica
gtgatgaactttcgacacgctaccagtctttggtggttactgctgttacccacagcagctctggctcagagtggctcccctgcgccggataataaagcggagttggtacagtccatgcaaacctgtcgcgcagagcctgccgcgctggaacgtctggactgttacgatcgcctgcttccgcctgaccgtccgaatttctccggcgcactggttaaagcccgctcaccgggagacgcttggcagcgtgccgttgaacaagagaagcagcgtaccggacacgacacctcctttctggtgacgaaaagcgaaggggaattcgcgtcagtcattatcactacccccgcactcggcagcacaccgccacgaccggtgttgatgttcagttgtgtggacaatatcactcgcatgcaaatcgctctgccgcgacctcatcaggataacgatatcccggtgacactacgtactgacatcggacaatttcatacccgctggtttgtccgtgagaatggttacttgctggaagccagtcgtggtcttaccggtattgacgagataaaacagctttttggcgcgaaaacgctgacgattaacactggcacggacggcgctagcggacaactgacatttaccatttcgggtctggcgcaaacccttgtgcccctgcgcgaagcctgtcactggacaggatag

SEQ ID NO: 395330 - DNA, 1410 bp, Salmonella enterica
atgatcgaatattccccggatgactggtttaaagctctgctggctgcattgccggaagaaaaggtgagccaggccgtcagtgacgataacgccctgtggatcaacattgaagataatgtctcgcgactgggatcgctgactcatggtcagattaatataaaggaaattcgtcggcaggcgctgacactactggaaacggagagtaaagactttcgggtagtggtacatctgctgcgcactttgcaacatggcggcaatgcagaagagttgttactggcggcgaagttgctggtgcagtacgtacagcattactggcaacaggcatggccgaaaaaccagacgcacaaaattcgttttgcgcagcaggtgattaaacggtttgaaacagcggcaggcagttttagccgtggggccagcgaaacgcagcataacgccatgccgggagagctggcttttcttgcaaaactatggagtgacaacggatatccaacgctggcagcgtccgccgacgctttgtttacgctttaccagcgcgatatgagcgaacccactccccctactgttgtttctgctgcccccgtacaggcgacagaaccctctctgatatcgcctaccgctgtcgtggtacagcagaatgttccggtaatcagcgtggaaagtcatgatgaaaaatcatggcgagaaactctactgaaagtggcaggtattttatgtgagcgtcagccggaccacccacagggctatcgactgcgccgccatgccatatggcaaaacatcactgtcgctccacaggccgaaaacgacgggcggactccgctggccgcgttttctgccgatatcatggcagattaccagacaagagaaagcagtgcagacagagcattatggcagcaggtggagcaaagtttaattctggccccctactggtttgatggtcatgctctgtctgcccgtattgcagaacgtcttggctgtcatgacgttgctgaagccattaaagacgaagtgaatcattttttacagcgcattcctcagttgaatgtactgttgttcaatgatcgagcaccatttttatcagcgtcaacgaaacgctggcttactccggacaaaaccacactacccaccggaacgatgagacctgacgatgaggtattactctcccggcaacatcttcaggaacagggactggaagcaacgctacggtatctcaatgggctgcccgaaggtgaaccgcgagatcgtttttaccgtcagtatgttgctgcacaaatgatggaagaagccggaatggcgcagcttgctaaacagcattaccggacattactcaatacaggattacacatgtcgttatcggactgggaacctgcactactggcatgtctggaagaaaaactcacaacagcacagtga

SEQ ID NO: 395331 - DNA, 3531 bp, Salmonella enterica
atgcccggctttctgaaaggactaaaacccacaattaaacccgctatgccccggataaaaatctctgtcatgattctggtggtactggtctgggttttatcactgctgtggatctggtggaaaggcccggagtggacggtatgggaacatcaaccgtttgcccccgtcatgagccgcgcgctggcaaccgccgtatggatactggtagcgctgggctttgtgacgtggcgcgttatgaagcgtctgtactggctggaaaaagttcaaaaccagcagcgccaacaggaaaaagatccgttgagcgtggaaattaatcagcaacagcgatatctggatctctggctgctgcgtctgcaacgccatctcgatcgacgaaattatctttatcatctgccgtggtatatggttattggcccaaaacagagcggcaaaagtacgttgttgcgtgaaggataccctgccgatgatatctggacaccagaaaagctcaggggagaaccggacagcccgtggcgtattgcgccgaaagtgggagaagcagccattattttcgacattgacggtgtactgacagaacagaacgatggtaacgcgtcaaaacaaaatcctctgtatcgtcgattatggcagcactggctggagtggctggcgaaaaatcgtgaacgtcagccgctgaacgggctgatcctgacgtttgacgtggtagacctgttaacctcgtccaaagcgcagcgcgaacggcaactggcagtattacgccagcgtttacaggaaatacgcattcatctgcactgtcagttacccgtctatgtggtgttaacccgtcttgatctgttgaacggtttttcagccctgtctggtctgatagagcggagcgacagagaacgcattctgggagtcacttttacacagggagcacaccgcgacgaacggtggtgtgaggaacttagccatttctggcaaaactggatggcgcacttaaatcaggctttgcctgatttgctgctgaaacagcctgagcagggtgatcgcgcttcactgttcagtttttcacgccaggttcaggggttgcacgatcatcttatcgtgctgttgaaaggactactttccggggaaaatatggacgtcatgctgcgcggcgtctggctgacttcatcactacaacgtgggcaagtggatgatatttttgtccagtcagctgcccgacagtatcggctgggaacacatgcactgacatcatggccgctggtggatacggcgccctatttcacccggacattattccccggagcgcttctggcagaaccgaatctggccagtgaaaatggactctggctgaaatattcacgccgcaggctaggctggtttacagctgtaggttctgtagtgattgtggcgatgatcgccggatggcatcattattaccgggtaaactggcaatccggcgtcatggtactaaaacaggccagaacgtttatggatatccctttgccgcaaggaattgacgattacggaaatctgcaacttccccttctcacccctatgcacgctgccacactggcctacggggattaccgcgatcacaacagcctgaccaacatggggctatatcaggggatcaaaatcggccctcacgtcgaaaaaacctatctgcaactgcttgagcaacgatatctgcccgctctgttcaacggcctggtgaaggaaatgaataacgcgccaccggaaagcgaacagaaactcgaagtgttacgcgtgatccgtatgttagaagataaaagcgggcgtaatgatgcagtagtcaaacagtatatggctcgccgctggagcgaccgtttccacggtcagagggacatacaggcacagctcatgtcccaccttgactacgcgctggcgcatacggactggcacgcacagcgacttaacggtgatactgacgctgtcagccgctatattccatatgaaaaaccaattgtagctgcgcaaaaggaactcagtaaactccccatttatcaacgggtgtaccagagtctgaaaacacgggcgcaaggcgtactacctgccgatcttaatttgcgcgatcaaattggcgcggggtttgacgggattttcgtggcggcaaatgacgaactgttgattgttccacaatttctaacccgctatggattacaaagctattttgtgaaacagcgtgacagccttgtagatctaacggctatggatagctgggtgctaaatctgagccgtaacgtgacatacagtgatgcggacagagaagaaatacagcgtcatatcacagagcagtatatcagtgactataccgcaacatggcacgcgggaatggataatctcagcgtgcgcgattacgaaaatctgaccgatatcatcaacgcactggaacagattatcagcggcgaacagccattccagcgagcgctgacaacgctgcgtgataacacccagatgccgcctcctccggagaatctgccggaaaaaacgcgcgaaagtatgatggctgagagcgattatcaattgctgacacgtcttggtcgtgaattcgcaccagaaaacagcgtactggtcgagcaaaaagaccaaaccagtatgttacaggctgtctaccagcaactgaccgaacttcatcgttatctgctcgctattcagaactctcccgtaccagggaaatcagccctgaaagcagtacaactccggcttgatcaaaacagcagcgaccccattttcgccaccaaacaaatggcgaaaactctacccgatccgctaaatcgttgggtcggaaaacttgccgatcaagcatggcatgttgtgatggtggaagccgtgcatcacatggaactggagtggaacgataaggttgtgaaaacctttaatactcagcttgcaggacgttatccgtttaatccagcagcgaaacaggatgcctctctggatgcatttgaacggttcttcaaaccagacggcatactggatgagttctacaaagagaatctgaaactgtgtatggaaaacagcctgacgtggggagaagacggcaatatcctgatacgcccggatatccggcagcagcttgaaaccgcgcagaaaatacgcaacaccttcttcaatcagcaaaatgggctgggcacccagtatgccgtggaaacggtggcgctgtcagccagtaagcggcgcagcgtactgaatctggatggtcaattactggattacagtcatgggcgtaactttacggcacgactggtgtggccaaacacgatgcgggaaggtaatgagagcaaacttacactggtcggtacgggcaatacggctccccgcagtatcagctataccggtccgtgggcacagtttcgactgctgggtgccggcgcgctgaccagcgtggatgacaacacctttaaagtacgtttcagcattgatgatggttacatggaataccagatacatgtggacagcgaatctaacccattcactggcgggttgttcagcggcttcagattgccggaaaccctttattga

SEQ ID NO: 395332 - DNA, 1341 bp, Salmonella enterica
atgagagatattcaattaacacagactatccggactggtggcgatccgagggatcttcctgaattcaatgcaatacgtgaagagatcaacaaagcgaaccatccgtcacaaccggaactgaactggatgctggtggagtcgctcgccttaaccctctttaaaaataatggcgtggatctgcatacggtaacctactacacgctcgcccgtactcgtattcatggtcttggtggtttttgcgaaggtgtagagttgcaggctgcgctgattagccgtgaatgggataaattgtggccccagaatccacaggccagaaccgaaatgctggactggttcaattcgcgtatcggtaacattttacgtcagcaattatcctattcacccaccgatctgccgctgatgtatcgtgctgaacgggcattgcagataatctgtgacaaactgcaacaggttgagttgaagaaaattcccagagtggaaaacctgctcttttttgtacagaacacccgtaaacgatttgagcttgcacagcaaaaaaacaatgccacccccccggcacagcctccagtcaaaacgctgatttatgcccctgagggtactgatacggtggctgaaacattacattttccagccccggaaatgacggtcaaggttcatccaggtacagctggagcatccaataccgggaaagttacaggaagtactttgaaaggatttatggcaggcattggctgttctctgatatttgccgccgtgttctggtggtggcaggtgtaccctatacaacaacagcttacacaggtgaaagacacttcgctgggtacggctacgatctggctggcatcccccaatctctcagactacggacggaatctgcatcaactgcttgacgcttcatctatgcaacctctggaaactggcatgcagatggtccgaacagcagacagccgttggccggaaagcctgcaacagcagcaagcgactgcgctatggcatgaaacgctgaaagaacgtgcgcagcgcagcccacaactgaaaggctggcaacagacccggcaggatttacgcgcttttgccgatcttattatgcaacgagaaaaagagggactgacactctcatatatcaaaaacgttatctggcaggccgagcgaacgcttaatgaggaaacaccgctggaatccctgctgacacagtaccaaacggcgcgttcgcagggacagaatacgcaggcacaggaaaaagagatcaatgaacgactaaacgacgtattaagtcgctggctactgataaaaaataacgcaatgccagaaaatgcaacagacagtcgttccggaaaataa

SEQ ID NO: 395333 - DNA, 480 bp, Salmonella enterica
atggcaaatctcatttatctgacgttaaacggccagcttcaggggctgatttcgtccggatgctcgtctcaggcgtccatcggcaataaagctcaaaccacacatctggatcagataatgatttatgaactgtcacatgggctaacccgtaaccagaacgtaaactaccagactgtcgttatcaaaaagccggtggataaatcctcaccgttgctgaataaatccatcacggaaaatgaaacgttaacctgtaattttgaattttatcgcacgaatcgggctggtatgagtgaactctactataaaataaaactcattgatgccacgattaaggatatccggctatccagtcccgattccctgaataaccctggagggcagccgactgagacgattagttttacctataactccgtggagtgggagcactgtctggcgggaacaagcgcatatagcctctggaatacgcgtgtatattga

SEQ ID NO: 395334 - DNA, 168 bp, Salmonella enterica
atgatttttagaaatataacctttgtttttttagcattattgttgtttggatgttccggttcaggcattgatgcccaaaataacaaagcaaaaagtattccctcgacaccggatctgcaattaacagacaaagacgtatttggtaatgaagcaacgttaaatgtttag

SEQ ID NO: 395335 - DNA, 222 bp, Salmonella enterica
atgaattattcaggaaatgaagagctgcggcaagatatcgccgtgctttcaaacgatatgagcgaactacatcagcgaataaagctgctggagcaaaaataccgctggaacagcaaagagctgacgcaaaacgttgccggacagaccttgcgtatagcaaatgaaaaattcgctcaactttaccgtgatatttacgaagtcgatttggctttttccgactga

SEQ ID NO: 395336 - DNA, 459 bp, Salmonella enterica
atgaataccactattaaacaggatcgcattacgctgaaaaactttaagatcgcggagttcgccagcgaagaaacgctgtgcttcaccgccactgttgtctttgatggcatcgccattggcgaggctcgtaacgagggtcgtggaggaatgacctttattcgtgcacttaaggacaaacaatcacagttgtccgaagccgagaaatttgccgaaagcctgccgccaaagctctgcccgaaactgccgctgaaagacggtaaagtgttttcaattgatatcacgcttgattatcttgttgataagctggctaacgtactgcatgaggagcgcaagctgcgcacccgctattcgcgcgacaaaaataaggtgacatttatcaatgatgtattcctgttatccaggaggcgcttagaaacaaatgctctgttcttctcgttaaagatcatgggctgtatatga

SEQ ID NO: 395337 - DNA, 255 bp, Salmonella enterica
atgatgtctgaagaaggtgccacagatgaaacaggcagacatttaatattgtcctacgctgaaggcttcaatcctgaacagcgggattttgacgagtggtattacgagctgcatgatacctgtggaggcgatgactttggtgagacaatatctgcaccgaacatggtttttcacagagttcttcaataccgggaagacctcgaagttgcatttacaccgacgcaatatgcaatgcgtaccatcaagacaaaataa

SEQ ID NO: 395338 - DNA, 432 bp, Salmonella enterica
atgactacaaatactgaacgtaaatactttgacctgcacacccgcggtattggctatgttaatcgcctgcgtaccgttaccccgaaaagaggcaatccgtttacggcctgcactattgcagcgcttcggggaaccaccgatgagcctgaatatacctatatcgacgtgcgtgtttacaacgagaaagccgttgaactgctggaaagctgtcaggacgcgctgggtaagaaacagagggtgcttattggctttaatattggtgatatctaccccgagtgttttacctatgagaaaggggataaaaaaggtcagttcggctgtggccttaaaggtcgtctgataaaaatcaccctgattaaaatcgacgggtatgaagtctaccgggaaggcgcagatgaaaatcagtctgagccagcccccgcaatggcctga

SEQ ID NO: 395339 - DNA, 456 bp, Salmonella enterica
atgcactcatggagctacggcgcaaattcaggttctgagattcgcgttcgtcttgatgccatgaatattgccagcaataacgcactgacgccggatgaagaacgcaaactgctgccgccggtcaacgatccgctggaagaagaaatgccggtgaaacctgaaacgaagcaacctgctccggcgaaggaaaaacccgcaccagcagaaaacacaccaaaaacgacgagtacaaaacgcccgcagttcaccgttcctactcccgcagagcaggaaaccggcgatcaggcgctgtttggcacactctggccgcttgccgatatcgtcaaactggatgcaactgcgccccgtcaggttctgcgccagcagaaagcaagactgtcacaactcggttacgactttatcgctcaggaacagcattttgttaaaaatgccgctcccgcagaaccacagcactga

SEQ ID NO: 395340 - DNA, 1932 bp, Salmonella enterica
atgatttccggagagcgcagggcgaataatgccaacagagccataactaacgggctgatagcgcttcatattcccgtaccgcttaccaccgtgcagtgggctgatgagtattactatctgccaaaagagtcctcctacacccccggcaaatgggaaacgctgccgtttcaggtagcgataatgaacgcgatggggtatgaactgatccgcgttgtaaacctcattaagtctgcccgcgtgggctataccaaaatgttgctgggggtagaaggctatttcatagagcacaagtcgcgcaacagcctgttgttccagccgaccgactcatccgctgaggattttatgaaatcccacgtggagccgactatcagggatgttcctgtattgctggagctggccccctggttcgggcgtaaacatcgtgataacacgctcaccctgaaacgcttttcttccggtgtagggttctggtgcctcggtggtgcagcagccaaaaactaccgtgaaaaatcggtggatgtggtctgctatgacgaattgtcatcttttgagccggatgtcgagaaagaaggttcgccgacgctgctgggggataaacgtattgaaggttctgtctggcctaaatccattcggggctccacaccaaaagttaaagggtcatgccagattgaaaaggcggcaaatgaatcggcgcattttatgcgttttcatgtaccgtgtccgcactgtggcgaagaacagtaccttaaattcggtgatggcagtacgccgttcggtctgaaatgggagaaaagcaagccggagacggtgtattacctttgtgaacataatggatgcgtgatctgtcaatcggaacttgatcagaaagcgggacgctggatttgcgataacacaggcatgtggacacgcgatggactggcttatttcagcgcgtccggtgaggaggttccgccgccacgatccattacctttcatatctggacggcttacagtccctttaccacctggatacagattatttatgactggctggatgcgctgaaagatccaaatggtgtgaaaacctttataaacaccactttgggcgagccttatgaagaggcggtggccgaaaaactcagccatgagcttttgctggaaaaagtgattcattatgcggcgccggttccggagcgggtggtatatctgaccgctggtatcgactcccagcgtaaccgttatgaaatgtatgtctggggctgggcgccgggggaagaggctttccttattgataagcaaattatcatgggacggcatgatgatgaagataccctgcagcgtgtggatgccgtcattaataaaaaatatcgtcatgctgacgggacggaaatttccatttcccgtatctgctgggatatcggcggtatcgatgcagaaatcgtctataaacgctcaaaaaaacacggcattttccgcgtgctgcctgtcaaaggggcctccgtttacggaaaacccgttattaccatgcctaaaaaacgcaaccagagcggggtattcctgtgcgaaatcggtactgatactgccaaagaaatgctttacgccagaatgggggcggttactgcgcctgccgacgaagccacgccttatgcgatccgctttccggataatccggatgtttttacggaggtggaagcgaagcaactggtagccgaagagctggtggagaaactggttaacggaaaattccggctgttatgggatgccaaaggacgtcgtaacgaagcgctggattgtcttgtctatgccagtgcagcgttacgggtgtctgtgcagcgctggcaactggatctggaggcgctggcgacatcaaggaaaagcgaagagcaggataccccgacacttgaacaactggccgcaatgctggcaggaggagttaatggcaacaatcactga

SEQ ID NO: 395341 - DNA, 552 bp, Salmonella enterica
atgtgtgtccctcgccgggtgtacaacgctttattatcggtaatgactatgcgccgtatattagccacctctgccgcactttgtcttggcggctgtattaccgtgtatggcccggttaaaacgggcgggcagcaacagcaggacagccagtccgggcagcagccagggatgagcgaacagatatcaacctcattcatcggtaaccgtaaaccggatgagttgctgaatgccgtggcgctgtatttcagggagaaggccatcacagccagtgttaacgaccagaccacagggattatcgccggtacaggggatgacccggaattgagttcgttgtatctggactgttcactgttaccgcagacacaaaatatccaggagcattaccgtatcgtcgcgcaggtctggagtgccggtgaaggcagtaatgtttcggtaatggtgacaggcactgccggactggatactgccgacggtaacgataaggtgaagccggttgagtgtaaaagtaccgggatatttgagaaggatttgctggaacggttacgtaagtaa

SEQ ID NO: 395342 - DNA, 1149 bp, Salmonella enterica
atgagcaaaattaacattaagcacgtcattgttcatgagttaataaaagactcaaacaaggattttgatcattcaaaaccttttaaccttcgtgataccgaacttgataaatctaacaagattgttaaaaagctggttgatggggttatagaattgtatggctccaagggtaattcagcacattatggcatttttattggcgataaaagtaaacaaggacctattcctggattattccataattattctttagttcaggagtctgtatctagcgactttatcagcctctctaaagaagtgatgaaacagatgtatcattctgcaaaagagcaattatgggcttcaggtggatatgtcgtttttacagattatatactatctggattccgttatcttttagttacaatgatcaagaaaacaaatggcgtaacaattagcgagaatcttgaaccagaagaaatgattcacctagaattaggcaatattaatcaagcagcaaagattaattttagatattatgaagaatatcaaactgctgatgatataaaaaaaaccgagttaagctatttaagctttataagtaaagctactggtcaatccgcggcagcatattttatagctgctttaggctgtgacaaaggtatagcatcagccggtgcaacacgaaaattaccagatgaagttcgacgttttttcaataaagaacctcttttaaaaaatcaagctgatttgtttagaaatgacgttatcaaatatctagaaaaacagtttgattataaacattcagctaagttagctgatatcgaagctctagccataagtcatatgactaacttagaagagatgaaaaaatcttcattggtgcaaaaattaatgacacatcttaacagcgaagaagtaagaatcccttctgagtttgtcattaataaaaattctttagataaaatccgaaatgtaatatataaaacaccagcattgagctttcactttgataaagatttgcttggcacgactgctgatgctaaaatttattataatgatgagaatgacagtttaactttcaacaatcttccgatagaagctttaaccaaaatcaggagagcgttgaaggaaataaatgccccacttactgaagaaaacaagggatga

SEQ ID NO: 395343 - DNA, 1227 bp, Salmonella enterica
atgaatgatttaattaaagttgttgagttatttaggttatccaatcgccctcattttgatggtgataagttttctgcgactataaaatttagtgacgacgttaaatcattacttagattgcttcttgatgaaagatttcaagcaggccgacttgatgatctcgagatagatggctgtgcaatttatgaagcaaaagatattccagataatgctaatattgttgcttatacatttaaagtaactcagcgaagtgcaaaccgattttataaaaataaatctgaattagtcaaaatacatacacttaaaaaaggcgtaatgccagaatttttttacgttatagaggatgactattgctcaggcgaaaataataaaccaacctatatcaaaaaacttgaagatatttgtaatcttattgagagtttatcaaaacttgcacattttcatgatactaagaatgataacaaagtcactttttatcgtttggtttttattttacattctgaatccaaatcaacatcagtcgttattgaaaccaaaattacagaaaaggtattaaatgacaacgagatcaacttaaatctaataaactcattagttcaagttgaatctaatgccgatatccattacgttgaaaaaataaacactttcagaaacaccattattgaatacgtaagtagaaacggtagttctttcgataatttaatagaaaactggaattcaatatgcgagctatactcaaacaacctcgccgcctatatgtctgctttttcttttcacaaagcgagaaaggaagtagttgatgcagagcttgaatactctgaaaagttctcaaaaatcatatctgaaatttctaataaagcactagcgatccctatttcactagctggctccattgctatatttaatctaacatccaaaagcgattggatagttacttttttgggtataatcataaccgcaattatatcttctgcaatgattgtttcacaaaaaaaacaactcgatcggattacacactccaaagaaatacttttcactcaaataaaaacaagaattaaagatgataccagcgaccttaaggctagttttcaagagactatacataaattagatgacaatgaggatttctgtcgaaaagttcttgacatacttttatcattggcatggatgcctacatttataggcatcatcggtatttttataaaattaatgccaaatatcaattaa

SEQ ID NO: 395344 - DNA, 345 bp, Salmonella enterica
atgcgtgatatgtacgaagttatggatcgctggggagcctgggctgcagcagataacagtggtgtggactggcaaccgatagcagcaggttttagagggctattaccacacggcaaaaagtcccggcttcagtgtgatgatgatgaaggaatcatgattgatggttgtgttgctcgcttgaaaaagcacaagcccgaagaatatgagttaataatagcctacttcgtaattggcatctcacttcggactattgctaaaaaaagaaaatgttccgatggaacgataaggaaagagatgcaaactgcaataggatttgttgatggttgtctttgcatgcttaattga

SEQ ID NO: 395345 - DNA, 1848 bp, Salmonella enterica
atgtgtggtctagttggctatttcagtagatctaattgcgatgcgaatataattcataatatgttgcataaaattagacatcgtggacctgattcatttggggtctgggaaagcttagaatgcaatatccattttggtcatgttagattatcgattgttgaattgagtagcgcaggccatcaaccaatgtcaacttcctgtggaaggtttactatcatatttaatggtgaaatttacaaccacctcgatatacgtaaggaactgggcaatgagataaaatggacgggaacatctgatactgaaaccttgcttaaaagcatttctacttggggggtttctggtacattgaataaagcggttgggatgttttcctttgcattgtgggatagtgtagaacggagtttatatctcgcgagggatagaattggtgaaaaacctctctactacggctggtgtaatggttctttcttatttggctcagaattaaaagctttaaaatcacatcctgattttgatgctgaaatagactgggaagcagttaatggatatttgcataataactatatctcttcacccttaacaatttatagcaagttaaaacaactgcgaccaggccattacattaaaatgagccatgatgatcttctttcaggtgatacacctgtattgtacaagtattggtcattatcttttcctgtcagtgagaataaacacaggtatgttgattctgaatcaaaattagaagctttactatcagaatcagtttctcttcagtcgattgcagatgtcaaagttggagcttttttatcaggtggaattgattctacaaccattgtagcaatgttgaaaaaaagtggacgtgatgtatctacattttccatcggaatgcctaataaacaatatgatgaatcacgtcatgccgaagacatcgcaaaatatattggtacgcaacattatactcatatgataacacctcaggaagcgctggaggtaattgataaaattcctgcaatttgggatgaacctttcgcagatagttctcagataccaacatatttagttagtaagtttgctaaagagcacgtaacagtcgctttgtctggggatggcggtgatgaactatttatgggatacaatcaataccctctgttgagaaaaatttgggatacaaggtatttatcaaatttacatttagatactatggccaagataataacaaaaatgggatttaagcattccagtataattgctagaaagattttaaatttaagccaaggttggcgttgtaagaccccttttttattaaatgatttttggatggataagtatcgtaatacagaatttcctttattacagcctgttccttataaacggaatttagacttaaattatttagatggaatttcagcaataactcagcatgatttaaattattatctttgtgatgatatattaactaaagtggatagagcttctatggcggttagtttagaaacacgagcgccatttttagatcaccgtattgttgagtttgcatttggtctaccgacatcattcaaaatggataaatacaatcagaaaaaaatactcaagtcagtactatataagcatgtagatagtaagttattagaacgtcctaagcaaggtttttcattaccaatgaatcaatggttaagagccgagttaaaaggatgggcacgagatcgtcttgattctttaccagaaggtgttttcgataaaattgttgttgataatctttggaaagaacatattgatgatgtcaaggataatagcgagcgaatttgggcgctaagtaatttagctaattttttggagtcccatgaataa

SEQ ID NO: 395346 - DNA, 1428 bp, Salmonella enterica
gtggcggcggaagatggcagtgaccggctggtaagcagcgcaggaacgccggatacgcagtaccggttccgggggctgacgccggggcgctacaccctgacggtgcgggcggtgaacagccaggggcagcagggcgaaccggccagcacgcagttcagcatcgcggctccggcggcgccatcatttattgagctcacgcccggctatttccagattacagccacaccgcgccaggcggtatacgacccgacggtgcagtatgagttctggttttcagacgcgcagattacggatatccatcaggtggaaaacgccgcacgatatctgggaacggcgctgtactggatagcggccagcgtgaatatcaggcccggcagggattactatttttatatccgggcggtaaatcaggtcggtaaatccgcattcgtggaggcgaccgggcaggccagcaacgatgccgcaggctatctggattttttcaaagggcagataactgaaagtcacctgggtaaagagctgctggaaaaagtagatctgacggaggataacgccagccggctggatgagttttcgaaagaatggcaggacgcgaacggaaagtggaatgccatgtggggcgtgaagatagagcaaaccgaggacggcaggcattatgtggctggcctgggcctgagcatggaagacacgccggacgggaaggcaagccagtttctggtggcggcggaccgcattgcgttcattaacccgcaaaacggaaaccagatgccagggttcgtcatgcagggtgatcagatattcatgaacgaggcgttcctgaaatacctgagtgcgccgaccattaccagtggcgggaatcctcctgcgttttccctgacaccaaacggtcgtcttgccgcgaaaaatgcggatatcagtgggcatattaatgccacgtcgggggcgctgaataacgtcgttattgctgaagactgtacgattcatgggacgttgcgggccgagcggattctcggcgatatagtcaaagcggtgggtaaagagttcccgtatttcagggagccgtccaccggagcaaagcgttacgccagtggcacactgaccgttcagatagatgacgaccagtcatttgaccgccagattattatcccccccatcaattttcaggggagttattacggacgcaatgatacgtgggatgagtgtacgctggaagtgcgccgcaatggcgcgctgatttacagcggaacgagcagcagcattcctgagtcatacggtgccacgctggatatgcctgccggaggcggcatcgtcacactgacatttagtgtcagtaccagggggaacagcacaggatggccgaattccagaataagcgatctgattctgatggttgttaaaaaatccactgcagggattcgtatcagttaa

SEQ ID NO: 395347 - DNA, 519 bp, Salmonella enterica
atggaattaaaaaacgttaaccgatacattcctgatgacccggactacgataacaactttctttattttcgtagtgaagatggtcaggacttttatgaatcgctgagtaaattcacgaaaaaatataagttgtgcattgattctgaaaatataatccgttccgtatcagaagatgtgtcgcgactttatccggctggtttttcagttgttgaggtcaacaaattgcctgccggatttaatatctatggagactggcagtataagaaaggtgctgttgtcgctgttcccgttgattatcatgcaaaagccgaaactacacgtcagaagctacttaccgatgctaacagcaccattgccgactggcgaaccgaactggcgctgggtgaaatcagcgacgacgataaggtaagtctgactcaatggatggcgtatatcaggaagcttaaggcactggatttaagcgaagttaaagacgaggccaccttcacagcaatcaggtggcctgcattaccgcagtaa

SEQ ID NO: 395348 - DNA, 1077 bp, Salmonella enterica
  misc_feature (673)..(682): n is a, c, g, or t
gtgaactatgatgagttgcaagactatctattaaataatcaaagaacttggttaattactggtgtggctggatttataggttcaaacttacttgaaaagttattaaaactaaaccaaaatgttattggcttagataatttttccactggttttcaatcaaatttaaatgaagttaaagataatgtatccgacggctcctggagaagatttaaatttattgaaggagatattcgtgatttggacgtttgcaaaaaaagcgttagtggtgtcgattatgttctgcaccaaggagcacttggatcagtaccaagatcaattgagaatccaatattgactaatgcttcaaatgttagtgggtttttaaatattttagattgtgcaagaagagaaaatgttaaaagctttacttacgctgctagtagttcgacatatggcgatcatacaggcctgcctaaagttgaagatattataggaaacccactttctccttatgctgtgacaaaatatgtgaatgagctatatgcaggtgtctatgcattaaattataatttcaaaagtatagggcttagatattttaatgtatttggtagaagacaaaatcctaatggggcatatgcggctgttattcctaaatggatactttcaatatcaaatggtgatgatttatatattnnnnnnnnnngtctacaattaccatatattatttggacagattatttatatattaatggtgatggaagtactagtagagatttttgttatatagataatgtggtccaagctaacttattagcggcgcttgcaaatgataacataaagaataatgtatttaatattgcttatggacaacaaaccagtcttaataagctatttgagtatattgcaggagctctagataatgaaggaatcgaatacgataagcaacctgtatttaaggatttccgaaaaggggatgtaagacattcgctcgctaatattgataaagctaaaaaatttttaggatatgaaccatgctatgatattaatgaaggaataaaactagcgatcaagtggtatataaataatctgtccaaataa

SEQ ID NO: 395349 - DNA, 201 bp, Salmonella enterica
atggtccgctgggtattggtactgataatgcgctgggcggtaattctattgtatttggcgataacgacactggttttaaacagaacggcgacgggatactggatacgtatgccaacggccagcacactgttcgtgttacgcccggtgaattgctggctctggggtctgtacgcgcaggtaacggcaaaaccctgtcactaa

SEQ ID NO: 395350 - DNA, 537 bp, Salmonella enterica
atgtttggtccgtttgttctcgatcttttctcggacgatgaaaacgccaaatgtgaggactattacacagcggaagataacgcgctggcgcatgactgggcggatcgtctggctgaactcaacggggccgcttttggtaatcctccttacagtcgcgccagccagcacgaagggcaatacatcacaggtatgcgatacatcatgaggcataccagcgctatgcgggataagggcgggcgttacgttttcctgatcaaagcagcaaccagcgaagtgtggtggccagaggatgctgaccatatcgcgtttatacgtggccgtattggtttcgaactgcctgcatggtttatcccgaaagatgaaaaacaggtgcctaccggcgctttctttgcgggggcgatcgctgtattcgataagtcctggaaagggccagcgatcagctatatcgggcgtgatgagcttgaagcaggtggcgaagcgtttctggcgcagatccgccgcgaagcgaaacgcctggtcgggaagatggtggcatga

SEQ ID NO: 395351 - DNA, 213 bp, Salmonella enterica
atgaacaccgtcgccgcctttatccttgaagagccacatgcggggcgtttcggcttcatccacaatagcgagatttatacgaccctcatttttaaggtagaggttgccggtcatcccgtcgccagtacggccaaactcccgtcgccagcccggagcatatccatcgccgtgattgatataggtgaactgggcgctgggtacaccaccacctga

SEQ ID NO: 395352 - DNA, 540 bp, Salmonella enterica
atgagttttattcaaacactttcaggtaaacaatttgattatctcagcgcaactattgacgacattgatattgaagatattgccgtggcgctttccaatatttgccgcttctccggacatctccctgaattttatagcgtggcgcagcattccgtactgtgcagccagcttgtatcaccggagtttgcctttgaagccctgatgcacgacgcagccgaagcgtattgccaggatatccctgccccattaaaagcgttactgcctgattatcgcgagattgagaaacgtaccgatcaactgatccgctttaagtttggcttgccactggaagaagccagcgtagtgaagtatgcagatctgaccatgctggcaactgaacgccgcgatctggatattgatgacagtattccctgggtaatactggaaggtatccccccgacagatttattcgaaatctacccacttcgccccggtcaggctttcggcctgtttatggcccgctttaatgaactgatggagctacgccaatgtgctgcatga

SEQ ID NO: 395353 - DNA, 156 bp, Salmonella enterica
atgaccattacccgccgcctgctgactgccaccgcagtgcaaaaagcaaaacccgctgatcctattctccgacgatacgtcaggccattgcgggggctggctcagactgattttcatctgcgccttcccggtagacttcatacccgtcgattttaa

SEQ ID NO: 395354 - DNA, 594 bp, Salmonella enterica
atgagagatattcaattaacacagactatccggactggtggcgatccgagggatcttcctgaattcaatgcaatacgtgaagagatcaacaaagcgaaccatccgtcacaaccggaactgaactggatgctggtggagtcgctcgccttaaccctctttaaaaataatggcgtggatctgcatacggtaacctactacacgctcgcccgtactcgtattcatggtcttggtggtttttgcgaaggtgtagagttgcaggctgcgctgattagccgtgaatgggataaattgtggccccagaatccacaggccagaaccgaaatgctggactggttcaattcgcgtatcggtaacattttacgtcagcaattatcctattcacccaccgatctgccgctgatgtatcgtgctgaacgggcattgcagataatctgtgacaaactgcaacaggttgagttgaagaaaattcccagagtggaaaacctgctcttttttgtacagaacacccgtaaacgatttgagcttgcacagcaaaaaaacaatgcccccccccccggcacagcctccagtcaaaacgctgatttatgcccctga

SEQ ID NO: 395355 - DNA, 447 bp, Salmonella enterica
atgactcttgatgatgaaataaaagagaaaatattacagctatctgactcactcttaatcattgatgactgggattctatcgctgatgagctgtcagactcttttgaatggataggttcaaaaattaactggtcaaagaccagtaaacatgaaagtctaaatttaaaaggcaattattctgactgggttggtcaaataaataactttattcatgctaataatgttaataatgaaatttcacatagcaataatatttattatataaatgactcatcattggatttctcggtttctattaaacccgcacaattttatcattttttaaagatggctattgaaaatatccctcagcatcattactttttcaatagagaaaaaaaatggtgtattgtaataagctctgagggttatatcgattttgggttttcaacatcagaaaaaatataa

SEQ ID NO: 395356 - DNA, 297 bp, Salmonella enterica
gtgttaaatacaaaaaacttatctaaaacatggcatcgtctcaagtttggctatgtcggtatttcccgcatcagtcgtaaaaccaaagtccccacctgctactcacaaagccccagcctgcaccttaaaggcgactggccgaaagagacgggatttgacaccgtgcgcgacgtgacggtgaaaatatctcaggggtgcattgtggtgatggcggataataacgaggtgcaggagctgcacgagcagctttatcaggtgcggcaggtggtgaaggggattaaggagacggtggtttag

SEQ ID NO: 395357 - DNA, 1095 bp, Salmonella enterica
gtggaaagagaaccacaatccgcgtctgcccggctgatagcgcaactgggggaccggctgccatatatcaacttttaccgcttctgccagttgctggagcagagccagccggacaaaccggtcaccggcagcacctggcaggtgcgatatgagccggtacgcttccgcccccatccggggatggggttcccggcctctgaaatcaaaggggcggagccacctgaacatccgcacctgccaccgacggtccgcatcacgtttatggggctctacggcgtggagtctccactgccgacgcactatatcgatgacatcacccagcggcgggaagggtatgaagccacagtcgattttcttgatatcttcaaccaccggctgattacccagtactaccgcatctggcgtaaatattcatacccggcgactttcgaagaaggcggtaaggacaaaacctcgcagtacctgctgggactggctgggctcgggattaacggctgcacggacagtatcgcgactccggcgtcccgctttctggcgctgttgccggtgatgttgttgccggggcgtaccgcagaaggcatggcctcgctggtgcgcctgctggcacccaacacgcaggcgaaaatctggcaccatgacaaacgccgtgtgccgctgaagaagccactgaccatgagcgtcagccagcccgtcaccctgacaaaccgaccggtgatgggcaactatgccaccgacgtaaacagtcaggtgctgatgcgtctgaccaccactgacccggcagaagtgcagggctggttaccgggcggggagcttcacacggatttaatggcactgctgcatgtgtatcttgggtctcgcctggatgtccgcctgcaactgagtgtcgaccgtagcctgctgcctgacgcgaccatgagcagtaaacccaacgtcggcgcagtgcaactgggccgcactgccgtgatgcggccgctgaatgcggcgaacaccctcactcaccccaaaaccataaccatcaatcttggccgctatgagcgggtacaggaaaatattcaccgcagggagaccgatgaagatggcaattaccgctggtaa

SEQ ID NO: 395358 - DNA, 789 bp, Salmonella enterica
atggcaaataatactctcaagcttcatcgaactcattatagcattagtgagaccgctaaaatattgggctgcgatgagcaagatgttatttatattgcggatgaaaaagaaattccattgtcgctaagaatgtgtgggcgatggtctttttcaaagcataaagtaagagatgtggactcttttattcagaatataaactctttgaaaaaagacaaagatggttttagttatatatctgagtttagtttgattaagattaatgaagttaaaaaagataaaaaactagtgctggcgagtacaaaaggctatttccaaatgccaccaaaagttaaaagtgatttcgttttttatgaggggcagttcccggagtacccatcattgttatctccagctggtaccacctattctgaaatggtcaaatatattcaaattgactggaaaaatgatgatgggtttggatatgagggagatgcgtacctggagcgggaagatgtaaagaaattgcatctaatattaaatgatgatgtttctaatgataaatataaatcgttatcaattgcacagcaagaaagacatgctaccaagagaaatgagattctaagtgtggcattatatctttataaagaggatatggcataccgaaaagaaaatgccgcagcccttgctgaccttatctttagtcgggctgaggaattttggcctgataaaaaagagcctccgctatcacacccaattattagcaaactaatatcatctatattcaagaaaccattgtttacaaaaaattaa

SEQ ID NO: 395359 - DNA, 699 bp, Salmonella enterica
gtgggtgattcacctgcgatcatccataccaaatgggtgcaactaattttgggaggctttgcctctagtctgactagtctgtttacaggcgttacttattactaccttcggcgcctcacattaattagggataatttgatgagcgatttatctgataaaatttggtggacaagaaaagcaaaaataaaagctgagcgccgtcttcttaattttgattattattctcaacttcttttgctttggtattcaacttttttggtgtgttattctatttataccttagtaaaacctgctcaaaaaatagaagaagcagcgataatggtttctttgtcagtgttaattttagtgttaactctgtttatcaataatatgaatttcaaagggcgtgcattattaattaaacagtgttatgagcgactgagtgtaatacatacagcatcactttctcctacaaattctgctgagttggataaagaatatcaagcagtgttaggttcgtcagaaaaccatttagaaaaggattttgcgaaagccttagttgatgaatattttaatacgaataataaaagtcttttaacgaaaaagcctacttttatccatttcttcatgataactatgctttttcttcgtaatgtatcatcatttctatttttgtttctttttccttttgttattttgttttcattgagagccgtctaa

SEQ ID NO: 395360 - DNA, 1203 bp, Salmonella enterica
atgagtgcatatgatatatttctcaagcattttcaattatctaatttgaaaagaatttacaaagaagttgttttgttatcttcggcaacaggtattgataatatgtctcatgaagtcttttggcgctttcatgatgacgagatagaaacaattagaagaaagtgtttggctggtacttatcgcttcaataaatacaaactaaaacttataagtaaaggtaaaggaaaggccccaagagaaatttcaatacctacaatcagggaccgaatcgccttaagagctatttgtgatttcttgcaagaggtttacgcatctgatttaagttttgaattgccacaggatatggtggttaaagttaataatattattttgagtgagcagtatgattattttatgaagtttgatgtggcgaatttttatccatcaatacgacataacaagttaatatcgaggcttagagcaaaaattagagatgaaaaggtattatcgctaataggtaaagccattagctcaccaacggtttctaagcctaatgcaagtgataaacctaatgaatgtggtgtgcctcaaggattatcaatttcaaatatattagcagcaatatatttgatgaatattgataaacactttacatcaagagaagatatttcatactttcgatatgttgacgacctaatgattttttgccgttcagataaggctggatctttgatagaaagtgttcttgtaaagttcagaaggctagggttaaaaatttatgatcctattaagaatccagagaaatcgagtatgggtttattaagtgaaagtaaatttggttacttggggtattattttagcgagggaggtaaggtttcagcacgtgatggttctgttgataacttgcgacaatctctattatcgatatttacagggttcaaacactccagctttaaaagtcaggagtttttaacatggcgtataaatctgaggattactggttgtgtatttcaatcaaaatcaaagggatggttgtactttttttcagaaattaatgatataacgttgcttcattctctagatgatttcattgctaggctctgtaaacgatataatgttagcttgcaattaaagtcatttgtacgagctcactatcaaattaaacataaaagacgcgagaccaaatacgttcctaattttgataaatataatttagaacaatag

SEQ ID NO: 395361 - DNA, 885 bp, Salmonella enterica
gtgaaaaagtaccttcccctggtgttgctggctacactccccccagccttcgccattaccgtacaaaatctcgattccgtacccagcgccattaaacattcggaaggtaaacagatttttgctgagcaaatggcgggaacaacacctgcgaaaggatttggcgagcttccgcagggattatccgagaaccagtggattgcctgggttgcgccgaatgaagatcctgacaatctgattctcacgggagccaaagcctggggcaaagacggcaaatatattggcatggcctgtttcgctgacaatcaggccgatgccgcgcaggcaaagaaatatgcggataacaactgtccagagaactacagcaacgggcgcgccaataaattatatctcggcgttttttcctggcagaaccaacagctagtgccgattgcccgctcggaaaaaccgttaaatcaactctcagagtggaataaagccgccgaaaaagagagcgatgatgagtccatcagaccgctggcttattatacaaaattggacctggcaccgtaccggatcacacccgataccctggcgttcggggtgcgcgggggatactctgatgcgtattccggcggtggcgcattttatgaagtgctggagctttatgcgatcaaagacaacagaatgatcaacgtgtattccgaccttgtttatcaatatacggacatcgccggagactggaataaagacggcacaaggcagcacgacatcagcgaaagcaagtacattctcaaaatgtgctcggcaaagacgcacggattttatgatttagaacgcgttaacctgcaggataaaagcagccaaatattccgctggtctgaatcactacagcgatatgcgccataa

SEQ ID NO: 395362 - DNA, 144 bp, Salmonella enterica
atggagtattggtcgatatttttattccatatcgatggcctacagcgttctgaacggtgtaggcctgatggggtgattatggcgcatatcgctgtagtgattcagaccagcggaatatttggctgcttttatcctgcaggttaa

SEQ ID NO: 395363 - DNA, 1140 bp, Salmonella enterica
atgagtgatatcgtctatctgatggtttcagggcaacagcagggcgctatttctgacggatgtggaaccgttgcatctgtgggtaaccgctggcaatcagggcacgaagacgaaatttttgccttttcgctcactaatagtataaccagtactggcagaagttcacattttcacggactgcaattttgtaaagttatcgataaaagcaccccattgtttgtaaacgctattaacaacaacgagcagttgtatatggagttttatttctaccgcatcaataggttcggtagttgggagaaatattattatattcaactgcggggagcatttctatcagacattcaacaccaattcagcgagaataatttagatatagaaacaataaccaccagttatgaatatatcctctgcaaacatcttattgccaacactgagttcagctacctggcgttgcccgagaactacaaccgcctgtttatcccccctccaaaaacccccgtagaaaacggcctcaaaacgttaaacagcaaaggggttggcagactgcttgccgccggaggtatctacaacggtaatatcgacggtttcagggaaacggcgaaaaagttggggggcgatgctcctgcgggttacgagcaggttatggataacaaaggattgctgatccttggtgcttcagtagctgcaggcttaactatgggaaggatgaaatttcctgaattagaagaactggagcagtttggagcgaaaggaacttatacatcaaggccatttgatccagataaggcgggaggccctgttgaacatcttacaactgaaggcgtaaatattacccatgaaggaattgcaattgtagaaaaacacatatctcgcttcgatccagatcctggtaatgaatttatggtaagccgtttaaaaaagatagcgaacggtgaattgttaccagaacaagtggatttaaactactacactcatgaatgtcgagagtatcaacgttattgcaatttaggttgggaaactggcaggccaagcgataaccaagaggcttatgatctatggaataacacgcatacatcaacactcgaagattatagaataactggtaatgacctttatcacccggatgcaccatcatggtaa

SEQ ID NO: 395364 - DNA, 570 bp, Salmonella enterica
atgcccttaaccacattagagataaaaaacgcagtaccacgggagaaggaatacatcatcaatgatggcgctgggctggtggtgctggtcaagcccagcggcgcgaagctatggcgcttccgctactcgtttgccgggaagaaacaaaagctatccctcggcagctatccagatatcccactcgcgcaagctcgcatacgcgccgctgatgcgcgtgcaaagctcgcgcagggcattagcccggttaacgaacgcaaggaacagcagcaggccagcaaggttgttaactcattcgagggtgtctgcctggagtggcaagctactcgcgccgctgtatggtctgagaactatgccgccgagattaaacgcctattcgagcgtaccgtattcccgatactgggtaagcgacctatcgctgatatagaaccgttggaactactcaacttactgaaaggcatagaggcgcgaggcgctaatgagatggctaccaaggtgcgcaggcgctgcggtgaggtttactcttacgccatcgtaaccgggcgcagtaccttgacgggcgcagagaaatga

SEQ ID NO: 395365 - DNA, 567 bp, Salmonella enterica
atggcaatccttaaccactcaaaatgtgagcaaataaccacaaatacagttgcatgtaactgtatgtgcttgactcatccgcagttcaaagagcatcatagccacgtatcggcaaaatccgataccgggcatctcaccccgtgttataagttatcggcgacactgacgcgctatgcgtctttttttgtgtcgagccatcacgcatgcctattaaacgggttaagccgttttacgtctatggtaatgctggtggggcaaccgaaaggttggccggtttccgataacgccggttgtgagaaccccgccagtgttaccaccaataaagagcctctcacctctagtggtaactcctgtaacttgttatcggagatcgccaaaatggctatcgatgcttccgcacgtcttaaaacctatctattcgcggctattgaccgcgccaaccttaaagccaaagcacctgtaatgctgcgtgttagcgcggactgcgagcgctcagctcgcatccagctttccgggcgttacgtcctctcattcgctggcgttatccagaatggaggggttctgtaa

SEQ ID NO: 395366 - DNA, 252 bp, Salmonella enterica
atggctgctaccgcaattaatttcgaatacaaaccatttgacccatcaaagaaacaccttcgccgtaaagaagtgatggaaagaaccttcctagctagttcaacaatttccaaatacctgaagctcggtatcttcccagctccaacccagatttcaccgtcgctggtggtatggcgtgaatgcgacattgatgcattcatgattgagcaggcgaaacgcgttggatccggcgttgttgagggagtcgagtga

SEQ ID NO: 395367 - DNA, 546 bp, Salmonella enterica
atgcttatgaactccaccagcaaaagcaccattatcagccagcagtatgggcttttaatggcccagcaaagcggcttggaagcacctagcgccgatgcatggcgcaacctggcatcactggcagtgcttcgcatgcacgagctggagcaagaactacgcatcagcgccaatccagtggaagcatcgggaaacctcattgggctggcactcagtcgcgtaaatgagccgctcaccgccaccgaaagcgcccttctccgttacggcgaaacctgcacggcaaccccaaccgcagagcgcgagcttactgacttgcagcagcgttcccaccatgcgaatacccggcaggtggaacccagcgccttaccattcaacgcatactttaattctcaatgtcgcgccaccaacgagaagagagccaaggagcgccgccggatgataaaggacggcacctatagtgatgttcgggagcgcgaactactccagaagtatgcccgtaaaaccccacgccaaggcggtgtggcgcaggaattaaagccaactaaataa

SEQ ID NO: 395368 - DNA, 378 bp, Salmonella enterica
atgaaattagaagaaaatttaattatttgtcggaaattaagaggccattttaacggtaataaaaccgggattactggtattcgcgtgattgtcgagaaatccgaacacccgcttattcagcagggtatccagttgcgtctttttgatgagcgaaaaggggttcgcagttccgttcgctggatatcggaaggggcgcttctggtggcttctctgacgtatgagccacaggaaccactacgggacgctaaagcgctttatgcggtacgccactatcaaatcttaatgaaatcagcaggaggaagcacagagaacttattaagcgaattcaataaatggcagttaagcaaaataaaccaacttaaagatatggggaaatga

SEQ ID NO: 395369 - DNA, 177 bp, Salmonella enterica
atgagtaattttgatgtcactgagatgttcaaaaaagcaacgccaaatctacagctaatttaccagcaggttctagataacaagatcactattgagcatggctgtgcagtgattagccaaattatgaaaaacacctatgacgaaacgaccataaaaaattttaaggtgaagaaatga

SEQ ID NO: 395370 - DNA, 1356 bp, Salmonella enterica
atgacagcagttacagacctccagaaacaacgccagcaagaccaggcgcaaatcaacctaggcgcagcgcagggttattccgtcacgccgaatcagggcagtgtcgtgccgaacgtgatgcagtcgcagaagatatacgaagcaatgctcgcgcaaaagaactcaattccgaacattgagccgcctagcgagggggaaatcagaagagagtcatggattgcgtccggcgtaatgggcctacttggcgcgttggtaacaggaaatccagcaagcggcatcgcaattggcatgcaggccgcactggcacttcatgaccatggttacgatctgcgccagagggccgagcatgtctgggagttgcatcagcagggatacagcgcattagccatcgagaaatggtatgaaacaggcgacaactccgaactggataaagaacgccagaatatggaggctatgacgcgcgaccaattcaatagcgatgcagctgaccgccgtcaacaaaatactctcgaccagcaaaaaactttccacgctgatgaaatggagaatacacggctggctcgtgagcaatcacagcgtaatgcagatcgtatgtatacgctggatgaggctaaatttcttctagataagcaaaaggctgatgcggcggcgtcagggaatgtagacaccaagacggctatcaaaaacctacagcagttggcgacccataacaacaccgagaataccaaagttaagaacgccaccgactttgtagtcaaagggcttacagcaccatctacgcaagctggtgcgcagcagttaggtatgtcagcaatgggcgcagaaacgggcgtatctcctcgcccaacgcaggtaacgcacatgattgaagagtgggctcccggctctatgggggcggttggaacttggattgagcaggcctctaacaatggcatcccagaatcaggcatgcaggcaggacgcaccatgctgatgaataacgctaaatccatgtggggggagaacgcccagaacgccatcaacacacttagcaatcaaggttacgacacatcgaatccaaacgtcatgcaggctatgcagaatgcctatcccaacattcccagcgacagccttaaaaagctggtggatggcaatatgaccgctgaccagtatgcggagcagcaggccgagcattaccagaatctttatcgccctggtgatagtgataacaccaccagcgagagtaccaataccaccagcgccaacgccagcaacaaagaacgctggcctgatgcgcccgatattggaagcacctccgatggttacaaatacaagggcggcaaccctgccaacccagctagctgggagaaagcctga

SEQ ID NO: 395371 - DNA, 1755 bp, Salmonella enterica
atgagcgcaccgtgggagaagtaccagactcaaaagccgtgggaaaaatatcaggattcatttgcccagcagtatcagcaaaatgaagaggtcgcccagccgggcggtcttaactgggccgatggcttgcgtcagcagtctgagcagttggagaaggacaacgccgctacggaacatagccttgacgacgttctgacccgcaaaggtgcactgtataccgcagcctctatcgccgcagccgccgcgcagccagaaatagccgccccgctctattcctgggcggttggcgcgggtatgcagagcgtagcagcgctcaccgcagacgcggcaaatacagccatcgacacacgcggtgcaagctggctaccagagaaccctatcgccgacaccgcagccggaccgattggcgagcttattcccgttgccgctgatgcacttccagccgccaccgatgcggcggcgaacctgacagcgaaagccacaaagcctgccattgatgcgattggcaacctgatggatcgctacccgctgacgcgccaggccgcggcctatttacatggaaaaaccggatggctcgatagtttgtcagaaggtaaagcttaccgcgacgccgttccagtgggtgccgaggcgaagttaaaagaccgagtaaccgcagaagcctcccttcaggcagaagccgcgcaagcgatgaatgagacgttcacccgccgatacttcgcgcagttgggagattcgtatatggcgcaaccaatgaaggttgggcagtacggcgagactagcaacccggcacaggcgctctactggctgcgtaaccagactaaagactactccaccagcatattgcctcatccagccactatcaccggatacgaacatcttactggcgtaccggatgtagaggcccacctccgcgccgacctgccctggctggatgatgctatccagaccatagataaaggcggcgacattgataagaagtggctaggtaaaaagctggaagagcataacagcgcgatggcgaccaaagcagatgatgagatgcgtaaatgggacaagaccgatatatccgacctagttggactgatgaaagagataccggacatcgaaactctggtggactgggagggtatcaccggaacagctccacgcgagcaggcagtaaaatccatgcgcgatgcgcgtcagatgggtttgcgtgatgcaacaaaagcctacgcacaggacaccatcactcgcattgatgaggagatcgctgaacaaaaatacgctcaatctgttgctgatagcagcggggagaccggcgcagtcaccgctatcggaaagcaggttgacgcgctcaccaaaatgcgttccgacctcgaagagtacatgcagaccggagaccttaaagactctctcaccaatgacgaagaagcgatgtttatcgcagcaggaaagcttcacgccgaagccgcgccgggtctgcgcatctaccagcgctaccgggagattcgtgcggcgcataacgccctgccgattgagaaagagcctggattgtttgataaggctgtcgataagggtgtcgatactgctgcgctactgatggcaaaaggcactatgggcgcgagctggctgggtagaaacgccgccaagaaagcagtaaaggcagccgggagtagcgcggttcgcatggtgaaaaagaatgtcggcaagagcgctaaacgcaaaattgcccgaatggctgaacgtgtaattgagggcgagaaggaatga

SEQ ID NO: 395372 - DNA, 372 bp, Salmonella enterica
atgatgacagatgcgcaacatcgccgccgtaaggcgcagcaactagccagccagaaggcgcaacgtaaagcggtgaaggccgaaacaacaaaagatatggatatcatcggagaagtattgccctctgatgattttaagctggagagtgtacaccgccgtgttcgtattgctggtgggcgtggcgtgcgctggcctaaaggtcttatcaagcgtgtttatctctttggcataccgcacgaacgccggggagttctccttcctggaacgctggtatgcctagagcatcttcgggagctgaaaaagggcaaacatcgctgtctgagtgcaaccaataaaaccgttatcaccattttgccaacagcaggagaataa

SEQ ID NO: 395373 - DNA, 3126 bp, Salmonella enterica
ttgagcgccctggacaatgtaaaacactggattaagggcaaccacgccgccgcatgtgcggcgtttggtattccctgcgacaccaccagcaaagagcacgaatgtccgctatgcggcaaagttaaattccgggtacgcatgacgggtactaccgctggcacctatatctgcacctgcggcgtgaagggctgtggattcggaatccttgacctgatagcccgtaaagaactgggcgcatcgcgtgaagaaaaggtatcaggatcacaagctcgacaggcggctaagctggtggatgagcgacttggtcttggcttctttgctgatgacccaacctacaccccgccgactccggcgcagaaagccgaacaggagcgggaacggaaagaagccctcgagcagcgccagcgcgaatcagctgaactggaggcccaacaaatagctgcggcaggacgaagggttcaggatgcactttcccgcgctacgctgggtgagtgcgcctacatgcaggacaagggctttgatgaatgccttcttcccgttaccgcgcgtggtgatggcatcgtaactctgacagatattgacgggcgctaccgctccgtacagtaccttccagcaccggatgcgctggatgatagcggagaaccgcgacataagagcctgatgaaagatgcgccaatatcgggcgcgtttatcgacgttctaccgaatgacagcgccaacacgattatcatcactgagggatacgccacggcgcgaagcgtggcgatctctgagccgctttctcatgttgttgcagctatcagcgcggttaacctgcaaaacgtcgctacggcctttagagatcgttttccggctcttgaaattgtcattgccgctgataatgacttccgtaagcccagcgatatcgacaccaacggcaagcctaagatgaatacaggcatcatcaaggccaacgaagccgcccaggctgtcggcgcactggtagtatcccctggctgtttgggtggaagaaagcaggattgggatgatgtgcgccgtgagcttggcgtagagcgcatgaccgaggaatttaaacgcggcctggagagggctagaaaagaaaaagccgctggaggggcggctttatcgcgcatgacaggtacaactaacacggacaataataatcctgattcgccggattacaatcctatttccgccattctggacgatgcacagcggaagaaaaaccccgcattacgcccagccagctacccaaaggtgcccgatagtgtggatatcgccaatagtcgctgtccggatcacttcaaaaaatactactccgagcgcaccacgccgcaggaaatgcagcctgacgcagtaccattccttatcgagcgtgaaagcggctctatcgttcacatcaacccgcgcctgcgtgccagcggtgaggatggcgcgaagtttaaatacgccctgctcgacaccgttatagacggcgtaaagcccgttctacgcggatacagggacaatgaagcctataccacatttgttaacaccagacgtgcggagttgcgccttgccgtggctgattctgccgatgcgaagcgcctatccgctgcactgcgagccattggcggcaccgtcaacggtacgctggtggacttttaccgcaatgcctacctaccggaacagcgcctaccgcaagcggtatacggcagcgccccaggctggcagcgccatgatggaaagccgttctatgtcagccaggcggggaaaacgtacctcaccaacgatgtgcgctatgagttcgtcacacctattgagcagcgattcagaacgccaccatccggaacactggatgaatatcgggataaggtgataaacctcattcgcaacaatgaaggcatggtatttcaggtgcttatcgagctggcttcaatcctgtttcctatccgtaacggctcaacccgtgccgaggggattactttcaacgtatacggcccatccactaagggtaaaagtctggcaatgcgcgtaggtgccagcgtctggggcgaacataaccagctcaccgagagcgcgaacgccacatatacggcgctggttaacagtgcggtgaagtccagtggtggcgcgatgcgtattgatgacctatcggcgatgaataacgttcgcggcagcgattacgaaaaccttatctactctatcggcaacggcaagggcaagttgcgcagcgccgttgacgggaaaaacatagccgccgatgaatttagcgttatttgcctgatgacggcagaaaagacgatctccgaagaggtctggcaaaaagagagctaccgctttaaagccggcgctgaggctcgcctaattgaacaaccattcatcccggtagataaattcggcgaagctgcaaatatagaaacctacgcaggcatggtcagcaacggcattaaccagtattacggttctttgggtgtggcgtggctgaatgccctccacgctaagggatgggacgcaatacaacgcgaactgcgcgaatatagcgacatgtttaaatcgcatatggcggacactctgggcagcgcatgggatgctcgaccaggttataaagcgcgtgcccaccagatatacgccgttgtattcgcagctgggatgatgtcactcgaccttacaggcctgaccgaagatgaggtgctagacactgtagaggcctgcatcatcatggaaatgcagagcaataatatcggcaccagcagagacagggaggctgtaagcacgttgtgggacttcctgaccgccaacaccagcggcatgggggcgatagctcgcgagggcaacaaagccacccagcagcgcggaggcaatgagtctataggctggctcgacctcgaagaaacgggcaatcacgaggaatacagacctgttttctacctcaataagaagcaactcaacacgatcgcaaaatccgagtgcggcatgaccggcgcggatatgctggccttgctggataagtacggctaccacgagacaccagacacggaacgaggacgcaaagatgggacgatgcaaaagcgcgttcgcaccgccgcaggattcagtaatctctatttaatcaaacttagcgccccagcccacgcagaggaataa

SEQ ID NO: 395374 - DNA, 159 bp, Salmonella enterica
atgcgaggaaataaagttgagagtgactacgccgctgactgcgaatcagccacggtaaattatagcaatgccatgaccgccaatcatggcagaccggaggaagcgcagacccaaagcgaggcatatcaaacgtatcgtcatgagtgcgacactcactga

SEQ ID NO: 395375 - DNA, 795 bp, Salmonella enterica
atgagagaatacgacccggtacaggcagcttatgcccagcttatgggcatcccataccatgacgcgccccttgacccgtcaattatcgaatttaggctaaaggccattgccacccactaccgccagcaggacaaagatatgttagagggctaccttgccgggcttggcgctatcaggaacaagctcaaggcggctctgaaagtgctgcataccaacggcaagaaaaagtacgaggaatacattcgccgtgaactgagtgagtttgataacaacttcgcggggctggatggcagggctagcaatctccttcggggattgctcgatataccatttaggcggggaaccgctaaagatgatgcggaaataaaggtaacactatgggccgtgaccaatcgaataattgattatcgccgccaattttccgacaggcagatagaggaatatgccgccaccgtaaccagcaatgtggataatgagaccataccgccagcgatagccagtctgataatgacagaagtatcagaactggtggattgtgccgttaaaacaaatgtgtttgcatacgtcgataccgggttaacctgcgccgagttcgtaagcatggatgactgtatcgaggcaccacccgccaataaactatcgcctcagatgcacgatcccattcacggcatcgcagagcagagcgtatggtacggcgggagtgtcgataccgaaaccgttgatgatctcattgtgtcccttgttggtgggcttctatatcagcaatgtccctctatgtgtcccttagaagaatag

SEQ ID NO: 395376 - DNA, 324 bp, Salmonella enterica; identical to SEQ ID NO: 374567

SEQ ID NO: 395377 - DNA, 399 bp, Salmonella enterica
ttggttttcctgtttctggcgacgctgggggcggggttatttaacttgatgatttgggcgtttatgaccgatgtgtgtgactatcaccagtatgttactggcactcgtgaggatggcaccgtttatggtgtgaacttcttcgctcgcaaggtgggtcaagcgtgcgcaggagccattggcggttttatgctggccatcattggttatcaatcctcgtcaatgggcggcgctgtgcaaaccagcgccgtgcaggaaaatatttatacgatggcgaatctcttaccggcttcatgcctgtttttggcggcggttattctgatttatttctatccactgaaccgtaaagaaacgcttaaaatggaagaaacactgaataaattcaatggtattagtcagtaa

SEQ ID NO: 395378 - DNA, 426 bp, Salmonella enterica
atggcattcggccagtatctggcaggcatggcgttcaacagcgccggacttgggctggttcacgctctggcgcaccagccgggcgcaacccacaacctaccgcacggcgtctgcaacgctattctgctgccaattatcgagaactttaaccgtccgaacgccgtggcgcgttttgcccgcctcgcgcaggcaatgggcgtagatacgcgtgatatgtctgacgaaaccgcaagccaggaagcgatcaacgccatccgcgcgttaagcaaacgcgtcggtattccggaaggttttagtcagttgggagtgacgaaagacgatatcgaaggctggctggataaagcgttagctgacccatgtgcgccgtgtaacccgcgcaccgccagccgcgacgaagtgcgtgagctgtacctggaggcattatga

SEQ ID NO: 395379 - DNA, 132 bp, Salmonella enterica
atgttcctgataatactaattaaatcgctcattatcggcgtactggtcggcgtaggggggggcgctggggctgctggcgaagaaaacggtggtttatacggtgctcgcgccgcaggggattgtctggggtga

SEQ ID NO: 395380 - DNA, 1242 bp, Salmonella enterica
atgagtaattggaagaaaactaccttaggacaagtcgctcaggtatttacaggatttccatttaaaagtagtggctactctgatgatcctaaggatattaaattattgagaggcgataatatcgctcaaggaactcttcgatgggatgatgctaagagatggccaaagaatgagtacgaaaaatacaatcagtatcagcttaaagaaaatgatgtcgtgcttgcaatggatcgtccatggattggtgcgggattaaaatacagttctatacgcaaaaaggatctgccatccctattagttcagcgtactgcaaggctacgtggtagcaccgaactggatattatttatttaaagtatattattgccagcccttggttctctaagtacattcaatcaataaatacaggatcattagttccgcatattagctctaaacaaattaaggattttcctattaatttgcccccccttccacaacaaaagaaactatcttctgttctggctgcgcttgataaaaaaatcgatgttaacaatttcattaatgccgaactagaagcgatggcgaaaacgctgtatgactactggtttgtacagtttgatttccctgatgccaacggaaaaccgtataaaacttccggcgggaagatggtatataacgccacgctgaaacgggaagttccggtagggtgggcggttaacacgctgtctcaaatagcgaatatcacaatggggcagtctccagccggtgagtcttataacgaagatggaatcggaacgctatttttccagggttcaacggactttggttggcttttcccaactcctcgtcagtacacaacatcacccgcaagaatggcgaaaaaaggtgatattttactcagcgttcgtgcgccagttggtgatatgaatattgccaatgccgattgttgtattgggcgagggcttgcggcattaaacagcaaaagccactcagatggctttttattctacgtgatgaagtatttcaaacagatatttgatcgtcgaaatgcggaagggacaacatttggttccatgacaaaagatgatttgcattcactgcaagtcgtttgcccagaacccggattactgaaacgatatgatgatattgtttcagaatacaataaaatgattttttcgcgtagccttgaaaaccaggatctaattaaactccgcgactggctcctccccttgcttatgaacgggcaggtcacggtcaaataa

SEQ ID NO: 395381 - DNA, 255 bp, Salmonella enterica
atggtacagctcaatctggtaaaagtactgctgttgagcaatgaacgcaccggctatgtccgctatgagattttctcgaaggaaggtgaaaatcctgactatccggagaaaatcatcgtttatcgtgagggaaatatcggtgagcatggtgagcgtggctggatcaagactgacgatgttataagtcttgaacacttgggatttcaacccggaagaggattccagaccgtgataacctatcacatgcgcccttga

SEQ ID NO: 395382 - DNA, 297 bp, Salmonella enterica
atgctgggaaccaacggcctgccacacgccattagattctacgatccgctgatggagttgctgggatatccccgtggcggccggaatgaggagatcacatggtggggcgtattcaacggtaataacacgacggcactgggtgtcggaaaaccttttgataaacaggatgccacgaccggaaatggtgtgatggtcgccctgattgcgcggtctgccgaacatatccagcagcttcacgcgctcgctttaaaccacggtggcacggacgagggagcacctggcctgcggaggtggtga

SEQ ID NO: 395383 - DNA, 609 bp, Salmonella enterica
atgaaagctacatggaccgtcacgcctgtggggtatcagcgcattgcgaaacgatgcccttcttgcaagattaaacgggacttcacgccgtcaggtacatttcgggttaattctcaaaagaagctgctggatgtatggaatatctataaatgcacacactgcgattacacctggaatatctccctgttttctcgtctgcacgtcagcaaaattgaccgccagctttatcatcggctaatgacaaacgatgccgccacggtacagcactttgcaagtgatatcgcgacgctgaagcggaacaacgcagagctatcgggtcggcttggctttaccgttcatgagcactggccggtaagcatcactgcccaccagcgggtccgcgttagtgtcaggacttcccgttcatttcaggtcagcttgttgtcgattttgaagcaacagctcatgctgagcgctgatgaaattctgagagggttggagtcagggcagatcagcggcgttacgatgaagatgcttaaatcgagaaagctaaaggcagcggaatatgaattccagctgtctgcggaaacgttatatgcccggcgcaggattgttctgacacgtctttaa

SEQ ID NO: 395384 - DNA, 225 bp, Salmonella enterica
atggaatacagcatcatgacagaacaaatttctttgcttgatgaccaactggtggttttgcgcttcatcacaaagctaacagggctgacggacgagtggttttacaagctaataaaagacggactgttcccgaagccaatcaaactgggccgcagctcccgctggaagaaaagtgaagtcgaaggctggctacagcaacgtattgcggattcacgcggtcattga

SEQ ID NO: 395385 - DNA, 207 bp, Salmonella enterica
atggaacgcttcttcaggagtctgaagaacgaatggatgccggtggtgggttacgtaagcttcagcgaggcagctcacgccataacggactatatcgttggatattacagcgcactaagaccgcacgaatataacggtgggttacccccaaatgaatcggaaaatcgatactggaaaaactctaacgcggtggccagttttcgttga

SEQ ID NO: 395386 - DNA, 1242 bp, Salmonella enterica
atgttcaaagtaaaaggtatatttttattaagaataataggtgctatatttgcactattagtaagtataatcatttcaaggatactgacaattgatgaggcagggaatgttttttttctgttatcaataacaggagtgattgcttccttatcaacaatgggacaaaacaatctaattttaaagaaatgtgcatctattaactttactataaaagctaaaagtaatttttttaatgattgtataataagaagcgttatatttagtctccttttatcgattgtcttaattccagtaatatattatttctccaataatcaaatattgtattctgcttggtatatagtgcttttgctgatagttttctcttcggttaatattttattatattcttacattcaatctcaagggaaagtaacgctcagtatcgttatacaatatatttttcaacctttaacattcatgttttttgtgtttttttgttttctttttgctaaggaaagtggtttttcggtatcattatcatatttgttatctgtagtgcttgtcggtagtggcgggttagtgtatgcatatcgttgtgaagtagaagaggaaaaaacagcttgtaaaaaaacagcgttaattccttttaaatttcgggagttatcagagtattttataggtaactcgttgggaatgataattgttcaatcttatgtggtattatctggtttattattaccatcaagtgatgtggcaataattgcagtatctgatcgaatatcgttaattgtaaatctgctcgcgatgtcaataagtgctatacttgcccctaggattgcaagtttatatagccaaggtaaaatgtatgacattaaggttctgactagaaaagctatagtatttataacaataccatgtgttttacttcttgttattttcccttttgtttctgattttttattatctatttttggcgcagaatatcgtaatgctagtgaagttttactgattttagtattagcgcaaattattaatgctgccttatgtcctatatatgtcttcttaaatatgagcgataaacagggttttattagcaagctgcatatatatatgttgattcccgcacttggattatctttttatttaacacatcttttgggaattgtcggaatagcaatatctaaattaatagttgtagcattaatcaatttaattccattggtttatagtgtttttttatttaatcgggtaacaaaatga

SEQ ID NO: 395387 - DNA, 795 bp, Salmonella enterica
atgagagtcatatatccattcattaaacgaatgattctatcatttcattattatttattttcgtcagcttttttatcttttaaagtcaagaaaaggtatgctgatcgattggagttcgataattacgtttccactaaattaaaaaaacagatcgaaaataaaaataagctacctagtgttgctgcaatttaccgggtgaaaaatggggctgaatatatagaggcctctatgttatctatatcaagttttgtcacgcaaataattgtagttgataataattccatggatgacacaaaaaatattgtggaaaaattgtcatatgagttaagaggcgtttgtgatataaagcttttttcttatgataaaaatcttgctatcgctggaaatggatatattgatcgggtaagtaatggtgagggttcgttagctgacttttataacttttgtttttctttaactgagtgtgaatatgtaatgaaagttgatgctcactatatattctcagcatatggtattgatattttacaaaaacaaatagccaggaaatatgatggtgtagtttttagaggggttgagatatttggcaaatggatgagtaatgaattatttttatatcgccgttcattgggtcttaaatatatagatggagaattatatgaacgtttagtatggaataaaaaaaatacacatataaaaaccatcataaagccactttatttacatgttaagcgattatcatacgctaaatacctttataatgctaaaggggctattcatatgaaatataataagtag

SEQ ID NO: 395388 - DNA, 876 bp, Salmonella enterica
atgtccgcgctctacgttccatctgcgggcgaggggagtgacagagttcctggccgggatgaattctggtacgaggaagagctgcggcagaaagccatcaccggggcaaaagcgacaacccgggtgaggttcttctggcgccaggatgaacagggcaacatgcgggtctatggcgtccatacaggagaaggtaccccgtatgaaggtgtccgtacggcaaacatggtgtggaatagtgagcataatcattatgagttcactccagcccacggtgccgatggtccgctgattacatggacgcctgagagaccagaaggcagtgaccttccctcacataccggcagcaacatcaagccaatagaccaggctacaatactcgtcacgccaattcctgacggcaaagatgaatacacgacaccaccattcccggtgccggatgaacgcgatcttaacgattacattctggtgttccctgcggactccggaattaagccgatttatgtttatctcaaaaccgcgagggatgagccaggtgtggcaacaggggagggtaagacactatcaggttctgaaaaatggcttgaagcagcaagctctggtctgggggcacctgtgccatcacaaatcgctgataagctaagaggacaagagtttagtaattttgatgcgtttagaactgccttttggaaagctgtagctgatgactcagcattgctttctcaatttacaagaggtaaccaggctttaatcaaaaagggatacgcacctttcactattccagaagagcaggttggtggtcgcaaaacatttgaaatccatcataatgagagaatagtagatggggggaggtatttgacatggacaacttgtcagtag

SEQ ID NO: 395389 - DNA, 147 bp, Salmonella enterica
atggggcattgtaaatggtggccagcaggcaaagtatttgcgtacggtacggattacggcgacgagtgccagaacgcgctgtgcggcctgttaaaagcgtctttgttctctcgcctggattgcttaatatactatgacgtcctgtaa

SEQ ID NO: 395390 - DNA, 171 bp, Salmonella enterica
atgaagggagcgatactcccttcgcaaccatgtcagaatacgacattttggtgttctattatttattattttctggctgtgaaggttatgctgttggcagactgctccagtcaacataaaaaaatactgtctaataacattctgatagagctcactgttcagcaaaagtaa

SEQ ID NO: 395391 - DNA, 1092 bp, Salmonella enterica
atgagttcagctacacataatacttccgcaaaacctgtgacagatgtttatctcctggcaggcctgggattactggcggtcaggattatccagggatttatttactgggggggtgggagccgacgttttatttatgcaccggataaacttaacccagatgcaccacactggatggcctataagtttcagacggcaatgcccggcgcgctaatggggctggagcatgtaatttcatttatgctccaccatttctggctgctgtatgtcggcgtaatacttttcagcgccgctgaactgttcgccggactgtttctaatgataggtctgttcacccgtatttcggcgctgttgtcgatgcttttttccgtattgctgatgctgatgtttggctggcagggggcaacctgtattgatgaatggacaatggctgcctgtaatctggcgatgggaaccacactgtttctttgcgggtcacacagctatgccctggacaacgtgatcctaaagagaaaacctcatttggctgacagtcggattttccggtggtgctgtggttcgctgtctgtaccgctaaccccggccggttataaaaaactggcgctatggctattagctttcgtggtagtttttgatgtagggacttacagttactatcgtggctcagtggtcacgccataccatcatggccctgttagtcctaccacacatcatatccgcctgactgaagggaaattgttccctgatggccggattcatgttcatgcttacctggacgcagggacgcctgaggcaccggaacatatcatggaggcacggctgaaagatgctgatggtacagatcttgttcactgggacaccaccatgctgtcggcattgccgactgatagtttccggaacgattatgcctacaataaattcactcctggccactacggcatacaggctattgtcggttcagccgccacgctcacccttccagccggagtcataaaaagaggtagcgatagactgccaaacggcccggtaacgctggtactgatagatatggaaggacatacgttcagcacgcctcttgaacgggtttccgaatga

SEQ ID NO: 395392 - DNA, 291 bp, Salmonella enterica
gtgccgttatcgacgcaggctgtcgccctgctggaacagattaaggacatcaccggagaatcggtatttgtctttgcgggggcgcactcaatgaacaagccgatgagcgaaaacaccatcaacaaggcgctgcgggtgattggttatgacaccaagaccgaagtctgtgggcatggactccgcacgatggcctgtagcgccctgaacgagtccggactgtggtcaaaggacgccatcgagcgccagatgagccacaaggagcgcaacggcgtgcgggcggcgtgtacataa

SEQ ID NO: 395393 - DNA, 720 bp, Salmonella enterica
atgccagcttataatgctgagaaaactattagaaacagcattctctcaatattgaaacaatcatatagtgattttcgattatatgtaattaatgatagttcaacagatttaactgaaaatattgtcaaatcaattaatgatgaacgtatagtttacttagtcaatagttgtggtaagggtgtttcatcagctagaaatgttggtattgctgcaagttgtgggaagttcatagcattttgcgacagcgatgatatttggtttgagaaaaagctcgaggaacaattgaaatatttaaacgacggatatgcagtcgtttgctctaactacgaagttataaatataaataaaaatattttaacagaaagaaaagtggggatgttaataacatataaaaatatgttacattctaattgtataggcaatttaacagggatttacaatacttctataataggtaaggtttatcagaaggatattggtcatgaagattatttaatgtggttgactattgtaaagaaaacaaacttagtgtattgcgtccaaaaaaaccttgcaaggtatacggtatctgaaacaggattatcttctaataaaactattgctgctctatggcagtggaatatatatagaaatgagttgggtttttctatgtttaaatctttaaccctttttattatctatgcttttaaagctttttctaaaagattttactcgaattaa

SEQ ID NO: 395394 - DNA, 243 bp, Salmonella enterica
atgaggaataaatcgatgcgtaaagcatgtattgaacttatggcaggaactaacgcagcctgcctggttgcaggtgaactaggcactggccgctgtctttacttggttgtagtaatggaagacatatttggtaaacctacaacagaacaatggctaaaatccttaaggctctgcgaggccaaggcggctgaactgaagtatgaagttgcccgcattcgcggcaagagtctggctggcttgtaa

SEQ ID NO: 395395 - DNA, 189 bp, Salmonella enterica
atgcaggactattttttggagtcgttgaagctccagcgcattgatttttttgtgaagcttgtagcggctagtgagtgcgatgatgaagagaagcggcttgctatccagtgggtttcggagctgactgatgagttgatggcgaaaatccgtactcatgagtacaaccgctcaatggatctccccagttag

SEQ ID NO: 395396 - DNA, 1266 bp, Salmonella enterica
atgcttattgaattcaatgttgagaactatctctcaatcaaaaacaaacaaacattttcacttattgctaacaaaagtaatgagttagaagagaatatctttacagttgaaggaaacgttaaccttaatgttctcaagtcagctgttatttacggtgctaacgcagcgggcaagtcgaatgtgcttctcgctgtcagagctatgatggatattgttactcaatctgcatctaacactcaggctggcgaagaggttcctgtattccctttcaagcttgattcagattcaattaaaaatcctactgaatttgaagttacttttattgcagagggcattcggtatcagtttggtttttctgctacaaatgaaagaattattgatgaatggctttttgcatacccaaaaggaagacctcaaaaatggtattttagagcttgggatgaagagaagcaggaatatgagtgggattttggcgcatcactacttggtgaaaaacaagtttggcagcgctcaactagaaataatgccttgttcttatctacagctgttcaattgaatagtgagcagcttaagcctgtatttacttggtttaaaaaaacactgagactttctgggattaaaggatgggccaatacattctccgccaaacgctgcactgaggatacgaagaaagatatcttgaatttcttgaaagctgcagacattggcatcgatgatgttttagttaaaaaagaaaagtttaatccagacgatttgccatctgatatgccagatgatttcaaaaaaatcgttatttctaacatgaaggataaagatatcctcgatgttactaccgtccattataatgataaaggtgagccggttagtttttctcttgaggaagagtctcatggcactcagaagcttttttctttagctggcccatggttggatgcgctcgataatggatatgtactatttatcgatgagcttcatgatacattgcatcctaagctggttagttttttggtaaatctttttaatagtcatgatactaataaaaaaggtgctcagttaattttctcaacgcatgaaacatccattctgaatcaaagcatttttagacgagatcaagtctggttttgtgagaaaaatgaactcagtgaaactaatctatatccattgactgattttagcccaagaaaaggaagggaaaatctagaagccgcatacctagacggtaggtatggagcattgccgttcatcaagaaattgacgggaatttga

SEQ ID NO: 395397 - DNA, 720 bp, Salmonella enterica
atgggaagcgaggatttatttaaaaagaaacgtggtcctaaaactgctaaggatctggcaagacgtaaggcagttaaatcccctctcgctaaaatattaattgtttgtgagggtaagaaaaccgaaccaaactactttgaggatttgattaaccattttgaattacttacagcaagtgtaattgatgtaactggtgagtgtggctctagtccaatgtgtgttgttcgtcatgcaaaagaacagtataaaaaaatggctgaacagggggctccttatgatcaaatctttgtagtgatagataaggatgcccacactgactatgtggcagcactcgatgctctcaggagaagtaaaccaagttcaagttggtttactgtgaattcagtaccttgttttgagtattggttacttctacattatacctattcgacaaaggcatttagaaatttaccgggtaacagttcggggaatcaaattgtcagtgagttaaaaaaacatattaagaactatgagaaaggctcaaaagggatttttcatgaaaccctaaatgctttaaagtcaaaagatttaaatgaagtagtccttagggctaagagaagtttacaggcagctgaagctagcgatactgataatccaagtacaaaagtttttgagttggttgaaagacttatccagcttaaaaaacaaatagagtcaaatcgtaaacagaaacgatcttaa

SEQ ID NO: 395398 - DNA, 1050 bp, Salmonella enterica
atggctaaccgcaaaaaccgcagcaaggcaccgcgcggccagaccgccaccgatacggccaacatggtcagtaatgcacatgcggaggcgtttacgtttggcgatccgatccccgtgatggaccgccgggagttatttgattacctggagtgcgtgccggtggaccgctggtacgaaccaccgatcagcatggatggcctagcgcgaacttaccgcgccgctgtgcatcactccagcgcaattcaggtaaaacgcaatattcttaccagtaccttcatccctcaccgctggctgtccaaacaagccttttcccggttcgcccaggactttctggtattcggtaatgcctaccttgaaaaacgcatgaaccggttagggcagatcatggagctgcgcgcctcgcttgccaaatatacccgtcgtggcattgacccggacacctactggtttgcacagtatggctacaactcacagccctatcagttcgatgagggaagcgtgtttcacctgatggaacccgacgttaaccaggagctttacgggatgccggaatacctctccgccattccctccgccctgctgaatgaatcggccacgctgtttcgccgtaagtattacctaaacggtagccatgctggttttatcatgtacatgagcgacccggccgccgatcagaaagacgtggacaacatacgcgaagcgctgaaaaaatcgaaagggccaggcaacttccgcaacctgtttatgtacagcccgaacggcaaaaaggacggcattcagatcatcccgctgtcagaagttgcagcgaaagatgagtttcttaacatcaagaatgtgagtcgtgatgacatgctagcagctcaccgcgtgccgccgcagctgatggggattattccgacgaacaccggcggattcggtgatgttgaaaaagcggcgcgcgttttcgtacgcaacgagctgacaccactgcagggccgcatcacagaagttaacgagtggctgggtgatgaagtgatacgctttaacccatacctgaccgatgaagactga

SEQ ID NO: 395399 - DNA, 1869 bp, Salmonella enterica
atgtttgcggtgataggcgcgtgtaaacaacgcgttgggcttgtgcgaactcccacacaatgcgaagccggggaaagtgctgatttgaggccgtatgtttgtgccatgacaacactgaccaccgcagacctcgatccccgtcgtcaggcaatgctgatgtactttcagggataccgcgtagcccgcattgctgaaatgctgggcgagaaagttgcaaccgttcacagctggaaaaaacgcgataagtggggcgaatatggcccactggatcagatgcagctcaccaccgccgcacgttactgccagctcgtcatgaaggagcagaaggaaggtaaggactttaaagaaattgacctgctggcgcgtcagtcagaacgacaggccaggatcggaaaatttaacaatggcgggaatgaagcagacctgaatccgaacgtggcgaaccgtaataaaggcccgcgcaagccaccggaaaaaaacctgtttaccgacgagcagatcgaaaagctggaagaaactttccgcgccggtatgttcgagtaccagcgccactggtgggacgctggcgttaagcaccgtattcgcaacctcttaaagtcacgccagatcggtgcaacctactatttcgcccgtgaagcgttgatagacgcgctcaccacggggcgaaatcaaatctttctgtcagcgagtaaagcgcaggcgcacgtttttaaacagtacatcatcgacttcgcaaaagaggtggacgttgagctgaaaggcgatccgatggtgctgcctaacggcgcctgtctttacttcctcggtacaaatgcccgtaccgcgcagagctatcacggcaatctgtatcttgatgagtatttctggataccgaaattccaggagctgcgcaaagtggcctccggtatggctctacacaaaaaatggcgccagacctatttttctacaccttccagcctgacgcacagcgcctacccgttctggtctggcgccctgttcaataaagggcgcccgaaagccgacagggtagagtttgacctttctcacagtagcctggcgcaaggcgttttatgccctgacggccagtaccgccagatagtcaccattgaagatgccgtaaacggcgggtgtaaccttttcgacctggaccagctgcgcctggagtacagcccggacgaatacaacaacctgctgatgtgtcagtttgttgacgacctggcctccgtgttcccgctggcgctgctgcagtcctgcatggttgacagctgggacgtgtgggacgatttcgaaccgcttttactgcgtccgtttgcataccaccctgtctggatcggctatgacccggcaaaaggaacgcagaacggtgacagcgccggttgcgtggtcattgcgcctcccgtcgtccccggcggtaaattccgcatccttgagcgtcaccagtggcgcgggatggactttcgcgcccaggcctcagcgattgaggaaatcaccagacgctataacgtgacctacatcggcattgactcgaccggcgttggcgatggcgtttacaaaacggttaagcagttcttccctgccgcgcgtgagtttgtctacaacccgaccgttaaaaatgccctggtgcttaaagcctacgacatcatcagcgggcgccgtctggaatttgacgcggggatgctggatatcgcgcagtcctttatgtccattcgccgttcaaccaccgccagcggcaaccggccaacctacgaagcatcccgcacagaggaagccagccacgcggatttagcctgggcaaccatgcacgcactttataacgaaccactggcaggagcttccgccagtaccagcaacatcgtggagattttttaa

SEQ ID NO: 395400 - DNA, 828 bp, Salmonella enterica
atggcaaaaaaatctaagcgttttcgtattggggtcgaaggggccaccactgacgggcgcgttattgaacgtgactggatcacccagatggcggcgagctataacccgcaggtatacaccgcgctgatcaatatggaacacatcaaggggtttacccctgatgggcctttccgtcgttttggcatggtggaaaaactggaagcggaagaaatcaccgaaggggctttgtccgggaagatggcgctgtatggctggattgccccgacggacgatctggtcaccatgaccagtaactggcagaagcttttcacctcaatggaagttaacaccagctttgccgataccggctccgcttatctggttggtctggcggttactgacgatccggcaagcctcggcactgaaatgctgcagttcagcgccagcgcagaacataaccccctggcgcgccgcaagctggacaaagacaacctgtttactgctgctcttgaaacgctgatcgagtttgaggacgtgccggaaaaaaccagcctgtttacccgcgtcaaagagctgctgtcccgcaaaggcgccgatgataacgcccgctttgctgatgtgaatcaggctgttgaaaccatcgcgcgtgagcatcagacgctggcggagcaggtcagcacccatcagaccgatttcagcaacaagctgagcgatatgcaaaaggttgttgatgagacaaccagcgcactctccaccctgcgtgagcagctttccactcaggacagccgcagcgaacgccgccctaatgcgaccggcaataacggcgcagaacaaaccaccgattgctga

SEQ ID NO: 395401 - DNA, 1149 bp, Salmonella enterica
atgaaaaaagagacacgttttaaattcaacggctatctgacgcagctcgccaaactcaacggcgtatctgtgagcgatatcgcctcgaaatatacggctgagccgtcagtcgcgcagacactggaaacgaaaatccaggagtcttcctcgttcctgcagcaaatcaacattatcccggttgatgaacagtccggcgagcgtctggggctgggtattggttccagtattgccggaaatactgataccactcaaaaagaccgtgaacccgttgatccgacttacatcgacggtgaagggtacaagtgtacccagactaactctgatacggcgctgtcttatgcgaagctggatttatgggccaaattccaggacttccagacgcgtatccgtgacgccatcattacccgccaggcgcttgaccgcatcatgatcggcttcaacggcgtgaagcgtgagaaaacgtcagaccgcgcgacctatccactgctgcaggatgtgaatatcggctggctggagaaaatccgccaggagaaacccgttcaggtaatggataagatcgtgtccgaaggcgaggtgatttctcagactatccgtgttggtaaaggcggtgatttcctgaatctggatgcgctggttatgggcgccgtgaatgagaaaatcgcgccgtggtatcaggaagatacggagcttgtggttatcgttgggcgccagttgctggcggataaatatttcccgatcgtcaaccgtgaccagccaaacagcgaaacgctggcggcagatcttatcgtcagccagaagcgtatcggcaacctcccggccgttcgtgcgccgttcttcccggcgaatgccatgctgatcactcgcctggataacctgtctatttactggcaatcaggctcccgccgccgttcggtcatcgacaatccgaagcgtgaccgcgtggagaacttcgagtccgttaacgaggcgtatgttgtcgaagattacgacggcgtttgcctggttgagaacatcgaactgttgcccgtgcaggcaggtggcaatgccagcccagcgctgacaactgagaccatccaggaaatagtcacggcagcggtgaaaggcgcgcttgatgcgcaggcagctggcggtgctggcaccggagcgtga

SEQ ID NO: 395402 - DNA, 654 bp, Salmonella enterica
atgaatccgttccgtgctcacactcagtatgtacaggcacaggatgccgcccggcagggcggcagtaatgccagcctgacgggctacaaccagatgctgttacagctgacagaacaccgcaggcgccttaaaaccgtccagtcaaatgagcgcaaggctcagctcaaacgtgagtttcttcccgcttatgcctcatggattgccggtttacttgatgctgacgcgtcaggccaggacgacgtggcgatgtacgtcatgatctggcgcattgatgccggagactataccggcgcgctggacattgcccgccatgccattaaacacggctgggtcctgccgcagcgattcaaccggacctgcgggaccgctgttgcggaagagtttgccgacgcggcaatgcgcgctttttctgccggtgaatcattcagtgccgccattcttacccaggtgctcgatatcgttgaaggtcaggatatgccggatcagtcccgcgccagacttcataaggcgatgggctacgcgctgcgggataacgatcaggcagtggcggcacttaaccatctgaagcgtgccctgcagctggataacagttctggcgtcaaaaccgaaatcaacaagcttgaaagccgattgcgacaggcaatgtcggcttaa

SEQ ID NO: 395403 - DNA, 468 bp, Salmonella enterica
atgcaattcgtttcgccggaacaggccggggaaagtacccaggacgttattaaaaacaccagtttctggcctgatgtcagggtttcagagttccgccgtgatatgcgcatggatgggagtgtcaccgatccacgcctgcgtctggcgctgctgacagcgattgctgaagttaacgccgatctttatgagttccgcgagaaacaacgggcgcaggggtatgcgagcctggccgacgtccctgctgatgtgatcgacggcgaaagccagcggctcatgctgtatcgcagagcggtgttttgctgggcaaaagcaaacctggttgagcgctatcgcgattttgacgcaaccggcgacggaagcaagaaagctgaagatatcgaaacaaccttaggcgagctttggcgcgatgtgcgctgggcggagtcccgcctgcgcgatatgccgcatatgacggtggagctgatttga

SEQ ID NO: 395404 - DNA, 216 bp, Salmonella enterica
atgacgcttgaacgaatcagcgcctttatcacttactgcgttgccctgcttctggcatggctcggcgatttgtctcttaaagatgtatcgaccatcaccggtcttgcgctggggattattactgcagcggtgacctgttatttacgctggaaagcctaccagctgctgcgggacggcagaatatccaggggggaatatgagtccttcaatcgttaa

SEQ ID NO: 395405 - DNA, 429 bp, Salmonella enterica
atgacgcgcgcgctggcggtgatcctggctctggtgctggcactgctgggctggcagtcatggcggcttaacaatgccggtcacaccatcggggcgcaggcagaggcgcttaaaaagaacaaacaggagctggcgaagaaaaacagccagctcatcagcctgtccattcttaccgaaaccaacagccgggcgcagatgcaactttatgctgcagcggaggagacttccgcgctgttgcggagtcgccagcgccggatcgaggagctaaaacgtgaaaacgaggatttacgccgctgggctaacactcctttgcctgctgacattatccggctgcgggagcgcccggccctcgccggaggtgcagcttaccgtgagtggttgtccaaaagtgacgcaatgccgcctggacaggtcagcgccgcgcagtaa

SEQ ID NO: 395406 - DNA, 432 bp, Salmonella enterica
gtgaacaagccgcattccttacgcaacgccctgaataaatcggtggcgtatgtccgtgacaacccggacaagctgcacctttttgttgataacggttcgctggtcgcaaccggcgcccgttcaatgtcatgggaatatcgctacaccctgaacgtggtgattgaagattttagcggcaaccagaatttagtgatggcgcccgtgctgctctggttaatgaccaatcaaccggacgccatcaacaacccggagctgcgcgaaaaactttttacctttgacgtcgatatcctgagcaacgatctgtgtgatctcagcctcaatctgcagctcacggagcgcgtgattgtcagcacagacggcactgtatcgagcgtagaagcggtgccggaacccgatgtacccgacgaaatgtggacggtgaaacgtggatga

SEQ ID NO: 395407 - DNA, 444 bp, Salmonella enterica
atgtggctgtacactatttatctggaccggagtgacaatataccgcactaccgtttcgtgggttacaaacgtgctaccgcaattgatattctggcactggcagtaacgctcttttgtggtatcagtgacctgaaaactgctcctggtatgagctgcatgtccacactttgggcaaatcatcatagttattattccatcacgacctgttttctccataatgatacatgcaaatacaaaattgagaaccacttattctatttcgagatcatcaattttcacttccagctccatcctggtcgtaaatccattatccgggctgacagaatgcgtcagggtggtaatggtccattctgcatcatcaatcggctgcttaaatcccgtcaccttcaccggcatttccgtatagagatcagcccgcccctcagcgagctgcagggaaaatga

SEQ ID NO: 395408 - DNA, 591 bp, Salmonella enterica
atgactactcaaatttctgcagaaaatctttctctgctaactcacaataatatccctgttatcacaactgatttcctcgctaatctgtacggcacgaaagccaaaaacatatctgataactatctcaacaacacttgccgctttgttgtggggaagcacttctttaagcttgaaaaagacgatttgcgtgagtttaagaacagacccgataacttcgggttagttggcttacgtgcccgctctctaattctctggacagaacgcggggcagctcgtcacgcgaagatgcttgaaaccgatcgagcgtggaaagtgttcgagaaactggaagattgctacttcaatagaaaccaatcacatgcgatgcaaactatggtgcttgagagagaggccataacgcagcttaacctcatgttctcgtgcgttgagcatcttcgcttggatatgtggccccaccttagcgctgttctgcccgggctgaacagtgactatcataagacttttgtaaaattggcgatgatgttttctttattaaagaaagagagagcggagtgcaagcgaaaagctgagaaaatcttaagcggtcactaa

SEQ ID NO: 395409 - DNA, 2145 bp, Salmonella enterica
atgttgaagcaggaaaacggccagcagctcccggccatccgctggccggtgccgaataagcggggcggggagttccgtaacttggaggagatgctggcgcatctggaaggtgaagctaccgggcactggctgattggccgtaatggtatgtggcacggtggtattcacatcaccgacaccaccacgccgtggtgtgcgctcagcggtcaggcgatgaatgaggcggtggattttccggtgccgtttaagggggagcaggccgtgcggtgcatggcggatggtgaggtagtggcgtaccggattaaccgggattacctcagcatgccgtggtactggggggatttacgctactccgggtcttttgtgctggtccggcaccgtgttcagtcaggtaaaacgccagagagcgggctgaccttttacaccctgtacatgcaccttgctccatggctggcgtacccggagcaggacagcacggcgttcaaagtggcagacggccagcacctgaatgcgtatgtgaacgcgtcccggcagtgggtggcggcagagctgccgtccggcacgcgggtaacatgggataaagcggccagcgccgacaccatgagcgggagcaacggacggcagtatgcgcatgtcacgctggcggagccggtcacgggcagcatgagcctgaaagctggtgacagggtgtggacggtgtgtgacaagggaaatctggttccggcccgcgacagcgccacccgtccggcgtggtggtccccgttcttgccgccgtcgcgcgaaaccgtgcagtttgatacggtggtgtgcccgaccccttatccgattaaggccggggacccggtggggcatttggggtattttcaggtacctactgaggacgggcatgaaaaacgctatcaggtgcatatcgaatgcctgaccacggacgacctgccgcgtttcctgagcaacccggagggcgtggggcgcgacacacctgcctttgcccgctgtccgaagggcataccggtgtacctgcaattcagcggtggggaaatacagaagggactggtaaccacgacgagcgaagcggtgatggcgctgtccgggcaggcggtgacggacaacgagggtaaacgctactggccgggtggttcgtcgcgcgggctgctggcagagtcggatgtgcagctgctgtcccggtatgacctggcggggcggggttttgagaccacggaggacagcccggcgagctttgaccatctcgatgggaagacgcagcctaaagggctggtgaagacgatttttgagcggtttttcaacgtagcggataatgacgggaagccctacagcaaagcggtggcgttcaactaccagcaactgctggacaagattgacggcacgaaatccccccactataacccggagcagtaccggcgtgcggtgcagaacccgtcaatgcgtgaccatctgtaccgactgtgcgtgaagcaccccagcgactggtattactcgtcggaagcaccggtgtggaaagcgttctttacgccacagctgaaaagagatgcgccggagtggtatgcctacagcatgaagttcctgacggacatccgctggatgtaccgtgtggcagggatggtggaaaatccatggcatatgcatccgctggtttttctggatgcgataaatattaagctaaattcgaaaaaaccaatcgataaagagtttgttaaattcgtctatgaggaagcgaagaaagatgaattaacatcacatgttccggctgcgataactacagcacaagccattctggaaacagggtatggaaaatctgttcctgtcgatatttatagtggtgagtatagtaataatttatttggtattaaggctcatggcaatccaagctttgtctatgttaacacccatgaatttataaatggcgttaaaaaaccaatggttgataagttcatgaaatatgattcgtatgaagaaagtatttcaggaagatctgatttctttgtaaaaaacaaaagatatcattttttattcgattatacagaccattgtgattgggctaggggtcttcagcgtgccggatatgcaacagatcctaactacgcagataagctaataaaaataatgaagagagagaatttgctatga

SEQ ID NO: 395410 - DNA, 348 bp, Salmonella enterica
atgaaagttatgtttgggttggttcttctgctttctccattgttatcctggggagggtgcgatgagattaattcagtagctgagcgatatcaagatctgactcagtcatcagattcaggatatgtggtaactgatacacatagggtatatttttatagtgcaccagatgagacatgtaaaataaaagatttatttataattaatggtgacaaggttaattcatatgcagaatataagggattttcatctgttatcttttttgacaaggacggtgagccagtgagtggatggattcattccaaatcaattaaacccaccggtacgggcattggccctgagtcaaagtag

SEQ ID NO: 395411 - DNA, 258 bp, Salmonella enterica
atgatgcagattaaccagtactatgagcaccttctaatgggaggggccaagttccaacttataatgactattaatcttacgctaaacatggataattttgcaggcgagggggatgtgaatctgttcggcgagatgctgcaccggttcttcgcgctctatgcggatattcacctctttaatcagctcacgctggtactgcaaccgacagggaaacgactgagatggcgcgagaattacagccagcacgtaccaggctga

SEQ ID NO: 395412 - DNA, 207 bp, Salmonella enterica
atggaacgcttcttcaggagtctgaagaacgaatggatgccggtggtgggttacgtaagcttcagcgaggcagctcacgccataacggactatatcgttggatattacagcgcactaagaccgcacgaatataacggtgggttacccccaaacgaatcggaaaatcgatactggaaaaactctaacgcggtggccagttttagttga

SEQ ID NO: 395413 - DNA, 594 bp, Salmonella enterica
atgagattgattgtggggatgaccggtgcaaccggcgcgccgcttggcgtcgagctactccaggcattgcgggcgatacctgatgttgaaacgcatctggtaatgtcaaagtgggcgaaaaccactattgaactggagacgccctacacgcccgctgaggtagccgctctggcagattattgccatagtccagccgatcaggcggcgaccatttcctctggctcatttcgtaccgacggcatgattattatcccttgtagcatgaaaactctggcggggattcgctccggctatgccgaagggctggtgggacgcgctgccgacgtcgtgttgaaagagggccgcaagctggtgctggtgccgcgtgaaatgccgctcagcacgattcatctggaaaacatgcttacgctttctcacatgggggtggcgatagttccgcctatgcccgcgttctacaacctgccgcagaccgttgacgatattatccagcacatcgttgcgcgcgttctcgaccagtttggtctggagcatacgcgcgcgcgccgctggcaaggactgcgacaggcagcaaatttttcacaggagaatggataa

SEQ ID NO: 395414 - DNA, 990 bp, Salmonella enterica
atgcacattacatacgatctcccggttgcaattgaggatatcctcgacgcgaagaaaagactggcagggaagatatataaaacagggatgcctcgctctaactattttagtgaacgttgcaaaggcgaaatatttctcaagtttgaaaatatgcagcgtacgggctcatttaaaattcgtggcgcttttaacaaacttagttcgttaacggaggctgaaaaacgtaaaggcgttgtggcctgttccgcgggtaaccatgcgcagggcgtttcgctttcttgcgcaatgcttggtattgacggcaaggtggtgatgccaaagggcgcgccaaagtctaaagtagcggccacctgtgattattcggcggaagtcgtgctccacggcgacaacttcaatgacaccattgctaaggtgagtgaaattatcgaaactgaaggccggatttttattccgccttacgacgatccgaaagtcattgccggacagggcactattggtctggaaattatggaagatctgtatgatgtcgataatgtcatcgtgcctgttggcggcggtggtttaattgcaggtattgccattgcgattaaatcgattaaccccaccattaatgttatcggcgtccagtctgaaaatgttcatggtatggcggcgtcttattacgctggcgaaataaccacgcatcgaacgaccggcaccctggcggatggttgtgatgtctcccgcccgggtaatttaacctatgaaatcgttcgtgaattagtggatgacattgtcctggtcagcgaagatgaaattcgtaacagtatgatcgccttaattcagcgcaataaggttattactgaaggtgctggcgcactggcttgcgctgcattattaagcgggaaattagatagccatattcagaacagaaaaacggtcagtattatttctggcggcaatatcgatctttctcgtgtatcacaaattacgggtttagttgacgcttaa

SEQ ID NO: 395415 - DNA, 522 bp, Salmonella enterica
atggccttacacggaaaattgatattgaacggagcagattatgcacctttcaatctgtatggtgtgggtgtttttatggctttctctggtaaaggagtatatcggaataaaggagcatgtggggcaattccgagtgacggaccactaccaccgggaaaatactggatagtagagcgaggagcaggtgggccaggctcatgggttaaagctaaggcacaagatctatacaacaaattctactatggtgctgagtttggtcgggatgagtggtttgccctatacaaagatgattggggaattgatgacggaacttggatcaatggtgttcatcgtggattgtttagacttcatccagatcgagtttctgagggttgtataacaattgcacataattcagactatgcactcatcagaaatgcacttctaagaacggctccaatacaagttccatgtatgcggtcacttatggctcgtggctgggtggaggtaatagctggtgactataacaacacttgcccgtag

SEQ ID NO: 395416 - DNA, 333 bp, Salmonella enterica
atgaaaaccgttcaagacaaagttctggaactatttcgagaagagatcccagggtatttagacagcaactggaaaaaaatcccgttagaacttgattctgatttatttgaagctcccggcgatgatctgcatgaagctttgaataaatttgaaaaaaaatttaatgtagatttatcagaagttaaatggtcgtgttatttcccttgggaaaatactccaatgctaacacggtggtttaaagtaaaacggaaggatgtcgaaagaacccgtaaacctttaaccgtcaaaatgtttgcagaatcagcggaagctggaaaatggctttttgactga

SEQ ID NO: 395417 - DNA, 480 bp, Salmonella enterica
atgctcagacccagcaatgaagtggcacactgcaagctctacgtcaccaaaacgccgattacagcagctgatttactgaatgatcgtgtactgccattttatgagtctcagggcctgccgatgctgagaatactgaccgacagaggcacagaatattgcggcaaagtggaacatcatgattatcagctttatctggcgataaatgacatcgaacacacgaaaactaaggcgatgtcaccacaaacaaacggcatctgcgagcggttccataaaacgatactgaacgagttttatcaggtgacgttccgcaaaaagttatatggcgatcttgatacattacaatcggatcttgatgaatggctggctcactataataatgagcggactcatcagggaaaaatgtgctatggccggacgccgatggaaacattacttgatggaaaacgcatctgggctgagaaaaatttaaaccagatgtaa

SEQ ID NO: 395418 - DNA, 921 bp, Salmonella enterica; identical to SEQ ID NO: 375329

SEQ ID NO: 395419 - DNA, 516 bp, Salmonella enterica
atgaaaataggatcccaaccagtcacattgcaatatgcatatacaggtaacgaggcgacatcaaaccttgagttattaaataaatggagaatagaatcccctgatattgagagggaggagcgtaatagtatttacaacaaaataatagaagcaaatcataccgggagcttatcaattactgctcgtcatgttacctctattccggtatttcctgataatttatccgagttgactttatcttcatgctatacactggagtctattccaaatcttcctgatgggttaaaaagtttaactatatctgaaaataagaacattaaaatttcatatttcccagatagcttagagtcactatctatagatatgcaggcatatgaagaaaattattctttccccacgttaccttatggattaaagagttttactgcatgttatggtaaatttttgcccccccttcctccgcatctgtcttctttgtcactgcaaaatttctctgaaatattatgtgctgagtaa

SEQ ID NO: 395420 - DNA, 777 bp, Salmonella enterica
ttgactatctctcgctacattggcgctatcgcaattatctgggttttaatgattgggtttaaccccgcgctacgtattccccttaaaagttattttaaacccttaaactttgccattatttgggaagtgatgggtatcggggttccagccagcgttgagtcggttttgtttaatagcgggaaattacttacacagatatttgttgctggtatgggcaccagcgtcatcgccggtaattttattgcattttccattgcggcgttaattaaccttccgggaaatgctttaggttcagcatccactatcattacagggcgtcggctaggaaatggacagataacccaggcagaaatccaacttcgccacgtgttctggctttctactataggcctgacggccatcgcgtggattagcgctccctttgccggtattatggcgtcattttatacccacgacccggacgtcaaagatgtcgtggtgatccttatctggctgaatgcggcatttatgcctatttgggccgcctcatgggtactgcctgccggttttaaaggcgcacgcgacgcgcgtttcgccatgtgggtctcaatgcttggaatgtggggctgccgcgttgttgcaggctacgtgctgggaatagtacttggctggggcgtggtcggtatctggctgggtatgtttttcgactgggccgtacgtgccgctctcttttactggagaatggttagcggaagatggctatggaaatatccgcgccctgagcgaaaaacaagatga

SEQ ID NO: 395421 - DNA, 657 bp, Salmonella enterica
ttgaacgtctccactaccttacgcaaggttgtcgtccgtacgccctggtatgccaaacgcaagagctacaaagtgttgttctggcgcgaaatcaccccacttgctatccccatttttctggaaaatacctgtgttctgctgatgggcgtgctcagcacttttcttgtcagttggctgggcaaggaagcaatggctggggtggggcttgccgacagttttaatatggtgattatggctttttttgccgcgatcgatctggggacgacggttgttgtcgcctttagtctgggtaagcgcgaccgtcgacgagccagggcggccgccaggcagtcgctggtgatcatgacgctgtttgccgtattgctggcggccgtcatacactattttggcaagcagattattgatgtcgttgccggagaggctactgcagatgtaaaagatctggcgctaatctatctggaattaacggttctcagttatccggcggccgctattgctctgattggcagcggtgctttgcgtggtgccggaaatacgaaaatacccctgctgattaatggcagcatgaatatgctgaacattatcatcagcagcattcttatctacggtttttttcctggcaaggactcgggttcattggcgctgggctggggttga

SEQ ID NO: 395422 - DNA, 738 bp, Salmonella enterica
gtgaaaaaaggtattagtccgtatactaactttctaaataagaaacaggcgtatattaaagttaaatctgaaattaatgatattgagagcagtataactttaaaaaaagatgatatcgagttggttgctaatgacattaaggcacttaataatgaattaaggctttcattatctaagctcatatctaaaaatcagcaagaacttgaagtcgttaactcaaccctaaaagtaatagaaaaacaattagatgaagaggatatttactctcctgttgatggtgttatttacaaaataaataaaagtgccactacacacggtggtgttatccaagccgctgacctactctttgaaattaaaccgaaggtgaagactatgctggctgacgtaaaaataccacctaagtacagagatcaaatatatttagacgaagctgtcaaactggatgttcaatcaattatccagccaaaaatgaagtcatatagtgcaacaatcgataatattagccctgactcctatgaagaaaacaccggaggaactattcaacgatattataaggtaattatttcattcgacgtaaatgaagatgatttgcggtggttaaaaccaggcatgacagttgatgccagtataattaccggaaaacatagcattatggagtacctgctgtccccgctgatgaaaggcgtggataaagctttttcagaacctgttaatactaaaagattaaatctttcttag

SEQ ID NO: 395423 - DNA, 297 bp, Salmonella enterica
atgagcggtaagcattatcccgaagagtttaaaattggaacagtcaaacaggttgttgatcgcggtcattctgtttccagcgttgcaacacgtctcgatatcaccacccacagcttttacgcctggataaagaagtacgatccggactcatccactaataaagaacagtcagatgctcaggccgggctccgccggctccagaaagagctgaagcgggttactgacgaacgggacatattaaaaaagccgcggcgtacttcgcaaagctgtccgactgaggtacgcctttatccgtga

SEQ ID NO: 395424 - DNA, 303 bp, Salmonella enterica
atggatttcgtatcggatagtctgtttaatggacggcgcttccgggcgctggctgtagtggataattttagtcgggaatgcctggcgatccatgccggaaaatcattgaagggcgaggatgtggtccgcgtaatggaagcgctgcgggtgctggataagcgtctgccggtacgtattcagacagataacggcagcgagtttatcccgaaaagtctggataaatgggtgtatgaacatggtgttacgatggacttctcccgccccggaaaaccgaccgataacccgtttattgaatcgttttga

SEQ ID NO: 395425 - DNA, 3420 bp, Salmonella enterica
atgcccgtaacattagaacatgtatcttccagacctgtacagcagaagttaaatacaaaaggtatcaaaacttgggacaccatacagtatctttcagctttggatagagcgcataaggatactgtttttcatgagcaaatatctaatctacccgaagagtatattcatctggatgagatggccagagatgaaaaagaatatggtttaaacatttatgaattcttctttgaatcaacggctgaaattatctgtgaagatattaaatcaactttggatttttattatttgaaaagtccaacattccggcggttggttaattatagggtcaattatagtataggcaacgacattgataccagcaagtgtgaagtaatagtatccccaaattatagttatcagaacactgaaggaagtagtgtgtatttatcgttgccgttcgataagaaaggctttcccattaatcctgagtctaacgactgcgataataacatatcatcagaaaaagtattattagatttatttttgaagcatattttatatgatgacttgaaggtggatcatgaagttacaaatctatactccaatgtcatttataaggaaattgactctacggcaatggcacatgcatcattgtgtttttctcaggcagcagtgagcgataaacatgagttatttaatattgacagcgtaactgttcaacctaaaagtaccgagcaagtcatatttgcgggagaggaaatacaaaaacaaattttattcttttttgaaagggagaataattttcagccagcaaccgctcataaaatggagagaaatataaaaaatattgcagtaacgggtttgttactgtcatccagattaacaatagcagacggttatgggagaaaaaatgataattcagaaaacaagaataatttttcatctgataaagaaccactgagatatgcaagggctctcccggaggatcatcccgccccaaatatggagcctcatccgttaggtaagatgatagatggtatagttgaacattcttcatttgctgcaggaatttcacttttcgaaacactcaaaaaaattggagatgagcaactgatgaatgattataaaagaggctatcatgaattacttgtattttctcaaacagggcagtggacgcatggtggtagaagacttactgctgaatatatgttcaatggccttataattcatttaaatgagattgaaatacttattaatgatggaggaaaggtttcttttgagcattttgtaagagaacatattgaacatcaatataaaatatatgagttaatcgctcgtgatatgctggttcatcctatatatatcagatccagaatttttgcaaccagacgaattgcctctgccctggcaaatgaaagccattatacgaaagtgctaaatcaaaaatttccagagatttctagttcaaactttgatactttctatggcaaggaggctatttttacagcattaaaaattgtgaattattacagggaagaaaaaaggatgcccacttttaacagtaaaaagatgaaagatctttttaagcgagttcaattagtgatacatcatttatccagaaatggtggtgataaaatattgcttagccctgatggcataaaatataattttagcatcatgcgtaatattatttattggtgtacaaagataactggtccagttaatgataagaaaataaatgccctatcaagaaaaattgtggttaataatgaattttccagacatattaagtctctatttcccagaggaaacggatttttagagcttttaatgaaggccgctattgacacacaactaaattgggcagagaaatattataaagcagtgacacatgtcaaggatcatatacaagattgtgatgtattagggttaatgaatataaacaaaatgttgcgagatacagttgttgggcttattcatgagattagcgatattgcacaatccagttggctgacagcagaagatcaacatgagaaacaggttcaggctctcgaagcgttcaaaagtaaagtctcatccatggatggcggacaagctttcgtgtatggttttgataaagtcattcaggaggggctatggggattaattgaattgagttttgatatcgatgataccgttcatcatcgaactgtttcttcactaagtcctgcgtcaagagcaggtcttcattttttaggaactatctggaatattgtaatgagttttgtccctggttttaatgctctggctggtaccagcagcattcttaatcgggctattgtggaaaaatctactgatgtatgtgggtacattcaggatgttatacgtattggtatggaagctgctcctgttgcagaagcgaagtttacagaaagggcgtccaacgcaaagtatacgggcctccgatttgttgaaaataaaatagaaagaggtgtaatacgatcgccgattcagaaggggagtaattataaagttattgagtcaatagagaatattgattttatttatcaaaaaagcactaataaaattctcgagctaaatcccgagggaaacgatggactctatcgtgctacagggtttaataaagaaacgcatggttattataaacagtcaggagaaggcttttacagaaagcagaaatcattttcaccgttgtcaacggaagcacctaatacgataaaatatggcgagagggaaatcattttatctaaagagcctggttcagaaacgtatcagggaaccttttctgataccggaaaaaatgtaggtatgacattttatagaacttctgacggtaaattttaccaggcctctgggctgaaagggggagggcctattcggcatgttgacaagccttattcagagttaagagaaggcgacgttgggtatgatgaggatcttctggatatttccgatgattcaccactactggaggacatgctgccttctctgtcagaagaattatatcctacatcagaagaaaatgtgcaaagtatatataaaaaactccagagtggtgatactgcagcaggcgagactgaagttgtattatgcagggggacaactggtccgcaggctgaaaatattgttaagcttaaaacagcaggaggtgtggagggcgccgatccgaatgtattgcctgtctctgaagaaacagccaggctgcaggttcggaatggaagagtggtacctgaatatactacagatcttagtgttgcagacaggtttagcagggagcattatcttattatcgttaaggtaaaagccaaatatattacacgaggtagtgtaagtgaaagcggctgggttatgccacatactgcaccagtggaacctgttggcataattgaccggacgtatggtcatgcagaaaatatcggacaggcaaacgcttctaagtaa

SEQ ID NO: 395426 - DNA, 597 bp, Salmonella enterica
atgccatcagcactaagtgaatttaatttctcctttgatcaaaaagaagaaattaaaaaggtgttatatgatgagatttttagtgatttatatataaacttgctaagattggacaatctacttcgcccttaccttgttttaaatcatgatctatcttatttcgacaagttcactgcggaattgactaataatcaaataaaaagatcattaagagataatcagactgaattcaatgtaagatcgcccataacaaaagacggatatgcacgaccattctacatctgttctgtcttcgaaaattacgcaacgtgtaattcgaacaattcattaggactacaaatagttgatgttttaatatcaaatttcaatagagcattaaaaggaaatttcgataatcctatacagattgcaaaagccataggtaagctaacaattaattcttatattaaaggtgtatatcctatagaattaatttacttaagtgaaaagttaacactgagtaaagacgaactgagtttaattagtatggtagaagatatgccatataaactttttggcttcaagaaagatcccgacaacatatacaagggcatctga

SEQ ID NO: 395427 - DNA, 684 bp, Salmonella enterica
atggaaaaagagactattgatttttgcatcatatcattggttcatcatgttgaacgacgggagcgattaataaatgaaatggttaagtataaaatacaatgtcgtgtttctaacgctattgatggcaggaaattgttagcagacgagtatttttctttgttcaaagctaattcatcaaaattatttggaagaggttttcttactccttctgaactaggctgttttttaagtcatagaaaagctatatctgagtttattatgagcggtaaacaatggcttgttatgttggaggatgatgtcattcctaatgataatgtacgagaattacctagtgtaatacattcatttaatgaaagtagtatatatatattgggggggcaggatggacttaaaagtttttctcgtgtcgtaatgaggagagaaaaagataacgagagggtgagaaaagttctgctgggcacttatcgttggatgtacaggacatgttgctattgtattgatcgaaaaggtgcaaaaagtattatgaagttaatgaatgaacaacgcttttttcctgatgattggagttttattatgaaaaatgcaaatttggaaaaactcttttatggtagttactttactcatccagttgatttaagctcaagttctatagaagctgaacgtatattcatagcaaaaaaatga

SEQ ID NO: 395428 - DNA, 570 bp, Salmonella enterica
ttgttgtcaaagtctgattattgtttttttttagatagtgatgattatgtgtctgaattggcacttaattatggagttgattacttattggcttataaagacatcgatgctgtgatttttaaaagtgagtacgttaaagatttaatcccgtttatgtttgatgaaataaaggataattacattataaagagatataaaaaaggatttgtaagagagtgtatagaatgtatggggtatccaaaaatgttgacaattggttggaaccaatctaatactctatatagaacaaataaattaattaacttttacaatgtacgatacttgacttggggagaggatattcctttaaagttaagtttagcttctagtataagttttgcgtcggttaacatgcctcatgcttctcagattaagatatcttatggccgtggatataaatatacgcttaagcaaatttttgaacttgcgttcgagatttttaaaacctcaaagaggtattatgcattatttttaagttttttaataattatacgatatacaccttcttatatttataaaaaaattaaataa

SEQ ID NO: 395429 - DNA, 327 bp, Salmonella enterica
atgaatatacgccgcccgcacgctgttgcgttcctgatggctcatctgccgctccaccgcatcccgcgaccagagttcagactccaccagcgcgctacaggccatcgtccggaagccatgtccgcagatgtcggttttggtatcgtagcccatcagacgcagcgcccggttgacggtgttttcgctcatcggcttatacgggttatggtcgccgggaaagaccagctccagatggccggagatttcctgtatttgcttcagaatggcaatagcctgtcgggacaatggcacaatatgcggagtacgcatcttagcgccacgacctga

SEQ ID NO: 395430 - DNA, 252 bp, Salmonella enterica
atgaaaaaaagaaatttcagcgcagagtttaaacgcgaatccgctcaactggttgttgaccagaactacacggtggcagatgccgccaaagctatggatgtcggcctttccacaatgacgcgatgggtgaagcagttgcgtgatgcgcggcagggaaaaacgcctgaagcctctcccattactccggaacaaattgaaatacgtgagctgagaaaaaactacaacgtattgaaatggataacgaaatactaa

SEQ ID NO: 395431 - DNA, 252 bp, Salmonella enterica; identical to SEQ ID NO: 375233

SEQ ID NO: 395432 - DNA, 213 bp, Salmonella enterica
atgaccgaggcggcgattgacggcgggctgacccgcgacctgtacgccgcgctcggggaggagctggacaacggcgcgtgggccgtgcgcctgtactacaaaccgtttgtccgctggatatgggccgggggactgctgatggcgctgggcgggctgctgtgcctggcggacccgcgctaccgccgccgtaaaccattgccggaggccggatga

SEQ ID NO: 395433 - DNA, 159 bp, Salmonella enterica
atgcgcaataatcgcccctgttttgtctggcgcttctggtcatgccggaacgtcacctacaccacaaccgccaccagcgaacgcgaagcccgtttacagcttcccgccgttcgcctggtattcattgcccgtattcgtatgagggttaatcatgcttaa

SEQ ID NO: 395434 - DNA, 666 bp, Salmonella enterica; identical to SEQ ID NO: 394556

SEQ ID NO: 395435 - DNA, 540 bp, Salmonella enterica
atgacacattgtcagacaacgtccactgaaacacacactgcggaggtgcaaacccttcgtaaagtgattcagcaggccaccgaccagtatccacgtcttgcggcgtttctgttgacgctgccaggcgtatccccggaaaccgtacagcattttcacgacagcgtttatcaacaggtaagggaactggccatcagtcgtcagctaagcggcaggccagtaccgccaacggtactgcgctggatttgggcgtctctgtcaggtcaggcgtgcaggcatctgttgctgctgaaccaggataccttctgccatccccgttacgacaaaccaccggatcgctgttttgaaacgatggaaaccctgctgcgggatgcggttggtgggagcaatgacatccggcatcaccagcctccggagatgaccgtattcagggtggaccggacacagcagacgcaggctgacgcgcagtacagccgtcttcgggaatgcgccctgtcgctgactcccgcagccactgcccgtagtgaacgaatcagcccctga

SEQ ID NO: 395436 - DNA, 237 bp, Salmonella enterica
atgccacgtggcgacaaagaaaaaattttaaatttccgtattccaatcccttgtcttgataacccggaaaaatccctggctatccagtcagaaatcgtgcgcattctggacacatttacggctttgacaaacgagctgacaaacgagctgacaaacgagcttaaactacgggagaaacaatacaactattatcgcgataacatattgaattttaatggaatttcggggggggggtaa

SEQ ID NO: 395437 - DNA, 1395 bp, Salmonella enterica
atgggaaaactgactgaactcgaacggtgggatgaggacgtctatcagattgagacgtctgaccctgtattaggtggcccggaaggtctctcaaacagaccacagaaacaactggccaaccgcacgcgatggctgaaaaaacagctggaagatgccaataacgccctggccgaacacgcaaaatcccgcaaccatccagacgccaccctgaccgacaagggctttgttaagctctacagcggcgtgaccagcatggatgaaaccatggctgccacacccaaagcagtcaaaatagcgatggataacgcgaatgaaagactggcaaaagcgcgtaatctggccgaccttcaaagtgtcccactggcgctggctaatctgacgcttaccagcgtaaaagttgcggtggaaaacgcctatcttggcgcggtgtcattgccagcacagtctgccgctacagacgaagcattcacctcgataggttcagggtatatccgtttgtggaaaaaccagacgccggggtctccgctgccaaccgataacttttgttatatcactatcattggtaaacgagatgccaatactggaggtgtctgcgtccgggttgtggagtgggacaaccctgggaactgctggacggggatcagggtggatagcaaacccgacacaaaattcacctgggccagggatttcaactccctgaacaaacccacaccggaagacgttggccttgccgccaccaaaaaagccattgacgacacccagaccggccttgctgtacagggcgtcatgtggataagcaccgccgacgacctgagcaacctcccggcaggcgctcgccgttttgcacgtaacaatgacggcgtcaccgttctgccagcagcgggttattttttcctggaagttctggcaaaacgtgacgtcgcgaacggctgttgtattcttgcgacaagtgacacaagggatgtctggatcggctttcgttacaccgttcctgatgaagcaggcttcacctggatacagctaaaccagactgtgcaaaacctcggtttaacggatacggtaaatcgcgcccttcatgtaaacagcgacggagatgttagaggctcattatggggtgactggttgagtcactggctatacgggcagtttgccactcgcgataacaacatcaacgcccgtgctactgttgactgggttcgtcaaaacttcctttcaggtttcaggttgggaggtgtcgaaagcgcccaggtatggcgagcgtatggttataacgatacgccaccttacgttattacaggggtgataaatggaaacactgacgacctgattgataatatcactcgccgccccttgcaaatgtatatcaatggatggcgtaacgtagactggttataa

SEQ ID NO: 395438 - DNA, 198 bp, Salmonella enterica
atgcgttttgtatgttgtaatatgttgtatcgtacagcatacaaatactacaaaaccagtcaggcaaatcgccagccgttcaccccttcccatagtaacccctgcccgatgctcagatatgagcaacgctatcgcttaggcgtgctggtgtttgcttccggccttgtgtattgcagcgtgtatagcaccagtaattag

SEQ ID NO: 395439 - DNA, 540 bp, Salmonella enterica
atgacatattgtcagacaacgtccactgaagcacacatagcggaggtgcaaacccttcgtaaagtgattcagaaggccaccgaccagcatccacgccttgcagcgtttctgctgatgctgtccaacgtaaccccggaaaccgtacagcattttcacgacagagtttatcaacaggtaagggaactggccatcagtcgtcagctaagcggcaggcctgtaccgacaacggtactgcgctggatttgggcgtctctgtcaggtcatgcgtgcagacatctgttgctgctgaaccaggataccttctgccatccccgttacgacaaaccaccggatcgctgttttgaaacgatggagaccctgctgcggaatgcggttggtgggagcaatgacatccggcatcaccagcctccggagatgactgtgttcagggtggaccggacacgcctggcgcaggctgacgcgcagtacagccgccttcgggaatgcgccctgtcgctgactcccgcagccactgcccgtagtgaacgaatcagcccctga

SEQ ID NO: 395440 - DNA, 363 bp, Salmonella enterica; identical to SEQ ID NO: 394706

SEQ ID NO: 395441 - DNA, 2235 bp, Salmonella enterica
gtggaatatctgccggaggatgaatgcctgctgcttgatgacgggatgtcggtcggtgcggtgttcagcctgagcccggcgcagacggacggccgctcagcagaacgtctcgaagaaatccgtgacatcaccgaggccgcgctgcagaacgggccggaagagcgcaacagccaccagtgggtggtgcagttctactgccaggatgaagcggacctgacggctgagatggacctgttgcggggctatgtcagttctgccgcgcagggcagcgcgttcacacaggcctggctttcggagacagagcatcatctgcaggtcattaaccggccggagggactgtttaaggatgagattgtgaccggagtcagctggtgcgggcagatacgtcaggtacggatggtggtgtaccgctatgtgaactcacgacagcgggagtcttatcccccggtggttcagcttcgtcagacctgcgaccggctgtctgcggcgctgagccaggccggtgtggtgtgccgccggcagaacggggaacaaatccatgcctggctgctgcggctgtttaaccccgccccgtcgtggattgaccgccagacgctttacaggacggccgcctggcgtgacagccgccaggatacgctgccagtggacacggatttcagcgaatcgctgttcttcacccgcccgcgcagtgaagcgaaaaaaggagtgtggtggtttgataatgtggcacaccgagcagtgtcggtggaaaacctgacgaaaccgccggagccgggcctgctgaccgcagagcgggagcgtggtgaacgtattaacgcgctgatggacatgatgccaccgggcacggtggcctgtctgaccctgctcgtacagccgcagaatgagctggaagaggaatttgcccggctgggtaagcgggccctcggggataacgtggagtctgagcgtacccgcgaccaggtggaggaggcccgggcctggctgaaggaaaaacacaaactgtatcgtggtgccctgacctttctgctgaaggcaccggacatgaagacgctggacgaccatcatctgtcgctaagtaccgtcctggtgaacgccgggctgaaaccgctgaatccggaatatgacctttcgccgctgaatacctacttgcgcgccctgccgatgtgttttaaccctgagctggacgggaaccggtggtatacgtggctgacttttgtgcagcatattgccggtctggcgccggtatacgggcgctcaacggggacgggaaaccccggtatcagctttttcaaccgcggcggggagccgctgcactttgacccgctgaaggaccgtaaaaacagtgcgcacctgctgctgtttggtccgaccggcgccggaaaatcggcgacgctctgcgtggcgctgtgccagatgctggccatgcaccgttcccggttgtttctggtggaatcaggcaactcgttcgggctgctggctgactactgccggagcctcgggctgacggtgaacaaggtcagcatcaatccaggacgtggcagctgtctaccggtattccctgattcgcatctaatcatgacgcttccgccggataagctggtagtggacgaaaaccagctgaaggacatcggtgatgttgatactgatgatgataataatgatgagcgtgatgtactgggcgagatggagattgcagccatcctgatgatcacgggtggggagaaggatgaaaagctgagccgtgctgaccgggggctgctgcgccgggcgctggtcatgacggctgattgtgtgtacggggaaaaacggcagatgctgccgtcggatctgaaggcgacgctggaaacgatagccacggacaggtcagagaagcccggcggcggtccccgctggcacatgaagatgcaggccagggcgtcggagatggcgcttgcgctggagctgatgaccgaagggtttgaaggtgagctgtttaaccgtgaaggggaagcgtggccggaagctgacgtgaccatcgtggacctgggttacctgtccagagaagggtatgaatcgcagatggcgctggcggtgatatcgctggctaatacggtgaaccatatcgcagagcgcgaccagtttgagaagcggaatacgctctttgatattgatgaggcccatgttgtgactgccaaccctctgcttgcaccttactttgcgaagaagtcaaagatgtggcgaaaactggggacctag

SEQ ID NO: 395442 - DNA, 870 bp, Salmonella enterica
atgatattaaatcaagatatatataatatagataaatataaaagtcaaatacaagtatacgctttatgctgtgatagtttttctagcggtgtatatagaaaacccaaagaaaaggcattgaaaaataaatacattgcttttaacaataaagatttcattaacggcttagtatttgatgttgatcatgcaaatggggctatagcgtgggattttgaaggtttgcctaagcctaacgttattattcaaaatacaaataacggtcatgctcatcttctgtatgctttaaaaagtccggtattgaagactgatgtagctagaataaaacctcttaagttagcttcaattatccaatgtggctttactgaacgattaaaagcagatagagcatatgctgatgtattaatgagaaatccactgaatacaaatgaatcacgcaccatatggggaaatataccttcatatgagttatatcatttagctgattttgtatctgataatataaaaaataaaaatgtaaagcataatcgaagtgatatatatggattgggtcgtaatgttaatttatttgaggatttaagaaaaatagcatataaagatgttttgaaatataaatcaattaaatcatataatgattttttcaatgatattttttcaaaagctattgtattaaataactatagtaatgctactgatccacttcctcacaatgaagtaaaacagatctgtcaaagtatatgtaaatggacttggataaatttttcgaaagaaaaattttctgagatacaatctaatcgtggaatgaaaaatacaggaaagaaaaaaataactaatttaaaaacaaaactagataagatatgggagagattatga

SEQ ID NO: 395443 - DNA, 396 bp, Salmonella enterica; identical to SEQ ID NO: 378715

SEQ ID NO: 395444 - DNA, 279 bp, Salmonella enterica; identical to SEQ ID NO: 394989

SEQ ID NO: 395445 - DNA, 126 bp, Salmonella enterica
atgtttcacgtcaaaggggaatccatatggcacattacgatgctctttgtactgtatcttctacacatgaggttggtgaaaatcaacaaaaaaaagaggttattcgcaatagcctctttatcataa

SEQ ID NO: 395446 - DNA, 162 bp, Salmonella enterica
atgcgcaataatcgcccctgtttcgtctggcgcttctggtcatgccagaacgtcacctacaccacaaccgccaccagcgaacgcgaagcccgtttacagcttcccgccgttcgcctggtattcgttgcacgtatccgtatggaggttcaaagccatgcataa

SEQ ID NO: 395447 - DNA, 189 bp, Salmonella enterica
atgcataacagaacatttcgcatcaatggtcgtgcagtcaacaagcgcggactaacggttggcattaactacgatgtaacagccaccagcgacagaaacgccgtagcggaagctaaccgccttgcaaccactaacggccttaaacacattcggatcgtctatgtacgtgagggggtacgccatgagtga

SEQ ID NO: 395448 - DNA, 183 bp, Salmonella enterica; identical to SEQ ID NO: 394931

SEQ ID NO: 395449 - DNA, 243 bp, Salmonella enterica
atgtataaggtcaaagtcagctacatcttgccggaaggcgatcaggttcgtgttgctgtatgcgcagtgaaagaagacggcactcagattttccagatggaaattcagtcaccgaaagaaaaggataaatcactcgatgcctacgagcaggccgcgatagagcagtacaccgcgattgtcagtgatattgccgcctcggtacaaccggcaccggatgccaccgaagccagcgccaaaaagtaa

SEQ ID NO: 395450 - DNA, 624 bp, Salmonella enterica
atgaaaaaaataaatcctataagaatgatatcagttttctttctgttgctattttttaagacaatatctgtatcagcaaatacggtgagtataactgataacgggaaaacagcaacgttaacattgccactaaaggctacgatttcagttgacagcattattcgtgagcatgtcacggttattcctctttcatctctgtatgagcatgtcagctgggatagttcagttaaaaagttcagggatcatcagtttctcgtcagggtgatgaaagatacgccttcacctcttctttatgagataattaacgatgcctatacatgtagttttaataatcctgacaggctggctcctgtaggtttgcctcctgatattgctgtggtgaacgaaggttacagctatagcgttacagtgcctggaggtaaattaacagatatggggcccgcgcggtcttccataattgacgataaggacggatggttacctgcacagggaaatagtgattattttattgacttaacattaaatattaaatttcctgatattcagtctcgacatccgttacttatacggcggggagggatttgccgtggaagtgtgacaatgcttgttagtcagaaactgtag

SEQ ID NO: 395451 - DNA, 216 bp, Salmonella enterica
atgatgttgctccctgcggtcgttatggcaaaaagcaacgcttccggccttgcgcccatccccaaatcaagcgcggagtacacgctgttatcctggtgcaaatggtactcgtcgataatggcaaggccggggtttgttccctcgatggtggccgctctcgctgccagcggctttaacaggctgttagtcttcggggcgatgattttatgctgctga

SEQ ID NO: 395452 - DNA, 195 bp, Salmonella enterica; identical to SEQ ID NO: 394953

SEQ ID NO: 395453 - DNA, 1059 bp, Salmonella enterica
ttgagagcgcttttaacgcctgaaattgcccggggtctcggcgtggtgttgtttaagccaggccgtgaactgatgagcctgtttgctcagggacgtgtgctggtggaggttgagcctgaaagtatggcgcggctaccgtccgggcgcgttcctgacgtccggcagccactggcagaagataaagcccttattccgttctttactgatgagagggttatcaatgccgctggcgggcttgccgggctggagcactggctgcagcgtaacgtgaaagcctgccagtatccgcattctgaataccatcatagcgagctggtagccatgcgacatccaccgggatcgataatgctgtgctggcactgcgaaaaccagttacgggaacagatgactgaacagttaacagcgctggcaacccgcaacgtcattgcctgggtgacggataccgttctgggcgggcttcgctacaacagggatcgggaactgtcgattgcagaattgtgctggtgggcggtatcagcgggaatagcagacgcgataactgagtatatggcgacacgcgccctgcagctaccgtctgagcctttccagtccgtatataaagagagcgacattgttccttccgttccggccaccagcattttgcacaaaaagctgaataccggcgatgcgccgatcgtaaagcgccaggcaaaaagccatgccatccctgaaccgcagcacagaaacatcctcacgctgaaagtagatccggagtcgccggaatcgttcatgctgcgaccaaagcggcggcgctgggttaatgagaagtacacgcggtgggttaaaacgcagccgtgcgcctgctgcggctgtcaggccgatgatccgcatcaccttatagggcatggacagggcggcatgggaacaaaggcgcatgatttatttgtactgccgctatgccgaaagcatcacgacgaactacaccgcgacccggtggcatttgaagagaagtacggttcgcaacttgaactaattttccgttttatcgatcgcgcactggcgattggtgtactgagttaa

SEQ ID NO: 395454 - DNA, 816 bp, Salmonella enterica
atgaatagtttgatggtaatcgatggaatttcagtacggcagttttacgaagaaaattactgcctcaatgatttgcaaaaagccgctatagcagcagatggtgaaaatcgctccacaagaacgatggaagtgtatgagtttatgcgccgaccagaaacgcaggcgcttgtagagttgctcgaaaaagaaactacgggaaattcccgtattaccccggttatcaccattcagggacgtaacggtggcacttatgtatgcaaagaactggtctacgcttatgcaatgtggattagcccggctttccatctgaaggttatacgtacctttgattccttttactcaaatacagccaaatctcatgcagccgatcagattcaggcaggcgttattttgctcgaatctgctgccagaatgctcaacctctccaattcgtcgaagcttggggcttaccataagctacagaaggtcgccggtcttcccgatctgatgccgtcctacgctattgacgcaccatctgacgcatacgatggttcaagccgtccgacattcgccataagtgcgctactgagacggaatggtattcgcatgacggcaaaccaggcttatcaccagttggcaaaagtgggggttgttgagcagaaacatcgcgagagccgtagcgggattaacggtgttaaaaaattctggtcggtgacggcgaagggctgcatgtatggcaagaacatcaccagccctgtaaatccgcgtgagacgcagccgcacttctttgagtccagatttcccgaactgctgaaactgcttgaaacagcgcactga

SEQ ID NO: 395455 - DNA, 969 bp, Salmonella enterica
atgctctcctttgcaattcttattttattaatattactaagcctttgcgttttcgatgttgcgagagataatactgagtttttgtatgcaattgctatttgtggtttttttcaagaagtcgacaacttatttaatggtgcgctaaagggatttgagagatttaatgtatcatgtctttttgaagttattacaagaatattgtgggcttttatagtaatatatggtattcaagaaaactctgttttgtattatacgtgtttagcatttatcctcaaaggaacgctaaagtacattttagtatgtttgaatattagcggcaagtttatttaccctgactttaataaaacagggattgttaatttattaaatgaatctaagtggatgtttcttcaactaactggagggatctcacttggtttgtttgatagacttgtaataccattgattttatcggttaataaattgtcttcttatgtcccttgccttcaactagttcaattgatgttcactatttctgcatcggctaatcaaatattactaccaatgttcgctaggatgaaagcatctaatacttttccttctaattgtttttttaaaattcagcttgtatcactaagctctgctttaccttgccttgtactattgtttcttggttatgacatattatcaatatggataagtcctgcatttgcaagcgaaaattataagttaatgcaaattttgtctataagttatattttattatctatgatgacatcttttcattttttactactggggcttggtaaatctaagcttgttgcaaatttaaatttgattgctggactcacacttgctgcatcgacgttaattgccgcgcattatggtctttatgcaatttcggtagtaaaaataatatatccactttttcaattttattatctttatgtggcttttttctattttaaaagagaaaaaaatgtctattga

SEQ ID NO: 395456 - DNA, 411 bp, Salmonella enterica
atgagtcttactgagtcagtttcagatcttgatacagacgtacacatatcactgacaaaaccgaaatcatctcaatacgagcatgtgcatttgggaattaacagaattggcatgttatataatcagcttattgaaggatcaactctctttgtcgactggggaagtgatgcaaataaaaaaataaatatgtattgctcaggcaccttttcatttaaaagtgattcgccagactttgcaattaattatattctaaaaaatggcggcagatgctaccttcctttaggaatgaaaatgaaacagataaaacaagatttaagctacccattaataaacattccaatctatgcagtatttgataaaaaaaagacaaaccctgctattgatgcctttctggaaatatttaacatttaa

SEQ ID NO: 395457 - DNA, 174 bp, Salmonella enterica
atgcgccctgaaaccctgttcggtccgaagaaattcgagagctatctgcaggacgctacgcgctggctgaaaagcggacgcccatccagcgaaagcctggaaggggggcgaaaaagagatcccatgatgtttggtcctgttgatacaacgattcctgcggggttcagaggatga

SEQ ID NO: 395458 - DNA, 297 bp, Salmonella enterica
atgacgttaaataaaactggcttcatcgccagcggatacgctcaccccgaaatcaaaccgggcgatatttaccgcgacaataaagggcgattagtcacagtggataaatgcgaatacgggcgagtgtatttcatccgtgacggcttcccgttctctacagaactgttagcccgtgtattcctggataagttcagattacaccgcaggaagaaagcgccggcaatgagtaccagcagcgcaacgagagtacaggaattacgcacaatgattaacgccagccgggaggcggggaaatga

SEQ ID NO: 395459 - DNA, 429 bp, Salmonella enterica
atgggttatatgccgttctatgatgatggtgttatggcggtgcatcgctggattgtttcagttgtttatttcgatgagcaggcgcataaaaacggcgttatcgatgtgccagtccccacaggggaaacctgcaaggcggcaatatataagggcaaacacacatcaatcacgatttacccgttaatgttgcgaaaactcatggctgacattgtagaggacactgcatttaaaaagtacggcagaaaagcaggtttaaaggtggctgcaatgtcatttgttaacatggtggagccagccgggaaaattctggccgtgtcgcctttcggtaatgaattttttagccgttcgctggaacagtttatattgcacattcagaaaaccaccaacggcagcggcggcagtaatccggcaaaacccgttattcactaa

SEQ ID NO: 395460 - DNA, 786 bp, Salmonella enterica
atgaatagtttgatggtaatcgatggtattgaagttcgtcgcgacgttcagggacgctattgcctgaatgatttgcatcgtgcggctggtggtgaacgccgccacgagccaagtttatggcgcaatctacagcagactaatgagttagtacaattattgagcgatacaggaatccctgtatcggtaattaaaggtggagcaggacagggtacgtttgtctgtaaggagctggtttactcctatgcgatgtggataagtccggaattccatctgaaagtgatacgcacattcgactctaccgttaaccagtctcatggcggtaacccggatacgacggataaaattcaggctggcgttattcttctcgaatcagcagccagaatgctcaacctttccaattcgtcaaagcttggggcttatcagaagttacagaaggtcgccggtcttcccgatctgatgccgtcctacgcgattgatgcgcctgcaggtgcgccggatggttcaagtagtcccacattcgctataagcgcattactgaaacagcacggtatccgcatgacagcgaaccaggcctatcatcaactggcgaagctgggcgttgttgagcagaaatatcgcgagagccgtagcgggattaatggcgttaaaaagttctggtcggtgacaccgaggggctgcatgtacggcaagaacatcaccagtcctgtaaatccgcgcgagacacagccgcacttctttgagtacagatttcccgatctgctgaaactgcttgaaacagcacactga

SEQ ID NO: 395461 - DNA, 429 bp, Salmonella enterica
atgggctatatgccgttctatgatgatggcgttatggcggtgtatcgctggattgcttcagttgtttattttgatgaacaggcgcataaacacggcgttattgatgtgccgatccccacaggggaaacctgtaaggctgcaatatataagggcaagagtacatcaatcacgatttacccgttaatgctgcgaaaactcatggctgacattgtagaggacactgcatttaaaaagtacggcagaaaagcaggtttaaaggtggctgcaatgtcatttgttaacatggtggagccagccgggaaaattctggccgtgtcgcctttcggtaatgaattttttagccgttcgctggaacagtttatattgcacattcagaaaaccaccagcggcagcggcggcagtaatccggctaaacccgttattcactaa

SEQ ID NO: 395462 - DNA, 570 bp, Salmonella enterica
gtgattgactccaccgggctgaaggtcttcggtgaaggggaatggaaggtccggcagcatggagcagataaacgcagagtatggagaaaactccatctggcggcagacagtgtcacacatgagattatctgtgccgatttatctctcagtggaaccactgacgcacaggcacttcccgcattgataggccagactcaccgcaaaatcaaacaggcctcagcggatggtgcttacgatgtctgttactgccatgatgccctgataaagaaaaaaatcaggccactcatcccgccacgaagcggtgcgcaatactggcccgacaagtaccatgaacgtaaccacgcagtggcgaatcagcacctgagcggaagcaatgacgtctggaaaaagaaagtgggttatcaccgtcgctcagtagcagaaacggctatgttccgcatcaaaacactgccgggaggtcatctgagcctgcgggactatgacgcacaggtaggtgaagcgatggcaatggttaaagcgctgaaccggatgacgttgttgggtatgccggacagcatccggatcgcataa

SEQ ID NO: 395463 - DNA, 429 bp, Salmonella enterica; identical to SEQ ID NO: 395459

SEQ ID NO: 395464 - DNA, 363 bp, Salmonella enterica
atgctgaatatcagcctgaagctgccagaggttacgctgctggatggcctgcagggcgtcagcaatacggtgcagttctgcgtcctgcggcgcatgttgtctgatgttttgtgcggccccgggttgatagcggtaatcaccttcgaaacaggcaccatccccctgacagcagaaaccggagaaccagatacaggttttttcgtggtatctgccgccggtggtggtgacgatgcgggtgttgagcctcacgccgaggaggttgcaaatcagcgagaaatcttcgtaaatgtcgctgtaccactcatactccagcccaccctcttcgcagtaccaggtccgggccttctcgcgggcagactctga

SEQ ID NO: 395465 - DNA, 213 bp, Salmonella enterica
atgtacggatattgcgcccctgacattccagccagtcatattgctgtatttgatgctgaaaccaaagcgtggattctgcaagaagactatcgcggcgagacggtttacgacacaacaaccggtaatcaggtttacatcaccgaacccggcccgttacccgaaaatgtcacatcagtttcaccagatggtgaataccagaaatggtatggatga

SEQ ID NO: 395466 - DNA, 867 bp, Salmonella enterica
atgaataagaaaatctcgtcaatggtgaacctgcctgcaccgcgtgagccgattaaccagaaaattgatatcaataacgaattggtgtcaaaccataatgcaatatatgaacaacgattagcggagatcacgcaatctaatacctatgacaaggctattgtcaccatcaatccctatgggacagccccgttgagcctctatgttggggtctggatagatgaagccgccacgcttgagatcaatgttattgatagcgaagcaacgacagaagcagtgcgttatcaatatgatgtacatcctggcgctaatcttattccagtatgtgggatggtgtccggggtgaataatcagattacactacgccttgcctcgcagatggttgggcaatatacggtaatgacaaatgtattaccgcctacagattcggccagcgtgagtctcggtttccccattattagcgtatcctatcctgcgcagcaggcctcgctggttgatgagggactttatttttccacctattttgatcgttataatctggcttttgatcataacggtatcgtccggtggtatgtaagccaggatattccctcttataattttgtcaggatggataatggtcatttcctggcgacatcacagggaataaatcattgtatgaatttgacattatgggacgagtttatacggtttatcttcttgataatgaattccatcactccattctccccattgaaaacaatctggcgattgcgccttctgagtacagtaatgggcgaccagatggttactcgactggaaaagatggcgtttctattattaacttatctaccggacttgaagtcgcttattacgatatgctgcatgtaa

SEQ ID NO: 395467 - DNA, 336 bp, Salmonella enterica
atgggcaataagtattccggcctgcaaattggtattcactggttagttttttttctggttattgtggcttacgccgcgatggagctacgcggtcttgcgccgcgtagttatcggccttggtttaatatgacgcacgtttcatgtggtatcactattttgcttttaatggtggcacgcttgtttattcgcatgaaatatcccacaccgcccattattcctcgtccaaaaccgatgatgaccggaatggcacatttgggacatctggtgatttacctgctatttatagcgctgcctgttattggtctggtgatgatgtataaccgcggtaatccctag

SEQ ID NO: 395468 - DNA, 198 bp, Salmonella enterica
atgccttacgatagcagctatagaaacaataaaaacaacattaaatcaatatgttatgtgtttatttttgtggtaaatttgttttttagtacacaagcatatacacattattttctgctttctccggcagtccatgtttcgatgatgattgccggagatttatcttctctatcagcgcctacgggtttcacttcgtga

SEQ ID NO: 395469 - DNA, 882 bp, Salmonella enterica
atgatttctaaatgttttgataattatttttatgaattcgatgtgcacgaacttatttattcaagacccttgcccgtaaatgttcgtagtagcatgaagtttaaacagatagctgttacggtgagtgaaatcggcttgattgaacctgtcattgtttttatcgataatgatggaacaaaacgtattcttgatggtcatctaagggttgaggtattgaaagatctgggagttgaaaaagtacattgtctcatctcctctgttgaggattcttatacgtataataagcgagttaaccgtataacaattgttcaggaacaaaaaatgctactcagagctgttgaggctggagtgtctgtggaaaaactttgtactgcattgggtgtatcaatacagacagtgcaaagtaagttaagattgtcagatggtattgctcctgaggtactggcgttactggctgaaaggagtgtacctcaggccttatttagccttttgaaaaaattaaaaccttataaacaaattgaagtggttgataccctgttgagtattaataatttcacaaaaaaatttgtagagtccatgttacatgcaatcccaccggaacattttgttgatgcttgtcatgctcaagaagagccgaatgatattcggagacaacttgaaagattagagaaagagcttgtttcagtgcaggttgaaacatcaaaattggatgatgagtactcagaaaatacacttaagttggtgattgtcaaaggtcatcttgaaaggattttgaatagaagtgatatccttcattggttatatgataatcatcctgattacctttcggtatttaaacagattaccgggattgaaaatcttaatcagattattgataactga

SEQ ID NO: 395470 - DNA, 906 bp, Salmonella enterica
atgaatagatccgatagcgaagttgtagaaatggttaatgtttgcgatgtttttattgcaaatgaaaggaaaagaaatcgttttatttatgagggaattaaagaaaatattataaatcaggggttaaagagacctataaccattaggccttacaacattaatggatataagtatgcacttatatgtggacaaggtcgactggaggcttttattggtcatggtgagaaaacaatacctgcattaataaagcatgttgatgaggaaacagctcacctgatgagccttgctgagaatatagccagaagaaatcccagaaatgctgagttcttcgccgaaattcaaagaatgaaaatctctggtttgtcagaaaaagatatagggtcaaagttgggatatacagcttcatggatcagtagtgtgttggctttactttctcagggagagaaaagtttacttattgctgctgagtctgggcatatcccattgtaccttgcagtagacatatcaagagcggcagataaagatgaacaagctcttttgaccagagcattagaagaagggcatataaaaggaagtcagattaataaaattaaaaaaatacttgaaagccgaaggcatgggaataaaggtagtatgagttcggcttatgttcctggcaagcgagccaagaaattgacaccacaagagttagctgacttatatgaaaaacatgttttcgagcatcgtgctgttgtaatgaaatcacaggctgcaaaagataaaataacagctgtgggacatatatatagtaagcttttagcaaatcctgattttgttttccttttgaaaaagaataatattactgatattccgacaatactcggagagttaatggaaacacataaggataaaattcatgatttctaa

SEQ ID NO: 395471 - DNA, 1536 bp, Salmonella enterica
atgattgaactccaatcagaagatgttattgcagcacaatacctgagaatgtcgacagagcatcaacagtattcaattgacaatcagcgtgaatacataagtaaatacgcagaggagcagggaatatccattcgttacacttatgatgatgcaggaaagagtggattaaagatcgctgacagaccagggctatgttctttgctgaacgatatttatgatgcgagaatcacagtgtctgtaatcctcgtctatgatgtgagccgttttggacgttgccaggatatcgaagagccagcctaccattcatatatgttgagacagaaaggtgtgcgtattatttattgtgccgagccattttctgagtcacagccagaattattcatgctcgggctttcatattcccgctatggagctgctcattatagtaagaatctgtctgacaaagttttcattggtcaggcgaaccttatccgtcatggttatcatcagggaggaaaagctggatacggaatgcgaagactgcttgtggacgagagaggaaaagcaaaagatattttacgggcaggacaacgtaaaagtcttcagactgagcgagtcattctcattcctggacctatagaggaagttaatgttgtcaacagaattttcgatatgtttatagatgagaacaaacctgaaattgtcattgcatcagagcttaaccgactcaatgttgcagctgaagacggaaccaggtggactcgtgggaaaatacatcacattttgactagcgagagatatataggaaatagtgtttataacagaacctcatttcgtctgaagggaaaacatgttaagaacccagaaagtgagtgggtacgttgcgatgatgcctggaaatcggttgtctcacgtgaaaaattttatgctgcgcagagaataatcaacaagcgttcgataaaattatctgatgaagaacttctcgaaaaattaaagagattgcttgtcagaaaaggccgcttatccggaatgattatcgatgaagaagagcttttcccatccagcagtatctttcgctcccgctttggtggactgatcagggcgtataaactcattggctataatcctagagtagactactcgtggtttgaaactaaagaaagtatatccggaataaacactgcatttagtgaacagattatccagactatctacagacttggtggatgggtaactgatagcgggatggttaatcgcttttgtgttaatgaagaattcgtactttccattaatgccgtccgatgtcagcgattgtccagcggaaagcttcgatggcgtatttcatttaaagatgtcagtttttgcgacatgatgttatatccaagacttgatagtacaaataagaccattgttgattattacctcatacctgcaattgatatattgtccgattcaatcactttaaatgaggaaaatggatttatccctgaactttaccgttttgataatcttgaatgcctggaaatgatgttaaagagaactccactggaggtttaa

SEQ ID NO: 395472 - DNA, 915 bp, Salmonella enterica
atgatgcttgagaatttacagagttttgatcttcaaacggccgagttatcggtatgggtattcaggaaaaagtccctgaaagggcaggcgtcgtttacagggaaatggatcccagtagatcctgagcttaaaacagaattattaggatttattcaaacagaaagaggtaactatacagaaatcatagattattcgttgctggcgcagaacaacgaaggcagtcttatgcttattggaaccggagaaacttcggctgtagatgttacaacaatatctgcaaatcaaataccagcgaaaaaggtaaaagagatcagggagttatctaattgtgatttctattctgtaaaattagtctccggtgatacagtcctacactgtgtgaagaaaactgatgcatcctgggcgaccaaaaagcaggctgggctgaagtcagttgttttcaaaaataacaagttgaaaattgataggtccccgcgatttaacattgcaaaggattttgactttttcattcttgaggataatatttatattaagaataagaaggtatttgaatcagttttgagttacaagacagcgcatattgataattttaatgtattgattgatgaaccggaattcagtcagttgcttaccgatgcagagccgctgaaacggtacgttggtaataatgcgatgcaactgagaagagcatctgctattaaagaaaagggatattacaaggtaccagaattcatggatagcttgagagccaatgcattgcgatttagattaaatctgcaatttgatgcccaaggtaaaataattgccagtgatgagtgctgcgcggacatatttcaagctttattagatcatcgcttgcagtcacactttgcagcacacatttatgatgtgcctaatgcatcaatggtttcgtga

SEQ ID NO: 395473 - DNA, 603 bp, Salmonella enterica
gtgacaccaagactattctttgctcttgcaatcttcttaggatcatatttgccattaagtatgattctgctaatgcaggatctggacaataaaaaacttaaggggaatatctgttttaattttttgacttcagggacatgtcatcttccgctccaaaaaccattcctgtcagtgagtttgtttcttgtttgtttagcctgctttgttttttcatggtttgctttgaatcttgctaaaccggatgggcaaaaaataaaagtaattgaatcaaaatataccccatcagatttaatgaattatgtgcttccttatattgtttcatttatgagtataagttacatggagacaaataagtttttagggtttgttgtattcctgttgtggctcttctggctctcatataagtcaggtcaaataatattaaaccccatgcttattgtttttaactggaagatgtatgaaatatcttatcgttttcctgggagcaatgatattttttctggagttgtattagctaacacagatgttaatccaaattcagattatgagtacgaaacaatacaatctgttatagtcatttgtggagagaatgatgatgcttga

SEQ ID NO: 395474 - DNA, 501 bp, Salmonella enterica
atggctgataagctcgggtgtcgaaaaaagaaaaatgcgccgtggagtgaaaatgaaatggatattatccgtgaccactatacccggggcatggaggctaggtctctgacccaattacttccagggagaagtattagtgcgatcttttctatggcggaggctctgggggtaaaaagtggacgtttctggcgtgaggaggaactcgatatacttaaagcggactatctccggatgggaatgtcggtaactgctcatctgccagaaagaaatgcaatgtcagttaaaataatggcgagaaggctggggctgaggaagtcccgctgtagtgaagctggtttccgtccctggagcgatgaagaatggactcttctggaaaagaatatgcatctgagtgtggctgagcagcaggtagtactgtttccggacaggaccaaaaaagcagtggaaaaagcgcgaggtcgtttgattaagaacataagaaaaaacaaggggggagtgtga

SEQ ID NO: 395475 - DNA, 1386 bp, Salmonella enterica
atgaatgacattacccaacgtaagattaaaaccggcggtgacccgcgctcgctatctgattatgccgccttgcgtgatgagctgagtaagctgacgcatccggctcgcccggatgtgaactggcgttatgcggaaaaactatgtctctcactgttcgagcagaacggtgtggaattgcaaacagcagcctggtatacgcttgcgcgtgcacagctggccggtttattcgggctcaatgaagggctgacgatactcgaggccctgataagccatcagtggggggcactgtggcctcagccagtccatgcgcgcatggaaattctcagcagtttgagtcagcgtctgcagcaacgaatgcgctcgctcccgctgaattacagcgacctcagccagttgtaccgggcggagcaactgcttacaggtctgggagaggtactgcagcgtctggagcttaagcatctcagccagctcgatacgttgcgtaccctgatgcacaatagtgctgtccggctggaaaacagtgataacacaacaagcaccgggccgaacattcagtcgggtatcgtatggcctgccaccgtgatgaatgatgcgacagcatccacgagagactttgctggtggaccggatgaagatacgcaagagagtgcagtgaagtgggttttcgttgcgcaaccggaaccgcagccgaatgtagaagtactgtctacaatgcctgctccggttaaaaagtggaagtccttcgtcgccgggatgtttaccatgctggtgataagcatagtctcagtgtggggctggcattttcttcaccgtccagatcctctgcagactcagcttgcagcttcactgactccgttccctgcacctctcacgtccgaacagctggggatattacgtcagcaaactccgttacctcaggaccttatcgcacagacacagcagcagcttgcccgactggataagttgccgcctgactggtattttgcttacagccgaaaactcacagaacaggctcaagagctgtggccggaacaggctaaacctctggcacaaaagtggcaacaacaacttaatgctactgcattaccaacagaacagctgaatggttggcatcaggggatgatgaagctgaagcaactgagtgacaggctgaacgggctggatgaacagaagggtaaatacatgacggtcagcgagctgaaatctgtggtattttccaccatgcagtcttttaacaaatcggtaccggctgaagagcaaatgcgggtattgttacaaaatcctgagaaagaacctttacctgctgctgcccgggctcaactggagatgcatctgaaacaattgacagcgcgctatgctgtaatacaagacaatgcatcagaatag

SEQ ID NO: 395476 - DNA, 1245 bp, Salmonella enterica
atggcacgaagaaaaaaggatgacaatgtagcgggtattatcctggttattattggcgtcattgcctgggggatttatgtcgcggtaagagcactcatcaatcttaatgagcgatttattgaagctgtgtcgaatccggccggaatcatcggtctgttctttggcttactgatagccgttgcattgataatacgggttttcatttaccggggcttcaggaagaaaacagcggagcttgaacaggccgtgtcggacctggcacagaaagagaaagcctttgacgaaaccgtcagtactgaagtggctcgcggtctgtatcaggaaaagaaacagctttccggccagtgggatgactttcacaatgccagaaataaagcctcacgggcactgcagcgtattgtggactccgcatataaattcaaagtaaaaacgctgctttccggcaccacggtaaataactggcaaagtaagtacgaccagctcagaaaagagagagacgcttatgctgctataagcgagaaaatcacctttctggaactggaagataatgccgactgggaaggcgtaaaacagcagtttctggataaggtcgccctgctggaaaaagcgcaggaagaaaaagaataccaggctgagctcaagcgccagatgcgggaagaaaaacagcgtcaggatgaactggagcagcagcagcgcgaagcagaagaggaagaacaacgccttgctgagcagcagcgtttacttgtagaagctctgcttgccgctgaaggtgctcacagggaagagctggaaagacagcgtctggagctggagcagaaaatccaggacgtgcatcagcagtatgaacgcgccaaatctatggcccagctaaccagacagggacatgtgtatgtgatatcgaatatcggttccttcggtgaaaacgtcttcaaaatcggcatgacccgacggctggagcctatggagcgtgtgaaagaactgagcggggcagccgtgccgtttgattttgacgtccacgccatgatttcctgcgatgacgctcctgcgcttgaaaagacactgcatgaccatctggaaagctaccggattaaccgggttaacctgcgtaaggagtttttccgggttgaactcagtaaaattatcgatgaggtggagcgtcatcacgggcaggttgaatatattgctgacccggtggcgctacagtatctgcagagtctcgaatatgcagaaagcgaagccgcataa

SEQ ID NO: 395477 - DNA, 471 bp, Salmonella enterica
atgtcagtaaaatcacaatttctcgaaaaattgcaggccagacggtctgctccggcttcatctgtcagcaaaactaaggccgatatcacagagtttcgcctgcgaataacgcaacttcaggagcagatggacgcgtggctggtggataccgggctgaacgtggaggcgttcgcggtatccgttacggacctgctggtggagggcggggcttttgatctttccggcattgtcctgcgtgtcgacgaccgggccgtaaaatttatgccggtatttttgtacggccagggcgtgaccggatgcatggaggtgacctttcatgatggagagaatttgactccactggggcgtttgttcatgcagtcaggtatcgtgaacaactggacctttgctccgtctggtgctttatcttgcccagggcagtgttttgatgaaagtacattttttagtttgattttatcgcttctgccatag

SEQ ID NO: 395478 - DNA, 453 bp, Salmonella enterica
atgagtgagtcattccgtccttcactgtatgaaactctttatggcaatttcaccggcggtctcgacctgcatcaggtcagcgagcagaaccaggtcattttgtccgtactcgacaatatgcagcgtatcctcaactgtcgtgccggcacgctggcgcatctgccggactatggcctgccggatatgaccaaaattctgcagggcatgccgggaacggcccatgagctgatgggcacattgtctgccgtcctgctcaagtatgaaccccgcctgaaaaaaataaccgttgtcctgctggagcagagcgtccccggcgagttgcgttatgccattgacgctgaacttaaagggattggcctcgtgcgctatggcaccgagtttatgcctgaggggagggttctccttcggcatcttaagcaacagcagtatctcgacacgactacccgtctgtaa

SEQ ID NO: 395479 - DNA, 537 bp, Salmonella enterica
atggcgattaccgctggtaaatttcctctggctgcgctggccgttggtatcactttgatactggcgggctgtgggctgacgcaaaaagtgacagacggcaccattgccgtgaccaaatcgatattttataaacaggtaaaaaccctgcaccttgatatccgcgcccgcgaggccgtgaacagcaatgccggtggtgtgccgttgtcgacggtggtgcgtatttatcagctaaaggaccgcaagaccttcgacagcacggactacccgtccctgtttaaagccgacagccaggccattaaagcagacctggtggcagagaaagatatccgcctgcagccgggtggcgcggtgacggtcgatatgccgatggaggaaaatgcgcagtacgtggcggtggccggaatgtttatgtcgccggaccaggtgaacaacacctggcgcgtagtcctgagccgtgatgacctcgatccggataaagcccggatgattgaggccggtaacaaccgcctgaccctgaaggcacttaaagatgagtga

SEQ ID NO: 395480 - DNA, 285 bp, Salmonella enterica
atgattacctccatcagtttcatatttacggcaaatattacagtctctcttacgacggtacatcgctttgatgattcaaccttaaggtcgaagattctggtcatagtcgtacttaaccagtgcgtcttcggaaaggtaatcgttagggtcggattgttttggtacgctcacctttcagcttggcatatcaccgagcatgcgagcaaaatcgacgcaattataaatcgcaatggcacaaataaggcacaaggggagaaggtggtttactttgtagtggtcaactaa

SEQ ID NO: 395481 - DNA, 252 bp, Salmonella enterica
atgcctctaactggcaactctccggtaactccggatggctggataagctgtagcgagcggatgccggaggacgagcaagaagtaattgtccagaacaagttgggataccgttatgtttcatatttcgatgagcaatctggactgttttttgacatgcgaggcggtaatcagattaactgcattgagcatatcttggttacgcactggatgccactaccagcagcaccgcaacaggaggtgaaccatggctaa

SEQ ID NO: 395482 - DNA, 1824 bp, Salmonella enterica
atgtcagatatcaccgccaatgttgtagtatcaatgccgagccagctcttcacgatggctcgatattttaaagccgtagccaatggcaaaatttatatcggtaaaattgacactgaccctgtaaatccagcaaaccagattcctgtatatctcgaaaacgaagatggaagtcacgttcaggtcgctcagccaatcgtaatcaacgctggaggttatcctgtatacaacggacagattgctaagttcgttaccgtacaaggtcactcaatggccgtgtacgatgcttatggttctcagcagttctactatcctaacgtgctgaaatatgaccccgatcagttaaagcaggagcttgcaggcccagatggttttaaatttatagggaaatgcgaatcaatatcaaaactaagaactatcgtagctaatagtaatggtcagtttatattggttgactcatatagaccaggaagcaataaaggtggcggtatattccaatggaatgccgcatctaacgatcctgacgatggcggggcagtcattgccgtgacaggggtagctacaggacggtgggttagacaggtaaacggtcggtatacacctgaaatgtacggagcagatggtacaaagacaaacgacccgtcagccattaaatcggtactggagcaccagaaatatgtgcttttttctggcgtttattatatgaatgatgagtttgttaccaatgggcataatattgaaggcggttcaactggagaatattatggtgatggttctaaaacaaaaatagttttctttggtgggttctctgcaaagcaagcagttcgcaatgaaataacaaaaagcgcttataaaaacatcacctttgaacctgaatcatgggatcctgttaatgggtatacaggaaccggtttgcgtgttggcagaactcttgatgctgaaaactgcaactggtttaagttcaaggagttcgggatggatttgtgggcttcaataacagaagatttagtgcattatccatatggtagtcagttcaggaattgcaggtttgaatttaatgggtttaatggcatccgattcactaacggggcaaattcagttcaagtatatggtgggtcggcaagctggaatggttctccagcttatggcgtgaaaccaacagattcaagcactggatgggacgggattctatttacaaaaataacagatggatcagtgccaccaatggataatgattttgatatacaaggaaatattattgagggaattgattgcagctacaatgcaagatatggttttaatgctgactatgccaatcaatcaattttcaacataggatactcagaggcaaatttcggacctgttgatgtacatgtaagagacgttgtagcatgcactattaatatacaggtttctcatagaggagaggatatcgaggtcccgaactactcgccaagcactgcaaggtcatcagcaaattatccaaacagtatcgttgtggctggagttgattatggaagcggatctaaggatgatggagacagatacatcacatggagaaacccgagatatgggataacccctttttcatttggctctctaggtaactctggatttagatcttacaaagataaatcgggctcattcgaaacgtacaacgaaggtgctggcgcactcccattagttagagcaaacgccgggacactgcctgttgcatcagaaaagtacctaggaaccatgtggcgagatacatcaattggtccaaacccagtatacatgtgtgtggaaagtgcaccaggggcatacttatggagtaaattgaattaa

SEQ ID NO: 395483 - DNA, 1026 bp, Salmonella enterica
atgaacaaagagatatctgtaggcttgaatataacaaggatagtagcttgtttttttgtgatattgcttcacacatcagctatggggttatataaaacaaattattactgggagcaattaaatataattgactcaatgacaagggtttgtgtaccattatttataatgttaagtggctcacttctcattagagaaaaaccagattcaaaaacaaagattgccaaaagaataattattataatggcgtgtttgttcttttggtctattgtgtacatatggagagacaaaaacgctacacttagtttaggtatgctatttgattcaattggaggtatcatttctggacctgttaaatatcatttgtggtatctgtattttatagttggagcatatgtagcaatacctttcttgtccaaggcttatcacaactcatcactaaaaagctctatttcttatttgtttatatggtttctcttgtgcacattcatgacattcaagaacatgattggggtttacaataactacgtgcaaacattcaatctttcatatcttgctgatgtgatgggatacttgattcttggcagactgatttttgatttcgtatgcaaaaatgaatcaaaaataaagtcattaccttttatagttgcgttctttttatcagttgcagcaacctcattatttgtttactttatgtcaataaagtctgaaaacatagaccaaagcctttattcatatacttcaccatttgttattattggtgcatcttcaatttttattttatttttaaaaaatggtaatatcttatcaagatttgagagtcaactatctaaagtaagccaattgactcttggtgtatattgtatgcatctcttgtttgtggactatttctatacaatgtttatatactggtgggggtataaaatgaattcaatttacgttttattatcttcagtggcaacatttgtcatctgtatgttagtttcatttataataaagaaaacaaaaatcctatcgtttgctgtatag

SEQ ID NO: 395484 - DNA, 324 bp, Salmonella enterica
gtgccggaaatagcgggggaattactgaaaggaataatgcgacgcgcctggccaagcaatgtgcgcgaactggccaatgcggcagaactttttgctgtcggcgtgctaccgctggcggaaacggtcaacccacagttgctccttcaggagccacccccgcttgaccggcgcgttgaagagtatgagcgacaaattattaccgaagcattaaatattcatcaggggcggatgaatgaagtagcggaatacctgcaaattccccgtaaaaaactttatctgcgcatgaaaaaatatggtttaagtagaggacattataaattctga

SEQ ID NO: 395485 - DNA, 123 bp, Salmonella enterica
atgataattgattacctcgtattaactgtatctggtatatcaactacaataatattttacgaagaggtacttggcttttcttcggtaacgtttaaacaaaacagaaaagcattaatattttga

SEQ ID NO: 395486 - DNA, 1098 bp, Salmonella enterica
atgaatattttactagtaattacaggtttaggtctgggcggagctgaaaagcaagtttgccttttagccgatcagtttgcagctcgtggtcacaaagtggggatcgtttcattaactaataaaactgatgttaaaccaagcaatcctgaggttgagttatttattcttgacatgaaaaagaatgttttaggatttatcggaacaattaagcgtctgcgtgtcatcgctaataatttcaatcctgatgttatacacggtcacatgtttcatgctaatattatggtacgttttcttaatgctttaacaacaagaaagaataaaataatttccactgcacataataaatatgaaggaggcgctttacgcaaatgtttatataggttaactgaccccttcaatcatataactacaaatgttagtcaagaagcattagacaaattcatcgctgataaagtctttctgaaaaaaaaatcctttactgtttataatggtattgatactaattattttaagtttaataacaacgctaggagttatcttagacaaagtttaaacgtgtcagaacaggatattcttttgcttgcagtcggaagattgacagaagcgaaggactatccaaatttaattaaagcattcaaaaaaactccaagcaattataaattgattattataggcgaaggggatgctgaggcggctatactgaagattatagaaaataataatctttctttaagaattaagctattaggagttaaaaataatgtaagggattattattctgccagtgatatttttgttctttcttctgcatgggaagggtttggcttggttgtcgctgaagctatgtcttgtgaaagaatagttattgcaacagattcaggtggtgttaaagaggttattggtaatccagagtttttagtgccgatcaaaaatccagacgccttagcgaaaaaaattattgatatttccaaattgaactccagttataaagaaattatctgtaaaaagaatagaagttttatagttgataacttttctatcgataatactatcagtaaatggcttcatatctataagagtcttaatagtactatttaa

SEQ ID NO: 395487 - DNA, 762 bp, Salmonella enterica
atgcaaataaacgtttatgttatatctcttgaggatgagtttctacgtagaaatataatgcgtgagcaattaaatggaccatttacatttataaatgctgtagatcttcgaaagattaaatcaattacaatcactaaatatcttaataacgataaattaccttatcctaaggtacgaacaaatttaactaatggagaaataggctgtgctcttagtcatttaaaagctttaaataaatttgtagaggacgagggagaatatgctcttatacttgaggatgatgctatactgcctactaactatttagatgtaattaataatatttgttctaattcaaaaggttactgggattttctacttttaggttattcgaaacttgatgtaagtgaaacatcatctttttataaaatggaacctattaatattttacaaaaaattaacaacattagtattggtgaaccttggaaaaattggacttcaggtactgttgcttatttagtaagtaagcaagcagcacggcgttttatcgaagttcataatagaaaaatatttactgttgctgatgattgggctttttttaaggggaactttgatttcaaaattctacactgccgaccactgattatatttgaaaattatgctgaattaaaaagttcaattgaattagaaagaggtacttttatctcttatactccttattatttaaaatttatacgtatctgtcgaggatatattcgaaaactgtttatgttaatgagataa

SEQ ID NO: 395488 - DNA, 1014 bp, Salmonella enterica
atgttgattttagttactggtggggcgggatatataggttcacatactataatatcgctgttagaaaataattataacgtcattgtgcttgataatttatgcaattcatcattggaatctataaagcgggttgaaaaaataactaacaaaaaaataaaattttatttaggagatgttcgtgataaagtttttttagaaagtattttttgtgataataaaattgatgcagttatacattttgccgcattaaagtctgttggagaatcaaataattatcctttggattattattctaataatgtaacagggacacttagcttacttgaagtaatgaaacagtttgatgttagtaaaatgatatttagctcatcagctacagtttatggggctaaaaatattgcacctaataaggagagtgatcccatagggggaacaactaatccttatggaacatcaaaatatatgatggagttaattcttcaagacctttgtaagagtgacccaagtttctcaattgtttctttaagatactttaatcctactggtgctcattcctcagggatgattggggaaaatcccaatgatatacctaataatcttataccttatataagtaaggttgcgcaaaaaaaattacagaagttacatgttttcgggaatgattatcccacaaaagatggaacaggcattagagattatatacatgtttctgacttggctttaggccatgtaaaagcattagattatatttttttaaataatattaattatgaggcattcaatttaggtactggtcgtggatattctgtacttgaagtagtacgtatgttcgaaaaggtttctaatacattaattccatttgatttttgtgaaaggcgaaatggagatattgcaatatcttgggcatgtgctgatttggcaagaaaaaaattaaattgggaaacaacaagagatttaaaagaaatgttggaagatgtttggcgttggcaagtaaaaaatccaaatggctattaa

SEQ ID NO: 395489 - DNA, 300 bp, Salmonella enterica
atgtacgttatcgccgggctgcttttcactccacgactcactgttcaccatagacctgtcaggcttgagacgtccatcacttctctgattgcatccagcgccagaagcgtaaatatcaccaagattatcggattcatatacggtgcgctttttattctggaggcggatattaccgtctctgagactaaaaaagaaaacgataacaaaaaactacccattatggtgggcttacgctgcgttatcgctgtcattgtacataacgttacaagccgataccaatcactcacggaagccctttga

SEQ ID NO: 395490 - DNA, 510 bp, Salmonella enterica
atggaaatgctggaacggattgcccgggaaaaggccagaacgctggctttagtcgatgaaattgagatttatctggcgtatcagaataagctgaagaaaccactcgggctgagcagcgtgacggcaaaaatgcgtttctttggcgtatccggcgtgacggcttcagaccttcggagcgctgagcgtcaggtgaaagccgccgaaaaacgcgagttcagtgagtggatactgcagtggggcccgttacacagcgtgctggaacgcaaagagccggaacgctttaacgcgcttcgtgaaaagcaaatatcggactatgaggacacgtaccagatgctgtctgacacagagctgaaaccgttcgggctggtcggtaataccgatgcagagcgcactatcggagtaagggcgatggagagtgcgaaaaaggaatttctgaatggcctgcgcccttttgtggaggagatgctgggtagctatctgaaagtgaaagcccggcggcgtcttaactga

SEQ ID NO: 395491 - DNA, 174 bp, Salmonella enterica
atgctgtctgacacagagctgaaaccgtccgggctggtcggtaataccgatgcagagcgcactatcggagtaagggcgatggcgagtgcgaaaaaggaatttctgaatggcctgcgccctcttgtggaggagatgctgggtagctatctgaaagcccggtggcgtcttaactga

SEQ ID NO: 395492 - DNA, 1254 bp, Salmonella enterica
atgatctttaactcatcaaaatataacagtcattggcaggataaaaaattatcagatttaggttctttccgtcgaggaaagtctcgtcatcgtccacgtaacgaccctaaactttttaaaaatggtgtttaccctcttgttcaaaccggagaagttaagcaggcaagcctgtatctcaataaccatcattcttgttacaacgagtttgggttatcccagagtgaaatctggccaaaaaatactttatgcataacaattgcagctaatattgctgaaactgcattgcttagctatcccatgtgttttccagatagtgttgttggattcaatgcctatcaagaggaatcatctgagattttcatgcattatgtatttacttatattcgaagggccattcaaaattcagcaagtggaagtattcaggataatatcaatgttgattatcttacagggcttaaatttaaagttccgttaaaagcatatcaagataaaatagtctcggttctttctgttttagactataagatcgaccttaacaatcgcatcaacgccgaactggaagcgatggcgaaaacgctgtatgactactggtttgtacagtttgatttccctgatgccaacggaaaaccgtataaaacctccggcgggaagatggcgtataacgccatgcttaaacgagaaatcccagtggggtggaatacatctacactttggaatatagctaagtacacaaatggccttccgatgcaaaaatatcgtgaagatagtgatacttacttgccggttataaaaattcgcgagatgaataacggtattagtgccgacacagagagagcccgagttgatattcctgaggcagcaataattaatgatggtgacgtattgttctcatggtctgcgacccttgatgtgaaaatttggtcacaaggtaaaggtgcattaaatcaacatatcttcaaagttagttctgatagttaccccaaaagcttctattactttgaacttttaaattatctaaagcattttaaaatgatcgcagatcttagaaaaacaacaatgggtcatattactcttgatcatttaaagcaggcttacatctgcttgccacctttatttttattagaagagtttcattgcaaagttgaaaatatatttcaacaacatcttttgcttgagaaagagaatagaagtctgatcaaactgcgtgactggctcctccctattcttatgaacggacaggtcaagattaaataa

SEQ ID NO: 395493 - DNA, 378 bp, Salmonella enterica
atgctgggtactaacgatctacagcgagccattaagttctacgatccactgatggaattgcttggacatccaaaggctggccgtaatgaagaaggcgcatcctgggggacgttcagcgataaccacaccatcggattgtgcgtcagcaggccctttaaccagcaaccagcgggcgctggtaatggcacgatggttgcgctgaatacccgctcgtttgaacacatccagcagttgcatgcgcttgcccttagtctgggaggcgcggatgaaggtgcgccggatcacaggccgcaatacggacaaggattctatagtgcttatgtccgcgatccggacgggaataagttagcgtttgtgtattacagttttgggagctga

SEQ ID NO: 395494 - DNA, 237 bp, Salmonella enterica
atgctcatcaaccgtattatcaaaattaaaccgcgtaaacatcttatgattcccttgttgaaggatttgttctttcgtcatatctccatgtcgcatgtcatccgcagtaaaattattcattttacgagttgtctcgaaaatcaagcgacgttctgccttttgtatctgcatgatgaatattcggggttcaaaatgccagatctgaccgctgagttccgtttggatctcagcaggtaa

SEQ ID NO: 395495 - DNA, 189 bp, Salmonella enterica
atgcatcgttcaatccttgattatgagaacagaatttttttagttaaagataaaattgatacctcacctgcaatagacggaatatcaacatcaattgaatttgctcccgctgccatcgtccttctcaccttacgtatatacgtcgccgtcgtgccatattccacctttcccgcctccagccgcaggtaa

SEQ ID NO: 395496 - DNA, 195 bp, Salmonella enterica
atggctaaggtaaaagtaaaaacactcatcggctccgttgtgactgtcgccttttttctgacggtcatcgtggcatttctgttttatgcctttccggaaaacgtggcttcggccaccggattcggtccgtatgacggccagcgcatactcacattctgcaccatactggttgccgcgttgtttttattcggctga

SEQ ID NO: 395497 - DNA, 216 bp, Salmonella enterica
gtggtactaaaaaccggagggactacaatcgggctggcgaataacaatattatccctgcagaagatctggatcgcagctatatcgtctatccgcagattaatcaggaaaaatgcgtcggctgtctgctgtgcggccatgtctgcccggtagcctgtattgatttaggcgaggtcagatttaaaaaaggtgaaaaagagcacgcgttgacgctgtag

SEQ ID NO: 395498 - DNA, 297 bp, Salmonella enterica
atgaaggtactggttaccggcgccaccagcggcttaggtcgaaacgcggttgaatttttacgcaataagggcatcagcgtcagagcaacaggtcgcaatgaagcgatgggcaagctgcttgaaaagatgggcgcagaattcgtccatgcggacttaaccgaactggtctcctcgcaggctaaagtgatgctcgccgggatcgacacgttgtggcactgctccagctttacctcgccctggggaacccaacaagctttcgatctggcgaatgttcgcgccactcgccgtctgggctaa

SEQ ID NO: 395499 - DNA, 222 bp, Salmonella enterica
atggcgctgcgcttatcaggcctgcagggcgggctccagctcttttgcacagacgcaaaaaagcccatccgtcaggatgggcttcttcacttgtttgatgcctggcagtttatggcgggcgtcctgcccgccaccctccgggccgttgctgcgcaacgttcaaatccgctcccggcggatttgtcctactccggagagcgctcaccgacagactacagataa

SEQ ID NO: 395500 - DNA, 222 bp, Salmonella enterica
atgatacaaccggactggcatcccgccgacattatcgcggcgctgagaaagcgggggacgtcactggccgccgtatcccgcaactcagggctggcgtcctccacgctggcaaacgcgcttacccgccgctggcccaaaggtgaaaggctgatcgctgaagcgctgggtgttgcaccagaacaaatctggccttcccgctaccgcaagcttgaaaattgttaa

SEQ ID NO: 395501 - DNA, 594 bp, Salmonella enterica
atgaggatcaccgctacccaaattgaacagtgggcggacacaagagacgctcagggaatgttgcctattttgatccggcgattaattagtgcaaccacaacaataacagcattgagcatgcccggcggtgattctgtttcaaccagcggctgggatggtattgtccaggctgacaaaggcaacatctgggttcctgatggtgcctctttctgggaaatgggctgttcctccgacatcattactaaagcacgctcagattttcggaaaagaaatcaacaaatttcaccacaggaagctgctaaaagttgctttgttttcgtatcgccacgtcggtggcccaaaaaagatagctggctcaaagaagcccgggctgaaaacatctggtccgacgtttatgcacttgatgctaacgatctggaggcgtggctggaaaacaccccggctgtagctctctggttcggtgaactaacgggccatactggcgcaggcattgaatccatttcccatttctgggaacgatggcgcaatcagtcacaatttccgttaacaaaagaaactttgctggcgggcagagaagaggaaaaaacacgctga

SEQ ID NO: 395502 - DNA, 2658 bp, Salmonella enterica
gtggggtgctggaatggcaaaaaggaaggcgataaatattgcgttgaaactattgcgcaaaaagattacgaagaactggaacaggaactacgcgaaatatttcttcgggatgactctccggtattacagattggtgatgtatggaaagcaaaatctcccattgagctattatatcaactagccccccgactaacagaaagtcagctcaaacgtttcttcctggttgtaaaacaaacgctacttaaacccgatcctgccctggagcttaaaaccgaagatcgctggatggcggctatctatggaaaagttcgttcagaatcagattttattctgaaatcaatcgctgactcactggtgaagctcagaatctacgctgaaagcagtgaagggattaattcagatttcatcattgttgccatcgacaatctggttagagatctgttgatggatgccgatggtgagagatggctgtcattaacagacgtattatgttcgttagctgaagcatcaccagaggtattcttaaaatccacagaaacaagcttacagtcaacagaggctagcgttacccgtttactaatggaaacgagcgaaagcacaggctttggcatgcgctgttggcatgctgacttattgcatgcgctggaaattctggcctggaatccaaggcgattacttagagtcagccttattcttgcaaagctatcatcattaagaattcagggaaactgggccaatacgccggaaaataccctgaaatcgttgctaaggccctactggccgcaaacaatggctacagatgaacaaagacttgtcgtacttgatatgcttatcaaaaagtacgatagcatcgtctggcgttttctctatgaacaaaccgatcctatgggtggtatgtatatggaaaatgccagaccaaaatggcgggatgatgatgctggcagtgctcagatgagagggatttttcttagcgcatattactctgcactgggtgagcgaatactcaatctggcagaaaataatgctgaaagaatagctgcgcttatcaggcgaatagatcattttgaaggtacctaccagaaaaggcttattgcattaattaaaaacacaatttctttttctgatggagataaggaaattgtgagagaagcactgtatcactatctgaactggcataattcgtataatacagatggagataaaaaaagcagagcggttgcagaaaacctcatggcatttgtcagtttgtttactatccaggatattattcttgataaacgtcgattgttcacttctcaatataccgtattggccgaaggaagtgatcgagatcatgaagcgcatagcaaagaaataataaaaatgcgaaccagcgcaatagaagagatatattacaagcaaggatgggatgggatttcatctttactttcagcagcacaatcaccgtctgtaataggtgaatccttagctacctgcgatttaaatttaatagattcattctcatggattattgaaaaattcaaaggtaatggtttcccgtttcatgatcaattgataagttcattttatgcctggctccctgaagaaaaacaacttattctgttaaattctcaagagtttaaaaatgagatggatagtgatgagaaaattgccgcattacactcagtactcccacccaatatggccacatggtacaaccttgaaagttaccccgaaagcgcccaaaccctgtactggaagaggataaactatccacatatctggagtgatgacgctgatgaaattgactacttcatcggaaaaatgacactttctgacaggtatatatccgcatttaatctcgtaaaacatcgtatggaaaaaatttcctggcaaaacctattgaaactgttaaacggattcagaactaccaccgaaaaagatgtatcaataccaaatggttggtacttgtccaaggctatagaatatcttgaatcgtcaggccaggtctcgcgtttagatttggccttactggaattcttctttttctcagcattcagaagttgtgaaaaagaagcaaaaaatctttacgcggaattactatccaatccaccactttttgtacaattaatatgtcttgcttataaaccagaatccgagaaagagtataaacaggatgaatccttaatggctgcggcacaacaagctggcagagttctgaaccaagggaaaggtcttcccggtcagaaaccagatcacagcattgatgaagtcgtatttagtaactggattaaggaagtcagaaaactagcgacagaaaatgacagaagcaacattactgattacatactcggtgaatggctatcccgctcaaaacatctaaatgatgtatcatggtccagcatgataatccgagacttactggaagaggcagaacgagatgagatcagagaaggattctattatggcattatcaatagccgtggcacaaccgtaagagcctattatgaaggcggtaataaagaacgaaacctagttaaccagtacaaagaaatagccaaccagttatatttcactcaccccaaactggcgtgtgtctttgatgaccttgcttcacattatgattttgatgctgcaaatgaagatcggcgtgcaaagttaagacttgaaggatattaa

SEQ ID NO: 395503 - DNA, 3057 bp, Salmonella enterica
atgggaaagaacagcaaggcaaaacgagatttaaaaaagaaaaaaagcagtaacaaatccagagaaaaatcctctagcaagggcaacagaaactatgaagacgctatgcaaaaaataaaagataatttaacatctatatataaagagtacaatctcgcagaactttttcttacattaagtatttctgaactatggctacctaatatctcgtcacctgtaaaacacactatagctttcaacactttgctctccatggatgttagtacatttaataaccaaaaggaacttaaaacatatcaacaagcaagcgaattttttagcattatttataagatattacctaacattcctcaaatggaagactttgtccctgaacaagactgggggcaaataaaaataccatggggagacaatatttatagaattttttacggtagctcagtcgaacgcttatatgattatattcaagcttttggaattagatacgcagaatatccaattatccttaagcaaatggaaaatgttcttattttacagaaccagtttctatcaagcctaaatccagttgatacactctcagaacaagagttctctcccggccatgtcgaaatccctccagaaacattctggaaaggttgccatcaggctttaacggatgcctgtcatgtgtttgagaaaataagaagtcagacggaaaaaatatttattaaaaaagcacgggaatttagaagcattaactctaccgctgaattatcaaatataataatggagggcgtagcactccctgctattggtatcaacattggtgatcgtgtttatccattgtcattcaggaatatggcaaatgtaattattgagcgctatgcttccaaaaaaatggatatcgattgttcagatgctatttcaaatttcatatctcagcgttttgaaagcataattgaggaaccatttctgctcctgagcaaaaaaaaggtcctaccttataaattctcaggattattacagggtaatgataagttttatttatttgctctttttgatattgattcagcaagtaagttaaaagatatagaagaagacgttttcgaactttttaatcaaggtgaatgggctttatcaccgatttcatcatcacaactattaggcattcgaaatcgctcggggaaacagctatcaattgatgatattgaatttattttcataaattctaatcttactactgccatgcatttttttgagccaccacaactaaaatatagtcatcacatcttctttctgacagagttcattgcattgtttgactcaatagagaatctaaatgaattatcattatttttttcatatttagataagaacaagtcaaaaataaatccgttctttatttccgtaatagataaatttgcatcatttaaaggaactcattctgtattagaagatggtgccattaattttaatatgattactcttgaccctcactggggttctaattggagatatgaagaactgggaaaatactggtcacaggctccctcgaattttcctgatgtcaatgtaaaatggaacatcagtaatagttaccaaggaaatatttcattaatatctaaaagtcatttctatgtctcttggtccacaacgataaataattgcacaattcatttttgtgcggattgcaagtacctacttaatgaagatcccctcaatggtcaacttctgacattatttttagaatgtgcttgtgatgcattatcgcaacgaaaagatattttagagagtacatctttccaaggtataaacagaattaccgtacactgcactattgacaaaaaatatctggtcgatagtaactctgacattacagaaaattttgctcctgagttgtttactcaggtatcgttaattaacaaagataattattctgcaaatataaagatttgcattaatttgccactaatgcaatatcgtcttaacagacctcaaaatgccagtttccaggctgatgtttgcattgcattcttacaatcgctctccaaaatacttcatatcgagttctccgaggatagtaggcaaaagttaatcaacacagggaacagacccgcaaggatggcaatatccaaggaagagcgcacttttgatactttagaaataaaaccaaacattcctgaagccaaacattttaaactagccagaaaaacattggctaatttcattaaagacgctggtgttcaggaaggaaattatgagttacaaaaagccaaagatattattaaccctttggccgattttttcagagaaaaaattcacacaacaatacgctcgataaacagggagcacttgctacaatttgtaattgaaaactatgatgcctatgtagccgaagatcatagaaaaaagaaaaagattatgttaagccttcaacatgaggttaattataatagaacggaaaaattagcgaaacaaagtactgagtttaaccgaatgtcagcaaattataggtatttgcttgagtgcactttaagtcttaactcaaaaagtgaggccataccgactaccgatgatattttacaattacttgctgatattgattggttaatcgtactttataatgcaagtgacatcctgcataatgatattgatgtaggtggtttgaacatagataatttttacatcccacaagtatttttttccgaagatcgtgagattaaagaagataagtttagtgaagaacaagcaggctataagttaggttataatttaaacgacactgattctgtagagtccgatattataaatgaaaaattagatgatcttgatcgtgcatttcaacaagatctgggcttcaaatactctagtttacttgctgttttctctattctgtttcaatgggcacgatttaaccaaattgaattaaatgtttcatatcagacgacaaagactgatatagtaaacatactgcttaacagcaatactaacttggttaatgaggaagtagagaaaataatagattttcttattcttgatcctaataagataagaaaattaggtaatgactccaattag

SEQ ID NO: 395504 - DNA, 504 bp, Salmonella enterica
atggaaatgctggaacggattgccctggaaaaggtcagaacgctggctttcgttgatgaaattgaggtctgtctggcgtatcagaataagctgaaggaatcacttgaactcaccagcgtgacggcagaaatgcgtttctttggcgcgtccggcgtgacggcttcagaccttcggagcgctgatcgtcaggtgaaagccgccgaaaacagcgagttcagtgagtggttactgcagtggggcccgttacacagcgtgctggaacgcaaagagccggaacgctttaacgcgcttcgtgaaaagcaaatatcggactatgaggacacgtaccagatgctgtctgacacagagctgaaaccgtccgggctggtcggtaataccgatgcagagcgcactatcggagtaagggcgatggcgagtgcgaaaaaggaatttctgaatggcctgcgccctcttgtggaggagatgctgggtagctatctgaaagcccggtggcgtcttaactga

SEQ ID NO: 395505 - DNA, 267 bp, Salmonella enterica
atgacaaaaggcttggttttgcttggtgacaaaacttctcacggtggaaaagtgatctctgcctcttccaatattactgtcgacggaaaaaaagccgcattagttggtgatatggtgagttgcccgatagaaggacatggaacgaatcctatcgtggaaggatcaccgcaccggacatttaacggtcgcgctgttgtcgtcgatggctgcaaatgtcagtgcggctgtactgtaatttcaagtgctcagaacagcacagtaggataa

SEQ ID NO: 395506 - DNA, 798 bp, Salmonella enterica
atgcataaaaggtctaaggcattgctcatttcctttttatttctctctactgctagttgcagtatgaaccgggccgtaaacaaaacgttatccccgccggcggatacaaaatgggtcaattttggagtaaaaaatccatctcagtatacgaaaccgtttccgcttgaggtcagatatatatcacatgagtgtcagaaaaaaagagtgagtggatttgattgctcagttatcacagagccaagctataacgttattggggtccccatgcagcaagagagtggggatacctggaaagcaaaagttgctatgaccggtggtggtacgtgtaaatggacattgagtgcagtcaatttaggtatcgagtatatagatgctacacatcttgggaatgatttagtacctggaactgcggttggtgtaactattgcttttgatgctgatgctgtgcggaatggacaatttgatacagtggcggggaatgattttaattacactccaaaatactatccttttataaaaaaatggaatgatagcccacagtctactatgcgggataaattatatctttttggtaaagaagatgcgttttggaaagtgaagttggactataaacctaacgaaaatgttttaataaattacaacccctctatagacgaaagtaaaaaagtattgatgacattccctaataagaaggggaaagatgctatgtactcttttgtctatccagatgggagcgtcatttcatcaaaaaacacaacacctgattttagcaaagtcaacggatctggtgggaaataa

SEQ ID NO: 395507 - DNA, 771 bp, Salmonella enterica
atgtataaccaatcaaaaattattctgctttcgctgatgttgtttactgtggagggttgcagtatgagccgggccgtaaacaaaacgttatctccaccgccagatacaaaatgggtcaattttgaggtaaaaaacccttctcagtatacgaaaccgtttcctcttgaggtcagatacatctcgtatgaatgtaagaaaaaaagagtgagcgggtttgacggttctgttataactgaacccagctataacgttattcggatcccgatgaaccaaagtaatggggatatttgggaagcaaaagtagcaatgactggcggcggttcatgtcagtgggctttgagtgccgtaacacttggtattgaatatattgatgctactcaccttggcaaggatctggtacctggtacggcggtaggtgtgtctcttgcttttgataatgatgcctcgcgcaatggacagtttgaaactttatctgatagcaatcctagttttacttcgacgtattatccattaattaaaactaacaaaacgattcgcgaaaatgattctctgagtatctttggtaaagaggattttttacaaaaaaggataacaaagttaaacaactctgtaagtgttaagttttcacctaatttagatgagtcaaaagtagtaaaaatggttgcaccaaaagatcataaggttggtgcatactataaaattatttatcctgatggcactgttgtatctgatggatcgactcaccctgatataagtaaagtggaaagatag

SEQ ID NO: 395508 - DNA, 2022 bp, Salmonella enterica
atgaccaccgctgtatcctcactctgccgtaaaaatccccatgctccatgcgaagagcagatgccctactgggtagaatttcaactggttgatgaacagggcgaatctgtggcgaatattccatggactgttgaaagtgctcatcctgtttccgggccggtggagggattcacttattctggtcagagcgatgctgacgggctaatcagggtcgacatgccgcacggtctggagctgaggctgacgttagatggcaatcagctggctacggaaatggaaaaacgtgctttacgcgttagtcgcgatgcggaaaatgattctgttgtgcgtcctgaagctgaagagaaagagtatatctggcattatgccgttattggtgaactttgtcagagttcaccaaacctggaattaagacctggggaaatgttacctgcataccactttccttcaaaaacagcatttaagggatttacatgtcgaacgaatgaacttgaaaaacgtcatgtaatagaaatatgccctttcagggcatgggagcttgttctgcatcatcaaaaggactattccatagcgaacggaattaatcttggtgcggcagcaacgcttgcctatgcagatgacagtactctggatacggtgtcaattacgcgcttttttattaaccagtgccaggatctatcccgattacctcaactttataaagacggctctgcatggaatacgttagtacaggatgttccctttagtgaacgatatcatcccccggtatttatggatacctcgcgcgatacttcgcctaaggcagacgagaagaacccacatggaacagtacaggctgaggacgatactgctgcaacaaaggcagacggtgatacgcagctttattatgtctataacgcggataaggtgattgtcgcctggcgtggaacggccagcttgtttgatgtgggaacagatcttgcgttcaggccgataaattcagaagtatgtgatatagacaaaacgcaatgcactcagttactacctgctgggaaagtgcatactgggttctggtgtgggtatagccgagttgaaaaaaaatttcacaaagaacttgaagatttcttagataagttggtaggtcgacaactatttatttctggtcatagcctggggggggcgcttgcattaattcatgctgcttcattgaaaaaaagtaatcctcttttatatacatatggaatgcctcgcacctttacccgcgatgctataatgcagttatcggatattacccatttccgccatgtcaatgataatgatcctattccagccgtacccgcagaagccaacctggataacgagctatataaattatggggatggtttggtgggactctgggctttttctggtcattgggtgagcttctcgcttaccagatggttgcctggggagactgcttctggcaccacggcaatacggttgcctttctcacagccacacagagccgggaatggaatgagtgtaagagggctctcccaactcctgcagggtgtattaccatcagaaatccacttccactaaaggctaagctttatctggtgcccgctctggcggaacaagagatgcaacaggccggtaagaaacagaaagattttaaagcgtcattaacgcaatcggatttaaatgatttcttccctaaaggcagcaacccagacaggggggttaatataaatatttttgaacactttatgacgtcctatatgccttatatgtataacaaggtgttagagttgattgataacgccggtatagtagaaaaacgcacatttactgagcatatgtataacgttgattcattcagggagcagatggcagaaaataaaaatgatataccgactgatgaattatccagaaatgaaatgttccttaatatcgaaggcttgctgggagtgtcgctgactccaacattatctatgccgtctggcaatgatatacttttgcggtttgctcaatatggagaagaggtaatggaaaatgtataa

SEQ ID NO: 395509 - DNA, 477 bp, Salmonella enterica
atgtatgcaggggcagggaaggttgatattcaggcacaagctgatgccatgaatgtctcagcattacaggacattactgtcgccagtggtcaggggagcgtgaaggtaaatgccagcaaggaactgattttaagttgcggtggtgcttatataaagcttagcggcgggaatattgaactgggatgtccggggaatattttgctgaaagcggccaatgttaatcagacgggccccgccagcttagatacaccgccagtgactttcccgaaagggtatagcgaagggtttaccacaacgtcatccgccagcggagcagtaaagcctttcaccacgtataaaattacgacggctgaaggggatgtttatgagggcatttccggtgcagaaggagagacttctccaatatttacgtctatgccatcgcagttaaaaatcgaatatccgcgcaatattgcggatagccaggagggcgaataa

SEQ ID NO: 395510 - DNA, 513 bp, Salmonella enterica
atgcgcgatcatactcccggtgcgctggcgtttgcccgcaacaccggaatagcccgtatcattccctcacagagccgtcagctgatgcagctgttgatggatgaaaacggcacatctccatgcctgataggccatgtacagcacccatcaaggatcctcccggactgctttcagcgtcttgctgaaggcatttaccaccaccggctggtcagcctgctggtaaagggcatccgtcacgaccaccttgagccctaccggctgattttctcgcatgcgtgctggtatctggtggccagccagtatggtgcgatacgggtattcagggttgaggaagtgacgtccgtttccctgtctgaacgctctttccaccggcgcagtgagaccagcgcactcattgtggatgcggatttcatcaatgctcttccacatttccacttaatcagcaacgtcattcacaccttccgggagctttctcccgaacctaagaccagaccaaaaggagttaaaacatga

SEQ ID NO: 395511 - DNA, 273 bp, Salmonella enterica
atgaaacacggtacagccctgctgctgagtgcaggaatgatgctggcatcgctgtcggccgtaaatgccgctacgcccgacgcgcttgtacaggctcataaacagcgctgcggaaagcccgtcttctatgcgcagaccgttaaccacaaaaaggaggttgagatttgcatcatcaccccgtcggtatcgtattcattcgggaagacgggcgcagagcataaggaaatggacattaccgtaaggccgaacatctggaagcccgtatggagatga

SEQ ID NO: 395512 - DNA, 450 bp, Salmonella enterica
atgagatttaaatcaccgtctctatacgaaattcttactggcaactttacaggggatcttccccttgaagttgtaaacgaagaagacccggtcattttatccgtgctggataacatccagagtattttgaacgcccgggccgggacccaatcccatctcccagattatggtctgccggatatgaccaaaattctgcaaggcatgcccgggacagcccacgagctgatcgatatattggccggtgtactactcaagtatgaacctcgtttacagtcactcaatgtgaccctactcgaacagcaagtgccaggtgagttgcgctacgccatcgatgcggaactgagaggtatcgggcttgtacggtatgggaccgagtttatgccagagggtaaagtgatgatcaggcacttgaaacaacagcagcatctggaaaaccatcagtttatctaa

SEQ ID NO: 395513 - DNA, 453 bp, Salmonella enterica
atgccagatagaaaatccccatctttatatgaaattcttactggcaactttacaggggatcttccccttgaagctgtaaacgaagaagacccggtcattttatccgtgctggataacatccagagtattttgaacgcccgggccgggacccaatcccatctcccagattatggtttgccggatatgaccaaaatcctgcaaggcatgcccgggaccgcccacgagctgatcgatacgctggccggtgttctgctcaagtatgaaccccgtttgcagtcccttaatgtaaccttactcgaacagcaagtgcccggggagttgcgctacgccatcgatgcggaactaagaggtatcgggcttgtacggtatgggaccgagtttatgtctgagggtaaagtgatgatcaggcacttgaaacaacagcagcatctggaaaaccatcagtttatctaa

SEQ ID NO: 395514 - DNA, 1218 bp, Salmonella enterica
atgatgggagtttatgctttcccactgtttatctattatatagtgttaacttttctttgtgtttacatccgtttttctgcctataaaaaaacgctgcaaacgaataccgccagttatgaaaaaatgtctacgttaatatcattagaagcaaaaagaaaagagttgaagtttctacgcagcaccttttttgaaaagctattgatggataaaactaatcgtgacgaatataccaaaatggaaatgaatattgaaaatcatcattgggctgaaatgataaaggctaactcttttgtttctatgattgtgatgtttatttcatcctattttgctgtcgtcaatggtagtttgacgacagcctctattattgccattatgattatcaactctcggctctcaggggctttagttgggggcgttaataagttatatttatcacgattacattcgtttcacatcatgaatagtttaagcgagctattaaaagataaagatacatttgtatcgcatagcggtatatatatatcacggattcaacaactatcagttgaaaaattatctatttcgtttgccgaacgaaaactgatcgaaccgctctcatttacggctgttcctggagattttattggcattgttggtgcatcaggagcgggtaaatcatctttaattaaagcactgtcaaactctattaattgctatacagggtcagttaagctaaataatgttgatataacacacatttctgaagagtatatacagagctgtatcgcttatcactctacaaacagctcttttataaagggctcgcttcgtgaaaatttcatgatatatggtgttgttgatgatagtgatatcatagagatattaactttatgctgtagaaatcttattctttcgaaagaaaacgtagacgaaaaatttgttgatgagctaaacctttccaatggggaaaaacaaaaaattttattatgtctggcattatttaaaaaaccggagatggtgttcttggatgaatcgacatcttatctttcaaccgctgacgctttagattttctggaaagaataaaacatctttactcagatagtattgtcatttttgcgacccatgatatatcactacaaaggttatttactcgaaagattgaactctcacatgaacatttaagaactgtaagttgtaatacaacgataagtattccgaaaatgaaactgaatggatga

SEQ ID NO: 395515 - DNA, 456 bp, Salmonella enterica
atgaattataaccaattcagtgatgtgcaatctaaaaatataggtgaaggaacgagggtatggcagttttctgttattctgccgggagcggtaattggtgcggaatgtaatatatgtgcgcatactttaatagagaatgatgtcgttatcggggatagagtcactataaaatcaggtgtatacatttgggatggcattacacttgaagatgatgtttttattggcccgtgcgtatcgtttactaatgacaaaattccccgttcaaagcaatacccagaacagttcgcccgtacagttgtaaaaaaaggtgcttctataggtgcaaatgcgacaatattgcctggaattgtcattggagagggggcaatggtcggtgcaggagctgttgttactaaagatgtaccagcaaatatggttgttattggaaatccagcaaaaaatattaaggaagtttaa

SEQ ID NO: 395516 - DNA, 348 bp, Salmonella enterica
atgctggttgcacttgaacagattaaaaatgttccttttgagataaaacgaatttactacatgtttggtaccaaacaaaatgttcgcagaggattccatgctcataagaatttgcgtcaactcgctatagctgtatgtggtcaatgtacttttctgttagatgatggagatgaacagaaaactatacttttaaatgatcctgaaaaaggcttgttaatagagccaggaatatggcatgaaatgtttgatttttcagatgattgcattcttttagttttagcaagcgatatttacgatgaatgtgattatattagagattacgatgaatttcaggaatggactaaatga

SEQ ID NO: 395517 - DNA, 876 bp, Salmonella enterica
atgaaaggtatcattttagctggaggttcaggtactcggttgtatcctatcaccatggggatatcgaagcaattattacccgtttatgataaaccaatgatatattatcctttgtcggtattaatgcttgctggtattcaggacatattaattataactactccagaagatcaggctgcctttattcgattgttaggtaatggtaaacaatttggcattaatcttagttatgaaatccagccaaatccagatggggtagcgcaagcatttattttaggtgaaaattttattgcccaagattctgtttgtctcgtgcttggcgataatattttttttggtcaaggatttacgcctaaacttaggtctgcagcggaacgaaaaaatggtgccactatttttggttatcaggttatggatcctgagcgttttggagtagttgagtttaacaacaaatttaaagccgtaagtatcgaagaaaagcctactcatccgaaatcaaactgggctgttactggactgtatttttatgataacgatgttattgagatagctaaatcaataaaaccgtctactcgaggcgaaatagaaattacatcagtgaatgaaatttatatgaataatgattgtttgactgtagagattttaggccgagggtttgcatggcttgatactggtacacatgatagcttaattgaagctggtagttttgttgaaacagtgcaaaaaagacagggaatgatggtggcttgtccggaggaaatagcttggcgcaatggttggttgagtggcgatgacgtttataatttaggtaaaagtattcagaaaaattcgtacggccagtatcttatcaatttagtgaaaaaaaatgaatattga

SEQ ID NO: 395518 - DNA, 1074 bp, Salmonella enterica
atgaaaatacttattactggtggggcgggctttattggttctgccgttgttcgtcatcttatcaaagatactcaatatacagtcattaatattgataaattaacttatgctggtaaccttgaaactcttgctgatatagctgagagtgatcgctattattttgagcatgaggatatttgtgacgccgaagcgatggcgcgtatctttagacagcatcatcccgatgtggtaatgcatttagccgcggaaagccatgttgatcgctctattatcaggccgaccgcttttgttgaaaccaatatcgtaggtacgtatgtactactggaaactgcgcgcaaatactggtcttctttaacggataagaaaaaagcagcatttcgttttcatcacatttccactgatgaagtctatggtgacttaccgcatccggatgaagttgcagctaacaccaagttaccgttgtttaccgaaaccaccgcctatgcaccaagtagcccatattccgcctctaaagcttcaagcgatcatttagtccgtgcttggctgcgcacctacggcctgccaactatcgttaccaattgttctaacaactatggtccgtatcacttcccggagaaactcattcctctggtcattttgaatgcactggaaggtaaacccttgcccatctatggcaaaggcgaccaaattcgtgactggctgtatgtggaagatcatgcgcgtgcgcttcatatcgtggtgactcagggcgtagtgggtgaaacctataatattggtggtcataatgagaagaagaaccttgaggtagtccatactatctgtgatttgttagatgaaattgtaccgaaagaaggttcttaccgtgaccaaattacatatgtgactgaccgtccagggcacgatcgccgctatgctattgacgctggtaaaattagtcgtgaacttggttggaggccgttagaaacatttgaaagtggtattcgcaaaactattaattggtatttaaataatgctgaatggtgctgtcgaattagagagactggctttcagcatggactattaggattgaaataa

SEQ ID NO: 395519 - DNA, 237 bp, Salmonella enterica
atgctcatcaaccgtattatcaaaattaaaccgcgtaaacatcttatgattcccttgttgaaggatttgttctttcgtcatatctccatgtcgcatgtcatccgcagtaaaattattcattttacgagttgtctcgaaaatcaagcgacgttctgccttttgtatctgcatgatgaatattcggggttcaaaatgccagatctgaccgctgagttccttttggacctcagcaggtaa

SEQ ID NO: 395520 - DNA, 207 bp, Salmonella enterica
atggaacgcttcttcaggagtctgaagaacgaatggatgccggtggtgggttacgtaagcttcagcgaggcagctcacgccatagcggactatatcgttggatattacagcgcactaagaccgcacgaatataacggtgggttacccccaaacgaatcggaaaatagatactggaaaaactctaacgcggtggccagttttagttga

SEQ ID NO: 395521 - DNA, 453 bp, Salmonella enterica
atgaccatgtttacccagcgtgaaacccgtatcctcgaccaggcgcgtgatattatcagtcggtactaccagcgtggggttcaactctgttcccctgatgatgtacggcggtgtgtgatggttgagctggctccgcttgaacatgaagagtttggcatcatcctgctcgataatcagaatcagctgctgcaccgcgaaatcctgttcaggggtacgttaaactcggtcagcgttcacccccgtgaagttatcaaacgcgtactgaaacataacgccgccgcagctatccttgtccacaaccaccccagcggcgagcctgaacccagccgttgcgatatcaagttgactaaaaaactacaggagttgctggaaatgctggatgtacggttacttgaccactttatcgtggcggggactgaaacggtgtcgatggctgagcgggggctcgtgtga

SEQ ID NO: 395522 - DNA, 930 bp, Salmonella enterica
atgagccgggctgcgttgcgtcaggtcgtgccagtggtgcaaaccaccgtgttcgatgcgtatattggcggtcttgcaccatcgggacggcggggcatcaccagcctgttaaaccgcagtgctggcatacttaaacacggtacggatgtaactagttatccgtgggaacaacttaactacgccgctgtcgctaaagtacgtgcggcactgctggatgacggttacgccgtgtcatcggtcaacatggcgttgtcagcgctccggagtgtggcgcagacggcctttaaccttaattgcatggatgccgaaacgctggcccgtatccgatcagtgaagcgcgtaagtggcgatatccagcggaagggaagggcgctggacaggcaggaaatccgtgcgctgattcaggccgctaaacagcatccgcagcatgtacggcgctgtcgtgatgccgctattgtgctgacactttgcggaacgggcctgcgggccggggaactggtcaaacttgagcgccgggactatgacaacggcatcctgactgtgaagcaggggaaggggcgtaaataccgtgaaattcatgtggcggatgcagtggataaggccatccgcgcatgggttaaagtcagcgcaaacgaagctgaaaacgcactgttcagccgaattcagcgcaacggtaaggttgccagtcagcctctgacaacaaccgggctaacgggtatcctggctgagttacagcatacgtcaggcatagcgcgttttaccccccatgatatgcggcgcaccttcattacccgtttactggagcagggcgtggatatcaacaccgtacgcaaattggcaggccacagcgacatatccacgacgacgcgctatgactatcgtggtgagggtatgaaagccaaagcatcacagagtttacggtgctggtga

SEQ ID NO: 395523 - DNA, 309 bp, Salmonella enterica
atgacatttgatatcgactatgacgcacttcgggcctcagtattcaaacagcattatgttcctgctgttgagtctatcggaaaaattgggcgttactggtttggaggaacaaggcaggccgcctcaatggtggcatccttgctaagagaaagtgggatgtcgatcatcttgcataatgcaccacctcgctgggaattcgtggtttacctgacagaaagtgacgtcgatagtgacgacttagatgaaattgcgcttcgtcgacatgagctgattgaacaaggtgttgcagaacgggatttacctctttaa

SEQ ID NO: 395524 - DNA, 669 bp, Salmonella enterica
atggaaaacaacaattctgacactaataaaaacagaacatcagttagttatgctaaaaattcagaagatccgtctaataccactcacgcaaagaagacaagaaagtcccgaaacgcccgctacaagagtaaaacggagtcaattcatgagaaatcggggttcacaacgctaaagctgcgtgtcgggcaggatgtcatgcaaaagctgaaggaaatctaccgggatcatcggggctatgaactgaatgaaacccgtaaagatctggatgccctcagcaaagttgtcagctactgcgtgagtaagttctataacgaaatgtatttgcagaaaaaaaagggggcattgcctgacattcttccggcaaaaacaccgcgcgcgcaggagctgtacgacctgtaccaggccgttacccacagggcattgtctggtatgccccatcaaatgattgccattgagatggaacatgacagataccagtctcctgccaatatcattgccagtcgacggggttcacgcaaaacgccattaccctgggatgtttctcaggttgatgatctgctgagcattcagtgggtaaacgatgaaatcaagaagcttaataagaaagagattcatcatccccctatccagcctgctgccgtggataatctgagtgattctgaaaagtga

SEQ ID NO: 395525 - DNA, 195 bp, Salmonella enterica
atgaataaaggtcggttaattaaaatagatgaagtaacgaggttgtgtgcaatgtcccgcgcgacattatacaggatgctcgccagcaacaattttcctcctcaggtatcagtaacagggggccgtgctgttgcatggtatgaggccgatatttataaatggattaatgagaggccatcaaaaaaagaggaataa

SEQ ID NO: 395526 - DNA, 789 bp, Salmonella enterica
atgttggcattatctataccgggctttgaaacaccagagcaggcaaggaaggaaagggtgttcaggattgccagtttatccacatataccggagcatgttacaaagcgctctgtgaaagattaacggaatgccacccgaaatacccctgtaacagcgcagcatgcccggaatgccataggcgataccggctacagatgacaagggaagtcctgcgattatgcaacaagacacataaatggcgtagtgtgaccttgattttctaccaggatgcgttcacagatgcagaagcacccatatggtcgccagatgcactgattgcacgtctccggcggtggttaaaagaatgtggattcaagtatatggtgattggtggtttcgaaatggattaccacatagatactggattgtggctacctcattttcacttaatcactttcaatgaagaggaggcattaaataaacttcggaacagaatgaaaaacaagcgcaatatgtcggccagaaagagtgtcatttccagaccaatgtttgatacaggaatagacagcccggagaaacaaataagttacttgttcaaggctatatggtggcgcgttgaatcgtataaagaaaacaagcctatacttatcaacaataagagtattaaacctaagcgccgaactaagaagttcagattacgcccaaaacagcatgctcattctttagttatgatggataagcagggaatacagacattaacctttatgtataaagtaaggaagtatggtgaccatttgatattaaaataa

SEQ ID NO: 395527 - DNA, 1689 bp, Salmonella enterica
atgatagaatataaagagatattgaataataaaaaagaaaaactatttgttacattgttggctcgtacaaaaatttccgaatcatgtccagttgcataccgacttattaaaatcactgattttcaagagatggagtcgacccgtgtgcttgtaccagccaaggcacttgtcagtgtattggagttaaaaaaaacgttattaacgtgcgggcataatcccaatgtgactaaagaatactggattcaagctcatcaagaagtaattaaggaaaccgataagataatcacactgtgctataagccaggtttttatggtgatgtttatttgcgtgttaacgatatagttattggaaaagttaaaggggataagcctgtactgcatcctggtgctagaaatcatttaccagttgaggataaacagcagacattaaaattatggaaaatgaatgtcgctccatacgcgctacatagctcgcgcattatgctggctctgtgctgcggattttctggctttctccttaagctttcaggtatggaagggggcgggtttcatttatgggggatgagtagtataggaaaaacctccagtgcctacatgctggcgtcattagcaggatcgccgaaagacattgtcgtactgtggaacaatacggataaagggcttgaggagattgccgtggcccataacgacagctacctggttctcgatgagtcgaagctgttagataaagacgtactggcagccgctaaaatcatgcagaaccgcgtgtatacgttatcgggtggtaaagggaaaacacgctctgcaatgtttgagaacaaagttgctgaatggcaggtaagcattttcagtacgggtgagtgcagtcttcaacaacttgctgcttccgggaatgttgagcgccttgaaggcgaaaatgtgcgtgtaatcgacgttaatgcagatgctggtgctgaaatggggatcttcgaatcactgccagatggtattaattccagcaatgaacttgttcatgcgataaaggatgcaactcaccgatattacggtagtgccaaacctgcctttctcaagcgcctggtagcggatattcaggatgatcgtgagagtgtgaaacggaagctcgaaaaaggcattgagttcttcctcaacaagcatcaggtcgatcgtaactccggcattcaggtacgtatcgccaaacgttttgccatcgcttatgtagcaggttccatggctgtgaaatatggtgttttaccctttacaaagcaggatgttatgaaggggatctcaacctgctacctgggctcccttgagatggttttatctgaacctgaggtaatgaagtcaccattagggcgttcgtttgatgcaattattgattttatcaaaaaggatgatcttttaaatctgattggaaatgatcgcgtaacccaaacggcgattaaaaaggcaccggtcattatccacaaagttaaaggatgtacggtatatgcagttgataagaatctggtacataactgcttgccgaaatctcagcgtaagggcattctgacattattaacaaaacaaggggttttattatccgatctgaaaaaggagtacagtaccattcagattatttataaacgtaagcaggttggccgtcgctattgttttattagcaaaaatcttgataagtttatgacacaatag

SEQ ID NO: 395528 - DNA, 1053 bp, Salmonella enterica
atgacgccattagatccatcctattaccctgatttccagtaccagtctaaaggcatcataaaagatttatttggtaagaagaaagagcagtctcaactcaacgccctacttgaaaatgttcttttgaaatacgccacactgaaagacccctattttactaatttcattcacacatcaagattttcgtataacaatcaggatagcaacagtaacatagatagtgaacgcaatagtgattattcagagataagattattccaggaagtactgattagaaaagggttcaacgaactggagcagttaccatcattgttagataagctattgctgaccacttcattcaattctatttattcagggtttgcccgtgaggttaaacgacatatcaagccaacccttaccgagacattaaaatcatggatcgaagaggctggtacaacttatcgtgcagatctttcgttattcctgtattacctttggagtaatgaaatccattatccagatataacctttaacgaacacgcggtaaagacaccgggtactccattattatcatttgactctatcgaaaaattccttgctatctgcgagagtatctattttgatattttagtagacagattagctacccgccttgaacattttaatccaaacaaatttgtcacaatgtatcttgttgatgcaatggatgggttccagtttgagaccttcttggttgaaatatttcagactataggatatgacgttaaagaaacaaagaaaacacaggatcagggggcggatttattcgttacccgcttcgggaagaatatggttatacaggcaaaaaattattctggctcagttggcaattcggcagtgcagcaggcaatttcagcaaaagcattttatgggtgtgatgaagcaatggttgtgacaaactcttacttcacccgatccgctaaggaattagctgattccgcaatggttcgtttgattgatagaaaagaacttcaaaactatctggatgattacaatcagaaaataattgaagatttccagtcagaatcatga

SEQ ID NO: 395529 - DNA, 453 bp, Salmonella enterica
atgaataccgatttgatgcccaatttctggaagctgtcacatggctggaaggagttctcattcctggatatggtcgaatgtattgatgaaaagctcgtctacattcaccgcacgaccgctggtaaagggcagtcttccgtcagccaggcagaggagtttgtaaatgctccgattggtgattacttctacctgacccacggtaatcagggtgtatacctgcttggtcagttcactggtccggttaactacttcacaaaacacagtgatggttggatggacaggccattccggctgattcacaaagccaatgccagagaggcatattatggtgtcgagaaatggtggacacctaatcacaactctacctttgttaaggttccgcaccacgaatatgatttatttgaagaactgatattgacgccctatttcaatattaacctaaaagatttttag

SEQ ID NO: 395530 - DNA, 453 bp, Salmonella enterica
atgaaccgcataaccacgggcgtaatagcctcattgttgattgtggtcgcggcgctggcatgggcaacagaccattaccacagtaacgcggtacggttccggcagcagcgggacaccgttactcataagctggcgctggcgaacgcgacaattaccgacatgacgaagcgccagcgtgacgttgccgcccttgatgcaaaatacacgaaggaattagctgatgcacagaccaggaatactgatttgcagcgccgccttgctgctggtggccggcgctgtacagtgcccacctggaccgcaaccaccagcgccagccgcgtgggcaatgctgccaccgtcgaactctctccagattctggacggaacgttctcgatatccgcgccgggatcatcagcgaccaggaaaaactgaagtatttgcaggagtacatccggacgcagtgtctgaaataa

SEQ ID NO: 395531 - DNA, 402 bp, Salmonella enterica
atgattctgctcaaaccagacgttgatattgatgccctttctccggatctggcagccctgatggcaattggccagcaaattggctgtaacggcttttttcctttccagattcgtccgggaaaaaacgaaaccgatgggcgaatgttttccccggcaatggggattgtggaagatccggtaacgggaaatgccaatggcccgatggcagcatggctcgtccatcatggcctgatggcgcatgacggtaaaacgctgcagattaaaggccatcaggggcgcgctttaggcaaagatggtactattgatatcaccgtcgccattcgcgataaccagccggaaaacgtcaccatctccggtcaggcggtcattctgtttcatgccgaatgggccattaatttttaa

SEQ ID NO: 395532 - DNA, 645 bp, Salmonella enterica
atgaaaacattaaatactaatgaagactgcccgtctgaattttatatatttgttaattttaacaacccaattactttcaacaatattcagacagtaggctcaattagctcatcgggagttcaaactgccgctatgggtgcagatatgctggctaaatatattaacgatgaaattgattatctgccatttttaccaaaccctaatgtatctcccgcaatatcaatgtaccagatgaatgtactcaacaactatagagcagagtataacgcggaacttgccagaagaagttcgttcaagacttatccatctcggctatcggcgctttacgctttcgcagactacgagacctgtgtggaggttagcagaaagtatggttggtctctcgacactgtcagaaagtttcgattgatagagatgcccccccttacgcgggttgtaaaagttaacatggaagtagtatctctgatcagacacgcctacagcgtttcaggcttcagttctgatgaggaagtatggcaacattattgggctggaaatgggaacattgagtttgaactgccaggaagagatttacagcgtcagcgctatgagagtggtgttatctgggaatatttgatcgagggaactctggagagaattgattaa

SEQ ID NO: 395533 - DNA, 231 bp, Salmonella enterica
gtgagaaaggctctgaaaggaaggtttaccactccttgcgcggaatattcatcagccaacttgatcgaggatgtgttgatcgaaaaggagtaccggaggtacaggatcgcactgattgtgggccatgagcgcgggaaaacggagagtttcagaacctacagcaaaggcgcggggatgaaagacctttcggagtatgtggagttggtgaattatgaagcacttgggatataa

SEQ ID NO: 395534 - DNA, 618 bp, Salmonella enterica
gtggaactgcgttctatcaaccagcatgtaagccagaatgtggggatcaactttgccacgggccgtgtgtgtccctcccttgtccagttacatgatgaatttatcgttcagcacaatgatagacgcaagctatccacgctcagcaagtacattaaagcggttgaggtctttacggctcatttccgatgcaaggattttcgcttgcacgatatcaacagaacgatggtcactgattggctcgacagggcaaaacatgagaaagctagccagacgctggctaattaccttggttgcctgtctcagcttgtcgcactggctcagaaccgctgtcacgatgcgccgaaagagaatatttttacaggccataagctggatgtacgccatgatcgagaaagctatgaacccattagcggggatgaactggctaaggtgtatgcgatgcttgatgaagagatgaaagccgttgcgttggtgggaatgttcagaggcatgagattgaacgaaatttgctctctgcaaatcagcaatatcaaaaccgttgaggggtatggtgtttcgaggtggcagagagcaagacacgcaatgcagctcgcttggtgccaattcatagccggttga

SEQ ID NO: 395535 - DNA, 1422 bp, Salmonella enterica
atgagtgagcaaattagattgagctatcatgaaatggactttcttgttccagttcatcgatttaacatccagttttcatatgtaactaagcaaggcttatctttcatcagagaatttgtattgcgattagtacagcttgcacctatgaaaccttcacaaatagcaacttatattggattaaataaggatgaagttgatgaagctatttctgatctcatggataagggagatctgcgttttaatacgcatgggagtgttgaacttacaccacaatctacaggatactttgatagtattggttccccccctaagacttcatcaattcaggaaacgggtactacattgtcgttcgagttatgtggctttaattgtataggaaataagcgtacattcgatcgctggaaacaaggaattgaattgcatgttgacaacaaactattatcttgctcagaaaatttagctaaagaaaaatttcagaaagaattttataaatatctcgacaaaggctatcttaaaggtgttagaactgaagggacggatcgcccaagcatatacacaatggatgcagtaaacaaattaacaaaagatgctcttagattaacttgcaaattctatgttgatgtagatggaagacctattgaacgagaagatttcgatctattagatgattccgctgatattcatgaaatgataacaaaaagcctaggtcataataaaagaccatccaatatatcgatgatagctacagctatggctaactttgaagatacatggactaaaaaagtttttaacgatttatctatcagccccgcatcttttgctattgcatccgctgaatctctagccaacttacaaaagcctaaaatactggcaggaccattatattccaattcaaattggagctttatatcgagtaagatccaaaaatacattactaatagaactacatcagaagacaaaaaaacaaagcaactagtatggttagctccgtctgatccttattgggggaaatcatcacaaatcatcgactgtttaagtgagttagagattctccagctgacaacaggtaaaaatcctgagagggtatttacgcctaaattataccttcctctatcaagtcctgcagatagaaggacattaagcaaactggtttatgattttagagaaagtgctaatttaaactatggtgtcgctgaaggatttatggatggtaatgtcgaagttttatacttagaaaatgaatttattgttgttttctatcatattaacttccctgaaagcttacctgtcacattgccagtaggttttataactgaggataaaaaaatcctcaacaaaatctctaagttggtcgaagagtatatagacagctcaagctctcatgacaaaccacataattttggccttctaaaaaacctctaa

SEQ ID NO: 395536 - DNA, 2475 bp, Salmonella enterica
atggaactatccggattatccaaagaactttctactaatgaagcctttttaagaacggtagatacagtttacaatcaggatgaagaaccaaagattgatggtttaactgaacaattaaaagaagcttttagaaagttagatcagggcaataataaagagaatgttctctctatttctactgctaaactctggaaagcaatattagaaaccgagactgaagcatatccatacatcgagatagtggggggtgtagtatctgttgaagataatgacaacgaaattattttgccatactcttcagatatagatgccctgggagggtttgcaaaaactgatatcgtggaagctttacaaactaaaggtgatgaggaagtcagattaggtgaagtcatactaaaacaaagtgcactcaatgaaattcgcttacataaacttagctttaaagccaaacatttagaagatggcgatcaagttttctttagaaccaaagcagataaagcttcatatattaagagaaaaacagcccttcaaagaatattagaccgtgaaagtgttataagtaatttatctcagtattttgatactgactgtaatattgatgctactcaatataaaattgaagttacagatacggatttttcacgatacgatcgaaaagatgatcatggaaataatataatccttaatgagcaacagcgtaatgctttttcaaaactactaaacaatggcccattatccttactacagggtcctcctggcactggaaagacagagttcattgctgcttttgttcattatcttattgaaaaacagaaatccaaaagtatcttattggttagccaatcacatgaagcagttaatactgccgctgaacgcatcagaaagcactgtatacgcttagggacacctttgaatattgtgaggtttagcaatcgcgaaggggctgtatcaacaggacttaaagatgtttactcaaatgctataattgcagaaaaaagagaactttttagagcagagtttaaatatcgagtagaattcttatcccaagcattaggattacagcctgagttcatttcctctatagtcgaagccgaacttgttctatttaaacaaatcgaaaatttgagtaagtgctttgatgctatacaaaatcaacagctagaaaaagacgagcaacaccagttgaaattgaatattgcatctcttgatgcgggcatacgaaaatccttatctcaagtgtattttctagattacccagcagataaagatataagaatggcgaaacgtgaagtcattaatcatttatgctcacgatactcggttcgccctgatgaagcaaaaaaagcaactgctttggctgctgtatctcgtgacatgatagatgttttagaaacagagcgtgtaaattatgaagaattttttgcgcgctcaaggcaattagtaaccgggacatgtgtaggtatcggacaaaaacatttaggcatagctgaaaatcaatatgattgggtaataatagacgaagctgctcgctctattgcaagtgagttagctatagctatgcaatcaggaaaacgtgtacttttagtcggtgaccataagcaattacctccattgtattctgatgctcataaaagagctcttgctttaaaattaggtattgcagacaaggatgttgacttagatgctattttacagagtgattttgcgagaggctttgaatctccgtatggaattcaagcaggagcatctctgctcactcaatatcgtatggccccacagattggtaatattgtttctgcaacgttctataacggcgagcttgaaaatgggtctcgttcaattcccgatatttataacgatgtcccagctgcattacatagtattgttacttggattgatacatctaagttgggtaagaaatgctatcacagcgaggataaaggtatcagtatttacaatcgtactgaagccgatatcatcatcaacttgctaaaaaatatatcctgtaaaccagatttcgttaactctttaaaggacatagtaaaaaaagatgaggctgctattggtgtaatttgtatgtatggtgaacaaaaaagaattataaggcaaaaatttaatgagattgattggaatgatgatttcaaatcattagtaaaaattgatactgtcgatagttatcaaggtaaagagaatagaatcataattctttctgtaacacgttctagtcctgataaaaaacctaagtttttaaaaactcccaatagaataaacgttgcaatatctcgagctatggatcgattaataatcgtgggttcaacacatatgtggacaggtgctaataaagatcttccactaggaaaagttcttagctttatatcagatcgttcatctgaagataagcaaaacttttatgagaaatcaccaaattatcgaatagttgatatcgagaaaaatcttgaagaggtatcaaaatga

SEQ ID NO: 395537 - DNA, 570 bp, Salmonella enterica
atgaagagattattactggcgttacctttactcttttctggaattgtatcagcaaatacaatattagaacttggtgataatgtagtcgcgttggctgctgctaacgcaaaagtatcaatgttttcgaaaaccgtctctttgcctgatggaaaacatcagttagttattaaatttgatagtccaacaaatccagaatctgtgaatcaggggagagggagactaacttctgcaccgtatattattacttttaattacaatggtaatgatcctgttttattatctgccggaaaagtcagtgatgaaaatgaagctaaaaaggaagcgcagaacccatcattctctcttactgcaaataacaaacctgttaaatttaatatcaaaaaaattgaccaggacagtgttaatctgttctccgattttaaatccatgttggttgctgatagcagtgaactgcaaaacattaatattcaaccggaagttaaagacggcgtagataaagtaaaaaatgcttataataaactttcggataaacaaaaactcattttcatgaaatggttaatgaataactaa

SEQ ID NO: 395538 - DNA, 351 bp, Salmonella enterica
atgaaaaactttggtgaaaccatccgcgaccttcgagtcgcccaagaccttgggttgcgcgagactgcgatcaaggtaggcatttcccccgcctatctaagccgcattgagcgtggcaaggagcgtccgccaagaccagaggtaatcaaggagctggccaagatactggcggccgaccctgacgtgctgttccgcttgtcttcgtccacggacccggaagttgtcgactaccttcatgaccaacccgaggtcatgaatttgctccgctatgtcaaggaggcctgctttaccgaggatgagctcaagagcctcgttcaagcagccgaaagcatcaaggccaactctcattag

SEQ ID NO: 395539 - DNA, 207 bp, Salmonella enterica
atgagcaatgacgaggttctgaaaataaaggatgtcgccaccctacttaaggtcggtgagaagacagtctattccatggcccagaccggggaactgcctgcttttaaggtccgaggccagtggcgattttcccgaaaggatatcgacgcatggatagaacaacagaaacatacaacaaaagatttcggtgagggtaatacaaaatga

SEQ ID NO: 395540 - DNA, 2001 bp, Salmonella enterica
atgagcaaaaagaacagcacacaagccgaaaacacgataccggctgggtatacgctcgactacgtttccggcaaacagatcaaggaaacgaagaaagagctagtacggcagcggatcgttcgcgccctaatccacgaatacggattctcgccggaagatatggagctagatttttccattggcggccgcaagaaggtggacgtagccatcttccatcatggcaaggaacacatcatcgagaatctggggcgcgctgtgctctgccgtcaggaaccgaacgtcggaaaaaatgccgtacgcatccgcgattttgaacaggccgctcaagatcttgatgaaattgaagctattatgcgcgaggttgaagccgttaagtatggtttgtggactaatggcttggagttcttctttgttgaaaaagagcaacagcgattcgaaacaaagtgcaacccaatcggcgactggcctatggcggcagagtctgttggcaccaaagagattatctctgatgctcacacgcgcgtcgctgacaatgagatgcttaaaatcacattccgtcgttgccataacttcatccatggcaacgaaggcatgccaaaggacgccgccttctggcagttcctctatctgattttttgcaaaatgcatgacgaaaaccttcggggaatccaacgtcagtcatggaagcggcagttctgggctggccctaaagagcagtttgaagttgagggccgaaaggccattcgtgctcgtattgagacgctctttaccgaggttaaaaagcagtataagaacatcttccggggcaatgaggaaatcaccctctccaaccgggcgttagcctttattgtttctgagttagccaaatacgattttacccgcacggacgttgatgccaagggcgtggcctaccaagagttagtgggcgtcaatctgcgcggcgaccgtggtcagtatttcactccccggggcgtagtcaagctagtcgtggaaatgctcgatcccaaggaaagtgagatggtgctagaccctgcttgcgggactggcggcttcttggtcgccactttgggacacatgctgaagaaattccgtgaggagcagaacacccagagcggaaatgaggacaccagcgagtttctgaacgtccacgagcggctgaaagagtatgctgcagccaatgtgttcggagccgactttgacccgttcctgattcgcgctgctcagatgaacatggtgctggcgggtgacggtcggggtcacatttacaacatcaactctctggagttcccactgggacatttgaccgatctgtcctccgctaaaagggagattccattggggtcagtggatatcatcgccaccaatcctccattcggctccgacatcccgatcaccgacaggcatattctggaacaatacgagttagcacatagctgggaatcagatggcgaaggaggtttccgcaatacggggtcattgaaaggcagtgtggccccggagattctctttattgagcgatgtatcaaatggctcaagccaggtacaggtcgtatgggtatcgttctgcccgatggtgttctcggtaacccagctgcagaatacatccgttggtggatcatgcgcgaaacccaagtgctcgcctccgtagacctgccggtggaagcttttatcgccgaggctaacgttaacatccttaccagcctgctattcctgcgtcgcaagagcgacgaagaaaagcacgccgaggctttgggcggcatcgatgagtatcctgtgttcatggctgtggctgacaaggttggcttcgaccgccgtggcaacaagctttacaagcgctccccggatggagaagaaatcgtcgagcccaagcagcatatcgagcgtatccgcatcggcgggcgtttcgtggaacggaccttgacccgcaatgaaaaaatcgaagacaacgatctgccggtcattgctgagaagttccgcgcatttctcatggagcatgattga

SEQ ID NO: 395541 - DNA, 2019 bp, Salmonella enterica
atgaacgatcaagatgacattcttgaaacctcgcaggatgctgccgaagatagtggctcgaataattttttcatcaatatcctgaccggcaacaaagagagtgcctccgtcaagaagctattggtacagaaagttttacgtcagtttattgaaagctacgggttcgaccgggatgatctggaggtgaactataacccccagatccccggccaagggcgcaagcgcatcgacatcgctgttttccaccccgatgctgagcacaacaacgataatttgcaacggattatcgtctgcaaaactcagaagaaacgtgacaagctccgttccattaccgaggccgacaccgacctgcgtgagctcaaggagctgctggaactgatccctagcgcgacgctgggcatgtggaccaatggtcaggaagagttcctgttccaggtcgaacgcacccggtttgaagtccgtgccaagccgttaggtgtctggccggtgccgggagaacgtactgccgatctcgaccgcaccggaggtgtcattcaggtcagtgccgaagcggaagacctagaagatgctctgctgcgttgccgtcagtatctgaaccgtaacttggggctcgatcacaaagattcctttaagcagttggccgtgctgatgttggccaagatctttgatgagaccctgtctgctggcgagcgtaaattctggatcaagggtgacgagcctttcaccgaggcaggtcaacaggctgttgccctgcgcatcagcgaatccgttgccgccgctaagacttggcagccgaacctgctggctcgtggttgggatctaactctggaacctcatgaaatagcccgcgtggtaatggagttagctcgctataacttaagcgaaacccagccccgtcaccgcaccggagcctttcgagcggtcgtacgcagtgtgatggatggccgcgagggccgctaccccacgcccctaaacgtggccgaaatggcagtggagatgctcgacccgaaacccagcgaacgcgttatggattgctccagcggcactggcactttcttggccatgatcgccgtacataccttcaagaagcaattagcggctatgggtactactcctgcagaagcgactagcgaacagctccatcaggcacaaaacgaaaccgccgcctgggccgccagcaatgccttggtctgcgacattgacccttttctggctgtggccagccgcatgaacttgctattcacaactggcaatcccggccgtgtgtttcgtatagatgcccgtaccttcccagacggcgatctggatggtattgaagccgccagctcagctataccgttaggtagcatggatatggttctacttaatccttggttctcaactcaagacatggtgagcgacccctctattctggcgcgctatgacttaggcaacaactgggagcgcgatgaagaaggtggattccgcaacaccggcaatcttaacagcggtggcgttcctcccgaggtgctgtttatcgagcgcgccctacagtgggtgaaacccggcactggccgtgtgggcatcctgttgcctgacggcttgttgggcaaccctagcgatgaatacgtgcgctggtggattttgcaccactgcgaggtcttggcctcggttgacctgccggtggagccttttaaagtcacggtgaaggaatatggtctatcacccgcactaccgagtttattgatcctccgccgccgtagtcaggaggagctgatcaatactgaacatccggaatatagagtgttcatggccgtggtggagcgagccggggttgatgcccgggggaatctcctgttccaaaaggcccccgatggtgaagagctggtatttgatgaagatgtgaacgagcgggttcgtgaaggtggcgaagtggaaatccgtagggtcacgcgtcgcaaccgccgcattcatgacgagctgccgctggtagctgataaatacaaggaattccgtataaccggcgaggtgatattgtga

SEQ ID NO: 395542 - DNA, 1395 bp, Salmonella enterica
gtgagcagaaaatttcaagtaaaggcaattccaagctcctggttggaaaacaatggacgtcgtctagactgcggaccttacatgtctggcgcgatagaggcagctgaactaatgaaacagtttagtgcggagccgcttgagagtcttaccactgacatatttcatgctggacgggagggaaggcaatatgtattggatgctaaacatggtgttccctttatgggcagcacagatattttggcctttgatctatcctatcagccgctgctgtctaagagacaagtgagcaggaatcctcagttcactatacggaaaggttggacgctgattactcgctcaggaaccacaggtagaatggcttttgctcgtgagagcatggacggtatggcatgctctgaacacgttatgcgaatagttccagatgctaacaaagtaccggaaggctacatatttgcttatctatcatctcgatttggtattccattggttgtgtctggcacgtatggctcaataattcaaagcattgagccacaccatatcagcaatttacctgtgccaagattgggagagatagaatctgtcgccgaccagttaatacagagagctggggctcttttgagtgcaagtcaatcaaagttgaacgaagctacccagctctatttcgatgctgttggattatcagatatttcgccaactgactggcattcttggggaagtgaccttggctttaccacctcagccaacgttaagtcattgagggcattgaatttcaatccccgttttgaccgtctttgttcccaaatcaaaaaaggcccatacaagttgcttggagatatatgctgcgaggggacattgcggcgaggcaacatcttcaagcggattgacgctgatcccgaacatgcttaccagttgattggtcaaaaacaaattttttggcttcgaccagaaggtcgttggatttcaaaagcttctgccagagatgaggttattgtcccggacgaaacgattcttgtagcggctcaaggtacactaggagaaggagaattattctgtcgagcagagtttattactggagacactcttgatagagcatattctgagcattttttgcgagttattgctgacgagacaaaaatggagcgaggtgcactattcgcctttatacgctcagaaatggcatttagaatgctgcggtcctcttcgacaggaagcaaacttcaagactttcattatgcagttttaccgtctctaccaataccgtatccagaacaagcagttcgtagaaggtgtcacgagctggttattgaggcttaccgagtacgtgatgaagccataaggttggaagatgaagcacgttcccttgtcgagcgcacaattgaggagggcggtcgctaa

SEQ ID NO: 395543 - DNA, 4167 bp, Salmonella enterica
atggcgaaggtcatacccatcgggcaacccgcaaacgaatctgaacgccaggctatcggtttccttcgggatcatctgcccgatagctggttgatcttccacaacttcgagatgcgccaaggggaggatgtgttcgaaatcgacattgccatcctcgcgcctcacgcgatctacctagtggatgttaaaggaacgcgtggcaacatcgatgtgtatggctcaaagtggtatcccgaggggaggcaaaaatttcactcccctctggcaaagttgcggaatcacgctaaggtgatgagcaccttattggctgatagcaataaaggaataatcgagttacgtaaagtacatgtacatgcggttgtattgcttacagcagatgatgcccagctatatgattctgctggcatcgatagcccggatgtgactgactacaagcgctgcttaaaattctttactgataagggcaaaatcccaagccaccgtctttctgatattcgttcttatcactcacatattgacaaagccattcaaggtagagccaagccaaaatcagctccccctgtgtttggtagttggcaggttatagaaaggcttggtggcacagaccgttacactgagtaccgggccaagcacaatttattgggtgcaaaggcgggccaagtccgcctaagagtatatcgcgcagacccctatttagaggcagccatccgcaaagaagaactgaaaaaaatcagtaatgcttttgtggctgtccagcacatgagtgcccattcgaatgtattggctgttcgtgacctgattcaatctgacgatggtaatgaaattactttggtggctgatgatatttcaggccaagcgctgcgtcagcacttaaaaaagccagcttttgcgctcacaacagatcaaaaataccaagtgatcaaaggtgtgctttctgcattggatcacgcacatcaacatcaggtcattcatcgaaacctcacaccagatgcgattctcatcactaaagggggtatagctcgaatcaccgatttcgactttgctcgggtgggtaaaaaccgatcaacttcagaaactattgctaaccaaattaccgaagatctcgattcgacttatcgcgctcccgaattagtaatatctgagcaaaagtctgagccgaaagaagcttctatcgcttcagatttattttctgcaggcttggtattttacgaattgttgactggtgagttgccctacgagaatgttgatcaaatgatcgaagccgatggcaaatttcccatcaaaccctcggagcacaaacctgatttacccaaaggaattgacgcgtggttgcaaaccttttgtgagttcgatcctgaagatcgtttcgccagtgctgctatagctaaaaggcaatttgaagagctgatattgcccgaaggtaaaaatgaacaaagtgaaaaaaaaccttctgcaccagcttttgacattcctgatgacctaaccaacctgcctgtcgattttgtattagctgagcgtttcagtgtgcaaaggaaactcggcagcggtggctttggggtggtctataaagtttttgatgctttaggcgatgtagttcgtgttatcaaacttgtgactaaagaccgccgtagcgtttatgagcgcctgcgccgcgaatataagacactcaccagcctgccagatcatccacatgtcgttaaggttatctgggccgatcgaatggctgatgcaaatcaaactccttatatcgtctttgagtatgtggaaggcctggacgtgtccgatctgatcgatactgaagccttggcgttggatgatgctgttcgcattgtacgcgaagcagctgaaggtttagcgcatctccataaacatggtatttatcatcaggacgttaaaccctctaatttgctatggactgataagggtgttcgtatcattgatttcaatgtcgcggtatccgaaagtgacgaggctcagggaggtggtggcactcgtcgctacctgccgccggattacgattacaattccgagccggatgcttctgatcgggtagaccgcgacatctatgcgctgggtatcaccttctacgagtgcctgaccagaaagtatccgttcgacgatcccacgccgccgatcaagactcaacccaaggatcccaagcagttcaaaggctgtgccgacctcagctcgtcactggtcaacattctggtgaagatgatcgcgccggagcgcaaggagcgtttcacttcagtcgatgagttcttgactgccatgggtgaggtcaagcgactacgctcggtgctgaccaccggcgagattggagctggccccaaggtgatgtccaggctgggcttcgagccggccaagcccaataccaacccctttgtcacccatctgcttaccctctacagccagagccaggtatccaacgcgggaacccgtggcctcgacgaagttggtaaggccacctatgtgccgacctatctggacgaaaagcttaagcccgccttgctcaaaggtgagtttaagcttgtgatcattagcggtaacgcaggtgatggcaagaccgcctttattcagcaggttgagtcctttgccgagagtaagggcgcacagatgcaacgtggcgcgaatggagcagtgttccagatcaaggggcatacctacctgagtaactatgacggcagccaggatgaaggcgatgagcgaaacgatgcggtgttgcggaaattctttgctcctttcgcgggtaaggatgcctctagctggcccgagaatcagactcgcctaatagccattaacgagggacgactggtcgattttttcctggagcatgaagaggagtacccgctgctcgccaggcagatccaacagggtttggccggggccgttccggaaggcggtatagcgatcatcaacctcaatttgcgctcggtagttgctgaacccgaagaaagtcagccttcgattttggagaggctgattgcccgcatgacgcaaaaggaatactggcaagcctgcgagaagtgtgacatcaagggcaagtgttttgcctaccataatgcccagactttccaggatccggttgccggtcccaaggtgatcgagcgtctgaagatgctctacacaattacccaccttcgcgggagattgcatatcactatgcgcgacctacggtcggcgttagccttcatgttagtgggcacccaagattgtgacggtattcaccagctttatcagaccggtggtgaagaggtccaaaaccgcattttggacggattctatttcaactcgtggcttggtggggaaaaaggttccaatgaccgacttattgctctgctgcgcgagatcgacattgcagaagtcagcaaccctgatctggaccgcgagttaggcttcctccatcccagggctaaggctatgagtcgtttctcgtttacagaacgagccggatatgacaatcaactggttgaagcgctgtttgacagtctgcctcgcgattactcatcgaaaaatcgtgcccgattgatctccagacatcggaattatctctcacatatgcgacgtcgccatttcttcgaacgaagggatatggggtggaaggagatgctgccatatgaaagtatcgatcccttcttggtcttcacgcagcgggcaggtacaaaaagcaacgatgaggtgaccgcaattctccgcgcaatcaaccgaggcgaaggtttaagtgacccagcgaggttaggtaaccagttggcactgcgtgttcgccaagtggataaaggtaccattcgcagttaccggcttttcgacggtgtccatttttcgcttcgtaccgaacaggagaccgcgtctcatcctttcctcgagtgcctgtctcaggcgctggtcctcctttatgactccggcgaagggcacaaggccagcctgcgaatcaatctcgatatatatgaaatgctgatgcgtcttaacgacggttaccgaccaagtgtagaagagcaagaaggctttttgttgagtttgtccgtctttaagaacttgttggcctctgtaccttacaacgaagtattgttaaccaaggctggccacaaattttacgaaatccgtcgagaacaagacggacggctagtaatggaagcatctgaaaagggggccgaatacaatgtcaattaa

SEQ ID NO: 395544 - DNA, 1683 bp, Salmonella enterica
atgtcaattaaaggccgtgacaaagagtttcgaatcccgaaagtttcttatctcgattttaaacatattgagatggatcgcgtactcaccatgttgtttccacgattgaaatacgatggttatggtagtcgcagacctcctcgcggtggtgatctttcagttgaggagtttctcgaagatttccttgaacatcccgagtggtttgctggtttcgatcaaaaccctgaaattgttcgagcctggattgaaacagatcttatggatctagtgaatagaggtaaaagcaaccaagctctagctgcaccacgtcctttgcatggcaatacctataagtttcgtaacgcgaagcatacccgagattacggcgctgcagagcaaatctactggatgcttttctatgcccgcaaaggtaagggccaagcggcgcgagatgccttgaagcgtttcttcttcccggggatcgacctggtgacggaccgttacgatcccaacgcttccgtggatgtggaaacgcaggccatcttgcgcttagaccaacaggttacgcaggatatgaaggattccaaagagcccgcacgtttccaacctctgtgtatcgggcaggccgatattttggcagacgatattctgcgtttactcgcctatgagccttatatcccgcgctcggtgttggttgactatctcaaaactctgatggctttccatctggcactatatcacctcaaactactgcaaatgctgcccaagctggtgaaacagcgctcaggtaacgatctctgcaccgccagggaatgcccgatcaacccgggtctcgacaatgctctggaaggttgcccttaccgcttggcgttgatagtagatatgggggacgtcaacaatccgcacatggtcgagttagctcgaaaatccactgaccggctctatcgtcagatacctgcttttgtgcaggccaattttgtcgtcaagaaactcgatgaaatggcggaatacctgagcaaaaaaactggtaaattggctcctcccggaggcggtgtgttcactgttagtgatctgatatccctgctgaagcccgaacacgacaccgagcgtcaagcctacttcaaattccgcttggcgagcctaattgaagaatcggcctctaggaatgaggatttagacccagagatcagggacgtcaccgccatgggcttgggtgaattcgattccttcattgaaatactgatggcctatcgaggtaaatatcaccgccaatacatcactgagtgcttggattctcttctgctgaagaataaagaaagcgggcttttggctcaagcccggactaagggaagcccacgtcgatttgtgttaggaagcaagctgctcgaagtgctcctccaggtagctgtactcacccaagacggcgggcgtttcgtgacccacgaggttcgcatcgaagaattgttagcctttttaaggaaccgctacggtctttacatcgaccagttaccagaaggaaccatagctaacagcagcatcctagacaaacgcgccctgcgtcttaatctcgaagccttcaagcgccgtcttcgtgaaattgggttctaccaggacttgtcggatgcttatgtaacccaaaaagtatcgccccgatatgcaattgaaagatttgatagaactgataagaatgggagacacacatga

SEQ ID NO: 395545 - DNA, 5454 bp, Salmonella enterica
atgagtagcgcgttcataaagcttccacaggataaattgaatgcggcgttggctggagtgctgtgtcctcgtatcgaagcgatcctgagtgatcgtggcccaggccactgtgtgcgggtcactgaccttgatgacgaagttatggagtcagtatgccgggaacttaggcgaatctggcctgacgggaacatatttatactcggcagtcatgaccaagaaggcatgcctttccgagtaacttccaccaagttggtggaactgcgtaatcctgacgcgaacggcgagctgcgccagcctttgctagtgttcataccgacctcgctccgtactagtgctgaggattcttttggcgtggcgaccttcgaggaacttaccttcaccaatatctacgaggatctgatcgaatcgctgtttgaccggctcccggcaacgctggctagctatgttcgcgatcttttgggtattctcaccgaggaggaatggctgtttgccgacgatgtttcgcgcgcgcggtatctactcaccgcgctcgaaaacgggattgatggagaaactcttggggcaagcctgtatgaattggcgttgatcccggacttcaggctctttgccgatccaggcatggtcattggaaaaattcgccgtaatcttgtcagcgtccgcagtttgataacctcgcacaggtcagttcgtggtcgtattgctgatcttgggctcagtgataaggcattggagtcgcgtctattcacctactttgaaaaacacgatgtccatgagtcagaatcttggacgccacccattgcgatagacaagagttggtggagcatttctttcgataaatggacgttcaaagaagagctatcactggacaaggttcttctgactgtgttggaaaccgacttgccggtcgttgcggacgatgaaaccgacgatcaactcactggcctcatcgggcagcaggttctggtaccgaacgaccgtcgtaaaatgaacgtggtgtttgaggttaatcctcaccccggcaaggtcagtgggcttgaccattttatggtgcaaatcatttcgcagaatgacggcccggtagggaaatctaaaaaggtaaaggcctggaccccgaaccgcctgcaatgtactaccagccttgctaaactcaataaaatcgaattcgatgaaggatggcatttcatccgtgtaatgccctggactgccgatggcgacccgattccgctggaagcggattccacctccgagggcgctaagcgctcttacgagagcgagcctttctacgtcctgcccggtggcaacattgaagaagagccccctcaacgtgccgttcctattgagcagagcctggagcatgcacgtttccgactgcaattgacagccctgggtgatgaacgtgatcccaatgatatcgctatcagtggtgtcgcttggtccgagggcggtcgtaccaagaagacctcccgcctggaaaccttgcacgcaaaattcggtcgtgagggggccgttcagattccgctatcacgtacgctcaaaatcatcgagcaacgcatcttagcaaagcctaaacacccgtcaggttggcgaatgcagatcaacttggataccgctgagccaccctccgaggtcggactcatgctgcccacttctgccgcgatggcatctttcttggctgcccgtgaagagttttttgcagcggtgcgcaaagccaccgccgaactgatcatgcaggggctgttgtttcaggactctgaaaaggaatgcctcgcgtatgctgaaagctatcttgacttagtcaggaatctcatccgccaggctgagatgacttctggtgtcgagcgccagcagcacctgcaatcgctaagaaacgtactggccgttgattcaatccatgtcatcctgaccgacttccgtggaaggcatcgcgaggctgttttggtctccccaacccatccgctccgagccttgtggctaaacagttgggtcactctgggtaaggattggatcgggaagatcaagtcaggtgggaaagaatacattcctcacgtccgttccgccctattggatggctttgtaccctcagcctatcctgtcggcattcccgtagaggatggtcgtatcttcacgccggtggacaatctaaatgcgttttgggctctatacgctccaacaaccgaggataattctcgtggcctgatggcggagatctgtgcggcacttggcttggtcgagccctctgcggcgggaactgatatttccggaaaggtcattgcggataagattgagcgctatctctcccagcatccttatgtgagagagctatcgctgaatatctttaaccccggagcaggttcgttaatagctgaggctctgatagcgcttcagcagaaacgtgagtatgccgatttgcgctatgacatacggctctttacctccgagcctgactcgccagttttgggtgaggcacttgaatccatagttcgtcccggggcgacggtaaatgaggctgcagacgcgtttgcggcatcaactggcagtcatctgttttccaagctgaacttggccaagcacgcgctgaatgaattccatgcaaatcccagggattttccagcgcacatcagcgttctattggatgtgttccccgccgaggagctttccatttctgagaggccgatgggggtgactccgttgtatggattgatacagggctttgacaccgaattcgttgacgacgattcgggtaccttctggaataagcggccgattattgggcgctccttcggtgcgaacaaccaggctgcgtgtttcgatttgctggcgtctctgagccgacacctctgttttgcaacctcagcggttgctacttctggtgctaatttcaaggccgtacccgttgtaacccttggtctcgatgtggcccaacgagaactgatctacgaggttcaccagatcagcgattgggtgttcactatcgatcggaatatggggattgagtttttcgaccatggcggtcggaaaaacagaccggattatctgattgactatgtgccaggagccagctcccaggcgacacataatctgataatctcctcgcgctcgaacgatgagttggaggccatgctgaagccggtgctgcttcagcatggtttgtccgccgacggcgagcagtcggttcagatacttgcgaacctgcgctcgctttctggtcagcttgccctgaaactgatttccgcacgtacgcaacaggcggaggctcttggcctggctctggcgaggctctatctcgaatatcaaggagcgttaagcaatcaggtcattgtgccattagacgcacacacggacctctaccgctcaagcggtgaatcagacgatgtcaacgatgctatcagcctacaacgtaccgacttgggtttgtttgatttagatttaaacaccaggacgatcacctgtaatctggttgaggtgaagtgttattcgcaggttggtgactttgcggcctttaaccaacttaaggaacggatctccgcccagataaatcagagtgaacgcatactccagcgtcacttcgacccggccctgaaaaaaccagatcggccggataggttgctcaagagccgggagttggctcagattcttaggttctatctggaacgctcactgcgttatgggatctttgacgtgactgccgagcaggaagcgcgagggctacttgaatccattgagcagggctactcgctacaattcaggcgatgcgctttgattttcgactttgataagtctggaacagaatctccggacaacgaggtaggcatcgaattccatcgtatcggcaaagatctcattcatgccttgctggaaaactgccgcaagtctgtgtctgtcgagagtgagaaagtaccgacagctcctactctgagcgaacagttcattccgaacgtgccgaagctcgagactgccgctttcatcgcccctaatagagtccgctcgacatcctggacggtggacgcgctctgggacgatgagctggagacaccagtcaccctgccaacaccttctgtctcagaggaaaccatcgcacctgttcaaaaggaagcacaggcgaaacccgtcgagcaagcacctgaacctaccaccattgtgcccaaacaagaaaaagatgacgaacaacccgacaccgttgatgtggaatcggaagaagctgctcaacccgtgcttgaagtacaggagcatctgacatccgagtctcaagccgaagtcagctacgacatcatgctgggcgttaatggtagttcaccgcagtacggattgctcggagaggtttccggacggaaaatcgcgctggacctcaatcatacccacacaatcagtctcttcggggttcaaggcggtggaaagagctacacccttggaacagcaattgagatggcctcaatgccgattcagcacatcaatgtgctgccaagcccgctcgccacagtcattttccattatagcccgacgcaggattatgcgccggagtttacctctatgattaatgccaactcggtagaggatgagatccgtatccttcgtgagcgttacaaggccaacccggaagcattgaaggatgtcttgattcttacccctgccaacaaggtagatgatcgtagggccgaatacccggatattgaggttaagccgattgctttttctgccgctgaacttaaggccgcacactggaaattcctaatgggagcgattggtagccagagcatgtatatgcgccaaatcaatctcatcatgagaggactgcgggataacctgaccttggattctctgcgagcaggcatcgataactctggtttgtccgatcatctaaaggagctggcccagacgcgcttactgtttgcaagcgaatatatcgatgataaccagcgtctccaggatctgattcgccccggccggttgattatcgtggatctgcgagatgaatacatcgagaaggacgaagctctcggtttgttcgtggtgatgctacaggttttctcagaagcaacctaccagggaagcgccttcaataagctggtggttttcgatgaagctcacaaatatatcgaaaacgatgacttggtttctggccttgtcgaggttgtccgtgagatgcggcacaagggaacaagcattatggtcgcctctcaggaccctccatcagtcccgatctctctgatcgagttgtcttcacagatcatcatgcataaattcaactcacctgcatggttgaaacacatccagaaggcgaatgccgctcttggtgagctgacctccgacaagatgagccatcttggaaccggcgaagcctatgtatggtcgagcaaggcctcggacgactcattcacccggggcgctgtgaagatcaagtgccgtcctcgcattacccagcatggtggtagtaccaaaacggccgtgggtcggtag

SEQ ID NO: 395546 - DNA, 159 bp, Salmonella enterica
atgggcagatataaatccgcttcccacgtattctatcgctgtcagtatcatctcgtatggacacagaagtacagatacaaaatcctcaaaggcaatcccggtaaagagctttattgcagtatcacattactgcaatatgaagaaatgaacgatgattga

SEQ ID NO: 395547 - DNA, 609 bp, Salmonella enterica
atgcttaaacgtctggcctacctgactaccggcgctgctctcctgctgctagcggcggcggtattctggtgtttcaaccgcctgaacaccctgacgctgacactgcaacagacacaacgccagatggcgcaatggcacaaccaaccgcagccagacgacaattaccgagagctggagcttgccgtaaaaaacatcaccgggcgcacggaagcccttgctaaacagcttagcaatgccaccagcacgcaggccgaacagcttcaacccattaacgaacagatcaaggcgctggagagacaggtccagaccctgagcgccagttatcaacacctgcaacaacagaccgccacgcgcagccgcgcaaaggcaaaaagccccatcccatctccgctttgggccgcaaaggcccctttttctcttatcagcagcgagtttcgcgccgggcggcagttcgccgtcattgccccatccggatatcgctcgctctcacagctccagcttgtggctcccggcgacagcgtgcagggctggcagctgctgcaactggacggcagtcacgctactttccgtaaaggcgggcagcggctgacgctgaacgccggaggataa

SEQ ID NO: 395548 - DNA, 279 bp, Salmonella enterica
atggcaagactcttacagcatgtagacgatctggttgcccgcgcggcccgaattgaccattttttgtatcaatcagggagcttatcgcggctgacctggcggcaagtcacactgctcaatatcattctggcggagcctgataagaaatattccgccgcaggcgtatcggataacactgcgcgtaatgacctgcgtaccctggcgcgtgaaaatctcttaaccgagatatcagaaaacgaccagaaaacggtttataagatatcccgcgatttgagctag

SEQ ID NO: 395549 - DNA, 543 bp, Salmonella enterica
atgttcaaagtgaataccgcatcagatagccagcttaatattgttgatgaattagaagaattgttggattcacgtgttctaaatcaaacgcgttacgatagtttgtgtagtttcatgattttgttctcattggctgaggccaagttaaaaatggatggagttggtggtacatgtatatttgcggataagttagttgaatgttctggttttgattctgaagtcatagacgactgctatcagtactttattcagcgatatagggaagaagatttagcggaggaacgtttcctgaagttagcaccaacagagcatgttaagggggatctcagacgcaactttataactctgctggaaaaaacagatcctacccaagctgataaaattagtttggtttttaaggtaatgtatcgactaaggcacaatttgtttcatgggacaaaatggtctcacaatctaagcatgcaagatggccttttttcgcatgcaaactgcgttcttaaatcatgcttatggaaaacgcgcctaaactggcttcatgcctaa

SEQ ID NO: 395550 - DNA, 135 bp, Salmonella enterica
atgagacctgaagatgaattgacgttggtggtcgatggggtcagtggcgtttttaaagtgatgtccgttagcggttcaatctccgaaaataatgtctgtataccatcatgcttgctagtgaaaaaggttcagtag

SEQ ID NO: 395551 - DNA, 948 bp, Salmonella enterica
atgaaaaaggtttcgattactcaggaagaaattaataaaggtgagggtaattttcacgattatatgagttatgtgagagatcgcttatccaacaagtttattgaaccaagttactcactttttgctgctgccgatctgattactgctgacggatacaaaatttcattagggtctaatccggatgacgctgggctatcagtaacaaattggctggcaaatttttacggggacaggcagcatatttcctattgtttccctcctattgcctaccaaatcaatggggttttatattgtatcagaatgcctattgaacgagtcaaagaaattcctttactggaggcggtgaacggtctgactgaagaagctgtaatgagaattacccgtagcaaattagaaaaaatccaatccgattataacgaattttacacgatgttctatgacatcagccgttttgatgtcacaacaataattcatttagaatcagcagccgaccgactactcgcgggggcagcccattatgcgctttcccgatgggaaagccttcacttcatcgaacgtgctatgaaagaggttctggaactaaaaggtgtaagattgtcggggagtaacggccacgacatcagtggcgcacttcaccgtgagtggattaaggttggtcttcctcctcttccaattgaattacttcagcaagttatgtgcactcccgctattcgatatcagagggctccgcatccctttatcgcttctgttgcagctcaccatgcttcaattcgcctggccgcgattatagctagagaaatacctcaacaacctaaaatagaagataaaatgattattaacagctctgtcttatttcgtgagggggctttggctatcgcgcgtttatataaatccttggatcctacatcagaaatgtgggaaaccgtacgactaatacctccctcttaa

SEQ ID NO: 395552 - DNA, 240 bp, Salmonella enterica
gtgcaaacatcaatgacatatctcctgcgaaagctttgctcttcctttgcctccagccaaaccgcttgcctggaggcattgttgaggaaaacatggatcactctgaaccgctatgattctgaagcgcgctacagcctcatcgtctccctgcatgtaccggagaccgatgtcgaactgctgacaccggtaaagagtatagtggatgcgctcatcgccagtcagatcgaaattccgtcctga

SEQ ID NO: 395553 - DNA, 903 bp, Salmonella enterica
atggatttatttcctgatattgaacaagctgtgcccttaccccatgaagaagtgctccgttacatggtatgtaaaatccgagataaccggtcggaagagtggcttgcagagatgtgcaggaaaaacaacctttctgatgtctgtcaggagtatcttcacaggggagtgctgaaggctctagagggtgaacctgatgtaagcttttacccaccaagactcacgattgagctggtcccccggacatgctggttcgataacgtcagaagtgcggtatcttcaacggactggaaacggttacgccaacaaacggccagatcagcagggtggaaatgccagatctgcggcggaaagggaccccgatggccggtagagtgccatgaaatctggcattacgatgatgacaggcagtgtcagaccctcaccgggctcatcgcgttatgcccttcatgccatgaagtcaaacacatggggttcagcgagctacggggtaaaaaggacgaggcggtggctcatctggctctcgtcaacggctggtcccttcagggcgcatttgactatgtggatgaggcctttgacgtgtggcgggaacgctctcgttatgcctggcaactggatatctcatggctcgaaacgcagggcatcaaacgccaggatgagacagcagcagagggcagtaacatccccgctgataatcagctttcgctggagcttgaggttccgccagtcgtggtggagagcaccgcagtgcccaccgtcgtggagcaagaaagcacttctgacaatgtggggcaaattcagaaggacaaccctgtatcccgctcatcgtccgtagggtcaacgttctggtcagtctgcctgcgggtgttctgccaggtgaaaaaggtgatacgggagcaatggtga

SEQ ID NO: 395554 - DNA, 393 bp, Salmonella enterica
atgaagaaactcctgcttcttgtttcgctcgtattttctgctccggtactggcttctgaagtgacggtgggtcaggtgtgtaaggctgcttcagcggcgatgtttggccgtgaccacaaaatcatgcagctggacaaagtcgagtcaggtattgcttacgtacattatatccgacagaacgatggcacccgctgggccatcaagtgcaaacttatcggcaatcaagtgatgtgggcgtctgacaaccccgacagcaccggtcggtggcgggatgatccagcagacagtacggtcaaatatgctgtagagggtaaaaaaatcattattacagaggtctacagcgacggttccagtagtagctccaattcttatccgttgaagcaactacagtga

SEQ ID NO: 395555 - DNA, 417 bp, Salmonella enterica
atgttcggattctttaaaaagaaaaaacctgacgcagaacccgggcaaggtccccgactgacggcaaaccagtttatcgcgctgacgctgagtgatgaaaagctatcaatgcctgtttatctgccgggaatacgcagtgaggccgaatgcgacgagctggggttatggccactcatctacatctggaatgtggatcgtactgctggcacgttcagcctatctattaacggtaaagccattgcccacctcctggagccttttgtgccccgtgaagaacctgcatatgttgaaattcgtgatgaggcgatgaaggtcatctccgaggcttcaacgcggtccgtgctggcaaccatagagaaaaccggcctcatgcccgatgttttattcgcttaccatgctgaggatgcacagcagtag

SEQ ID NO: 395556 - DNA, 1941 bp, Salmonella enterica
atgcatcatttaaatgatttccccaaaagagatagaaatcgcaggattgaaagacttgcgatatcagcttttgaaaatttccttagagattcaaatgatttttttattcaaagtcaggatataaatgattacggcgtagactatcaactcgaaatcacaacaaatggtcaagcaactaatattagattgtttgttcaactaaaaggtactgagcaagaactgaataatgatggatcggtcagtatatctgttaatagagctaacctgaattatctgttaatgcacccctattctttttatgtgtgcttccatgccccaagtaatagtctaaaaataacattcgctgaaagcgtgattcgaagctatgaacagtctgaaaagcaatggattgagcaagaaacactcactgtaaattttattgaggatatgtctgactcacgtttgcatgaaattgcagaagtggctagatttaatgccataagtgaccgtaatgctcgaatcgagttgataacaaataatgtttcaaatgttaccgatgttattaataaagtcataccgaagatacatataccagaagataaaaaattagctcatgaattgcttaattcattgtatgaaaataaccatgatgatgtaataagtgctaattttcatgagtttttggctattttcggccctgaccatccggcgatgattattccatatatgtcggaaattaataaagctatggatagagttaatggcaatgaagaaagggttataaatggtatacaatatcttagagatagattggaagagggtaatataacaaagggaagtttatattattcaataggtaatgggtttacggctcttgacagggacaaagaagctattcaagagtataagactgctcttgagcatataatcaaagcagagaaattagctgcgcaatgctacaaaaatatgggtagtagttactcaaggctagggaatgaaaatgaagcatatgaatgctataagaaggcacttgagttagaaccaaacttaagtgaagctaatttagccttgggagtaattcataatcgtaggggtaattatgaattggcattagaatatttagacagagtgttttttccaagaaattatcagcataaactaatttatgttgaaaaatggagaataaacactcttttcaatatgggggattatcgttcggcatatagagagattaataatctattaactcggaatgataataaagaggacttatggaaatggtgcttaatgctagttgcagcgttctgtcgagcttcaactgcgtctgctaagcttagcttgcctttttgggctcgctttttagaattctatcctaatcaccctgatgcctctagagaaattctattggcgaaaaattacttaagagttaatgataatttaactaaatattcgtaccatgattttaagaaggagtttgaactgcgaataaataatgttagtaatgaagatagtgctttcctgtgggatcgtataggccattgggcacaagatgaagacgagtgggaagatgcagaaatacacttccgtaaagcatatgaaattgcgggtggcgaatatggatattgtcttggggtagctctgaatcatcttggtcgcttccaagaaagcttgcctattttggttgagcaagctgaaaaaattcaacctgatgattttagctggttccaagccgctgttgcctacgaatttcaaggatatattcaagaggcaatcgattcttatgaaaaatgcttatcaataaataagaaaaacgaattggcattgttcaatcttggaggtctttactggaattcgagaaattatgatgaagcaagtcgtgtctggaagctggcagtagcgtattatcccgagcatgagctttcgcataaacttcgaaaggatattccatttattttaaattga

SEQ ID NO: 395557 - DNA, 486 bp, Salmonella enterica
atgcacatcaccatctgcagaccagacgaatatgatgatttggctgatatttttatcgaaatggaaacctactataaccagacgctttgcctgtccaagagtgacatgtccgcgtatctgagggataagatctttgcagccgactccggaaccgaagttcacaaagtggtttgtgatggagttatcgctgcattctcatgtgtgtcagtcatgtacccctcaccgcgtttcagtggacaaatgtttatcaaagagctttttgtttctgcacctttcagaagggctggaattgggagagggttgatgggttttatagccagccgtgctaaagaacgggggtgctttcagctcgactggttatctgtggcagcagacccactggcgcagaagttttatgagtctctcggtgctcagattatcaggagtgttaactatcatcgggtttctggcccatcaatagataagcttgcccgtagtgccaactga

SEQ ID NO: 395558 - DNA, 528 bp, Salmonella enterica
atgcagatccctgagctggatgttgtgattaaagcgggtaaatttgttatcccggaaaaagggcatctcggattttgtccggaggttggcgttgtgtatttgactgttgatcctgataatcccgcattctacaagaatgaggcgcaatcccttgaacggatgtttgctcatgaactacaccatgcggcgaggtgggctgggccgggatacggtttaactctgggagaagtgatggtgtcggaagggcttgctgggcacttttctcttgagcttttaggaggcgaacctgagccctgggaaagccttaaatcagatgttgttcagcactatagttcactaataaatgaaaactggcatcgcactgattacgaccataatgaatggtttttcggcgcagggagtttacccagatggttggggtataccgtaggattcagcttggtttccagataccttacaacattcccacattcgaaggcttcaacgctggcgaacataaatgcagaagacttcaggggatttatttga

SEQ ID NO: 395559 - DNA, 168 bp, Salmonella enterica
atgagcaacaacaaaaaagagcaggtaacttatgctaagccgtctcgttcggacataacacgttccgtagcgacgtcaacggcggtcgagacaggacagccttcagccagggttgaagcttctctggaagccgcgcgcaaaaagttcgcccatcttcgtcttgcctaa

SEQ ID NO: 395560 - DNA, 375 bp, Salmonella enterica
gtgagcagagaagaccctcaacttcgtattaggcttcccattgaattgaaagagataattgaagcttcttcgaaagagaataatcggtcaatgaatgcggagatcgtcactcttttagagttggcgattcgcgtttgtcgtgagtttgggcccgatgatggccctgtcgttcaacagttcaaagagcgactcgatgcgttaggcaaaaaaaatgataatttcgagcaagaaagactcatacctcaacttttagaaatcatagaaaaacagaaaaagcaggtcgataaattgattggcatggttgaaagatcaacgcctctttccgacgaatacaagaagaagtatcttgatggtgacaacaaaaagcccacctaa

SEQ ID NO: 395561 - DNA, 324 bp, Salmonella enterica
atggctgtcaaaatattcagaagcgatcatctgtcaaatagcgaattaacctaccgagaatggcttctcaaaaatcctgatggatttgtcgttaataccttaaagagcgccagtggacagcacacgaaaagtgatgagcgctttacccgaattcaccgggccaaatgtaaaacaattaatccgctgctaagttcaacggaaaaatctggcttcaccacagggagataccaaaagctttgcgctactgattttgaagttgccgacagtgaggccaggaaaattaccgggctaaaatttgttaagagatgtcccaactgcatctaa

SEQ ID NO: 395562 - DNA, 612 bp, Salmonella enterica
atggctaaattaccgcgccgtaagtgcgcaaataaagaatgccgccagtggtttcacccgatacgcgaggggcagatcgtttgctcgtaccagtgcgccagcgccgtcggcaaagaacagaccagaaaagctcgcgaagccgcgcaacgtaaggcgcaatcccttcagcgcgccgctgaaaaaaaagaacgcgccgcctggcgccagcggaaagccgcggttaagccgctgaagcactggattgacttgacgcagcgcgccgtaaatgacatttgccgcgaaaccgaactggcagaaggactcggttgcatctcctgtggaacgaagacggcgttcgcatggcatgcaggccattacaggactacggccgccgccgggcatctgcgcttcactcgcttcaacatccatcttcagtgtgatgtctgcaacgtctacaaatcagggaacatcgaagcatatcgtgccgcgctggttgagcgttacggtgaggcggcggtgctggcactcgagaacaataacaccccgcaccgctggacggtcgaggagctgaaggaaatcaggctcgcggcactggcggatctgcgtgcgctaaaaaagctggaggcggcatga

SEQ ID NO: 395563 - DNA, 207 bp, Salmonella enterica
atggcgatgaaatattcgtacttccaccacactgactgcaccaccgagcaggcagagcgcctgattgccgattatcagtctcgcggtgtcagagccaaaaagagcctcaatcctgatttcctgacatggaccgtcagcgcgaaattacctgaatatgcacaccgggtgcggacgccaaaatccttacgccaaaaggtctgggggtga

SEQ ID NO: 395564 - DNA, 903 bp, Salmonella enterica
atgaccactaataccaataacaaactaacagacgagcagttacaggaaatctacggcgaggcggtatcgtgcgaactggcagagaaaaacggggcgtatatggcttgtttcgacctgctttgcaaaatggacgatgtaggcggcacggcgcacgttgtccgaaagctgatcgatatgctccgagcggagtgggtagagctacaggaactacgccgtaactatctggcgttacgtggtgagattgaagacgtgcggtcacagctgtacgaggcagaaaaccaggctaacgagtacgccagcgagctacaggaacgccgcaaagctgattgctctgaacctgttctgtatacgatgcggggaaccaatctggacactgatgcagtatcaacctgcaaaagtgtcgtagacggctgggttgaagaatggaatcaagaacgaaaacagggtgagccagaatacaaaaccgtaccgctatacgccgccccgccagcgtcagaacgcgaacgtattcgccgtgagcacgccgagtggtcagataagacgttcggcgatgtcggtccagtcggtccgctgaaacacctctcgaaagaagcgctggaagccgcttccgatccatcagatccgcttgaatgggctgatatgcaatttttattgtgggatgcccagcggagaatgggactctccgacgaattcattacgagggcgatgattgaaaagctggagataaacaagtcccgccagtggcctgagccgaaagacggtgagccgcggctgcatatcaaagagcagcctgcgccggtagtgccggaggaaaagtgcgatgatgacggtaacactacatctgagtttgaccacggttggaacgcctgccgcgcctcgatgctcaatggaggtaaatcatga

SEQ ID NO: 395565 - DNA, 420 bp, Salmonella enterica
atggcactaacgaaaaaacaacgtgcagagctacgcatgaagttcggcggtcgctgtgcttattgtggatgcgaactaccagagaaaggctggcatgctgaccatgttgaggctgcattgcggaagtgggagtttggcgaacgccagaccaatggaacccggcgcacggttgcaactggggaattctggcgacccgagaatgatgctatcgaaaacctgttccctgcttgtgcgccgtgcaatctgtttaaagccacattcagcgtggacttgttccgggaagaaattacgcggcaggcagaacgtgctcgcgcatatagcgtcaacttccgcaccgctgagcgctttggcctggttgaagtaatcgaaaagccagttgtgttctggttcgaacagtatcagaaaggggcgacatcatga

SEQ ID NO: 395566 - DNA, 711 bp, Salmonella enterica
atgaaattaggtaatgaaattgccttagaaagtggtaaacaatggactttcgataataatgtagctccttattttgatagtcatgtgcagcaatctgttccagtttatcttgaaggccatgaactaatttgtttcattagtgatttctttgttagagataacgctattatatatgaagttggttcatcgacaggagcgttgattaataaaatttttgaccggcaccatatgaaaaataatgttcggttcattggcatcgaacctgtaaaaagtatggttgaacaagcaaaaaaacaatcaaagggaaagcatattgaatacattaatgaatgtatagaagtagtggaactagaaccgtgtaatcttatcgtatcatattattgcgtacagtttatagaaatgggaaatagagaatatatattccataaattctatgaaaaattacagccgggtggagctctgattattttcgagaaagaaataattaatgattcaaaaattaatgaaattgttgagtcttgctatcttaaattcaaattaaaacaaggattttctattgatgaagttctctcgaaaaaatttagcttagaaggtgtaatgaacactaacactgaaaatcaaaacatacgtctattgatgaatgctgggtttacccagtttgagacaatcatgaaatacggagaattccatggatacctttgtatcaaatag

SEQ ID NO: 395567 - DNA, 315 bp, Salmonella enterica
ttgggtcgtcagtacgttaatacatccgccctgatccacgcgttttgcatccgggtcgtaccatgcgccttctcccagggcgaccacgcccggcatcatgcgcggcgtcactttagcctcgatatgtacttcgccgcgatcgttgaagatgcggactttatcgccattgttgataccgcgtttctgcgcgtccattgggttaatccacatttcctggcgacaggcggctttcagtacgtctacgttgccataagtggaatgaacacgcgctttatagtggaagcccgtcaactgcaacgggaatttatccgttag

SEQ ID NO: 395568 - DNA, 306 bp, Salmonella enterica
atggtggccttcggggtcgcgctgtttgaagatgccttgcttacggaactcctcaaaggtgggcagatttggaatggatttacgcgactgttcgtacagatgacgcatccactcttcttgcgtccgtccttcggtaaactgttgctccacgccaagacgtttcgccagttcgctggtcatctcataaatcgttttacactcgaagcgcggtttaatcgcctggtcagtgaagataacgtaagacatgttcccgcaggaggcatccagcgcaaagtccatctgctcagaagcggtgcaatccggtaa

SEQ ID NO: 395569 - DNA, 153 bp, Salmonella enterica
atgtccgtggcgcaaggccgtgactgcgtgacagtgacgccagcgttaaccctcgcttgtgaagcgctgccacaatatcggcacgatgccagttccctgagcttcctttgctttgctttttctgcgatgctgttgagttacgcacagtattaa

SEQ ID NO: 395570 - DNA, 360 bp, Salmonella enterica
atgaacagaaaactgttggccttattgatggcagccataacgctacctgtcgcagcagagcagtacgtaaaacccggagcggttctaaccctgaatccggaaaagggcaatgctgaattcagcattaatgcctcaacaggagatggctcgggcgtatgcaatatggaagggacggcaaaccaaatagctgtcggagaaagccagaaacgtcgctgggtctgggatgacaataccagcccgtgtgttgcagtaattggtgaactgaataacggtaaggccagcgttatgactcgtggttgcgagggatactgcggggcttctgcggcaggcgcaatggatggtctatttaaaaagaagtaa

SEQ ID NO: 395571 - DNA, 246 bp, Salmonella enterica
atgaataagaacatcacatttacccttgtagctatgctcgtatttagtttgttagtcacacacaatacaactaagccagaaaaagatcctcctgctaatgcgccgttcattattaaatctaacctaccaggtacatgcagagtcagtaccatgacagcttctacagataccaaaaagaatatacctgtcgtagcgtgcaaaatcagcattacgactacaatcactttcagtactaaaagttactga

SEQ ID NO: 395572 - DNA, 2253 bp, Salmonella enterica
ttggaaataaaaatttgggaaggcggattacaggcacaagaactgaatgctattgaaaaaataaaatcgacctttagcccaccaccgccaaaactgcctaaccatggcaagtcaatgcaagaacagttacgtaatatatcaggttcaagcatgtttccctggaaaggatatgctggctttcgatttgtagatgtgaatagtggatacgagggtgaattcgacttagtgattgttactcattgcaatgtgctaattatcgaattgaaagattggaacaatgggaaggttacttccagcaaggataactggtacaaaaactctcgcttaatggggcgttccccagtaagcatcacccgcaataaaaagtttttattagataataaaattaaacgcgaaagacatcgattcacgaataaagactttcctccttcagttgagtttcttatcgtcatgactggtaacgcggatttctcacaattaccggatcacgaacgacttcacacactaagtttagatgattttctttcattatccgataaaaaaacattccaaaaaaagttcaggccacatccagccgcacaagtattaaacaaagattttcatgtatttgacgacttattcaatattaatgcaacggcacctaaaccaattagcgttggtgggtataaatcaagcacattaatatttgatgagcacccaacaaagctttatcgagagttcttggctatttcagaagtatctagacaagatgaggcactgttgagagtatgggactttagtaagtttcgcggagttaaaggaggcacacctgaaggaagatatagcattgtctctcgtgagcgtgaagttcttggttatattaaacaccaaaaccatgatctctacaaacactgtttacgttctttaactagcatacagaaagaagatataacaacagaattcaatgaaatatttgaactacccccgagccataatcgttttaatgaatttattgggaaattcggactgaacttttcagattccgatcgtattaatttagttaagttgttgatagcgaaatttgctgatttgcatagaataaaaatagcccatagggatcttgcagatcatagtttatggatttcaccaggtaaagaaattgccttatctaattttatctcggcatatcaccaacccataggtacagttggtgattacagaagccagttgtcagttattggtacaaaacccgataatgaactaactccattccaagaagatgttaaatccattggtattatttgctggcatatactatctaatttgagaatgtctgagattagtttagaggaaatgcagaataaactctctgcatccacgttttggtatagcgaaattttaatcaacgccatcaatggaaaatattattgtgacgcaggtgagctttttgatgctttaaaatcaatagagccaaaacttgataaccactttgacttcgatgattctgaattagaaccatttagaagaacaataaatcactcgaggcagtatagagatgatgaatttatagttgaaacagatgagaaggaagtctatatctcaggcgatctcatagttaaagcctggctcaatataaatcctactaatgatgagccattactgggctcaaaaatagtacactttctcaaacgtattgaacgtattgcatccataaatcctccttatataccttgcattagagaatatggcatagcgacaaaatcatctagcctctttcttgttactgacaaatgcactggagatttttttgatactgtgcaagtgacacaggatgaaaaaataaatattataaataagttgatagctgcaattgaacaccttcatggattgggtatttatcatggtgatttgcaccctaaaaatatcctagtgaatggcgaaggcagtgaaattgaaatcataattattgatattcctgacttttgtttagatggtaatgaacctaaaagtcctcgctattgtccagaacaatttgacagttgcactggatttgaaagagataactttgcagttatgaggttaagctgtgagttactcggtatcgagtggggaggtaattctgaacactttaccgagctagctgattgtataaaaaatgaactacaagaccgtgacgctgggttcaaagatttactgcgttttaaacaagctctattacccactaaggatattacaaactcagtaattgaaattctgtctcttatacacatctga

SEQ ID NO: 395573 - DNA, 237 bp, Salmonella enterica
gtgatccaggagcatatcaacgccgggatctcactgtgcgacgcggtgaattttattgtggagaaatacgacctggtgcgaattgatcgtcgtggttttaatgcagaaactcagccgccgcttctcaccagtatcaatattctccgcccccgccaagccattcggctgacgacccgcaacaattacaaagtggtgaccgatatcaccacaggtaaataccgcgaggtgcagccatga

SEQ ID NO: 395574 - DNA, 1011 bp, Salmonella enterica
atgagcgacaaacaaaaaaaggcactggcgatagatttctgcaatgaaaactttattaaaaacggaatgattgccgatatagcttttcataaactcgatagtgaaaacccacattttcacgtcatgctaaccacaagacgcctgacgccggacggttccgggttcggtcagaaagaaaggaaatggaacgacaaagaacaactcgaacaatggcgcaaagactgggcagatacagcaaacgagcatctgcaggccgctggtatcaatgcacgtattgatcaccgttcacttaaagaacaaaaagccgcactcgatgccctccactctcccacaattgagcaacaggcacaggctatcagcttagatcgccccgcaaccatacatagaggccatacgggaaacactgagcgtcacgctcgttttgacgcacttcaagaagtgaaagtgtcccaagagactaaagcacttaaccacattgaacaaaacacgcttaagccctcgccgctggctccagcttcctcccctgccgcatctttgcaagatgctacacagggaggcaatgaaaacaacccgcaaaatagactcggcgaagttggcgaatatcttcaatctaaactcaataaagaagataaagcagatcttaatactgataatgaaatcaaagttcacactactaaaaataataggaaaagcagttcagcagcagctataggttcaacatcaaatattaatttaaccgatgagaaaacagataagaatctacacttaacagaagcacaaaaagaagagttagaagatttagaaaataaagaagcaacagcgaagaaaaaagcttatctgatgagcggagctgccgttcctgaactttctcaagattacaaaacacagtcaaaaagtgagtttaaaaataagcttcatacagctaaacaatcaatatcattaactgaacagagatttaatgaagaatgtgaagcatatgagaatagaagaaaccgaccaataccgcgctaa

SEQ ID NO: 395575 - DNA, 486 bp, Salmonella enterica
gtgaagtttgtggggactggtgcagggacgaccgctgcggtgatcaatctggttctggatgctgaagatttatatgcagagggctttgctgagcatactcgatggtcttatgtcggattgtactttatgaagagtgccaatgatgtggggctattagttaaatccagcgaaggtcttatgaaacttctggccgatagtgggattgtgaggaaagaaattgcggatgtggctgcaaagtgggctgcggctgaagcaatttcttggttggcgagttgggaggtgatgatagctctgttcctgatcgaacaactcatcacttactactttggtaacgatttacagaaatggtgtcgggagggcgtattcggactggagcctgatgacaaactgaagagtacctggcaactgggccccaaaaagcctcgtgacaaggagtatgacaaccagcaggaagaatatcaaaaagcactgggggctgtgttatga

SEQ ID NO: 395576 - DNA, 1245 bp, Salmonella enterica
atgatcttatttaatgtaaagcctattcctaaaaaactaacgttgctaatattggtgtgtattttcctattggtctacattagttttacaaaaatagatattgtttcacctgggacaggagtgattactggagtaactgacaaccttgaaattcttagtccagactcaggcttcattaataaatttgattataagacgggctctagtgtaaagaaaggggatgttcttttctcatatactaatcttgatgtttttcatcaggaaaaaacgcttaaggggttggttacttttgcggataaacgtatttcagaactggaagaagatcagcgcttgctcaaaattatactttcaggagaaattaaagataagcaggagtttgcgtctcaagaaaatagcaacattaatagagagttaagtgcatataaattcattaacgaatatatttctttgctaaatgaagagggtaacttgaagttacgtgaagagaaaatgcttgaagaaaaaaaggatttgggtagtcgaatacttctcttaaaaaggaaagggcgtttgcttacgaatgctggagcaccagaaattgatatcataaataatcaggaggaaatcagtcaaatagactcacaaatcacatcaggtgatattaatcttttgtcattacaaaatgacagcaagctcgctttgaacaaatttgagagtactgttcttgaacaacttaataacaatgacaaccaacttcagcaacttaagaaggaaagaattgaaaatagtggtcaactggatttgttaagaaataaaataagagccaatagcgttatatcacctatcagcggcgttatcttaagtattgagaggaattttgataaaggctcatacgttgaagcatcaaaacctgtaatgacaatcaaaaagaaaaatgagaaacaagtcattgatgcaaaggttttagcaaaatatagaccatttatttacaataaagctgcggtaaaaataattgttaactcacccggatttaatcgaagtattattggtagcgtaacgaaaataagtgcggactcattcgctgatgatgagcgaaaagaaggtgagcggtattaccgggttgaaataaatcctgttaaaggagaaaaaatatcccctgaactggaaggagttcaagtgagtacgtatatagtgagtaagagaataacattacttagctatatgacggctcttgtcggtgataacttggtttttaatgtctggtga

SEQ ID NO: 395577 - DNA, 327 bp, Salmonella enterica
atgactaaaaatacacgcttttcccctgaggtccgtcagcgggccattcgtatggttatcgaaagccagaacgactatggctcgcagtgggcggccatcagctccatcgcccctaaaataggctgtacgcctgagacccttcgtacctggctgcgtcagtataagcgcgatgccgggactggtgacggcggactcaccactgctgaacgccagcgcctgaaagagctggagcgcgaagttcgtgaactgcggcgcagcaacgatatcctgcgccaggcttctgcgtattttgcgaaggcggagttcgaccgcctgtggaaaaaataa

SEQ ID NO: 395578 - DNA, 594 bp, Salmonella enterica
atgtttctctgcccattcagccagtgccagcgaaataaattccggtccattatccatgcgaagcatggccagatagccgcggtttgccgcgttcctgtcgagcacccggaccactcgtggggctggcagattcagatcgatttcaatcgacaacgcctcacggttaaagtcatcaacaacattgaacgtgcgaaaacgacggccacagaccaaatcatcattcataaaatcgacagaccagctctggttcagcacttccggtatggccagtggcgggggattacgcaccggcagtcgttgtttacccttacggcgaaaattcagcttcagcagacagtaaatacggtggatccttttgtcattccactggtatccctgccgccgcagaacctggaaaagcttcggaaaaccgtatcgcgggtatcgttcagccgctgcctgcaatgcggcaataacgggttcgtcatgcgtagaatccgggcggtaatggtaaaccgttctgctcaggttcagactccggcagacctgacggatactgagtccgaatgtcgttatcagatgagtgaccagctcacgcttagaggctggttttaa

SEQ ID NO: 395579 - DNA, 390 bp, Salmonella enterica
atgttagatcatatcggtcaagaaaccataagaaatattactgggataaatcaaaaaatagtgcctgatcttatttctcaggagacttacgacgcattaatatctatcgatgctgttgattatgcagaaaccctaagcgaattattaccaccagagaatgttcaagctgcccttaagcgtcttgaatcagctaaacaacatgcttcagaattatatcgtaataatcgggtcataagtaattggcaagatcctaacattgaaatttgttataacaacgaactgctagattatgaaaataaattaaacagaggcatcagttatccacaaaatgccaatctcgatctatctttatatcttagggacttccactatagtgtattattggtttga

SEQ ID NO: 395580 - DNA, 237 bp, Salmonella enterica
atgagcatattatcattgttagcaaaagcaaaaccggcagtagatgatggcggggctagtttcatgggtccggcgatggggttttttgttgctgcttttttagttgctatcattgcgtctgttgtttcaagtgcttttcgttctgctaaaaactcagcagatgtgagtataagtaatgcaaaaaaatatcacgtagcattaataaaagagcaatacagaaagaaaggcggcgggtaa

SEQ ID NO: 395581 - DNA, 297 bp, Salmonella enterica
atgattggaaattataacaatgattacgactatgatgataatgagtatttaaatgatgacactatagaaatccctttgagctgtgaagatgacgaatatagagaggattatttaagagaacaagagcaagaacaaaaatctgttttacagaaaatgattgagtataaaaatgaatttggttttactgttgttttattgttaggatttatttttacgctgccgattttgtttatggctggattgattgcgttttttattacgataaaagaaaagagaggttctaaaaatggcatttaa

SEQ ID NO: 395582 - DNA, 186 bp, Salmonella enterica
atgaatgataatgataaaaaaatagaagtggcagcgtctgaacttgttagattgattattaaaaagctacaagatgaaaatacggatgttatatgtagaacgagcttatttataacttacaatcttttttctcatgaaagcgattttactgttgtttatgacacgttagggggagatctggaatga

SEQ ID NO: 395583 - DNA, 351 bp, Salmonella enterica
gtgcagttggcgcgctattttcatcttgatgaacgggatcttgctttcattgaccagcggcggggaaggcataaccgactgggaatagcgcttcagcttaccagcgcccgttttctgggcacctttctgacggatttaacccgggttctgccgggtgttcaacaatttgtagcggtgcagcttaatatccgccgtccggaagtcctctcccgctacgcagaacgaggtaccaccctcagagaacatactgcgctgattaaggaaaattacagttaccatgaatttggcgattttccatggtctttccgtctgaagcgcctgctgtacacccgggcatggctcagtaattga

SEQ ID NO: 395584 - DNA, 1128 bp, Salmonella enterica
atgctcaaacctattttctacagtgcaagtgcaaaggctccgcaatatccggaaacagataaggcagaaaataccggatgtacttctctatcttcagacattcagcatgttaaaaatgttgttgaagatgttcaagcatttccagaaagcagaacggtgagtggttctgttagcgcagcgtacaggctttcttttgaagaggcattttgcggtctaagcaatgaagaacgtaaaaaggtgtatggtcgtctttttggaaaacaagtacttgcacatattaattccatctgtcagcgtgacgctgacataataagagaaaaagcattaaggcgggtaagtcgtgagtgtggcgcagaaatagattgcgttagcttgttaaataagatggtggatattttacaaaatgcccggctgacaataaattttaatgccgcaaaaattgactttgtctctctcttaaaaaataaacaatatctaaactctcatgctataggttgcagaccgggagatttacctgcttataacgtcggacgtgattcagttgaaactaaaacatttgagctggggaagcttgcagattcaccttatgccccatatggtcagacaggaggtttttccttagcatatactccccaaaatagaaattttagccctacaagcagaccaatttatgccgcactggactttctgaaaggagcgcatggaggagccagctcttatgggaagtcattttttgaactaaatgataatgtcaaaacaaattgtacattctcaccttttgatatctacggtcacagatttggtctggataccagtaaattatctacattctggcatatggagaaactcattgcattctgtcaagatgatttgttcggttataattgctttaagagcttagttaaaatggctaagggtgaaaaattttcagctcattctaattatggcacgggttatgaaggaaattatatagaagctcatattcatggtaatgtatatttatttagagacataaaacacgttcatttatatatgaaagaaagctcttattcgaaaaatcaactggatgattatgcaaaacaaataaaccaagcgcttaatagaaattgcataatactatatcaataa

SEQ ID NO: 395585 - DNA, 555 bp, Salmonella enterica
atgttaattgaagaagcgctacgccagcgccgatcggtcattgcacggcggcaatattgccagcagacgttacaggttgaactgattgggcgcagcgagtggatgaatcaatttcgacatcggttaaagcagttggcggaaacggacattgccgtgtggttttacggtgagcatggaaccggacgtatgactggcgcccgctatcttcatcaactggggcgtaacgcgaaaggcccgtttgtacaccatgaactcacgccggataatgccgcgcagctagaagtatttatcgaccaggcgcaaggaggtacgctggtgttgagttatcctgaatatctgacgcgcgaacagcagcaccatctggcgcgtctacaaagtctggaacatcggccttttcgtctggttggcgttggcagcgcttcgctgttggggcaggcggcagccaatcatattgcggccgagctatattactgttttgccatgacccaaatcgcctgccagtctctttctcagcggccggatgatattgagccgttattccgccattatctttga

SEQ ID NO: 395586 - DNA, 375 bp, Salmonella enterica
atggtctgtcagatggagctgaccagccatctgctgacggcagccgccttcgacacgatgaaaaacagtgaaaatgagcttgctgagcaacttatagaacaaaccggcgataacaccctgacattaatggataaaggctattactcactggggccgttaaatgcctggagccaggcgggagagcaccgtcactggatgatatctctcagaaagggagcacagtatgaagaggtcagaaaaccgggtgaaggcgaccatctggtgaagctgaaaaccagtccacaggcacgaaaaaaatggccgggcctgggaaatgagatgacagcccgcctgctgaccgtgacgcgcaaaggcaaagtctgccatctgctgtga

SEQ ID NO: 395587 - DNA, 591 bp, Salmonella enterica
atggaagcgagtaacgtagtatcgatattatcgccatcttccttgtcagcttcatctacttcatctcaatcccagttcggggagaaagtaaattctgattcattactgctgttatttgatgagatctggatgaagctactagagcttgccaaaaagctgcgcgatatcatgcgatcatataatgaagtaagacagaagttgggttgggaattacaggtcaaagccttacaaacgcaaatgcaagcgattgataaaacatgtgaagcatcaatatttactgcggttggctcatgtttttcgggaatactgacgatggggttcggggctgtaggcggagaatccggcgttatattcggtcaaggcgtaggacataccgctatgggggggtttagccttggcgctggtattgtgcaacgtcaaagcgatcaagaaggtgcgattgctggactgcaacaaactggggctcaatcttatagcaaaaacatgatggatattatggataaagcgcttgaagtcatgcagcaaattctgggtttggggacgtcattggtccaggttcttgctcaaatcctccagtcattagcgaagtaa

SEQ ID NO: 395588 - DNA, 1272 bp, Salmonella enterica
ttgctcatattgcacttatctgatattcattttcgaaaatctgaaattcagaccgctcaggatccaaactttcatttaaggaatgagttgattcgtgatgctgcgcaaaagtgtgcgcacataggtgtacctgatgtagtgattgtatcgggagacattgcattttcaggggatcccgaggaattttcatttgctacggactggcttgagcgtctctgcgaagcttgtcagtgttcaatggcatcggtatttgttgttccgggcaaccatgatgttgtgcgaaacttagcggatcgaaacttggttcagatgatccaccgaacaatcaagtcagcaccaaatcccaatgctgagattatgagacagctaagcgatcctgatgcccgacgattactttatgaaagtctggacaactacaatcaattcgcacagcaatttttttgtgacttgcttccccctaataggactcgagttgttcgagaccttgtgttaaatgatggttcgactttaagactgtgggggcttaatagttcttttgtttcaagtagctatgatcgtcctggcgagttgtttgttgatcctgccagcctccaaattacgcgtgaagatggcgttgttaatgcagtgattactcaccatcaccttacttggttgggtaatgcgcgtgggcttgaagatcatctcaatgatgtggctccattacaaattttcggacacatacacactaatcgagtggacatggttcgcgattatgtacggcttgcagctagcgcaatgaatcctgatcggcatgaagatggctgggaacccggatacaatctaattgaattagacgttaacggggagccaacaaggcgagtgcttaacattagagctcatatcagagtgtggcaaactgcaccaggcggatttcaggcgaaaatggatagaaactcttccgtattcgagcattctatacggctagaagattggaattcatccactgaaacatcctcaagttttgtagcacaatctcctccgtctgcgcatatatcagaaataacgtctgtgagggaaggaaattcaatgaatacccttcgtgagcttggtctgcgtttctaccgactaacatttagtcagaaattagagattgctggacgtctggagttgttagaagacgacgatatgcgtttacctgactatgaacgttttcgacaagtgttgctcagagctcatgcgagaggaatgcttgatgagtttgcagcagcggtgaccgaagctgaacaacgataa

SEQ ID NO: 395589 - DNA, 1071 bp, Salmonella enterica
atggcaatgttaacattcgcggaccgttatgctgaagcgggtttatctcctacatcagaaacaataatttctcgtcaagaaccggtcaaacggatcgtagaaaacatcaatcaaaagcaaatacttgatttagcatcattttactacggtaatgctgatatttctttagaatggtttcgagatgagttcgcagaagacgatgcaagttttagcttgtggaataatgaaagagaagctcgtgttttatccgcatcagttctgggggaactaatcgatcaagaaaatgctgttgctatcttggcgatatgtgttgggagtgttaaaggtctgcgtcggcctttacagtctttgtggcttttaaacaatgctgaagagagctttattaagctggccattgcagggagagcatttcaagaaattcctatcaaaatagttcccactgttactcccaaacttgacgaagagattgctgctttgagtgccacaaatgattgggcaacgctaatcactctgcttgggaagattcgaacagaagcccaaacatcggcgaaaacagttgcaaatcagagtatgggtatactgaaaaaaattgagcgacaggctgcattgatgcgagaagaaagccagatgctttggtggctgacaggcggttatagtagggtttttaatcgtagtttcactactttctcaacccaacaagcagcaataactgccgcaatagacctaggggctttaactaattcgtccgaatttggccctgttgctatacctgcgatgcttgaacgcgtaattttaactgctaaaaaagggcgcggggcgcagctcaaagaactttctacagctatcgatggtttcagtgtggaggaacttcgttgccttaaggtacctgcaatattaccagccaaacttgcccctatttcaaccgcgattgagttagctgaggcaattggtattggttcttggtatgcgcaatttcagtcgagaacagggcttgaatcttcaattcagttagagtctctagctttggctgaacaactttaccgtgaatatcttttagggcggctgctgtga

SEQ ID NO: 395590 - DNA, 942 bp, Salmonella enterica
gtgacaaatcagctcaatgaagaagaaactgatgttgatgtttttgaacaaccggaatcagttaaggttcaatctggtgatcccgcacaggcgtgggtatcgctacctacttctacaatgcttactctggaagaggcagatcagcttctgcgttggcgtgatgcttcaataataaccatagttggggagcgtaacggtggtaaaacaacattagtaaccgaaatatatggccgttacctacgcggtgcttttgcaaattcatatttttgccatagcctgacattaatgggatttgaacgaaaaagctttcattctcgggctgagtcaggaaggtcatatccagacactgatagaacttcggctcaagatggcttacgcttctttcatttggcattgtcaaatgaaacagatcttttacgccgtgatcttcttatttcggaacgtgctggtgaagtttatcgagagatccgagatcgtccagatcgtgctgttgacatgatagagattcgcaaggcaacaaccatcgcttttatcgttgatggtgagcgcgtagctttaccaagaaaacggtcagaggttttttcttctgtaagaaatatcgtgcgtgttgtgattaattcagggaatatttcatctcacacacagatccaattggttgttactaaatttgatttacttgagggtgatgaaaaatctcaagctcgagatgccttaactacttttgagcaaactattgaaactatgttgtctggaaggtttcattttgaaatttttcatactgctgctcgtgcgctacatcctaattcagagccagcacaaggattagctccacttctgaaaacttggttgagagtgaaaccacttgaacatattgataatcctcgtcttcctgagttgacagatgaatttgataaactgctagtgaggagagctgttcagtga

SEQ ID NO: 395591 - DNA, 879 bp, Salmonella enterica
gtgaattcaaatttcataattatgggattacctgcatcaggtaagacaacttttttagcagcactctggcatttggttgaatctgatgagacgaattgtcttttagaattagatgcttatgagggagaccttacctatcttaatcgcatagctgaagcatggcggaactttgaacccgttcctagaacatctcaggtcggtgatatgaacgtagcgattcatttgcgaaatcgcgaaactggtgagaaaggaacagccttttttcctgatctggctggagaggtctttgatcggcaagtagaagatagaatatttcgaaaagatttcatgaaaggtttttctgatgacgatgggattttattctttattagttcagatgttagagaagacgatctatctgtaactgagctcaatgcaagattacctagtaatggtgaaacggaagagtctttgagcgatggttctgctgatgagaatgttgaaattagaataactgaatgggaaccaaaattattacctgctcaagttaaagttgtgcagcttcttagtgatattattaggccaccttttgagcctcgcttgcgacgaatcgctttattaatatctgcatgggatttaatccatagttcaggagtaacacctaacgattggttagaggtaaatatgccacttgtggcacaattcctgaagactaataaagattattttgaccatcagatttatggtgtttctgcacaaggagttagcctttctgataattccgcagttgatgagattgctactttattggcaagtcggagaattaaaattgttggtccggaaagcgaagggaatgatttgaccgaacctcttgtatggcttatgtcggcgggcgaatga

SEQ ID NO: 395592 - DNA, 1956 bp, Salmonella enterica
atgaaattagatcattgcttatttggttatgatgatggtcatagattgattgcttcatcattacctcttggtgaagaaagtgcatatcttacggagttaagtgatctcgctccgggtgttgttttcggaagttcaaagggttattggactggttctcccgcgccttctattgggcgttatgttttaatgtatacatggcctgctccagagatgccaaggcctgggtgtgtttggactcatgctttattgttagagccagcaatgttggaatctatagaagatttgtctatattacagggtgttattactcgccctagcgtttctatagagatagattattacagacagcctctagaggtcgatctaaacaaaacaaattcctctcagttaccgttagatattacaattgttgaaaaattaattgattcactgtatggaagaataagtacaaacattgaagttctttcttcagataggcttgaccagccattatttgctgtttggtcacagcaatggcctaagcttagacgtaattttcgattccagacagccgcttctcggatgcaaagaccaacaggctctgctcgtttcgatattattgctatcttttctcaagatgaatctaacaattctgaaagtgagaacatctcctctagttggttaaatgatgcgctaacagatgtgcaaagtggaggtaaaacttcattacgtactttcctatgggaatatggaagggatgtgcgtaagcagcggggatcatttagaccattggctgaaatccattcgcttggttataaatctcaagtgggagctgtgcagcgtataattaatattatttctgaatcatttcctactttaaatgatgcgaaacatttaaaacaacatttagtcgatggtatcttagctggtcatgaacaaattatgttgatcactaatataatgctgagcggtaatgaaaaggaaataatgttcccagcaatcacaatggctggagttgataatttaattggtttttggccacaaaaggcaaagtctgttttagatctttttattttatcatcgcattccagttctgaaagtggaagagttatttttgaaagcttgatagagactattcaatcatctgatttttggacacttagctatgctcacccaattgcccgtaaaattgtaactaaacggaatcctgagttcttactcgcaaatggatacaaattagacgatattgatgtgataagcttacttcctttggttccttctgctactaaaggactttctcatttcataaacgatatgatttcgcgtgataataaaaacatcgcaagtatggtgtttgattattttcctgatatcgctgtcgcacaagttgtgcaaagaataaatgtaaaaacattcgtgcccaaggtttggaagaaaaaactcttatcacaatataactatctccttaaagatgaggtaattcgtactataactcattcaagcttactttttgatattgcggatgcacttggttggttatcggatgctgtcattgtcgaaggtttagagccttggtataactctttaatgactgttactaacgatcttgatgagcaagaagcagatatgcttgattgtttttttattgttcttgctataaaaaatggtggtgataaaggtctccatgtgattgaaaaatcatatataaatttacatcataaaatattgaagtccaagttatcacaaaaatctcgtgatatgctttcccaacaattaccagatgttggttggttgcgaggttgggatttaggttatcgtttccgtttagctattgcaaaagcatatatttgcaatagatggcctgtagaaagttatgttggcttggcttctgatagtaaaggtcgtgaattactggcagatgcagcttcagatgttgaaggtggacgcgaatattctaatgcagcttggcgttattga

SEQ ID NO: 395593 - DNA, 1293 bp, Salmonella enterica
atgtcagaaagtctgcaacctaatgtcactcaaacgttacctgacgacagggaagagctttaccaccttgtctggcgcgagccagcggagagaatcgcctctctctatagcatcagtaaagaacaactgacaaaacgatgcgctgaattacgaataccgagaccgctcgccggatactggaaggcgctggcgaaaggaaccgcaccggcggtacctgcgctgcctgatttgaagaagggcaagatagtaaaatcccccagaaaaacctgccaggtcgttccaccacccgtcaaagtatcatcaaaagtagccgttccagcgccacgaaagcgatctagtgctgtgggcagtggctatgccttgattaatgatctcaaaacctaccttcccggctcttccgtcactagagatggctactacaaaccaacgaaaaagaaactactcgacctgaatgtttcagaaacgggtttcaacagtgccatcgattttctgagtcggttctttgcggcattgggaaagcaagggtattgggtacgattagctgaaagcagagaggggcttcattgtcaggacatcgatattaaagaagagccaaaagggggcggctttcgctgcgacagcttatggcggccttgttcagccagcattatttgcgttgaggatatgctgttcgcctttagccttgcagaaatgacggaatatgttccagcaaaagaagttaatggtcgatacatccgcgatgagacgatgatccattggatgagggggaatcatgacaagccatttcgctatgtcattaaacatgccttacctaccggacgattctttttacagctctactcaccatactcgtcaactaactggcaggttgagtttcgccagacaaaacagtgcgggcttatcagccagatcccgaaaatcatttccgcgatgcgtgatgctgttccgttgattcagaagcaattggaagaggcgagagtcaaagctgaagctcggcggatccagtgggaggtgaatgaaaagagatatcgggaaaaggagcggatcagaagggaaaaagaggcatatacagctagcttagccgaactgaacggtatcatgatacagtgggccgaagataagcgtatagagcagtttctccgtgatgtagaaaaggacgtggcgagtattgatgagcagcagaaggcacagattatggaacgcctgcaattagcccgccagttcttgttagaggatacggcagttgagcggttgctgaagtggcaaactccccttgagaggcttcttaaatga

SEQ ID NO: 395594 - DNA, 1155 bp, Salmonella enterica
ttgattagaaatatgacaaaaatatttttgactgaagaagacaaggatattgatgtagatgcatttcttgataatgcaagtgaagaggatgtctttatttttagacggcgactcgaagtagctcgtcatgaaaaacctattgctttatgcagtgtatgttaccaaccagttgtgctgaggggagatattaataggtcatttttcttcgcgcatacaaagaattctgacgattgtccaattaaaactacaacaaatctaacgcacgatgaaatccttgccatgaaatttaatgggcaaaaggaaggaaaagcgcacagagaaaataaatttaagctagcagagattttaagacaagatggtttcttttctaataatgtattggttgagtcaacatttagagaaactaaccgttcaggaatagctaaacactggagaaaacctgatgttagtgcagtcagtatagaaggtgaatattcaattgtatttgaattgcaagtatcaacaacatttattgaagtgattgttagtcgagaggcattttacaaagaaaataatgcatacattatgtgggtttttctcagttttgattgtgagaaatttacaactcttgatgtaggatatagtaatcgctcaaatgtatttgtttttgatgaagaggccaagaacttatcatcagacaatcagaaacttatactgaaatgttactacaaaaaaccattcatgaactctggtttatctatatcttatgagtgggattgccagcttgtagattttaatgatttatctttcgaccctgatgagaagaagatttatttcgctgatcctgatactttgaaaaaacaggttttaggagagattaacaccgcaaaggaaaaactagagagtgataggattgcgcgtgaaaaaattgtagctgcgaatagaaaaagggagttggaaagactatttcaaacggaaagggggaatgcagtttctaatgtcaggactaacaattatccgagtaaaaggaacaagacagatcatataacttctgtgcatagcacaagtaaatcatttggcgattcagttaaatgtccacaatgtgggaagatagttaaaaagagaaaactcgcaaaatcatctctatgtagtaattgttattgcgtattagattaa

SEQ ID NO: 395595 - DNA, 1305 bp, Salmonella enterica
atggctctctcgagcttaattgccagaggaggcataatccccaaaaaacattttacaattgcatcgggttcgcctatagccatgaagggacgcttatcttgcgaacaggtattaaaaaaattaattgagctaaaattagttgaaatagtcaatttgccatcttatggtgagtgtattacgcttattgaaaaagatgaaagatatttcaaagctatgggctacatcaaagccagattaacaggggaggacatactattaaatacaatagtacaatgggctaaaaacctaggctttacaagttatgacgtgattcaatgtagaaacgatgacaaagaactaccacgtgtagctaactttaactgggatatatccggaccatcttatttatcaccactggtaacaaacactggagttgaaaatacaaaaccaggattcttcatctgtgatgtattattaggctctaaaatcacactgttagaaataaaaccatttataaataaatgtacttctttgcgaagcttacctaaagttggcaaatctctctttatgtttgtcgccgaggattatacacatgaagcgtttaaagccttaaaaagcataggcattattcctgcaacaccagaaactttattcggtaaagagttctcagaaggaattagaaaacttattgaatttatggagtttattgccggaggtggagaagtatctttggaacatattgataacgtaattaccaatctggctccaatagaaggtgcactatccacgttgagaggggttttctttgaatatctagttgcagaggtcttcagatcatctggcaatggtacagtaactataggaaaagtttataaaacacaagaaaagactgcggaagctgacgttacaattcaaaatggttataaggaaattaaatttattgaatgtaaaggttacagcccttactcccagatcccagatgatatcgtgacaagatggctacaacatcaggttccaactttctttaaatgggttagggaaaatatcagtcaagatatagatattatttgtgaactttggacaacagggaaactatcacaggaaagcatagctgcattagattctttgtcaaaaaaaatcagcccgaaaaaatacacaattaaatatagagaggctcacgatgtgataatgaaattcaaggaaactaaagataaatccctactcaatacctttgaagaacatttcgtgaaaaatcgttactctccaaaaaataaaccatatatcgctcgatccgttagatacttaaaaaaaggacctgatcattga

SEQ ID NO: 395596 - DNA, 441 bp, Salmonella enterica
ttgcgtaaacatacgctggaagaactggaggcagaatggctggaacggcatgtcaaatatttactagaagatgaaagtcaatttcgggccttggtcgatcaagcggcacatcatattaaaaatagtatagaacaggttctgatgtcctggttcgaacaacagtcggtagacagtgtgatgtgtcatcgtctggcatgccaggcgatgactatagcggaagagggggtgctttatttgcatattcaccctgaaaaagaggcgttgatgcgtgagacctttgggaagcggttcactttgattatcgagcctggtttctctacagatcaggctgagctttcttcaacacgatattcagttgaattttcactctctcgtcatttcaacgcgttactgaaatggttacgtaacggtgaagattatagaggtggcgatggatattaa

SEQ ID NO: 395597 - DNA, 387 bp, Salmonella enterica
gtgcaattatttaaaaatgagcaagcatttttggaatactgccgtgttaatgatttgacgggtacatgttttcttattcatggatattgctttcagtggccattgtttacgcagggaaatttttattccattgaggaagatttcggtagcgataagatatttattgaggaaggaataaataaatcgggcagagtggaagttacggtgagtgattatattaagcgcattcagtctggcgttaaaggcatgggtaactggtcatggcagccgcatctttcccacgcaaaatcacttaacaatagtttcactgtacccgaagctattacattaaataatattgagaaatcgttagtaggcgaactggttctgtctcttatacacatctga

SEQ ID NO: 395598 - DNA, 675 bp, Salmonella enterica
atgcggcgcgatgttctcgccgaccggcgcatttctcggcgtcgatggtcgtccggaggcgataagaattttgcctcttacaccctgcagcggctgggcgtggaggttatcgatctctatcagccgtgccgcgccgatcccaatgtgccctatgaagaaaccatcggcgcgattgccgacctgttgcgtcgcgcccatcgcgtatatccggtcagcgcgctggaaatcgaatattcgctggcctgccgttttatcgaagcggagatcctgcccaccgcgcgcgagctgggcgtcgccgtcgtgccttaccgtattctggcggatggcctgctgaccggggcggtgacggcgagaagcacggcgcattacgcggtcccgcgcatggaaggagcaaaccttgaacataacctgaaaccgacggcggcgctgaaagcgctggcggaagttcgcggctgcgcgcccgcacaactggccgtcgcctggctgctgtcgcgcggcgaggatatcgttccggtgctggggatgagtcgtcctgagcgtgtggcggaaaacctccaggcgctgaccatcacgctgacggcggatgagctggcgacactggatagcgccttttcgcccgacgctattatcggtgatcgctatccggcaatggtgatgaagctggcggcgcggtaa

SEQ ID NO: 395599 - DNA, 1056 bp, Salmonella enterica
atgaacccgaagcattcacccagaaaacttatggctcttttactggcggcatcgctgctgcccgccgccgcatcggcggcccggattcttacctacagcgatcatgaaccgctggggggcatgcgtacccgttttatcaatgatgtgtttttcccggcgattgaaaaagagtcgcacggtcgtttgaagatcgacgcgcactggggcggcgagctcagcaccagctatgaggcgttaggcaaggtaagcaagggcgatgtcgatatggcgaccgtcgtgccggaatacaccgccgaaaagctgccgcgccatcaaatcttcaagagttttcccgtcggtcccactggcgtgcagcaggttgatttcttccgccgcgtctatgccgatatcccggcattcccggcggagctgaagaaaaacaacgtggttagcgtttttctggcaaccggctatccgctggcctttttcagcagtaaaacgatgccggatccgggcgatattaagggcgggacatggcgctccgccagcttctggcatcgcgattttctgcaaaacgcgggcgcgacaccggtgaccatgccctggggcgaaccgacctataacgcgctgaaaaccggcgcgattgacggcatgatgctgaacgtcgacagcggttacgatcttaaggcctatcagttcgctcccaacatactgatttccaaagacctgtggctggggcacctttacattctggcaatgaacgaaaaaacctgggaaaaactctctgcggaggatcaggcagcgatccagcgcgcggcgcaaaccgcgtatcaatccctgggttcggcgatggacagcagctttaacacccagatagacgatttacgtcaagccggcgcgacggtgcggctcctgacagcggaagaggttgcgcaatggcaaatcaccacccgctaccaggccgcgcaagctaaatgggttaaagagcaggaagcgaaaggcgtcagggatgcgggaacggtgatgaaacaggttaccgccatcatggatgacgcaatgcggcggaaggcacgctaa

SEQ ID NO: 395600 - DNA, 894 bp, Salmonella enterica
atggaactgcgtcacctgcgttattttctcgccgttgccgaggagggccattttgggcgtgccgccggacggttaaatattgtgccgcctgctctcagtatgcaaatcaaagcgctggaagaggaactgggtggtccgctgtttatgcgcaccagccggaaagtagaactgaccgaagccggtcggttgttgcaggtagaggcgcaacgcacgctggatcaggcggaaaatacccggctggcggtgcagcgctcaatacgcggcgaaaccggccgggtgcgcgtcggttttgccggcaacgccgtgttcagcggtaaactgacgcaggatatgcgagcgtttcgcaaagcctaccctgacgctgaactggtggtgcgcgaagtcgcgccgctgttgcaggcggatgctatcctgtccgggcagctcgatattggctacacgccggatcaccgtcacgttcatgccccggctctgctgtgtgaaacggctggagtctggaagcgtctggtggcgatggccgacgatcacccactggccaagcagtcttatctgacgctcgatatgctggcggatgaaccgattattttttacgacgctcacagcgccgatgagccgctttatacggcgctcatccgaatattaggccgtgcgccccatattgcgcagcgtacctccagcaccctgagcgtcctcaccctggcggccgcaggacaagggctggcgctggtgccggaaccgctgcgcaatatttctattccggggctggtgtaccggccgctggataccccggagctttcggctaatctgatgctgattagccgaaagctggaaaatagcggcgtagtacaggcttttctgtctattgcgcgtgaaaatgcgcagcccgcccgttag

SEQ ID NO: 395601 - DNA, 735 bp, Salmonella enterica
atgcatccgattgcatttttaaatgctataaagaaaggaaaagccaaaattacacgagagatgctcaggagaatttggcctgatccaagaaatgtttctgactctgtccttgatgttgttgctgaagaattttcaaataaatttgatatgtgtaatattaatactaggagtagactatatcatttcttcgctcaaatatatcaagaagtagggcctgctttcaatttgaatgagggttttaactacaggccacaagtgcttatagataaatttgcatattatcgtaatcactctcaagatgctcaagtggatggttttattccgggaaggcaagcagcaaataaacaaaacattgctaacagggcatatggtgggcgagaggggaatgatgatattacaagtggagatggatggcgatatcgtggaagaggaatgaaacagttaaccttcaagaataattatagatcttttacaaattatcacgaaagagtttggggtgaacgtattgattttgtaaccaatccagattttttagttgaaactgtttatgcggcaaggtctgctttgtactttttggatcagaataatttatacagtagagctgataatggggttagtagaacagtgtcggactcaataacgcgaattgttaatctttatgataatcactatgaagatagacataataatttaataagattcttgcaagaggggatttttgatgagatattttaa

SEQ ID NO: 395602 - DNA, 3360 bp, Salmonella enterica
atggctaaggtaaaagtaaaaacactcatcggctccgttgtgactgtcgccttttttctgacggtcatcgtggcatttctgttttatgcctttccggaaaacgtggcttcggccaccggattcggtccgtatgacggccagcgcatactcacattctgcaccatactggttgccgcgttgtttttattcggctggctgattgagaaggccttcgacttcgccggtagatcggggctgtatttccactggggtcagaaaaaggctcagatggtcgtcccggcaacaggcaccattgcgagcgaagatgatgaagaagagcctgtcttcagtgaggatgccgtatccgagcacctccgtttccgctatggccgtcgctggcagcgtaaagtgcgactcctgctggtgatgggcaacccggacgacgtccagaaagcggccccgggcctgtgtcgtgacctttggcaggaaggtgacggcaacgtgctgatttatggcggtgatgcgcagtcacttccggatgagatcttcctttcaaaattgaaacgtctgcgtcccagccatcccgttgatggcatcgttcaggtgctgagttcctcggcactcccgacagatattgagcgggatgcatttttgcgtagccgccagaaagcagaccaccagttgggatggcaggcacccgtctggctgtggttgacggataaagctaccggtgctcagccacctgctatcggtgcgattttcggaccaggggggtcaccgaaggccgcaaatgaggccattcagaccctgatcccacggctacgtgaggccggggtagcacaggtcgtgaataattcgacacatgacggtctgcttcagctctcttcccgtctgcaaaacgagctgaaatccagtctgagtgcattgctcagtgggttgatgcaggggtctgccgcctggcgtcttcgtggtgtcatgttcagtccggaactgacagcagcgggagccatacccaacacgcgtctcgatacccctggctgggcagctgtgactgaggattgtgatgccgtcagcgccaaaaaactgggctatgactggctgaaagtgctacggctcatcctgcttgctctgattgtgttatggggtgcaggtactcagctgtcactcatcgttaaccgtacccagatttatcaggcacaggaaacggcgaggcaggcagcggataccgcaaaaccacttgctgaacgcctgcacaaccagctcgtactccagcaagctattgcccgtctgcaacatcgtgaggcgaccggcgccccatggtacacgcgttttggtcttaatcaggacagtgacacgctggctgctctctggccgctgtatgcgaaaaacaacgcacagctgatgagggatgccaccgcagattatctcaggcagcagctgaatgcgtttgtgcaactccctcctgccagtgatgcccgtacgcagggtacacagcacacctatgacgtgctcaaaagttatctgatgctggcccgtccggataaagcggacgcgagctggctggcaaaaaacgtactggtagcctggccgaagcgtcagaatgtgccggatggcacatggcaggaaatggcgccgaaactactgggtttttatgcgcagaacctcccggaacatccggaatggaaaattaagtccgatgctgaactcatcagtacggtacgtcagatcctgctcaaacagataggccagcgtaacgccgaatccgggttgtaccaggacatgcttaagcgcgttgccagtaactggcctgatttaacgctggcggacatgaccggtgataccgatgcctcaacggtattcagcactgacgaagtcgttccgggaatgtttacacgccaggcctgggaagagcaggttcaggatgcaattgatgaggtggtcaaaacccggcgtgacgaaatcgactgggttctgacggataaaacccatcagcccgggagtgatatttccccggaagcgctgaaggcccgtctgacggaacgttattttaccgattttggtaacgcctggctgaacatggtcaacagcattcagtggcaggaagccacatcactttccgaagcgattgcccagctcagtctgatcggtgatgtccgccagtcgccgctggtggcactgatgaacacgctaaactaccagggaaaaaccggacagaagggcgggctacttgccgactcgatagtggattcagcgaaaaagctgatcggtcagaaaaaaaatgccagacagtttatagagcagacccgggggcctgaaggcccgcttgatggggtgtttggtccgctaatggggctgatggaaggtaaagagggcaccggttccaacggtaacctcagtttccagtcctggctggcccgcgtaacccaggtgcggctgaagcttcagcaggtcaccagcgccccggatccgcaggctatgtcgcagatgctggcccagaccgtgttccagggcaaagccatcgatctgaccgatacccgcgattacggcagtctggttgcggcgagtctggggcaggagtggaatggatttggtcagtcgttatttgtgcaaccgcttgatctggcctggcggcaggtacttgccccggctgcgggtagcctcaatgcccgctggcagacgaccattgtcgatcagtggaataaggcctttgcgggacggtacccgtttaaagccaccggtagcgatgcttccctgccgctactggctcagttcctgcgtagcgactcgggtcgaatcactaccttcctgaaaacgaatctcggcgggatcctccacaaggaagggaatcgctgggtcgttgatccttccgcaagtcaggggatggttgtcagtccggattttctccgggcgattaatcagctggcggaactctcagatatcgtgttctctcagggcgatgcaggtgttcacttcgaactgatggcgcgtccttcacgggatgttgccagagtgcagcttaccctcgatgagcagaacctggattacttcaatcagatggaaagctggcagagcttcacctggccggggaatacgtactatccgggcgtgtcactcagctggcgaagtgtcaacagcggtatgcagctctatgcaaacaaccagggtaactggggtttcattcgcctgctggacaaagccctgatcactccactcgatgccagccgtacacagctggtgtggatcaccgccgatggcaatcctctgaagtttgtcatgcgcagcgagctgggcgacggtccgcttgccttactaaagctacagggatttaccctaccagggtccatttttaacgttgccgctggcaccgaaggcgttgagtaa

SEQ ID NO: 395603 - DNA, 189 bp, Salmonella enterica
atgtctgtgaatactgaaacacaatcggtgcaggggaacactactgtaacggtccattctggtaccaaagggaaaagctctgtttacccggcaggatgctaccggggagtcggtctttacagcaacatctgcacgactgagcgcacagtgccggctcagacgggagtcaacaacgccagttggggatga

SEQ ID NO: 395604 - DNA, 594 bp, Salmonella enterica
atggaaaacaaaaacggtatgaatcagcatgaaacgatattcggtctgattggcaacctgcgcatgcaagcgctgacgactcaggggcaatatgacgccgcgcgtatcgtcgatggcattgagcgagaagtcaaaaagatgtatgagagcatcggttattttgacgcccacgttaataatcatgagtctgacgaattaactgtgttgatgtttagtggcaaggtaagagatgtaacgccgcataatagcttgtgtatatcacgcagcaccgcaggacaagaagcaacggaaattctcaaaaaatcgattctgattgatggcgatgatttggtattcctcagctcaactggtgacacagaaattcttcgtatggatttacagcgtattcttgaaaatggttatacgcaggcgaaggatagagcgcttggcatgaggattgaacatcggcttgagatggcggcatgcatgagagagaaagcaaaatcacttgggataaattttataagtgaaaatgactggaatgatattttttatgtaatggcgcgaacatatcaccaaaagaaagccgcgccttatgaaattggcgattgttaa

SEQ ID NO: 395605 - DNA, 192 bp, Salmonella enterica
atgagcaatcaaaaaattaatgaactaatcgttactctggaaaaagccgttaaattggctgactcgcttccaaatccaatgggggatattgagccctccaataaggctattaatctaattgctcaattaggagtaatagttcactctaaaaaaccggagattatcaaaggtttttttgatataaatcgttaa

SEQ ID NO: 395606 - DNA, 1122 bp, Salmonella enterica
atgactaagccagtaatgctaaccgaatcgactttttgtccacaaaacttggataaatacgcgtcgctaatgactaccggcaacgggtatatgggaattcgcgccagtcatgaagaagcctatacgaggcaaacgcgcggtatttaccttgcaggactttaccatcgggcgggaaaaggcgagctcaacgagttggtcaatcttcccgacgttgtcggcgtggaaatcgttctgaacggtgagaatttttctctactgagcggcgcaattgaaagctggcatcgcgagcttgatttcgccaccggggaattacggcgcgcgctggtatggcaagcgccaggcggtgcgcgttttgcgatagaaagccgacgcttcgtttctgcggagaaactgcccctgttcgcacaggaagtggcgattacgccgctggataccgatgctgctattttgatctcgaccggtatcgacgccaccatcaccaatcatggccgccagcatcttgatgaaacgcaggtcagggtattcggtcaacagatcctgcaagggatatacaccacccaggacgaccacaacgatattgctatttcttctttctgtaatatcgatggtgaagcgcagcgttgctttaccgctaaagagcgtcgcctgctacaacataccagcgtccaggcgaaagccggccagcgcgttacgctgcaaaaaatcacttggatcgaatggacaagcgagcgtcaggtttccagggaaacctgggggcgccagttgctgagaaagcttgaagcttgcgtaaaacaggggtatgaggccttgctggccgaatctgcggaaaactggcgcgcctggtggcagcgtagccgcgttcaggtgatcagtacagacgcgacagatcagcaggcgctggatttcgctctttaccagttgcgcgccatgacgccaacccatgatgaacgtagcagcattgcggcaaaagggctgacgggagaaggctacaaaggccacgtgttctgggataccgaagtttttctgttgccattccacctgttcaccgagccgaaaatcgccagaagtttgttgcgttatcgctggcataatttaccgcgcgcgcgagaaagcgcgacgtaa

SEQ ID NO: 395607 - DNA, 273 bp, Salmonella enterica
atgaaaactcttcctgcaaatcagcgggtggcggagccatgcccgccgcctgtgcttgtctggcaaacgctacttacacgcctgctggagcaacactatggcctgtcgctgaatgagacgccgttcagtatgaaactgttattcaggagcatatcaacgccggtatcacgctggctgatgccgttaactttctggtggaaaagtacgaactggttcgtatcgatcgccgggggtttaactgtcaggagcagtcaccttaccttcaggcggtag

SEQ ID NO: 395608 - DNA, 327 bp, Salmonella enterica
atggaaaaacacgataaccctgcatgggggcttcggtgcgaggtaatgcctcactttagcgcaagactggtacaggaaggcaaccgcctgcattatttagctgaccgcgccgggataactggcgctttcaatgaggaagagtgcaaccaactgaataccgcatttccgcactttattgaacagatggagctgatgctgctctctggtgagcttaacccccgccatgcacatcacgtaacgctataccacaacgaactgacctgtgaagcggatacgctcggtagctgtggctacgtttatatcgctatctatcccactcaacgttaa

SEQ ID NO: 395609 - DNA, 402 bp, Salmonella enterica
atgcctatttcaattagtagacatggtgcaccttttcttgttcaacataataattgtattagatctggtgcaagtcagtcatcatcactttcaaaaacaatctgtcatagcagcaactcttacgaaaaaataaactttgtaagttgccatggtgcaaacgggggctatttctccaatgcacagatgttagcaaatacctcagggaggcctgtcacagggtactatgggagagtaaataagttaacagccaatctggcttttactggtcgtacattctacccacaagataagactattgcctgtatttgttctgcgggtaatcggattctgagcgggccagctaaagtgttggtctacttgagaggtctgctaacccagaacacggatgataatctctggtaa

SEQ ID NO: 395610 - DNA, 594 bp, Salmonella enterica
atgtcattgctagagtcatttgggaaagcattaattatattgcttgaagcatttttagggaaacgcaaaggtcaggaggaagcacataataatttcttaaatgaatatacaaaagcaaactgcaaccatcgcttggtagaatattggttttgtcagttcacaagatggcgttacgcaaagtaccgggatattgattttatcatgacctcatccgacccatctaaaatattatacatggctaaaggaattaattacattgcccgtacagtggagtttatcgatagtggagattgtaaactatccgatagatataaagagacgaaaaagcatacattcctctttttgttcatatcattcctgatcattctcttcatattaattgcctggatgatatcctctgtgatgtctctgataacgcatcatcatgatgtcacattaatggctataaatatttcatcgataatagcagatgcgatttttatcatgtgctttgcattctttattcatgcaataataatggagttttttgcctttgaaaaggctgagcattttgtaaaatcttacaatgcagaaagaacatcatcaggtcattaa

SEQ ID NO: 395611 - DNA, 567 bp, Salmonella enterica
atgaatttaggggctggcatggacatcgagtgggatgaaatatttaaaggctatgaaccaagaaaaccgccgacagaggtacaattgctgctggaaaccatctatgaaagtggtaaatgggccgaatttgtgagggatagccgcatacaagggaagctcaccaatgaggtgcagaccgcatttcacctattctggattgagagggggcattttatgcgctcacgtttgaatgatgacgaactgctactgcaaatcctcaaggcgctacttcctccacttaaggtagagtcaggtctatggctatatcgaggtgagaacctggactgttatcaggccggagtaataggcttttgctggacggcacaggaagagaaggcccttccgtttgcaaggagttttaactcttttggctccggaggggtgttacttaaagcatgggttccagcctcctccatactggctggcattcatccccacagcacatatcttggggaagatgaaataaccgtaaataagtttgaaatagagcaagttcaagcgcttcagacctttcctcttacacactga

SEQ ID NO: 395612 - DNA, 264 bp, Salmonella enterica
atgaaattattatcccttgctcataacattgttgagatggtcaaaggccctgcaaaaattgaagcgatggacatcatcaatgttgcaattgaacttgagcatgcagaggacaatatcagtgacgccataccgcacattacagctcgtttatttgcaataagcttcccagatatggcttccacacttccatcaggagtccctgatgctttgatgcagcagtcgcttgagctggtactaaaatttgggaatggtcattaccgttag

SEQ ID NO: 395613 - DNA, 339 bp, Salmonella enterica
gtgcaggcgacaatactgaagctaggtaaggccgctggcgcgccactcatggacatgctgaattttttgcgtggtcgtgtggtgaatggccatgtttttgcctcagggaataaacatgaccacgatgctacatggctgaaaaaatttgaaaatgtgagttcaccggaacgttactcacctttttacctattgattgatgatggattgattggtgtttatgtgatgccagtggcatcacccttttacctattgattggtggtggattgatagatgttgatatgatgccactggcatcaaagcttatttttgccgtttatctctacacaaaggacacataa

SEQ ID NO: 395614 - DNA, 207 bp, Salmonella enterica; identical to SEQ ID NO: 395412

SEQ ID NO: 395615 - DNA, 7410 bp, Salmonella enterica
gtgctgacggtggaggcgaccgatattgcgggcaatacggcgacgcggacgctgggcttcactatcgacaccacgctgtcaacgccaaccattgaattagcgccagatcaggataccgggcaaagtaagaatgataatctgaccagtttaactcagccggtttttgttttgggtcatatcgataatgatgtccaaagagttgaattacagattgagcataacggtacatttaaaaacattattttaaccgaatcggctgatggatggcgttatcgacctgacgcggcattaaacgatggtagttataaattgaccgtgacggtaactgatacggcgggtaacaaaacgacatccgctcctttaacggtaacgatagatagtacgttgagtaccccggtaattgcgttggctaatggcgaagacagcggcgtggttggcgatcagcttactaaccacgatcatccggtatttgacttgagtcatattgattctgatgccttgcacgttatggtcagggttactcataacggtagctctcatgaggaagcggcggtatttaacaatggtaaatggcgtttcagtccttctgtgagttgggcggatggcttatatcaattagctgttgttgtagaagatcgggcggggaatgtaaaagaatctgcgcaattagatgtccgtattgatactacgaccactatcaacaatatcgtgttgcttaatgacactggcgttctcggtgatcaattaacgaataacgctaaaccatcattcagagttgaggttcctgcggatgttgcccagatgcgcgctactcttgatggcggcacaacctggattccgatacggcgaaatgcggatggacagtggatttttgcaagcacaaataatctgactgatgggcaacatacgcttcgtatcgaggctacagatacagcaggtaacgttgcgagcaaagatttagtctttaatatcgatactcacttacagattccgacaattgctttgggggccggacaggatactggagcgaatacttccgaccatattacgaatatttcacggcccacttttgttattggcaatgttgatgccgatgttattaaggtaatggtaactattggtaccaatacttataacgctactaaagtgggggggacatgggagttcagaccggataatgcgattcctgatggttcttataatgtgagcgttactattgaggataaagcagggaatatagcgacatctcaaccgttatctataatggtagatacgagagccgaaattaatagcgtaacgctattaacagatagcggtgatagctcttcagataatataaccaacgtaaacaagccgcagtttgaaattgtggctgccaatgatactgtacaggtacgcgttaaaatcgataatacgggtaattggattgatttaacgcagagtgttgaaggacactgggaatttaatgtaggaactgcattacctgatggtcaacattcactattagtggaagttgtcgatgttgccggtaacgttgcacaacaaacgcttaattttacggttgataccacgctgcgtgagccaaatattgtgcttgaccctacgcaggatactggcgatgacagtaatgacaatattactaatattaataagccgacatttattattggcaatgtggataatgatgtgtcacatatcgttattcatcttgatggtcgggattatatcatcgaaaataatggtgctaaattaacatttacaccagataagccgctgacagatggtcatcatacgcttactgttacagtgacagatattgcgggtaatacaaaaacatcatctgaactgcaggttgaaatagatacccaggtacaaattgacagggtttcattaacaaccgatagtggtgttaatgatagcgatagaatcactaatgttgctcgtccatcgtttaatattgtaacacctgatgatgtgaccaaagtattggtttctttcgacggtgttatctggagcccggcaagtaagaatgcagccggacagtgggactttacggcgggtagcgctctattagaaggtcattatgtactccatgtgcaggcaacggatcgggcaggaaatacggctaattccagtcttgcatttacggtggatacacatgttgatggccttaacattaccatgctggatgatacagggaatgacgcggcagaccgtataaccaatattacatcgccgcgttttgaaatctcagccagagaatcgctacaggttgtaacggtgacgttaaatgggaacgtcaccactctcaacaaagggatgggtaataagtggatatacactcccgaaataccattacttgatggacattataaactagaggtcactgctgaagatattgctggcaatactattaaccaggagatatcgttcactatagatacgactgtacctgtgcctgatgttgatttgttggatgccgatgactccggtgaaagcgctgtagataatattaccaatgtcactaaaccacgtttcattattagtgatattcctaccgatattgacactgttacgataaaaattaacggtgtctcttatcctattactctggatggcagtaacaccgggacattccaggttcctgtggcgctaaaagatggtgtctacgaagcggttgtcgtcttcagagatcttgcaggtaatatatccgagacgaaactaccatttaccattgatacggcaacaagtgttagtgttcgaatggatcccacatcagatacgggaagttctaatagtgataatctcactaacagaaaaagtcctaaattcggcggtactgcggaaccggatgcaaaacttgttattaccattatcgatgatacatcaggtcatgaggtgttgaaaaaactggtcacggttggtgttgatggtaactggagtatgacgccagatgccctggcagatggtatctacacaattaaagttgtctcaacagacgttgcaggaaatacagcggaggcgcaagatagatttactatcgatacggtaacgcccgatccaacaattcagcttacggattcatcaattgatgatatgcatgaagctaccagcctgcgacctgagttcaaggggatcgctgaagcattctcaacgattatgatccagtgggatggcaaagttatcggctcagccaatgcgaattcgaatggcgaatggagttggactcccccatcaatattaacaccaggttcttatgtcattagtatcgttgccaaagataaagcgggtaatgaatcgtcacaagttgactttccagtcgtaatacctgttattgatgtaacccctcctacgattaagctaagtgatgatagtgatagcggggcattgggggactttattactaacgataaaacgccgactcttattgggagcacattacccaatactattgtcagcatttatatcgacggtaagaaagttggcgaggcaacatcggataccgcaggtcgatatgccttccagatgcaggaacagcctgacgggacgtacgttgtggaagttggtatattaaatccacgcgtcaatgaagaaattcgctcagcagccgttagcctcgttattgatactcaggtcgctgaccttgaatggcatatatctgggatacatgaagacaaatatattaatactgtaacgccggagattagtggcacaagcgaaccaaacagtaaaattacggtttttgttaatggggttgaaaaggctgctgcttatactactgcaggcgggcattggggcgttatattacctactttagggaatgatggtaattacgtattaacgttcaaagttgaagacattgcaggaaatgttaaagaatttggccctcaggaaataacattggatacggtaattgaaccgttaacagtgacactgcgagaagttgatgattcgggtaaactgggagactggatcaccaacaaatcacatgtaaatatagatggtactgcggaggcaggaagtaccttaactattaaaactcagggaggagtcgttgttactacttttgaagtaggaagtgatgggcattggagtgcagagttagatctgagtaacggtaataatatctttgttgttgagtcagtagataaagcgggcaatagtcaacaaaaagaacttttagtagaatatgacacgcagatcgaaatcagtgctatttctttaagccgagatagtaatagtggtgataaatatgatctcattaccaacgataaatcgccagagctagttgcaatgaccgaacctggagcaacagtacaggtttatattaatgatgtattgcaagctacggtagaagctaattctgcaggtaatgttagttataccatgccagcgaatagcgccgatggtaactatcatgtgcaatttgttgctaccgatatagccggcaaccgaactgaatctgctgttgcgacagtgacgatcgattctgaaattgctgtgtttactattgatgaaggttcattaccgactatatcaaatagtcgggcattatcagtcgctgggcaaggtgaggcaggcgctcaggtaagcatctttgtcgataataagctggtcaatgtggtcatggttgaggctgatggttcctggcgtgctccgatattgctgcaagatgatggtacgtttaagattcatttcagcattactgacattgctggaaacacccaggcgagcaaaaatttcagtgtcgatgtcgattcatcaaccgaatttccaacaataacccttgaagattcgagtaactcaggtctggttgacgatctgattactaatcataatacgccatcctttgttggtactgcggaagcgggtgctacaatccatttttatgttgatgaaaaaattgtggcaaatatcctcgttcaagatgatggaagatggtcatatcaatttgataattctctgaaagatggtgaatactccattcgtgttgttgcggaagataccgctggtaacagggcggaatcacctcgcttaatcgttacgatagataccagtacatacattgaacctcctacgctgacagcgggatctgataatggtttgtatattaacgacggcgtaacaagtcaaaccagacctcagtttagtatcaacggtgagtttaaccagagtgtccaaatttacattgatggcaagctagtcgatacggtcactgtgacagacagaaaccaggtttatcaacctgtggctccattgggtgacggttctcataatatttattatgtcattaccgataaggcaggtaacactgcaacatctaaaacactagatttttcaatagatacatcgaataaaactccagtggtgatagaggccattgatggtcatacactagcggagatgaccggcagcgatggtaaaatatatataacagatactactcataatataatttttcgcggaagtgcggagcctgatagtttaatggatttaactatcaatgggctaaacgtaggccaagttttggttagtaagacaggagaatggcagatgccagtcaaccctgtttatctctctcaaggtcttctggagataaaaataaaatctacggaccgtggaggtaatgtaaacgagaaaagtttctctatctgggtggacacgatgattgaggactttaccagtgaacttgatgacaataaatcatcgtcgcaaaatgactggtggagtaataatacccttatcactatgagaggtctgggagaggctggcgcgacggtatcactagtgctggcaggtgtcacattggcaacgacagtcgttgcggctaatggtaagtgggaactgtcgaccgatcggcttccggaagggaaatacgatatcactttgagtattgaggacaacgccggaaacaggagagaagagatccgtgaaatattcatcgatcgcgttgcaccggcagtccctgctataacatattcggacattgtcgatgatctcgtcattatgaaagggacgggcgaagcaaaatcaaaattaacgataactgacagcgagggaaatatatatacattaaccgttcctgataacgggaactggagtatggctattccttatccatcagaagggatatttactatatcaagtacagatcgaattggtaacaccagtgatgttgtctctgtcgatttaataagagagataccgactatttcgttagcggtagattcgaatagtggttctaaaaatgacaatattacgcaagataaacaacctacctttattatcggaaatttagaaagcgatatcgttaacgttcaaatagatattaacgggatagcatataatgctgaaaaaagagcggatggcgtctggttctttacgccagatatagctttagctgatggtacctatacgatatcggtaactgcgaatgacgcggcgggtaatcagaaaaactcgttaccgattactatcacgatcgacagtacgctgaaggtgccggagattgcgctggcggcaggtgaggataccggcgcgccagacagcgataacgtgacgaatcacacccagccgaagtttaccctgcagcatattgacgcggatgtgaccggagtgaccgtcagcgtggcgcataacggaaccaccgacacctatccggtcacgaagggggatgatggctggagcttcagtccgtcagcagcctggagtgatggtaactacacgctgagtgtgacggtggtggacggtgcggggaacacgcagcagtcatcatcgctgacggtgacggttgattctactataacagcgacagcgcctgttgaggcaggcgatgttagtgagttcgccatggcaaccgatgtagctcaaccggaatctgaaatggtcagcattgaaagtgaaaaaaatcatagcccagctatgttttcaatgatgtctgcggttggagaagtggctgcgcaggaggatgcctataacatcgtattattaaataccgagtctggtgatgtaactgaacgttctattagtcagacaccatcttttgcaatatcagtacctgataatattgtgaatgttagtgttatgttcgaaggagaagagattgatttgccgattaataatcagaaggcaatatttgaggtgccagtacctttgaatgatggtgagtatactatagatgtgaaattcatcgataaagatgctgattatctgattaaggaaaaaacattctcagttgatcattcttcggcagatatagttaattccatgggtgaaagaggcaacaccgaggatgaagttaacgtctcagccccagaaagtgctgtaacacaccataataatggtgctgttgagatattcactattagtgaagtaagtctccctgtagataatcaagaagaacacgcataa

SEQ ID NO: 395616 - DNA, 219 bp, Salmonella enterica
atgcacatcacggacggcgtttttactggcatacggcgagcggtctttattcacctcgcctgcagcaatcagcaacgcttcatgccagcgcatgcgctgcgctttgagctggttagtccaccattcatcgttaatcaggcgagcgacggcggaaaatgcctgtcggattgtcatctggcctttgcggtattttttccagaaaagcggagcaatgtttaa

SEQ ID NO: 395617 - DNA, 183 bp, Salmonella enterica
atgaccactctggatccgcgccagctctggcggcgcacggccagaacgggcaacctcggcgcatgcaaaaccatgcacctgttgcatgcacggctaaaaaacggggaaatcgcggaaaaatggcataaaaaaaccggcattcagggtgccggtttgggttggatcttaacactaactttatga

SEQ ID NO: 395618 - DNA, 201 bp, Salmonella enterica
atgggggtaattgtgaggaaagtcggcgtgattattgggtggattgctgggatgttgctgttttttctgcttctcggctgggcgggagagcaagaccgtaaagactgtgaggagcgtatagctacagagctgaaaaccacggctgtttttataaacaataagtgcatggttaagggctatggccgctttgacggaaggtaa

SEQ ID NO: 395619 - DNA, 435 bp, Salmonella enterica
gtgctcactttaatttatggggggggcggaaatcgccctacggttattgaactggatgacgagcagggatggcacctgtatagccagcgaaatccggatgggactatttcattcactgttaacggtattgtctactgcacagcgttaaatgtaggcggagctatttatcagaataacggcgacatctacggttctgtctggggaaatagctggctgagtacgtggattcacaacaatgtagtaagaggggtcagacttggccccgtggcgctttctggcggtctgtggcgtgattttcaactcggcggcggacaggtggtgacgggcttccatactgacggtaaatgggaaatggaaggtgatgatgacaaggtctattaccgtcccgttcagtatctggttggtgatacgtgggtaacggccccaagtgtataa

SEQ ID NO: 395620 - DNA, 246 bp, Salmonella enterica
gtgcttctgcgaggccatgcccgaggcaactttgcgcaacctcagaaaattcgggatccagaatatttcatcgaccaacaggtcgccgttgtggctctgtgcggtgttggaattggtgccgagataaatcagctttgcgccgttattaccgagcacaatggggtcacctgtcaggtcgacgtcgaccagtcgcgcaaactgaatgatgtattcccggaacacgtaagcctgcgttttactggctga

SEQ ID NO: 395621 - DNA, 192 bp, Salmonella enterica
atgcggcgaaacgactcaaccacgccgaataccgtccttacaggcagggccggtgttccgtcaaacacgggggtctggaaagtgaatgacgccggcttcagcagtaacgtgtcgcaggcgatatccgcagaggtgcaggtcaccgccacgtcataccgccagggctggctgagggactccaccgcactgtaa

SEQ ID NO: 395622 - DNA, 144 bp, Salmonella enterica
atgagcgtgatttatcaaaccaccatcacccgtatcggccagagtgcgacggaagcgctcggcgaacagatgctgattacgtttcgggaaggcgcgccggcggatatcaagaattttgcttcatccattgtcatggcgaaatga

SEQ ID NO: 395623 - DNA, 324 bp, Salmonella enterica
atgaaaaaatcaacggtctggttttattgcgcccccgcacttttattttcatgtttcacctgtgccatgacgccggataatacgtccgccatcatacgaaaaaacacacagaacaccttacctaatccgcacatctccgtcgcggaaagcaccccttaccttctcacgccggacgataacaaccggattgtcattcctgccgggaagacactggtaatgtcggaaaaggatgcccggagcatcattacactcgtggtgaattacaggggcatacaggaatcgaacagaataacaaaaaccagtaacggatttattcttgaataa

SEQ ID NO: 395624 - DNA, 642 bp, Salmonella enterica
atgaataataaaaaacgtgttactttcagtattgcttctctgcttacaggggtgttagtgtacgcatcatatagttattatacgacaaagattctggacaaagaagaatgccgttcctcactgatcgttttctataatcaatcacgctcagatattcaactcaattttatttattcactggaagataaaaaggggattgtagctgttagcggtaactattatgagaatgataaattaaaagggaaaatcaggcgagatattgaatatagttggagagaaaatcacgatatttatcaattgatatctacaaaggttaataagtaccgtatcctggaaacgttaccctcagatacaatggcgaagattttgccagatttctacgtttttcctgataaaagtgtccaactattctattcaaaatcaaggagctggtggttttattttttctaccggggggaggccacttttttactgtgcaaaataaatgctggtatacacatttccctcgataaaatgtgtataccagcaaccattaatatcttagttgaaaatttcttgtatcagcaaaaggtcgtgaattttttttccacccagccttttgcacgcccgactgcgataatcatatactctctttggcggtaa

SEQ ID NO: 395625 - DNA, 255 bp, Salmonella enterica
atgcgtaagaacacttaccccgaccgcaaggatgcggtgatagtagcgcttccgggtgtcctgattgatatttccggtatagcagaagcggcacacaaacacgcctgtagcgaatcagagtacgccggatcatttatcccgcattcattggcaattattcagaacagcgcggaacaggctttacaggatgtaagcaacattatggcaaaggatacaggggaaaccgaaatcaataagggggttgatcatgcgtag

SEQ ID NO: 395626 - DNA, 204 bp, Salmonella enterica
gtgactaatatgaccatgcaaaccgcagtagttaaagcctgtcagttatcatcaatcattgcggttatagctgaaaactatctcttaaatgttcattccggcaaccttatttcgcttgcggaagaaatatccggtaatcttgctacatttcttttagaaaaagaatgcgaggcgaacacagaacaagggggcaataatgaataa

SEQ ID NO: 395627 - DNA, 315 bp, Salmonella enterica
atgaataacagccagaacaaatcggatataaaaagactcggtgaagccaccagagatatagcgattgtttcatattacgctcttagtgaaattaatgcggttggaaagttggttcaatcatggatggaaactacagaggcatacagaaaccccgaaataatatcccgcgcaattgatagtattgtttatatcgcacttgaggcgctggaaagtgtagagggtgaagccaaattagcagggtgtgaatatatggacgcgaacacaaagagacgcttgcaagcagcggaagaataccgcgaaggcatagaaaactaa

SEQ ID NO: 395628 - DNA, 468 bp, Salmonella enterica
atgacaaaggacgctataaacggtgcgccaccagcacaggacgtatggctgaaaagaatcaggccggagggaatgtcccgcgaccagtggaagaagagaaaacgggttcagaggattgcggcgttctggccgaatctgttcgatatcaacaccccgaagcccctgaagctaaacatcatgcaggacatggcggaagatattcaggcgcgcgggcttgatatggggctgggttctgttcgctcagccctgaacacatacaccagccatgccaggtatattcgttgcgtcgctgctggtggaatgcgttacgacctgaacggggaaccatgcggggaagtgacggaaacagccataaaacacgctacagaaaggtttaaggctttagagcgtaagttcagggcaggccgtaaccggtcaaacaatagcgacagtaagccggaagcggagagcgcgacagatggcagatga

SEQ ID NO: 395629 - DNA, 357 bp, Salmonella enterica
atggcaagagcaccaaaaccgcctgcttatcttgacgagatggcggcgcaacaatggaaattaaaagcgaaacaacttgcagaacgcgaggatcttactcccgccgactggaacaacctggaattgtattgcgtcaattattcgatataccggacggcggttgcagaccttgccattcgtggctttagcattaaaaatagccaggggagcgaaagccgtaacccggcgcttagtgctaaatctgacgctgaaaaagtgatggtgaaaatgtcgtggttacttggttttgacccggtaagccgtcgccggaatccgccagaaaccgaggaagaggacgagcttgaccgcctggaatga

SEQ ID NO: 395630 - DNA, 129 bp, Salmonella enterica
atgattacccacaggcgcagccgtgtaaccgtgggggaatttcagcacgcaaacccgctcataattccgatcatcatagccactttcatcacaggggtaggggtgggtaaaaactcagaaaccctatag

SEQ ID NO: 395631 - DNA, 369 bp, Salmonella enterica
atgataaggctcattgaaatctattcccggcttaatactattgatgatcttttggtgcttatgcttcaaccaccgaatatttacaccgaagagacaataggtgctcatgttgcctcattggttgcgtacgttgatcacgtaaacaattttatgtggatgctacaggaacggggcaaactttgtgatttcgatacccaatacatactgcctgctatttctgaaatatggctacaggtaaagcgggatctaacggtaaacagcaggccactatgtgagttagctggctgcattacggggctaatcagtctgaccagtttttatctttcccgcatcgagggcaacaacgataaaaacagggtgctacattga

SEQ ID NO: 395632 - DNA, 204 bp, Salmonella enterica
atgaaactacccgaacaatggccgctctatgctaaatggtttgttgtctggctggtggtgctgccaatgatccttcaccgtgtagagcattccgccgtgttcgcttccgcgtgggtctgtgtgatggttgtcggctttgtgtttggtttctacgttccgctggtggatcgtgtgtttttcttcctctgccagcgctggaagtaa

SEQ ID NO: 395633 - DNA, 447 bp, Salmonella enterica
atgagactgaccagccgcaaaaaagaaattctgagttacttcgagccggattatagggaacgggtaacgagtgagattggcgcaccgccttttgacgtgtccggcgttgcctggctgcttcatgggctggactcacacgataagcgccattgtctggaatccacgcgtcgcacgcttgaagcaatggttagagacaggttgcttgagaagtccaccagctacgaaaaccgccaggacacaacgcaatcgggcgatggtgccggggtatggtgcaatgtctcccgctatggcctgcccggtcagtgtgctgtaacgcgcgatgatttgggtgtggatggcgctatttatggcgagtgtgtgcgcctgcctgatcaatcagtttttaagtgtgctgctctggggttatcacacgagataaacgagcaaggcagaaaggcggctttatga

SEQ ID NO: 395634 - DNA, 513 bp, Salmonella enterica
atgagtaaagcggaacagcaaacgcggatcagaaagataatgatttatgcccttaacgcggcattacgggctggcgttattccactgaaaaccagacataacggagtaacggaaactgaatgtgcagaaataaccgtatgtggtaaacccacaatcattaactggtgcgataccggacacaatgatctgaggattagtgtctggtgggactacaggccagaacgactacccaagctgacgaagaacagggttcacgaccttacattgcctttgccggggatatatcgcgatcgtttacggctcatcgttgggttatgtgcaagttgttactttaaccgccagcgaaaaaggggggtattgtctgataagggtaacgagtttttttctgtttatgttcgcgaatctacggccagttatatagacgaacagaaagaagtgaaaccttttggctattccatatcggagttatcccgatcactactaaagaatgatttcaccaccagcaggcgttaa

SEQ ID NO: 395635 - DNA, 396 bp, Salmonella enterica
gtgatcaatgtgttcaaaagcctgagctgggactttaagaccaacaatccatgtaagtttggttcaaaaattatcgtgaatggtctggtaaaatgtgaccgatggggatacagcctcaactggggctggcagcgtgaccggcttgctgacctggagcgcatgctgatgctgctggacgggaaacccgtccctgataatcgtgccgatgtgacccgacgccttggcgatcacattcacgagaacaaagggagtaacagttacgaggacgggatgtttaaaatcaaatactttaagaagggaacatcacatatcacattcaagcgacctgaactggtggacaggctgaatgacatcatcgccaggcactatccagagatgctgtctaccgtgttgtaa

SEQ ID NO: 395636 - DNA, 210 bp, Salmonella enterica
atgggaagatataatacattccaaaaaggagataacccagacaaaatttcaccgcctgaccatcacctgttatcatttaatgataaagcaatcagacaaacaattatcaacttctgtaagaacgtctacactctcttttactctgtctggacaacatgttacttgtctcttacaactatcagaataaatacatatcaccagttaatatag

SEQ ID NO: 395637 - DNA, 138 bp, Salmonella enterica
atgttttttattgacaactactacctgcaaacacgaaaaagacacccagcacttgatttacccaataaagagcaccataaggtgccgtacacattcctctttgacgtggggcattgcgatgccccctcttttttttga

SEQ ID NO: 395638 - DNA, 387 bp, Salmonella enterica
atgataatactgaactcaaacacgctgggcgaacagtccgggcagacagcagcgacacccccaaatctggcggacctgatatcaggccgttttgggctgcttcatgccgaagatgcgcctgtctgcgaaaatctggataccgcgatgattggctatatgctcgtcactcccgatacaaaaggcaatcctcagtccggagaccttgcttacggtcaggtgcagacgcttgattcattcggcgccggcaatgacgggcagcgaacattgccgccagtgggcgaaattaaagaatgggtgatgcagatcgtgcttatggcagatggcagcatgtactcacgtaacaggataaacaacggcgcatttcagccgttcgtcaagcgctggtaa

SEQ ID NO: 395639 - DNA, 417 bp, Salmonella enterica
gtgtggttgtgtcatgaggttctggatatggctatttatactcaatccccacccccacaactcccacagcccctgcgattaccggatatcgatccactggcaatagccgggttattcggctcacttccggccggaccaatggaggttgtaacagatttcaacaccgcgatgatgggctttatgcgctgtacagataaagtacccaacgttgcagaaccgggctggccgtggggcatgctgtggacaatatcatcgaaaggtactggaccgactggcaggcgctacatccccgccgttctggagcagggcgaggtgacttatcagatattttacaccacgcagggtgcgctttattcgcggggtggtatctggttaacgggctggggcaaatggcaacaaaggtggcttaaatcatga

SEQ ID NO: 395640 - DNA, 711 bp, Salmonella enterica
atggcagcgacggacacactcaatctggagatgccgggcatggcaaccctccgcctttacggggatttgcaacgatttggaaagcgcttcgatctcagcataaaaaccgcagcggaagggcttcatgcgttgtacctccagataccgggactcaggcagaggatacaggaagggtggtatcaggtcaggattgccggtaaggatgttacgccggatgacgtcacggccagactgcacgaaccgttaccatcaggcgccgttattcacattgtgccacgcatggaaggagctaaaaacgccggtatatttcaggtagtggtgggcgcggtactgacggttgttggtattgtcacttcatggaccggagttggtgcggcagtcggtgccgctggtatcgcgatgatggctggcggggtagtgcagatgttaaccccaacccccaaaagccccacgtcaagccatgccgataacggcaaagccagcgtttacttttcttctgtcgataacatgattgcccaggggaatccggttccgatcccctacggtgaaattatgtgtggctcccgcgttatcagtcaggaaataacaacccgtgacgaaagttcgccggacaaggttattaattttggtagctcaaagagtctgaccggtgctatgggtaatgcgttgatggggaaggatatcacaaagccaagagtgctgatccgataa

SEQ ID NO: 395641 - DNA, 549 bp, Salmonella enterica
atgtggtcagaacgccgcagggcgaacggtattttccgtgtgaaaatctgtctgctgaacccacgatgtattttcgcatttcaccggaagattacctgctggccagcgcggcgggtgaggtggtggcgctggtacacagccacccaggagggttgccgttcctcagcagtggcgaccgcacactacagctacagacggcgcttgcgtggtggctggtgtgcgatgagcaggtttataaattccgcagcgtgccgcaccttacaggccggcagtttgagcatggggtatacgactgttacacgctttttcgtgacgcctaccatctggcggggattgagttacctgattttcaccgtgaagaagactggtgggataaaggtgaaaatctctatctggataacctggaggcaaacggtttttatcaggttcgcgcggataaagcgcagcctggcgacgtgcttatctgttgctttggcacatcgaccgccaatcacgcggcgatttactgtggcaacggcgagctattgcaccacgtgcccgaacaactga

SEQ ID NO: 395642 - DNA, 420 bp, Salmonella enterica
atggaaataatcccgataattgaattgcttttagctgctgccgggatatttataccttcatttattggtatcggcttatcccgaagaagtgcatttaaagcagaatcagcgccattattgataaagctccttgaagaaagaacgatgatatccaaaggctcgtatccatttcgatcccttacagaagatgagttatttaaagttttcccgttcgccaccaaaagaaaacaaaagcggttgttggcggcattttatcgttatgtgaatgctcacgataaaatcgcacaagcccggcactatcacagcgcccccccgtatgatggaggagctttctttgtttttagctttactatcgacaatcctgatgaagtacttaaagagataaaaccacttatagatgaacttacgacccattgttga

SEQ ID NO: 395643 - DNA, 126 bp, Salmonella enterica
atgatgctgaaaaaatggtgtatcaggctgcttctgctctccagtttttttggtggagtggtcatatactgcgttgttatcgagcgtatagagcatgagctgatttttctggggatagatgattaa

SEQ ID NO: 395644 - DNA, 822 bp, Salmonella enterica
atgaacttttctaataccaagaaagacggtctcacgaagaaatgcttagtgagagcttttaaagtaaacacagcatctactgatatcctctttgaccaaattctaaaatcgaagagctttaaggtcgatactgtaattaagatcagtacaaagaaacatctaatgctgaaggcatttgagactgataataactgccattatcttcacgtagccctttacaaccccaaggctcaagtatccattacacctctcaaaaaagcggctagtgacttacttgacgtagaaaatcttgatgaccttcatgcatttttaatagttaaagataatcgcattgcatcattaatgcagatttcaactaattggtgtgaagttaaaattgcgaaaattttcaaagaatttggtatttcagtaacaccgacagcaattttacaaaaaaacgtcattaagaaaatcaaagacgataaattaaaagcattgcatcttaatatcgacgtcgaagagtcagattttgttaagactcctggattattagcatcaatcttccaaaaagaacctaaagttaaagcaaaaggaatttctggtcacttaaccattaacgccaaagggaatgctgaattagctcaatctattgaaaacgatcctgcaaactgggttgatgacctagatagcgatttttatattgaaactaaaaagggtgataagttctacggtgatgatttaaaactaacaaaaacctactttactgtaccatatggttcaaaatccataaatgcgaaatatgcaaaagaaatcctgggagattttgtagcaaaagagctataa

SEQ ID NO: 395645 - DNA, 486 bp, Salmonella enterica
atgctaaaaaatcttaatgtaacaggcatactcgtttcaacgctgaacattgtagcctccttttgcttctcggtgttcttgaccggaagtttgactaataacacagatgctttgaatcttgtggcaaatgtattttccatattgtcaggatttcttttactcgtaattacaatgtcaggtgaaaactcaacattaatgagcaatataagtgtgcttgacgcagaaaatcaagaaagaaggtttttaatgcgttttaataaatactacgcgctgttcttgctttatattcttacactagcattaatttttattttttatattatcacaaaagataaaacaaatacatcaccaacactcacgatgataaaatctgtaattggacactcaattgcatttctcacatgtttctcattcatccagtcgactttcatacctctaaaaatcaaagagctattcaaagaaaaacgagagctaaataaaaaataa

SEQ ID NO: 395646 - DNA, 189 bp, Salmonella enterica
atgaaactggatgtaacgaaggaagacgggcacaccataagcgaataccttcgcgccgcgtatggcggatattccggcccggtattcatcgatatcaacaggctggtggatttgaacatgacttgcagccgtctggttgttatggcgtatctcatgaaacagcagtggttctggagggctaaacaatga

SEQ ID NO: 395647 - DNA, 312 bp, Salmonella enterica
atggatcgtcttattcgcgaaatgtcgtatttattcaccaaaaagcgttttgaggaacttcaggaagcggcttgtgaaatagcgacaggacacagtgattttccggaatgttttgggctcattgctgatgctatagcggaatttgttgaaggaactcccgaagatgaatggcgcgagcatgaaaaaatctttatgcactatgtcgttatgcgcgatctggcactgtgggagcagggagagaaaataacggaagtccagtgggcacatccgggctggttcggtacggcagagaagggagataccatccaatga

SEQ ID NO: 395648 - DNA, 1419 bp, Salmonella enterica
atgacgccagtatggagaaacgatgatctggaaggtgcggtaattggcgctatttttctgcgcggtgctgatcctgaggttcttgaaatcatttcccgcctgccagcaagcgttttttatgtgcggcagtaccgtgaaatttattccggcatatgccgtcaagtgcgtgggacgggggttattgatcctcttctgctttgcgagagtatgccggaacacagcgcggtgattatggcgtcagggcaaatagcctgggcgaaatcagcgctggtttcctacgtttctgtgttggaacgtaacgcagctgtacgcgatgcggaagtggtgattgaaaatgcccttgcaggaatccgggcagcggccaatggtgaaagtgcagttgaagcgctgaaagctgcacaggccagcatcgcgactatctccctttccgcaaacaccgtacagccagttcatattgatgaaatcctgtctgctgtcgttgatcgtgttgatgcccggcatcaggggctggagacagcaaaaagcctgctcactggcattgaagagctggacgagaaaacgggcggtattgaacccacggatctggtgtttatcgctgcgcggccatcaatgggtaaaaccgaactggcgcttgatattatcgacaaggtatcggagcaggggcgtggcgtattgctcttcaccatggagatgtccagcattcagattggtgaacgaatggtatctgctgctggtggtatgtcagtttctcgactcaaggctgcggcgaagtttgacgatgaggaatgggcgcgtttatcaaccggtgttggtcgtcttactggacgcccgatctggatggtggacgctaccaacctgacggttgagcaaatccagcaggtcgccaccagtcaccagattgcccacccggaaatttccctggtggtcattgattacttgttactcattaagatccagagtacggcacgttatgacctcgctgtaggtgaaatttcaaaggggttaaaaaatctggctaaggcaaaccagactcccgtaatcgcactgagccagctttcgcgaggcgtggagtcccgaccgaacaaacgcccaatgaactccgaccttaagaattcaggcgaaatagaggctgatgccgatatcatcatgatgctttaccgtgacgaggtatataaccctgagtcaccagcaagagggatcgcggaaatcaatataaccaaacagcgtaacggcgttcttgggaccgtgtaccgtcgtttttataacggccattttctcccaatcgaccaggaagaagctaagcgaaaatcagcaccacagcaaaaatcacaaccccgacgttatgcaaaagccgaaggagtcagcaatggatcgtcttattcgcgaaatgtcgtatttattcaccaaaaagcgttttga

SEQ ID NO: 395649 - DNA, 882 bp, Salmonella enterica
atgttaaatttgttgaatcagcagaaagatcgcgctgacctgaaggcaagacaggaacgcctgaatgaagaattaaatttcacactggagcataaacttccgtgggggtatggcggctgggactcaggaaaaaccgagaccactacctgcgaaaaacatggcgaatttgagcgtttcactctggtgggaaaagattttcgcggcggtgagaattttaaacactcacaatgtccggaatgcctgcgggatgaacttgcggaggttgacgcaaaactgcgtacactgcgcgttactgaattgctggatcgcgctggtattgcccgccgcttcgaggattgtaagttcgataactaccagactgtaactcaggatgcggcgaaaaacctctctgtgtgccggggctatgtcgacaactgggagcactgctttgatgcaggactgggcctgctgatggttggaaaatgtggaaccgggaaaaatcacctggctgttgctatgacaaaaaaccttattcgcaaccacctcgcccaggttgaaattaccgatgtgatgcgcgttatgcgtgccgtaaaaagcacctggcaccataactctgaaatgacagaagacagtgtgctggaccactttgcgtcgctggatctgctgattattgatgaggtcggagttcagttcggcagcgcctcagagctggctatcttgcaggagatcgtcaacgttcgctatgaaaatgtgctgcccaccatcttgattagcaatctgacctttgagcagcttaaggataccattggtgagcgcatcgttgaccgcgtgacaaacggtggacgcaaccggctggcattcaactgggaaagcttccgtggcaaagacgggtggtctaaatga

SEQ ID NO: 395650 - DNA, 912 bp, Salmonella enterica
atgagcagtaaaattctggggaacgtctgggatgcttgcgccgctcatggtgtaaagggtgccaagctggtaattatggctcgcctggctgattactcaaacgatgatggggtctgctatcccagtgttgaaactatttgccgacagttggctttgggcgaaagtacggtaagaacagctattgccgaactggagtccgctggttggtttcgtcgcgaatcccgccgtaaaggtaatcgcaacacgtccaatctttaccacctgaacgccgatcgtctggagtgcctggcccgcattgaaaaagacaaagtgaaagcattacgggaagaacggaaaaagtttaacgattttcaccctccagaatctgaaccttcaaattctgacccgtcagattctggatgttcaaacgattttcaccctccagaatctggcaaaagtgatgttttcaccctccagaatctggacccagatccacaaggtttaaaacatgatccacaagtaaattcaaaacatgaaccacaagatattggcacatcggctgacaccgctatgccgacgcgttctgcgaaacaggattattcacctgaatttgaaacagcctggcaggcataccctaaacgtgcaggtggtaatcccaagccatcagcgttcaaagcctggaaagcccgcctgaaagtcggagttaagcctgaggatatgctggaaggcgtcaagcgctacgcggcatactgccgggcgaccggtaataccggcactcagttcgtcaaacaggctgcaacgttcttcgggcccgatcgccacttcgaagagtcctggcagactccgtccgctcccggaggtgggcgtcgcaatgcgctccctgtatccggcttcagcgagcaggactacggcgaatcgggttgtcagtggtaa

SEQ ID NO: 395651 - DNA, 315 bp, Salmonella enterica
atgagcagcacaagttatatctatccatctgattttgtttttaagcacccgtttgataacccattacagcgcctgatcatgatacgcatcctgttggcgggctcattggatggtgagggtgagcgcattcttgatcacgagaccttggttgatttttgctgctgttctaagcaggcaatgtttaaggaaataaaaaaccttgagcgtgccggctgtctttgcgttcgtcagattggtgcgcttaccaccgggctgaacgttcgccttgaaccagcgcgtggctacacgatccttcctccccaggaggttttatga

SEQ ID NO: 395652 - DNA, 336 bp, Salmonella enterica
atgacccagaaggacctggctaaagaggtaaatgtatcaatggcggctgtatctttgtgggagaaaggagagtcaacacctggagctaacaaactcgaactcatatccaatgcattgaaatgcaagctaaaatggttggttgccggcgatgatgttgaaatctgggaaactgatgaaagcgccaacccaaccgatccagacgacttatcaaaattgcgtttaattttagatttgataccagaaaacaaacgaaaggaagtgctggcattcgccgcgcagaagcttgctgagcacttcaagaatgttgaagacggactttataaaataaagaaatag

SEQ ID NO: 395653 - DNA, 594 bp, Salmonella enterica
atgagtattgaaaaaaaaaaacatgatacacaagccatagcttttgagtttgtcaccaacgctgaaaattcaatgtgctccatattacaggcgaaaagtgtagccagcctttggcttgagtcaatgggatcgttgaagaatgactccattgaaaagcatttgctttcaaatattataagcaccctttccaaagcagagaaggacgtatcactttctataaattttgacatgaataagttggacgacataacagtggacagccttgatagttctgattatgccggcgagaggctaagccatgtcgttgaacgagaactcgacactgctgagtatgttatcgataataataaggttgtcaaaaaccgtgttgttcaaatggattctccgaaaggcagcgctaaacttccagtattcaaaggattttctcctgtcccgttagacgcacttaaaaatatcagcgccattatagagaccggtcatttaatgacgtcttgctctgataaagaatgcgaagaaattagtgatgtgattatcgactttgcacgtcagtatgcagcttcagcacacgcatatgcacaggaggaaaagaaatga

SEQ ID NO: 395654 - DNA, 552 bp, Salmonella enterica
gtggcgccggtactgtacgttattcatgctctgctgaccgggctgggctttaccatcatggcgattctcggcgtcactatcggcaatacagatggcaatattattgactttgtggtgttcggcatcctgcatggtctgtcaacaaaatggtatctggtgccggtagtggcagcgatgtggtttgcggtttactacgtcattttccgcttcgccattacacgctttaacctcaaaacaccggggcgcgaggcggagatcgccaccagcattgaaaaagcgatcgctggcgcgccaggaaaatccggctacaacgtgcctgctatcctggcggcattaggcggcacagaaaacatcgtgagtctggacaactgcatcacccgcctacgtctgtcagtgaaagatatgtcgcttgtggatgtccaggcattgaaggacaatcgcgcgataggcgtcgtacagctcaatcagcataatttgcaggtcgttatcggcccgcaggttcagtctgtaaaagatgaaatggttggtttgatgcataccgttcaggcataa

SEQ ID NO: 395655 - DNA, 195 bp, Salmonella enterica
gtggatagtcagattggttcgcgtaccctatcggcgttgagatttttcctctctatccggggaagtgaaggtgaaatgatacttattcttgcgctaaattgtagtcaggggcaacgctatctggaactggctgaacagcgtcaggctaataaatcatttatttacggatggatgaaggaacgtgttaaactgtaa

SEQ ID NO: 395656 - DNA, 144 bp, Salmonella enterica
atgccaataactaacacgtctccagaaaatatattaaaatatttacatgcggccggtactggtacgaaagaagcgatgaaaaattcaacttcaccacgcggtatactggaatggcttgtcaattttttacctgtggtggagtaa

SEQ ID NO: 395657 - DNA, 2085 bp, Salmonella enterica
gtggccgctgaacttgatttcacattaagcctggttgataagctgacaaagcccttaaaacaggcgcagtcggctttaaccggctttgctgataaaacagaggccagctttaaacgcatcggcgggggcgcgattgccctttggggcgtcaataaggcgctgatgggcatgatgcgccccgcctacgatttgcaggacgccctggatgattcggtcggttcaggttttgccgccgcaggactggataaactcagaaaggccgcgaatgatttcgcgatcgactacggtcgctcgtcgctggagttcgtcaaaaacagcaccatgatccgccgcagcattggcggtattaccgataacgacctgcccgcctacacccacgccgcaagcgtgctcggcgttgccatgcgcaccggcacagaagacgccgttaactatctgtcgcacatgactaacctcatgccgcaaatggtcaaaaaaatgggtagcgtcgattttgcgggcgcgatggccggactggctacccagatgaaaaacagcttcaacagttccctcagcgatatcagcaccatgattgagcagtcgaaaggcacaggggccgcatttggcgtgtcgctggccgagcagctcggcacgatgggaacagcaagccaggtgttagggagcggagccagcgcaggctacgatcagttattgcgccatctcggtagcggtgacgccaccaaagcaaccggcattaactttcgtgactcacaggggcagatactgccgatcatgtccatcctggacaagctcaaagccaaatacggcgagaatatcgacggcaacgcccgcgtacaggccgcaatggaaaaagcctttggcaagggtgcggcggttatccgggcgctgtggaacaacacggacggactgagtcagagcattaacgcgctgggtaaaaatccggggttaaaagccgtcgaagaccaggcaaaaaaaaccgtcgtaccgtgggaacagttcagcgccattctggaggcgatacgcgccgaaatcagcctgcgaatgctaccgacattcgggccgttctttgacatgctggtagattgcggcaaagaatttgttaactggcttcaggctttccccaaccttgcccgctggattggctatatatcggtaagcctgctgggtatcgccgcagccggggcaataactaacgtagtaatggggctgtttggcttcatcatgaccggacttagcgggattgctggcgtactgaaaggcgcatggaaagggttgatattcaccctggatttattgcgcccttccctgctttcaacccgtcttggcctgatggggctgtggattcaggaaaaggccgtctgggtatggtcaaaactggtcgccctttgggcggggatctgcaaagtggcaatcgccgcctggaacgtggtgttacgcacctgtaccgttgccatgcgtctgtttggtattgccgccaggtttgcaggtatggggctgggctttttactctctccgattggtttaattctgctcgccattgccgcgctggccgtggggatctatttcgccatcaaatactgggacaacattaaagccgccatcatggacacggaagcgtttcatgtcctgcaaaaagtcattaacgccgtggtgggctggtttgatgacgcctggagcagtattaaggccggatgggacaagctgaccaactggtttaaaaacttctcgctggccgacacgttcggcaacatcacagccgggattggcaagctgtttgacggtatctggaaatccattaagagcacttttaccggaacgtggaactggatagtagagaagctgaacaaaatccccggcgtcaatatcagcaccgcacaacagaccgtcgccccgacacctgccccggatcttatcaccggcaaccgtagcgccgccattcagggcgggccggtcagtcaccagataagcaacaaccggggcgataaagtcaccaataacaacgttaagcaggatatcacgctacacgttgacaccctgccgacgccgggacaactggcggaatataacgaactggcggcggggtga

SEQ ID NO: 395658 - DNA, 348 bp, Salmonella enterica
atgaacggcgaggcgcacacctgggcggactggtggctgatggtgaaaagctggctacatggtgatattccgctgaacagtctgatgatgaccgccgctatcgccgcgctcagggtgctttataccggaagtagctggcgtcgctttttactggaagtgccgttgtgctgcctgctcgcggtcgccgccttcaccattatcaaaccgatccacgtcacctggttatcagaagactgggaagactggcgcgtaggtatcggtgcagcaatcggttttatcggcgttgagcatatccgggcgctcggcgtgatcattacaaggaaatttgcagggaaaaatgacgaatga

SEQ ID NO: 395659 - DNA, 462 bp, Salmonella enterica
atgaacaccgaacgcattagcggcatgagctttgatgtgtcattcaatggccggattgttcacgttaagaccgccaccctggatattaccgacaacaccaaagccattcaggaacgcggcgtacccaacggctgggtgcgcggcgacgtggaggctggcggggaaattgaggtcgatactgtcaactttcagttactggaagaagccgcccgcgaagcgggaagctggcgcgatatcgaagccgccgattttctcttctttgcgcaggctgcaaagagtgaactcaaaatcgaagccttcggctgcaagctggtgatcagtaacctgcttaacctggacaccaaaggcggcgacgccatgagccacaaaatcaagttcatggtgacgtcgccggactttgtgaaaattgacggcatccctgttctgtcaccgcgtgacgttcgcgatctgatggaacagtaa

SEQ ID NO: 395660 - DNA, 1068 bp, Salmonella enterica
atggccgcacagatgttatccacaaaagcaatgaagtatctgcacaaatacgcgctgagtatcgcgaaagctaacggcacgttcacagcagagaacttcttcactatcgcaccaccgcgcgaaacaatgctgcgtgacgctatcatgcagaacgccgccccgttcctggcgcttattaacgtcatgctcgttgagcagcttgtaggccaggtaatcagcaccggcaatccggggttgttcactggtcgcaggactgacggacgttttaacaaagcgctcggtatcagcggtaacgaataccgcctctatgaggtggattctggttcattcctggactatgccaccctgaccgcatgggcgaatgccggcaccgaaaacgagttctacaaccgtcttcaggcattcttttacaagtccattgccgccgacctgttacgcgtggcctttaacggtacgcatgccgcagaaggcgacaccgacccgaaaacgcacccgaacggcgaagacgtacacccgggctggcaccagatcgtcaaggagcgcagcccgaaacaaatcattaccgacaagataatcctgaaccgtgaatcgggagcctcagactttaagtcggttgacagcatcgtggcagacattatctacacctgcattccgccagagtttcgccaggaccctgatctggttgtgctggtatcgcagaacgtcatcgccgccgacgcagtgagcatgatgaaccgcatcgaccgcccaagcgaaaaagtcgccgcccagctcatgaaccgagaaatagccggtcgcaaggcgtacaccccgccgtatatgccggataaccgcgttgtcgtcaccaccctgcacaacctgcatatgtacttccagagcggtacacagcagcgcaaatcgggctggatcgacgaccgcaagcgcttcgaaaacaactggttgcgtatgcagtgctgcgcggtcgagtacgacgaactttacggcgcattcgacaacattgaactggcgggcctgccggagccgaaacacgccccggacgccgaagcccagccgcaagcggcagcgtaa

SEQ ID NO: 395661 - DNA, 561 bp, Salmonella enterica
atgctgaccatgaaacctatgagaacgccagggaaatgcccggcacatcgccgaccctggacagcagaagaagatgagttactgataaacctgcatggaaagaagacagcagcagaaatggcgaaacttcttccggcgccaggaagatctgtttatgccgttaaaaccagactaagcgacttacgtgagcgttttcctgatctgatcggttacatcagacatttgtggacgcaggaacaagacaacttcctccgcaagaatcgccacacgatgaccgcaaaagaaatcggcaatcgactgacaccgcgccggacagaaagcgcggtcatgagcagggcaatttatcttggtatcagcctccgtaaatgcggggataacctgcctcagacacgccacaaagacaaagatgttaacttcatccgcgagttgcgtgacagatacggtctgacattccctgagattggtgaaaagtttggcctcagtaaagacacaaccaaacggctgtactactgccgccataccgccattgacgccatcgcaagggagtatctcccgcgatga

SEQ ID NO: 395662 - DNA, 936 bp, Salmonella enterica
atgaaaaagcccgctttcatccgttccccgctcaaatgggcgggcggtaaatacaatgccctgccgcaactgtttgagcacttaccccgcgaaggtgagtgcctgatagagccgtttgttggtagtggcacggtatttctgaacacgaactacaggcgctacgtgttgtgcgacagcaacccggcgctgattaactttttacacaccctgacgtatcacaccggggaggtgatttggtgggctggcgctcttttctcggtatatgacgacaaagaggattattacgagcgtcgtaaattctttaacaaaatcaaaaaatatccccggcttgtcagtgaccgggtttattgggcggcgttgttcctgtatctcaaccaccactgcttcaacggactgttccgcaccaatagtaaaggtgagctcaatgtaccgttcggcaagcgcaaaaaagccccgcgtctccctgaaaaggaaatgcgccgctttgctctaaaagcccgccagacaaaaaccaaatttatctgttgtgatttcaggctggcccttaatccctggcttgtgcctgaattagaagacgccgttatttactgcgatccaccatacatccctgccagcaaaacagccgatttcactcactacaacggtgagcgttttactcgtcgcgatcatgagcatctggttaagtacctgacaaataaccagccacctttcgcaaaagttgttatttccaacagcgatactcccctgacacgcgaaatctacgcgccgtttaagctccacgaactggaagttagacgatccattagtgccagcaccgaaggccgtaaaaaagtccccgaagtgatcggcgtactggatggccgggaaaggtatgtaagcgcaccacgccaggagggaaaggcattcgccgccgcaatggaggccgcatcatgctga

SEQ ID NO: 395663 - DNA, 546 bp, Salmonella enterica
atgctacagatgaaatttaagccccgctttattgaagcattccgcagcggccagaaaataacgtctctacgtcagatgaagttccgttgcttttcatctgacaggccagacccacgtgatgggaaatacagtttttatcatatcgataagctaaatagcgacataacgatccccgactacagcgcgggcgaatcaatgatactcgacaaaggaacaccctacacccgcgtgtcaaagcttgatggcctgctgaaaaggcaaccctaccagccctcaagcaatatcaccctggtcactgaaatcgaaggcggcgaaatagcgccgttcgccatcgctttcatcaaggacatttcggttatcaagggcgacaagatagaagatatcgacgctatccatgacggttttaaccctgaccatgatccgctcgccgaactctacgcattcatgcgggatatctatcccaacacagacctgagaagccagatgtactggcggtacaccttcaccaacgtgcagatgttgccgcagtggggaggtgaagcatga

SEQ ID NO: 395664 - DNA, 216 bp, Salmonella enterica
atgaacacattacccatagaagcatcatatttattgctcattggttcaatagcgctgaccgtgtttattgtccagcttccgctattgattaaagactatctccataagcgccgccgtaaaaaagaaatgagcaaaatcatttttgttagtgcggatgctttttacgcacgcaatagcgaaacaattttaacggataataaaccacccaaaaaataa

SEQ ID NO: 395665 - DNA, 222 bp, Salmonella enterica
atgaccagaaacacaacaatgaaagtaaacgccgctatcaggtggcactcacaaccagaacataatgaaatgctaaagaaaagcctggaatccataggcgttcaatgttgtgacgaaaacaaagagggtgatgtttatgaaattgccctgttaattgattttgttaacaaaggcaagaaattaaaagaacttaaattaccactaccggggtttgcaatatga

SEQ ID NO: 395666 - DNA, 312 bp, Salmonella enterica
atgcgtcaggaacttgaagataaaattgtttacctctccagtcttagttttgataatgccgcccctgttgagaaccgaaatccttactatggtgatgtaatgagcgatatgttcattgcatcaataatttctaatctcgacaaagtaacggcttcgcgagttgttgaagatatgcgaaaacttgttgatatatcagcaatgagtactcgtaccgggctgtctgggtatcctgtatatatcaggcatcgccttcacggtattagcttgatggctgaaacgctgcgtaccagtcacgaacaagacgatcaataa

SEQ ID NO: 395667 - DNA, 936 bp, Salmonella enterica
atgaatatatcaattgaaaaggtgttacttgctcgcactatcgccaaaaaaagacagtttgaaaatattgtggaaaatttcaaatgcacaaatttcccgcgaatcatggaacccaaaacccgtagcaacgataaacatagagaaattataggtgttgtcagtcatgttgaattatcagaagttggctgcatgactgagctatatggaacgttgaactttaatgaatgctacgaatgggaagatattatcgcgatacttagggagttcccttacccgttcactactatcagaaacgcgcaaggccgcgcatcatgcgagatactacatgaagtaacatttgttggatcacacgaaagcgacattccggttgattctgtaaactggcgggattgcgtttgtcacggaagagaagaatacgcagaacacgtactaagagcgaaagtattaaaaaatacatccatcacacaaactataagcgtcacctgcgaagaaaaaaaagaaccggttatcactttcgataacgaaggccgggatattggcggcggcattatgcgctacagacattataaaaacggcgcattaatgggttatgttgttgtgaaagtgactgaatttggcggcaatggttgccaccaggaatcgttagatattttagagaagtttacagaacatcaacgcggtaaacaggtaagcgtaactcataacaaaaaacaacactgcgacgcaataaaggttgttagttcttttattccggcaataaacaaaaaatgcaaagatgaaaaatcaatcgatttaattcgcaggattatatctgtagttggtgcaagcgataattgccgccaggatgaaatcgaggcggcttataaaatgagtctggaagaacttattgatcgtcttgttcgtgactggtacgcagcgtttcagccatcaagctaa

SEQ ID NO: 395668 - DNA, 300 bp, Salmonella enterica
atgtcaagcgagtatgcagaaaaacttaaagagataagagaagcggaggggctatctcaagtgcagctatctaaagagataggcattcctgttggtacgatacgaaattatgaaaccgggcagaaagatgttggtttgttaactgtaagcaagtttacaaaacacccacggttcaaaaaatacacaacatggttaatgaatggtgatactaacgaagctgcgggacaggtaagccccgctctctcccctgatgggctagacagcacatcatcccgccgaaacgcaaagaaggctggttaa

SEQ ID NO: 395669 - DNA, 696 bp, Salmonella enterica
atgtatttaatgatgcctttgcatatgcacatagactatggttttggtgcaacagcagaacagtttaaagaatcagcagatatattatcggcttctgaatccgttaaagatttaggtatgccagtcaattatcttagacgacatgcaatcgaactttatctaaaatctttaatttatgttttgcaccgaaaatttaaaatcccattcagtagtggcggcactcttgaaaaaccaaagattaaagtgttgggaaaggattatgaattagaaaacatgcatgacatcagattattaaccatgtatttaatggatcagcacaataagttaataccttgtttttttcacttaggaataggtgtaattgaaaaggatattttacataagatcaataagataaattccatagattctaagagtactttttttcgttatcctaaaacgggagatcacatacaggatatgagaaagtcatctgtaaggcaaaaaagtacggaagatattataaactcgatgaacaaaaaagaagggaagtatgtgaaggctttgctattagttgatgacgaggataacatagttgactcatttgacattgatgtagatgtatttccagatttaaataaaaatcttatatatctatgtgattattttcatgatcttcatgcggcatacagatggggtatatgtgatggcaggtga

SEQ ID NO: 395670 - DNA, 597 bp, Salmonella enterica
atgagaataaaaagagaaacagtcttaattgcgaatgataactttacaaattcatcggccattatacatctaaaaaatgatataaataatgctattgaaaaagctgtatggcctcaaggtaatgatcgtttctcaattaaccctacatacaaaggaaatggagtaaaacctataaaacaagaatgtatggctcacttgtatagcaagggttggtttttagagcaaagactaaagatttcctctgaaagtaatgctggtccgattgatgctgtatatcccattacagatcatctttattttgctgtggaatgggagactggaaacatatcttcatcacacagagcattaaataaaatttgtttaggaatattaaatggttcactactcggtggaacattaattttaccttctcgtgaaatgtatccttttctgactgatcggataggaaattatcaggaactatcaccttattttaatgtttggagaaattttaatatagccaatggctacttatcagtcatagaagtagaacatgacgagatagatgtcaatgctcccttaatacctaagggcacagatggacgagcaaaattttag

SEQ ID NO: 395671 - DNA, 891 bp, Salmonella enterica
atgataactgaaattgaattagatgatggttttttacccgacactatatcagaagttataaagagaaatgtgattcactctctaaatgaaataaaaaccattaatgataaattcattatcaatgatagttcattcatgcgaaagcaaagcaacaatcgaataacaccttgtgtaatgaactctgcatcatttatttccagtaaatttcaacataatttaagcttactgcctaattgtttgggtgaaaatagtttaaatcaacaaaggatagatgggctaataaaagtcgaatataatggatttgcgtatagaataaaagataaaaataaaatactggaagtagcatttaaatatatagagtccaaaaaactccccaataatgtaatatacacattatttcctatgttttatgggatgtatgtagatagattatgttttagcataccagaacttaatgacatagaacatttattcgatattgagaaggtaaattatcattataaaattggtatcgaatttgaaacaggaaatgttgctagttcttttagagccatcaacaaactgaacaatctcttccacgatggtcatattgacggaggttgcttcattacaagtattgataagagaaactcagccactagaatttggcccgtatcaaatagaaatggttcatttcaagaactaaaaaatagagcctacatatctcaaatatccttaccactaatttgcattggttttgcacctgatgaattttcacaaacagccccatttttagaggcaaatggtgaactttacgaattagagaatacatatcgaagagatcttgaaactaattttgaaatattcactaaaaaagatggattagaatttctaaaggcaccattcaagtaa

SEQ ID NO: 395672 - DNA, 249 bp, Salmonella enterica
atgttgatgaaaataaaaagaaaatgtttcgcaactatgattggcagcagattgcttgtagcaagagtacagaagggattcagtcaaaacgatatccaaaatgctactggtattgatagagcaaccttatcacggatagagaatggtaaacaacacatagccctctatcaattgcttcagatcttatcagttctaaatatggatatagcagagtttcttaaagatatagaggtagataatgataactga

SEQ ID NO: 395673 - DNA, 1257 bp, Salmonella enterica
atgagttattcggatcagttttttaaagctttaggagtagtcgatgtttcggctaagtcttataatgaaattagtaaacttacaaaaataccgactgacagacttaaatattataatcaaagaaatattatgcccagcgggaaggatctgagcatcctttgcgaagaatttaatatatcacctgtgtatttccaattgatgatggggcatatggatatgcatacattggaacttatccaagaaaatgcttctttcatatatgagaaaatactatcgccaaatataaccgttactggtgaaagttcctttgaaaaagattttgaactggtattgcagactaaaaatggtgaactttataatggggattgcttaaaggtttcgaaaaatattgatgctgattctgtggacatgatttttgcagatcctccatttaatttagataaactttatccgtcaaaaatgaatgataatttaaaggaagaagaatatattaaatggactcatgactggttaaatgaatgtattcgcattctaaaacccggtggttcattgttcctatggaatctacctgtgtggaacagtaagatagctaattttttacatggcaggcttaattttaaacactggatagcggtcgatatgaaaaataatatgcctatccagggtaggttatatccctcccattattctcttctttattttatcaaaggtgaaaaggctaatgtttttgagcctgacagattagctgcacagacttgcccaaaatgttttggtgatctaaaagattatggtggatataaaagcaaaatgaatccacttggaattaacctaaccgatgtctggtatgacatcccacctgtaagacataaaaaatataagaaaaggaatggtgctaacgaattaagtataaaagttttagatagggtgatcgaaatggccacaaaagaaggtgatctaatttttgatccatttggaggctcaggtacaacttatgtaatagctgagataaaaaatcgcagatggattggctctgaaattgatgactgcgaaataattaaggagaggtttagcaatctttctgaagataaagaacacttagtcgaggtacgaggtaagcttaattctttgtttccttcgactattaaaagagaaagagagaagcgggggttgtggacagtagaaagtgtaagaatgaaagatgacgaaaaaaaaacagctaacgagcactttggtcttcttcaaaatgaagaaaaatga

SEQ ID NO: 395674 - DNA, 258 bp, Salmonella enterica
atgaaacggctgatgctctccggcaccctgctcctagtctgtatggcagtgatgttttatctggctactgataatacaccgcagattaaccgcagcgacctgctgctctggcgcgtaacgctgtacggcgtgattagcgctgtgggctggcgtctgtatgaccgttttccaccttatcgcccggtcatccgccgcattgcgctgtggattatcgtactgattgtgctcaacgaaatcgtgccggaggtgttccggtga

SEQ ID NO: 395675 - DNA, 1197 bp, Salmonella enterica
atgatggcaaaacctgtcagctatcgttgcaacctgcattgtgaatactgtttttatcttgaaaaggagacgatgctgaatgcgcggaaaagcccggagcatacaatgagcgacagtatgttgcgccgctatatccgtgattacttacgttctcatgccggcgatacggtggattttgcctggcaagggggtgaacctacgctggctggattagatttttatcgtaaggctgtggcataccaacagcaatatgctgaggggaaaacggttaccaatagttttcaaaccaatgcaattgctattaatcgtcaatgggcagacttttttgccgaaaatcgttttctgattggtgtctctgtcgacggaatagcagagatacatgataaataccgtattgctgttaatggtcagccaacctttgagcgtgtcaaaaaatctattgcgttgctacgtgaatacaacgtggattttaatacactaacagtcgtgaacgatcaaaactatgataaaggacgggagacttaccaggcgctcaaagcattaggttccacttttttacagtttattcccatcgtagaagttgatgcccgttgtttgactcctgcaaagggtcattactcaccaccagcagatgccgtgttatcaccttttagcgttccggcagatggttacgggcattttatgaatgcggtatttgatgcctgggtgaaagaagatgttggttcaatctatatacgtgagtttgacagtttactgggtacctggatgggatatccggcatcaacctgtgtgcaagctactacgtgcggtcaggcgctgatcattgaaactaacggcgatatttacagctgcgatcactatgtctatccggcttatttgttaggtaatattgctaacacatcgctggtaaaattggctacatcacgccagcaacagcgttttgggaatgcaaaacaggaaaaattgacccaaatgtgtcagcagtgcgaggtcaaagctctgtgtcagggaggatgtccgaaacatcgtatcgtcccacaagcgggagaaaagcataagcacaattatctgtgcgcttcttacaagcatttcttctatcacaccgcaccagtcatgcaggccatgagcaagattattcagagtggcggcgtggcggctgacattatgccgttactgaataaatttaatagccattaa

SEQ ID NO: 395676 - DNA, 174 bp, Salmonella enterica
atggttgccagaaacaaaagacattcgcggcgcattattcgttcgttgcagcgttccagtctcggttatttttttcaaaaactgtccgacagcgcagatacatctgagtatgtttcagtgacgtcagatacaacatcgttgctaattcatctggtgccagcaaaaggcggttaa

SEQ ID NO: 395677 - DNA, 297 bp, Salmonella enterica
atgtggacccattgcccggcactggatagagtagtggggttgatgatgaaaaaagtgatattgcctgcggatacagcacagtatacgggactggtgaaaaatgaaatttccctgctgcgaacaaagatgggcagtgactgcattacgctgaactaccgtatggccaggattaaccccaatccggtactggtgattgatttttcagcgaccggggacgattgtaccccctgcgttatgatctgtcggcgggaacatctctgcaaaattcacggcgtctgtcgaaaattctgtttctga

SEQ ID NO: 395678 - DNA, 291 bp, Salmonella enterica
atgccggaagaaaagcgtaaaaccccgacgttacctgatgatgagattgcccggaagctggaggtcgggaagctgtggcggcgggcggtctgccgttggcgcagtgtcctcatcgaaacggaagatgcccatgttgcagaacagatcgtacagcatatagcctggtgcaggcagcaggttccaccccggcgtccgggtacgctgatactgacagcgaatgacctgcgtcatattgacagggtcgcccggaagctgggatgtggacccattgcccggcactggatagagtag

SEQ ID NO: 395679 - DNA, 258 bp, Salmonella enterica
atgagtaaaaatatagtaaaacgttcctgcaccgcaggtattcctgactttataccacgtcagaaaggccagaaaaatcaggtacagcagaaagaagatatgtggcctgaaattaatccgtggaatgtaatgttctctgcacttggtggattagcaatttttgcattatcaaattcaagaaataaatatttagaaagtgttgaatgggattatgccactcatcaatatgaaaacaaataccgtgaataccggaattga

SEQ ID NO: 395680 - DNA, 423 bp, Salmonella enterica
gtgtcccgtaatctgattattcccccgttgttactgagcgtactgttgctgcccatgctgtcccgggcggtgatggtagtgttcaccgaccatgcccacccgccgaccggggtaaccggtgatacccgcgtggtctggctggatgcgccggaacaattacagcagtcgatgtttggcagtctgacatcagaccccggagaagcagaacgccgggcgcagacggtgatccactctgcgggctggcagcagaaacagactgaactggctcaggcttaccgggggttgctgcaggcgtggtctctgggactgaaaaaatacccggccgtggtgtctgacgaccagtacgtggtttatggcactgccgatgtggtggtggccgaaggactgttccacagtcacaggacgcgggagggggtgcgatga

SEQ ID NO: 395681 - DNA, 231 bp, Salmonella enterica
atgaaaatgaggctggccgtcgccatattgctggcttccgcgggcattctcactttcactatcgttgcagaccagagcgcgcagccccggcacaaaaaaatacaaccagcctctttaccactgagttcatgtacccaattcgatggccagtcgttgattttcccgatcacttcgcacaaccagccctctggttccacgccgttcaattttaaggtatccagcaggctgtag

SEQ ID NO: 395682 - DNA, 615 bp, Salmonella enterica
gtgagccaactgcttcatttacgctgtgcttcccatgaactcccggacttttcccggctactgaaagagagtggagcggaatctctgtcggtcagaggtctgacgcgagaacagctgcaacaccggacggttcttctgattgaagcgcatatcgatcagcgggcgctcatggcctggtgcgaggagctggaggagcatctggtggcgggagggctcatcgtatttaacggtcatctggcctacccgctgttttacggccttgaactatttcgggttgcagcaagccggaggcgtgacgatctggttctggagaaggtgcatgaacacccggtgtttgccgatgtggatagcgagcacctctcctttcgtcgaggtgtcgccgggttttatgccaggggtggcaacccacctccttcaggggccacagttatccatcgtctgaaaaaagacggcacgccggttgattgggtctggagacgcccgcagggcggcgtcattctgatgcacagtggcaacaatatgtggctgttccagaacgatggcaccagcgcatcacgcatcgcgccacaactattaacatggatgctggaatatattgccagcgctcaacggtaa

SEQ ID NO: 395683 - DNA, 1098 bp, Salmonella enterica
atgaaaaaaacatcgtccattctgctgctggcctgctttggctggctatcggcgacgaagtctgataccgccccgcccgctatgcgggtgaccgaccaaaaccagcaacaggtggttattacgcaaccgccgcaacgtatcattaccttcgtcattccactggcgtccaccattatggcgattgacggcggtccggaacggctggtcggcatgaaccgcgcaagcgtcagcgatgtgacggaagggttgctgggggaaatctacccggcggcgaaaaatattgctgctgatattgccggcgacggttttgcgcccaacgtagaggccgtcgccgcagcccgaccggatgtggtattccagtggggcgatcggggagatgcgatagttgccccgctcaggcagttggggctgccggtggtcacggtcaactacggcgacacgcggctcgcccgccactggtttacgctggctggcgacgtgttgggaaagcccgggcgcgggcgtcaactggcccaatggtttgacgacgaaattaccgccgtggagcggctcgccgccacagtctcgccagacgagcgtcccggagtggtttatctttaccgggtgcgggcaggtctacaggtcgcagggaaaggcaccagtatggacagcgacattcgccgtaccggcggcaacaatatggcgcagtctctgcctggctttgttaccgtcgacgtagaacagttgctgcaatggaacccgcaggtcattttgctcaataacttcgaagcaggattgaccccggcggatctcctgaacgatccccgactggcggcaatcgacgcgattaagaccagacgggtttactcctatccccgcggtggctttcgctgggaacctcccagtcaggaatccccactgacgcagcactggctgctcaccctgttccatccccatatggcgcagggaaattttcgcacccgcgtgaaggaggcgtatcagtttatctatcactataccttaagtgaagagcagctcgaccgcatcctgaaactcccggtaaacggcgacagcctgaactattgcgctcagttttgccgtaaacagggtcagcaatga

SEQ ID NO: 395684 - DNA, 273 bp, Salmonella enterica
atgagcattttgactaaaaaggatttatggtgtgttttcgtaaaccagttttctattcgcagttgtaacaatttcgaacgtcaacaggctgccggttatactcaggctatgttacccattatcaggaaatgttatccagataagtcacttcaaaaaaaagccatggaacgccatatggaactgtttttgactcatgatatggggtctgcagtatgtattggtgtctcagctgcgatggaagaacgtatagcacagtccggagatatctcctaa

SEQ ID NO: 395685 - DNA, 240 bp, Salmonella enterica
atggccgttgaactggcaaagaatacagctaatatatatctcgaaacgtctgggcagtatgacagttggttgttacagaaagtaatagatgaagttgatagtaataaaattcttttcggtacagactggccttataagtatcattcaattgaactggaaaaatttaaatatttaaatatcaataaagtcaccaatgataaaatattttgcgaaaatgcacggagattgtggagattatga

SEQ ID NO: 395686 - DNA, 192 bp, Salmonella enterica
atgattcttattctgtgggaaagtgggcaggacgcgtggggggggcaaccctgtgggcagaagccgtacctgtccacagggttgtccatgccctttaagcgtcattcaccgcgcagcggtgatgtccacttatccactgtttctgatttcacgcagggaggcgacggggcatcacgcgccgtttcccattga

SEQ ID NO: 395687 - DNA, 216 bp, Salmonella enterica
atgaatgtgatgttgtgggtgtggattttagcgccctgtttgctggcctttatctgcgtgggtattgcctttgggctggcagagatattgcggatgaggaaggtattgctgcggatgtgcctggcgacggagcagttgctgtcaatgctgcgggccgggctcatacaacactgtttcccggtcagaccacaatgccgccaggagagctcccggtga

SEQ ID NO: 395688 - DNA, 1221 bp, Salmonella enterica
atgctggccggatgtacgcaatcaccggcggtatcttctgcccatgatgcggcattcagcggcagccttaaaccggctatgccggcagatatctggcagggttcaccggaggtgacccgcgaaggacgctacacgctggtcagcgtgaaaagtgctgatgcccagcgtgagcccctgaatcagctgattgatatcaccatgccggggtcgctggtaaacagtgtgggggacggctttcgttacctgctgttccagtccggctattccctgtgtggtcgttacggtgctgacttttcggagctgctgaaccggccactgccggccatccagcggcgtctggggcctgtccgtctgagcgaagcgctgcaggtggtggcgggaccggcctggcgcatgaccgtggatgaagtgaaccgtgaggtctgctttgtgctgcgggatgcttatctggtacaggcacgtccggcgtcctcacaggttacagctgcgcaggccgtatctgcctccgctgcgggagtatcttctgccggtgcgcagacgcgtcagagtgagacgcatcctcttccggcggtgccggtactcacggcttccggtacggggggcaagggcacagtgaaaactgcgccagtgtcgacgtcgtcttccactgcggcaataaaccagatggtcacgacaggcgggcacgccactgcttccccgttgctgacaccggcgacaacagacaacaaatcttcatccgctgcgattgcagcctcagcgacatctcaggccaccccggccccggccgttgccgaaaccgggcgtaaccccttcagcagaaaggacctgagcggcaaaaccaccgcacccacgtctgtcgtatcaacggcgtcaccagcccccgcacctgcattagccaccccggcccggaaactgatcggcaccccggtgaaggcgctgccgtccggtctggaatggaaggcggctgccggtatcaccctgcaggagtcactgaccgcctgggcggagaaggccgactgcccgaacggcggtcactgggtggttatctggcagacccctgtggattaccgcattgaggcgccactgacattccgcggcggttttgaatcggcgctggatcaggtgtttgacctgtaccgtccggctgaaaaacgcctctatgcagaagcgaaccgggcgcagtgcctggtgtcggtgactggccggccggtggaccgctga

SEQ ID NO: 395689 - DNA, 543 bp, Salmonella enterica
atgaatgctagcgagattttcgtttcagtcgatattgaaacatccggcccggtcccgggattatttagtctgctttccattggggcctgtctggtgcatgcgcccgacgtgcgtttttatgccgagttgaagcctgactgcactggctttgatcctgaggcgctggcagtgacgggatttaaccttcaggcactggctaccaccggcatagcccccgcggacgccatgcttcagttatccacatggctcacaacccaccttcaaccgagccagaagccggtctttacgggactgaatgccccctttgactggtcattcatcaattactacttccataaatatacggggaacaacccatttggcttcagtgcattagatattaaagcttactttatgggggcaacaggctgtacgtggtctgagaccaaatcatcaatgatgacacagcgtttatctgccaaaggaagacccagccataatgctctggatgatgcattatttcaggcagagctttttgcgatgatgcaaaataaagggtcttga

SEQ ID NO: 395690 - DNA, 498 bp, Salmonella enterica
atgaatgaaatagcatggcgctgggcctggccagatatgaatgcggagctgcaggttgggcggcaggtctctgagatgttcggtcactaccggcagtcacagggagaaaatgagcgaggcgggcagctgtttgtcgatcccgccgatcccggcggcattgtactgtgtcatgcttcagcgccacatcctgcggaccgcgctggcagaacgtggctcgaactgaacaacgatcgctgccgcactgaaatcgagaacgcaaacaggaagggattacgcttggttggatactggcatacgcatccgcaggcagttcctcacatctcagggactgacattgccagttttgcgcgattcgcgaggcaaaatgcacgtgatcttccacatcccgtggcggtgattgtcggcacgtcaccatcgagcacaggcattaaagcctggatatttcgggagggcaggtatcaggaggcagtgtatacagcatccttgtcgcggccttaa

SEQ ID NO: 395691 - DNA, 1794 bp, Salmonella enterica
atgttgcacctgtcgggcgactcggctgatatgaaggatgagatgatacaacgcggcatttccgcccttaaagactgtctgggcgcggacaatgcttcggctctactcaggcccgctgaactgcgggtcggtgaggcggccgccttttattttcctttacccgttgattacactggccttgagcgaagactacggattggttttcccaacgatttcccgtctgaatcccctagccttcaggttgaaccttcaccgtggttagtctggccccatgccatggcgtccgggttgtgtctccatggattcagggaaaagcccgttacgggctcgcctgagaaaattgttcaggacagcttatcccgttttgcgagcattgtgtctttttctctggaaaacgcagatcctgcacggcggaaaacggagtttcagaatgaaatttccacttactggctctggcagcttaaacgatcggcacgtaacctgattcttttgggggagcctgaatcggattcagttttgtatgttgtaagcgatccgaggtataccggtcatactggcctcaacccggtatgggtttcgtctgacaagaacgctatccgccagcatttcagacgtgccactggccgttcggttgtgataagaagcccccatgaagcaggtttctttgtcaaactgacgtctttccctggcattaaggtgcctgaacctcacgcgtttctcgaatggcttgctccccatatttctgaagaatccctggccgcgatgtctaaatggtcagaaaagagtagtgctttgctttcccgatgggttgtcatggcattaccgggtggggatggggcggcaagatttactgttaacctgtgcaccagaaagaaggaaacagaccgtacacatttttacggcctgagatcctcacgccgtcagtccgggttaaagaaagaaggacctccggccagtattctgtcatcgcgtgtgaacattattgatcgtggagcatttttttcacgggatcgaagtaacacagcaaaaacacttgagaactcgcatgttgtctttgtcggtgtagggtcgctgggatctgctgtgagtattcaactcgccaaggccggtctgggcaggctgacccttatcgatcctgacagactggagtcacccaatctggggcggcatatgctgggtgctgaggatttaggcaaatttaagtctcaggccatgcgccatcgactgcttcaggatctgcctgtgcttgatgtcaccgcgctggatacatacatcgaatgggttatgggtcaaaaacccgatattttcgaggatgttgatctggttattatcacgacagcggactgggaatcagagtctgccctctgggaaaagaaagcctccggagcgaaatgggggctgatacaggcctggagtgagccgcatacacttgtcgggcatgcactgatcgcacctgaaggccgctttgatgcaagatatctttttagcgatagaggtgacttcaggcaccggtttaccgactggccggatgggggcgttgtgcctcttcctgcctgtggtgaaagttttataccgggaggctcggcgggaatgaatggtgttgcaacaatggtcactcaggccgcaatacgttacctgacgactgtaggggatgtcactcaatggcattccagtgtgtatcgccctgatgaggccggagtgttggggggacgctatacgggacctgtacttcctgaaggagttgtccagagtgtttttgaacgtaactggccgaaacccgggcaaaacgcatga

SEQ ID NO: 395692 - DNA, 1248 bp, Salmonella enterica
atgagtaacgaacagactaaacaccgcagctgggagtattttcttctccgtgcagcccgaaaaatttcgttatcagcagctcagtacagcgttattgatgctcgctactctcagctggaaaaaattctttctgctgccgatgatcccctgctggcggatgcccatatttttccccagggttctatgcgtcttcagacaacgattaacccggtgcctggggcgccagcagatctcgggacaattgatgccgatgcgattgtctggttgccccatgccagagggatcgatgcccggactgtattagaggtcattgaacgtcgtttccaggagggcagtagggttcaggaggatattcaacaacttcgtcgcggtgtcaggattgtttacgccgatgaaaatccgggtttccacattgatgtcacacctgcacgtccctgccatcataatgagcaaagcgacggactgggcatgctcgaagtacccgacagggagcacggctggaaggcaagcagtcccattccttatgcagactggctgcatgatgcgtcaaagcaggacattatgcttgaacatgttgttgagtttaataaaagtcatgcagtaatggactctgcgacccaggccccgctgcctgaatataaagaatatcaaaaagatgatccgttacgtgcgagcattaaactgatgaaaaggcacagggatgaatgggcgatcaggacgaaaagtgaaagataccggcctatttcggcagttatcaccacgcttgcgactcacgcttatctggatgttgtcgcgcagtcagaatataccgccttcaccccgcttcaggctatcctagcaatcgtgaacaggatgcctgaccatattcatcgttacagtaatgagtattacgtctgcaatcctgaagataacggcgagaattttgcggaaaaatggaatcgtccggatgaaggttataaatacgttgatgcctttaataaatggcatgcgagtgcccgttcggcgctgacgctggggctcgacagccacgcgtcgacagaaacctttgcgaaggcggtccaggagcagttcggtattggtccgacattcgttcgcgaagttaacgagagcattccggcaaactggacgatgcccgggcggcaagatggtgtgacacgaaactctgtcgcaatgggggctctgttcgggagttcagtcagcagtaaccagtctcaggcaaatgttgcacctgtcgggcgactcggctga

SEQ ID NO: 395693 - DNA, 1176 bp, Salmonella enterica
gtgaatgcgaaaaaaaaggcggatgattcgagtgggcgttttaacactagccctgaagtgaaaattctggtctggatccgtgcagcgggtcattgtgaactctgcggaaccgatctgacccatgattttcgtatcggtacgccgatgaaatggggagaagtggcccatattcttcctgccagcccgaaaggccccaggggaaacgccacacacagcgaagaagaggccctggcactgacgaatgacagcgagaatcttatgctactgtgtccgggatgccatgaccgggttgatcgtgacggcgataattatcctgaagacgatcttagcggacttcactctgcctgcctgaccagaattcgcttagcggcttccacgcccggggaggaacgcgccataccggttatcgttcaaagccagcatcatcagactctggttgcaattccggcgcaggcccttcttaccgccatgtctgcagaagggcttacggcacagtgccatccggttacggttgtgttccctgagcccagttcacggggaagggatgcgggttactggcaggcgattaaggatttaatcactgaaaaactcgaggccgggcttgcccgccgcggggggcaatttggcgataagccggctctggccatggttgggcttgcggatattccggcgttgtttttcctcggccagaccattggcgaccgctataaacgctttcagtattcatttaacagggaacatatattgcgctggccggatacagatgccctgccgccggcgtttatctcttctgaacttccgcaaggtgaggggccagttgctctggtgctgtctctttccgcagcggtaccgcgaggcgatgttaccgccgcactgccgggtgcccgaattgtagaattcactgtacctgaacccagctacgccatggtgacaaaccgcagggtcatccatgcgttcagagatgaactacagaagctgctcagtcagttagaagccaccacgacccaggccattcatgtttttgccgcggtgcctgctgcgctggccattgaatttggggctttgctgacgactcagcatcagcatccctacatcatctttgaccgtgacaaaaataacgcaaaccagtttcgccccatgcttagcatcggatgtacagaggagcaacgtccatga

SEQ ID NO: 395694 - DNA, 879 bp, Salmonella enterica
gtgaaactgaaaatgcaggatttgaggctgtttaatctcgtgtttgagagcgatcctggctggatacttgatttctctaaccgcaccttgtctgctttttttgatgaagaactgaacattgatattgatgataaacgttatcaggaagaggggacatcaaaagccaaacgagttagatgcttgctgaaacagactgatcgtgagaccgctctgcgggttcttggcgctctctggcagtataaaacagaatccatgcctgaacaggctgaacaaagccgtaatgactatcttgcactgatttcccgcttagaaaacgctgacaccaatgaagccaaaggcgtaaagcctgtccaggcatggcatggtgttgactggccttcacttatcgctgaaatgaacgagatgaaatctctgccgccacaactacgtggttttcggtttgaaacttggcttgctgaactgttcagtatctttaagcttgctccccgttcgtctttccgaaatacaggcgaacagattgacggaagtttccgactgaatgatgaattttacctgatggaggcaaaatggcatcagaaaagaacgtcggctgccgatctccatgtatttgaaggaaagctcagtaccaaggcaacctggacacgcggcgtttttatcagttggatgggatttacgcctgaaggtctgacggcttttggtaaagggaagcgggttatctgtgtcagtggttatgatctttaccactcactgagtcatgggatccctttgcccgaccttctggacgctaaaacccggcacgccgctgaaacgggagagccctatgctgagttcgaccgactatatgcactgaagaacaaacagttcggcacgctgaaataa

SEQ ID NO: 395695 - DNA, 294 bp, Salmonella enterica
atgcttttggcagggagtatatttttactgacgctgatactggtgatctggcaacccagaggcttgagcattggctggagtgcgagtatcggggctgtgctggcgctggtaaccggtgtcatccatatcaatgatattcccgttgtctggaatatcgtctggacgcgacagcggcatttattgcggtcattatcatcagtctgctactcgatgaggccggtttctttgagtggaccgcactgcacgtctcccgctggggtaacgggcgtggtcgcctgctgttttcctggatag

SEQ ID NO: 395696 - DNA, 1521 bp, Salmonella enterica
atgaaaattataaaaggattctctttattagagttaatactggcattagggatcggaactgcaataagttttataaaatttcaggatatgaaagccgagcaagaaaatattattgctcaggctgttggagaacaaattaaacaaatcggagaagcagttaatcgctatattagtatccgttatgataaattatccacactgtcttccagtagtagccagtcaagcgatccgggaccaagagcctgttcagctaatggttgtgaaatcacttttcaaacactgataaatgagggattgttgccaccaagctacacgggtattaatgctaataagtcatcatataagatcttgttaaagcgttcaggaatagtgcctaattatgttatcaatggtttgataacaactgcagttccttggatggagggtaataagacgaggtatgatctattaggtaaagctatgcagtctgcgggtatcgatagtggtatgacgcaatccgcaacgttagcatctggttatagtggttcatggtctgaaaaatcatcaaattatccatctatcaataaaacaggattacttgcttatcgtgtgggatatgattcctcgatgtattctgtgtatctccgtcgtgatgggacattacctatgactggaagtttgaacatgggtaatcaggatattaataatgccagaaatataaccgcagcaggtacaacaacttctgggatattacattcgactggagatacaaccattggaggtaatgctcaggttaatggtgatattaactcaaacaacaccgtttcaggtacgacagtcagctcccgtggagaaacctatactcaaaactggttcagaacattaggtgatggtggcatatacttccaaaaatggggtggtggatggaatatgcctgatgctaatacaatacaggcatatggaggaaaaaatattcgtactgctgctggattatatggtggctatgttaaatcaacaggagatattgatgcttcaggaaacataacatcatcagcaattgtatcaggacaatatcttcagccaacatctgtatcaacagcaggtacttattgtcgctccaatggcttaatgagtaaggatagtcaagggaaactgttaacctgtcagtcaggaaggtggacaagtttatctgactttcctgcagggattccggttccgtggcctacatcaactccgcctgcaggttggatggcctgtaatggtcaagcttttaacagaagtttatacccaatgttagcaagagcttatccttctggatacttaccagatttgagaggtgtgtttattagaggatgggataatggtcgagggttggacagatataggggattattgacttatcagtctgatcagagtgatatggtctacaatccgggtggtcatttaaaagggcatcatagcggaatggcatactattataaaaatggagttgaaatcaggcctaaaaatattgcttttaattatatagttaaagctgaataa

SEQ ID NO: 395697 - DNA, 219 bp, Salmonella enterica
ttgtttccagaatacagagagttgatttcacggataaaaaatgaggatgcccatttttcggtgttgtttcatcggcataatgaactggatcacgaaatcacccgggaggaggctcgaccagctcctgacagtctcctgctgatgaaaatgaaacgggataaattacacctgaaggatgagatgcatcgaattctgagcgcttatctgtccgacaagtaa

SEQ ID NO: 395698 - DNA, 216 bp, Salmonella enterica
atgtccctggcaggaggcgaaagtcttcatgccgcaggtgttcatgcaggtaaccagacgctggatctttggatcaatctgaaaataactttttcccatggttttatttttcccgataaagccggcatcgtgacggatgtgtggggggcttttccatgcttaattaaaattcgggaaaataaaaataagggcttcacaggcgaggtcagcaggtga

SEQ ID NO: 395699 - DNA, 402 bp, Salmonella enterica
atgaaaccacaatatctcagtgtcacgattctgaccggtctgtgttattccttcatgatctccggcgcaatggctgctgataacgggtgcgaatataaacgtcagcgcctggagcatcagattgattatgcgcaggcgcataataaccaccataaggtggcaggcctgcaggaagcacttcgtcaggttaatgaacactgcactgacaaccagttactcaggcgaaaagaaaataaagtcgttgaaaaacaaagaaaggttgcagagcgccagcgggagctggaacaggcccgggcatcaggaaaagcggaaaaaatcgccagtaagcaggcaaaactggatgaagccagggaagaactggcagaggcccgccgcgaacttccccaccgcacagcagagtag

SEQ ID NO: 395700 - DNA, 243 bp, Salmonella enterica
atgaaaatacattacttcagctttatcccgctgtgcctggccgccacgtttccggcttacgcatttaaatcaacggtgcagcaaaccaccggagacctgaggcagcatgaagatcggttgctgagcaaattttacagcgccacgcacgcagatatgcaaaatacccccgtcggaacctgcggtgtcacccccgtaccgggctgtcagtgtgcgtggtgtaccgcattacgaaaagcgaaataa

SEQ ID NO: 395701 - DNA, 324 bp, Salmonella enterica
atgctgatatttaacgcaaaagccttaaagccggtgctgcttgaggcgcgccagaaccactgtggcgtgatgctggtaaaagataatggcgtctacatcatgtctgaaaccggcgaactgaccccgcgggggcgcaaggtggcctgggcgaaaggctgtcatccgcagaaggatgacaactggtgggagaccgcgcgcaccgaagtgggggatgacattggagaatcgctggatttaaccgaaagcatgatgaaccgcattctcaatgaaggaaaaccgctgcacatcacggtcagaggggattcttttttaattgaatgctga

SEQ ID NO: 395702 - DNA, 282 bp, Salmonella enterica
atgtatgaggacattagcattaacagcggcctaaccgtgaagatccagaagcagggagcggatgatctgtttacgccggtctgctttgtggtgaatgtacactataaaaatggtgcgttactcgagtctttcccctgggactgtgaggttgatgatatcaaccgactgaccagcaaagactacggtgaggcgatgagtcaggctgtggcctgggtgcgagagcaaacagatgagccggtgaaagacctgccggtaccacagcagccgagactggctgcataa

SEQ ID NO: 395703 - DNA, 954 bp, Salmonella enterica
atgaataaaagagaagagaaaaagcaggagagcgcggctcgtgtcgcctggatgtattacgtggcgggactaacccagcaggatattgccagtttacttgggttatcacggcaggtggtacagcggttgatctccggtgcccgagaaaccggaatggtcacggtgagtatcaatcatccggtgacacactgcatgaaactggccagcgaattacaggaaaaatataccctgtcgctgtgtcgggtcgttccctcagccggcctggaaaatgaggcgatccagcaaatgctggcagtggaaggagcagacgtgatggcacagtttatcgctgagaataaaccacaggtgtttggagtcggctctggaaggaccttacggtcagtgattgatgctctgccgtggttcgagcgtccgcagcaccagtgcgtgtcaatgattagcgctatcgcccgtgatgattcagggacccgttatgatgtcccactgaaaatggcagagaagatgcagggaaaatatttcttcattcctgcgccactctacgctgacagtccggaagataaaatgatgtggtgccagcatcagttgtatcagcgtgttgtcaagcgggcgctgaatgctgatatcacattcctcggtatcggagaggttggatatggttgtccactgaacgccgagggttttatctctgatgaacaggtaaaagagctggaacagcagcaggtcgtcggtgagatgctcggccatttctttaaccaccggggtgagcgcctgctgggagaactggataacctgctcactagtgtaccgctatgcagccatacgtcccgtaacgtttgtggatttgccggtggtgagaagaaatatcacgcgatccgtgccgcattaaccgggaggtgggtgaacgggttggtgacagatgaggacacggcaataaagttgctgtctcacgattga

SEQ ID NO: 395704 - DNA, 1398 bp, Salmonella enterica
atgtccggtaagaaatccgtgtggatgcatattggcgcaggctcgttccatcgcgcacatcaagcctggtatctgcataccctgatgatgcaaggggatgacagttggagtattgctctgggaaatattcgtgatgatgcctgtgagctgctcagtgcgctggccgagcaaaaaggagagtacgtactggaaaccgttacaccagaaggtgttcggcagtatgaaaccatcaaatccattcgcaaggtgctgaaatgggacaataaaatcagcgaactgatcgcacagggagccaatgcagaaacccgcgtgattgcctttaccgtgaccgagagcggttattacctgacaccggaacatgagttggatatcaggtcatccgatatcagagccgatcttaatgacggtatctgcaccctgtacggcgcgctgacccggatactcagacagcgaattgcacaaaatggtggaccggtgaccctgttaagctgcgacaacctacgccataacggcgaacgtttccgccacggttttctctccttccttcaggctaaaggggaacaggcgttgtatgactgggtgaaacaaaacaccacctcacccaatacgatggtggatcgtattactccacgcccgacgtcagatgttgctgagcgggtactggcagcgacaggcattaaagataccgtgcctgtcatgggagaatcctttattcagtgggtcattgaagatgattttatcaacgaccgtccggcactggaaaaggtcggtgttgaactggtggaatcggtgctgccgtgggaagaggcgaagatccgcattcttaacgccactcacagctgcattgcctgggccggaacgctgatcgacctgaattatatcgatgagagtacaaaacagagcgctatttatcagatggcctgcgattatatcacccgcgatgtgatcccattactgaccccctgcccgctcgatctggagcagtatcgcgatgtggttctagcccgtttcggtaacccgtatatcaaagacaccaaccagcgtgttgccgccgatggcttctcaaaaatacctggaatggtgacgccgacgctgctcggatgttaccagcgtggcacggtaccgtctgcaacagcggtattaccgggactctttttcctcttcctgcgccggtgggccgccggtacgttaccgtacacctaccaggatggcgtgatgtgtccggagacggtgcgggcagtgtttaaggctgaagatccgctgacagtatgggcatcggatgaatcactgtttgcggaactttcccgctcggctgagtttcattctctgctgaaacatacagttacagggcttgagatgtgggtagctcagatgcagacacaaccggcaacagcctga

SEQ ID NO: 395705 - DNA, 1461 bp, Salmonella enterica
atgtacctagggattgatattggcacctcggaactgaaggcgctgttgctggatgagtgcggtgagatagtggggaccgcccatgctgaactgacagtacaacgtccacatcctcaacaggctgagcagaacccgctggactggtggcaggcatgcgggcgtgtagtcagcgaactgcgtcatcagtatccacaacaatgggcggcgatccgcgctattggtctgtcaggccagatgcacggtgcggtactgctggataacgagggcaatgtattgcgcccgtgcattctgtggaatgacacgcgcagcgccgctgaatgtgactggctacgcgttcaccatccggaaatgatgacaatcagcggcaatatgattatgccgggttttaccgcaccgaagctggtgtggttggcgcgtcacgagccggagatattcagacgtgtggcaaaagtgttgctgccaaaagattacctgcgctggcggatgaccggtgagtttgtcagcgatccttccgatgcctcagggactctgtggctggatgtggcgaaacgtgactggtctgatcaactgctggcaatgaccgacctccgacgggatcagatgccggatctggtggaaggcagtgaggtgagcggtatgctgcgcgcatcgctgacaacggaatgggggctgagtccatcggttatcgtggcggggggcggaggtgataacgcggcctcggcggtcggcgttggtgccgtgatgccgggtgatgcgttgatttcacttggcacttccggcgtaatttttgtggttaatgatgtcctgcaggccgatcctgcttcaggtgttcatgccttctgtcatgcattaccaggacgctggcatcagatgagcgtgatgctcagcgcggcagcctgtctgcgctgggtgtgcagtctgctctcggttaccgaaagtcagttaatgacagaaattgcacaactggaagacagcgacctgtgcagggcaccgttgttcctgccctatctttccggagaacgcagtccacacaacgatccacaggccagcggttgtttctttaatctgcgccatgaaaccaatcgcgcactgctgggatatgcggttatcgaaggtgtggcctttggccttgccgacggactgagggtactgagcagtgctcggatcaaccagtgcagcctgaccggaggtggtgcacgcagtcctgtctgggcacaattaattgctgatgtgctggcgattcctgtagtcacgcatccggccagttcatcgggggcgctgggggctgcacggctggcctggttggcagatggtggcacagaagccacagtgtgcctgaaaccccctgtgtcggcacagtacacaccacagccggagcgccgtatctggctttcacagcgactagatctgttcaggttactttatcaacaacagcagatggcacgtaagctgctgccatag

SEQ ID NO: 395706 - DNA, 1281 bp, Salmonella enterica
atgcaatccaaagaatactggcttggtttaccgaaacatctgttgtggggatttgtggccattgccattttcatggcaggtgatggctttgaaatggctttcctgtcaaaacacattacggatatgggctttacgccagcagagtcggctctgctcttcactctgtatggcctggctgcagcactggctgcctgggcctcaggggtcgtggcggagcttatcacgccacaaaaagcgatgaccatcggttttatattatgggtagtcatgcacatgctatttatgtcgctgggtcttggattacgtaactatccattaatgctattgttttacggtatccgcgggctggcctatccgctgtttatctactcgtttatgttgatgctagtacaggtgttaccacgccagcatcttgccgcggcgaccggctggttctgggcgatgtactccattggcattggcgttattggcagctatttgccgagcctgaccattccggcctttggggaaaccggtacgctgtggtttgccatagcctgggtgttaagtggcggccttctggcattcttcagtctgcgacatgtgccggttgatcgttcacgggtaaatctgacaatgcgagacaaggttaaagagctgtcccgagcgacgaccattttatttacgaatcgtgatattttttatgcctgcctgatccgcatcatcaatacgctgtcactgtttgggttcgcaattgttatgccccttctgtttgtggacaggctgggttttaccatttccgaatggctgcaaatttgggccgtatttttctttgtcactatcttcaccaatattttctgggggatcactggcgagtatatcggctggatacgtcaggtacgctggtttggctgtctgggaatggcaatatccagtctgaccttctattatttgcctatatacgtcggacataattttctggtggctctcatccctgcggtcatgttggggatttttgtcgccgcctttgtgcccatgaccgctgtgttccccacactggagccacaccacaaaggggcggcagtgtcaatttataacctctcagcaggaatgagtaactttgttgccccggcgattgcctcagcaatactgccgttctttgatatcgtcggcgtggtgtgggcttatacgggtctgtatatttttgctggactcctgacctttataataaaagtgccacaaccgaaacgcgagcgccgacaaacaaaagtcagagaggatatacggcaaagtaccgattaa

SEQ ID NO: 395707 - DNA, 324 bp, Salmonella enterica
atgctgatatttaacgcaaaagccttaaagccggtgctgcttgaggcgcgccagaaccactgtggcgtgatgctggtaaaagataatggcgtctacatcatgtctgaaaccggcgaactgaccccgcgggggcgcaaggtggcctatgcgaaaggctgtcatccgcagaaggatgataactggtgggagaccgcgcgcaccgaagtgggggatgacattggagaatcgctggatttaaccgaaagcatgatgaaccgcattctcaatgaaggaaaaccgctgcacatcacggtcagaggggattcttttttaattgaatgctga

SEQ ID NO: 395708 - DNA, 900 bp, Salmonella enterica
atgagtattattaacgaatatatcagccagcagatatctgaacgactgaagctggatattgatgacgataacattacctggcagttgggtggtcacgtttcagattatgtgaatacccggatactgtttacccgggaaaagctgatgtctgtgatggaggtcatgctgttcggccttaacagtgacgaggcaacattatcgcgctgccggcagatactgacattatggatagccggactcgataccctgtcgaaggaggcggaggagccggactggttgccccgggtacaccctggcagcagtggccggtatgaccagttgttaagcggaaataccactgcccttattgacgcggatgaggaggagtacctgcgggtgaccggtcaactggattcaccggagcatcggcgtattccgcaggccaccttcaataatacggtgcgctactggcatcgttttgagtcctggctggcgcagcagttgcgtgaggtcacgcagtactgctaccgaagactgcgctgttttgtggagaactgtacaacagagccacggaagatacggcactatcgcggagaactcggctcactgcgtttatacgtgggacagcaggatatcgaggggatagacgtgctggagtttaacccggattacatcgtgtcctgggtggacaaagtggctgatggtctgtttacgccggtctgctttgttgtaaatgtacactataaaaatggtgcgttactcgagtctttcccctgggactgtgaggttgatgatatcaaccgactgaccagcaaagactacggtgaggcgatgagtcaggctgtggcctgggtgcgagagcaaacagatgagccggtgaaagacctgccggtaccacagcagccgagactggctgcataa

SEQ ID NO: 395709 - DNA, 453 bp, Salmonella enterica
atgatgttaactacccgtttgtttatttttttgctgcatcacctctggcgactcctgcgctggaccgggctgacggtgtatcacggggtttctgtgttatatcgccgaagacaggccagactgcaggcggccgactggcggccgcgaacggtgtataccggtcgctggcaactggccgatgacggtcagtgctgtggccgtgcggtggtacttcggctcagtgacgcgctgaaacccggcgtggagttactttactttggcgaagaggccgcagagccgtactacagcgaacgtcagtttgccggcgataaggaatcggtcatggtggcggagcagatgctgatgcggtttctgggcagccggcaccggcgtcagagccggcgtggaacgtcagtgcctgtgctggtcaccgatgctgtggccaccgttccggttaacgatgaggccgcctga

SEQ ID NO: 395710 - DNA, 987 bp, Salmonella enterica
gtgaaaaaacataaaaaaggttcatccggacagacggcgcacgctgatgtttaccagatggtgacagaccgtattattgccgcccttgagcaggggactgcgccctggcgcagaccgtggacgagtgcggacgctggctgttccggcggattaccgtcgaatgccctgaccggtcgttgctacagcggcgtgaatgtgctgttgctgtggatggcggccgaagagggcggctataccagcgaccgctggctgacgtaccgccaggcgcaggaagccggtggtcaggtccggaagggtgaaactggcagtcttgcggttatccataaggactggacaaagccggcagaggatgaacacggtaacaggctgtacgataccgatggcagtccactgacggagacggtgccgatgctgcgtcagttacatctctttaacgtggcgcagtgtgacggactgccggagctcatgcaggcgccgcagccggatgacggtacgcaacgaccggtggaggattacgccgtggtttccccggagcgtctggccgatgttcagaaaatgctggaggcaaccggtgtacaactggaatcccgttaccagagccaggcgtactatcgtccgacggcggacactatcgtcatgcccctgacgtcgcagtttgactcagaggcggactactggtccacgctgttacacgagatggtgcacagcaccgggcacggtaaacggcttgaccgggagggtatcacctcatcgttacgaagacatggcgacagggtgtacgctttcgaggagctgattgccgaaaccggcagcgcgtttttgtgcgcgcaactggggatatacggtgaggtacagcatgagagctatatcgacagctggcttcaggtactgaggtctgacaaaaaagcgctgttccgcgcctgcagtaaggcaagagaggcgacggaatatctgctggcgccgctgagcatgcgttcagtggcatga

SEQ ID NO: 395711 - DNA, 312 bp, Salmonella enterica
atgaccactaatacatttaacggtatcacacttgtccggcgggacagcgatgaatggcatctgatgtggagtgcgctcggtgagcataaagcgaaccggacattatcacagccaaccgtcgctgagcattttggcgaggcatgggagtacatggagacacgcgaagtccggacgttcgggttccggaaagggtatttccatttcttcaggcatcgtatgcatccgaccatgggcgttaactaccgcatcagagtccctgccagcccggggtttgattcagcagcgctgaagcaggccggtatgcagagctga

SEQ ID NO: 395712 - DNA, 375 bp, Salmonella enterica
atgtctgcagaagtgaacagcgtcacgtttagcgtgacgggcctgaatgtcgggcacgttattaccgatgaatacactgctgagtccgggctgcggctcgggtgcgttattggcggtgaagtaacggatgagcatgaacggggcaggcagtgcctgtttgtggtgccgttatacgattttaattacgactttgccgaccgggtaccggaagtgtactgccggttgtggggctgccgctccgctgtgagtgcgggtgatgtgctggacgccgttcccggcccggtgataaccctgccggatggccgtgtggcttacggtgtgaaagacgaagaccttcgttacaacgatggcttcatcgtacagtcctggcattga

SEQ ID NO: 395713 - DNA, 393 bp, Salmonella enterica
atgacttttctgtttaatgtgatttttcggattttacatatgctgatggtgcttatgccatcacagaattcattcaaaatctggctgcgtcagatggcggaagatgcgcttctgatggcgcatgtggctgccgatatccggctggcaggtgaacttttcagacttaaatcgcgttattccggaggcgatattgccagtgcggaactgatagcagaacgtatcctgcatagtgcagcgtaccgtctgggaggcgcggttttccatggtctgtcgtcccgctggccggtatgggtaatttacgaactggaacgccggggctcttttattgaagaggggttctggggcgaaggccgcagttacggttaccgggatgcctgtgattatgacatctga

SEQ ID NO: 395714 - DNA, 300 bp, Salmonella enterica
atgaatacctttctgacttcgctggtcagtatcctgcgtaaggtgctgccgcgtgttcgtcactgcaaaagtgaatggatcgccaatcataccggctatctgcgttttcaggcagaggttcgggaagatgaaaacggtcattttcatgcagtcgtaaacaaacgtaccggctggataaacccccgtcacgaacgggcggtggattgcggtacctttccttcttttcatgacgctatgaatatagcataccgtcaggctcttgagctggcgcacctgcgctatgcctgggaaatggcctga

SEQ ID NO: 395715 - DNA, 990 bp, Salmonella enterica
atgacagaacgttatgattttcagaaccgctttcctcgggaacataaatctgcaagattggcccggcaactgtatgctgcattaaatttaatcggagggaaagaaaaaacgcttaattcccgccgaaataccctgatttatttttgttgttacattggggatacaggaacagctttgagaaatttcagacttgcaacggaggatataattgaaggttatatccgttacaggaaaaacaaaggcatgtgtaaacgtaccctttgtaacgagatggcggtattgagaagtatgatggactattttgaattatatgagctgaagaactccccgcgtctgacaaatacggccctggggttgaccggagtaagccggaaagtaaaaaaaagaccgatgccggatattatttaccggataacagaggataatcttatggaagcggaagaatattttgtggtcgcgattatgaaattatgcaggggactggggctacgtacagacgaagcaatcctggggatggcctcgttgacaacttggctgaaaagagtgaatgcggatatgccaacagttcatattgtttttggtaacaggggaagtaactaccgacatgcacacattataaaccgggaacgggttcgtgaagcgctgagatttgcgataaatgtctgggagaatgaaaaaggtggtaagaacggactaaagaaacgaacgtttcagaaactgaaggattattatcagaggcatttttctcataatgtggctgtgaaagggtattcatcacacagtatgcgttatgcctgggctgttgaggcatttgattactggatagcgtcaggtttaagccgtaaggaagccctatatattataaaacagaacctgggttatggggatggtggtgggcgttctctgaaaacgctggtatcggaacgtatcgatcagcagacgatcgacgaatgcataatcagcagtctggtcgcgaaagaagcgacatga

SEQ ID NO: 395716 - DNA, 600 bp, Salmonella enterica
atggataaagaaaataagctggagtgtctggagttattaacctggtgtgcattggttgcattaaaattagaagagcaggataaagctaaattatcaaaaatggcagagcatctttttttaatgaaatggttgtctgtggcgaagaaacgaaaactctttccaaaaattgtagccagtgatttggactggttattaaatgaaggtcggcgcaaaggtattaatgcgaacttaaagtttaaaatcgagtacttgaaatcaacttgtcataaagatgtaaaggcacagtccttattatttcgattcacccatgcaatagaaacgctaaaagaaatggggtgggggagttacctattagcgtcagataaatgggaagcattatctgacggagtattagacagtatggatagctacatttttatggaagaggccaaacttcagaactgttttggtactaatggggaattaatcaactcgttcaggttacgggtatgtgggaatgttgatgtggttcggtcggtattcgagacaaacaaagtgggtacggagtatcagctggacgcatcaggagaacagcattttttgtgcctcattcctgaataa

SEQ ID NO: 395717 - DNA, 492 bp, Salmonella enterica
atggctaacaatgggttcaacagcaaagacattgaggagtttgtagctcgtcatactcgtgtgcgtaacaaaaaaccgagaaagaccacctccgggataccctgctttgtgccccgtgaaccggcaatccagagcattgtaaatacacctcagaatgaggaggtctgggctgcagccgctgatcgtgcagaacaacagcaagaacaggaactcccacctgccagcccttgttttagccaggctgatatcgatgagtttctggcgagaaaaccgaagaaatatcagatgaccgagcaggactataaggagttgggacgcaatatgatgttggggcttggtgatttaattgtctctaccgcaaaagtagctgtctatggagtgtcatgtattcctgatccgactcctagtaaagatgatgaagtttggtattactctacggacgagaacggttggagtcatgcttataacagaaacggtgataggttatattag

SEQ ID NO: 395718 - DNA, 384 bp, Salmonella enterica
atgtcgctgcattcctggttacccaaaatgaagtcgttaccggtctggttacggcagctaacgcgactgtcgctgcaggtggtgctttggggcgcggggctgatggttatatctgcagtccttatcgccgtcgtgcttcaggagccacaggggatgaacgtaaaactctggctcgataacgcccgctttcctctgttggtctggcgcctgatgttatatgccattctggcgggcacctggtttggtggaatacgtcagtcgctaatggtccaaattcgtgcccgtggtgacgggcgttccctctcgtcactgcgtcgtcttgaaatcatggccatcgcactgatcgcgctgtctgaatacaacgtctggctggcgccacgttaa

SEQ ID NO: 395719 - DNA, 981 bp, Salmonella enterica
atgaacaggatgttgaatcggttacgtcccgtcgcacttagcctgatgtttggcaccggcggtttacctgtggctgatgcggccataaatactgccagtattgtagcctcggtcgtatcaccgtcatgtatcagttggcgggttagcgggatatgttactggctgatgtgtacgccatttggctgtacggtcaagacctcagtgaaagtcactcattttattccgcaggcggtggtgtcggtttaccaggagagggggaaaaatccctggacggagatggcattggtcagcggagcgtcggggggtgtagagaacaccatcagtggggcgctggccggattgtcggccgatggcggtgaatcgacgagcaaagtcccaggtcaacgctccctgcatacacattttaaatatgccgatgcccttgggcatcctgcgacgtctcttattggtggccagataccgggctactcctgcaggagtgccgcgaccccgctagtcccttattttttgagcacactggatacgctggtctggcgtaccggtgtgcctgagctggcgtatcccgaggcactgataccagggagacgagagctgggcagtcagacgtcgaaaaacatgtggggcaatgtgtaccctcgcagcggttttatcactcagcaagatgattataaggccggtgccgtggtggctcagcgggtggcagacatcatcactcggcgtggtcagatacacgtctatcagcctttggtaggtcaccgttcttctggctactggcctcctgaaccggtgacggaaaataccggcagtaaaaaccataaatggcagcgcctgtctccgacattgtcgcagtcctgtgctgtttttcccgacactgaggggcaggtggcaaaagatggcaactatgcgtgggcattatggcagccctacagctgttgcaagcgacgtggccagaccttcctttacagtactgatttcagctaa

SEQ ID NO: 395720 - DNA, 408 bp, Salmonella enterica
atgtatcgatatttttcactgctggcactgatgctgtcagccccttccattgcgtcgacagtggtttatacagatcggcatcattcgccggctaacgttcaggctgacacacgcgtggtttatctggatgaaacggaccagttggcgaaaagtcttttcggcccgctatcaaccaattcatcgcaggcagaacgtcaggcacagtcggtcattcattcccctcagtgggcgcaacaacaggctgtgatggcgcaagcttatcaggggctgatccaggcctggcaactggggcttaaaaaatatccagccgtggtgtttgatgaccatgatgttgtgtatggaactgccgacgtggcggtggccagaacgtatcaaaagcataaagagttgtcgggaggacgtccatga

SEQ ID NO: 395721 - DNA, 264 bp, Salmonella enterica
atgtccgataatcgggaaagtcaggttaaccaaaacgtcatcagtgaactcacgaccctgttacgtcagcatgccgatgacgctcatgaagcgctcaacattctggccgtggtcgcgcattccctgatgcaatcttgcgcggcaaaatcttttgaaaccaaggaaatcggcggtgaaggaatgcggtttacccgcctgtttagcgatccaccaagtaaacctacggagcgttcagagccaccgacggaaacgccgcttcactga

SEQ ID NO: 395722 - DNA, 420 bp, Salmonella enterica
atgagccgactggttctcaaatatccagaccccgtggtgacaggggaaaatggtcatgggatgttgtttgatattcccccacagtctgctccggtgttaccgctaactctgcaggcggagtggaaccaactgcagtcagcgttgcgtacccggctgaagggagaggtgacgatgacatgtcaccctcatcgtattggccatcgcggctgtgtggcactgtgttttcagggagaacagggcaggattgatgtgctgatcaccgtcagcggccgggcgcagttcccgcaggaagaagattaccttgcgccgcgctggtatatcgatgtggctgacatggtcgatgcgttgtatctggtgctgtggttgggaacgttgtacgagggagcaccggcatcattgattacgggggatgaaaactga

SEQ ID NO: 395723 - DNA, 2829 bp, Salmonella enterica
atgcttgattttctgaccgggaaacgtaacgcccctgcggcacgaaatactgcggcgtctgcgctgggacgtgaccccctgaaaagggagagacatctgagccgacgggaagaagcgaaagtgtacgaacatggcccgtcggtgattgattttctgccttgggctgagtacctgcccgaagatgagtgcctgttgcttgatgacggtttgtcggtcggcgcggtctttttgataacaccggcgggaacggagggcaggacgcaggacagacttaatgaaataagggacgtgacagaaaaggcgcttcagagttcactggacgagcggaatactcaccagtgggtggtgcagttcttctgtcaggatgagtcagatctgacggtggaaatggaccggatacgcggatacgtcagcccggcagcacagggcagtgcattcacccaggcctggctttccgaaaccgaacgtcatcttaagcagataagccggccggaaggcctgttcaacgacagtgtagtgacgggggtggactggcgcggacagatgcggcgtgtccggatggtggtataccggtatgtcaatccccggacccgggagccgtaccctccggcagtgcaattgcgtcaggtctgtgaccggctggttgcctctctgggacaggcgggcgtggtgtgccagcgacagaacggtgagcagatccatgcctggttactgcggttattcaatcctgcaccggaatggattgatccggatacgctgtaccggactgcggcgtggcgtgacaaccggcaggagacgctgccggtgaataacgatttcagtgaaacgttgtttttcacgtccccccgtagtgacgtggacaacggggtgtggtggtttgacaatatggcgcaccgcgcggtatcagtcgaaaggctgacttctgcgccgacgcccgggagtctgaccggtgaaaagccccggggtgagcatatcaatgcgctgatggatatgatgccacccggcacgctggcctgcctcacgctgctggttcagccccagaatgtgctggaggaggagtttaaacaacagaggaaaaagtcgctgggtgacaatctggattcggagatggccagggagcaggtaggggaggctctggagtggctcaaacagaagcataaactctaccggggcgcgttgacgtttattatcagggcacctgacctgagtacgctggacagatatcagttgtcactcagtaccatcctgatgaatgacggactgcagccggtgaatccggaatacgagctgacaccactcaatacgcttttacgcgctctgcctatgtgttttaacccggagctggataccaatcggtggtacacctggctgacatttgttcagcattttgccggtgtggcgccggtctacggccgttcaaccgggacgggtaatccggggatcacctttttcaaccgtggcggagaactgttgaattttgaccccataaaagaccgtatccagagcgcccacaagttgcttttcgggccgactggtgccggaaagtcggcgacgctgacggtggaattgtgtcagcaaatggccatacaccgcccgcggctgttcctggttgagtcgggtaactcgtttggtccgcttgctgactattacatcagcctggggctgacggtcaataaggtcagtatcaagcccgggaaggggacgtgtctgccggtattcccggattcgcatcttatcatgacgcttccaccggagaagctggttgtggacgaaaataagctgaaggacatcggtgatactgatgatgcgaaggacaccggtgatactgatgatgctgataaacgtaaagacgatgagcgggatgtgctgggtgagatggaaattgcagccatcctgatgatcaccggcggggagaaggatgaaaaactgagccgggctgaccggggactgcttcgtcggtcgctggtcatgacggctgagcgtgtgtatgaagaaaaacggcagatgctgccgtcagacctgaaggcgacgctggaaacgattgccacggatatgtcacagaagcccgggggcggtccccgctggcacgcgaagatgcaggctagggcatcggaaatggcgctggcgctggagctgatgaccgaagggtttgagggtgagctgtttaaccgtgagggggaagcgtggccggaagctgatgtgaccatcgtggacctgggttacctgtcgagggaagggtatgaatcgcagatggcgctggcggtgatatcgctggccaacacagtgaatcatattgcagagcgtgaccagaatgatgagcgcgatattatcttcaccatcgacgaggcacacgtggtgacagcaaaccctctggtgtcgccttattttgccaagatatcgaaaatgtggcgtaagctcggcacctggctgtggctggcgacacagaacctgaaagattaccccgatacggcagaaaaaatgctgaatatggcggagtggtggatttgtctggtcatgccgccggatgaaattgagcaggtggcgcgttttcgcagtctcacagacgagcagaaggcgatgttgttgtcggccaaaaaaggggcgaagaaaaacggcatcccctgttacaccgaaggggtggtactggcccaacactggaatgcgctgttccggtctgtccctcccagtttgtatctggcgttggggatgacggagaaagatgagaaggcgcagcgcaaggaactgatgaaaacccatcagtgcagcgagctcgaggcggtgtttatggtcgcccggactctcgatgaaaaacgtggggtgaacgtatga

SEQ ID NO: 395724 - DNA, 852 bp, Salmonella enterica
atgaaaaggtatgcctctgtactgacaatgctctggtttttcagtgcctggtctggtgcggtggaactgatgaagtgggagcgtattcccctgcaaataccgctgacggtcggtcaggaacgcgtcatctttgtggataaaaatgtccgtgtcggttttcctgccagcctgaacggtaaactgcgtatccagagcagcagtggcacggtatatctggatgcaagagctgccttcccgtcaacccgactggtgctcaaaaacgtggagaacggggagatgattttgctggacgtgagcgcaagcgacggaaaaaccgtccgggaacctgtccagctggtctatcagggagcggtgagttcagccagttctgccagtcagtctaaggacacgggagaaactcgtcaggacagggattcaggcaagaccgcgacaccaaaaacggccgagcttaatggccctttgcccgtcgttctgacccgttatgccgcccagacactttatgcaccgctccgcacggtggagtcagtcgcgggcattcatgcactcccactacgtcttcctgccagattgaccgcattatatccggtagccccgctggagatgactccacttgcggcctgggggctgggtgaatacagcgtggtggcgcttaaggttcgcaatactgaaactcagaaagtggttctcgacccccgaaacctgtcaggccgatttatctctgccacatttcagcatcggtggttgggtgaggtgggacggccggaagataccacaacactctatctggtggtgaaggggcgtccggagtcagcatttccagctgaaccggctcctcataaggaggtccgctga

SEQ ID NO: 395725 - DNA, 390 bp, Salmonella enterica
atggcgacgatcgattttattccggataagctcaatacccgtccggtggtctggcggggattcacggttgaagagttgggggtaactgcgctggtcggtattgctatcggttttgtgctggccatttttatcataccgttcacaagctggatcgcgtttcccatgctgatgatcctgatgccgatacccacagcctggctgagtggcgggtggctaatgaaatataagcgcaacaagccagaccactatctgtggcaacggatatccctgctgcgcgcagcactgcagggaaacggaaaacgtgggagtactgctacaggtagctaccgttttatcacggtttctcgcgcctgggaactcaggcgaacacgtcgtaaggggcagatatga

SEQ ID NO: 395726 - DNA, 339 bp, Salmonella enterica
atgaaactgatggagctttttcgtcattatgcactgacggtcacaggactattctggtctgcatatgccagtgctgaccttcccaaactggccgggggcagcagttccaatgatgtgatgggggacgtcaaaaagatgagccaggacggggttgcctacggtgcgctggtgatctgtgctatcgcatttattgttgtggtgctttcctgtgtgggtacctatcacaaaatcggagatggtaaagccaactggttcgacttcggcgtcagggtggtcgttggtgccattatgatcgtgttgtgtatctacttcctcaataaagcggtcactattatctga

SEQ ID NO: 395727 - DNA, 237 bp, Salmonella enterica
atgaaccaggcacagataacggcattcagtaccggctcaggtgggattgcgccctcggatattaaacttctggtcgtcggtattttctttgctttccttttcttatgggcagcctgggctttacgtactgtttatgttggctggtcgaatcaggatgtacggggagatgccgtcggtatctttgttatccgtgcggtcattctgattgagctggccattttctttttcagctattaa

SEQ ID NO: 395728 - DNA, 324 bp, Salmonella enterica
atgttccgctatacccggctggcgctgaaaggcgtgttgttgatgagttgcagctgtctgactgtgctggcacaggctgcagagaaagatgaacttgcccaggtgatgcgtcagctcgatcaggttcaggcgtcttatgaccgcgcccgtgccctcagcgctcagtcagcagatgacgggcgtttttattttgattatgtccgtgcaagccaggacattctggcgatgaaacagggcatttcacaatatcttgacccttcccgtgctcagccgcgtgatgctgccaccgtggagggacgctaccgccaggagagagctcaatga

SEQ ID NO: 395729 - DNA, 1017 bp, Salmonella enterica
atgtccataactgttgttccttttgatgatgcgttgtccgcccagtttcgggacagagtgacacactaccttaattgccgggtatcaggtatcggctgcgacgatgttttctcccctgtatcgtatagtctgcgcccggtattcagcgctgggttgttggaagggatcagacaggcaggggaggccctgcagaaagcagcgttcatgccggtgatggtggaggtgagtacggatgtgaaaatgttgctggattctgaactcttctttctgattttcgggccgcagatgctttacggctctgccggtctttcccccgggcaggaggaaaaataccgtatcctgctgaacctgcgctttccggatgaaagtgattgtgattgcccggaaagcttcgcctgttcggaaattaaccgaagccttacggactggtgtgcatttcaggacgcggtgatgcgtaaacaatccgctaatctggcccgcggacggttgttgtctcaggtactgaacaggcaacggcaagattttccggatacggcctggggcgccctgatgttgcagatgctgccagcggataaacgcatggcggtagaccagctctctcaggtggttcctgaactgatgcgacttttccgtgcaggtcttaagcgggtgaccgacggtgaaatggcgctgttccggggatgcagccttaaaacccttcatgaatatcctctgttgcgggtgctgacagacggcgtttttgctgatgataccggaatactgatgcagtaccgctcagactggctttccgcagcgtcggtatggctgcgcgacattttacaaccctacacgttgggggttccttctgctgtaaccgaagccgtccacagcgcggtactggcgatggcgtttgatgattttcacgcgctggtacacgccaccgcgtatgaaagtgccgtcagtatgcaggcggatgatgacgatgacttaaggtccgtatcgctgaatgcggcatttatccggggaacgcagggatga

SEQ ID NO: 395730 - DNA, 141 bp, Salmonella enterica
atgagtaatcgttatgtgatggaggcgctgttgcgccctgcggtggaactcaatatggccgtagcggcaggctatgagctgagagcgttaaataacataaacggagagtacaggaatgtccataactgttgttccttttga

SEQ ID NO: 395731 - DNA, 495 bp, Salmonella enterica
atgacattacccttactgcgggtctgttgcctctccctggctcgtatactttttttgtggccggcattactcaccggaggcgcggtgctggtgatggtatttctgttgttgaatcagaacagtgtggcatcacgggtggattattacacttatgaggccgcacgctggcgcaatgcgccggaagggagtcttatggttcagcgttgtaccgatgctgttgcagacagcgctgctttccccgtcgctccggcgtggcgtgtgatagcgcctggggaaactgactgccatgaagtggctgagtcgtttgaacaggcggctgaaaatgatatccgtggtttacgtctgctgctcaagtttgttctgacgatgagcttttttctggagctgattataaagcttcgtggcgtaagggaaaatggtcatcgcggtgcggtggcacatgttcgcatggcaaatggcggcatccgtatcatcagggaggacgacgatgagtaa

SEQ ID NO: 395732 - DNA, 534 bp, Salmonella enterica
atggtcatattcctgttgttgtgtctcagcgtcctgattgtgatgtggtgccggccagcggcttcagtccgaacacgccggcaccggcgttaccggaaaactgcgctgcggatactcatgcgcctgccagagctgtcctgcgacggcgctcgtctgaactatctgcggaaaatcaacccgtatgtgtttgaagagctgctcttactggcactggaaaaacaggggctggacgtcatcagaaatcactcgtacagcggtgatggtggtgtggacgggcaggtctttatcgacgggaaacgttggttgatccaggcgaaacgctaccgtcggagtatttcgccgcaacatgtccgtgagtttggtgagttgcttgcgcgggagggatgttgtggtttttttattcatacgggaaggaccggacacatgagtcggttggtctgctcagcctctccacgtcttttcatcatcagcggccagcggttgttggatctgctcgccggccaatgttcacattttcaaaggaaatcattatga

SEQ ID NO: 395733 - DNA, 501 bp, Salmonella enterica
atggtcagtgcattactgaccacatcctcgatggcggcactcaatgtgattgctgatctgggtggtgagtcaacggcaccgctttttgatgcgattaacaatgaaaataacgagttcacaccgccccggtcactgaactcaacggaaacgtctgcgtatccggctccggccgatatcagtgacatgctgccggtgagcacgccggagatgagtgcgggcaaggttgtttcacgtgagttaaatctgacaggtatgacaccggtttttctggtcggcgatgacgcgttgtcacgtgagtggctggctctgcgccgtgacgagcttaagcgacgtcatgctaccggtctggtagtgaatgtcagcgataaagccgcgctcgctgaactgcagcagttggtccccggagtgacgttgctccctgcgtctgccagtgaaatcgcgcgccggcttcagctcagccattacccggtactgattacctctactggtctggcgcaatag

SEQ ID NO: 395734 - DNA, 693 bp, Salmonella enterica
atggcaaattgcagcattctgaccaccgccagcgttatttttcctgtgctggtccttatgaccgggatgtccggtagtgccgttgcagccgcaaaagcgcaaggtctgcaaacgatccctcctggttatcatcttgtggccagtgaaagcggggtgccagctgaggcgctgtattcggtctctctggcagaaacgtcccgaaagttacctcatggcgaacgcccgtggccgtggaccctgaacgtcgccgggaaagggtaccggtatgacacacgtcaggaggcgtatgacgcgctgatgtccttcatgcgccgttacccgttaaagcacatagatgtggggatcgcgcaggtcaatctcggctggaatggggcttatttcagcagttatcacgaggcccttgagccgtacaccaatctgcgcgtggcagcccgtattctcaaatcctgttatgacagcaacccggggagctggatacaggctgcggggtgttatcaccatcctgccggcggacagccggctcgtacctataaggccatcgtgaaacgtaagctggccacgctggatttgagtaccccggtctcatactccgactctgaatttcaggtggcacggataccggtaccacaacgtcatttattacctcaaagccgtgaactgcaatgggtcgaacccagggagtcccgacagtga

SEQ ID NO: 395735 - DNA, 747 bp, Salmonella enterica
atgaaaccgatgaaatcgacactacgttattcgttgctgtggaagtgggcagcaccagccatggtggccgtcacgatgagccagccgactcttgcctccgtcagtaccaatagcagcgtcagtacgcctcagcaacagagtgccaccaccgttgacaggactcagacatccggcagtgcatggggactcagtgataaagagtggcagcagtaccagcaggttctcaaaggccccagggcgttacagtcgccgggcattgacccgctgatggcgctggggctggaggctggttcggccaatgagcgccgacactttgccgaaatgtgggtgaaggaggaatatgcccgcgtggaaaaagagctggcttttcagcgtgaagtggacgccgcctggaaacgtctttatcccaatacgttgtccgtcaacatgggcaacgccagcggtattgcccatgacacacagggaagactggcgttatttgttaaacgcaactgtttacagtgcgatgccagattaagcgcgattctggcggacaaccgtcctgttgatatttatctggtcgacagtgccggcagtgatgacaccatccgccagtgggcgctggcacaccatatccccgtcgacaaagtgcgcagccggcagataacccttaaccacgataacggcaactggctgaagtatggtcagggacgtatgccggtcgtgcttcaacaaggagcatcgggatggcaaattgcagcattctga

SEQ ID NO: 395736 - DNA, 927 bp, Salmonella enterica
atgacgaccacgacggcatcttctgtcgatattccgtcagataatgatttacctttatccgcgcacctcactgaacccgccgaaccgaccattgacatgccggaaattcctgtcgcaccagataattcagcgcagtctgccgcacatagactgggtgggaaaggggggcgaacctggtctccttcttcagaccgtcgctctctaatgtttaaagtgacttctgctctggtgttctgcgtactactgggcgcagtcctttttctctggtttaccgtgcgcgagcagcagatacagctgacgacgctggatgcggcatttcgcagcggacagctgcaggcactccctgaacgtatgcaggccatcgaagaccggctgcagcagtacgttctcaaatctcaggccgaaaaatggcagcagagcctgagtgaacaggcgcagagcctcacgacgtttcaacagcaactttccactctggctgcagatgttaaagagacccaggcggcggccgcgcgggcgattgccgggcaggatgaaacgggcatgaagctcgacacattccagaaagcgcttgatgcacaggtattacgtatcgataccctggatgcctggaaagaagagtggagtcaacgcgtagccttaacctcaacgaaaactaaaactgcaccggcccgcggaggtagccagcctgccgtaaaaaagccgtcaaaaccccaaccccgggtcattaagccgcctttcacgctggtgagtattgaacgcaggggagggcaggcttacgcggtgattttacctgccggggaagggggctgggcacagttacgtatgcttagcccgggagagagcctgtctggctggatgctgatgagtgccagcggcagtcaggctgagtttcaggttaacggccagatacagcgtctgacactctga

SEQ ID NO: 395737 - DNA, 732 bp, Salmonella enterica
atgaaaaacactcatgaaaatttagatgccgctctgaagtctttcagtaaaaatcacgacagggtaaaattactatcggaatcgagggagttattggattatttttacaccaacacaagaagccgcccaattttattttggttgcttatatttggtttagtagtgttctgcattacaatccttatatttagtatcattaaaaacaataaaatagcagggctttatgatgccgatcttttcatattatgcgcaacggtatccgttttaacctttatgatgccggccacttatttgttactgaaacaagcaaaactaagcagaatggatgacataaccatagaactatgtcttaaaaaaaacgactggtctgttccagcgttaaaagcatcatccaaaatgatatcatctattcaggggtctcttgaaaaaaggttgaataccttcaaaatcatctgcggagggtttgcctttatcattgttattttcactaataaggcaataactactataccttatctgcatcatataattaacatgatttcagctaatgtatttttcacagatttatccttttttattatctgcaccgcagcagtaattatcatttacacatatgtcgaattttgctacttggttttttacatcaaccattgttcaaaaataaaagcttcaattgattttcttatttctatatctgaggaagacttttctgagcaaactaaaaacaaatga

SEQ ID NO: 395738 - DNA, 354 bp, Salmonella enterica
atgatcactattaccagagaacaggcacaaaaaataattgatgctgccgacgaggtcatcactgcacttgctggtactaacgatgatgttcacccggataacagcacaaagatgacccagttgtacgatggcctgaatgaccactacgccccgccagaagttgtgcgcgagctggcgcgtatcgcgctggtatcgcttaccgctgaacctgtggcgtggcgattggtagattctccagagtcatcagttaccgttacggataatgagaaaatggcggcgataacggctcacgcagaccagcgtcgtgtcattaagctctacaccgctcctcctgtggcggtatcgcccagttaa

SEQ ID NO: 395739 - DNA, 369 bp, Salmonella enterica
atggcttacaaacctattaccagagaacgtctcgaatggctttctaagatttctgggcgtgatgacatggacgatattaacggtgatgaaattcgtgagctggcgtgtatcgcgctggcatcgctggaagctgagcctgtggcgtacatgtgcaaagatggtgatgacgtcgagtataatggccatgacgagttttctggtgggagtaaaggtgtgccactttacgccgccccgccggcgccagtagtgcctgaggaaatcaccgacgagtctacggaacaaaggctgatggggcgacggtgggctcacagtttctgcgctggctggaacgcttgccgggccaccatgcttaaaggggatgcaaaatga

SEQ ID NO: 395740 - DNA, 645 bp, Salmonella enterica
atgaaaccagtaaccattgaaacagtacgtgagcgtctttcttatctggaggggcttaacgagcggggcgtgggtacggctgtttcgcagcagcaatttgaaacagcgtgccttcgtgaattgctgacgctactggatgagcaggaagccgcagagaagcgcatagcagagcataactttgaaagtcgtctactggctaatgctgatcgcgatatcaaagcattacgccagcgcatagcagaactggaagcgcggacatacattccacagccgctggatatcgaggatgaatgtcaaagttacgagtatgtagctgggtggaatgattgccgtgatgctgccagcgttcgccaacaaaccccagcggtgtgtgacgtcattgcagagcgcttccggcaacaatcagtcgaaggctggactcttgagcatgacgaccagtacggaaaatcacagttgctgtgggcatcctcatgttacctgctaaacactattcaaccttttaaccgcatcccgatggactggccgtgggacagcagttggtggaagccgacaaatccacgtcgcgacctggtaaaagcttgcgcgttaatcatagctgaaatagagcgacgcgatcgcgccgctggcatcaaggttaaggggtga

SEQ ID NO: 395741 - DNA, 687 bp, Salmonella enterica
atgacaatcgacaaacaggcgctgcgtaagatggcgcagaaattaggagaagacctggacgcggctgaaaagcgcaatgttgagctggtagaggcgctggagaaggcgcagttggaaatatcatccgctaatcgagtgatggcggttcaagatttagagttggccactcgccgccagcgcatagcagaactggaaagtaaaaacggcaatctgcgaaccattgcgcacgaacagaacgagttggctatcagggccaatctggacagtatcaacgacactgttgagatggacaggctgcacaaacgcatagcagagttggaacgcagcgaaactcagttaatcgacgaacgcgataatgctgaatctgccctcaatgatgcctacaaagccgtaatgggccaggcaccagagtggagcaactggtttagcttcgcaaatgcgatagatgaaattgagctggcgtgcgagcaatggcgcaatcagaccgatgacgttatccagttccgccagcgcatagcagaactggaggcgcggatcgtgacgttgcctcagcaggctccagaaaacttagcatcggcccttgatggctacgaaaaatggcttatagcgacaacgtttcgtgatacgtggaatgcgtgtcttgctgaagttacacggatgaacgccgctggcatcaagggggcttga

SEQ ID NO: 395742 - DNA, 189 bp, Salmonella enterica
atgagcaggttaacccgtgaattagttgcaaaagcgatgctcagcagcgttgaaaattatgtgtttgagattatcgattctgttcagcacgaggctggcgaactgaccgaagaggagcattgcaccctcgatgcctgggtcagaaatgccgtggaaaaagcatcttcggaattggaggcagcccaatga

SEQ ID NO: 395743 - DNA, 246 bp, Salmonella enterica
atgactgattcagcaaggctacaactggggtttttaccgctatcaaaaaccattgtgctggcaaagatgcgagatgttgacggtggtcgcctgcgcgttggtaatgaccgtgggcgtgatgtaacaaatgaagccgcacaaatggtctggcaactggtcatggcagaaggcggtgaaattgtgtggcatatggatgatggttccagcatggtgctgaaggctgagaaacgggagaccgcacaatga

SEQ ID NO: 395744 - DNA, 279 bp, Salmonella enterica
atgaaaaatacaatcacttttgcacctcttgttctggcatgtcttctcctgtctgcctgtagttacagtcatgaccagactgaacaatcgtcgacaggctcaggctcatacatctcacttgatgtaacaaatgaagccgcacaaatagtctggcaactggtcatggcaaaaggcggtgaaattgtgtgggacatggatgatggttcctgcatggtgctgaaggctgagaaaagggaggctgcaaaagggaggctgcccaatgagcaaaccaaccgatga

SEQ ID NO: 395745 - DNA, 1212 bp, Salmonella enterica
atgaaatttaattctcgtcaatattctctgatgtctttctctgtacttattgcgttatcaggaacgactcatgctgccacaacgtatatggacgcacgtaatgatgcgatgggcggaaccggtgtggcttcttctcattacggaacggcggcgctcgcaaaccctgcgttactgactcacttcggggcttctgatgatttcagccttattctgccatcggtcggtgcgcaggtatcagacccgaaccatcttcagaatggtgtggatgatgtttcagatgcctgggatcgttttgacaatgcgttgtcagcagggagtgtgtctccggggactgcgtctgatctcaaaaatgagcttctgaagtttaaaaatacgcatgccaacgcgcaggccagcgtgggtgtggttgccacggtacccaacagtgtggtgccgtttgctttgatgttgaagtcatggggaacagcgacggtggacgggaaagtcagcgaccatgacctgcagtatcttgatgacgtcgcaagcgggaaaattgtcccgacgcaggcagacaaagatgcgttgacgtcgcgagcttatggtcgtgcggcgatagtcagcgatgtggggatttcgctggcccgggagtttgaaactgacgggtttaaatactcagtgggcgtgaccccaaaataccagcgcgttgacttgtttaattacaacgtcacggtacagaactatgacagccatgacttccgcaacagcgattaccgaaacaccaccaccggatttaacgccgacattggctttgccacgaacctgaacgacagctggacgctgggtctggtcgctcaaaacattgttccgcgcagcatcgacaccaaggaagtcaacgggctaaaagagacgttcaaaattcgtcctcaggcgacggctggcgcctcatggcacaacacactggtcacaacggcgctcgatgttgacctgacccctgccagtggcttcacatcggacaaaaaacgccagtttgcatctctgggggctgaattcaatgcgtggcactgggcgcagctacgcgcgggttatcgccagaacatggcttcatcagaaggcagtgcattcaccgccggtattggtatctcaccattagatgtggtgcatcttgacctgaccggtctggtggggacggaccgtacgtatggtgctgttgctcagctgagtgtgacgttctga

SEQ ID NO: 395746 - DNA, 876 bp, Salmonella enterica
atgaatgcaacttatacagcgctaatcgcattaatgcgatcaggtgaaatatcaccggtgccagaggagtctgtacccgtatccagcgctcagttttctgtgagaatacgaccggaaagtcgggtttttctggacaagtgcgcagatcatctgggcatttcccgcgctgctctgtttggcttgtgtatcgatggtatcgttgcagaggccagagacagtgtggcagacagagcctccacgctttatgagcgattctgtctgctgatggatgctcatgggttgaatgttgtcgaacaggcgcagctactggcctcctgggggatacgggccagcgtactggcgagtcaggaccggacgcttgatctcctgaataaacccttactgcagcaattgtcgacatggtttgatgtggatattaactggcttctgggtgattccacctatccggtggatatggctgacggacagcgcgattgggcgatgcagacaccgtctttgttgtgtcgcctgcagtcaatacagtcagaggatccggtcgagttaattttcttctggcagtatgggcgcaaaccccaaaatgtgggactgtgtctgcgttatcgtcccatcatatcaggggagcctgtcaccctttttagatcttatcaggccctcgaatggcacgatgaacaggtccagcaggcttataatcaattgcggctcgtgaccagtatcaccccgtccggacatataaaagagcaagttgaaaaatatccgcctgttcggatgcgtttcttctcattttcagcccgacaaatgcaggcattagacaatggggaaattatgcctgccatgatatttaataaaccactgggggagtacccgggtattccataa

SEQ ID NO: 395747 - DNA, 471 bp, Salmonella enterica
gtggtggagtatgctgtgtttgtgatggtctgtctggtgctgtattgcccgtgcttcacgttaattacgctggttaccccctggaaagggttcgcggtgttcagcgtgacgcatcgttgccgtcagtattgggctgttcatcttgctttactggatcgtgtggggaccatgaaccgccgccgggcacggcgttatcatcaggcattcgtactgtcgcttgagaaggccctgacggcgcagccagtccgtcccgttttctttcgttcacatctgatgcgccccgcccagatagcgcttgcctgtcgggttctttctcacagggctgaataccgctgtcggattgtcactgtgacgcttccgcggtgggagcgtattgctatcgtggctcagatgctgttgcaggaatggcgctttattccgctgccttctgaacatgctgtgatggttgtcattcatcggctgccgaaataa

SEQ ID NO: 395748 - DNA, 135 bp, Salmonella enterica
atgcacaaaacccgcatggctggaagcctaattattacgcaggttcaatcgcaagagctgatgcgaatcgtattgttaaatgtggttattacgacgaatacaatttctatgctggaaccaatcgtactgatttga

SEQ ID NO: 395749 - DNA, 1425 bp, Salmonella enterica
atgatgaaacataaacatgacggcggttttgttgcgatgagtatcggcgccgggttgttgatagtgctggcgatggccgggatggcggcccgttacatgggagactacctgaaggcccgggaatggcaggtcgtggcgatgcagacgaaccggttcacccaggcgacgtcttcctatgtggggcgttattatccgacagtgctggcagcggcgacgaccacaaagccggtggttgtcaccgcacagatgctgaaaaacacgggcatgctgcccgcgaccttcagcgagaccaacagctatggacagcagtatcagtcgctgatagtacgtaatccgcaaaatcaggaactgctgcagggcatggtggtgagtcggggtgggcatgcgatgccgttccctgcgctgagtcagatatcaaaagaaattaccgccggttttggtggatatgtgcaggacggtaaaacggctatcggtgcgatgcgcagctggcgaatcgcgttgtcgtcgtatggtaccagtagcggcagcggccatctggcggtgctgctcagcaccgaggatttatccggtgcgcgtgaagatggggatcggttgtatcgttttcaggtcaatggccgtccggatctgaacaagatgcacacagccatcgatatgggcggtaataacctgaataatgtgggcacgctgaatgcaaatacggtggctgctcagcggggtaattttggtgtcagtctggtgagcaacggcccgattacggcggggggtgatattcgtagtacaggtggctggatagtgagccgcagcggaaaagggtggatggatgaaacccacggcggtggtctttatatgtcggataacgactggttacgcattctgaataataaaggactctttaccggcggacagattagaggtgggcagttacgatctgacggtaacgtgtctgttgccggggtaatggagctcgagaaaatcaatgttgccggcactcattgtgacaaagacgggtctgtaagccgcaccgcccctggcgccccactttcgtgccaatccggtatctgggttgggattgacagttatcccgtcggaagccccatcccgtggccttcgacgacacctccccccggatattttttaatggccggacagcgctttccttgcggttcctaccccggacttgcacgggtttatcctggttgcgtgctgccggatctcaggggcgctttcattcgtggatgggacaacggacgtggtctggatccgggacgtgatattctcagttaccaggcggaccagagcaatatgaccgccggtggcggcggggcgttacatggtcatcatagcggcatgacttattactatccaggagggcaggaggcacgccctaaaaacgtggcattcaactacatagtgaaagccggatga

SEQ ID NO: 395750 - DNA, 654 bp, Salmonella enterica
atgatggggtcatttgtcggtacattgtttcctttatatgcgctgccggtgtttctggcctgtggcctgatggcggcgtttgtgcttcgtcaggtacgactttaccttgcttctgaggtggatatatcgcgccatcccgcggtggggacgggtatctggctgtttgccgtggtcggactgttgatagtgatggcaccgcagtcagggataacccgtaccggtatgttgctgctgtgtggttttttactccagcttggcgtgatggacgccgtcagcggctggttgccgcggccctgtacggccgcgtgtctttgcgccgggttactgttcagcgcgacgttcagcagtgagccggtactgcgttttatggaaactgcggtgatggcggtggtgatgggggcagtttgtcaccatgttaaccgacaccggccgcagctcggtgtcggggatgcgtggctgctctgcgcccaggtggcgtggcttggcatggtggatgtcatgacggctgcgtttctgggactcagtggttttatgctgtggcagtgggtggcgcaccgggactttcagcggtgtggatttctgggaccctggctgtgtgttgggtgtattccggtgattgtggagcggctgtatcagcctgagtggatactatga

SEQ ID NO: 395751 - DNA, 471 bp, Salmonella enterica
atgcggggatatcgtctggtgctggcgctgatactgtgcggactgccgctgtgggctcaggccttttgttttgatgccgcagcggccaaataccatgtttctccccggctgataaaggctatcgccatgggggaaagcggcatggatccgcaggtgacgaacgacaaccgggataagaaaaccgggaaaatcaaaagcacggactacggactgatgcaggtgaattcaacacatattcctcgtctggtcgaaatggggatcatcagggataaaaacgatttgctgaccaaaccctgtctgaatgtccagatagggacgtggatcctggcccgccattttcaggtctgtggtgtcaactggaactgtctcgggtcgtataacgcgggttttcgtgctgatcggaatgaaacacgtgaacgttatgccaaccggatctggaaaatctaccagaaacaacaggggatgccctga

SEQ ID NO: 395752 - DNA, 1746 bp, Salmonella enterica
atgttgtctgaacgggcgtttcaggagcgaatgatgcctgaaatcaacgatgcggtattgctgtatcacaatccggattcgtcagccaatgagctgctggttgacagcgagcgcaggatggatgcggcgatacagcaacgtgttatgcagttgctggaggaaaaccccgcggcgtctatgcgcatggtctcccgttcggagctgctccggtgccgcgatttggccagccgtcaggctgagcagggcgagcagggcctgcgtctgcaggatattaaaaaagatgtcagccgccgtcagggtgatgtgctgaattactttatggtcgccaaagatatcggcgcgtctgatatccactgtaccacccatccgggactcacccgcatcgagatgcgcgttcacggtgaactggagactatctcggagctggccgaagaggacggcaacgcccaggccgccaccattattttgtccatgtgtgatgtgaccgatccccagttctaccccggccaaaagcaggatggccgtgtggcagcgaagtttctgcgcaaagtggggctgtttggtgcccgctacagccacaccccgacggcagatggtctgcactatgtgatgcgcgtcattcctgatgacggcgatgtggtgccgacgctggagaatctggggtatctgccggaacaaatccgcctgatacaacgtattctgcgcatcccggaagggatggtgattttatccgggccgaccggctcggggaaatccaccacgctgcgggcctgcagtgacctgtacctgaagcgcacccgttataaaaaacgtctgctgacggtggaagacccgcctgaagggcgcattgtgggggcgatacagaccccgatactctgcgacaaggccgatgaggccgaagtcaggcgggcctgggagcgtgcgctgtcgtcagcgttgcgtcttgaccccgacgccattttacccggggaacttcgtgaccttatctccattctggcaggtatttttgcggcccagaccggtcatcttgtgttcactacgctgcatgccaactcggccttctctatccctgaacgcatgataaccatgggggctaatgccggacttgttgcagacgcgcagctgcttatcggactcatcagccagcgtctggttcaggtgctgtgcccggactgtcgtattccgtggtcggtcaaaaaagaacagctcaccaccgaagagcgggaatatctcgggaagtactgcacggtggagggagtgtgccggcctgaaaatcttcatttcagaaatgaggacgggtgtccgtcctgtcgcaaggccgtgacgattaacggcaggcaggtggcgacggtcgggaaaggtgtgggcggtcgtagcgtggtggccgaagtggtacgtcctgacaccacgctgttccgcctgctgattcaggaagggaaagaggccgcgaaagcgtactggctcagtgaactggggggaataacccgccggacccatctgcttcacaagctcaatgacggtctggttgacccgcttgacgcagacctggttgttcctctggatgaagatgaggtcatgcttatcccgacaggccagaagccgacgccggccacagagtcggtgcttatcgcgcatctggctgaggtgattgccgtcggcgtcagggacggtctgaagcagagtgttgaagaggccattaaagccggtattgccgccggaatggccgcgctgaaggagaacgtatga

SEQ ID NO: 395753 - DNA, 597 bp, Salmonella enterica
atgccaaaaaatagtgttttcatcaggggcgttatcctgatggcattcagcgcaggtgtgttcgcacagcccacgtcagtggttcctctggccgcggatgttattccggcaacgtctggccgtgaaccttcaacggacgttgtgtcgtcgaagacgcccggggacgcatcagagaccgtcccgatattccccggtaacagtgtgacgggcggggagctggaagccctgcaggctaaaacgctgctgctggaagctaaggtcgcggctgcacgcctgaaaaaacagttgtctgaggccgaccgtttgtctccggctgacagcgcgccttcagtgagtgaccccggtatgccgatggggatgacggggatgaatggcactcccgttcaggctccgcccgtggaggccagacattcaggaaggattgcggttctggaggtcagcggcaggggacaaaaccttcaggccacgctgtcatttcctgacgggcgtcagggtgtggtgcaggtggggagtcttctgccggggaccacgctgacggtgaaggcgataacgctgtcgtccgtcacactcagtgacggtcagcaactgacgttttag

SEQ ID NO: 395754 - DNA, 1329 bp, Salmonella enterica
atggcggatgagcaaaagccccgcacgcaggttctgcgctggcaggggcaggcctgggcggtgggactgcgctgggaagagaaggcaaagtcggtacgacgttcggtacgacgtccacgcgcccgggttaagcacacagggacgttcagcgtgatgttaacgctgggacaacgacaggcaaaacgtctgcttcctcagggagcccgccaggccagtattctgaccgcgcagggacggattaaaaacagctggcgtcatcagaaggtttactcgctggcggcgttgttcagcctgcggagttcccctgacggctatggcatataccagctcgataacggccagctggtcttcctggcaacggttaacggcatgccatcgctgatggcggatgtgaccggtgagccagaccacattgcccgtgcgctgacgctgtttttgtcgttcaaccatgagccggcgcatgggtggcaggttctctccaccgttgcggccccgcagtcgtgggaggttctggttcagagcgcgacgccttcagaattgcagttcgcccgcctgtcgggggcgtcaaatgtcctgcaggtctgtgcggcaggcggactggctgccgccctgctgggcggtatcgtctggtggagcctgcctgcggatactccgccagtcacggagacggtgcccgaaaacagacaggtgccggtgaaggtcatcgcccccaaaacgccggcgccggtttacctgccccatccgtgggccgatatgcccacggccacacattttttaaaccgctgtcagcgctggcgggctgcaattccggtgagcctcgacctctggcgtcttgaccgtgtcagttgtcgtgctgaagggctggagatggtgtaccagcgactgcctggtggcacggcggcacgctttgctgaacgggtaaagcaggtttttaaccgtactccggtattcaacctggtgtcaggtggcaacgacggggtggtgtttattccctgggcgaatttcacattacaggatgagactgcgccggatgcaggaacccagctgatgcatgcggtgtcgtggtttcagtcacgtcaggtcagtttttcgctttccgaagtgaaagttcctcctgtcatgcccggtgagggggccagtaatgatgcgccgcagccgatacaggactggcatgaatacaccttcagtatcacggagaaacacagtccggagtggattttacaggggctggatatgcagggcgtgagactgagttctgtggcgtacacgctgagtcctcagggacagtttacttatcagattgaggggcatctttatgccaaaaaatag

SEQ ID NO: 395755 - DNA, 438 bp, Salmonella enterica
atgggctggcttatcgtcgcgttcggtaccgtattcctgctgatggtcgggcatatccagaacatccagcggggtgaggtgatgacattgcagcagtcggggagcagctctctgctggcccggcagatgctgtcgctggctgccggcattaatgactggcgctaccggcactggcttccagacggaacggtcgccctgtccgcgctggtcctgccggtgacgcccgacagccgtatccggcatgtgattgcggctaaccggttgtgggtctggatgcccgaaattcccggtctggtcgatgcactgcgtgaacagtccggtgggtctgcattaattggcacagtgaaacaggggcaactggtctggttatccggtgtgaccgcgggattgcccttgccggcaggcgttcagaacggggatgtggtgtacctcaattag

SEQ ID NO: 395756 - DNA, 1272 bp, Salmonella enterica
atgaacacacaagcgcttttctgcctgagcctgccgctggtgatgattgccgggtgtgcacagcagacctccctctcaccggctcgcgacagtgcctttgcacaaagtcagcgaccgcccgtcttctctgatatctaccagcgctctccggaggtgacccgcagcgggcgctacacgctggtcaatgttaaaagcgcggacgcacagcgtgagccgcttaaccagctgattgacatcaccatgcccggacagctggttaactcagtcggggacgggtttcgttatctgttatttcagtccggctattccctgtgtgggcgttatggtgccgactttgcggagctgctgaaccggccgttgccggccgttcagcgcagaattggcccgatgcgactcagtgaagcgctgcaggtggtcgcaggtccggcctggcgtatgtccgtggatgaagtgaaccgcgaagtctgtttcgttttacgcgatgcgtatctgacacaggctaaagcccggacgcagacgtctgtcataccgcagacggctgttacaccggcggtggccggccccgtcagagacggtgtttattcttctccggaaacctcccgcaatccttataccggcgctctgcccgggaaaacccctgaaccggtggtggccggttacttgctggcgacgaagaacagcagggaacaggctgcgggtcagtccctgccggtacctgcactgaaaccgcctgccgcctccgtgaaatcagtggggacgccggtgtctgcgacatccacggcgccacgtaatccttttacgggtgaaaacctgaccggtaccactatgccggcgccggcgtctccctctcctgtgggggcaaaaccggatgttaaaacaccgtctcctgctgccgttgcgacatcttccaccgtcacaacggtaaagccggccacagcgacggtagcagcggcaaaaccgttaaccggcacaccgatacaggcggtggccagtggtcctgaatggaaagcgattgtcggcagcacgctcaaagagtcgctgacggaatgggctggcagggcggactgtgccaacgggggacactgggtggttatctggcagaccagcaccgactaccccatcgatgcgccgctggtgtttaaaggcaattttgaatcggcactggatcaggtgtttaacctgtacaaaaaagccgacaagccgctgtttcctgaggctaaccgtctgcagtgtctggtgtcggtggcggataaaccggctgaccggtcatag

SEQ ID NO: 395757 - DNA, 225 bp, Salmonella enterica
atgaaatctttctcacaaggtcccatatcccgattcgattttggcgttgccattgttgtgctggttctgatgattgtgttgatttatgttcacccgctctggaaaccattccggtgggaaagcgtatgtcagcatcaacattcagggaagctggggtcgacgcctgaaaaacagatacagaccctttgtgagacgtatcggaagagaaacaatcaggtccgctga

SEQ ID NO: 395758 - DNA, 219 bp, Salmonella enterica
atgttacattcacaatcttcttccactggattactggcagcacagtttgctggtttgtctttacctttacaggttcttcgcagtggtgccggtttctatatcggtacggcaaatgaaatgggcccggtatcccgcgaatccgtggaatatttcgcctctgctgaactggctgaacgtgcgctcgaacagggcacatggtcacagcgtgaacaggcttaa

SEQ ID NO: 395759 - DNA, 1281 bp, Salmonella enterica
atggaaccagtgaaccggagtacgctaccggctgatagcatcattgattatacgcttgccagaatgcaggagcgtctggcaatgcgtagtgatacacagtcaggtcaggaacgcagcggtctgctctttatggggaatgtgcacgatgcgtatccacgtgcactgcttctcgacacccgtctgtcgccgctggataaggtggcatggatgatgatacgccagtatgccctgcagaatgacggggccattttcccctcctacgatgaattgcagcaattgctggcctctccgggctcggggcaagcgtcccgcggaacggtgagccgggcgctgacgatgcttcgtctgaccggctggctgagtctgtgcaaaaaagtcagagatgagcaagggcgcgtgaggggcaatatttacgcccaacatgatgaacctctgagtgcacgtgatgcggaaacctttgatcccggatggcttgatatggtgggtgatgcctgccggcacaaaagccgggctgtcaatgaaacggcatggcagatactgacatccatacaggatgacccgatgatgcgacaccgtcattcacgggtgacgttgattgcagagcgtttgacacgcctgcccgatgctgtgcagttagcccgaatacagtcgagtgcgaaaatcgaactcagtacaaaagagacagaaaatcagcctgaaatactgagttcgaatatcgaactcagtcatgactgcgatgagaacacactgagttcgaaaagagaactcagtggagaatcaagggattgcgacagagttcgaaaatcgcaccataataacgtacgttctttcacacaaagtgtgattaaaaaaacgtacgtatctccgcaggccgacaaaaacgcggtagccggggtacctgagggttttgtatggcctgaaggtctgcaggacattctgccggtgaacgagcagccgatgctggctcagcaactgaaccagctggcacagaaatcaccggttgtggctgaacaggttgctgtcagtctggtgaatggctttcgccagaagcacatccacaatccagtgggctggctgctggccacactcaagcaggcgagagcagggcagtatcgtgtggaaccctctgtggtagcccccgccaaacctgtcgtgcccgtcgaatcatcctctgtgatgagatcctctgaatatccagccgaacctcatatcccagcaaatcaggatgtcgtgaaagcgatggtggcggaaattcgtcagaaactgaattgttcagcatga

SEQ ID NO: 395760 - DNA, 447 bp, Salmonella enterica
atgaggggcatacgttccaccctgcgccccctgcggaggttcctccggggggggtacgtattcagctgcgtcatgttactgatgttgttggctctggttttaaaagatgctggcggggtagtgtggcgaagcatatatctggcactgtttctcggcgctgtgttgtatgaggttatgtggcactcagacagggaggattgtctgatggtgactgggctgatgtggatacaggttgtattgctgtgcaccctgctgatgtggataccggttgtattgctgtgcaccctgatcttcgcgtatggactggtgaaaggcttcatcctgtgggaatggccggaatatgagatacatatgatcatcactggcctgccgtacgctttgatgatgggcgtggggctcagtgtactgttcatgttagtggtggctgttatttttcagcgcaattaa

SEQ ID NO: 395761 - DNA, 249 bp, Salmonella enterica
atggatccacggatacctccatttcatttttaccgcaccgatccacggtatgtgagtaaatcaacaacgtcaaaggcgcgttccctgctttccctgtatcagcagggaaagcgggtttacagcaagataggccagacagggtatctcaagattgatttgggattccgttggcgactgttaagcaaggacgccggaaaaagctggttatttatgtctcaccagacttatgaccgggagctgaaacgatga

SEQ ID NO: 395762 - DNA, 723 bp, Salmonella enterica
atgtcggcgagtgaaaaagtgctttcacgtatcaggaagcttatggctctggctgataacaccggcaatcctcatgaggcgtcggtggctctgcgtcaggctcaggcgctgatgatgaaatatggtgttaccccgggctccgttgtcatggcagagataaagagtgaaacgtgcaggaacatccccagcaatgcactttcgatacccggctggctgaatgctctggtttcggtgatctgcatggccgcagggtgtcgcagctattacggctggtatcagcacagtgacaagaagaagcgtcgcagcgtgacgttctatgggattggtgaacgccccgccgtggcgggttacctgtttggcgtggtttgccggcaactgaaacgcgatgccgatcattacctgcatacagcatgtacacatccgttgctgaagctctccactatccggcgtcgtatggatcaatatcgcctgtactgggtggcgggaatgtggtcggtgctggagtcttttgagcccgagtcctcagagaaagcggtgctcgatcagtggttatcacagcagcagcgtagcctgactcccgctaaaatccggcagccggaggggtgccgcaatgcagagaaagtcagacacgcagcgtgggctgctggcagtcaggctgaaatttatccggcaatggattatcgcaatgaagaacaatcgcttcaggaggtttccaatggttaa

SEQ ID NO: 395763 - DNA, 264 bp, Salmonella enterica
atgatgaagagtctgaaaaagccccgggcacattaccagtgggtgggtgccacggtcgtgacctgccatgagttgcagagttcccttgcggtactgcctgcggggagtcgcggcgtggtgaatgccgcaaagcgtgggctgtcggtgatatttgatgcctgtccgtgctgtggggtccagctacggctgacccgtattcgccctgagatgctcgatatcgtggcgtatccggaggttgaggaggtgacccatgtcggcgagtga

SEQ ID NO: 395764 - DNA, 225 bp, Salmonella enterica
atgagcattgataccgatgatgcgatggctcaaatcgaatcgcagatacacatagacagcaggatagctgaaatccgggcagccctgcgtatgcaggggcatgtttcccgacaacactgcagggactgtggggatgagatacctgagaagcgccgtaagttccttcctggcgtgagtctgtgtaagcaatgtcaggaatggcgtgaagcgggagagaaaaaatga

SEQ ID NO: 395765 - DNA, 1800 bp, Salmonella enterica
atggctagagcaccgcttttaaatctgggtgatgcactgttgcagggcgccaaagagccatcatcagcgcccgctgtccccgtgttaccgaccagtgaaatgccgatggtgctgacacttgatgaggtggcgccgaatccggataacccgcgcaccacgcgtaaccctaaatacgatgaaatcaaagagtccatccggacacgtggactggatacggtgccaaaggtcactaaaaatccggatttaccgggttcgccctatattttcagtgacggaggtaatacccgctacgcagttttgcgggaactgtttgccgaaactcaggatgagcgtttttatcgtttccatgcattgtttaagccctggccgggacggctggaatgtctcgtgggtcatctggctgaaaacgatgtccgcggggatttaacttttattgataaggcgctggggataaaaaaggcccgcgccattcatgaggaagtgctgggacgagcagtgtcgttgcgtgaactgtctgacctgctgggacagcaggggtatcccatccattactcactaatcagccgtatgattcatacggttgagtatctgtatccatttatgcctgacctgctggcatcagggttgggaaagcatcagattgaaactttattaaatttgagaactgatgctttaaaaatttggcagcaatattcggttatgactgagactgatagtgactttaatgaggtgtttggtcgcgtctgtgctcagtttgacgatccggaatcgtattccttcgagatgttcagagatgaatttatcggtacgttggtcaatgttctaccacacccttctcttaactatgaccgatggttacttgagttagatcctaaggcgcgtaaccagagaatgttgtttggcgagccagagcccgttgcccctcatcttgtggaggcagaccgtcaggcatggcagaacgcttctgcatcattgtcgggggctgaaaacgatgagaatcaacagagcaactcctcttcagattcgatgttgatatcgacttcaaataatggcgcggtcttatctccacaaccagattcagataatgacgatgacggaaccggggaagggttcggctcttctgaatccccgcgtttgcctaaagtcgaaatccagagcgatctcctcggtggccccgctgttttgtccggtgacattccattcggagagccacaacttgctccagatgtcggcaatatcgcggtgatggcgtccgcctttgctggcgctcaggcgttgctaacggcggacacatcatctgatggtgataatcctgcagacgataacacgtctgatattccgcttttacctgctgcccccgccttgtcctctgtggcatttgccaatgttggactggagcctgtcagtgacatctgggcgatttcggcacttcaggatgatatcgaacatctgcaggacatggcttatcggcttgttttcgaacttgcggaagcgatgggctgtgagatggacgtcagcgaagataaaagtgccggtgcggccgggttcgctgtatcggagcacggtggagagttcgctctttttctggcagggctctccggccatttacccaacagacagttcaatatgtttatgttttgtctcaattttattggtacgcaatctgcgggagatacgcctgtttttgacgatgtacacgtggtgaaaaccctgcgtcttatccgtgttattcgtcgtctgcgcgagctgcagagaaatatacccgctgaacaacatgacggggggatgtatgagcattga

SEQ ID NO: 395766 - DNA, 498 bp, Salmonella enterica
atgaacactaatgaaaattggcgggatgaactcgaacgtaaacatcaacagagtgagtccgacaaatccggggcaaccagtaaggttgaggaatactacaagcgctggaaggcaggcgcgctgtctcatgcagatactgagcattgccagactttttttgataagggaacagaggtctttcccggagccggtcaggaacttgcgtaccgtctttgctggctgggacaatggctgatacaaagccgtcactggcatattgagggataccccctcattctcatcccccaggcaataaaatttgcgcttattcagcagcatcactggctcccctctgagattgattccatgacgcctcaggagatttctctggctctgatagattactggacagaatttgagatggatccttatcagagggcgctgcgtcacatgattggctggcaatatcagaaactaagtgatcagaagcaatgcgacctgataaagacagggaattaa

SEQ ID NO: 395767 - DNA, 510 bp, Salmonella enterica
atgaaagacaacatgattaatcagtcaaaagcttcatcacgtttatctgttgccacattgatggagcatgccggaattgccctgattcgctatctggaaaaagaaattctcgagaagggtaaaaccatttctgatgaaaatatccagaacctctgcacgtcgtattcagaggctattgatacgggatttaatttactactgaagacctttgagagccggctgctggaacagtgttgcgaactcgaactccgtgcggacaacctccatgctacatgtcagaaactggaatcccgctacaggtcgtcagtcgacatgcttaattccctgtctttatcaggtcgcattgcttctgatcacttagtttctgatattgccagccaatcatgtgacgcagcgccctctgataaggatccatctcaaattctgtccagtaatctatcagagccagagaaatctcctgaggcgtcatggaatcaatctcagaggggagccagtgatgctgctgaataa

SEQ ID NO: 395768 - DNA, 222 bp, Salmonella enterica
atgagcaatatgacggtcaataccatcctgaaaagacttcaccgacaacattcttttgagagcaaaaattctgcgacctgtgttggctgcggttgtacagacaataacgcctgcgtgaatgaatatcacgatacgtgctactggctgaaggttaaccgccagtcagggctgggcgtatgctcattctgccccgaattcctgagccataacatcactgagtga

SEQ ID NO: 395769 - DNA, 369 bp, Salmonella enterica
atgagcctcaacaaaatctggcgggctgttgcatattcaaccgatcaatacaagcctcatgatgaagtacatgtgttcgttgatgctcctgatcctgaaactgcaaaaagtcgcatttataagcggctgagtgaagagtgggagctcgccggcggttttattgatttttacaacttctggagtgaggccgagttgtgcgatatggcgaatggcccattaatcccccgagggctcccactgtttgaatcaggagcggcatttaaaggtgagagtgtagaagtttattacgatcgtgagcctctgattcttgttgcatcaccgcatttacgggaagtgcttgagaatgcattgcaggaggtaaggtcatga

SEQ ID NO: 395770 - DNA, 345 bp, Salmonella enterica
atgaaaatttcatctcctacgccttgtttaaactttgctccacagaaagaatattctgctgccgttgttccgcatccttcaaagaatgcctatgcggattacgttttggagacaggtaagcgaataccgttttccgccgcagatttaagcaacctctaccaaagtgtcatttacgctgtccacagcagtcgtagcaggctcatcgatcagcacacggccgatatgatcggtaacactgtacttgatgccttaagccgatcacagacctttcgtgatgccgtcatctatggcatccataataaggaagtgcaacttggctgcattacatacagaaacgaatactag

SEQ ID NO: 395771 - DNA, 981 bp, Salmonella enterica
atggattttgaagttcagcagctgtcgacagttgaaaatatcaggttatctgtagttgatggaacgtcattcactgtttatgacctcttgtttaaacatgggcgtgtcgctgccaactgggataacatctttgactatatgtttaccgatgtcgacaatgagatattgtggggtttttttgctcaccatccggagacgctttcaggccataaggtcagtgttcctgaggagtctgttgataatgttgtaaatcacatcatttcagcagcagataagccagacgcgttgtatgcacagttgattagcgtgctgcctgtgagcatcgaccaggcagtcagtgatctgccactgacaaaatttaaagcactttgtgacagcaacagagttttgctgtcagaagcgctctataaagacgtactcagtatttatgaaggacaacgtcgcaagggcctcaatgagtgtctgtcgcttatgattagaaacaacgttgctgtttttgaaagtaatattgagttttacttgcaagatgacgaagatttcgataatgaacttattgagcttgtgctcaatgatgacgatatagcgttgactactaaagtttcaatcatcgacattatctggccgcactataccaatagtttcttcgaccatataagcgtgaatagtaagatcagtatggtacttcttcttaatgtttcggaagatgacacccggcttgtgttcttgaatcatcttttagagtttgaaaaactgccttttgaatacatcaatcgtgcacttatggccttcgtgtcggaagaatacaatttgattgcggataaaaccaaacgagcaaaagtactcaaaactgaaggtaatgagatccttttaaagtatttaacgcattgctactttatcagcagttataaagacaagggggaatcctttgaagtgtatcattaccgtaagatgtttctgaacgaatcaccagatgatgattaa

SEQ ID NO: 395772 - DNA, 201 bp, Salmonella enterica
atgtcagaaataagtaatgatcgcattgttcgcgaaaaggaatgcaggaaactttctggattatgtcgcgccactcgtttcctttgggagaaaaaagggaaatttcctgcacgccgtaatataggcgggcgctccattggttggttactgtcagatattcaggagtggcaaaagaatcagccgaaaagagatattgaataa

SEQ ID NO: 395773 - DNA, 180 bp, Salmonella enterica
atgtcaaccatcagtattaaaggaaaaggcaataaacagattgcattgcgtgtagagccagaattagaagcgggtataaagcaagcattggcgcaagatggcgatgcttctgtttctgcctggataaagcgaataatccgcaaagaactacagcaacgcggcatagagccaaaaggctga

SEQ ID NO: 395774 - DNA, 1269 bp, Salmonella enterica
atggggaagttgaccgataagcagataagggcatggataaaggccggagaacgatttgagggccgttcagatggtaacgggctttatctatcctaccgtgaaacttactcaatccctgtttggaggttccgctataaattttcaggtaaggcccgcgctatgcttattggttcttatggcgagttgtcactatctggagccagagacacagcccgcaagctggccgctcgtgtagcgctggggtatgacgtggccgcagaaaaacaggagcggaaagccgaagcactctcaaaaatcgaagccgaaaaaaacgccttgcgcgtttctgacctcgctaatgagtattacgagcgccagattctgggacgctggaaacaccccgatatactacgccgccgcattgataaagacataacccccaacattggcaagatgaaggttgaggacgtcagaccacgcgatatagataacatgctacaaaaaatcgtatcaaggggtgcgccaaccgttgccaatgatgtattgcgttggactcgccgcatatttgattacggcattaagcgcgaattactggacgttaacccaacaagcgcatttgaaatagccgacgcgggaggaaaggaagaaagccgcgaccgatggctaacgcgtgatgagcttattcgcttctttcaggctatgcgcatggctaagggattcagccgcgaaaatgagttgtctatgaagctgattcttgttctttgctgccgcaagatggaactatgcgctgcaccgtgggatgagtttgacctttccgggggcgtctggcatttgcccgcagaacgcgcgaaaaacggcgatgcaatagatatccccctacccgcccccgccgttgaatggctggcagagcttaaaagcattgccgggggaagtcgttgggtattgccagcccgcaaaatgcagcaccgcatgttaccccacatacaggaaagcacgctgcccgtagcgctggctaaggttcgccacgaaatgccagaggttcctacattcaccgttcacgacttccgacgcacagcccgtacacatctggccgctttaggcattgaccccgtagtagctgaacgctgtctaaaccatcgcattagaggggtggagggcatttataaccgccacgagtattttgatgaacgccgggccgcgctggaaaaatgggccgccctgctggtggcactggagaaaggagaactttacaacgtaaccccatttaagcgccctaaaaaggcactttaa

SEQ ID NO: 395775 - DNA, 921 bp, Salmonella enterica
atgactgaaacaacttacccgctagatgtggccgcagaaatgctagggtgtcagcaaaagaaaattctcaccgagtgggccaaaaataccattagcatagtaatggatttaggcgataataaagggccgatagctcgtatatctattgatgccaaaacccaacctgactcaaaagagttttttaacagcttttcattgtctgaaatgcgaatcggcttatttaaaccactaaccccggaacaagaaaaaataaacaaactgatagatgaggaacaaaatagattactattacgccactacggttgttcagtttttaaaatacacaataattttagagatgatacaaaaattaacttaaaggaaaatagagaattaattgaaactaaagcagtcatttcggggttatggatagtaaattataacgatttcattcgccagcatgttcaaaatcatttcacacttactccctatcctgctggtgtagtatctggtgagataaaggctgaacttgaatccgattactatcatgagcaattcaggcttactaaaaagaacttacgtataaccacaagtgacatgatgataatgcgtgggatactggcaggacgccacaacaagaaaacaaaaacactaccagccaatgaaattgctgaacaacaaaaacaacatggcggtattgagcgttttgccctcgaacgtgaaaagattctagcggcggccctgtacgttgcacaccactacccaaaagagataggcaaatcattcaaatctcacgccgaggctatagaaaaacacagctatatcttttggaagaatgaacccgcccccgacgcgggtaggatagcgaagatgatttctgacgctgccagaccaccggaagaatggaaaattttaggagggaacgcaaaggcaaaaaaatga

SEQ ID NO: 395776 - DNA, 201 bp, Salmonella enterica
atggataccctacccaagtctggttacatgcgcccggcgcaggtaataaagcatttccagatatgtgaatccacattatggaattgggttaaatcaggcaaattccccaaacccgacaagttatctgatggtgtaacgcgtttcgatgttgccgatattcgcgactggcttaataaacgcaaaaacaatccaaaccattaa

SEQ ID NO: 395777 - DNA, 810 bp, Salmonella enterica
atgaacaccgaaaaaaggcccgtaacagggccggaattcgctcaccctgaaaacagcgtaaaggttatttcatatagcggcattgcggccctcgttcccgttattccggggagtattggcggcaatcaaacgcatattgtaagcgcacgcgcattacataaagcgcttggtgttaaacgtgatttcaccacatggataaaagaccgaatcaggcgctacggttttgttgagggtgtggattacgtcattgttgaaaatttgcgctcaccaaaacgggggagcgcaaaatctcgccaacaaacagagcacgactatttaatcaccctcaacatgggaaaagaaatagcgatggtggaacgctcagagcagggccgaaccattcgccgttacttcatcaagtgcgaggaagatttacacaaggccgcgccagaaagagccgcagcattgcgccgggaactgaaagcccgtattaccgtagccagttactttaagccaatgtgcgcggcactggacttgcaacgcgcagagacaggaaaggcaacccaaccacaccattacacgacagaagcgaacatgctggcgcgtatcgcgctgggtggcataacggccagacagtgggcgcagtctaacggcgtgacaggcgacccacgcgaccacatgaacgccttacaacttgagcacctttcttaccttgagcaaagcaatataacgctgattgagctagggctggactaccaccagcgaaaggccgaattgatgcgactctcacagcgctggttagcccgtcatatggaggccagccatgattaa

SEQ ID NO: 395778 - DNA, 471 bp, Salmonella enterica
atgattaagcgcaccaccagccgcaggccgcacaaaatgattgaccgcaccaccccgcccggttatcgttaccacgcgctttataaaacgagcgccgggattggaaccccgaagttaacaaaggcgacaccagacgccgcaagcgtctttttttgtgtccgtcatatgcgccattttatggcgtggtgtgccatacatccgcagggtttacgatgccgccccgccggactcatcacacaccatgccgcccacaatggcgcggtgtgcgtaccttgcgccgggtttactccgtttttccgggcaagtaacagcacatcgcgccgccgtataatggtggcgttggcggggcagccgcaaggctggccggtttcctttgttcccggtagttccaaccccgtcaacgtcaccgcccctattgagattggaacctcaggcggtgactccttaaccagaacaaaggaggccgcataa

SEQ ID NO: 395779 - DNA, 234 bp, Salmonella enterica
atggctactacccctaccccgtcacaccctcaaatcgtctatttgccgtatgtatccgccgttaacccggaaagcagccagcttaaccagtggctacaggaggcggaaatacgcctgcttgaccgcgtaaaggccgcacttgatgaagctggcgttacatggcttgacgttcgcacacgcgagacgaaccagcccacaaccaccagcggggagggatgcgacgatgcgcaataa

SEQ ID NO: 395780 - DNA, 189 bp, Salmonella enterica
atgcgcaataatcgcccctgtttcgtctggctgtttgcggctgtttcccgtctggatcttgccgaccacaccccgcacatggtgcgcatttccgcaccggatgaactgaccgcccgccgcctgctggtgggccgctatgtgctttctttcgctggccgtgttcccgttcaggaggtgcgccatgtataa

SEQ ID NO: 395781 - DNA, 306 bp, Salmonella enterica
atgccgcgtcccgtcaccctgccggattcactttgcgcgtttattcgctcactggataaaccgccagtagtcacagcccccgcccgcaacgccaccgaaccggagacagacaacgccagcgacaccacggccccgccagcgtatccaccacccccggcatgggtggcggcgcgtgatgcctatatcagccacgtcatggcctgtaagcagtgcgtgaccagcgggctacgcattccccgccattgcgccaccggggaacggctacgccgcgaactggatgcgcagccgtgggagtcagggccgtaa

SEQ ID NO: 395782 - DNA, 234 bp, Salmonella enterica
atgcaacatatgaaaataatggcagcggcggcgtttttgttcgcaggcgctacacaggcgcaccctgtcccgacaaaacagcctcaccctgtccagaccaccagcccgacgaaacaggacggcagagacggacacaggggcgttaaaggcgttaatgacggtgcgggcgaaaaaggagaggacggaaaaaacggcgggaatggtggccggggtggagatggcgcggatggctga

SEQ ID NO: 395783 - DNA, 282 bp, Salmonella enterica
atgccagctattgagttgatgaatttacgtatacagatagacgataacgcctttgcgtctatccgcattcttgaggtagcccccgccattttaggaagtaaccacacgtacaaatacagcctcgcctatgtcgtcaatggtgagtgtgtaatgcgctatgacaacgaacggggtaaaggcgaccataagcacatcggcgcaaatgagtacccggttgagttcaccactatagaaaacctgatagccagctttcaggaagatatcaaccagctacggaggtaa

SEQ ID NO: 395784 - DNA, 360 bp, Salmonella enterica
atgcgagtattaaccgtcaaagtgatggcgataaacgacgctttcagcgttgcagcgtcggaagccgtccgtgcaatgggtggggattttattggcaatacgctgatatttccgaccgttgaacaactggctaaaaccatgctcgcccccaaccgctggcagataatcagagcgatggagggaggcgcagccgtatctattcgcgaactggcccgcaaggtggggcgtgatttcaggggggtttataacgatgttcaggcgcttattagcggcggcgtactgtataaaaccgatgaaggtatagccctgccctatgaccgtatccatattgaatttaactcagatgatgcagccgcttaa

SEQ ID NO: 395785 - DNA, 495 bp, Salmonella enterica
atgaaaatcaacaagctgatattattcggattttttattactccttattctgatgcttcaacaacgatgggaaaattacctgttaatgatggatggcacagtcctcaacagatcttttcacagcatcaaaagacgagtacgaatgcttaccgaattccggcgatcacggccacgactcaggggacggtaattgctgtaagtgatgccagggcagatggtacaagcgatattggtttaaataaagatgtgcatttcggatacagaatatctactgatggaggaaatacctggagtcatgaacaggaaataattccggatattaaagggaaacatcaaatttcagatccggctattgtacataatactgatacaggcagcacattcctttttggattttacaatgacaggtttattacagcgaaacctgtcagtaataattctgattttttatgtttaaatccgatgacggaggaaaaacctggggtaagggagtaa

SEQ ID NO: 395786 - DNA, 435 bp, Salmonella enterica
ttgctgttatctgcgcatctggtctttttattcataccgctttcgcggctgaatctgcgaaagatgctaccgcctatacccaacaggttaatcaataatacacgaagaacctgccgttcagcgatcggcaggactttgccgatgtgcagcgcgtttatctctcccctgctggatcagggtattctaaaaaccgccagcgagaagccattctatcgtgccgaagactacaaatttgatatcaacgcgccagcgccctgttctatcccagctttgatatcaaagccttctttggcctcgattccatccatctggataatttgtttaaaaacaccagtaaacagatcaactttattccgggcttacgcctgccgctttttgacggcggacgtcttaatgccaacctggcaagcaccagggccgccagcaatatattga

SEQ ID NO: 395787 - DNA, 135 bp, Salmonella enterica; identical to SEQ ID NO: 377603

SEQ ID NO: 395788 - DNA, 126 bp, Salmonella enterica
atgccaggaatagcgaaacgtatcgatattttcaggattccactcaacggcttgttttatatgttttttctgacaagtattaacagcgttattgtttgttacagccccccaaatatttatttataa

SEQ ID NO: 395789 - DNA, 381 bp, Salmonella enterica
atggcgtctggaacaaataaaatagtcataattatactgacattcatatcttcaattgtagttgtggtgggggggtattcattttcttcatgggtttatgaacaaacatttattgtttcttctcatcgaactgtcggtatgatatttatatcatttttctttatggccattgcgactccgactttactgctcgctttgctttcaccagtaagaataaatttaactgtcttagtacttgcaatatctttcctattttatgagtggttttctatgcatcctctacgtgtaagtcttatggggggatgttttataataagttatctgtacgtggtgcttataaaaaaatattttctttcctcacgttcgaagtctggagtttaa

SEQ ID NO: 395790 - DNA, 558 bp, Salmonella enterica
atgaaacttaacaaaaaagagatagcttcaatctttggtgtcaatcagcgcactattgagcgctggcaaaatcagggaatgcctcagatatccgggggaggtaagggggtggcggttgcttttgattccgcaaaggtgattgagtggtatgccgagcgggatactgctatagaaaacgaaaaattacgtaaggaagtggatgatttgcgggcggccgctgaatccgatcttgtaccgggaagcattgactatgaacgttaccggctgaccagggcacaggccgacgcacaggaactgaaaaacaccgagcgggaaggtgaggtactggagatagatctatttgcctacattctgcaaaggatagcccaggaaattgtagtgattcttcccaaagtaccgcttaccctgcaacgtaaatacccggagatgccggcaggcgtgattgatgtagtggcaacggaaattacaaaagcaacagacaaggccgcaacgatagcggatctggagaagtggctaagtcatttcgacagagagatcgaagagggtaaaaagccatag

SEQ ID NO: 395791 - DNA, 792 bp, Salmonella enterica
atggattacggctatgacagcgattattacggcctgatgcttggcgccgacgccacgctggaaagtgacagcgggaaatggcgtaccggcgcggccctccatgccggacacggtaacgcggactcccggggagattttaactcaacgcataacgccatggatttctggggcatttctctttatcagaactggaataacggacgcgtcaacgtgacgggcgatatcgggtataacgccagcagtaatgatatcgaacaaaaaattcctggttggatgaatgcgggcagtacgctgaaaggctcgccagactcgcagcttatcaccgcaggcatcaccggtgagtacctgatcagtacgcaagcgatagatattctcccccacgcgggcgtgcgttataaccagttaaaaacgaaaggttttaccaccaaaaatacacatcgggaggcggtatttactacccaggaagagacgctggatatctggcagttcccggtcggcgtcaaactgaataagacgtttgatctggatgccggatggggattatcaacgcaggcggatttcgccgtcattaccaacatcggcgatacgcaatccgcgacgaaagtcagcgccgtcggcattcacgccagcgatggaattagcgccaacttcattgataagaccacatttgcagggcagatcggtgtaaaattacagaaaggcgacatgcgctggggactgggctatagcgtcaatacttccagtcataataccgatcagatgattaacgccatctggcagcttagtttctga

SEQ ID NO: 395792 - DNA, 264 bp, Salmonella enterica
atggaagttaacattctgattgtatcaaacaaaggtgttgaatctttggttgaatttaatctcgatgacgatttaaatacactcataaaatcatatcgtacaccacaaaataaaatggtttgtattcttcaggatggtaaacggacgcatcgctgggacagaagttatggttctgtacagaagaatcactggcgaaaagtagctcctgactgtttcgaaattctcggttcaatagaaaatatccgacatgccagagaaatttaa

SEQ ID NO: 395793 - DNA, 588 bp, Salmonella enterica
atgtacctgcatattgttccaaacctttttcatttgatggctaatgagtgccgtctggagtcaataactattcctgagtttgatttcaaaatcgaagttgatgcactgtcaacaggaagaccctggcctaacagaaacgtatgggttggaatgcgaaaaggcagaaaagcgattaacggccttttactgaataccgataaaaaaattaaatggtttacaactgagtatcaatggaatattgagagtatgggaatgataagtcatcgtgtaacttcctatattgaagatgatgaatttgatttggtatcacaggatatattgttaaataacggatttgatgagtgggaatgccgggtgcattcagcttacgaaaacaaggctccagtacaaattcaaccccaaatggagtcttttatcactaagccaggtaaagaatcacatgatgtatggatagaatacaattggggtgattttcttgtatccagagaagaaagtttactccttcatactattcagtccgaaaggcttaatactgatttctctttgttcagtcggtttccctcctttaaacaggttattaatatatga

SEQ ID NO: 395794 - DNA, 333 bp, Salmonella enterica
atgaaatcttacgatagcgaaatcaattcatggtgtgagcgtaaatatcagtacgttgttagtatactgggaacggataatgttgatatctatgttcatgcctacactcgtggtgatgaatggatagcgtgcgatattttcgctcacggtgacaaaagtaaagttgctgatacaaccttttcatttggtgatgagactaatttagatgacctgtattcgccgcaggtgaaaaacgtggttattctgtttgaccttctcgaaaaactggaaaaacagtttaaaggaaaaatccacttcggaatgccagaactaacagctaacagaaaggaatga

SEQ ID NO: 395795 - DNA, 123 bp, Salmonella enterica
atgaaatttaatggtgtagaatttcgtcataaggaaacgcttgatgaagaaaactggttatcatttattgataaacagcgaatgttccgttgttgcagaagaataatccgctgcaataaatag

SEQ ID NO: 395796 - DNA, 273 bp, Salmonella enterica
atgatgacaggaaccggaattaacacagtacgtatcaacggtgagatcaaatacattaccgaacttgacgccataacgcttagtaacgagtggtcaaagctgaaaaatgaaaatgcagacctgtaccgctataaccatcaggtcagccagggctggcgcggtctcgttcttcgcctgataggtgtgcatctgccggataaagagcgcgtgcgtcttgagggcatcattctgtccaactcttttacccgcttaatccttgaggacattaactaa

SEQ ID NO: 395797 - DNA, 546 bp, Salmonella enterica
atgcgaattttaaaattatctttagttgttgctatcctatctggctcttctgtaaatttctctgcggtggctgatacatcaccagcaaccagtaacgcgcaaagtgaaggggcgttcggtgcgaattatgggatgtttgaatatactgattcagattcacttattaattctatacgtctcttggagaaatttgggtttaatacatccgtagtagcagatacgctagatttaaattcatataaaggtagtgttatcatttttaaacctgttgccggtggcaaatcgctatcatatgaggatgctcttgcagcgttctcaaaatatatgaaacctcaacaattttcttcgagtgacgccattgtcgtcaaaaatacaccactttccgttaatgagggtgggacggtgatgaaacaatattataatgttttgtttgctggagagagtgctgaggcaagtcagccattccagattcccaaaggcggcttggctctgacggtactcaagatggacgatggaaaactgcttgtgatcacatccacgccgtaa

SEQ ID NO: 395798 - DNA, 174 bp, Salmonella enterica
atgcaacttgcctctttattgagcggagccttatatcggctgctgcctcatgaaacatgcacgtcgggtgaatggatagccagtcacctcgggtacctcagcgtcgtgctgagatacgcggatgattatggtctattccgggcctttgtcagcgtgcagcttataccgtcctga

SEQ ID NO: 395799 - DNA, 378 bp, Salmonella enterica
atgaaagccatgctggccgttcagttgcctgtacaggcaaccaccggggaagacggtctgccggatatcgggccaaagcggtcgctgcgcgtctataatgacacggcgctgatttacaatgagaacacgggagggcggacgctgaagaatatccgggcagggtcaaaaatggcggtggcggtgattgaccgggagaatcgtgacggataccggtttatctgtacgccgttgatcacagaggacggggaagcgtacgagaatgcgctgaacttcgcgcagaataacggtatgcagcagccggtgtgtgcggtggtactgcagattaatgagatatacagcctgcgttcgggggcggatgccgggaaaaagatccagtaa

SEQ ID NO: 395800 - DNA, 471 bp, Salmonella enterica
atggacaacacacaacagacttacaccacgcccccactacagcagaaaaaaacaacccagagcaatcatgacccgttcgtcattccgccttcgttacagcagtatgccgacgagccactctatatcctgatcgccctgtggtgccggcagcagaacaactgggttagccgtatggccatttcagaagccttcggtatcactgaccggcgcgcatcattccaggtgtcctatatctcccggcataaaaagcgggttgactgtgaagtacgggttatccggaccgacaattcacagcgcttttatcatgaactcagggtgaaagacgtggtgctggcccgggatacagaaaggacggtgcctgccacgcccaaagcccggccagtgaaacgcagcagcgtcggaaacgccacgccggagctgcgcaatatgttcaataccctgattggcgcgcaaagaacctgcaggaactga

SEQ ID NO: 395801 - DNA, 1494 bp, Salmonella enterica
atgtcttattctgatacgcctgaacaggcggccgttatcacctggaagggggaacgtctggttgtcagtgcctttgccggcacggggaaaaccagcacactttgtcgatatgcggaagaaaacccgaccgaacgtatgctgtatgtggcgtataaccgggccattcgcgatgaggcggagcagaaattccccttcaatgtgacctgtaaaacctcacatcaactggcctggccgacggtcgggaaatactaccgtcatcgcctggtgaataccctgcgcctgactgacgttgcccgggcgcttaactcccgtaactggttgctggccagactgacgcttgatgtgattaaccgatttatgtgtagtgcgtcttcacacataacggcagaacatgcgccagagcctgatgactgcaagggacttgaacccgcacagatactgctgtctgccagaagaatctgggacatgatgtcagaccggcagggagactttccggtcactcatgacacctaccttaagctttttcagttgagtcaccccaacctttcattccgctacagcaccgtgctgtttgatgaagctcaggacgccaatcctgtcaccagtgccattgtgcttcatcagtcctgtcgggtggtgctggttggcgatacgcaccaacaaatttaccgctttcggggggcggataatgccatgtacgccccggagctggagagcgccgaccgcctgtggctgacccacagtttccgctttggtcctgaagtggcacaggttgccaacagactgctggcgctcaaaggggaaacgcatcaggttacaggcaaaggcggggctgaccgtgtcctgcaaacaacaccgcggacgcttggccatcatgccgttcttcaccgttcggtctgtggggtgatacgtacggcacttcactggtcgctgtctggaaagaaggtgtactgggtgggcgggatggagagctacaaggtcgaggacctgctggatttgtactggttttcggttgatatgactgagcgtatgcagcatgacaggctgacgcgtgaataccgtgattatggcgagtaccagcagatagctgaagatacgaatgatgtggagatgaagcaggcgatttttattctggagcaattctttccgttaccggacaggctgaatacgttgcgtgaacaacgggtgaccacggagtcggatgcggatgtgaccgtatgcacggcgcacaggagtaaggggctcgaatgggacagagtgaaattacatgatgatttcgccgatatcctcgatcctgagatgtcggaaagcaaacgtcatgatgaaatcaacctgatgtacgtggccgcgacccgggcgcgtaaaatactgatccccgacccgatattgtccgaacttcttgcccagccaccggctgaggagctgttcccatcccggtctgaaggtggtatttcatccccagaaacaggcggggataaaaatgatgtggcataa

SEQ ID NO: 395802 - DNA, 1581 bp, Salmonella enterica
atgatgtggcataagcttcgtaacattctgacgggtgtccccgttagccctccgtcatctgtttcacgcaaggctgaaggctcgctccaacagcggggatatctggagccgcgctcggccggatcattactggatactgagagtcgacaacatttgctcagacagctatgggaaaacagcctgttgcctaagacacattatgaacagtattttctggcgccactgaagcgatgcgtttcactgatgcaacaacttcctgcgactgcggacgggcatcacgccgtacctggagggatggttgattatacgttgaaaacagtggtctatgcgcttcgtctctctcgggggtatatgttacctccgggtgccagcgctgaggaacagtcagcccagagtgcggcatggagcgtggtggtattttatgccgccttatttcattctctgtcttctctgcggcagattgaaggtgagctgctaaacggggaaatttggtatccggggatcagcgtacccggtcaaccttatcgctttcgttttagtcctaatataccggacggcgcaggggaggggctgcgtacgatgctgggaatgcgtttacttcccggtgaggtgatcatttggctgagtcaaacaccgcaggctctggatgcgctgttgtcatttgttcgtggcaacttcggacatgccagtgtcatttctaaaatcgtgggggatgccatacagcatgcgggtggtgacccccgaagcgtgctgtatgagctttcagtttctgtgccacaatccccccctgtggcagcactgccgccggcgccaacggctaccgacacagtggccagcagcgtggcggcattgaccccatcggtggaaacgtccaacgaatgcgctttacctaccgaaggacatgtgcaagtaccgctggacggatcaatacctctaacgtcggcccttgatgagaatgtatcccctccgatccccgctgttcaggctgagcagagtgagggcgatcaggctattcaggatgtgttatccctgatggggttggctccagacgtttccgtcgatgaggccgttcctgagcaggtgggtgccgtgagtcagacgatggatgaattaccggctgtcggttctgactgcacggtaagttctgacgaacctccctcgcagacgacaacgttactctcttctaaaacccgttgctctgacgtaaatgaggattatgggccgcagtttatatcgtggctaaggacggaaatgatatcagggggcttaagtgtcaatgccaaagaggcgcaggtacatatcgtgggtggcctgatatttctaccaacgccgaatatctttttctctttcatgaaagacaacgcttacgactcctcgctgaaaggcgatgtgcaacgtggatttgaacgtctgggcctgcactttatacgaaaggggaagggggttttttcctgcctgaagtatgaggatgaaaacagaaagggacgttatgaaaaaatatcgggttaccttatcaggtcaaaaataatctatgagtcacaccctattcctagtgactcattgtttctttttgtatcgtga

SEQ ID NO: 395803 - DNA, 390 bp, Salmonella enterica
gtgagagacatacaacaggttttagagcgatggggggcatgggtcgcagataatcgcgaagatgtttgttggccacctgtagccgctggtttctcgggcatcattccgtcaaaagttaaaagtcgcattcagtgttgcgacgatgacggagtgattatttctaacgttatggcaggggtgcgtagcaagtaccctgtagcccatgacctgctgttcgattattacgttttcgggaaaacgttcatgcaactggcgcgtgaacatcattgctctgacggtcatatcgggaaaaaactacagaatgctgagggggttgttgacggctatctcatggcgttagaaataaagctggaaatggataaatacgtcaggcgcgaggtggcggcttga

SEQ ID NO: 395804 - DNA, 288 bp, Salmonella enterica
gtgatcacatgcacgcagcaccgagtgtctcgcatacacctgctgggatcggaactggaaatcactggtgatattatggaaaaagtgaatgaaatagaagcaataaaattgatactaaaatctatttttccagtttgttttaaactgttatgtatctttatagtgatgtatgtatcaaaaaacatcctgcctttatatatacataatcaagtaatcattgacattgtttcatttctattaatggcttttgtcgggttctttctattcagaaaacgcaaacccgaataa

SEQ ID NO: 395805 - DNA, 744 bp, Salmonella enterica
atgaccactcatgttactcacttttatttccacaattcatcagttcgcattcaggtgatcgacggcgagccgtggttttgcttatccgatgtggcaaaaattctcgaaataaaaaattcccgcgatttgctttcaaaacaattagataaagatggggtagataaaatctacatcatcgactctctcagccggaaacaagaagcagccttcatcaacgaaccaaatctttaccgcgtcatcttccgcagtaacaaaccagaagcaaaacaatttcaggactgggtattcaatgatgtgcttccaaccattcgcaaaactggacgctatcagaagcaaccgccatcggagccacttaactcaaacgacatgagtaacctcaagcgtcttgtatggatgatgacgggaaacatgaaatttgagaatgcgtggaatgcaggtgtttggtatgccctccgttctgcaacaggacgcccttcacctcaaccgttcagcgttgatgatttgcccgctttgggcgaagagtgccgccgtatcatgaaaatcactgccgctgttcactctgctgtttttgatttcgaaaaagaagtcatccgcaaggtggttcgtaaacgtggcgctattgaaccggtactgaacgaaatgcgcattaagctgctggagctacaggagcaggaaagccagggagttctgatgatcgacaaattaagcgaacacggcgtaaaaagtttaattaatcgcaattaa

SEQ ID NO: 395806 - DNA, 471 bp, Salmonella enterica
atgatgttcaactggaaaacgatgtttgttggcctgttgctcgtctctctaattgttgtcggtcggctggcaaatcactaccgcaataacgctatcacttacaagtaccagcgtgatactgctactcacaacctgaagctggcgaacgagacaattaccgacataacgcagcgccagcgcgacgttgccgccattgatgaaaaatacacgaaggaactcgccgatgcaaaagctgaaaatgatgctttgcagcgccgccttgctgctggtggcagggtgcgcgtcaaagggcgttgtacagtgccagtcagcaccacacccgccagcaccggcagcgtgggcgatgctgccaccgtcgaactctctccagttgctggacagaatgttctcagtatcagatccggaattatcagcgaccaggcaaaactgaagtatttgcaggagtacattcggacacaatgtttgaagtga

SEQ ID NO: 395807 - DNA, 588 bp, Salmonella enterica
atgtatgaaccctgtaatgaaataacgcctctggttgaggtgtaccagcgctggcttaacgaccagacacgacttgccgttcgctatggtatcagtacccataaaacgcatacctggcacaccctgacgaccataggcatcacgctggcagacggacggcaggggaccatggtggtcccggcctgcctgctgccagtttcacctgtggtgagaggaatctgggatcacaatgatgtttccctgctggccgatatcagcagcctgcgggcttacccgcagttacccggtattctgctgagtgagtgtgtccgcctgcggcttgatggtttacatgactgtcttgagcaggttttcatccgtctgagggggccgggcctgcgggagtctctgacgctgctgtgctggtatgagctggtggatggcctgcaaaacagcgactggctgtacctgtcagcgttaagtgagctggaggtgaagaaatgggtggaaacccgactgtcgcagtatccattgctgtacagcgtggcggatgaatacgtcttctttgcctgctttggtttctggtctgagagcccaccatgtttgtag

SEQ ID NO: 395808 - DNA, 732 bp, Salmonella enterica
atgtttgtagtgggtatctgtggttttgttttgctggtgaccaacggtttgtccggacggtactggtggtgcagtctggagaataattccatctcatgccaggatttcttttgttatactcagcctcgtatgaaaaaatcacctcattctttatctcctgaacaaaccgtcgctgaacttgcgcattttgcctggtgttcccttgtcgcattacgtttagcgcagcaggatggtcaggcactgtcgccactcagcacgcatgtatttttactgcgctggttaacggtggcgtataagcaaaaacggttcccgcgtacaattgcatccgatattgagggattgctgacgctgggacgcaaaaagggtatcgccgctggcttacttaaccgcgtggaatatctgtggaaatcctgcacggggccggtacccgctcagtcagatttgtaccagctgacttacgctattgaacaacttaaatcgcagggttgggtcaatgcggtggtgagtgacggggaatgggacggcgaacttctgactgaagaatacagcgatactgatgcactgctggtaggaaagtcggcactgatccatggattttctgatgagggcaaactgattgcacccgttgaatttcttgtgactggtgacttgtcagtctgtatggcggttttcgaggcccatgtactccctgctgtcatgccggagcctgaccggatagtcatacagccctga

SEQ ID NO: 395809 - DNA, 174 bp, Salmonella enterica
atgccaaaaattcgatggactcttgatcagaaaaagcatcacgttgccgcctggcgttccagtggcctcactcgtgaacaatattgcgacctttacgatatccctttcaaatcattgcgacagtcgcgtaacgttgcggtgaactcatcttgcaattgtcttttggttcgttag

SEQ ID NO: 395810 - DNA, 327 bp, Salmonella enterica
atgaaaaactgtgaatatctgtgtcagtatataataacaggcatggatatctcactcctcaccaccaccagtgacatcgaacagttccgcgctatggcccttgccatggcgcaaaaagtggtgactgagaaaaatgctgaactggaggcaaaagaccagcgtatccgactgctggaagaggctctcatgctggcccgccagcagcgctttggccgtaagaccgaaatgttgtccggcctgcagcgccagctcttcgaggaagatactgaaaccgatatagccgctgcagaaacgcaactgaatgcgttgctgcgacaggatatataa

SEQ ID NO: 395811 - DNA, 351 bp, Salmonella enterica
atgcgttgctgcgacaggatatataatgaggcagaaaaactatcagcttcccacccggtgcgaaaatcgctgtcgtcgcagcttcttcgtgcgaaaaaaactatcccgccggcgtcagatacttgtaccgactgtggtgtggcgctccgctttatccgagacgagaccagcgaaaaacaggagtacatcccggcacgctttgtggtcaatcagttcgttcgtcctcaatatggatacccctgctgtgaaaaggtgttcagcggccagatgccggcacagctcatcccaaaaggtatagcggaagccagccttgtggtgcaggtggtggtcagcaagtaccgtgactactag

SEQ ID NO: 395812 - DNA, 210 bp, Salmonella enterica
atgcctcaggtctccgggcttctgcgtcaggtgtttgagccagaagctgtggtaattatgctacacccgcacgccgccagatgtgcagactgtttactgtgtcagggacgagggtactgccgtcaatgcgagtgcaccgcaacgttaccctcattccatctgtttgatacttatttcgcttttcgtaatgtggtacaccacgcacactga

SEQ ID NO: 395813 - DNA, 1188 bp, Salmonella enterica
gtgaacaaaacatataacagtgtggcggaattgacggagggaaggcccgtgaccaaggggaacagccaacagcacgaccgtatccggactcagagccggggaaatacgacgtcacgtctgctggctgtgcgggaagccgcgcaaagggataaacatcaacagcttaccagtctcttccaccacataagcgaagcgctgctgctgcagatcttccgtcaactcaaacggtattctgcaccgggctgcgacggaatgacatgggacagctatgcgcagaacgcgcatgagaatctcagagcactccacggcagacttcagcgggggcagtacagacccctgccggcaaggcaggtgttcatccccaaagaagatgggtcagaaagaccgctgagcattatatgtctggaggacaaaatcgtacagcaggcggtggtgacggtgctgaaccaaatctacgaggctgactttctgggattttcctatgggttcagaccgggaagaggtcagcatgacgcgctggatgccctgcacacggcgattatgacgcgaaaggtaaactgggtgctggatctggacatcagtaagttcttcgataccgtggaacatgactggctgctccggtttcttcagcaccggattggggacccacgtatactgaggctgatcaggcagtggatcacggttggagtgtgggacaaacatgggcaccgacagcgttcgagcgtcggtgtcccgcagggcgcggtgtgctcaccgatacttgcaaacatttacctgcactacagcttcgatctgtggctgaataaaaccagaaagtatgcgcaaggggacgtggtgatggtcaggtatgccgacgacgctgtgctgggattccagaaacaccgggatgcccgggagtgtctgtcggccctgaaacagcggctggggaaatttggtctgaaagttcatccggagaaaacccggctggtgcgctttgggcgttttgccctgagtcactacagggaagagcagggtaagcccgggacgtttgactttctgggctttacccactatgtagggcaaaatcgggctggaagtccaatagtgatgcgcaagaccaaacgtagccgtcgtctggcacagttaaagacaattaaacaagcacttcggaaacgcctgcacgacaagccggtcgaaaccggtcgctga

SEQ ID NO: 395814 - DNA, 1809 bp, Salmonella enterica
atgtatattctgcaatcgcggaagtctttttctcgtcctgaaaaatataagcgcccgggggcgtttatgctggcaccactgaccctgattctcgccagtgcctgtgcgcatgccgccgggccaggtgttcccggtgccggtgcgcttggtaaccagctccgccaggagaaaatgttgattccttctcctcctgaaaatgccccccttgttctgcccggggaggggcatcgtaaagcgttgtcatcagacagtcataccagtgtggtggtgaaaaaggtggtgttcaccgggctgcctgatggtcttaatgggctgagtgagccggtactgcaggagctggtttcaggtgacctgaaccgttcgctgaccttttccggcctggaggcgctgacacagaaagttacggacctgtaccgccataacggcctgctggttgcccgcgccatactgcctccccagacggtgaaagatggcgtgctgaccatagaaatcattcccggccgttacgaccgggaacagataaccaacacctccgggttgcgcgattctgtggcgcggggcctggtgcgtaccaccacaccggaaggcaatgtggtgacccgaaaccggctggagcgtgaggctctgttgctcagtgaagttccgggtgtgagtgctcaggttgcgatgaaggccggcagtcggcaggggacaaccacgccggaaatcaccctgacgccggggcagttgttcggggggtacgccgggctggataatcagggcgacccgaataccgggcgcagtcgtgtgatggcgggcggctatgcgaataaccttctgggagtgggtgaccagctccgaatggatatcctggacgcgtttgagaagagtgacctgttcagtggttccctggattacagtctgctggcaggaggggggtacggcacgcgcgtcggggttgattacagccacctgaactaccgctataacctgaacaggctggggtttaaggggtactccgataactggggactgtatgtcacccagccgtggatgcgcacctcacgggcgcgcgtggatgtgcgtctggacggcgggcaacagtttctgacggataattacccggaggtgtttgccactgagtcaggcagttcgcgtggtcgcaagacggtcagccttgggacgttgtccgtaaccggctctgttgctgaccttccgggcgggctgaccgggtttggtgtcagcggcactgtcgggaatgtggagctgcgcagtgatatctcccgcaccttctcacagcaggcggggtcgggtggtcagtttgcccgtttcaattaccaggtgaaccatgaccagcaggtgtggggaccgttctcggtgtatgccggggtgaagggacagctggcagacagcaatctggacgcctcacagaaattcctgatgggaggaccttctgcggtgcgggcttatgacatcggggacggctctgttgaccagggagtgacaggaaccgccgagatacgcggacgccaggctatcccggtgaagcgctggctggggaatgacccacagctgaccgtggctgttttttatgaccagggctggggtcagcagtaccgtaataaccgcggtgcagacggtaatcctcttgcctccggtaacaatcacaaccgtcttaatctggccggtaccggtctgtacgccacggtggcagacgcgggcagctatgccctgacgctgacctgggcgcaccgcaccggcaatgcagacccgaatgcggtgcatgatgaccatgaccgcttctgggtgtcagcggtgaaaaccttctga

SEQ ID NO: 395815 - DNA, 225 bp, Salmonella enterica
atgaccggtgcttttttcttttcccatgcccgccgtaatttcactgaccaccacgagttcattccggcgtttgtcgaatttgagtttgtatattttattcattgtctgtgctctctgtcagagggtgcaggaacggaagcttttcccggaaatactggctctggtggggcgcttatctgccgggtgatgagccttccgctcctgcattattcgtataagaaataa

SEQ ID NO: 395816 - DNA, 597 bp, Salmonella enterica
atgatcgaagaacttcacgacactatcggccttggcgttgagttcgccttggtcgatgttcacaccattgttgtcgcaaaaataacggttgtaaatgacaaaacgatcagttgcgtcccggttatcaatcgggttgtgaaaggtgaaagtaaaaagttgcctgagtttatcgaagtccccccggtaattttgcagggtggtgatagttatatcgctgaaccaattgcggctggtgactactgccttgtcctgatctctgaacgttgctatgacgcctggtatgctggcagcgacttcgtttcaccacttgaaatgcgcatgcacgattattcagatggcttcgctctgtgtggggttaatccacaggctaccgctatcggtattcctaagaagaaccggatgatgaaggggaatactgaccatgagggcgatctgaatcttacgggcaatgtcacgatatctggcaacctgatggtgggcggtgatatcaactgcgccggacggctaacggtggcctcggcgaccattggcggcattgatttcggcacccataaacacagaggtgacagtggaggcactacaggaggcccgcagtga

SEQ ID NO: 395817 - DNA, 660 bp, Salmonella enterica
atgcacggtaaaaacagcgaagcccggaagtgcgctaacactaaccgggcctctatcgaaaataaccgcataggaaatatcgacatgagtaatttagcaataaaacaatcagcttgcaccattaacgtgcctttctatggttccgagctttacgttgttgaacacaatggcgagccatttaccccaatgaaacctattgtggagggtatgggaatggtgtgggctgctcaatttgttaagttgaaacaacgctttggcaaaggtattgcggaaatcgaaataccttcagttggcggtatgcaaaagatgatctgcctcgctctccgcaaactagctgcatggcttaacactatcagccctaacaaagttcgcccggagattcgcgagcgcgttattcgttatcaggaagagtgtgacgatgttctgtatgaatattggacaaaggggcaggtgacgaatccgcgcagcatggaaccagcaatcgatatgatgaatattgatcttcatctacgtattcgcgatgggcaggttgagagcatcgagcgcatcgggtcagacatgtttgtcggtaaagttgaacagatactaagcggtctgcgtaaaagcggctggatagttattaagcgagaccttctggcagagaaattggctacatggtga

SEQ ID NO: 395818 - DNA, 234 bp, Salmonella enterica
gtggtgagtaaattccctagccaagaaatggatagatttaatgttcgactgcccaatggaatgcgtgatgccatagctgaacgcgccaaacgtaatggtcgctcaatgaactcggaaatagtccaaatccttgaagatgctctatatgggaaacattcgccagaagatcccctaggagacaagttaagatacgctatagataaagcaattgacgatgtactgaaggactattga

SEQ ID NO: 395819 - DNA, 351 bp, Salmonella enterica
atgaaattgaccgcagagcaattacgcgatggatgtcagtggctatcaagagaactgactcgactcgaacaacttaaccgacctctttcgattgatgaattctttgacctctccgaggacgagaaatttatcaacaccatgtttgaaaaatatgggcattttatccttggtctccacttactagatcaccgaagtgagcactgtaataaagaactaattgcatacatggaaaatgcccttagtcgttactcgaacgttattacaagagatacctatggtgtagttgataatgcctacctgttagcaataaatgttctgttcgacatttctcgtgaagctgatgagatgtaa

SEQ ID NO: 395820 - DNA, 534 bp, Salmonella enterica
atgggattcaaattcaggcagcgcatcaaaattgcacccggcatacatataaacataggtaaaaccggcataactagcgcatcaattggtaaggctggtgctaccctgaacgtgggtaaaaaaggggtaaaggcaaccgcaggcattcccggtaccggtttgtcttacacaagcggaaacttgctcgcgggtcaaaagaactccactggaaaacactctgagaacgtagaggaacaagcaccggagcggcttggtttcttttcggagtcaacgttgttagaggatggtcaggaagatattcaaccacctcgccccttggtcatggtattaacccataagcaatttagaaaactatcaaccgaggagaaaaaggcatttaaaagtgcaggtggtaaggtgaagttttcaataggcgagaaaatttttattctctcagtcattatttttgctcttggctggctttcagatcgccacccaccagaaaaaaccaattccagcgtaacgcaagaagtaaaatcttcagttaacaactga

SEQ ID NO: 395821 - DNA, 1803 bp, Salmonella enterica
atggcgatagttaacgagcttattaccaaattcggctttatcggtgatctggcgccacaggaaaccttcaatgcgaatctgaaagcgtctattggtctgctagccgggcttggggctgctatcgccggttcggctgcaggggttgctggctgggtgacgtctatcagtcagtctattgatccgctggtccagttttcccgggaaacgggcgtggcgatcgagaccgttcagacactgggctacgcggcatccgtaaatggttcaagtgttgatgcgctgcaggcttcactcggtgagatgacaaaaagagtgggggagttcgtttctaccggagagggggaagcaaaagacgttgctgaaaggctggggcttcagttcaaggatatgaacgggcaggtaaaaaactccgatgtgatatttcgtgaactggccgacaaactgcacggcatgagccaggcagagaagttttctgttctggataagatgggcatcgaccgttccatggtgcagttgttatccatgacgggcgaagaaatatcttcgttgcagaacaaggcagaggcgcttggtgttgtcacgcaagaccaggccgatcagtttgctgcctataacgattctctgactacgctagggaaaggtttcgatggtatcaaatttcaggttgccgtcggatttgtgccagtgctgaaagatctggtagatggtttcaccgatttcctgatagcaaataaagacctcatcaaaaacggcctgtcacacctgggtgagattatcttttctgtcatgggaatgattcgccgtttcctgcctattatcgcagctattactatagcttttgccgcatggtggctggtgactggcgggcttgcaacggtaatgggggtactcctgtcgccgatagtgctgattaccgccgccattctcggcgttatccttgttattgatgaccttcttactgcgatggaaggcggccaaagtgttattgccgatttcttcaaggataactgggggatcgatattgttcccgctctgaaagaagcgaaagcggcactgctggattttatcaattatgccatagatatttttaagcccctggctaatgcaatagtctccatgtttaagttcgtatggcatctcattgccggtgcgtttacgggggatttccaggacgcgatgaacgatgcgcagaacgtctttgattccctcgtggcatttattactggcgcgtttggtgtcgtcggggatgcgattgaatacgtattcggcgatgctggaacatttatcgtagatatcttcgagcaaagcattgaaaacgtaaaagccctgtttagcgcccttagcaagctggtaacaggtgattttcagggggcatgggatgatgttgttaaggcgtttaccgacagcgtggcgctactcaaaaagccatttgatgagtttatgaagtgggttctcggcctgttcgctaacctcggtgaaaccatcaaaaacactatcagcaatgccgcctcaaacgcatggaatgctacgaaatcattctttgggtttggagaggatgagcagcaacctcaacagggtgtgacgggcggcggtaacggaggtattggatctggtggaatcccatacggcatgaatgctgtggtgggtatcgctggtggcggggcggcatacaataattcgtacacctcaaatcaacagatttatgttactgcaccggatgctgttgcggcagggaatgctgttgctgatagtacccaacaacagcaaaaagatgccaaacgaatgttttcgaggaatgggaaataa

SEQ ID NO: 395822 - DNA, 636 bp, Salmonella enterica
atgacgaactatgacgagcgcaggccactcccgccggttaacttcatcaatgctgtaaactggcagccatacactaggatcatccccgctaatgaagtgcatgagtggataaaccgacaaatcctcagcgataccggaagcatccataaccctgaccacggacatttgctagaggccgatctctgcttcatgtgggcgtccgactcgttcgagaagaaagggcgttccgtgctggggcaggcggaagaagttgcgatgcgggccggtggatggcagaaagcgcgcatggagcagcagatgtatgaatggttcggcagggtgccacagttcatcatcacgctggccgctgattactgttcgcaatgttctgatctggagttctgcgccctgatagagcacgagctttatcacatctgccaggcgacagatgaatttggtgcgccgaagttcacgcaggaaggcatgccgaaactgaaattacgcggccacgatgtggaagagtttgtgggcgtggttcgccgttacggtgcgagccgggacgtgcaggaaatgattgatgcggcaaatcagccagcggaggttgctcatcttgatattgccagagcgtgcgggacgtgcatgctgcgactggcgtaa

SEQ ID NO: 395823 - DNA, 429 bp, Salmonella enterica
atgaaatacttactgccagtagtaatttttgcctcggcctgcgtatcaggctcagttttagctgctacaccaactctctgctctacagttacttacacggcttttggcgaaaaagaaaaaacagtacgtgattgtgttgacgccaacacagaaaattttttcatcaacgccaaaattaatgattacacacttccaacattggctgttggtttagaaattccttcgtgggtaagcgaaacaggacacggggtacaaaaagccttcattggtcaggtaaccaaacaaaacggggtttataccgttagagttcaaatcgaacttgatggcaaaaaaatcattacatcgtctcctgttgaagtgggttcaacaaaaactgttgttgttaatggtgagaaaatccaacttaacctgcatcgacaggtcatttaa

SEQ ID NO: 395824 - DNA, 228 bp, Salmonella enterica
atggagtttttaaaacaacaccatttgctatcaataatttttgggataacttccgctgttctatgggtctgctcaagttttgcatattcaaaaaaacaccctgaaaagacagatcagggatattcagtgcttggtcacattaaaactggcgaaatacaaaataaatggaatgccccagcagcgctatgtgcagcattagctgcgttagctcaggcatttggagtttaa

SEQ ID NO: 395825 - DNA, 570 bp, Salmonella enterica
atgaaaaatctacccgatgactattttcttgatgctgacgacgatcttgtcgattttcttgaaaagcagggcgaggattgtataggtgaaatctatcggtcaaatactgtaaataaagaaaatggttataagttgctgagcattctgattgttggtattggatcttcatttttgctgttaacgcaaaagacccggattgactttctgagcgcaggcattgcagttttcacggtgtactggtcaatttgtgccatatatcttgttatcaatgtgttaacagtccatacgtatggacttatttccacatcgcccgcagctttgtataccgaaggttataaagatatctgtgagtcagatttcgatagtctcagggcaaaaggttttgtcggtaaaaatgatcgtctttcagtgatgagacgatacagattgaagacgctatgtgtgactgctgatgagttgttgcaggttaatgaaaccatcagaaccagactaaaaaaagcaaggatagcgactatccttgcccctgtttacgccattatcatttcagcgatcacttacctttttttctga

SEQ ID NO: 395826 - DNA, 1098 bp, Salmonella enterica
atgtatgattacttaatagtaggtgctggtctttttggatcagtttttgcctgtgagatgaataagagaggttttgccgtaaaggttattgaaaaaaggaatcacactggtggaaatatttattgtgaaaaaattgaaggtattaatgtgcataaatatggggcacatatctttcataccaatgataaatctatttgggattatgtgaataaattcgccgagttcaaccgatttacaaattctccaatagccctttctaaaggaaaagtttataatcttccgttcaatatgaacacttttaatagtatgtggggtgttattgacccagcagaagcaaaaaaaataattgaagaacaaaaaaaagagttaggcaataaagaaccttcaaatttagaagagcaagcaatatctttagttggtcgtgatatatttgaaactctgattaaagagtatacagaaaagcagtgggggcgcccttgcaaagatttacctgctttcatcatcaaacggttacccgtaagatttacatttgataataattactttaatgacaaatatcaaggtataccaataggagggtataatcagatgatagaaaaaatgctcgaaggagttgatgtacaattaaacgttgatttcttcgataataaagatttttggctttcctcagcgaaaaaggttgtttacactggacctattgatttattttttgattatgagtttggtaggctagaatatcgtacattatcctttgaacatgagctattgaatgtagataattatcaaggaaacgctgtgattaattatatagattcttgtcataaattcactcgtattattgagcacaagcattttgaatttggtactcagccaagaacagtaattactaaagagttccctaaagagtatgttgaaggagatgaaccttattatccagtcaataattctgataataatagaaaatactctaaatacaaaacaaaaacagaagatttcgaaaatgttatttttggtggaagattggctgagtataaatattatgatatgcatcaagttgttgcatccgcattgctggcagtaaataatgagatatcataa

SEQ ID NO: 395827 - DNA, 306 bp, Salmonella enterica
atgtattataaaacacgtgacaaccatttctttgcctctcctaataagtattacgaacatttagcattgggtaaggtgatgttgacaaccaagggtacccctccaggatttaaagttgaaaaatatcaaacgggattcgcgattgatgaaactattgaagatattgataatataattcaatatatgcgagataataaagatgtgctagctcagtatgctaaaaatgctcggaaagtttggcttgatagctataaagattataatgcgatgtattttgctaaacaatatactaaaatggtgggttaa

SEQ ID NO: 395828 - DNA, 3321 bp, Salmonella enterica
atgtcgcttaagggacaggtctggcgaccatcgggggcaaccctgtttacgctggtgtcgggagtgctgtcagccggagtggtatggctgctgggtaaacattacggactctctcctgcacagatgggcctggtctggctgggtgttcaggcgttgttgacggccgtaatggctggctaccggttgtatcagcagcgggagcccaaatcagacgatgacaggcaggctaaaacagcgcgggaaaaagtctccacaccggcgtatatcacggagatgcgtgactaccttaagcatcactacgggctgacctggcgcagtaaagtgcggtttgtggtgatttgcggttcaccgaaccagacagaccttgctgtaccgggcctgacggaagccggatggctggaagccaacaacgttgtcgccgtatggggcggcagtctgctcccgggggctgacagcgcccgtatcgcggtgctgcgtaaacttaaacgctgtgcggtcagcgcgatagtgctggtctatgacggcgaactgcgtcaggcgatgcagggcgacctgattgttcgccagcttaacgaacgctataaaaaactgggctggcgcgtgccgctgtatctgtgggaagtgcagaagagcgcgtggtcgcaggagggccgcgagactcagccggtgggttgcctgctggccccgcacaccacgccgccggagctggtggagaccctgaaatcgctaccggacacgttgatagagcctggcgttcagcaggggctgggcagccatacgcatgatttcctgttgcgtctgggctggcagttgcgtaacgggatggcggagcgctttcatgcgctggcggtttcgctgctcaccggcccttatgccgtgccgctgcgcggggtgatgttcagcccggcggtttacccgaaggacggaaccgacagacagcgctggctgccggataacagctggaacgccattctgaacgatttgccctcgctcagaatccagcgtgccggaatggcgtgggagcgcacgctgtatcaggcggtgctggtggccctcggtctgacctgcgcgggcgtactcttttcctggaacaccaaccgtcaggagattaccgacgcacagcaactggcagtaacagcccgtgatgaacaccagaatgcggataaacgactggctgcactgggtgagttgcagcgggagatggcgcgcctgcagtaccggagtcagcacggcgtgccgtggtacagccgctttggccagagccagaatgatgacctgctggcccgcctgtggccggagtatgcccgcagcgcgttgccgctgttgcgtgatgcctccgccgccaggttgcgtgacgcgctgaccgcctggaatgcgctacctgctgacagcgacccgcgggcaaaactgagccgggatgcgtataactggctgaaagcctggctgatgttaaaccgtccggagaagatggacgcgaatttcttcacctcaacggtgatggccctctggccacgccgtgatggcgtggcacccggtgtctggcagtacgaggggccccgacaactggcctttctggcgcagaatctgccgtcacacctggcctggaaaattgcctcagacccgcaactggtcgccaccacccgcagcgccctgttgcgcctgattggtcagcgtaatgctgaatcggcgctctaccagaaaatgctggtgcaggtctcccgtaactacgccgatatgcgtctcaccgatatgaccggcgacacggatgcctcgcgattgttcaccaccgatgacgtggtgccggggatgttcacccgccaggcgtgggatgatgcggttcaaccggcgattgataaagtggtcagcgaacgccgggacgagattgactgggtgctgagcgataaccggcacccggtgatgcaggatatttctccggaagcgctgaaagcccggctgacggaacgctacttcactgattatgccagcgcctggctggatttcctcaacagcatccgctggcagaaagccgccacgctctcggatgccattgaccagctcaccctgatggcggatgttcgccagtcgccgctggtggcgctgatgaacacgctcaacacccaggggcgtgccggacaacagcaggaagctctgaccgactcgctggtgaaatcagcgaaaaatctgctcagtaccgatgacgcgaaagccatcgaccagaaagccggagcgcacggtcctctcgatgcagcctttggtcctgtgctggggctgatggacacgaagggcagtggtgataacagcctgagtctgcagaccttcctcacccgcgttatccgcgtgcgtcttaagctccagcaggtcaccggtgccgccgacccgcaggcgatgatgcaggcgctggcgcagacggtgttccaggggaaatcggtggatatcaccgatacccgtgactacggcagtctggtggctgccagtctcggtcaggaatggagtggctttggtcaggcggtgttcgtgcaaccgatggagcaggcctggcagcaggtgctgtcgcccactgcagagagcattaataatcagtggcagcaggccatcgtcaacgactggcagcaggacttcaatgaccgctggccgttttcgccggataaacagagcgaagcatcgctgccgctgttgtcgcaatacctgcgtaacgacaccgggcgcatcacgcagtttgtgaaaaccagcctgggcggcgtgctgcgcagggaaggtcgtcactgggtgccggatgcgattgccgcacaggggctgcactttaacccggacttcctgaatgccctgaaccagctcagcgaactggcggatgtggcgtttaccggcggtgacgccagcgtacattttgcgctgatgggcaaaccggcccgtgacgtgatgcagaccgacctctatctcgaccagcagaaactggactaccacaaccaggtggagaactggcagccgttcgtctggccggacagccagtggaaaccgcacaccacattaacctggaccagcgtcagcgccggagagcgtatttacgccgactaccccggaagctggggctttatccgcctgctggacagggcgcaggtccaggccaccgacaacagcacctttattctgagctggaaggtgaaagacggcagtccgctgaacattatgatgcgtacagatgcaggtgaaggcccgctggcgctgctgaagctgaaagggttcagactgccgcagcaggtgttccttgatacggatagcgtccctgatgtgccgtcagataacggtggcggagacggactgtaa

SEQ ID NO: 395829 - DNA, 1149 bp, Salmonella enterica
atgttcggggtaaagcaagcccggaatatctgggagcaggatggcttgcccgggcggaatatgcccggtgttcaggccatttttatcttcataaaagggaaaccagaggacgtaaaaaccagcgttccagagggcgattatccagcccaacgacagaaaaagaaaaacggacagacattccgccagatcgccatgaactggcatgccgatcaccggcgctggtctgaacactatgcgacgaacatccggcgcaggctggaaatgtatgtattcccggatatcggggacaaatacatcgatcaaatcgtcacagaggatctgctgtttaccctgcgcaaagtggagaacaaaggctttctggagatcaccgcgcggctgaaaaattacgtcaccgggatcatgcgttatgcggtgaaaaagcagctaatcaaatcaaaccccgctctggatctggacggtgaatttacgccgccggaaacacagcattacccggccctgccgcttgagaaactaccagaattattatcccggacggataactactccggcaggctgctgacacgctatgcccttaaattgtcgctgctgttctttgtgcgctccagcgaactgcgctttgcccgctggagtgagatcgactggcagcagaagctctggataatcccggaagaacgggagcagatcgaaaacgtgtgcttctctcaccgtggcacaaagatgaaaacacagcacatcgtcccgctgtccgatcaggtaatggcgatcctgaaacaaactgaagcgctctccgggcatctggcgtttattttccccggcgaatacgaccaggacaagtgcatgagcgacaacaccatcaacaaagcattgcgcgtgatgggctacgacaccagaaaagagatctgcggtcacggcttccgggcgatggcgtgcagtgcgctgagtgagtcgggacggtggagcaaagaagcgattgaaaagcaaatgagtcaccaggaaagaaacagcgtccgtgccgcctatattcataaggcaaaatatatggaggagcggatcgctatgatgcagtggtgggcggattatctggatgcaagcatggatctgtatgtgtcaccttaccagtatgcaggcaaccttaaggaggcctcgtaa

SEQ ID NO: 395830 - DNA, 1197 bp, Salmonella enterica
atgcctttgactgccagacaagctgaacatgccaaacccaaagagaaagagtacaaactgacagacagtcagggattgtaccttctggttaaaccttcaggagcgaaatactggcgttataagtaccactttgctggtaaagaaaaaaagctggcagtcggtgtttatcctgacgtatcccttgcccaggcacgcctgcgccgtgatgaagccagaaaattattggctgagaacaaagatccatcgcaagaaaaacaaaatcaaaaacggatacaccgaacggaacaaacaaatacgtttaaagcaatatcgactgaatggctactgtcgaaaaaacaacagtggggtcaggattactggaaaaatactgaaagtcggttaaaaaattatgtgtatcccttcattggcagccgacctgttactgagatttcccctatggaagtattgacatgcctgagaaaaattgaggctacagacaagctggaaaccctcagaaaaacaagaaacgcctgcctacaggtatttacatatgcaatcataaccggcagagcaaagtctaatcctgccgattatctctccagcgctttcgcatcacctgaaagcgaaaatcatctgagcctagaatttgaagctcttcccgaatttttacgggaactctatgactcgacaagtaatccactattacaattagccaccagactgttaatcatcacaggattacgttctgttgagctacgctggggtgtctgggatgaaatcaatctggataaagccatctgggagatccctaaagaaagaatgaaaatgaaaagaccacatattgtaccattatcaaaacaagctgttgaaatattgaaaaccatcaaaattttaacacaaacaaaacaatctaagtttatttttcctggatgtcataatgctcaaaaaccacgcgcccgtcgtatgttcaattactacttgttaacgctgggctggctggacagagtgaccgctcatggatttcgtcacaccatgagcacaatactcaacgatcatggatttcattctgactgggttgaaatgcaactagcccatgtagacaagaacagcattcgtgggacgtataaccatgcgcagtatcttgatgggcgtagggagatgatgcagtggtatgcggattatattgacagtcttgctgattcgtctccggcggtttaa

SEQ ID NO: 395831 - DNA, 186 bp, Salmonella enterica
atgagagattcagaatcagccggattactgaaaagagcagatgccagtttgagaatggcagtttcttttcattctttgacaaaagaggaagaaccagaaatattgcatattgataaacgcttaaattatgatgtcgttattctgctggaaactcgccactgcggggagccgttgcacaaaaaataa

SEQ ID NO: 395832 - DNA, 162 bp, Salmonella enterica
atgactgatttttttacgcatatatatggtctgttacttgaatgtgatgggaacgatacttattattttatattcgggtattctttgtttctggtggtatctgattgtttctacactggctgtagtcagattcttttctttttttttgggtttttgcagtag

SEQ ID NO: 395833 - DNA, 234 bp, Salmonella enterica
atggctgtacgagccagatgcctggagtatattgaatctgaaactacagaagggcgaaggggctgcgttgataaggcgctggttgatgctgaccggattctgccggaaatgttgtcgggggagaacgtgacgtatgaaatcaggcttcagaacggcacgcgctttacggccagaatcctgcatttcactgagctgatcactgcccggaaaccctgggcacacaggcgatcgtaa

SEQ ID NO: 395834 - DNA, 219 bp, Salmonella enterica
ttgtttccagaatacagaacgctgatttcgcggcttaagaatgaggatgcccatttttcggtactgtttcagcggcacaatgagctggatcacgaggtctcgcgggaagaagcccgcccggccccggacagtatccggctgatgaaaatgaaacgggagaagttacacctgaaagatgagatgcagcgcattctgcgttcttactctccgggggagtaa

SEQ ID NO: 395835 - DNA, 282 bp, Salmonella enterica
atggagaaaagttattttcagattgatacaaagaaccagcgtctggttacctgcatgaacacctgcggcatgaagacgttcgcttcctgccagggacatggttttcccgttcgcagattcctgccatatgtggcattcatgacctcactgtatcaggcgcaacatcttgccaggcgggtcagggaagacgctgaatatccctttccaaatctgtactggggctgggaagtgaccgcccgttttaacaaccagttcagcctgtgctggcgtctcgccccgtaa

SEQ ID NO: 395836 - DNA, 1125 bp, Salmonella enterica
atgaaaaaattaacagtggcattatcagcagtggcagtaacggtcatgatggcaggaatggctgatgcggcagaggtttacaataaagacggtaataaactcgatctttacggtaaggtcgatggcctgcattatttttccaaagataaaggcgatgatggcgatcagtcatatgttcgttttggttttaaaggcgaaacccagattaatgaccaactgacagggtacggtcagtgggaatacaacattcaggccaataatgacgaaggcagtacaaaaggaaatgccacccgcctggcgtttgccggtctgaagtttgctgattttggttcggttgattacggccgtactaatggtgttatttatgatatcggtgcctggaccgatatgttgcctgaattcggtaatgatacatatgaagatgctgacagatttatgaccggacgggctaacgggcttctgacatatcacaacaccgatttctttggcctggttgacgggcttaatttcagccttcagtaccaggggaaaaatggcagcccgaaagagagtaataatgggcgtgaggcgaaacaccagaatggtgatggctatggcatgtccgtgacctgggaaagcgatgccggatttggtgtggggacggcatacagcaattcccacagaatgagagagcagcgcagcaatgaatatggtactgatggtaaacgcgcagaggtctggaccgccggcctgaaatacgatgccaatagtatttacctggccgccacctatgctcatgccgtcaatacgcagtcatttgaagcagataaagacagtgctattgcagtggacttcggggatacagatatttttgcacataagacagacaactacgaaatcgtggcacagtatatgtttgatttcgggcttcagccttcagtcgcttaccttcagtccagagcaaaagatgtgggtaaatacggtaatattgacctggtgaaatatgttgatgttggtgccacctattacttcaacaagaatatgtcggcctatgtagactataaaatcaatctgctgaaagacgataacccggcgtctctgagcacagacaaccttgtggcgaccggtctggtgtatgagttctga

SEQ ID NO: 395837 - DNA, 156 bp, Salmonella enterica
atggcgaaaagagagaaatgtcccgctaaaaaaagacactggatgacggcggatgaaattcaggcaagggattatgccagttgtaaactggcccgccagttctggagactgctttacagtgtccggctgcgaaacaaggccggcgcagacctgtga

SEQ ID NO: 395838 - DNA, 192 bp, Salmonella enterica
gtgaaaataaaatttatggacattacccggcaggctgcggagctggaacgtcagagtgtgtttaaggaagccgggcagttgtggaacaaagcgctttttgtggccagacatgacgtgaatgcggagtactgccgccacagggctgaattttgtctgagcagcatgtttacgcgaagttcacagacagactga

SEQ ID NO: 395839 - DNA, 597 bp, Salmonella enterica
atgatatcgccagaatgttcgacagatatccggccgctgcagcagtgcagcgaggaggaatatcttcgcctgaccgggcagacggatttgccggaaaaccagcgaataccgcagaagacctttaatgccacggagaaatactggcagcggtttgaggccaggctgggacgccagctgcgggagacaacggaacgctgcttccggcaactgagccggtttgtggaaaactgtaacttcgaaccgcgtgtactccaggaataccgaggagagtacggggtcatcaaagtgggagtcatgccacaggatatcagggccattgatgtgctggaatccgatccggattacattgtgtccagggtggataaagtggcggacggcgtgttcacgccggtacagtttgtggcaaatgtgttctacaggaacggcgtgcagatggcgtcgttccggggagacacggaggtggaggatattaaccacctgacggcaaaagactacggtgatgtggtggggcaggcggttgagtgggtgcgcgagctgtttgaggagcccgccgcagtcgaccggcccgtcgcacagttacctcgtcttgcggcataa

SEQ ID NO: 395840 - DNA, 615 bp, Salmonella enterica
atgaaagacaggaatgaggttctggaatctttttcatgggctgcgctggttgccataaaaatggccaggcgggagggtggcataacgtcaggattttcagagcatgtatttattatgaactggctggccacagccaggaaaagaaaactgttcccccggtctgtatcatcagaaattgactggttaattaatgatggccggacaaaagggtataatacaggactgaggacaaagattgagtatatctatttcacctgccagaaagatgtcagtggacaggcgggttattttcgttttacccgcgcaatggaaatactgaaaaatgaaggctggaagggatacctgctgacgtcggcaaaatggaaagcgctgaggagggaaagttttggtgacggggagaatttaatttttatggatgatgacgaggttaaaatcagtttcaacagtaatggcagactgattcgtgcgctggaactgcgtgtcagcggtgatataaaaatagcggagacgatatttgaaaataatcatctgccagtcagaacggaatgtccggacggtgagcgttattacttttacctgcagccggaacgggagagcggagtggatcaacgataa

SEQ ID NO: 395841 - DNA, 261 bp, Salmonella enterica
atggagagaaagacggcccgctgggtatatgaacaggccagcggcgtgacggcaaaagaagtggcgaaacgcttcagactgaatgagcataccgcgcgactggttattcacgccataatgcggcgggcagatggaatacgctgtgaactggtcggtaaatcggtagcaacagcaaaaggcaggaagcttgtgaaatatttttcggtaactaatcttcctgacgaataccagccccggggtaaggtagtggaaaaacaatga

SEQ ID NO: 395842 - DNA, 126 bp, Salmonella enterica
atggacgacaaccagtctgattcagacaatcagactcagcagttaaaagtgtggagaatgcagccggaaaagtgcaagcatatttcgtattttttcaccgtgatgaatatttttttatttttctga

SEQ ID NO: 395843 - DNA, 573 bp, Salmonella enterica
atggcaatctctacagaacaaataatgaaagctgccgacgagctcgaccaggaagggcagaaccccaccctcgcccgggtccgcaaaaaacttggcggcggcagcttcaccaccatcagcgaggccatgattgaatggcgggcgcagaaagcccgctcagtgccagctcatgaaccggctccgcagattgtcaccgacagactgaccgctttcggggatgatatctggacactggcgctggaaatagctgatgctggctttaccggagagcgggaagctttggaaaaattacggcaggaaacagaagatgcgagacttgaggctactgcgctggccgaccagttgaccgctgaactcgcacaggcgcgacagcatatcgtttcccttgaggaaaagctggctgccaccaggaaagagaatcttgcaataaccatggagcgggatgaatctcgacgggaaatggccggtctgagggagcaactggcgtccgttcgcggcgagttacaggccgtcaccctctgccatcaggaaatcgtttcggccattaaacaaaacattgcaccggctccgtga

SEQ ID NO: 395844 - DNA, 174 bp, Salmonella enterica
atgctggtcatcaaaagcatacctcttatatcagacatcaccctgcgcccggaccacatcgccggtgtgatgttggagtgtgagggagttggtacaactccctcacggagccggtgcaatgttttgtttaatggccgaaacgatttcctgatggcagagggtgacggcctgtaa

SEQ ID NO: 395845 - DNA, 714 bp, Salmonella enterica
atggaaaaaaataaattatcactggttatactcggctgtgcttttctcagttcatgtgtccccccccctcctccccccaaaacgactatcgtagacacaaggacagtcaggactgccagcggttcagatattacaatactgactcagaatgcaataaatggagatgtgattaaggatactgacaacagattaaacattgtatctaaagccgataacgcaaaagccatcggactggtaaccttacagtttgcagctatgctacttggtggcgggagtggacgcgttgctggttacagtaaggagcagctaaaagggattcacatagacagtgtgaaaaataaaacaatgacgtatctgaaccccgaactcgatgccatacttgaaaaaattccgacatccggcaaagatataaaaataacggttgaaccatataaattcaagcttatctatgatggactggataacaacaattatgagtttatatattcaacaacaataagctcaggtaatttccatcagttatgctcaggaaattatttaacatcatcagaacgaatccagccgattgatacctgggaacgaaacaattatgagctaacacaaatcatggctaaaaagataattaaaaattgctttgaagatattaaccatgcagaaaatctggcgaaactggcaaatgccgtatcaggagaggaaaaccagagggagaagtaa

SEQ ID NO: 395846 - DNA, 261 bp, Salmonella enterica
atgaatcaccgtaacaaaaagaacaaacaaaaaagccgcaccatcacaccagaagcccttgctgccgtttttcaggtcctggagtctcagaccagtaacccggacgaggcgctgatggttctcgctgccacggcacatacgctcatgacatctctggatgtatacatcattgagtcccgtacgcctgacggaccggggataacgctcacccgcaccgatgaagatgacgggcgacaaacgagccatttgcatctgcactga

SEQ ID NO: 395847 - DNA, 270 bp, Salmonella enterica
atgcctggcaataaccgcgaagataacgatacgacatacaacgacatgagcctcagcgccgatgcgctggaagacctccactgcctgcttgacactcactcagacaacctgcaggagaaaatgcttctgctggctgtggtggctcacaccctgatgaccgaacaggacattgagtattttgagtcacgacttccctgcggacacagaatacagcttattaacgacgaatctcatcaggacatatcgcctccaccattttacctgcactga

SEQ ID NO: 395848 - DNA, 474 bp, Salmonella enterica
gtggcgctgcagaagcttaagattgaaaacctgcattttcacgacctgcgccatgaagccatcacccgcctgtttgaaccgggtacgctgaatgtgatggaagttgccgcaatctcaggtcataagtccctgaacatgcttaagcgctacatacatctgcgggcgtatcaactgatcagtaaactggatacccaccgccggcagtcgcagaagattgtgacgtattttgtgccatatccggcggtactggaagaggctggcgatggtttccggagacatctgcacgattttgaagggatgagtgtcagcggtaatacgcgtgagtcggcgatggatacggcttcggtcgtgctgcttcgaactattgcatcagcagcacagcgtggggagcgggttccccgtccgggaaagctgccgttacatgccggggggatgattaacccgctggcggggtctgtgccggtatttgtgtga

SEQ ID NO: 395849 - DNA, 456 bp, Salmonella enterica
atgatgggtgaggtgatgacggtggacatcgcggcttaccgtgacgactgtctttctcaggtgaatcctcgcacagaaaaggcaatatccggtaactcggttcgcctggaactggccctgcagtcggcgctctataatctggcgaaggtggaatggggaacctgccggacaaaccccatggaaatggtgcgcaagccaaagccgtcccccggacttgaccggcgactcacttcatccgaagagcgacgactgtcgaagtattttaaggtgcgtaatacagagctgtacaccatattccatctggctctggaaacaggaatgcggcagggggaaatattatctctgcaatgggagcacataggcctgcagtacggggtgacccattatacccgtaacgaaaaatggcagtgtccgggatgttccgctctcccgtcgtgcccgaaatctgctacttga

SEQ ID NO: 395850 - DNA, 1572 bp, Salmonella enterica
atgttcagacagattaaaatttcttacggactcgtcgcggtccttgtgctgctgacgttcattcagattatctctggttcatggagtgttgtgtcataccgggattacgacaggaacctgcaacaaatagcctttcagcgggccagaattgccttgctggatgaggcttacgttattatttcggatacccggggggatgtatggaaaatggcctctctgatggcgcagggaaagcagggggaggatgccggtgaaaaactggatgccatgcttaaacagtatgcagacgccgatcgggatattgacaaatactatgcgctttcccggaatggaagccccgaggatatccgtcacgctgaccagatgaaaacgttttatacctcggccagggattctcagataaaaaatatccacttgctggttgccggtgattttcagaagcttgacgagattgcccgccagggaaatccgacggctgattttctgaatgctgtgaacagtactgaagatgccattaacaaaaccgtcatcgaaccttcaataaccatgtccgagacgcttgtccgtcaggggattattctggcggcagtgtttgccgttgtgtttattctgctgacggcggcttctgcgctgtggtgtaaacagtatgtcatcggcagtatccgcaggctggcgggataccagcaggccattgccggcggggagttatccgtggacattccgcttgtgaagggtaatgaactggatgacctgacggccggtctttcctcaatgcgtgattccctgagtgaaatggtgatgaccatccgggctggtgcagagagtatacacaccggtattcaggatattgctgacggcaacacggacctgtcttcccggaccagtcagcaggccgcagcgctggaggagacagcggccagcatggagcaactgacggccacggtgaagaataacaccgataacgttcgtcaggttgctgagattgcggctgccagtgccactactgcgcaggacagtgcggtcataacagtcagaatggtggagacgatggcgcaggttagtgaaagtgcgcaaaaaatcaacgaaatcatcgggctaatcgatggtattgctttccagacgaatattctggcactgaatgccgccgttgaagcagcccgggcgggtgaacaggggcggggatttgcggtagtggcggctgaggttcgtcatcttgcacagcgcagcgcggattcagcaaaagaggtccgggcgctgattgacgagtccggggagcatgttcaggccgggaatgaactggcagaaaaggtcagccgtatcatgaatgagatagcggaaagtgcccagaagacaaaattaacgatgggcgaaatgctcagttgtgctgaggagcagagttgcggcatcgagcaggtgcgcattgcggtgtcagaaatggaccgggtcacccagcagaacgcggcactggttgaggagtctgctgcagccaccggggcactgacgcagcagacaaacaggctgacgcaggtggtgtctctcttcaggactgaacggtcaacagccggcgcgtga

SEQ ID NO: 395851 - DNA, 159 bp, Salmonella enterica
atggatgaaacccacggcggtggtctttatatgtcggataacgactggttacgcattctgaataataaaggattgtataccggcggagagagcagaggtgggcatttacgatctgatggttacgtgtctgttggcgggtactggaccttgaaaaattaa

SEQ ID NO: 395852 - DNA, 426 bp, Salmonella enterica
atgatgacacattgtcatacaacgtccactgacgcacaccttaccggggtagaaaccctccgtaaggtccttcagcagtccaccgaccagtatccacgtctggtagcgtttcttttgactctgcctgctgcgacacagggtacagtacagcggtttcacaaaagtgtttatcagcaggtaagtgacctggctgtcacccgccagatgagcggcagaccggtccccccgacggtgctgcgctggatttgggcgtctccgccaggccagacgggcaggatgttactgctgctgaaccaggacaccttctgtcatccccgttacgacagaccacgggaccgctgttttgaaacgatggagacgctgctccgccaggcgtgggggacggtggatatcccacagtgcagcaaagcgccggagataacctga

SEQ ID NO: 395853 - DNA, 1089 bp, Salmonella enterica
atgaatgataaaaaaaatgataacagttacgattccaaactagccacgtggcacagtaaatggatagaggaattaactggaaaatctgtaccttcacaggagcatccgtcgcaaaccaccgatacaaacaagagtgtcgagcctgtacttcaggcagaacctgtaaaaccggctaaatgtggtgatattgataataccctttccggtcagcatgccgacgacggaatgtccgacgctgactctgtaccctctttccgtgaaatgaaaaaaataggtgctgaagaaaagcctgacagtcataagcattatttgcgcgggggagaaactgaatatttacgtgatatcgactttaagtggttgaatggcagagccaatgaacgttctattttttggttttgggtatatatacgaaacacaccagaaataattgactattccgggatggacgaattgaatccaccccggagtgcacatcccagttttttctatatgaaccttaaactcccccaaaacacaaccagcacggacgaaagaagtaaaataattatcacctattttaaaagcctttcattccatttcccgccagttcaggttaaggagttatttaattgcatccgtgatatctggcttaacctcaacagtcagatcaaaaaaatatcatggataaagagaaatgacagcgaagcgattgagtgggcgtgggattacttatcaaaaaggaaggatatagaaggaaatataacactctggtttaaatgtgcagacctgaatgaaaagtatatcgcgataatgggtgttattgattgttggggaatttttgaagatactgtaaacagtaacaaagaaaagattataagccaaaagaatttgtttctgaagagaatggagaacgctttcagacaacgtgaacgcaggtcgaggaaagcaggaagtgatattagtctgcaatctcagaaaaaattacagatattagcaaaaatacatgataaaaaaagaaatcagcttattgaaaaactgatagatgacgagtatctgctatatgaactgcatcctgaaaattataaagccttaaacaagactaaaaaataa

SEQ ID NO: 395854 - DNA, 177 bp, Salmonella enterica
atgtcaaagcagaaatttaaaatcaccaactggcccgcatacaacaacgcgctcaggcaacgtggttcactgacggtctggcctgatgagtctgccattgccgaatggaccgacaacgcacagcctgaaggtcgtggccggccacttcactacaccgatatggctattctgtcctga

SEQ ID NO: 395855 - DNA, 228 bp, Salmonella enterica
atgaaacgtgtgttcaacctgccgaaccgggctttacagggcttcgttgactcaatttttaagctgatggaactgctgctgtgctgcccggattactctctggccagcaaacgggcaaagagcgtcaacatcagcataaaaacgccaacccgtggtgaaatctctcatctggtcatcgacagtaccggtctgaaggtcttaatggaaagtcaggcagcacgggactga

SEQ ID NO: 395856 - DNA, 492 bp, Salmonella enterica
gtgtggcgcaagcttcatcttgctgcagacagtgcgacacacgagattatttgtgctgatttattgctcagtggaaccactgatgcgcaggcactgccggagttgatgaaccagactcacagaaaaatcagggaagcctccgcagatggtgcttatgacacgcgctactgccatgatgcgttattgaggaaaaagatcaggccacttatcccgccacgaagtggtgcgcaatactggcctgacaagtaccatgcacgtaaccacgctgtggcgaatcagcatctgagcggcagcaatgacctctggaaaaagaaagtgggttatcaccgtcgttcagtggcagaaacggcgatgttccgaatgaaaaccttgctgggtggcagcctgagcctgcgggactatgacgctcaggtgggggaagcgatggcaatgttcaaagtgctaaaccggatgacattgttggggatgccgcacagcgtccggatcgcataa

SEQ ID NO: 395857 - DNA, 567 bp, Salmonella enterica
atgaatcaaacttaccatccttactggcaacaacgcatcgccgacacctttcagaatacccttgatgcttatccccgtgtgctgatgctgcgggttgatctgcgtttccctgattgtcctgctgcgaccgatgcagaggtgatatcccgctttacggattccctgaaagcaaaaatcgccgcgtacataaaacgtaaacagcacgaaggcaaacgggtacacgccaccaccctgcgttatgtctgggtgagggagttcggcgagcgtaatggtaaaaaacactatcacgtggtgctgttactgaaccgggatacctggtgtggagcgggggattaccgtgcaccggattcactggcagggctgattaaacaggcatggtgcagtgccctgcgggtggatgcgcagcagtattcctcactggcgaacttcccgcagaacccggtgctgtggcttgaccggggtaatgccgcacagctgcaacagggactggcacgtgctgattaccttgccaaacaccacaccaaagtcagcgacggcgaacgcaattttggctgcagccagaactga

SEQ ID NO: 395858 - DNA, 297 bp, Salmonella enterica
gtggtcgtttttctggatcagaacaccgtctggaatggcattcctgaacatacccggctcagcgccctggagcgccggctttgtaacgcctggtgcagtactcccggattatccggcacacaggtcgatatcccggtgtgtggacgaacgcgtgacaatatctttctgctgaaccgcgacgctcccggcattcaggaagagataaaccgcctgacctggcatttaagcgatatggtgcggaaccggcatcacgttaccgcgcccgaagcccgggtgctggagagcagcgtctggtaa

SEQ ID NO: 395859 - DNA, 231 bp, Salmonella enterica
atgaataattccagccacctggcttcgctactgtcaacagacgatccgcttatcgacatggcctttatcaccacctgtaccggcatgaccgacaagtggttctacaagctgattggcgatggtctgtttccaaaacccatcaagctcggacgcagcagccgctggcgcagaagcgaggtggaaagctggatgcgtgagcgcattgtggattcacgcggcggggctgactga

SEQ ID NO: 395860 - DNA, 285 bp, Salmonella enterica
gtgagagaaataaaacaggttaacgtgacgtattcagtggacaacgacagccgggaaccgggcggcataacaatcagaccctgcaaatacgcggtggcgcagactggctacctggtcagcgctgctgaatttgagtttgtctcactgtggcgtttttactgcctgcactgcaaccttccggtgaagctggtcatggctcaggggctgcagcctgcacatttcatgcatgttgcagacgatctcagcgatatcgccggcacctgtccttttgttttaaaagtgtga

SEQ ID NO: 395861 - DNA, 258 bp, Salmonella enterica
atgtgttgtttcagtcagtcagacagctcagtccggcatcttcgcgtggcggaataccgtcaatattgccggatcctcgtgggtgttaatgcaggtttttggggatgcgtcagtgatgcagagcgacagtgctggcagcagcgtgcgtcagaggagctgcaaaaggcgcaacggacgcgctgtcgccgcgccaaacctgaagataaccagcgtcttgaagaggcctgtgaacgcctttgcaggataattcaacagtaa

SEQ ID NO: 395862 - DNA, 540 bp, Salmonella enterica
atgacacattgtcaggcacctcccgctgacactcatgcagagagttcgggaatccttcgcaaagtacttcagcaggccatcgatcagtatcctcgtctggcgacgtttctgctgacgttacccggcgtaactccggaagccgtacagcattttcacgacagcgtttatcagcaggtaagcgaactggctgtcacccgccagctaagtggcagaccggttcccccgacggtactacgctggatttgggcgtccccgccaggtcagacgggcaggatattactgctgctgaaccaggacaccttctgccatccccgttacgacagaccaccggaccgctgttttgaaacaatggagacgctgctccgccaggcgtgggagacggtggatatcccacagcgtggcaaactgccggatataaccgtgttcagagtggaccgaacgtgcccggcgcaggctggcatgcagtacagccgccttcgggaatgtgccctgtcgctggctcccgccgttactgcccggagtgagagtatcagcctctga

SEQ ID NO: 395863 - DNA, 585 bp, Salmonella enterica
atgtataacccctgtaatgaaataacgcccctggttgaggtgtaccagcgctggcttaacgaccagacacgacttgccgttcgctatggtatcagtacccgtaaaacgcatacctggcataccctgacgaccaccggcatcatgctggctgacggacggcgggtagccatggtggttccggtctgtttgttggcggtttcaccggcgatgaataatgccggaagccacgtcgatgttcctgtgctggtcgatatgaacagcctgcgggtttatccgctgttacccggtatcatgctgagtgagtgtgtccgcctgcggcttgatggtttacataactgtcttgaacgggttttcagccgtctgaggttgccgggtctgcgggagtccctgacgctgctgtgctggtatgagctggtgaatggcctgcaaaacagcgactggctgtatctgccggagttaagtgagcaggaagtgaagacatggggggaaacgcggttgtcgcagtatccattgctgtaccgcgtggtggatgaatacgtgttcttcgccagctttggtttctggtctgaagccccgccatgttaa

SEQ ID NO: 395864 - DNA, 390 bp, Salmonella enterica
atgtcaaagcaaaagtttaaaatcaccaactggcccgcatacaacaaagcgctcaggcaacgtggttcactgactgtctggcttgatgagtctgccattgccgcatggaccgacaacgcacagcctgaaggccgtggccgaccacttcactacaccgatatggctattaccactgtcctgatgatgaaacgcgtgttcaacctgccgctccgggctttacagggcttcgttgactcaatttttaagctgatggaactgccgttgtgctgcccggactactctctggtcagcaaacgggcaaagagcgtcaacatcagcatcaaaacgccaacccgtggtgaaatctcgcatctggtcatcgacagtaccggcctgaaagtcttcggctaa

SEQ ID NO: 395865 - DNA, 177 bp, Salmonella enterica
atgaccaatagggcggatgttatccctgtagaaataaaagccagggagtctgtcgaagctgccatacagatatcctttctggtgcgagaatctcagggaaacaacatgcggggggagcggaccatactaatggtgaattggggggcggaagttttcctggacggttttattgtgtga

SEQ ID NO: 395866 - DNA, 288 bp, Salmonella enterica
atgctgtatatcgcctacaaccgtgcgatacgtgatgaggcggagcaaaagttcccgtatcatgtcacctgtaaaaccagccatcagttggcgtatgccgcgacggggcggtttatgacggtaagactgaaactgagtcttaccgtcaggggatacacggccggtcaggcagatcaggtgcatgagctgtatgcgtcacggggaaatatttcggtccgagagatttcagcaaagacggggttttcatatggttctgttagttacatgttgtatgccgttaagccgtaa

SEQ ID NO: 395867 - DNA, 228 bp, Salmonella enterica
atggttctgttagttacatgttgtatgccgttaagccgtaaatgtcgccatacattacagattaatgtgtttattggtcttgactggacaatcctgattgttgctagcgcagcactgggatggaagagagtggcggacgcgttagttgcggccattctgcataacctgagcacgttgttggtattgttgaataccgggcggttgctgcagtttaatgaaaacagctaa

SEQ ID NO: 395868 - DNA, 168 bp, Salmonella enterica
atgcaggaattaattcagaccgataacaaggagatatcaatgcaaccagataaaaagaaattagctgcaattaccatcccgacagttacagattcaaataaatcaattcctgacctgacatccttatcggagctaaacaacactgacgtgaatttcaatggcaaataa

SEQ ID NO: 395869 - DNA, 5019 bp, Salmonella enterica
atggcagtggaaaataagttcaaacttaatgttattgccgcatcagtgctgatggggctgagtctgtcggctgtggcggctggcgaaccgcagcctgcaacaggtactgcttctgccaaagaggctccggctgctggtgtggagaaagcgaaagaggcggcagtatcttcagctaccggattcaatcctgtggttgtggggcagtcttcagttgctgttgatgccacgaagtttaaatacagtggtgaaaatgcggtatcgtctctgtttgatacgggcggagcagttgatacttttaataaagcacgcgaagcagcttttggagctaaaggtgcactggacgcgaaagctctgggtgttatagctgattacaataaagctaaggctgatactgctaaagctgatgctgactggaagtcatttgcggccggggctaaggttgtcggggctgaatatgaaaaagcattaggcaacgtgtatggtacaggtaagacgggcgcatatacggatgagctggcatctgtcaccagtttatcaacgcctgcaacaggcggtgcctttggtgaatatgtaaaaggtgttaatgattttaaaagtaagctgggcaccttccaggatgcactgattggtactgatggaaagagtggtgcgctgacaacccctctgggtaagagtgatgaggtagccacaacactgcaaacggcagtagataaagttcagggttatcgcaactatctggaagcctggacgaaaaatgaagcagcagatctgaaggttgaagctgctaaaaatcagattattaaaaccctgccggaaatgcagcactttgttacagagtggggcggtctttccgacaatggtaagggtgaagctaaacctgatttagccgctaaatatcaggcgttttctgaggctgtaacagcccttcagaaggctgatgataaggcgctttctgaagcccgtactaaacttcaggaggcagcttcagcactgagtgtggcttttgattctgtcaaagttgttaaggatgtgaatactggagttgcaagtagttttgatggcgacgataaaaccagatttcagaatcttatgactacagtcaaaaatgccgttactgcaattacggctactgacacagacaaagctgcctgggcaaagctggagaagacaggcaagttctcagatttgcctgggtatgcttctcttgcttatgggaccattgagaaaatcggtgatactcatgttgcctccgttcaggatgcccttcaggggctgcaggaggcgtttgcaacattgtgtggtggtgatggtgcatctgatatatgcaagggtgaaagtggacacactgaggttgctgacctgaaaacttcatgggaaaaactcatgggggccgatggtaagggaactgacacgaagtcacttgccttcgcatataaaactgctctggataaactgaatgtcgagaaagaaagactcgcaacggttttcactgagttcaatgagaagaatcttgcatacagtgatgtccggaaggcttacttcactgcatatgacgcctataacgatgctaaattagccgatgccagacaggtatatagtaaactgggtgctgcgtttgatgaactgcaaacagcaagttcgaacctgggaacagcaatcaaatccgctgctcgcgattattctgctgaccgtaaaaacggtgtgcctgatgaaaccgcactcaccacttctctgggtaaactgaaaacgctcattccggttaaactgcaactggattcaatgattcttgattaccagcaggcaatggggcagaaggcggacgtcaatggcctgtcaacgttgtcacagttacaggccgcataccggtctgcaaacgaagccaaaacagcagccagcgatgtctataacaaagctgttacggcttataaggacgccaccagtgcgtacgatgcggcagttaaaactggttcaggtggcaatctcagtaaagcggaagcggacctgacggttgcggctaaaaacctgcttctcgctgcaggttataataaggatatgagcaccttatcacttaccgggaacgggggcagttctcttataggtactgtgaatagtaagttaaaaaatattgcacaaggagctaaagctggtgagcttattggttataccagtattattcctgatgataaattcacccctggagcgctgacggagtacaatactgccagtggagctcttgagaatggcgctgtttctgcaggccgtcagaatatcgccagcggtctccgtaacctggcggacctccgtgtactgtacacagataaagaatggtcagacctgaaagtcggtgtcgacaaggacggaaaaggtggtcagtcccttgctgacgtgtatctggctgctcttgacaaagtgggtgtgaaagccaccagtgcggaagagcagaagaaagtcgaaaatgcagaaaccattacacatcatctgggatgggcggatgtgggaggctacgactttactgcaggtcgctataaccctgttatcctggataccgacaaggatggaaaagttacgggtatcaagcgtgactttacagcagccgatttgtacaccggtacgcaggataaaccattcaccactactgtgctgaacattgaagcgccggtaatgggtaatggtgctccggctgaagccaacacaattacagtgggcgaagcttccaccaaagacaggaaggctacacctgttgaagtctgggcacgtactgaagagggtgcggtgaagctgagtggtaaactgaaaaccgccattatcgttgccggtaaagatggtgctcaggaagtcattcgtggtgctgaccggattgttctgcagaatgtgaatattcacaacgataatcttcttgagaaattaaacaccctgaagaacgatatggtgagtgttggtctgcacattgataccggtacagttgattcacttctggccagggatatgggtgtggctctgagtcatctggctgcaaacggcactttcggaactaatgatgttaaagccgcaccgaaagaagccaatatccggctggataatgtgaacattactctggttaatgaccgtgattcccgcaatacaactcaccaggatacccgtcgtcgcgacaattctgttgactaccgtccgaaggaatcagacgccattctgctgtcaggcagcggaaaccacattctggtcagtggcggtgtgtttgatgctggtagtgtgaatatctatgacagacataatcataacgaccaggtaaatgtgctcaacatcacgggtgaaaataacatcgtcgatttcgtcggttccacactgaaaggcgatattctttccagtgctgcaggtaacaccgttaacctgaaaaatggcagtaatctgaccggtgatgtatcaacaatatatcatgagttcctctctctgaatctggacggcagtacctggaccggtggggctggtccgaacagcccggatgtcagcctgagcaacaactccgtctggaatgttaagggttatgattttactgatttccctgagtcttcggtcaacagcctgacactgcacggcagtaacacccttaatctggttaacgctgaaggcaaggcacaactgagtggacgtggttttgttggtagtaaatatggcacagtcctcagtgttgacaatgacctgaccagtgttggtgagggtgtgaccactgttctggcggggacttactcacctgataatctccacagtctgacgaataccggtctggctggcggctatcagcttggtgcaattaatgtggacggtctggcgactggcggtaagtacgccctgtccgtggaaagcgccggtgctgagccgtacaccattggtggtcggctggctgatggggctgacgcaacccgtgcccatgaatttgtgtcatacaaaacgtcggaaaaccgtcctgttacgggcaaggatggtaataccgctgttcagactgttaagtctgacgctgacttcaccagcctgagcgctccggctgagctgggggtgtaccagtatgccgctgagaaggtgatggacggggtgaataaccggacaaacatctactacagcagcacaggtaagctgtccaacagtgctgccacagcggtttccctcgctgcggcgccggttgatgtggccaatctgctgtctgacacgctggcgaagcacatgaacagcgtgcgtcatggtaaggattccggcgtgtgggtatcctactttggtggggagaaccgcaacaccacagcagcaggtccggaatacaccctgaagactaacggagtcatgctgggtgctgacaccctgacggaaaacaactggctggccggtgtggctgtttcttcagcccgctcagacatgagcgtgatgaacagcagcggtgacctgaacagctacggtgcgcagttctacatgtcccgtcgttatgacagcggtgtgtttgtggacagtgcgctgcagtttaaccacttcagcaatacggccaaagctcgcatgattaatggtcagcaggcgaaggctgacttcagtggtaacagctacggcctggaagctaaggtgggttacgcctggatcagcgaagggttctttgctgagccgtatgtccgtgctgcggcccgtgcctttgacggtgagcattatgccctgtctaacggtatgaccgtgaacagcaacgactataagtccatgctgggtgaaatcggtaccgacctcggataccagtatgacatcagtggaggttacgtgaagccttacctgcacctggctgcgctgaatgagtttgctgatggtaactccgttcgcgtgaacaatgtttcactggataacagcgtgaaaggcgccgccttccaggcgggtctgggagctgaagtgaaggtaacggataacctgggtggatatgcagcctttgattacacgaagggcgataacaccgagcgtccgtggcaggcaacagtgggtgtgaactacacctggtaa

SEQ ID NO: 395870 - DNA, 150 bp, Salmonella enterica
atgaaacggaatgacaggcccgttaatgtccggtctccccgtataaagtatacctttactttaggagctaaattgtttataggcggaatttattttagcctgttgtttttggttgtgctcattatttacataatgagaaatccttattaa

SEQ ID NO: 395871 - DNA, 687 bp, Salmonella enterica
atgatgaaatacaaaatccccctgacagcactaccctttatccttagcgcaggtcaggtgatggctgccaccagtgaggaaggttattacgcttcggctaaatatgtgtatagtgaacaacacgccagtgaccaggatagcagcagtcgtcccggtgtcgggcagtttgttaatggtaaggaaaaagatcgcctgagcagtgcttcgctggcggcaggctatcagtacggcaacggctggcgcaccgaaggggaatacactttccgccagaaaaccgaattcaccagcggctccactgtcttcccgaccagctttaaccaccttaagctgaaaactgaacgactgatgatgaacatctatcgcgactacgatgtcggttacggcgtgtcgtttttcggtactgccgggctggggatagcaagggtcaaagctgacggctggcagggtaatatctcccgggaatacgcctccggcacgcagaataatctcgcctggacgctgggcgcgggtgtcagctactctcctctggagcgcctgagttttgatgcaggctatcgctataccgacatggggaaaattgaaagcggctacaatacattcggtaacgtgcgcagtctgaaggatgagcaaatgaaagctcatctcgcctctggcgaatttactattggcactcgttatcttttctga

SEQ ID NO: 395872 - DNA, 498 bp, Salmonella enterica
atgaaacgtatcctgtcaggcgccctgttgatgggctgcatagttcccattgccagcgctactgatgttgtgctgagtcagaaaaacctctccttccacatcgccgataaactggcgcaaaacgttcttctggtatgtgccagagataactacaacgtggcggtaaccgtggttgactattccggcacacctctggtgatgaaaagaatggataacgcggggccacatactatcgaagccagtcgtatgaaagcttttactgcactcagtaccagaaccccaaccgataacgtcatgaaaaattccaggtccagtgcagacgcgaacaacctgcgtgatattccgggtttcctgctgctggcgggtggtgtaccggttacatctggcgggcaggtgattggggcggtcggcgtcggcggtgcgccgggcggtcatctggaccaggcctgcgccctggaagcgctgaagagcattgataaagaactgaatgcgggttaa

SEQ ID NO: 395873 - DNA, 618 bp, Salmonella enterica
atggaaccgtgcatctggcttattgatgacgatgcggcaatacgcgactcactgagtctgctactttccactgtgggatggcagacccatgccttcgacaacgcacaggattttcagaaacaggcgggtaacctctgcgagctggcaggctgcatgctactggacatccgcatgccgggcaaaacaggactgatgctgctggacgaatggacacttcaggggcttactctgccagtgataattatgaccggccacggaaatattgatttatgccgccgcgcatttaagaacggagccttcgagtttttgaccaaaccggtcgatgcagatttgctgtttgaggtggtaggggctgcgatggtgcagcagaaaacccgccaggaagaacagcaaaggctgcagccgttacagaaaaatctctcgaccctgaccgcccgtgaaaaagagatgctcgggcaaatggttcaggggtattccagcaaggaaatcgcccggctttgttcactatcgccccgtaccgtggaggcgcatcgcgccagtatctttgccaaacttggagtaaattcattgcccagactgctgacaatgtacggtgaaatcgcaagagaaactaagtaa

SEQ ID NO: 395874 - DNA, 1320 bp, Salmonella enterica
atgttgaagataatcagctggtgcctgctcacatcacttagctgcacgggacttggtgcctggtttctacagcagcagtatgaagaaaaatctaccgactttcgcatcctttaccgcgaaatcacggtgaaactgtcgcagcacgacgccattatcccgctgctgccagccagcaagaactctgccgaagtgcagcacatcctgccgcagatcgttgactggcagtggcgcaataaccctgaatccagtcagcctattgttcccgaaggcctgggccgttactggctgaaccgtcccggtctctcgctactgattgatttaaccactctgctgaatacactgcctgagaaaaaaacgttcagatatctcgccattagctggggcaggacaacgctgtatgaacagggtaatgaccatctgcctgcctggtggcgctgggaaaaaacggtagccagcccgactcagcctcttctcgttctggcaggtgacaatcctgtatggtcaaagctgccatggtggcagatcgtttttcctgcactgttctgggcgctggcgctttatctgctggctcagtatcaggcaaataaacgccgccgggacactgccgacctgcgagcccgttacgccgaacttatccggctgaataccatgggcgaaatggcagcaggtatgatccatgaactaaaccagcccctgactgctatcatgagctataaccaggcagcactcaggcttatcagactggacaatccgactcagatccccgacctgctggaggcctccgtgctccagataaagcgtattgatgtcctgctcagccagttccgccagaagctagcctgcgaacgtatcgaatatcagcaggtcgaacttcctgtactctggcggcgggtttgcaggctgctggataacgagttgcgggcggggaatgtacgtgtaagctgccactttaccgacgatctgccatcgctgatggcaccgccactgtggattgagcagatcatgcataatatcgtcagtaacgcgattcaggctcaggcagggaatacgccggattcagcatgtatccatctggaggcctgtcagcacgaacacggtattgcgctgacattcaccgactgcggtccgggacttacggctgaagcgctggaatacgtctttatcccgttcttcaccacaagagcctctggtatcggcctgggaatggcgataacagacacgctggtccagcgcatgaatggcaccattgaggccagtaacatttcggaaaaaggggcctgtttccggatttggtttcccctgccagaaaaggaaaaataa

SEQ ID NO: 395875 - DNA, 273 bp, Salmonella enterica
atggttaaagttgacgtaaaatgcccattttatgagcaacccgtatccgttaaacatggacccggtaaggccaaacttcagcgttatcggtgccagtcatgctgccgtactttccagcccgattatgcttatcgagcgtgccagcccggcatgaaagaacagattgttgaccttgctatgaacaactcagacatccgcgataccgcccaggcgctgcatatcagcatcaatactgttgtccgcactttaaaaaactcgcgccgcgatatgtaa

SEQ ID NO: 395876 - DNA, 261 bp, Salmonella enterica
atggcaaccgcggagactctttacgcatcaaagaataactcatggataaaaatctttaatttatctaaatctcatggtagggaagagggcagtttgcacgagatgaattacacctggctgagcctggcgcaaaaaatgctgctcaaagacaggaacgtcgcaatgttcaggctggggctgaatgcccgggttgaccacctcaggcccatgcttgcagctatcctgtgcctgtctgataccggaggtggtcatggcatctga

SEQ ID NO: 395877 - DNA, 3540 bp, Salmonella enterica
atgacagtggaaaacaaattcaaacgcaatgttctggcagcgtcaatccttgttgggttgagtctgtctgcagcatccggggttgcctgggctgagggtgaaagtgctttgcagatgaagggggagagtgaagctttatcagccgatactaatgcggatgcaggggatacaggaaaaaacagcgaagttcagagtgctgaaagccttgctaccattaaagacgatgccctggaaactctttcctctggtgataagttaagcgagggctctcctgggaatttgcaggaaggcacaaatccacaaaatgaaacctccaccattaaaaatgaaaacgatgaaataaaatcagatgaaaaaaaagagggtgacacctctgaacaggttccctcagaagcagacccgaaaaaggctgacttaaacgccgaacagcaagacgcccccgtagcgcaccacgaggactcagaaagtcttaatggagggaaaggtgatgaagataagagtttgatcgaaaaagtgggggatggtttaaataatcttgtcaatgctgctgctgaccttatcactggcgggggagcttcaacgccagaggacaacaaggaaggtggtggtcaggctctttctgatggggcggaagataatagtcagccctcagcgcctgtaagtccgtcagcggaaggcggtgaccgtaatgttcagtctcctggtgattctgaggctggccatgctactgaacctggcaagcagccagaacttgatggtaagccagtggtcgatggcggttctgaacctgacaagcagccagaacttgatggtaagccagtggtcgatgacggttctgaacctggcaagcagccagaacttgatggtaagccagtggtcgatggcggttctgaacctgacaagcagccagaacttgacggtaagccagtggtcgatgacggttctgaacctggcaagcagccagaacttgacggtaagccagtggtcgatgacggttctgaacctggcaagcagcccgaacttgatggtaagccagtggtcgatgacggttctgaacctggcaagcagccagaacttgatggtaagccagtggtcgatgacggttctgaatctggcaagcagccagaacttgatggtaagccagtggtcgatgacggcacggaatctgacaagcagccagaggtcggcagtaagcctgcgcctgtagagaagcctgttgcggaaaaaccggcagaacagccagcggtaaaacctgctgaacccagacatacatattctgctgctgaactgaatgctctcactaaggataaagcgctaaccgaagccctgccgatagacgtgagtccgtctgccactgacacgaaagcggtcgtgtactctctgggcgatgcggcatccaaagatggaaaagttacgccatccagtatccgggcagaatcagctgtcgcagtggatctgacaggaactctccgtacggctcagccggagctggataaagatggtaaacctgtggctggtaaagttgttcgtgatgcagacaaaattatcctgcagaacattaatatccagaaccgtgtgaatgagtttgtcagtgatattgctggtatccgaattggcacacaaacggcatccgataccggggcatcatctgcagcgccgaaagatgccagtatcctgctggataacgttaatatcactatgcagaatgatagtggccggactaaagccattgacctgaccggcaacagtaaccaccttctggctaaaggtggggtgattgatgcgggtgaaggttatagcgccagcgtccttgacatttccggcagtaacaacgttgttgattttgttggctcaacactgaaaggtgacattaagtctgaatggagtccgtcggggacgcttgataacactgtgaaccttaagggtagtaagctgacaggtaatgctgtttcggccacaggaaaccttaatctggtgctggatggtagtacctggacgggaggtgcaggtttgcacagtccggatgtctctctgcgtaacggctctgtctggaatgtaactggtacaaatggagtctggtcagatcgttcttcagtcaatagtctgaatctttatggcagtaacaccgtgaatctggtttcttccgttggtctggcgcaactgggtgggcatggttttactggtgagaatacaggtaaaacactgcatgtggataccgacctgaagaacgacggcaaaggagttaccacggtgaatgtcggaacctattctccggggacacttcatcgcctgaacaataccggacttggtgatgattatgcgtttggtcggattgaggctgacgggctggctctgggtggtaaatatcgtctgaatgtggaaagttcgggtgctgagccgtacaccattggtggacgtctggctgacggggctgccagcaaggcccatgcgtttgtggaatacaaaacgtcagagaatcgtccggggacagataaagatggtaagccggtcacactgaatgttaagtctgatgctgatttcatcagcctgagcgcaccgactgaactgggtgtgtaccagtatgccgctgagaaggtaatagacggggtgaacaaccgtacgagtatctactacaccagcacaggcaagctctccaacagtgccgccactgcagtatcaatggctgcggcaccggttgatgtggcaaatcttgaatctgacactctggcgaagcacatgaacagtgtgcgccatggtaaagattctggtgtgtggctgtcctacttcggcggggagaaccgtaacaccacggcagcaggtcctgaatacaccctgaagaccaatggcgtcatgctcggtgctgacaccctgacggaaaacaactggctggccggtgtggccgtgtcttcagcccgctcagacgtgagtgtgatgaacagcagcggtgacctgaacagctacggtgcgcagttctacatgtcccgtcgttatgacagtggtgtgtttgtggacagtgcgctgcagtttaaccacttcagcaatacagccaaagcccgcatgattaatggtcagcaggcgaaggccgacttcagcggtaacagctacggcctggaagctaaagtcggttacgcctggaacgataacgggttctttgctgagccgtatgttcgtgctgcggcccgtgcctttgacggtgagcattatgcgctgtccaatggcatgaccgtgaacagcaacgactacaagtcaatgctgggcgaagtgggtgcagatgtgggttatcagtatgacctcagtggcggttacgtgaaaccgtacctgcacctggcagcgctgaatgagtttgctgacggtaactcagtccgtgtaaacaacgtttcactggataacagtgtgaaaggcgcagccttccaggctgggctgggcgctgaagtgaaagtgacggataacctgggtggttatgcggcctttgattacacgaagggtgataataccgaacgtccgtggcaggcgacggtgggtgtgaactacacctggtaa

SEQ ID NO: 395878 - DNA, 291 bp, Salmonella enterica
gtgaatacagaaaaatcgttgcgcgaactgaattatgcctggctgaatctggtgcaaaaaatgctgctgaaggacaggagtgccagcctggtcaggctgggtatcgggaccgacattgccaccgtactggccgggctgacagagaaagagctccgcagattatcttcacatccccactttattttcagcctgcgaattaaatcgccggaggcgctgaaatgtctgttgcatgaatcgcgggtagatcacctgcagccggcacatgccgcaatcctgtgtctgagtgaataa

SEQ ID NO: 395879 - DNA, 519 bp, Salmonella enterica
atggcaacagaaagcctgttaaaagaattgcatgatacagcgctggccgcagaactgatttctctgggggcaagaatgcagttgctggagcatgtggttgaactgagtcgcgggaagatgacccggctgtacagggaaattcggggcgttcccccaccaaaggggatgctgccgttttctgctgactggtttatgtcgtgggagcataatgttcatgcatcattgttctgcaacatctgtgacagaatgagagagcagggacaggatgagtctcatatcagaacgctgatatcagcttaccgcgtatatcttaaatatacggatgagggtacggaagttttatccctgacccgggtgtggctcctcatgcgttttattgatgcccggatgttatgcctgaccccctgtcgggagtgcggtggtaaatttatcacttatcatggtgaaccggcatatggttacaggtgtgtgatgtgccgccctccatcacgggcgacaaaaaaagtaaaagtcgtgtaa

SEQ ID NO: 395880 - DNA, 711 bp, Salmonella enterica
atgggcatgccagaagaaaataataaaaaacaccccgtttccattattcgttaccggaatactgaaccagggccacaacaggatgttccgggccagataatgaacatcctttcagatgttgccgggatatctcaaaacaaccaactcactgatgagcggctgacggcaatcattaatcatttctggtccatgcggggcagactgaacaacaagctcgcggcagagggagccgccgactccctctctgagaaaagatacaaaaaactactgatctcccttcttgatgaattaatcagggaaagtaccggcgtccaggaaatcacccgcaagtcgggacaaatgctgaagatatctgctgaccgtcttaatatcagccggctcagggcccttcaccaccagtggcacgaccagacccgggcatccgccctgaaccagccacctctcccggagaaggtcgttcccgaaaatccggtcagggactggtataaaaacacagggaaatcacagttcgcccatctgcctgcatccctcgtgctgggagatgcactaagccacctgtctgccgcaacagaagaactctggcttgaagggcgctaccggttttcacctggctcattaccggaaaaactacaaaacttcgatgcggccagtcaggctgtaacgggagccctgactggacttgatgcgcagattagcagattagcagattag

SEQ ID NO: 395881 - DNA, 6210 bp, Salmonella enterica
atgagaaataaatcaggtcgtaacagcaattatttcgtgaattttatgtgcaaatgcagggataactcaggggcggaacagtgtgctggtatgcgttccctcaaagatgagaccgcagggcactcccggcgctttcgtattattgcgtgggcgaacatagcctgccagctgatgtttccgctggcattgtcattcacgccgcttatgacggcagcagagacggaaaaacacgttccagcaggtgacccccttccggatctgggggggagtgttgtcgcagatacaaaaggcgggagtggaaccggaacgaatgcggactctgcggcttccggggcgcaggctcccgacagtatgctgaacgccacgcagaagttatggggtgtgctgggttcttcttcaccccgtgagcgcggggttgaaatggcaacaggttatgccagtggtgtggcaaatcaggcggtgcaggactggctcagtcagtacggtaacgcccgtttttctttttccacgcagggtaccggcagtgccgacctgttgctgccgttgatggatacgcctgattatttactatacacccaggcaggcatgcgtcgcggtgatgaccgtaccacggggaacttcgggctgggtgggcgtttctttacgcctgactggatgttcggggtgaatgcgttttacgataatgactttactggtaataaccgtcggctggggctgggggttgaagcctggcgggattatctgaagctgtccgccaacagttacatgcgtctgtctgactggcgtcagtctccgctacatgagtcccggtattatgacgaacgtcccgcaaacgggtttgatgtccgggctgagggctggcttccggcgtggccgcaactgggcggcaagctgatgtatgaacattatcaggggaaagatgttgccctgagtggtgattttaacagtcgccgtaataatccctccgccgtcacggcggggctcagttacacccctttcccgcttcttaaggtgggagtggagcacagggaaggttccggtaccggtgacaccacgctgaatctcgatttctcttaccgttttggcgttccctggtctgagcagattaatccgcagagggtgggagcaatccgtacgatggccggtacccggtatgacctagcggaccgtaattatgacattgttctgcagtaccgtaagcaggaactgatttccctgtcgattggtgctgataaaaatcccgggtacacaggtgagagcgtgacgctgacggccacagccagaagcaaatacggactggcccgtgtggactggtcggcaccggagttgctggcggcgggcggcgctctgacgcctgttgcgaaagacggcagtgtggtgcgtgtggacctgccttcagttgtgtcaccgaaagcaccattacgcgcccgtaaagtgactgccggtgacccgtttattattgaaggtgtcgcatatgacagggaagggaacgaggcccgggcaacgctggaactgaatgttgtccgttcgacccgtggtattactgcccgcctggtcggaaaccgggctgcagcggacggccggatggttaacacggtggaagtggaggcgacggacagtgatactcaactcccgctgcccggtgaagaggttgaactggtgttcacttacgctgacggtcctgagaagggtaaggtactggacacgcagactgtgaagacggatgagcagggtaaagctgttgcggaagtgtccagccggcttgcggccagggtgagtgttgctgtcaggctgaagagtaacggtaacagcacaggcattgatgatatggcctttgttgctgacaacgcgacagcaaaaccgggagagccggtggtggatgttgcggaagcaggcagggcagtggctgatggcaggggcggggtcactctcaccttcccggtgacggatgccaatggtaatcccgtgacaggacaggaggtgacaattaccaccacgaacggggcgaaaccggaacgggtggtggtcaccacggacgagcaggggaatgccgccatcacggtgaccagtacggttgccggagcgagcacggtgacggccacggtgaacggagtgtctcagggacaggatgtgacgttcgaaccaggtgctcccgatacaacacagaccgtatttaccgtcactccgggtactctggtggcggacgggattcagagcgcagcgttgagtctggcgcttaaggacggggccggtaaccggattgctctgtcgggtgacgatgtcagctttaatgtttccgggcctgatggtgtggctctgtcggcggtaacctgtggtgaagacgtatgtaccgcaacgctccggggttcactcgcaggcacggtgacgctgacacctgttgttaaaggggtcagtatgagtgcgtttgccagaacggttaccctgacggctgagagcgaaagcgcacagggcagtaagctgacggtgaaaaataataccgttccggcagatgatataactgccagtgtcgttgaggttaaagtggaaaatgcagacggcagtcctgctgcgaatgtccgtgttgaattcagtgcggatgccccggcgcatttcctgaaaacagactatgcaaccagtagcgagggtatcgcgtcagcttcactggtcagtccgctggcacttgaaactcatgtgactgccatagtgaacggaaacagtataaacagtgaaaccatcagatttgtggcagtgggcagtgatgccgtgtttgacggtgctcagaatgtaactttacctgacgcagtcacagccggaaccataacgcctgtgatatttacggtgagagactccgacggaaaaccgctttccggccagccggtgaaggtcagttacttcgttccgggaggcgtgtcaggtgcaacggtagtggaagatactcttgtttccggcagtgacggcagggtcagcgtcagcgcgggcagtaataaagccggtcccatgaatattgtggcagaaatcaacggcaaccgtcagacggttacggtgaatgttgaggctgacagtgcaaatccggctaaagacggtgaggcaggaggaaccaccttccgggcagaaccttcggtgctgttgcctggcgaaagaacgacgctcactcttgtccttaaagacagatacggtaatgccattgccggacggaatgatatcgaattatctgacggcagccgttttactgagacgggcgttcccggtacctggacggcttctctggacgtgaagccggatgcggccccgggagtacagacagttactgtcctggcgggagccttgcaggtgggcgaactcagtctgaccgtaaccgacggcgcgctgccgggtgataccagcgctgacctggtgattaaagaaaatgaccatgttgctgacggagtggcggaagatgttctggctctgacgctggctgacgttaaaaatggtgatgtggccgtgagcttcagtgtggagcctgcgtccggcactgtcatcagtacgggaggcggggctgttatcaccccgacaggcggaaacacggtggacggcagcctggaagccactgtcaccagtaaaacagccggggactttattgttaaggcagagctggcaggggggaagaccatcagtaagacggtgacgtttgttgctgatacacgtactgcaacgttcgggaataacccacatcttacggacatcacggcaacagttggtaatcctgcaacggtaagttttatggtgcaggatgctaacggcaacctgataaaaaatcagcccgtgacgataacggcggataacggtgccactccatcatcagtaacggtgacaaccggtgcagatggcgtggcttcggtgacggtcagcaatgatacggccggagagaccacggtaacggcgaccgtaaatggtcagtcacaggacgccagggtgactttcagtgcggatgaggaacacccggcgggtatcggtgcatcaggagggtccgtgcttaccgctccgaaagaactggtggcgggagagccggcaacggtcacgcttgagctgaaggatgagaaaggtaatgccataaccggacgaaccgatatcacattatcagatggcacccggtttaccgaaacggctccgggtaaatatgaagccaccctgcaggaagacagcgttgccggagggaataaagatgtttctgttctggccggaggaacgccactggcaggttccgtgatgaacattccggtgaaagccggggagcctgacactgcgaaatcaacgctgagtatacaaccggacaccatcctggcggatggtaaggccacagcaacagtcagcctgacgatgcgggatggcaaaggtaatccggttaccgggaaggaagctgatattaagctggcgctgacaaaatccccgtccactgctgccggtgttgctgacggcatcactttgtccgggataagtgaagatgccggtaatccgggaacatatacagccactgtgagcggcacagttcccggagaagcggaagtgacagccagtgttggtggttcggcgtttaaaggaagcgtgacgctgacacccgatgaaagcacggcgtccgttacgggtatcagcgtgaaggaaaccagcgttccggcggacggtaaaacgacgaatacactgacggcgacggtggtggatacaaacggcagacctgttcagggggtgacggtcgactggagtaaaaatcagggagtgaacgcatccctggcaggaaataccagtacgacaaacgaaaaaggcgaagccactatggaggtgacgggggccgctgcggagacggcgaagttcggggccagggtgggggcaaataccagtgataccggtaaggaagcggatgctgtctttactctgtatcctgtggttggtgtgaccgtgacaaaagataacgtttctgcagacggaacaacagcgggcacggttgaggtgacagtggcagaccttgccggagcgccggtgacagggcaggcggtaaccattgcgacagcgtcgggcgtcatggcgaccagtaccggaatgacggatgctgacggtaagctttctgtggatgtaaccagtacagtatcggggacaacaggtgttacggcctcggtgggggccggtaacagacaggaggcgaccgcgcagcttaactttggtcggtatgtaagatttgacggactgactcttattcatacccctccgactacagatgccactaatgcaggtaaaatatgtcaggctgactgtgatatcacgctgacggcaaaagtggttgatgtttccggtaatgccgtgccggatgtgagtgtcagcttccagggttcagttaccggaaatgatggcagtgtggtaaccagtggcgcggatggcatggtttcggtcaccagaaagtacgataagggtggggtggaggatgtgtctctggttgcatcatcacagggagcgaccattggtacatcagcagctaacgaaatagatatcttgccgaaagttttaacgaaaattgtgcaggcgaaagccaccagtccgatgacgaagacttcgctggaacttttcaagggtaaagatgtgttgaacagttatgatactgaccttgagccgactcttgcgtcaagtggctcttatgactgtacggcagaaatacagtactcatggatgggtaaggaggtgacttcccccattacagggacgttcacagcgaaaggaaaaacgcaaggaacgaagtgtgtatttagtaatgatatacagcagccgggtttatctgatcacgaaaacgcgaacttagatgaaatcggaaaccctgcaaactacgtcttcaaatggccgacaagtgattgttcctgggcgggggagtttaattacacatttcagtgtacgtattcagggttctggacactggaaccgacgagcggattcagcccatctggtcccgttgtttttgacgcgagcaaattgaatgtgtcaacaacatcctcatcaacttatgcggggcgctacatgttctcaattcctgcggttcccgccgatggtcatactttagctaactacagtaatgatggaaagttcgcgcttatcgagcctggagctttaacaaccaaagttgttcctggttctgtattccagagtaatgtgattataggcaacggaccgttgtttacagatgcaccctga

SEQ ID NO: 395882 - DNA, 870 bp, Salmonella enterica
atgatattagatcaaagtatttataatatagaaaaatacaaaagtcaaatacaagaatatgctttatgctgtgacgattttaatgatggtgtgtatcgaaaccctaaagaaaaggcattacagaagaaatatattggatttaataatcgttctttcgttaacggtcttgtattcgatgtagaccacgaatacggagcaatagcgtgggatttagtaggtttaccgaagccaaatattattattcaaaatacaaataatggtcatgcacatcttctgtatgcgttaaaaagtcctgtattgaaaactgatgcagcgaaaataaaaccgttgaaatttgcggcgtatgttcaggcagggctaactgaaagattaaaagcagataaagcatatgctgatatattgatgagaaacccactaaataaaaacgaatcaagaacaatatgtaatgatataccagaatatgggcttgattatttatctgatttcgtccgcgaagatttttcaacccaaaataaaaagaagaatcgaagtgatatatatggattgagtcgcaacgttaatttatttgaagatttaagacaaatagcatataaagatgttttgagatataaatcaaataaatcatataatgaatttttcaatgatatgttttcaaaagctattgtattaaataactttagcaatgctactgatccactttctcacaatgaaataaaacagatctgtcaaagtatatgtaagtggacttggatgaatttttcgaaagaaaaattttctgagatacaatctaatcgtggaatgaaaaataaaggaaagaaaaaaatcacaaatttaaaaacaaaactagataagatatgggagatattatga

SEQ ID NO: 395883 - DNA, 246 bp, Salmonella enterica
atgaaaaagatcattatatttaccattgtagctaatatcgcattttatttattcgttacacaaaataccgctgagcctaaaaaagatcttccagctaatgccccctttattacaaaatctaatctaccaagcatatgcagggtcagtacaatggcaactgctacagataccaaacagaatatacccgtcgtagagtgcaaattcagtattgcaactacaatcacctccaatgctaccagttactga

SEQ ID NO: 395884 - DNA, 579 bp, Salmonella enterica
atggcaaatgacagtaaaaaaaccgattctacagaatataactctgttcacgtagacatttcagacatcaaacgccaaagggatgccgccaacaaagcaaggaaagagaaaaaatacactgatgcgggattttcaagaacaaagatatacttaggaagagacacctatgagaaacttgccgagatatttgaagaccagcggggaagcgtactcaacatagaagggcgtaaagacattgattcacttagccgggttatcagctactgcatcaataaggtgtatcaagaggttcatatcaaaaagaagaaaatcggtcagttacctgatgttatccccgcttttaacgcaaagagtcaggaactatacgatctctaccaggctgccagcttcatgcaaagtgaagggcatagtattgcgaaaatcaggacaaaaatgagtgctaatgaatatccggcaccaaacactatcacgctgaacggttcccgaaatcgtttatcggcatggacggagcagcaagtaagagacctactggatttagagatcctcaacgaagatcttaaagaccttcagtcacgctga

SEQ ID NO: 395885 - DNA, 192 bp, Salmonella enterica
atgaaagagagcaagttaattaagattcaagaagtattaaagcgctgtgccattagccgggcaacgttatatcgcctgattgccaataaaagttttccaaaccaagtttcgctaactggaaatcgttccgttgcctggcgagatgaggatatccagcgttggattgaagagcgtccaaccataaatcagtaa

SEQ ID NO: 395886 - DNA, 828 bp, Salmonella enterica
atgaaaataccactggcaaggttaagtgataagaatgaagcgctagctgaagcattgccaaaatttgaaacagtggtgaaggtcagagcggaaaagtgcttcagggtaaaatcattgcagaaatgccaagggaaagtttaccaggatctctttaaaaaacttaaagattgccatccgagcgatccttgcgggagcgctgcatgtcctgaatgcttcaggaaacaccgactggaaatgattggagaagtgctccgtttatgtaagaaaagcaaaaaatggcgaagtatcactttaatattctatcaggatgcattttatgacaatcaactattaaaatggcagcccgatacattaatagcacggcttcgtcgctggttaaatgaatgtggcttctctggaatagtgatcggtgggtttgaaatggattaccacatagatattaaaaagtggatgcctcattttcatcttatcattcccaatgacaagcaggctattaaaaggctacgtatcaggatgaagaacaagaagaatatgaatacgcggggaaatgtaataaatcgccccatgctagtaagtaagttaaaagccccattacgacaggtgagctaccgttttaaagctatctggtggcgagtcgagtcaatccagtatgattattatcatctacaggggaacaaggaaaggaaaaggaagcgatggactaaaaaatatcgtctattgcgtaatcaatatgttgattctctgattaagttggattctattgggataaccggattaaccttcatgtataaggtaaggaagtatggtgaccatttgataatgaaatga

SEQ ID NO: 395887 - DNA, 177 bp, Salmonella enterica
atggttaatgccaatccttgcacacatccaaaatttatttggcgtttcttctcatgccagcaatccacctatcacactgttacggccaccagcgaacgcgaagcccgcgcacagatacctgatgcgccgtgtctgtttgccgctcgtattcgtctggagggggttaatcatgcttaa

SEQ ID NO: 395888 - DNA, 285 bp, Salmonella enterica
atgcacaatgaaagaaatattaaaaataatctggcttattacctggttgatttaacggatgcggtaagtgctttatcggtgatatgggaatcaaaaggaattgataaccatattgatgataaaacaataacagcaatgaattttatttcgcgggaaatttacgatcggcacatggcgcttgatgtttttctggaggatgaagatctcacagaattcaagagtgataaggacatttgcgaaattcttgcagcacgaaaaagagaatctgccagcaaagaagactaa

SEQ ID NO: 395889 - DNA, 303 bp, Salmonella enterica
atgaaaaagaaaatatctggcttaaccgccagcggcctttctcggcctgaaatccatcccggtgatattttccgggacaagtccgggcgccgggtaatgattaaaaccgtcagtgcaacgcgcattgtgttcgttcgccctggctaccctgacgaatgtttttgctcaccatcccgccttgtgcgggatttcaccccgatcaaaaagcagacgtttcaggaatgggcgcaggcaaacaacccacttgagaaaacgctgaaattacgcgcaatgattaacgccagccgggaggccagcaagtga

SEQ ID NO: 395890 - DNA, 981 bp, Salmonella enterica
atggcaatacgcaagcttgatgatggccgttggctggtggatgtgaggccagcgggagcggaaggaaaacggataagaaaaaaatttaacctacgtggcaaggctgaggactacgaaaaatacattatccaaaatttccacaataacccctggcagggcagagcgtcagataagcgcaggctgtcagaactggcggagacatggtggcgcataaaagggcgtaacgatgcttacggtgatcagtattttatgcgactgaataaagttatcagggaaatgggagacccgcgaacctgtaacgttacatctggcgcgatcattaaataccgttctgaaaaactggcggcgggattgaagccgaataccgttaaccgtgatttaacggtgttatcagcaatgtttactgcgttgtctgagtcagaaatgtactacggcgaaaaccctgtacacggtgtgcgtaagctgaaggtaatcactactgaaatggcttttctgtcagaggaagaaaccgccgaactactggctacgctggaaggagattacagggcgctggccgtattgtgcctttccactggcgcaaggtatggagaagcggccagattgcgcggggagcacattacaggcaaccgggtgatgtttacacgaacaaaaaacggtaaaccccgcgccgtgccgatatctgatgatgtattgaatgcggtaaaaaaacgaaagaccgggcgactattcagcgttgattatgtgaagttcagggaggcgctaaaggcagtaaagccggatctcccgaaaggccaggcgacgcacgtactacggcacacattcgctacgcatttcatgatgaacggcgggaacatcatcacgctacagcgaatattgggacatgccaccatacagcagacgatgacctatgcgcattttgcgccggacttcttacaggaggcggtgaactacaacccaatagcgggaatgagcctggaatag

SEQ ID NO: 395891 - DNA, 291 bp, Salmonella enterica
atgcaggagcaaaaaaggccgatactgagcattaagcgcaagccgtctttgatgtatcagaagccaccacaaaaaccagacagtgaacagagcgccgcgcagctagggcagcaggccgcgaccgtcaccacgataaaagcgaagcccaaatataaagggcttcccggatgggaggaggtgaggggaaaattttctgatggttattttaatctggggaaaatgctttcatcgggaatgttcagaaaagacaagcaggaagccgcacgacaaaaaaggcagtctggcgggtga

SEQ ID NO: 395892 - DNA, 213 bp, Salmonella enterica
atggcagatgaagcggatattgccagcgagagcgagcagctacggacagatgcggcattatcaggacgtgaacgccatgcgctaccagaaacggggcattgccataactgcgacgagataatcagcgccgggttattttgtgatgctgattgccgggacgattacgagaagcgggaaagattcagcgccatgaggccgcgcaatagcgaataa

SEQ ID NO: 395893 - DNA, 210 bp, Salmonella enterica
atgaagataccggaacgatggccactctatgctaaatggtttgttgtctggctggtcatcatgccgatgatcgtttaccgggttagtcatacctggttgtttagttctggcctgtttggtctgctggtggttgctcttgctgtagggttggcggctcaccttgtggatcgtatgttctcttttctctgcgattgtgtgaagcgccgttag

SEQ ID NO: 395894 - DNA, 390 bp, Salmonella enterica
atggagcgtaattcatccggcctacatttgaagattgccgaatggatattagaacggggtgaatctgcctgcgtttacgatgttgcgatgcaattcggcgtgaccgttcgccaggctatagggttactctcttctgtcgtgacggatagcgctatagagacacgaaccgggcttatcattcccgatcgtcccagcggtcgctataacggtaaatacgttagatctgtgtccgttctctctattgaccatgaaacaatatcccgtcgcagaaaaacgcatcaatgccacaactaccgcgccgaaagccaccagccggaaacatactgcgaaatgtcacgcgctgagaaatgggaatgggtgatcaggaatgccagacggcgaaaacggtaa

SEQ ID NO: 395895 - DNA, 369 bp, Salmonella enterica
atgataaggctcattgaaatctattcccggcttaatactattgatgatcttttggtgcttatgcttcaaccaccgaatatttacaccgaagagacaataggtgctcatgttgcctcactggttgcgtatgttgatcacgttaacgccgtgatgtggacgcagcaggaacggggcaaactttgtgatttcgatacccgctacatactgcccgccatttctgaaatatggctacaggtcaaacaggaactaaccagagacagcaggccgctatgcgagttggccgccaacattacggggctaatcagtctggtgagtttttacctttcccgcattgagggcaacggcgataaaagcagggtattacattga

SEQ ID NO: 395896 - DNA, 378 bp, Salmonella enterica
atgagcaattcgccggatctgcatttaaaaattgctgaatggatacttgagcatggggaagcggtcagtgtttatgatgtaatggcaagatttgaaataacacttcatcaggctacgggtcatctcaatacgctggagcgggatagcgctattaatatgttaacagtcggatctataccaacggaagctcttttctctcattgcaaacgtaccgtaagaacggtaactattacgaatattgaccatgtaaaaattgaacaacgtaaaactttcgcctaccacaattacaaatatcaccctgtagaatctgtacccgatttaccccctgcagaaaaatgggagtggataatcaggaattccggacggcggaaagactga

SEQ ID NO: 395897 - DNA, 390 bp, Salmonella enterica
atgagactgaccagccgtaaaaaaaagatactgagttacttcgagccggataacagggagtgggttactgtcgagattggtgcgcctccgctcgatgtgtccggcgtggcatacctgatctatggatcgggcgtcagtgataacaggcattggctggaatcgacaaggcgtacacttgaaacgatggtgagagatggcctgctggaacgtatcagggcaagagaaacgcggggtactctccgctgtgaaactactgcaacggtaatccgctacggtctgcccggtcagtgtgctgttattcgggatagtgacgggaaaaaaggcgctatcgatggtgagtgtgttcggctgcatgagcaaccgggacaaccgatcgcgataagcagataa

SEQ ID NO: 395898 - DNA, 360 bp, Salmonella enterica
atgacaagactcaatgagatatacaaccgccttgacgccatagacgaccttatagcgctacagaaaccgcacttttctcacagccagattatcagcgatcaggtgacggcgctgattggttatgtggagcacgtaaccgccgtaatatgggaacggcagcggcgggggcggttaacggattttgaagcctgttatattctgccagcactcgacgaaatttatatattgatgggtgaaaaactgaataagggagaaatacccggcgaccagttaagcgacagcatactggattttatcgggctggttggctggtggatgcttcacatagagaacagcagcacagggagagcgggacattga

SEQ ID NO: 395899 - DNA, 546 bp, Salmonella enterica
atggcagggaataatcaggttatgggaaaagcggaacagcagaagcgaatcatgaagctgatgatccacgctattaatgaggcggtaaaagttggtgttattcctttgatgttcagacaccgaagaatgacagccgaaggatatacggggttcacagtatgcggcaagtatacaattataaactggaaagaaaccagacctgatgaattcagagtaacgatctggtgggattatcagccagaaaaaatccctaaattgataacgggtagacccgaaaaccttaaattactattacctgatgttgatcgtgctcgtttccgcttagtcgttggtacgtgtgctagcttctattttgactatctgtacaaaggcatattgtcagacaaagggaaagagttttttgcggtttatgttcgtgagtcaatggccagttatatagacgaactggaagacgtgaagcctttcggttattccatatcggagttatcccggccactactaaagaatgatttcaccaccagcaggaggtcagtacgaaaatattaa

SEQ ID NO: 395900 - DNA, 354 bp, Salmonella enterica
gtgtctcggggctgtggtcaggtcaccggagatatcactgcgccggagggtacggttgtggtgagtggcaggggtagcgtggagggaaaaatcacctgtcagaggctggaagtgaacggtgaagtcagggggatgtgcactgccggtaatgctgaaatcggcgccaccgggtctgttacgggcgggctgcgttactggagtctgacggttcagccgggcggtgggctgtgtggtgaaatcagtcagcaagaccctccgtcggacggggcggagcttccggaaaagctcgtgcagcggaaggacatccggaagacttcgcccgctgtggattcaggtgatgactccggtcagtag

SEQ ID NO: 395901 - DNA, 456 bp, Salmonella enterica
atgcacagagaggagttttaccgttaccttgtgttttcagtgctgtttctgttgttgttctttctgcagatgtcccgggcacttgctgctccggaggcagggatgcatctccggtttcacatgatactgagcgacgggaaacagtataccctggcgctgactgtcgaaaatgccgggaaggtccggatgacccggggatacgtggtggtcacaccggtggatacccgctgccgggtaatgccgtcacagatgttgtccctgcctgcgctggctgccggggaaaaacagactgtccgctttcccctgaacgttaccctgcatcactatcgtctgcagatgcaggcttttgatgaggagggttttgacattccgtttgctgatgacaacgccggggtactttcggaacgtctgcaggcgcagcgcgactggtgccggacggttcgcgctccggtatga

SEQ ID NO: 395902 - DNA, 381 bp, Salmonella enterica
atgaataaactgtttatcgcggcagcctgtctgtccctgttatccggctgtgccttgcagggaagtaaacaggttaagtcggcgctgaaccagcctgccggtggttcagtgatgtctgtacccatggataaccagtgtgtgaaagattttacagtactgaaagggcttaattcttcagccttctccgcttatcgcggacagtttgatgagattaaccgggtgtatgccatatatcagcgtgatgctgccagtttgggtaaagacccgaaagaattactgagtatggagctcggggcgaagttaaatcaggtctgttcccgtgtaaaatattccgtctatactgaagtgcaaaaaaaactgtttccggtgagtgagttataa

SEQ ID NO: 395903 - DNA, 6363 bp, Salmonella enterica
atgggcgggagtatacgttttttattaatgtttatgcgagatttttgtgttcgggtgctgtctgtattatgcagcaggtgggcctgtgtctggtctgctgtaattcctgccggggacaggctgacccatgtttctttttattcccgggctttccgggttatcacctgggtgaacattatctgccagctgggcttcccgctggcgctggcctttacgccgtccgtgctggcggctgctcagaaagacctggcgtccgagatgcaggctctgcagcaggggcttggcgagcgtcccgggccggcgccggtgttcacgcagccggagacggcaccctcatcgtccacttcattccattctgcgtctccttctccttcgtcctcccggacgtcctcttcagtacagccggcccttgtgacgtcgtctgtggatttgccggagctggggtctgagccggtaacctcatctgtcgggcagcaggacgaatcgggttcagtacgccaggaggtgctggataaccgtgtgagtgcagcccgacagttgtgggatgtgctgtccggcccgtccccgctggaccaggggctggatcgggccagaggcattgcctcgggactggcgaatcaggcggcggaagactggctgaagcagtacggtaacgcgagactgtcattctccacagaagggctgggcagtctcgacctgctggctccgttgtgggaggacgagtcagacctgttctacacccaactgggggggcgtcgcgacagcgaccgcaccaccacgaacctggggctgggtgtgcgccacttcactccggactggatggtcggggtgaacgcgttttatgactatgacgtgaccgggcataacagccgggccggtgtcggggtggaggcatggcgtgactacctgaagctgtccgcgaacagctacctgcgtctgacggactggcatcagtcggtgctgccggagatggaggattatgacgagcgtccggcgaacgggtttgacctgcgcgcggaggcatacctgccggcatatccgcagcttggcgggaagctgatgtatgagcgctatcagggtaaaggggtttccctgaacgggagcaccagtgacctgcgggataacccgtcggcttttacggcgggactgaactacacgcctgtaccgctgataaagctgggtgtggagcataagagcgggtcggggacgaacgatacagccctgacgctggacttctcataccggttcggcacaccgtggctggagcagataaacccggatgcggtggcgttcgtacgcagtctggagggtggccggtatgacctggtggaccgtaataacagtatcgtgatgcagtaccgtaagcaggagctgatatcgctgctgctgaccctggcgggagtcccgtatgccggggagcgcgtggtggtgacggcggacgtgaacagcaagtatggtctgaaccatattgtgtgggatgcgccggccttactggcggcaggtggtcaactgacgccgctgtcggcggactcagtggaagtgcggatgccggttatcaggacggctgtgccgatgcgtgcccgtgctgcagcgaaagacagagccgaaagctatgagctgggtggggtggcatatgacgcccgtggcaaccagtctgaaagggtgacgatgatgctgatggtggagcgttccccgcaggatatcagtagtctggcggtgacgaaggacgggtcagtggcggatggcgtgacgacaaacacggtgcaggtgacggcgacggacacgcagagcggcgcgccgctggcgggcagtgaagtggagctgaccttcacgcacgcgaagggagcagtgctgtcgacgcagacggtgaccacggatgcacagggtcaggcgacggtggacctgacgagcacgctggcgggaacagtggcggtgaaggcggtgctgaagagtaacggcaacgcggcgtccacgaatatgcgctttgtggcggacagtggcacggcacacattgcggagggcagcctgacggtggtgcgtgacaatgcgctggcggacggcaacagtaccaatgcggtgagggcggtggtgacggatgcgcagggtaaccctgtgagcggtacagatgtggacctgagtgccacggccgacgcggtactgtcggttgcccgggcgacgacgaacgacaacggtgaggtgacagccaccctgaagagtacccgggcgggtgtgggcatggtgacggcgacggtcaatggccagagcgcgcaggtgaacacgacgttcctggcgggtaagccgcaggtggcgaactctgcgtttatggtgacccctgccaccatcgtggcggacgggcggacgtcgtcacaactgacgctgacgctcaatgacggtcacggtaacccggtgagcctgagtgcaggtcaggtacgcctgacggtgagcgggattgacggcaccaccctgacggcggtgagtggtcaggacggggtgtacacggccttgctgaccggtatcagggccggggaggcggtcatcactccggcggtggagggcagtgacctgagcggtctgaaacagacggtgacgctgacggcggacaagaacagtgccggtctgccggacggttccctgactgttgtgcaggacaacgcagtggcggatgacacggcgaccaacaaagtacaggtcgtggtgacggacgcaaacggcaacccggtggcgggggtgccggtgtcgttcagtgctccatccccggcgcatgtcacggtgtcggactatacgacggatgttaacggtgtggccacggcggcactggcgagtccggcgcagggcagtgtggctgtgagtgcagaggccaacggcagtcgccggcaggtgaacgtgatgttcgcggcgctgtcgctgacggtgaaggcaacggacattatcggtgagctggaagtggggcagacgctggaagggcagtacagcttcagcaccaacggcaacaacacgacggataactcgaccttcgtctggagtggcggtggtcagagtggtgtcaccacgcagacctataaactgaatggcagtgacgtgggtaaaatcctgacgttcagcgttacggccagaaacggggcaggcgtgaacggaaacactgacagcatcagcacgaaggatgctccgggtaccggcggcagcagtggggagaggtcgggggagattatcgacccggcagctattcctgtggtgaaggacctgaatatcaccggagccctgcaggtcggacaaaccttaaccgggcgctacacctttaacccgaacggtggtgactcgaccgacaagtcgacgctggcgtggagcgggggtggtcagagtggtgtcacgacgacggcctacactctggagtccagtgatgtgggcaaaatactgaccttcacggtaacgccggtcaacgggaagggcacgtcgggtgcgccggtgagtattgataccagaaatgcgactgatacccgtggtggtgacagtgacccggctcataagggtgaaatcattaatccggcagcgaagccagttgtgaaggtgacggacatcaaagggacgcttggtgtggggaataccctgaccggggtatacacctttaatgccagcggaggggacagccgtgatgcgtccacgtttgcgtggggcgggggtggtcagagtggtgtcaccacgcagacctatagcctgaataccagtgatatcggtaaggtgctgacctttagcgccacggcggtgaacggtgccggtgtgaccgggaataccgacagtatcagtactgagcatgcgggtggtgtgaccgacggtgatagccgcaccccgggtgcggtcattgaccaggcggcagcgccgggtgctgacaacctgaacatcaccggagccctgcaggtcggacaaaccttaaccgggcgctacacctttaacccgaacggtggtgactcgaccgacaagtcgacgctggcgtggagcgggggtggtcagagtggtgtcacgacgacggcctacactctggagtccagtgatgtgggcaaaatactgaccttcacggtaacgccggtcaacgggaagggcacgtcgggtgcgccggtgagtattgataccagaaatgcgactgatacccgtggtggtgacagtgacaccaaaggcgcgattattgacccggcagtaccgtcagagaagctgtcaacgctgaaaagtggcactcagagtatcactgcggatggaaagagcgaggcggtactgacttttgaggtgaagaacgcagcgaatgaagccattacgggactcgggaataacgtggtctttaacgttgccggtgcaacggtttcactgtcgggcgtgagtgaagcccccccggggacgtacacagtgaagctgacagggacacaggtgggtacggcagacgtaacagttagtgtgaatggtgtagataagggagctcagattgcactgactgcgggtacgcctgatggtgcgcactctgtcctgaaagctaatccggtaagcattgtggcgaataacggagacacagcggcagggcggtccacagtgacactgacgctgaaggatacgcaggataacctggttaccggcctgaccgatgtggccctggacatgggcggcgtgacagggacggcgctgaccgcagtgacggaaagtccggctggcagcggtgtctatacggcaacgctgagcggaaccatggccgggacagcgaccctcactgcatcggcaggtggtgctgagctgaatggtctgcaggcgcaggtcacgctgacaccggatatatcgatggcgacggtgaccgcagtgacggaaaccgcgggcggggcgaacgcggacaacaccagtacaaatacgctgaaggcggtggtgaaggatgcgaacggaaacgtggtaccgcatgcgacggtggcctggagtgtgacgaagggtattgcgacgctggacggaaataccagtgaaactgacagcagtggtgtggcgaccatgacagtgaaggacacgatggcggaaatggcgacggtcagtgcgaaagtcggcattaatacaggggactcaggacagagcgtggatacggcgttcagtgtgtacccggtgataagcagtatgacggtgacaaagaatgaagcatctgccgacggcaaggaatttaacctcattgaggttaaggtgactgacgtgtcgggtaaatcgctgtcggggcagactgtgacggtgacaacagcatcgacgacgccaccaacagaggctattatccctcaattgccggctatcactgacgtaaatggtcttaccactgtgaaggtggttgacacgaaaatggagagtccggagatcactgcgaaagtgggaggaactattgcagatgcgaggcagacaaggactgtcacgacggactttagtccctatgcgaaaattgagtcgttattaatgaatgccactaacaaagaaccgggaaaaacctgcaaggttccctgtgaagtgacgttatcagcgaaagttgttgatgcgaaaaacagaccgctgccgaatgtaacagtagccataagtggctcagtaaccggaacaactggttctgttgaagccacatcagggccagatggtttagtcaatgccatcaaagcatatacgatgggaggggaagaagatctggcgcttacaaccgggaatggaattcattcaataccgtccagtcccgtgcctgttgatataatgccggagatgacggtgcagagcatactggtatcccccacaggcaaaccagttccggagacttacggagcaacgacaataccgtcagatataactatcccgacagatttacccaaaggtatggcgattaaaacaaaagcctgcaaagcggttttaacctggacactaactgactcactgactcgagatcatgagttacaggtgagtgctgagctcgaagggaatttttcagccgacggcttttgccatctgacagataaattagaccttatcccacaatctgccttgggtaattatatgattggagttaaagatttttctacaaccgtactacctgctggcgcgaatgtcacttgggctaaggcattttcaccaaactggatagggggtgaaacatcatggatcgcatcaactacaccattcaccggtgataatgctaaaaactggttaaatacagaagtaggcactttcgtcgggtatcccgccaccaatggcgtatacatgtccggcgataccaggtacatagtgttctataaacacagagcaacagtagtcacggttaaggcggttcccttcaccgttgaagccgcagtacccggaccagtatttactacggttcattga

SEQ ID NO: 395904 - DNA, 345 bp, Salmonella enterica
atgatcatcaacggcatgttctggatactgtgctcaggaacgccatggcgtgatttgcctgaacgatacggcccatgtaaaaccgtttacaaccgctttaatcgatggtcaaaatcgggagtgattaacattattttcaataaattactctcatcccttgacgctcatggtctcgttgactggtcagcgactgcgctcgatggcagtaatatccgtgcgctcagatgtgctgccggggcgcaaaaaaacatcccgatatcaccggagatactagcctggttcgctctcgcggcggttttggcaccaaaatccatctggctacagacggaagtggcctcccgttaa

SEQ ID NO: 395905 - DNA, 735 bp, Salmonella enterica
atgcgtacactgtctgaggaaaatggcgccctggcagcccgcaccgaacagggtgccgccgccgtggtggaaaccgctgccagtatggaacaactcagcgccaccgtcggcctgaacgcagataatgcggttgccgccagcgggatggcccgtgaggtcgttgcatcagcgcgggacacctgtgaaatggttgtccgggtgaaaaacacgatggcagaaacggaggcagcttccgttaagattaacgatatcaccgccatcattaattccattgcgttccagaccaacatcctcgcccttaacgcctccgtggaagcggccagagcaggtgaacagggccgcggcttcgccgtggtggcaactgaggtcagaaacctggcccagcgctgtgccggttcagcaaaagatattgccgcactcatctcctccgccaccaccctgatacaggaaggcgtggccctcgcggaaaatgctgagtcatccatgaacataatggcggactccatcaacaacgtctcccgtgttatcggcgaaatcgcggtgagctctgaagaacagagccggggcattcagcaggccagggtggccgttaatgaagttgaccggataacccagcagaataaccagatggcggagcagtccaccaccctggtcggtgccctgcagcagctgacccaacagttaaatcatgaagtcgatttgttcaggctgccggataacgccctgcagcactga

SEQ ID NO: 395906 - DNA, 519 bp, Salmonella enterica
atggcttttccctggacggaagagagaattcattacctgcatgagcatgccgggacgctgacatcccgtgagatagcggaagcgcttggtacaaatgtcacagcagtccgtaacatggcggcaaggctgaaactgagtcttcgcgtcagggggtacacacccgaacaggcagacctggtgcatgagctgtatgcgacgcggggagatatttcggtccgggagatttcagcaaagacggggttgtcgtatggtgccgtcagttacattctgtatgccgctaaccggaaaacaaagccgttgtacaaccggataagatttgttgagtttgagacagaggagagtacacgatttggtgtggagacagtactgattgacgccagccgtacctgcctggaaaggctgaccagtgagccggggttacaggatatctggcttctggatggggcgcattttaaggccagaaatatttattttactgaacggataacctccgccgggagcaggctccggggaaggtga

SEQ ID NO: 395907 - DNA, 720 bp, Salmonella enterica
atgtcgctgattagtgatgaaaaggttttttcatatatatatcgtaccctgcagagcaagctggttcatgtccagtacacagcggagaaggctgtcaggttgcgtaaaaaaatgaccgcgtcggcggctgaaaaccagcagatagcggaggggatggctgagtttattaaccggctgtattccttacggggccggataaaaacgaaaataccctcactgggcaccagggaaaagcgttatggaaatcagattgtttccctgtttgatgacctgatgaaagtgacgacagaaatgcagggttcagtgtctcgttcggctcgtttgatggatatctcagccggcagcctgcaggtgacagtgctcaaggctgtgcattatcagtggcgagaacgggtatacatgtccgtactgaacaaaatcaatgccattccaggagaggatgagcatcattgcctgctggggcgctggtatgatggggaagggcgggaaaaatttggtcttttgccggcatttatcaggctcggtgaggtgcaccggaagttacatcaggcggcggcagagctggcaaaggaagacatgacgagccccggtcaggaacgactcctgaagaaactggaagtttttgaaacgaccagcctggctgtgattgctgcgcttgatgagctggatgacagtatcatcagaaccggtgagaataaggacttactttctgtcgggtga

SEQ ID NO: 395908 - DNA, 741 bp, Salmonella enterica
ttggtaagagaaaatacagagaagctgcaacatatctatcggcttcagcaggggaaattggttagcattagtaatctgacagaaaatctcaacaagatatgggagagccttgaagtatttagtgatgaacagaaagtgcttgcaggagagctggaaggttgtgctaataagataagaagggcgattaaaagtctggaatcaaaagaaagtaaaggaaaaaacgaggactatacagaagtggaagatgatctggtttcctcggtaaggaaaaaaactttacgacgtgtgttacagaaagttaatgatacaacaacatcagttgccgaaggtatctatcggctctctgccagtcacaaacattcagccgcattgcttgatttatcagtcattatagtgaagcattttttgtggcgtgaacgtatctttatggccattattctgggtggacatgatagttattccctgaaacagatcagctcaaaaaaatgtgcgctaggtagatggtatgatggaagaggaaaagaatcttattctcatttagctgcatatcgatcacttggagatgttcattcccgttatcacgcactaataaatgagcttgtagacagaggtgttgatgacatgtcatacaaggaattgtcaactgaattggctaatattgaaatgctgagtcaacaaatattagcattcattggtcgtatacagcatcatgtggaattaatacagaatccacctcagtaa

SEQ ID NO: 395909 - DNA, 345 bp, Salmonella enterica
atgatcatcaacggcatgttctggatactgtgctcaggagcgccatggcgcgatttgcctgaacgatacggcccatggaaaaccgtttacaaccgctttaatcgatggtcaaaatcgggagtgattaacattattttcaataagttactctcatctcttgacgctcatggcctcgttgactggtcagcgactgcgctcgatggcagtaatatccgtgcgctcagatgtgctgccggggcgcaaaaaaacatcccgatatcaccggagataatagtctgggtcgctctcgcagcggttttggcaccaaaatccatctggctacagacggaagtggcctcccgttaa

SEQ ID NO: 395910 - DNA, 1296 bp, Salmonella enterica
atggtcgttcttttatttattcttttttccacttttacaacagcaacagaaatttcccctaacacacaaaacataaataatgaacttatccaccatttaattaacaacgaccctgtagcagtgaaaaacattctacagccctgtggaaaatgcttaccgttcattgatccaattttgctcgactgggctaatggtatcctttcgcgtcaggagaaaaactactcaaaatcaatacggcattacagaaaagtcatttctgtacatcctgactggtacagtgccagattacagctggccacagtcctctaccttaataatgatatgttttccgctgaaagtcagttacgtaaattacgcagtgagtccttacccgctgaagcgaccgttctgattgactctttcattgcaaaaatacaaaagacagacaactggtcatttcgtggtgggtttacttacctgaatgaaaaaaacatcaataatgcaccgacatccggtcgttccatcgggcggtggaagtctgaaaaaccacaatctggaaaaggcatgatgttctggggtgaggcagaaaaaacattctctttaccggataacttctttggtataacacggctggccacttcaggaaaaatataccaaaataaccacccttatgatgaacttgatgccaacatcggcctgggtctgggttaccgcaatgttaataccacactccttctccttccgttttatgaaaaaagttattatgccggaggcaggacatcagaaggaggcctgaaaccttactctgataccagaggaatcggaacagaaacaatgttgcagctttcaaaccgctggcgtttatattcggattttaaggccggaaaaaatgagtataaaaaacaaacttacctggacggatatagttactcgttaaatgaaaccctgatttatttccctgactcacgtcagtatatctcctcagggatcggccatcgcattgtccggacagaagaaaaagacagttcttatgacagaacttctttccggctggggtggatgtatgagtggaatggtggaatatccacccttttacaggccagctatggctacagatcttatcgggccggggacttctgggggataacacaaattaatcatgaatacagtacctctgtcaccctgtggcatcgggatatttattttctggggatcacacccaaaataacctggagttatcagaggactgacagtaatcaccctttttacgacacagaaaagaaccgtattttcctgagctttagcaaatacttttaa

SEQ ID NO: 395911 - DNA, 1014 bp, Salmonella enterica
gtgaacaaaactattataggtagcatcattctgtcgtgcagtctgcttagcggctgtggcggaggtggcggaggtggcggaaacaacagtaaaactcataccaccaccactgaaagtacatctgtaaccagcattaccacatcaggaaccgcgggatcagaagagaataatactgtctctgctcccgcagtgggaactgaagctactgaagctactgaagctactgaagctactgaagtcattgtaaaatccgaacctgagttatcaacacaggaaagtagtaaccatcctgtgagcgaaaaaacccgttctgaacctcaatatactgaaggtaccgttcttacccggacaatagatgatgtcgattccggccttctgtacaaaagtaatgttcagaataataatgatgcttatattctcagtatgaaagacaatgaaattatagtagatatcgtgccgttaaataccggcgatcctgctgattaccgaaagcttgccgccagaaatcttaatattatcagggataaagaggggaaagccgtcggattttatggccttgtggaaacttatacctgggaaacggcccggaatctttctggtaaggcaagatatggtcgaatggactatgttgtcgccacgaatggggaagataaacggctaccttctgttgccggtaattacaacggcaaagtgttttatgaccacaaccaggctccgggtaaagaagctgatatcagtctgcgttatgaagacaacaaagtgactggtacaataactggcagggataaccctgagttcagccttaaaattgatacccgtgaatatcatgaagtagaaaaagatggaagctttcttgctgctctggttggcaataaaaaacctaatgacaaagaaatgcacggatatattgatgggggtttctatggcaaagacggtgaaattgtagcaggttatgttcgctccagagatgatgacagctggggtggtgtctttggaggggaaaggcaagagtaa

SEQ ID NO: 395912 - DNA, 204 bp, Salmonella enterica
gtgggtcgaaaaaaaggagaacacccgacgggtaaggaggccgggaaaccggatacccctgtgatgagtgatgccgtggcggggctccttcgacttttaatgctcggatattatgaccctgtacatgattctgtggtgcgacacgaggctttccagtgggctggcaacgtttattttttatatcgtgcaactcagacgttatga

SEQ ID NO: 395913 - DNA, 417 bp, Salmonella enterica
atgaaatcccagtcctggcgaaaagaaccccgtaaaaattattcgaatgacttcaagctacgtatggtcgaactggcatcccgtcccggtgcctgcgttgctcagattgcccgtgaaaacggcatcaatgataacgtcatctttaaatggctacggctctggcaggatgaaggtcgcatatcacgccgtcttccggccacagtcgaatcttcatcattaccgactatgctgcctgtcgaggtgattcctgatccagcgccaacaggtgaggcgaatactggcccgggtcagttctcagcgctgagcgcctcctcctgttgcgtcgagttccgccacggcaaaatgacgctggagaacccgtcaccagagttgctggctgtgctgcttcgcgagttgaccgggagagtgccgggatga

SEQ ID NO: 395914 - DNA, 270 bp, Salmonella enterica
atgctctatttcgcgctcttcgttctctattttctcttcagcgcgggccagcgccgaacgcaggaacgactcagtctctgctacgaggctgagttgattgtctttctggcggagcgcgtcttccagcgcggcgatacgggtaagatagtcctgactcatgaccatatttataatgcggtcatatgctttttacaacattgtcagagagttaaggcgagctgcttttggctgacgccagtccagcttatcgaggagcatggcgagctgtga

SEQ ID NO: 395915 - DNA, 741 bp, Salmonella enterica
atgccaattccaactcaatcacagatcggcggcgagcagcaggctgcgcaggcgattgccgattcagtgtctactcagatgcgcgtagcgatgcccggcatcattcagtcattcgatcctgacgctgttacctgcacggtagaggtggcgcttcgcggtgttgttggcgatggctccaccgaattgaaaccgctggtggatgtgccggttatctttccgcgcggaggcggttgcacgctgacctttccggttaaagaaggcgatgagtgcctgctgatttttgccgaccgttgcatcgatttctggtggcagagcggcggcgttcaggagaccgtagatccgcgccagcatgacttgtctgatgcgttcgccatcgttggcccgcagtcgcaagcacagaaaatcagtggtatcagtaccagcgccgcgcagctacgaaccgatgatggcgcagcgttcgtagaagtcgccgcaggacataacatcaccattaaaacgccgggccagcttacggctacggctgaaggtggaacgacaatcacatcccagactatcacgctgaacggaaacgtaatcattaacggcaacttgtcgcaggggatgggtgagggcggcggtagcgcaacgatgcttggtcctgtcacggtgactaatgatgttaaggcggggggtaagagcctgatgacgcacactcatggcggcgtgcagacgggtgacgggaataccggcgcgcctaattaa

SEQ ID NO: 395916 - DNA, 375 bp, Salmonella enterica
atgatttttttcttatctgttgagcaagtcatagccattcacgactgtcagttggagtcttatggcgggctggcaggatacagagatattggtcttgttgaaggaatggtggcccgcgttgaaaaccttcatgcataccagggtgaaagtgatttgtttgtgctcgccgcgtcgctgctgctttcaatagctcgagggcatggcttcaatgatgcaaacaaaagaacttccgttgcatcagcgatggtatttctggatatgaatggtacaccaataattccgacagagggtttcgctgactttgtggtagaagctgcgcagggagttcatgatgtgcatgctgtagcgcaagagctgaagaggctcacaaattag

SEQ ID NO: 395917 - DNA, 225 bp, Salmonella enterica
atgatcactctgaccttttccgatgttcgtcagaaattttccagcgtactggataccgccgtcaatcagcccgtgacgattacccgccgttccgcgcctgatatggtggtcattactgcggaacagtttgcagagttacagcaggctaaatttgatgtgtctcttgctcgggtgatgggaaagccaaagaatcaggccttgtttaaggaacttgcagataaatga

SEQ ID NO: 395918 - DNA, 726 bp, Salmonella enterica
atgaaaccgatcggaatagtcgctaccattatgcctataatcttagcgtcatgtagtagctgggatcttgatggcactaaagcacgggaacgattgtacgaacaacaaaaagaagaacgtttagcttatgagaagcaccaggctgaagacttaaagaaccagttggaaaagcaaaaggaagacaaggctgcgtatgatgcttctcacccagaagttgaaatagagaggatgagcattggctccgctccttcggctgaaaataaactcggtgcagcaatgaataacttaggttttgttactcgcaacccaggggcgcaagacctagataacgtttatgtcaaagttggctcttacaaattgaccgttaggcgcgttcaaatagctattagaggctacgctgacgaatgcaaaagagtttctgcatataataactctgattataaagatgcctgtgtttctgctttagctagcgctttaaatgatttttccagtatgctaaaaaatgaaaacatacctgataaaactaagactactgcgctaaatgaggcgtcgtacggtaactatattgatttcgagcacgcagcgagactggcaaaaatgcattatgagctgtgccgccagcagggaaatagagggtatgtcgcaatggtaacggctgcggctccatgcgatgggcaaggtgatgtcctcaatattgcggcggcaaaaaaaattggagcgttatga

SEQ ID NO: 395919 - DNA, 306 bp, Salmonella enterica
atgcagtttaacgaaataccgctttctcctgataatcagcagttccgcgtcttgctgggcaataccacatatacgctcaggatcatctggcgtgatgcggctggctggattatggacgtaatggatagcggtggcgctgcgcttctctctggcgtacctctgctgaccggcgtgaacctgttacagcaatatccgcagcttggtattgatggcgtactggtggttgcaaccgataaggacgcaccagacgaacccaccaaaaccaacctcggcacatacagccacctcattttcgtacaggagtaa

SEQ ID NO: 395920 - DNA, 615 bp, Salmonella enterica
atggatattctgtcagcgatttttcgccagcaatcccggcgaattggcatactgatcccgagcgtggtcgtttccgaaaagcactctgatgtgctcgaaattactgaacatccggttgaaaaaccaacaacgaatagcgcatcgggtttcattgccgatcatgcgtataagcgtcccagcgaagtcacaatggaatgcggcttcgctggtggcggttcgttgctggactttattgatacatcatcaatcagtctcagtgccgggcttagcccaaaggagacctatcaaaagttgctcaggctgcaatcagatcgccttccttttgatgttgtcaccggaaagcgggtgtacagaaatatgctgatcaagacgctggaggtgacaaccgataagaccagcgagaatgtattgaactgcatactaaccctgcgtgagctcatcatgacgcaaacaaagagtatcagtgttgctgataagtttgatatgcaggatggcgtcagtacttcggcggtgcagaattccgggacgaaatcggttacaccggtgaatgactccctcttagggcaggtcacgggggcgagtaagattggcggacgttatcagttacctttctaa

SEQ ID NO: 395921 - DNA, 504 bp, Salmonella enterica
atgcctgatttgcgcggcgagctttcacctggcccagcatttgccacccgctttgttgaaaatgcctcaaccattaacattcaacaagcccgcagtgctgtaaacatacaggatcaaaagaaaatattcttctttgaccgctggataaacaatgctgacaggtctctgactgacatcggtgggaatgtaaatataattttcgatgctgttaataataggtattacctgattgaccataatctggcattcgcacaggatacaactgatgatgagtatgatgtccatgtgtattctgcaaacggaagaaaatgggagttcgacatacttgataaacccgaactgatggatctcgccagtggtgctatcggttcagttgaggagaagtttaatcaggttcctgatgagtggttttcatccgacgaagaacgcgaactgatgttgaatgagataatgaattgcctgaacagagtaagcgacagagaattttggagtaacatcaaatga

SEQ ID NO: 395922 - DNA, 819 bp, Salmonella enterica
atgaccacaccatgcctatacagcattattagatatgcgccatatgcagaaaccgaagagtttgccaacgtcggtgtggttctttgtgctccgaagttagggcagtttcactttcaactgactcaaggcaacaacgctagagtaaaaaatttttttcaggacgagataatttttcctcatgcgaaagaagcaattgcaagagagttgacgtttgctcaagaacaaagttataaattcaccactcctgagaaattagcaaactttttcaattacttaattggtaaaaaggaatcaatcattcattttagccctgcaagagttgtgatgtctgattgccctcaggaaattacagccaccctttttaataagtttgtaaatcattcagaagtaacaaaagaatctcgtgaggctatcctaacgagagagcttaagcatcgcttctctcattatagtgatcttaagaatgcgtttaaaaaagagacgcttggcggagagttgacgcgattctctttaccatttgtcgctcgtcaagagggcgagattttatgtgcaataaaacccctggcgttcacacaggacaagccggaaaaaatgatggagcactgtgactcttggacggcaaaaattttacgtgccgccagtgagaaaattttatctatctctaatgtgttatttacgatagatgcaccttaccagccaagcgctcttgaggtaaaagcgatgcgtgaaattcgtaaaacattcgacgagaagggtatccatcacatagagcatagagatgaagcatcaatagtaaattttgccagacaagcaatttaa

SEQ ID NO: 395923 - DNA, 210 bp, Salmonella enterica
atgtcaacaacaacaatagagatcattattgttgatgggatgaaagaaagccagtttgttaaaaaaatagacatgcgtttatttgcaagaataattaatggtaatgcccgaagagagactgttatgcaggcacataataaaacaagtataataatgctattattgttcatttttatttactctcataattattgcgcatacagtagctga

SEQ ID NO: 395924 - DNA, 1320 bp, Salmonella enterica
atgaaatttattcataaagcatcagcaatttgtttatcattatcatttttcagcatatctgcttatagcgcacaggaacttaatcggaatatattcaatgaggggagtaataacctcactctgccagaaagcgccgaatatatgaatgcaattaaatcaggttcagcttaccaacttgcggttgatcctaaaagtaatcttctttatatgagctggggatacagattaggttctaaccctgttgctggtattctggcctttgagctagataatcttaaagcaaaaggatttattaatggtattcatgatgtttatggtctggattttgataaaaagaataacagattacttgctgaacatacagttagtcgcaaaaccgaagaaggtgagttattaactggaaactcgtttgatataattagcttaaaagatggtactaaactgactaatacaatcgagattgaccaaggaaaaaaagaaaggaacacttttaactcacattacatttttgttaatgacattggtgacattttcatatcttctgagtcaaaaccgaaacatggcgggccggatggaatgcaaaaaattactaaatacgatagctcaggcacagaagtatggcaaacgaaagcatttccaggacttgtagcagcattaatttccaatgataaaatcatcgcaggggctaatgacctttatgaaataagcctgagtgatggagctatcagcaaatcattgtacgccagtaaaccagaaaatggcgatgcccgttatatggccctggtaaaaggagataatttagtttatgcagcatctttttcgaagctagaaaatataaaacccaaccaaataaagtacgataatgtttatgtaattgaaaaaggaaaagccgccaaggggttttctactgttacaaataaaaaaactgtcggcgtaggtagtaccagcctcattgttaaccctgagagaaaagagttgtacaccgctaatttcaatgataatacaatcagtgtgattaatataaaaaacaaaactgaccttagtatatataaaaatatatttatacaagatgcctggggcataaacgctgttgcgtatgtcaactccaatgataacacatatatttatgcagctatcaaaggcggacatgggaaaaatgtaaaatatacagatcaggggatggatgatgtgaagttagccaaaatcactcttaacaataaatatgccaacacctcctcatggtgtaaaatatccattatggatataaagtcaaacactttcgattataaagaacaccaatgtgacattcaacgaaaatga

SEQ ID NO: 395925 - DNA, 468 bp, Salmonella enterica
gtgcctgcacatgcagtacctattgatataaaagagcaaggtgttatctggcttttacctccctacaactggtctctcagacaagtagcccgtaagctggaactcagcccttcagttgttgcaagatggagacttgaacttgtgcagaaaggtttattgcacgagattgaaaagatctcgtccgttgatagtgatgaatggactccggaacgtcgattttctgttgtacttgaaacggcaacattatctgaaatggaactggcagactattaccgccgtatgggtctatttgtcgagcagattacagaatggcgggttatctccattcaggctcatgaaatgaaaatgactgaaaatcgtcgtgccgacaaagcgttgagagaaacccgaagccggtttctcgaactcgaaaaagagcttttgcgcaaagataaagcgctggcagaagcaggcaatctattgatgtag

SEQ ID NO: 395926 - DNA, 663 bp, Salmonella enterica
atgaatgaaccggtactggtttacagccggcagtggccggtgacagttgcccttgcgacgctgttgacacggatattcagtgtcagggtgataccgttgtactcgaagggagaacttgtctgccatctgaataataatccgcgcagtcctctggtgctgggactctgcccgcatgaacatgtggtggagctgtactgcatgcagtcgttgctgtcaggtcgggcggtactctttgtcgcgcgacgtttttactgggctgactgttgcctgccgagcttctgtggtctggtgttgtgccggtgttgcacatgggacagcctggcaacgccttccctctggcgaatggaaatgcgacatttcagacagttaatgacggaagaaattccggttacaacgtcgggaaattcccctgaactgacggcagaacaaatattgaccagagcaaaccagtggctgtacagtcaaatggaagaagccgggctgagcgggtatgaacgtgtggtcctgcttctgttatcggaacacaggaggggagagctgtcatcgcgtaagctcagccactataaaaacagcgggctgggcaagctgggaatgtctaggcatgtgagtaatctgtaccggggtgtgaaggttcgtcctgcactgcaggttcgtctgtcctga

SEQ ID NO: 395927 - DNA, 564 bp, Salmonella enterica
atgatgcgggagccttgtcgccgccctgatgattttgatgacaacggcctgctgaaagcgccggtacttttctgggtggggctggttgtgcaggcgcgggcctggtggctggccggactgatggccatgatggcaccggccgggaatacggggggcggttttctctggccggatttccggtttcaacttgtcgcgctggcgactggtgtcccgggaatggtaatgctgtttatttacccgctgcggaaccggtggcctggtctttcccgggcaaactatatgctgatattgctggccctttttgtgatggcgctggttgaccttaccgggctgatggttgcatcccgcagggaatgggatatgggatggttcttcctctgtctggatacagcctgtgtggtgatgctctacccggacaggtggctgtgggaggtatttttacagggtaacgcgacggatgcatcaggctcttcctgccgtcgtacagggagcgggaggcgcggtgatatgacgctctgtgagcaaatgcttaaacggggacgtgaggagcagaaagatgaatga

SEQ ID NO: 395928 - DNA, 2025 bp, Salmonella enterica
atgatttcccggaccacagagtctgaaaatgcggctaccggcgcacatgaccgggtggagtttgccggcgttcccgtcggccaccatgctcagccggacaattttaatctggagctgtttgagtatcaggtgacacagcccgataccgagtctgccgccagaatgctgctgcttctgctggagcaacttgaccggcactacggccagtggggacccctgttttcggcgtacgcgccgggtgttgctccggcgggactgaaccgtcagttgtgtacccggattgcaggtgccgttaccacgcttttttcccgcccggattttacggtcagtgacagtggctatgtgcagttgatgaacctgcaccgctggctggcgctgattttcgccgtcagcagctacgggcacgccgaccatatcatccgtaaccttaacgcggcgggcggcggggtggtcgacccgctgacgcttaacggtcataacctgcgtctgttctgcctgtgctacttccctgactcacagattaccctgcagccggacgtgctgtggcagtacgaccgccggacggtggcccggctgttcctggcgcttatcagcgggcgtgctctgccgacatcagccgcgcacggcaagcgggaacagttgctggcctggttaccggaccggcttgcggagctggactccctggatttcttaccgaccgcggttctgcatgatgtgtacatgcactgctcctatgcggacctggcagaaaagcaccggataaaacgcagcctgaatgaccttatccgccgttcactgctggccggggattttgcggatatcgctgtgggggataaccgggggcagatggtcactgacaatccggagattcagggtccgctcaaaaaaccggtcatgctggttgtgctggagtggttcacctgtcagcacagcgtgtaccggacccactcccgggcgctggcggccctgcgccggcgtttcaccgtccatgccgtggggctgaccacagcggtggatacggtaagccggcaggtctttgacgtttttcacggggtggacacagcgtctgccctgcaggaggcatataccctggccggggagctgcgaccggacgtggtgctgtacgccggcgttggcatgtttcccttcacgatttatctgagcaacctgcgcctggctccactgcagctggtcgggcttggccatggcgcctcgacgttctgcgggcagataaacggctttgtgattgaggaggacctggtcggggaggaacgctgcttcagcgaaacggttatacgggttcccgccgatgcgatgccgtttgtccccccggcagatatccgccgtgtgccggtcacgcgtacgccgttccttacccgccagcaggcgcagtggcgtgagccgctgccggtccgggtggcggtgtgtgcctccgttatgaaaattaacccgaactttcttctgacgctggccgaagttcagcgccgtagccgggtggccgtgcagttctgtttctatatggggtttgcgcaggggctgacgctggattacctacgggacgccattcatgccgtgctgccgggggctgaggtgaatgcccacatgccggtacaggcataccagacggccctgaacagctgtgagctgttcgtcagtccctttccttacggaaacatgaacggtgtggtggatgcggtgcgtcaggggctgccgggcgtgtgcctgaccgggccggaggtacacagtcatattgatgaagggctgttccgccgtcttcaactgccggaggagctgattacaacatgccgtgaggagtacatccgggcaacgttgctcctgacggaagagcatgactggcgcgagctgctgcagaaccagttactggacaatgatgtggagcaggtgctgtttcagggacatccggagaaatttaccgccgccatcagtgatgtgtggcagcaggtctggcccggtgttgtgtcctccggcacagtaccgaaagcgcggaggggaaaatcattatga

SEQ ID NO: 395929 - DNA, 981 bp, Salmonella enterica
gtgagtggttcagacagcactgccaccaataccactatcagcggcaacaccgccgacggaacgggggtcagcatcagcggcaacctgaccagtgcgggcagcaccacggtgagcggtaactcaacagggacaggctcaggcgtgggcctgtcggggaatgtcaccggcggcagcgtcacgggtaacgccaccgggaccggcagcggcgtcagcgtcagtggttcagacagcacggccaccaataccagtatcagcggcaacactgccaacggtaccggggtcagcatcagcggcaacctgaccagtgcgggtagcacgacggtgagcggtaacgccacaggaagcggctccggcgtacatctcaacaacggcaccgtcacaggggggcttgttcagggtgactcccttaacggcgcaggtatcagaacagaaggtcatgttaatgtcagtggctctcagttgaaggggaattcagttaacggaacagacctggttgtttcaggaacgttgtcacacgatccggatacgacgattgaagcagagacagttacggggcaggaaaacattcaggaagtgaaacccgtcacgccaccgcccgcaacggatgacgacggcagccagcctggtcacgatacggatagcggcaacatggacagcggcagtgacaacccggtagtggacagaccttcagttccgtctgagcctgagtctcagtctgagcgtgaccctgatgcgtcactcagaaaagagactgaggttaacactctccgtcagggcgctgttaatgcgcaggtcatcaatatgaatcagccggcgcaggatggcttccatgcatcaggaacatcgccggtgccggtgaagggatatctgccgcctgaacggaaggtggatatcagtctgtgtgacggggaaaactgtcggtcggtgtcacttgatgccgccagaccggcagaagggaacgtgacgccctcaggcagataa

SEQ ID NO: 395930 - DNA, 165 bp, Salmonella enterica
atgaataaaatgccaattagttttataataaatggattgatttttaatatcctttatgaaaataaaatattttatctgactgatggagatataaatctaataaataggttatgctatgatgatctttatgctttatcggaaaaagatcccgcaggcaggatttaa

SEQ ID NO: 395931 - DNA, 732 bp, Salmonella enterica
atgaatttaaataaaatatacgaaatccccccgactgtaagacagtacaattttgatggttatcagcgagaagggtatgctactgttttgtatgttgagaatgatattgcggtatttgatcaaaccattttttacgctgaatccggaggacaaatttatgatacaggttctattaatgggaatagggttatttcagtaaaaaaatatctgggagaattaagtaaagtaaaaagaacagatatcaatgttccttcggtaaagataaatacgcgaattgttcatgagttttctaaacctgttgatttcagtgttggcgatgtggtttcaatgtcaattgattgggatagacgctataaaatcatgaagaatcatactcttgcccattttttgttttttgggttaactattttgtttgttaacaaaggtatagatctttttataaaaggatgtgctataaacgaagaaaaaggaagtttttcacttaataacaaaataacaaatgaggatgtggattatatagaggaaaagattttatccatttatgaaccaggaataaatataataatgcaccctgaagaagaaaatgatgaaatttattattggaaatttaaaaatattatcattccatgtggtggcacgcatattaaaaacactgatgaaatttcaaattttaaaatatggagaaagtctgagggtaaaaataaatcaaaaatatatataaaagcattgtaa

SEQ ID NO: 395932 - DNA, 573 bp, Salmonella enterica
atgcttccgtcaattaactacatggcactgatttttgcattacaggctgtcagggagggaaatattaaatactgtaacacacttgggctgacgctgaatgaggtaagagagattaataagctatcgctggatgaactgttttttatcagcaaaacatccttaatgtttattgatataactgttaatcatgaacgtttaaaaaacctccttgtccgttcacgtcaggaattacaatatcagcagcaaataaaccgggctgtgcgcctcggtgcttcacacgaaattctttatacatattttggtctcaatacggttgatgttgctgcaagacgaagattactgggcattaccatccccaacggacgcaaagttattcctgacgaaaatacagattctaaaatatggttactatggaagaaaaaacaccaggataatactgaatcacttcaggccctggacgtcatgatgcaaatcacggaggaattatataatgaaggttatacattttcactgactgttataagaaatcgtatagtactttttgataaaaacgcgcagaaaagaggtggttaa

SEQ ID NO: 395933 - DNA, 408 bp, Salmonella enterica
atggctgagattacgtttctttcggttgatgaggttattgcgattcagaaaagtacgctgccgaacagcgggcagcctgatacaggtaagctcgaaggtgccctgaacagggtgcataatctgcacatatatgaaggatgtgaggatttatttaaatttgccgctatgtatatggtagcgatagcgaagtctcacgcttttaacgatgccaacaagcgaacagctttccaggccaccagcattttcttgctaatgaatggctatgaacttaacacctccatggagttggtgaagttgaccatctttgctgcgactggagaagctgattgtgataatactgcgctggcactcaaactcttgtcagattataagaatgagctgctggcagacacgattactggatactga

SEQ ID NO: 395934 - DNA, 414 bp, Salmonella enterica
atgaaaaccattacttatacacaaatgcggtcggatttatctgccacgctggaattgttacgctcaggtgagagtgtaacggtaacgcaacggggaaagcctgatattgttatcagtgcaaaaaccgttgataaggtggtgtctggaaaagaaattaagccacaaactaaaacgatagatgcgcatcttgcacagttaatttcatctaatttatccccacaggtaacggagggagtcatgaagtttactaagcaattggatgtccttctgcagtctgatgaggcgcgccagacaatgatgaaggcagccaatgccgcacttgccctgcagggcgtatcagagtcatttattaaagctttgcaacatactcagactaagcatgcggaaattataaaaaaactggaagataaataa

SEQ ID NO: 395935 - DNA, 663 bp, Salmonella enterica
atgacagatattggtgtaacaatgacaggcttaattggtctcgcaattacttcttctattattattgctataccagggccaagcattatgctttttattggtcaggtaatgatggatggtaagagccacgctttgcggggagtgttaggaaacgcaataggtatgattattatcgcactattactttcgattggtcttggttctttaatttcagaatctaaaatagcattattaatactaagagttattggagctattgcattgctattcattggtttgcaatatgtaaaaaaatcaacaccagaaagaaaaaataagttatctaataaaaaaagaccattgataactggaattattgttagtataacaaatccaaaatcatttattatgtttggaacaatagtaccagggtttctttctcaaaaagtggataatcctatcgttgttcttttattttactcactaattcctattctccttggattattcattgactacctgtgggtatcgattgctcattctttgaaaaatagagcgttatctgattcaaaaaacatcagacgtattagtgtttttggcggcctactaataataatcaccggaataattttgatgtcggagtccgcatctgttttttttcacatgcttggtctacaggtttaa

SEQ ID NO: 395936 - DNA, 1833 bp, Salmonella enterica
atgagtaattattatcaaaatgtaataataggtggtggtcctgccggaattaatcttgctcttgaatttatgaaaagaggaatcagctatttattacttgagtcaaatgaggaagttggagggcaatgggataagcttcctgtatgtggacaacttatttcgcttaataaaaaatacgttcccaaaaatgaccatacctatcgtatgagatatgactggcatactcttagttctattagttccgatgatgcagagaaagatccaaaacttctttttaccgaatggacttcagaacactggccttctgctcgtctttataaaaaatatttacagtatgtagctgagtctatgggaatacaatcttcaataaaaacaaattctcgtgtgtataaaatttcaaagcagaaagatgatggtaaatttattatttatgtagagaacagtaatgacataatcgcagacagaatattttgtggtacaggaagaaccaagcctattatcccatcaattgaggggttaactgaagatctatatactctttatgaaaattataatccagaaaaagcttctgagtattataaaaataaaatagtgattattttagggcgtggtaattcagcgtttgaaattgcacataacctggtagatataacagcagagaccagagttgtaactcgctcacttcctaaatttgctcgacaaacacataatgtacatgatatacgggggcaagtttctgatatatttgatctgatgcaactgaagtcaaataataatattgtaagtgatcgtatagtggcggtaaaaagaattgaagatggtgtaaataaagggaggatattagttaaatataacaccccatgtgtacactggaatcctccaagatggatgcgtcggacaggtattgtagatgatataataatatgttgtggttttaactatacgatgactgatatttttgatcagtcaactgtcagaccagagtgtgatgagaaagggaaatattgtttacttacttcaagttgggaatcgataaacacacctaacttatattttattggtgctccgacacgtattaatgatcctgatgctgcatcaggcttcgttcatggattccgttgcaatatccaggcattggccactattattgaagaagtacattataataaaaaattacttcctatttttagttatactttttcagttaatgattcttccgatgatttaaatttattatctgaccatgttattaatatggttagtaccagcatgccattatttgagttatatggttatttcagcagtataattacatttgaacaaaatagcgatgggaataccctcattcaaatttggcccccattccctaggaaatacaataacgagcgatggggaaatcataaaaattatattgaagttatatttgaatatggtttttctaaatatggtaatggtgacttacccacccattattttacattaccagcagaccattttgctccatccatgagtgcatatattcatccagtatttcatgtttatcgtaattgcatagaagttgaacagtttcatatgcaggaaagtttaattggcagatgggatctggatgattatgttgacgaagaaacaaacttagaacaatacaaaaatgttgtatttaatgctatagcctgcgctataggcatgaaagaacgtcgtagcactttaccagtcaaagatgagtatatggataaatgttatccaataatgactgagtatgaaatagatgaagctcttcgtattcagccaacattagcattgctttccaataactttgataaaaagattatttga

SEQ ID NO: 395937 - DNA, 1257 bp, Salmonella enterica
atgtttctcaacgatacaaaaatccgcagtctcagaccttcatctaaaccctttaagatctccgattcccacggtctgtatctcctggtcagtccgggcggctcccgtcactggtatctaaaataccgtatcaatggtaaagaatcccgtatcgggctgggcgcatatcctgcggtgtccctgtctgaagcccgccagcagcgagagagtatccgccggatgctggcacaaaacatcaacccggcacaacaacgggcggctgaacggggtttacgctcgccggagaaggtgtttaaaaccgtcgtactcgcctggcatcaaagcaataaaaaatggtcgcagaataccgccgaccgactgcttgccagcatgaacaatcatatttttccggtgattggtcatctgtcagtcacggaacttaaaccccgtcatttcattggcctgctcaaggggattgaagcgaagggactgctggaagtcgcgtcccgtatccggcaacacctttgtaacatcatgcgttatgccgtacatcatggattaaccgacagtaacccggcggcaaatctcgacggcgtgacgatgcctcccgttaaacgccactatcccgccctgccgctggaaaggctgccggaactgctggcgcgcattgacggttatcaacaggggcgcgaactcacccggcttgccgtcctgctgacgctgcatctttttatccgttccagcgaactgcgctttgcccgctggagcgagattgatttcagaaataaggtctggacaatccccgccacccgcgaagctattacaggagtacgttattcagggcgtggggctaaaatgcgcactgcgcatatcgtgccactgtcccggcagtccgtcgccattctgaaacggattcaggatatatccggtcatcatgagctggtgtttcccggagaccataacccgtttaagcccatgtgtgaaaacacggtcaacaaggcgctgcggctgatggggtatgacacaaaacaggatatctgtggtcacggcttccgggcaatggcgtgcagcgccctgatggagtcgggtcagtggtcacaggatgcagttgaacgccagatgagtcaccaggaacgtaatactgtacgactggcctatattcataaggcagagcatctggaagcgcgtatggaaatgatgcagtggtggtctgattatctggatacaaatcgtaaacagtatatagccccatatttttatactattgattataaataa

SEQ ID NO: 395938 - DNA, 516 bp, Salmonella enterica
atgcgacacgtctttgatgctggcgactatgaccacaatggcttattgaccgcgccgatgggtttttgggtggccgttgtcttttctctcaaagcatgggtgctatttctggtcgctcaggcctgcgaaggtcagcggctggcgctgtttgacggaatgtacccgagtgttacggcggtcattatcggcttgcttttaggcgttcccgcgatggcgctgatgttttgctaccccctcagaggccgcattccccgtctgacaggtgtgagttatctgggcgttttcgcggcggccctcctctcgatggcgtatgacacgtttgccttctgtcaggtcgacggcactcaggctggtttgtggatgagcattctggcctttgactctgcatgctggctgggtcttctgcccgaccgtcgtcttcgcgccgtctttttctccacctggcctgcacgggactcacatatgcctgtggcgagggttactacacctcatcaacaccgcgagatacaaaaatga

SEQ ID NO: 395939 - DNA, 468 bp, Salmonella enterica
atgaaaagacacatcagttccagcgtgatttctgaatcagaagtacgtcatcgggcgcagatgcagacctgtgggatgtcgctgggcgatatgctgagctgggctcaggatcctctgcatgctgatttgttacgccgactggaagcacaaatctgtcagttgcaggcgggggaattaacttccccgatgatatctgccttctggggggacttcaaacacaacccggcattgatgagctggtttaaatatgtcgggtcagcctggaaattgttgctgaaaagtgggctggccggcgaccagtacagtatccctgttctccggctgattataaaggaagcccttatgtaccttcccgcggatatcaacggcagacacgacccgggcctgattccgtcatcggccctacagaccggtacgcccggacatccggtgggcgctatcccggacgggcagacaacctcactttaa

SEQ ID NO: 395940 - DNA, 264 bp, Salmonella enterica
gtgctgaagctgaaaataaatgcccgcaaagataaatgcctgcaagggaatgaatgccggcagttcgtcgggttccggcagaccctgctggcgcgccttattctgttgtcggtggcttccggtgccggcatatcttctgtgtctgtggcttctgaactgaaccttaacttcattcacggtgccgataagcagcacgcgcctgccattctgcaggagggtaccagaatgataatcgtgcaggtacctgtaaccgcaggcacctga

SEQ ID NO: 395941 - DNA, 960 bp, Salmonella enterica
atgaaactgggccttgaaactgagtcatatcatcttttcttccaacagggagccatggacatttttggctttattgctaaagcaagcgaacttgggcttgatggcgtagaaattaatatcattccggatgaagggttacatccggaattcggagtactgaacggcgacaatcctgaatacctggcaaaagtgagagacgcgatagaaactcacggcctttactgtgagattgacactcgtttcacaacccctgacgcgattaaaaaagccgtgaatattgcttcagcattgaacgcggatgtcatcagaacctatatgttccgtcggggtgaatatgacccgcaggcataccctcaaattattgaacaactgaagtccatcgttccattactcaaaaaacatcgcattcgtctggctgtagaaaatcatgaagacgaaacggctgacgaaattattgatgtcattgaagcagttaattcagtatgggtaggggcgcactgtgatattggcaatggcatgatggcatgggaggaaccggtagataccgtcaggaaactggcgcctttcgcattcagtacccactttaaagatcatatcgtcaccatgaacggagacgaacctgttgtctgcggtgttcctgtcggggaaggcagcatagatatagatacctgctttaaaacgttggtggacgactcagcggtgacccgcatcaatatcgaaacctgttttccctatgcctcacgtttcgcccggccaaaaggtacggggggcgttaatgagtttaagggaactttcacagtaaaaccctcgccttttgacgaaaagaaaataaaaccgcttgaatactactacccagggaaaatttctgaagaacggttggatgagttaatggaagctcaggaaagatgcgtacaggtttctgttcagacccttaaaaacctgcgtaataaatattgttaa

SEQ ID NO: 395942 - DNA, 366 bp, Salmonella enterica
atgattatttgcacaccgcatgcaccagaggctattggtccttactctcaggctgttatttcatttatctccggctgctgtccattccgtgctgctgatggctctgtcaatggtagcagcattgaagaacaggccagacaggccatgagtaacctgaaagccattgtcgagtcagccgggactgatatggattccgtcgttaagaccacctgttttatcagcgatctaaataactttcagacttttaattccgtctatagcgaatttttctcaactggaaagttccctgcccggtcttgtgttgaagtggccagattgcctaaggatgtgctgatagaagttgaagccattgccctcgtcaaataa

SEQ ID NO: 395943 - DNA, 276 bp, Salmonella enterica
atgaattcccagacaataaaagatattccctgcttccgttcttatttgcctgatgccctgcgtttaagatttgaagataaactgaccatccgggccatcgctcagcgtctcggtctcagtcattccacaatacatacgctttttcagcgatttattgcatccggtatcgcatggccattgcccgattcagtctcattcgctcagcttgacgccatcctttatgccaacagaaaaaatgaatccacccgctctgaaatcagcgtaagcgttaagtga

SEQ ID NO: 395944 - DNA, 819 bp, Salmonella enterica
atgcgattagcaagccgtttcgggcggattaaccagatccgccgcgaccgccctttaacccacgaagagttgatgcagtacacccccagtgtctttggcgaagataaacacacctccagaagcgaaaaatactcttacatccccaccatcaccctgctggataaccttcggagagaaggctttgagcctttctttgcctgccagtcccgcgtgcgcgacccgggacggcgggattatacaaagcatatgctgcgcctgcgtcgcgccggtcagataaccgcccagcaggtgccggaaatcattattctgaattcacatggaggcgaatcgagtttttggcttttgcccggcgtgttcagaagcgtgtgcacgaattcgctcgtctgcggacagtcattcggggaaattcgtgtcccgcatcggggcgatatcgccgaaaaagtgattgagggcgcttacgacgttctgaatgtattcgaccgggtggaagaaaagcgggaggccatgcagtcgctgcagctcccgccaccggcacaacaggcgctggcgaaagccgccctgacgtatcgctttggcgaagagcaccagcccgtaaccaccgcacaggttcttaccccacgtcgccgggaggattacgggcaggatttatggaccgtctggaatacgctccaggaaaatttgctgaagggcggtcttcccggtcgcacagttcaggataaacgtacccatacccgcgcagttaaaggtattgatggcgatgttaagttaaaccgcgcgttatgggtgatggcggaacagatgcagcaggcgctgagctga

SEQ ID NO: 395945 - DNA, 171 bp, Salmonella enterica
atgcaacaggaaacaccaccattaccggactgtactgtggatctggttgtcggggccgtcggaatggtgctgatacgcagtaacacgattatcgtccgggcgccgggtgtggccatcaccacattctgtactctccacatactgaaaaaaatggcagatcttgcagattag

SEQ ID NO: 395946 - DNA, 885 bp, Salmonella enterica
atgtctgacaacaccgaacagggtattaatgccctgaaaccacatttatcccttcttcccgaacaactttcacgtgccgttctcgaccgtatccgccagtgcattcattacgagccggtgattggcattatgggcaaaaccggtgccggtaaatcttccctctgcaatgcgctctttcagcagcccctgagtccggtcagcagtatggcaggctgtacccgccagcccctgcgtttcactctggatgcaggaagtcgtcgtatgacgctggttgatttgcccggtgccggtgaatccctggattatgaccgtcaataccggcagttgtataaagagcagttaccgaagctggacctcattctctgggtaatgaaagcggatgaccgggcctgtaccaccgatgaagcctttcatcgcttcctgctggaatgtggcgtgtcgccgggcagtatcgtctttgtcatcaaccaggccgacaaggcagagccgtctctggagtgggacagggagaaccgccagccctccaccgggcagttgctgacgctcaccgccagaagtgccgccatctcccgccagttctccacgccatacccggtccatgccgtttcagcgaaaaccggctacaacctgccacgcctggttgaaacactgatattcgccctgccaccggaggctagcagcggcgtctttcaccaggtgaaaaaagagcaccgtacccgggaagctgaaaccaccgcccgaaaggattttggggaactgctgggggaattgttcagccgtgttgtggacgcggtaccgttaccgaaagtgctccgggacggtctgggcacccttcgtgatggcatagtgaatgccgccaccacgctgtggcacttgtttttctga

SEQ ID NO: 395947 - DNA, 975 bp, Salmonella enterica
atggttatttatgatggcaaaaacaggcactccccgataaagtcaggaaatttaagaacctgtaaattttatcttgactggctgaatgtaaataaaaacatccgagcagatggtgttaaccgtcaggatgcagaaagttgccgtcaggccactaaccagctcattaatcagttcttcccggataaagaaatgcagaaccggttgctggctgaaatgaatgcagcctgcgacgaaaatatactttcttctgacagttttgactggcttaaacaggatgaacgggccacgttctggctgtggggatatctctgtaaagcaggggattatcagaccggatttaatccaccggcaaatgccacatttgatggaaaaaactggtatcagcgacttaacctgagcctgtcaccggtaagtcaccaggagcgactggctgttattatcaccttttttgacctgataattatccattcacctccggttaattatattaaaaaacagctgatggaaaagttcaaagaccagtggaagaccatttacagcaaaccacttccattgaaatggttacccgatgatgaagatgctgttttatgggcatggaataatctgcaaaaaatccagcaggaaaaaccggttaccctggccggactcagtttcagtttatccgcgcaggagttaaccacctggtttacccccctgagtcatcatgaacgctttcttgccctgcgggcggcgctggatttatgggatgatgctccggatacaaaacgcttatttctcctgaatctcaataaagcctggaatcagcaaaaattacgtcagtcacgtactgacaagaaagcactgaacacatacctgaagaatgagactaaaatgcgtcttgatattctggccacacattacaatatgcggataagtgatgtgctggagaaactgattaatgagcattaccgtcaggaattaacaccatctgaatag

SEQ ID NO: 395948 - DNA, 240 bp, Salmonella enterica
ttgcctgaatccagaactacagcggctttcaaatactggtctgatcgctcaccgggcatggaagagatggaggtgacatttgctgatgaagcaacccgggcgattatcaacgcccacatgccttcgctgacggatttcttcatagcgttatttgatcgaatcagtgagcaaaaaacgggggactactacgccttaccacgaacgtttaaactctcagattctgcgctggcgacgatttga

SEQ ID NO: 395949 - DNA, 171 bp, Salmonella enterica
atgcaacaggaaacaccaccattaccggactgtactctggatctggtcgtcggggcagtaggaatggtgctgatacgcagtaacacgattatcgtccgggcgctgggtgtggccatcaccacattctgtactctccacatactgaaaaaaatggcagatcttgcagattag

SEQ ID NO: 395950 - DNA, 855 bp, Salmonella enterica
atgtcacatggcaggactgtattaatcattaagaaactgaaaggaaaccttatgcgtaaactcgtttttttatctctcagctccgcagcattgtttattccattgctctcgtccgcgatgacaattcacggcgacatacatcccgaacgctataccttctttctgactcaggaaggcagtaatcaactgaaacaggcaaatgaccggctagcgaagaacccgcaggcttatacgcttgatgtgaatcataccggcattcaaccctttgacgctgttcgctgggacgggaagcctgtaaaagcagttacctgcgtcctggtagatggcgtgatgatgggacaaaaaaccacgtggtcacaatgtaaagacgaaagtggtgctgagtattttggcaatgccggatggccggtacgtgattacgtggcaaaagcgtgtgaagcaggcaaatcagattgtcctgtttatcttgttttccagacagatcccccgactctgcgaaacgatatggctaattttactccagcgccaaagaactttaatgcttctgcaaacctgacggatgaaattaaaaacgacggatgtcagatggctgacaattcctttgaatatgcaaaaagcaacactcgctgctccgcaatcaacaccgtacgttttatccgtaaacaaaataccgaagccacttatgaggctgacctcaccaccacttcaggtaaaaagctgacaatgactgtcggatacacctacgggaatgcatccagcaaggaaccgggctggcgtaccatttctgtccctgacggcggcattatcactgatatccgtaaacagggccagtggctccccaatggctacaaataa

SEQ ID NO: 395951 - DNA, 1086 bp, Salmonella enterica
ttgaatggaaaaatgtggatagatataaaaaccaaacgtgatttaagattgtttttatggatggcaggaaacgatattgctattgaaaattaccggcaaacaaaggaaaacaaaacataccacctgaatcacatatatggtgaagactgtaatttagcagcgctggcaataaacgaggcttttcggattctttataaacattcagacgagttattctcatacgcctatagatttaaaaaagcgaaagaagcattattaccaataaaagagtttagttggtttaaacgtagcaatgatgcctgttattttgcatgggcatatatcagggttttcagtaataagaacagatccctgtcaaattttggagataatgaaatactgactattcataccagaacaccttatcatcgatacattaaaattcaatatcccgtaagccatcgtgaacgcattgagtgtatagaggatttctttgacagatcacccatggatctttcatcaaagttatccattatgtcagatataaggtatgagtgggacaggcactccccattagcaattggattgccgctaaagaaaaatgaaaagaaaaaaataaactgggcatgggattatatctgcaaagataaatttaattacattactggctctataaaaagagcacaagaaaaaataattgaagacagtggtaatgataaaactgtttcacaagcggctctggatgaaatatattactcatatatgaatggttatattcatcaacctcatttccttagccttttcaggccatcaaccaccaccgagaaatatctagcactccgttgtatttatatttcactttactattatgataagaaattcatatccagatttaaaaaatcatgggaatcatcatcctatcgaaaagcaaagcggaaaagtaacagcacatttttaaaaaaaataaaaagtgaactcatctcaggtgaaaacatatcagaggcttctggtccttttgaagaggaaacagtaaaaactgaaaaggatatcctgagagaaaaggcacatgaggtaattgaaaaagttatgaagaatatcagaaaataa

SEQ ID NO: 395952 - DNA, 192 bp, Salmonella enterica
atgtatcaggaggacaccgggcggcatcctttcatgtcatcggtcgtatatgtacggttttactattcatccactcagtgctttgttaaggctctcagtctctatataaagcatgccctgacaacctccgggattcctctgctgacgggtttgcatagcgtgtggtttttgcttgtgttttcacgtcaatga

SEQ ID NO: 395953 - DNA, 204 bp, Salmonella enterica
atgagcacaattgatattcataacgataagttcgtcagcatgcagttcattactgaactgactgggttatccgataaatggttttataagcttgcacaggaaggtaagtttccaaaacctgtaaagtttggccgcagttcccgctggattgaacgtgaagtaaaagaatggttagaagcccgcattaatgattcgagagcataa

SEQ ID NO: 395954 - DNA, 1023 bp, Salmonella enterica
atggacttaccagaatcattcctgttatctcatgctgaatatcacattgagaataatactccccacatcatcatctctgatgacaatgagttcaggtgcaaattagaacaactggatagttgccttaaaactatcagcagaggacgtaagttacctttcacaattctttacaaccggtcaggatataaagagcgtgcagagtcagccatcattcttgatgctatctgttatctcaatatgttgccgcaagacgcgatgaaagtacgaatagctaacccacgtatggctacatttcagaatttatttaataacactgatttacatgcccgcgtccacaacgggaaaatagtgggagcagatactgttaccacggcagagatgctgaataagctggtacaggattaccgttccgctgtcagtcaggcagagtttagacaggcctacagaaagtaccagcgggcttcagttaaaaacctgaagggcgtgatgaattacatcagacacctgcaggagcgtcattcccgattgctggtgttgcggatagatttatcatgggcaaatgagcataaagctgacatcactgctgatgatgcccgtaagcaccgtcagcaactgtttcgcaatatgcaaaaaaatccactgtttcgccatgttctcgggactgtgtggaaacttgaatatgcaccacaacgtaaatttcattaccacatgctatttatcttaaatggcaacaaggcacagcaggatggcgtgattgctcatgctttcggtgaatactggaaacacaccatcactaaaggtaaaggcatctactacaactgcaacgctaacaaagcgctttatgaggagtgctgcctcggcaaactgaaacgcggtgacaacagtaaggataaggggttgcttcaggcgctaagttacatcaccaaaatcgatgcctgcgcccggctggttctccctggaaatgccagaacctttggtcggggtgaaatcaactcgctgaaagccaggctgagacgaaagtaa

SEQ ID NO: 395955 - DNA, 378 bp, Salmonella enterica
atgtatgaattagtttatgccccggcagccctgacccttcagggggagtggggggagccgggaacggtgatgcaggacgattatgacagcctgtcctgtgaatactgcaggctgaaaatcgttgtctgcgttgaaccgctgacgggagtaaaaagttttgttcatgctcccggtaatatcgagaatgtaaaacgactaaaggcctgtcgttatcacccggctatggctgtgttacctgttcgttctcctcctgtgcggcgtcaggttatctgtaaaacggtatcccggcgctggcattgctgctggtgtcatgtttgctggctgggtgaaaaggtttgtccgtgttgtgataacggaatttatgccattgacgcatag

SEQ ID NO: 395956 - DNA, 516 bp, Salmonella enterica
atgcgacacgtctttgatgctggcgactatgaccacaatggcttattgaccgtaccgatggggttttgggtggccgtggttttttctctcaaagcatgggggctgtttgcggtcgctcaggccagcgaggggcggcgattggcgctgtttgacggattgtacccgagtgttacggcggtcgttatcggcttgcttttaggagttcccgcgatggcactgatgttttgctaccccctcagaggccgcattccccgcctggcagggatgagctatctgggggttattgcggcgaccttcctctcgatggcgtatgacacgtttgccgcctatcagactgacggcactcaggcgggtttgtggatgagcattctggcctttgacttggcgtgctggttaggtgttttgccagaccgtcgtcttcgcgccgtctttttctccatctggcctgtgcgggactcacacccgcctacgccaagcatcacaacaccttatcaacaccgcgagatacaaaaatga

SEQ ID NO: 395957 - DNA, 456 bp, Salmonella enterica
atgaaaagacacatcagttccaacgtgatttctgaagcagaagtacgtcatcgggcgcagatgcaaatcagtgggatgttgctgggcgagatgctgagctgggctcaagcccctcaccatgctgatttgttacgccgactggatgcacaaatctatcagttgcgggagggggagttatcttccctagtgatatcggctttttggggggactttaaacacaatccggcattgatgagctggtttaaatatgtcggggcgagctggaaagtcttattgaaaagtggcttggacggcgaccaatacagtgtccctgttcttcaactgattattaaggaggtgctgatgtaccacgccctcactcgtgataaccacggcagtcgcgacacgagcccagtcatgtcatcgccctccccaacagatacgcctggctatacggtgggcgcgctgtctggatag

SEQ ID NO: 395958 - DNA, 633 bp, Salmonella enterica
gtggccgaacttgccgagccacaatataacggccggtcagacgcgttgacgatgaccgtcacggtgaatgagatgaaagatgatacacagcacacgcctttatggggcgataacgctattttcacaacacacgatgctcattccacagaacgtgtgggaccctcggagcaaaagccccttaaaaaacgggttagtcagagtaaccatgagtcgtatgtgataccgccattcttatcccagtacgctcaagaaccgctttatcttctgattgccttgtggtgtcaggcgcaggcacgctgggtagaccgtaatgaaattgcggcggttttccgcttaaccgccaggcgggcatcttaccagatgtcttatctcagttgtaaaaagcagagtattacgtgccgcacccgtcgggtagcttgtgaagacccgcgataccgtcgcaatgagctgtacgtggaatcggtgacggtcgcgaagaagacatccgcgtcctgccccccaactcgggcggagcaggagacggcccccccgaaaaaaagtgggcagcgcagttcatcggtcggtcaggagggacgcgataacgccgcgctatggcgctggctgctgagtcgtccttcgggagaggataaatga

SEQ ID NO: 395959 - DNA, 822 bp, Salmonella enterica
atgaatccaacgatgatgccgtgtgttcccgtccctgtgattgtctatgcgcattcttggcctgagtcctgcgcattagaagcttacattggggaagcttatggcactgcgcgcgcggtcagggtttgtgagcgaatcagcaccttgatgcgggtgttatcgctaacgccccagagtccgctgattttggcgctgaatccgcatgaacacgtcaacctgctgtatgcgctgcggccctggctaggccagcggccaatattatttgttggccggacgttttactatacggaccgacagataccggggttttttatttcccagccggttgcttttcattgctggcagcgcacgtctgagcggagcgtgaaggcgcaaccgggcctactgcgttttttacgttctgcacaggcgcctgatgtcttgcccgcggcgacctattcctcggccttaccgacgtatgcttgtgagtcggagttgctcgttgcgataaaccggtatctgttaagccagatgttcattctgggggtgagtgccaaagagtatgaggttatatcgctgctgctgagtcagcagagtggcgtgtcgattcaggggatgatgcgtgcacgtaacatgacgtccaagatattgagcgcgcataaaatgtctgtgctgaacaagctgggcatgaatgctcatgtggtcagtttgtggcgagggctggaggtgaaagcgctcctccagcaaggtatttttacgctgccggcgtggtgtgagaaagggcagtccataggtaccgagctttcgatggacgagccagcgaaaggaatgacgacagtctga

SEQ ID NO: 395960 - DNA, 333 bp, Salmonella enterica
atgaaagaaggaatatataacgtggtgtttgaaagccacgatgcatcttttggtgaagggatactggtggtgagtcagggagtggtgaatggcggcgatattggttttatttatcagggtaagctgcagcgtccggtgatgacgttgagggtcaggcaataccagtcggatatcctgtcggtagtgggcatggagggagagtatacgcttgagatgcgttatgaggaggaggaagagcacgaggggcattaccggcttagcggcgtggtcagcgggatgccggagaagcaaatcacggcttatgtgagttttttggcggatgttgtgcgttag

SEQ ID NO: 395961 - DNA, 603 bp, Salmonella enterica
gtggatgaaacgcgtaaactgatggtgattaagccatccggcgtggaatatgacgtgatgaccgccgacgatatggtggtggtggatattgccagcggcaacgtggtggaaagcagtaaaaaaccgtcgtccgacacgccaacccatctggcgctgtaccgtcgttatccacagatcggcgggatcgtccacacccattctcgccacgcgacgatctggtcgcaggcgggtctggatctccctgcatggggtaccacgcatgccgattatttctatggttctattccgtgtacgcgtctaatgaccgctgaagagatcaacggcgaatatgaatatcaaaccggagaggtgatcattcagaccttcgagcagcgcgatctcaatccgctgcaggttcctgcggtattggtgcattcccacggaccgttcgcctggggtaaagacgcggcagacgcagtgcataacgccgtggtgctcgaagagtgcgcctacatggggctgttctctcgccaactggcccctcagttgccggatatgcagtctgagttgctggataaacattatctgcgcaaacacggggcgaatgcgtattacgggcaataa

SEQ ID NO: 395962 - DNA, 669 bp, Salmonella enterica
atgatgagtcgaccattactgcaactggcgctcgaccacaccagccttgaagccgcgcaacgcgacgtcgcgctgctacaagagagcgtcgatatcgttgaagcggggacgattctctgcttaaccgaagggctgagcgccgtgaaagcactgcgtgctcagtgcccgaataaaatcatcgtcgccgactggaaggtggccgatgccggagaaaccctcgcgcagcaagcctttggagcaggtgcaaactggatgaccatcatctgtgccgcgccgctggctacggtagagaaaggccatggcatcgcgcagtcctgcggcggtgaaattcagatggagctgttcggcaactggacgttggatgatgcccgtgactggtatcgcgttggcgttcgccaggcgatttaccatcgcgggcgcgatgctcaggccagcggacaacagtggggagaagaggacctgacgtgcatgaaggcgctttctgatatcggtctggaactgtcgattaccggtgggatcacgcccgccgatctgccgttgttccgcgacattaacgtcaaagcctttattgccgggcgcgcgctggcgggggcgcaaaacccagcgcaggttgctggcgaattccatgcgcaaatcgaggccatctggggctcccggcacatggtttag

SEQ ID NO: 395963 - DNA, 714 bp, Salmonella enterica
gtgccagctcggtgttggtcaaaaaaagcgcggctgttgtttttcatccgctccctgcttctggatcttcacggttatgggcgctatgtcaacgacgggcagtacatcgtccacgaagccagcccgacctcctccggcaatctggaatggtttaccgaccagtggggtgaactctcttttgctgagatcaatcaggccgttgccagcttacctaaagtcggcagcgatcttttatttctcccttttttgtacggcagcaacgccggactggagatgactagcggcttttatggcatgcaggcgatacacactcgcgcccacttattgcaggccatctacgaaggcgtggttttcagccacatgacccatgtcaaccgcgtgtgcgaacgctttaccaaagcacacaccctacgcgtcaccggcggcccgacgcactccgacatctggatgcagatgctggcagacgtcagcggtttacgtatcgaattgccgcagattgaagagactggctgctttggtgcagcgctcgccgcccgcgtcggcaccggcgtttatcccaacttcagagacgcccagcgcagcctacagcacccggtacgcacgctgttgccggatgccgccgcacaggcgagctaccagcgtaaataccgccaatacctggatttaattaccgcactacagggctatcacgcccgaattaaggagcacgaatga

SEQ ID NO: 395964 - DNA, 555 bp, Salmonella enterica
gtgcgctccagcgaactgcgctttgcccgctggaatgaaatcgactggcagcagaagctctggataatcccggaagaacgggagcagatcgaaaacgtgcgcttctctcaccgtggcacaaagatgaaaacgcagcacattgttccattgtctgagcaggcgatggcgatcctgaaacaaactgaagcgctctccggacatctggcgtttattttccccggcgaatacgatcaggacaagtgcatgagcgacaacaccatcaacaaggcattgcgcgtgatgggctacgacacccgaaaagagatctgcagtcacggcttccgggcaatggcatgcagtgcgttaagtgagtcgggacggtggagcaaagaagcgattgaaaagcaaatgagccatcaggaaaggaacagcgtccgtgccgcctatattcataaggcaaaatatatggaggagcggatcgctatgatgcagtggtgggcggattatcttgatacaaatactgagcgatatgtgtctccttatcagtttgcgggacaccagaggcaagcgtcatag

SEQ ID NO: 395965 - DNA, 447 bp, Salmonella enterica
atggcactcactgataccgctatccgcaagcccagacccacagacaaccccttcaaactcggcgacagtgccggactgtacctgctgatcaaacccaacggctcaaaactctggtatatgaagtaccgcattgacgggaaagagaagaagctggcctttggtccttacccggatgtttccctgcttacggcacgccagttccgcaatgcggcacgcagtaaaatgcgtgcgggggtcgatccctccgttgacaaaaaaatcgcgcaacagaaaaagaaaaacggacagacattccgccagatcgccataaactggcatgccgatcaccggcgctggatctggacggtgaatttacgccgccggaaacacagcattacccggccctgccgcttgagaaactaccagaattattatcccggacggataactactccggcaggctgctga

SEQ ID NO: 395966 - DNA, 621 bp, Salmonella enterica
gtgtatctgtctgatgaactgtcagagtctgcccgcgagaaagcacgctcctggtactgcgaaggggggctggagtatgactggtacagtgatgtttatgaggatttcaccctgatttgcaacctcctgggaataagactcaacacccgcaccgtcaccaccaccggcggcagataccacgaaaaaacctgcatctggttctccggtttctggagtcagggcgatggtgcctgtttcgaaggcgattaccgctatcagcccggagcctccggaaacatcagacaacatgcaccgcaggacgaagaactgcaccgtattgctgatgaactgcaggccatccagcagcgtaacgtctggcagcttcaggctgatattcagcatcaggggcgctattaccacgaatacagtatgcacattaccgttgagcgtgactcccccaccggtcagcaggccaccgacgacgcagacggtgtcctgagtgacgcgttacgcgacctggcccgctggctgtatcagcaacttgaaatgcaatacgactggctgacctcaccggaagccgtggatgaggcgcttctcgccggcggttacaccttcaccgaaaccggccagcgcttcggttaa

SEQ ID NO: 395967 - DNA, 549 bp, Salmonella enterica
atgaccgtcacggtgaatacgatgaaagatgatataaaacacacgccagcatggggttactctattttcacaacagatgatcattccacctccgcaaaaaacgtgggaaccccggaacaaaaacccctcaaaaagagggtcagtcagagtaatcacgattcgtatgtgataccgccgtcattatccgggtacgctcaggagccgctttatattctgatagctttgtggtgccaggcgcaggcgcgctgggtagatcgcaatgatatttcggaagtttttcatttaacggcaagaagggcatcttaccagatgtcttatatcagttgtaaaaaggagacgattacttgccgtatccgtcgggttacttgtgaaggtcagcgacgacgccgcaatgaaatgtacgtggaatcggtgacgctcgcgaagaagacgtcagagtccagcgacctgctccaggtggagcagaaatcggaatcgggtccaccgaaaaaaaaggacggcgcggcgcggcggggggggataatgcctcccggtgtcgctggccgttga

SEQ ID NO: 395968 - DNA, 813 bp, Salmonella enterica
atgaccccggtgctgacacagcgtgcccccgttcctgtgattgtctatgcgcattcctggcctgaagcctgcgcattagaggcttacataggggaggcttatggtactgcgcgcgcggtccgggtgtgtgagtgtatcagcaccttgttgcgggtgttatcgctaaccccccagagtccgcttattctggcgctgaatccgcatgaacacgtcaacctgctgtatgcgctgtggccctggttaggccagcggccgatattatttgttggctggacgttttactatacggacagacagataccgggtttttttgtttcccggcaggttgcttttcattgctgggagcgcacgtctgagcggagcgtgaagggacaaccgggtctactgcgttttttacgttctgcacaggcacctgatgtcctgcccgcggcgacctattccccggccttaccgacgtatgcctgtgaggcggagttgctcgttgcgataaaccggtatctgttaagccagatgttcaccctggacgtgagcggcagagagtatgaagtcatctcgctactgctgagtcagcagagtggcgcgtcacttcaggggatgatgcgggcgcgttacataacggccaggatattgagtacgcataaactgtctgcgctgaacaagctgggtatgagctatcatgcggtcagtttgtggcgagggctggaggtgaaagctaccctccagcagtgtatttttactcccccggcgtggggtgagaaagagcagtccaggcgtactgcgattttgatggccgagccagcgaaggcggaatga

SEQ ID NO: 395969 - DNA, 333 bp, Salmonella enterica
atgaaagaaggaatatataacgttgtttttgaaagccatgatgcgtcttttggtgagggaattctggtggtgagtcaggggacggtgaatggtggcgatattggttttatttatcagggtaagctgcagcggccggtgatggagttgagggtcaggcaatatcagacggatatcctgtcggtactgggcatggagggagagtatacgcttgagatgcgttatgaggaggaggtagagcacgagggtcattaccggcttagcggcagggtcagcgggatgccggagaagcaaatcacggcctatgtgagttttttggcggatgttgtgcgttag

SEQ ID NO: 395970 - DNA, 141 bp, Salmonella enterica
atggacgaaaaacaattgcaggcactggttaatgaactggctgcgtattaccatgaaggagatcggtggttaaccattgatggagatcggttcgtgttactttcacagaacgatagcgttcataattatgtgtcacgttaa

SEQ ID NO: 395971 - DNA, 516 bp, Salmonella enterica
gtgaacgatattctgattgcctgtgtggatggtctgacaggtttcccggaggcaataaacagcatttacccggataccgaagtccagctctgcgttatccatcagatccgtaactcgataaaatacgtcgcctcgaagcaccacaaggcgtttatggctgatttaaaaccggtttaccgtgcggtatcaaaagaggccgccgaaagcacactggatgagctgaaggagaaatggggagcacaatatccggtggtgcttcagtcgtggcggaaaaaatgggacaacctgtcgcattacttcagatatccggcgacgatccgcaaagtcatttacatgacgaatgccattgaatcagtgcaccgtcagtttagaaagcagacgaaaaccaaaggcgcattccctaatgaacagtctgttgaagcttctttatctgggattaatgaacgcacaggaaaaatggacaatgccgctccagagctggaatctgacattgtcccagttggcgatttattttga

SEQ ID NO: 395972 - DNA, 609 bp, Salmonella enterica
gtgaataccgggattaagcagatagctgaggatacgaatgatgtggagattaagcaggcgattttgacgggggcgacaggcagtggcaaaacgtatctggcctgcgcgcccggccacaatgcctgccgacagggatacaaggtctattactaccgtctgaaagcactgatggatttgtgttaccaggggcatgcggacggacgatacagcaaactgctgacaaaactgaatcacagcgatctgctgcttctggacgactggtggctggagcctctgccgtcagaacaacgcagcgatctactggaaatagtggatctaatgtaccagcgtggttcaatcatcgtcgtgagccaaacgctcaaaacacccactggcagcttcgaacgggccacgccccgcgatcgtaacggcacttttgagcctcaactggtgaagaagcatcagaccacgctctctgatgagattgaacgcaagatcatccgcatgttcgcactgggcatgagctacaaagatatcagtcaggaaattgaagatctgtacgctttcagcgtctccagtgccaccatcagcgctgtcaccgataaagtgatccccgagctgaaacaatag

SEQ ID NO: 395973 - DNA, 597 bp, Salmonella enterica
atgtcttattctgatacgccggaacaggcggccgttatcgcctggaaggcggaacgtctggttgtcagtgccttggccggcacggggaaaaccagcacactttgtcgatatgcggaagaaaacccgaccgaacgtatgctgtatgtggcgtataaccgggccattcgtgatgaggcggagcagaaattccccttcaatgtgacctgcaaaacctcacatcaactggcctggccgacggtcgggaaatactaccgtcatcgcctggtgaataccctgcgcctgactgacgttgcccgggcgcttaactcccgcaactggttgctggccagactgacgctcgatgtgattaaccggtttatgtgtagtgcgtcttcacacataacggcagaacatgcgccagagcctgatgactgcaagggacttgaacccgcacagatactgctgtctgccagaagaatctgggacatgatgtcagaccggcagggggattttccggtcacccatgacacctaccttaagctttttcagttgagtcaccccaacctttcattccgctacaataccgtgctgtttgatgaagctcaggacgccaattga

SEQ ID NO: 395974 - DNA, 237 bp, Salmonella enterica
atggcccccgccgccgagcctgccgagctaaaggtgacattcatcaggtcagcgagaccaccgctgagcgtggtacccgtcagagcaaaaccggtattacccccggttgtcgtccccgtaatgaccgcttgtgaggcattcagcgtgctgttgttaatacgcacaccagcaccggtagcagcactgccggtcagcatcagcttgtcaccagcgctgagtgcggtgttctttatgtaa

SEQ ID NO: 395975 - DNA, 270 bp, Salmonella enterica
atggtggtgttgtttttaataacgggaattttacttttattaatgataccgtcattaatgcgactggcgatagctatgctgggttgctttttgacgctgggtggtattcatattcaaaaatcaatcttaacttccagaatggaaattccgccattaatgctgttaataaatatcagggagttcagtctggaactaatggtgggatggcaattgctccatgggataatcatccggcacctgtggcctttaatattcatggtggtaagttaa

SEQ ID NO: 395976 - DNA, 216 bp, Salmonella enterica
gtgaccagtggcattcccctcaagcgtcgtgttggcattggtcaggttacctttcacctcaataccactgccctcggtggcattaccgctaaccgtggcattattgagttttgtattgccgttaactaccaccccactgccagtggttgcgtctccttttatggtgacaccgccatcgctcaacagcgtgccattgacattaacaccgtcccctaa

SEQ ID NO: 395977 - DNA, 594 bp, Salmonella enterica
gtgctggtcagcccacctgaaacagagagccctgaaccgctgcctgttgagccggtcagtataacgttatccactgttgagtctgcgccggtcacatcgaccccggcccctgattctgagctacctgtcacgctgccgccggtgatattccccgacaggtcaacgcctgagccagaaccatttgcggttccgttcaccgtggttccgttggtgttggtcagattgcccgaaatggtaaccccagtaccgttggtactgctgcctttgagggtggtgttattagcaacgctgttatcgccggtaatattcacaccgctaccggtctgcgaggttcccgtcacttcaccaccggacagattaccgccaagcgtaaccccagagccatctgccgcactgccattgaccgtcgtgccattgacattcttcaggctgcccgagatattgacacccacaccagaactggtgttgccgctaatagtagccccatccacggtggtattggtgccactgactaacactccactccctgatgcggactcacctttaatggcaccaccggtaatatttccaccgatgttgactcccgccccgtga

SEQ ID NO: 395978 - DNA, 1722 bp, Salmonella enterica
atgaaaatagcgaggactatatctcctctggctttactggtgagtaccgccatttgggctgcccccatccccctgcctaatgctggctcacttggaaatcaacttcgtcaggaagcccatgttgatgtgcctgctcccgttgcgccagcattggtgttgccggccaattcggcttcgcagtcacgcatggccgctgataactccacggttgtggtgattcgtcaggttcattttactggtgacgtccttcaggatggcattaatgaagcaatgctgcaaaaaatcattgcgggtgatttaaataaaccattgacctttagcggcctgcagcagattacagagaaaatcacggcacgctatcgccagtcaggcatgttgctggcgcgcgccatccttcctgcgcagaccattcgttctggtgagttgactatccagatagtgccggggcgttacgatgaagctactgtcaataatgccaccaccttacgctcacaggtcatccaacatttggtctcgacaacgacgccgacaggcgaggttattcgccgcggacaactggagcgcgttgccttactgcttaatgaaattcccggtgttaacgcccaggttgccctgtcccccggcaaaaaaacaggaacatcagcgctggatattaatatgacgccaggtcagcgcgtcggaggctatatcgggctcgataaccaaggtgacccgaacaccggtcgcagtcgtgtgatggcgggggtctatgcgaataacctgttgggattaggtgaccaacttaaggttgaccttctggatgcttacgagaaaagtgacctttttagcggctcattagattacagtttgttggccggtggatattacggcacccgcgttggcataaactacagccaccttaattaccgctacaacctgaataaactgggttttaacggtgactccgataactggggggtgtatgtcactcagcctctggttcgccaggcacaagcccgtgttgatttacgcgccgatgctcagacacagtcactgaccgaccattatcctgttgattttggctcgggaacgcaggggcgtaaacaggtcaatttgggggatgtgagcgttcagggtagtttggcctatatccctggaggtgttagcggatttgcagtcacgggtaccgtggggaatgtcgacctgcgtaatgacgtggcgagaacgtggagtggcatggggagtgacggacagttttcccgcctgaattatcaattcaatcacgaccagcacctttgggggcctttctctctttatgccaacctcatgggacaacaggccaatcataatctggacagctctcaacgatttttgatgggcggaccaacaggggtgcgtgcctatgatatcggtgatggtgcagtggataatggcaatattgtgaccgctgaactgcgcagtcagtggtcagtgccggtgcagcgctggctgggtcgagccccgacagtgaccgtcgcgacattttatgaccagggttgggggcgtcagatgaaagacaatcgcgttgctcaattacctgacaataacattaacctgtccggtgctgggttatatgcctcattgggcgatgccggtaactatgcgcttaacctgacatgggcacaccgaaccggtgatgccgacccgagcgctgttcatgatgaccatgaccgtttttggatttcagcggtgaagaccttctga

SEQ ID NO: 395979 - DNA, 327 bp, Salmonella enterica
atgtcttattctgatacgcctgaacaggcggccgttatcgcctggaagggggtacgtctggttgtcagtgcctttgccggcacggggaaaaccagcacactttgtcgatatgcggaagaaaacccgaccgaacgcatgctgtatgtggcgtataaccgggccattcgcgatgaggcggagcataaattccccttcaatgtgacctgcaaaacctcacatcaactggcctggccgacggtcgggaaatactaccgtcatcgcctggtaaataccctgtgcctgactgacgttgcccggacagctggttattcgcctgcagtctcttaa

SEQ ID NO: 395980 - DNA, 282 bp, Salmonella enterica
atggctatttatcgcagcaaaaagtggctcgccgccgtcgggcagatcgagcgctgtgttctttgtggagcatggggaacgcaggtggcacaccggaacgaattaaaaggcatggggcttaaaactgacgactgcgcgaccgctgcgctttgcccggagtgtcatcacgaaatcgataacgggaataagctgaacagggaagagcgccggcagcttatggaccgcgcgattgttctgacagtgattgaagttgcccgccgcgggctggtggtgcccgcatga

SEQ ID NO: 395981 - DNA, 357 bp, Salmonella enterica
atgaaaatttacgaaattacgccgattggcaagcccagaatgactcagcgtgaccgatggcataaacggccagcaacagcagcgtactgggcatacaaagagcatgtcaggttgctgggcatccgtttgcctgagtcaggatatcacgtcactttcgttatccccatgccaaagagctggagtaaggcaaagcgtgcccaatatgtcggccagccacatcaacaaaagccggacaaagacaacctggagaaagctttgctggatgcagtgtttgacgaggatagccatgtctgggacggacgggttaccaaaatctggggagaaaccgggcaaatcattatcgaggaggccagatga

SEQ ID NO: 395982 - DNA, 141 bp, Salmonella enterica
atgaaaccagaactgatcgagatactccgcatgcgctggcagcgccttcgtatttaccgccgtccggggtcggtgttggttgactaccgcatcctgcgcaattttgttcgtatttatcagttcacaggatttactcaatga

SEQ ID NO: 395983 - DNA, 678 bp, Salmonella enterica
atgaacgctctatacctccagtatgtacgtgaacagataatggtagcgacagccgatttaagcggggagactaaagggcagcttttggcctggctggagaacgcgcaattcgacacgaaaaactatccccgaaaaaaacagcgtatctgggacaaggaaacagaacgctggataacgttaaataacccgccgatccccggcaagcagtcactggcgaaaggcagtgctattccgctggtaaagcctgtggaatattccactgcctcatggcgccgggccgttctttcgctcgatgaacactacaaggcgtggttgttgtggaattacagtgagaatacctgctgggaacaccaggtcgaaataacaagttgggcgtggtgcgagttcagacagcagcttgcagggaggaagatggctggcaagacagtggagcggctgaagaaacttatctggctggcggcgcaggatgtgaaatctgaattagccgggcgtgaggtttatcaatataaggatttagcggggctggtaggcgttaccgaaaagaactggtcagaaaccttcaccagacattggctcaccatgcgcaccattttaatgaggctcgatagatactcacttttaatggcagtaagggggcggtctgaacaggtagcgtccaacagatgcgcacttaattga

SEQ ID NO: 395984 - DNA, 573 bp, Salmonella enterica
atgaccactcaaatttccgtagaatccatttcgctgaccacccatcaaaatatccctgttattactaccgaattgttggcacagttgtacggtactgaagtaatcagaattcaacaaaaccacgcgcgaaatgcggaacgttttattgagggaaaacattttttcaaactggtcggtctggagttaagggagcttaagcacagactatctttaagcgagtccgtgaaaatcgctcgcaatgtacgttccctcatcctctggacagaacgcggtgcagcccgccacgcaaaaatgctcgaaaccgatcaggcatgggaggtattcgagagactggaggactgctatttcagccagaaacaacctgttccagcacgccagactcatcccgcaattccatttccaaaagaacgacgtttcattgtaacagtgtcccccgacggtactgctgatacccagcctttgcctgacgacgtatttgtcggcaaagtatcgagcatattaagtgaccttcgccagatggggtggataatcatcaaacgtgaccggctggttgaaacgctcgcgacttggtga

SEQ ID NO: 395985 - DNA, 294 bp, Salmonella enterica
atgtggcgaggaataaatcgcggcggcagtcagatgattctgactgcctacgaatacgacccggaaaccaaaaaatcaaagtcggtttaccttctacggcatcacagcaaggttaaacaaaccactcttgagcagaaattgtttgtcgagaacgacgcgtttggacggtttaaaccaatggtcgagcttgccgactttcctgaaagattaagcgagcgcgaagcgatgctgaagctggctgactggctgcaccgacttggcgtggcgattgaagataactggagtacaccatga

SEQ ID NO: 395986 - DNA, 324 bp, Salmonella enterica
atgaaaccagtaaccattgaaacagtacgtgagcgtctttcttatctggaggggcttaacgagcggggcgtgggtacggctgtttcgcagcagcaatttgaaacagcgtgccttcgtgaattgctgacgctactggatgagcaggaagccgcagagaagcgcatagcagaactggaggctcggcaaccgtacgggtatctgagagagaatgacggacagattcagatttccataggtagtaaccgaccacatgaccgttctggtggctatgctacgccgtggttcgcaatctataccgccgctggcatcaaggttaaggggtga

SEQ ID NO: 395987 - DNA, 1038 bp, Salmonella enterica
gtgagtggttcagacagcacggccaccaataccagtatcagcggcagcacagccgacggtaccggggtcagcatcagcggcaacctgaccagtgcgggcagcaccacggtgagcggtaactccacgggaagcggctcaggcgttgacctgtcggggaatgtcaccggcggcagcatcacgggtaatgccagcggaaccggcagcggcgtcagtgtgagtggttcagacagcacggccaccaataccagtatcagcggcagcacagccgacggtaccggggtcagcatcagtggcaacctgaccagtgcgggcagcaccacggtgagcggtaactccacgggaagcggctccggcgttgacctgtcggggaatgtcaccggcggcagcatcacgggtaatgccaccggaaccggcagcggtgtcagtgtcagcggttcagacagcacggccaccaataccagtatcagcggcaacaccgccaacggtaccggggtcagcatcagtggcaacctgaccagtgcgggcagctcaacggtgagcggtaacgccacaggaagcggctccggcgtacatctcaacaacggtaccgtcacagggggccttgttcagggcgacgctcatgacggcgcaggcatcaaggtgtccggtaatagcaccatcaatcacgccaccgttaacgggacaaccacgaacggctccggtttcctggtggacggcacgctgtcgcagagtccggattccatcgtcaatggcgcagtcaggcctggcgggaccggggaggcagtcaccagggtgacgccacctgccgaacaggatcgggcacagatgatgagccaggtatcacggcagcagcaggtcaccagcgagatggggcgcgaggctgttcgccctcaggcgggatatcagcctgcgccagcgcctgtagagatgcaactgtgtgacggtgacagttgtcagtccctgacgctggatgcgcacaaagcgtcgccgtcatcgcctttatcaacgtcggtaacctctccggttaatcgcccttaa

SEQ ID NO: 395988 - DNA, 708 bp, Salmonella enterica
atgagcacttcgttgttcagtaacaccccgacggtcacggtcctcgacaaccgcggactgaccgtgcgcgacaacgcgtattaccgccaccccgactccccgcatgtgaccagtgagcgcatcacccgccatcagtacgacgcccgcggctttctgacgcagagcgccgacccgcgcctgaatgaggccgggctggtaaacttcagtttcctcacggacctggccggcaacgtcctgcgcacgcacggggtggataacggtatcactgtggcgctgaacgacgccgcaggccggccgtttatgaccgtcagtaatatcggcactgctgacgacggcacggaagacgccagtcaggcaatgacccgcacctggcagtatgaaggtgtgtctctgccgggccgcccggtgggcattacggagcaggtctccggcgaagccgcgcgtatcacggagcgtttcgtctgggccggcaactctcctgaggagaaggcgctgaatctggcgggccagtgtgtcagccattacgacaccgcaggcctgatgcagactgacagcgtggccctgaccggcgtaccgctctccgtcacccgccgtctgctgaaggatgcggacaaccccgatatcgtggccgactggcagggtacggatgcctccgtccggaacacgctgcccggtgacgggggggttcaccaccctgaccaccactga

SEQ ID NO: 395989 - DNA, 408 bp, Salmonella enterica
atggacggaattagtcgtggcaatggccacattcgggttgtaagcgttaaccgtaatatcgccttttggggcatctgcagtggaaggggtcgtgttcagaatacccttactcactgccaccgtcatcgcattcggattgctgacactgccgtcttcggtcgcggtggtatgattcaactggtcaagcgtgatattcccgccactggtgttcacctgactgccgttcaatacctgaatacgcccgctgtcggtgcctgccgccagaaggctgacgtcaatcttcccggttgtggcactgatgttcgtaccgctgagggttatattctgaccggccgtgatgttcaccgccgcatcacctgcagccgtctcattcactctgctgccggtcagggtcaggtccatatctga

SEQ ID NO: 395990 - DNA, 237 bp, Salmonella enterica
atggcccccgccgccgagcctgccgagctgaaggtgacatttgtcaggtcggcgagaccaccgctgagcgtggtacctgtcagggaaaaaccggtattacccccggttgtcgtccccgtaatgaccgcctgtgaggcattcagcgtactttgggtaacatgcacaccggcaccggtggcagcactgccggtcagcatcagcctggcaccagcgctgagtgcggtgttctttatgtaa

SEQ ID NO: 395991 - DNA, 237 bp, Salmonella enterica; identical to SEQ ID NO: 395974

SEQ ID NO: 395992 - DNA, 405 bp, Salmonella enterica
atgaaatcattaaccgcagtgcgtaaaaaaagccctaatgatcccgttgagttcaaaatcaaaatggttgaactctcgcatcgaccagagatctccgtagcgcaactcgctcgtgagcatgggatcaacgataatctgttgttcaagtggcgtcagtactggcgcgaaggaaaactacgccctccttcaacaacagaaaacagtgtgcctgagctgctcccgataacacttgatgccgaagatgttgttcctgcaacctcctcactgtcacaacctgtcgctgctgcggcacctgaatcactcaatatctgctgtgaagtgacgttccggcacggatcactccgtctgaatggtgccatcagcgaaactatcctgaacctgctgatacgggagctcaaacgttga

SEQ ID NO: 395993 - DNA, 348 bp, Salmonella enterica
ttgatcccattaccagcagggacaaagatctggctggtcgctggtatcaccgatatgagaaacggcttcaacggcctggcggcaaaggtgcagacgacgctgaaagacgatccgatgccaggtcacgtttttatcttccgtggtcgtaatggcagtcaggtaaagctcctctggtctaccggcgatggactgtgtctgctgaccaaacggctggagcgcggccgcttcgcctggccgtcagcccgggatggcaaagtgttcctcacgccggcacaactggcgatgctccttgaaggtatcgactggcggcagcctaaaagactgcttacatccctgactatgttgtag

SEQ ID NO: 395994 - DNA, 1047 bp, Salmonella enterica
atgaaagaactaaagataatagttgataaccttgctattaaaggaggtgtagagaatgttgttgtgtccattgctaatggagtggcatcaaaaaataaaaaagtaactgttgtgtgtgttaaaaaatgtattcctgcgtttaaaatagatgaacgtgtttctgttaaattcttaattacaaaattgacaagaataaaaaaatattacagccttatttgttactttagaaaggaaacgagtgaaggtgatattatttatacaaattcagttgtcaatactttattagcaataatatttgcttcgaaaaaggctgatatttatgcttgtgatcataatcaatataaagcagtaaataaattttgggcatggttaagaatactattatataggcgtttgtcaggagtgattgtacttacaaactatgatcttgaaaagtatttgaggttaaattctaattcagttgtatttaataacccggtaaatgataacttcttcaatattcaatgtcctttagataaaataaaagacaaatatattttaaatattggaagacttgaaattcaaaaaggccaagatttacttttgcaagcatggaaattggtggataaaaaaggattttccttgtggatttgtggagatggtagtaaaaaaaaggatttagagaatctagtggcagatttaggattaacttcaagtgtaaagtttttaggaaatcgagatgatataaatgttctgttatatcatgcttattgtaatattctttcttcacgatttgaaggtaagccagttagtctgatcgaagctaaggttattggatgtcctagtatctcatttgattgtaaaacagggccatcggaaataattatagataaagaggatggtttactggttgaaaatggcaatatccataagcttgcagaaagtatacaatttatcattgacaatccaaatgtaagaaatttattcgcccaaaatacgcgttatgatcgggacaaatactctagtgataccattactaatcagtatattgattttttcagactataa

SEQ ID NO: 395995 - DNA, 456 bp, Salmonella enterica
atgatttttattcttatcatgttgtcattgattatgattacaataataatcatatttcccgaaataattgattccattttagtgagaatggatactttgcaatcgggtaacgatggtagcacaaatttaaaatatcaattcataaagttttggctagaaaatgaacagcgcatgttatttggcaatggaatggttggatattatgatggtaagccaaagttttttgaatcgagttttgatctgacatttataatgacaacgttcacaactttcggggttttattttctataccaatgttatttacattatattacctgttattaaaaggtaggggaaagaaaaaaaacttattattactattattgagtttaaaaataacaacagttatctttccttatttttgggtgttgagtgggattatatttacttatgaaagaactaaagataatagttga

SEQ ID NO: 395996 - DNA, 390 bp, Salmonella enterica
atgccgactcttgatgtaactgatgttcttttcgaccccgatttttgcgacttcaacttgtgggtaacgcgtcgggtacagacagtggatgaagacggaattggcagcgacagcgaagttaaaacgcagtttgccggggttgttaccgttgaccgttcactggaaaaccgccgcatgcagtccgggcaggttatcagtggagcaatccttattgtgaccactgagcgactgacacaggggcagacggggcgcgatgccgatattgtgacgtatcagaaccgggattaccgggtgacttttgttgacccgtacaccgcatatggtgccggctttgtacaggcgcattgcgagctgctgccgttcgatggaggatttcccgttgagcaataa

SEQ ID NO: 395997 - DNA, 549 bp, Salmonella enterica
ttgagcaataattccagtacggagccgggatggcttacacctgtcagcggcgatccggattatgacgaggcgctcgacaggttgttaagccagtgggtacgcaacgtttccggtttgccggctggaatggttcgcccccgatggcagaaagatcagccgccactgctgccagttgaaacgaactggtgcgcgttcggcgttaccggatggcccatagataacagtcccgcattcactaaccagactgaagagggcgctcagctctggcgacatgaaacttttgagtgcatggcgtcattttatggcccggagggcatgacgtttgcgtcacgttttcgcgatggcatatctgtcccgcaaaacaacgccgaactgaacgcgcttggcctgtccatgggggactataccggtctgacccctttccctgaacttatcaaccagcagtgggttcgccgttacgacattactgtgcgccttcgtcgcaaggtggtgcgcgagtacggcattaaatcgctggtggatgcaccagtttcattcttcggagattaa

SEQ ID NO: 395998 - DNA, 393 bp, Salmonella enterica
atggcgatcctgaaacaaactgaagcgctctccgggcatctggcgtttattttccccggcgaatacgaccaggacaagtgcatgagcgacaacaccatcaacaaggcattgcgcgtgatgggctacgacaccagaaaagagatctgcggtcacggcttccgggcgatggcgtgcagtgcgctgagtgagtcgggacggtggagcaaagaagcgattgaaaagcaaatgagccatcaggaaaggaacagcgtgcgtgccgcctatattcataaggcaaaatatctggaggagcggatcgctatgatgcagtggtgggcggattatcttgataaaaatactgagcgatatgtatcgccttatcagtatgcgggatatcagagggaagcgtcataa

SEQ ID NO: 395999 - DNA, 408 bp, Salmonella enterica
atggacggaattagtcgtggcaatggccacattcgggttgtaagcgttaaccgtaatatcgccttttggggcatctgcagtggaaggggtcgtgttcagaatacccttactcactgccaccgtcatcgcattcggattgctgacactgccgtcttcggtcgcggtggtatgattcaactggtcaagcgtgatattcccgccactggtgttcacctgactgccgttcaatacctgaatacgcccgctgtcggtgcctgccgccagaaggctgacgtcaatcttcccggttgtggcactgatgttcgtaccgctgagggttatgttctgaccggccgtgatgttcaccgccgcatcacctgtagccatctcattcaccctgctaccagtcagggtcaggtccatatctga

SEQ ID NO: 396000 - DNA, 561 bp, Salmonella enterica
atgacgtcaaaagccgctaaaatgactaagttccctgaaaattattataagtcaggttatctatggaaaacgttatttccagtctatgtagatgagagtaattttgtaggttttcttgatgaggttctagaaaatattaattatagggaatcgtcaggtggagaattggttggctatatgaactgttcagaaccattaagaatgattagagtttctgttcttcaccgagatggaaaaataaattcggtctatccttcatggtctcaaccgaatactggcaacaatggaaagccgttctcatattttgacaatataggtcacttcattgcatcttctacagtgctttacgacagaacagaagatcataacctcttcaataatagtatgtttcttgatgcaagaaacataaaggacatatgtgctcgtacgcctgagatttttttagagagaacctctccttcaaatgatctcgatgagtggagaagaagtagggtgagggagttgaaggcttatgctgccggggctaatgaggacgacatatatatcttactgatggggtga

SEQ ID NO: 396001 - DNA, 189 bp, Salmonella enterica
atggagtcggtgttgtatttaaaaacggggggtatacagccaatgcaacatcgggacatattgatgtttatggtagaggcaagactattggtggttcaagtttttatggtcaaactaagggagatattcattttcaaggggagagcaaattcaaagcaaaagaagggaatatatcggggaggaaagtaa

SEQ ID NO: 396002 - DNA, 516 bp, Salmonella enterica
atggcatctgaaagcattctccgggaactggaggacacccagctggccattgagctgatatcgctcggcgcccggatgcagttactggaacacagtgtcaggctaagcaggggtagaatgacccggctgtacagagagctgcggggaactcccccaccaaaaggcatgctccccttttcagccgactggtttatgaactgggaacacaacgttcactcatccctgttctgcaatatattcgactgcattaagaaacagtctcccggtgagccatcaataaaaatacttatccaggcctatcgcgcatatttaaaatatgccggtaatacagagacactctccctcacccgggcgtggatactgaggcggttcgttgattcaggaatgctggattataccccctgctgcaaatgtggcgggaaatttataacccatgcaggtgaacccgtacatggttatcagtgtgtaatgtgccatccgccatcacgggcagtaaaaaaagccgtagcggaataa

SEQ ID NO: 396003 - DNA, 480 bp, Salmonella enterica
atggaacaacagctacctttatttgcagccactctgccactggccgcccaacaaaccatccgggaggcgctgactctgctggagcgtcagttgcgtgagccaggggcagcatttacctccagtcatgccgttcgtgactggatgcgcctgcaactctccacactggagcgtgaagaatttgtggcgatcttcctcgataaccagcatcacctgattactcacgaaacgctcttcaccggcaccgttaaccgcacgcaggtccatccccgcgaagtggtaaaggccggtctgaaacataacgcggcagccgttatcgtcgcccactgtcacccatcaggcctcgccgaaccgggtcaggctgaccgtcagataacagagcggctcagacaggccctgaacctggttgatatccgcctgctggatcacctggtggtgggtgggatggatattgtctcattcgctgaacgcggctggctttaa

SEQ ID NO: 396004 - DNA, 459 bp, Salmonella enterica
atgaccacaatatttaaccctgaactccccctcccgccagatgaaactctcatcaccgccacgcccgtagaggacgaggaccgccctgacttctggccccgccacttccggggcattccgcagtggatattactggagccccgcatcttcgcatggacggaccgcctgtgcgcggactaccgcggcggtatctggcagttttacacgctgagcaacggtggcgcgtttatggccccggaggcgaatgacggggatgacgtctggtcactgtacaacggcatgaacggcaacagcgcagacatgagtcctgaggctgccgggatcaccgcctgtctgctggagtacagccatcacgcctgtcgcacaaacagcgacctgatgaccgcgcactattatcgcctgcgggattatgcccttaaccatcctgaatgcagcgccatcatgtacatcaccgactga

SEQ ID NO: 396005 - DNA, 459 bp, Salmonella enterica
atgaccacaatatttaaccctgaactccccctcccgccagatgaaactctcatcaccgccacgcccgtagaggacgaggaccgccctgacttctggccccgccacttccggggcattccgcagtggatattactggagccccgcatcttcgcatggacggaccgcctgtgtgcggactaccgcggcggtatctggcagttttacacgctgagcaacggtggcgcgtttatggccccggaggcgaatgacggggatgaggtctggtcactgtacaacggcatgaacggcaacggcacggacatgagtcctgaggctgccgggatcaccgcctgtctgctggagtacagccatcacgcctgtcgcacaaacagcgacctgatgaccgcgcactattatcgcctgcgggattatgcccttaaccatcctgaatgcagcgccatcatgtacatcaccgactga

SEQ ID NO: 396006 - DNA, 480 bp, Salmonella enterica
atggaaaaacagctacctttatttgcagccactctgccactggccgcccaacaaaccatccgggaggcgctgactctgctggagcgtcagttgcgtgagccaggggcagcatttacctccagtcatgccgttcgtgactggatgcgcctgcaactctccacactggagcgggaggagttcattgtgctgtggctcgataatcagcatcgactgatagctcacgaaaccctgttcaggggcaccatcagccataccgaagtccatccccgggaggttgtgaaatcaggcctgaagcataacgcggctgcggcgcttgttgcacactgccacccgtcgggtgaggcagaagcgagtaaagccgacagggtgattacagagcgcctgaagcaggcgctggagctggttgatattcgtctgctggaccatctggttatcggtggaatggatattgtctcattcgctgaacgcggctggctgtaa

SEQ ID NO: 396007 - DNA, 492 bp, Salmonella enterica
atgaagctgtccatgaccgtggaagccagtgcgattaacgcccgggccctcaacatgggccggatcgtcgtggatatcgacggtattgaactcgccagcctgatcgatgtggtctgtgataacgggtattcacttcgcgttgtcgacgggtctgataaacaggccactgaagccacgctgccaccgtttacctccctgccgggcatctgctgctgtaccacccatatcaccgaagaggataacgctatcctggaccaggcctcacttcagcagcacgacggcggtaacagtgactgggtactgtacaccggctacggatttttgctcaggctcaatgcccgccgataccccgcgctggagctgaaacggatgggaatgtcgaaggcctgccgccggttagtggtgacgcttattcgtcgttattccatcagcatcctgcaccttgatgccttcggtgaactcctgcccggctttgaggttttcgactggtga

SEQ ID NO: 396008 - DNA, 378 bp, Salmonella enterica
atgcaaattttaccctcactccggcccggagcggcatcgtcacatccgtcccccgtctccgtatggcagaccctgctgtcatatctgctgcaacagcactacgggctgacgctgaacgacaccccgtttgctaacgacggcgtcattgagcagcttatcgacgccggcatctccctgtgcgatgcgctgaacggtatcgttgagaaatatgacctggtccggactgaccgcccgggattcagtattgcggtgcagtctccgttcattacccgtatcgatattctccgcgccagaaaagcctgcggcctgatgaaacgtcgcggctacccggccgttaccgacatcaccaccggcagatactgtggggtggctcgatga

SEQ ID NO: 396009 - DNA, 267 bp, Salmonella enterica
gtgaaaacagctgatggtaccgacgtaagatgtatttttattgatgatcctattcattcgatggactccattaatgtcctttctaccatcgatatgttgcgtacaatttcaaagaaattcgataggcaaatcattctttcaacgcatgatagaaacttcttcgacctgctgcaggagtatctttctaaattcattgagctggaaacatttggaaaagtcatgtctacaaacgtacgttctgaaaatgatgtagatttggttgattag

SEQ ID NO: 396010 - DNA, 249 bp, Salmonella enterica
atggtgcctgagctgtacttagcctctggaatacgagtctcactggacggcgttgatattacaggctctttctgtaacgtagttccgctagttccgctagttccgctagttccgctagtttcactaattgcaggtatccccgtattgtcggtggaatcatttcccgtggagccgacggtttcagttatctcatctgaattattattagatgaaccgggggttcctgatgtggtgatactcacgacgtga

SEQ ID NO: 396011 - DNA, 735 bp, Salmonella enterica
gtgcgcacgctgtctgacgaaaacagtgccctggcggcccgtactgagcagggtgccgccgctgtggttcagaccgccgccagcatggagcagctcagcgccaccgtcggcctgaacgccgataatgcggtcaccgccagcggaatggcccgtgaagctgcagcatcggcacaggacaccggtgaaatggttgtccgggtgaaaaacaccatggcagaaacagaagccgcctccgttaaaatcaacgatatcaccaccatcattaattccatcgcgttccagaccaacatcctcgctcttaacgcctccgtggaagccgccagggccggagagcagggccgtggcttcgccgtggtggcaaccgaagtcaggaatctggcccagcgctgtgccggctcagcaaaagatattgccgcactcatcgcctccgccaccaccctgatacaggaaggcgttacactggcggggaatgctcagacttccatgaacgcaatgacggactccatcaacaacgtctcccgtgttatcggtgaaattgctgtgagttctgaagaacaaagccggggcattcagcaggcccggatggccgttaatgaagttgaccgcataacccagcagaacaaccagatggcagagcagtccaccacgctggtgagcgccctgcagcaactgaccgaacagttaaatcacgaagtcgatttattcaggctgccggataacaccctgcagcactga

SEQ ID NO: 396012 - DNA, 261 bp, Salmonella enterica
atggcccccccctctaccgaaccggtaatatcgaccccagaacccgcgccctgcgttgagccacttacctcaccggttccgctcaggttgccgctgaccacagcccccgtgcctttttcagaggtgccggtgatgttaccgttgttgctgacgttgccatcaatcaccgctccgctgccgttggtggagttgccgctgacggtgccgtcggtaaggtttgagccgttgcccacatgggcgccggtgccttcactggactga

SEQ ID NO: 396013 - DNA, 234 bp, Salmonella enterica
atgtcgagccccgcacctgaaccctgcgccgagccgctcacatcaccggtaccgctcagattaccgctgaccgtggtgcctgtcccgttgccggaagtaccggtgatgttgccgctgttgctgacgttgccgtcaatcaccgccccgctgccactggtggagttgccgctgacggtgccgtcggtgaggtgcgtgccgttgcccacgtgggcgccggtgccattactggactga

SEQ ID NO: 396014 - DNA, 243 bp, Salmonella enterica
atgagccggattatcgtgcaggactggcagtggggtatcagcaaagtaccttcagctggacgtcaaagggaggaagttatctctatgacaatggtactgataccggaagttttttacccggtcagtctgttattggttacagtcagacgtttaaactgccctggattggtattgccggaacttatcgtttccgtgattttgaacttaatggtcttttcaaatacagcaaccagggtaaggtga

SEQ ID NO: 396015 - DNA, 342 bp, Salmonella enterica
atgctatcaccgtttatcccatcaaataataacgtattcgtatgcaaagacatttatattaatttcctgaaaaatatattttcaaaaattttaggagattttttacttgacattaactttattgaacacacttacgatctttcctctttgatctacaaagtaaaaaatggcgacggccatgcattgctcaccaacaaattagcacagtactataacctcaatggaataaaaaaaacgccaataaaagaatataacagtcgcttagtcatttatcatgatgcgtctgttctggatagcagacctttgttaaaattgaaacaaatacttaatgattttatttag

SEQ ID NO: 396016 - DNA, 402 bp, Salmonella enterica
atgaaaattaaaaaagtcattgtagaagggttccgtgcttaccaaactaaagaagatggaacttttgacttctcaacgcccacaggtgaatgtgcaaacttcgtatccctgtatgctccgaatggtttcggcaagacctcgttttatgatgctgttgaatgggcattgacaaacaatataggtagatttgtaagagattatactagaacggaaaatgacaatctttccaaatcgcaaaatcaaccgagcaaaaaacagtacatcctgcggaaccgctttatcaaagacacagatccttctcgtgtcacagttgtgtgtgataaaggtgaatcgagagtaaaaaatgtgccgaaagccaaaagtgggagccgagattatcttttcaaaagagaggcgacataa

SEQ ID NO: 396017 - DNA, 237 bp, Salmonella enterica; identical to SEQ ID NO: 395974

SEQ ID NO: 396018 - DNA, 288 bp, Salmonella enterica
atgctgaccccagtaccgttggaagtattgccgctgatactggtattggtggccgtgctgtctgaaccactgacgctgacaccgctgccggttccgctggcgttacccgtgacgctgccgccggtgacattccccgacaggtcaacgccggagcctgtccctgttgagttaccgctcaccgtcgtgctgcccgcattggtcaggttgccactgatgctgaccccggtaccgtcggcggtattgccgctgacggtcgcgttattcagcgtggtgtcatcccccagatga

SEQ ID NO: 396019 - DNA, 372 bp, Salmonella enterica
gtggcagttctccggcgtgaggcggtcgagggtgccccggagtttttccaggtcatgacgggtcagcggcacatcggtacagttctccacctccccggcgttggcatcaatccagttgagcagggcgttgaacttgcggtaatagccgacggcctcatcctgctcccggcgggtggtgtctgcggtggtgtcggccggacgtttaatgaaatacacatcgagtcccatgaggaacctcctgtttacgttgagataaatgaaaaaggccatacacgggagggacatagcctgtggtgtctgtcggtgaataagcggagtggggggatgttgttaccggcgatatcacaggtcagcaaggcaggtctgccatga

SEQ ID NO: 396020 - DNA, 606 bp, Salmonella enterica
atgaaggtcaacccccgctttctcagtacgctcgcggagatagcgcaccgcagtgttcagcccgttcagttttgtttctatatgggctttgctcaggggataacgctggactatctgcgtaccgctatccatgccgtcctgccaacggctgaagtcaatgctcatatgccggtgcaggcttatcagcacgcgcttaacagctgtgaacttttcgttaatccgttcccctacggcaacatgaacggcgtggtggatgtggtgcgtcagggactgccgggcgtatgcctctcagggcctgaggtccatacccatatcgatgaggggctgtttcgtcgcctgggactgcccggggcgttgattgcgacgaatacccggacctatgtcgatgccgcgctcaggttgactgaagaccatgactaccgtgaaaccctgcaagcccggctgctgaaaaatgatactgaagccaccttgtttgagggaacgcctcaccggtttgtggaggccgtgcttgcccttcagtcctcacgttcgacccgcggggcggggggcaaagcagcggcgagacatcacgagagcgaggaggttagcgatgcgacacgtctttga

SEQ ID NO: 396021 - DNA, 606 bp, Salmonella enterica
atgaaggtcaacccccgctttctcagtacgctcgcggagatagcgcaccgcagtgttcagcccgttcagttttgtttctatatgggctttgctcaggggttaacgctggactatctgcgtaccgctatccatgccgtcctgccaacggctgaagtcaatgctcatatgccggtgcaggcttatcagcacgcgcttaacagctgtgagcttttcgttaatccgttcccctacggcaacatgaacggcgtggtggatgtggtgcgtcagggactgccgggcgtgtgcctctcagggcctgaggtccatacccatatcgatgaggggctgtttcgtcgtctaggactgcccgaggcgttgattgcgacgaatacccagacgtatgtcgatgccgcgctcaggttgattgaagaccatgactaccgtgaaaccctgcaagcccagctgctgaaaaatgatacggaagccaccttgtttgaggggacgcctcaccggtttgtggaggccgtgcttgcccttcagtcctcatgttcgacccgcggggcgggggacaaagtagcggcgagacatcatgagagcgcggaggtgagcgatgcgacacgtctttga

SEQ ID NO: 396022 - DNA, 324 bp, Salmonella enterica
atgaaaaagctaaccattttattctgttgtgtacccgcacttttattttcatgtttaacctgtgccatgacgccggataatacctccgccatcatacgtaaaaacgcacagaatacagaatcccatccggccctctccgttgcggaaaacaccccgtatattatcgcgccggacgagaacaaccagattattataccggcgggtaaggtactgataatgccagaaaatgacgcccgaagcattgtcacgctcgcggtgaattacacgggcatacaggaagcgaacagaataaccaaagtcagtgacggatttattctggaataa

SEQ ID NO: 396023 - DNA, 204 bp, Salmonella enterica; identical to SEQ ID NO: 209170

SEQ ID NO: 396024 - DNA, 363 bp, Salmonella enterica
atgctgaatatcagcctgaagctgccagaggttacgctgctggattgcctgcagctcatcagcaatacggtgaagcgcttcgtcctgaggtgcatgctgtctgatgtgttgtgcggctccgggctgatagtggtacatcccctcaaagcaggctccgtccccctgacagcagaaaccggaaaaccagatacaggctttttcgtgggatctgccgccggtggtggtgaaggtacgtgttttgagtctcacccccaggatgttgcaaatcagggtgaaatcctcataaacagcgtcgtaccactcatactccagcccaccctcctcgcagtaccaggcgcgtgccttctcgcgggcagactctga

SEQ ID NO: 396025 - DNA, 375 bp, Salmonella enterica
atgaaaagaaaaacaatgggatggcttatcgtttttcttctatttatagtttacatgctcaactatatggatcgttcagcattgtcgataactgcccccttgatcgaaaaggagttaggatttaacgccgcggagatggggatgatcttcagcgcgttttttatcggatacgccctgtttaattttattggtggctgggccagcgataaagttgggccaaaaacggtttttctcatcgcagcgttactatggtctgtattttgtggcttaactggtttggtcaccggattgtggacaatgcttatcgtgcgcgttcttttcggtatggctgaaggaccggtcagcgctgccggaaataaaatcatcaataactag

SEQ ID NO: 396026 - DNA, 204 bp, Salmonella enterica
atgcgtactggtttcttgttaactcaaggtagccaagcccgccgcctgatgccgccgttctcattgctgtgttttcagccaggcggcaatatcctgtgtcggcagatgatgttgtgcattccaggtgtcactcatcggccaccacataccgtcaccacgcgcgaaggcgacgcgatagcgcagcattgggtcatgcggatgtaa

SEQ ID NO: 396027 - DNA, 414 bp, Salmonella enterica
gtgcctttttcgccttttgtgtcttccattggtttattaacgcaaaccggcgacagttctcgcaaatcctttatctgtggtagcgcgctgtgtctgctggttgccattataacgccgttaacccgcttattttgcgctattccactggcgatcagcagcgccgttatgctggtctcttatttacctttactttattccggtttggtttttagccagcaaattacgtttaccgcgcggaatatttatcgcctggcgttaccgctttttgtcggcatttttttgatggggcttcctccggtctatttacaggatcttccactgatgattcgtcctctgcttagcaacggattactggtgggaatcttactggcagtgcttatggaaaatcttattccgtgggaacgcattaaataa

SEQ ID NO: 396028 - DNA, 1086 bp, Salmonella enterica
atgatgaatattttactggaagaacttccccatcaggaacaggcgttagcggcgattctggcgagtttcaccggtatcgatcacgcgcaggccgatcataatcactatgctaatccgctgattaaggaacgttacgacgataaggccaatattgacgttaaaatggagaccgggacgggcaaaacctatgtctatacccggttgatgtatgaactgcatcagaagtatggcctcttcaaatttgtgctggtggtgccgacgccagccattaaagaaggcgcgcggaactttatcaccagcgattacgccagacagcatttttcacagttctacgaaaatacgcggatggaactttgcaccatcaacgccggtgattttaaagtaaagtcggggcgtaaaaattttccggcccagttattaagttttactgatgccagccgtcgtgatagccatacgattcaggttttgctgatcaatgcgcaaatgctcaattccgccagtatgacgcgagacgattacgatcaaacgctactgggcgggctgacgtcgcctgttaaagggctgcaaatgacgcgaccggtggtcattattgatgaaccgcatcgttttgcgcgagataacaaattttatcgagcgattcaggccattcagccgcaaatgatcgtccgctttggcgctaccttcccggatattgtcgaaggtaagggtaaaaataaatgtgtacgtaaagattactatcgccggcaaccgcagtttgatctcaacgcggtggacagttttaacgatggtttggtgaaaggtattgatatttattacccgaatctccccgaagaacaggccaacaatcgttatatcgttgacagcgtcacggcaaagaaattaatcctccgacgggggagcaaaattgccgaggttggcgtgggcgaaaatctcgccgatgtcgatgcaggatttgaaggcagtatcgaatatgccggcagtaaaatgttgtcgaacgatctggagctggaggcagggatggcgctggtgccaggaacctttggcgcgagctaccagaaaataatgccccgcgtattaagaccttaa

SEQ ID NO: 396029 - DNA, 207 bp, Salmonella enterica
atgctgggattcctcacccgcaccactgcgctttttaccgctggttttacgttgctgacggcattgatcttccatagcaattttgcagaaggtgtaaactcgctgatgtttatgaaaaacctgaccattgccggcggattcttattactggcgttaaccgggcctggcgcgttcagccttgaccgtctgctgaataaaaagtggtaa

SEQ ID NO: 396030 - DNA, 573 bp, Salmonella enterica
atgattagcgcatttgatatttttaagattggcattggaccttcaagctcccataccgtagggccaatgaatgcaggaaaatgttttatcgatcggctgatcgacagcggcgacctgccgcgaacgacgcgcatcacggttgatctttacggatcgctatcgctgacgggcaaaggccacgcgaccgataccgccatcattatgggcctggcgggcaatacgccgcaggatgtcaatattgatagcattccggcgtttatccaggaggttgcccgcagcagccgtttatcggtggcgggtggcgcgcatgtggtggattttcccgtcgccgacagtattctctttcacgctgaaaccctggcgcgccatgaaaacggtatgcgtattaccgcctggaacggacaagcgccgcttttacacaaaacgtattactctattggcggcggctttattgtcgaagaggagcgttttggtcagtcgcacgacgtagaaaaatcggtgccgtatgattttcattccgccagcgaactgttgacgctgtgtgaaagacagggctctcggtttccggcctga

SEQ ID NO: 396031 - DNA, 561 bp, Salmonella enterica; identical to SEQ ID NO: 379871

SEQ ID NO: 396032 - DNA, 495 bp, Salmonella enterica
atgatcgatggcagcgtcacggtcgggccgaatgtggtgctggcgcttaaacgcgaaggctaccgtaagcgcgacgtttccttcaccgacaccctggagattttccgctccgccggcattcgccgcgtactgcaaaaccatctgctttccgggctgggcgagatgaaaaactcgctgtgcaaaagcggctatttgcggcgagtacaaaagtattgccccagcctgaccgtcaacgatctccagccctggccggcaggcgtgcgggcgcaggcggtttcaccggacggcaaactgattgatgattttctgtttgtcacgacgccgcgttccattcacacctgtaacgccccctccccggcggcgacatccgcgatacctatcggcgcgcatatcgtcagtaaagttcaggcgctacgcgcaagccagagcaaccccggacgtacgctgcgtgcggcacgcagcgtggacgcattacacgccgcatttacccgttaa

SEQ ID NO: 396033 - DNA, 930 bp, Salmonella enterica
atggatgaaagaccattaacaagtcaatatttatttaaacaatcacttagaatacctgtattctcagcgatatactttggtatattttcttggcttggacattcacctcaatttgatagtgatggctttaataattttattgcaattagcaaactccccatcgccttgctttctttgtccataccatttgttgctgtcgtagcaaacatacaccgtacagttcagacaaaccgacagattgaggaaacaaagcaaaagaacctatctgatagccactatagccatctaaagttcgtcactgattatttcaccaatttacctagtaaaatcgttaaacgcgatcgttattataacactaaagaggtgtgttataagattaactacccaatacatctatatagatacattttcaaacatagttcgccagagaatggccgacctaaaaacacagataaagaatacatacaggaagtaaataatcactggattggaatattaaaaaacctagagaagataaattcccctaatcgtggttctcaacttcacgaagttttaatccgtcaaatgcaatatcttcattcaattgaaaaacatttatcaaaacttaatcgaatgctttgcctaactccgatagagttaaatgaacatgcaactttacactctaagggatatgaaattaccactaatttcatgtctagcactgaacttggcgatactattgaaacttattttaaatttaccattgatattcttgacattaccgataatttcctttcattcaaggatgatggcatgtccgggcaaattattatacttgcaagattactaaaagataataatccagctatttttcatgagattataacaaataaagggaaggctgacccttcgctgacctacaatggcgacacattggcggcagagcattaa

SEQ ID NO: 396034 - DNA, 1020 bp, Salmonella enterica
atgactgcaactacacatcagaagcctcttaatgctttctttcgccgagtaggggcgcttgataggcgtttagccgaagggctatcaaagttacttcctgattggtgggatgattcgcttaatcattcagcgagcattagccagcaggtaattttaggtttggcaaagtttgcgaatctggatttggcgacggtcgtcaatcctactgctgaattgagattcaatgagtcagtaagaaagtataaacacgcggcaaataaatcggtcgaagagttgcaggctgctacggctgtggttgatggtatggcaaaaatcgcagcttcagttgctaaaagaccatatatggggctttcatctgctcgtgatatacgtgagataatcctttctcaaggaaagccttgggtagatttcctgtcactcttagaatttgcttggtctgcgggtatccctgttttgtatatgacggatattcctgccaggaaaaagatggatgcagttgctataaaggtttctgatcgcccagttattgctcttacaaaaaaacataaacatgcaagtggtattttgtttagtttggcgcacgagttagggcatatcgcttgcggccatcttgaggataactcattgttaattgatgaaaaaatcaatgaagatgatgtcgaaaatcctcaagaaatagaagccaatgcttacgcaatagaactccttaatggcagaccagatgctgcattccatagcagtggttggatttctgctgaagtgctggcttcggaagctttgcgtatagggcgtcacaataaggttgatcctggccacgtagctttaaattacgccaaaacaatggggcgtacgcatacagggaattttttccctgtatgcggaagtgcattaaacatactttatcctcgtttggattggatggagcatgctgccgcaacttttcttgaatatgttgatgaagagaaggtatcggaagacaagtttgaaatgttatgcagaatgaacaacattgaggtgtaa

SEQ ID NO: 396035 - DNA, 639 bp, Salmonella enterica
gtggctgtattacttgataatgatgtagtactgaaattggctcaacttgatctgcttgctgatggttgcaaattacttacaagtaagtacggccaactttatgttttagatacgcttttttatcagttacgaggtaagtcagctcttcgtcgttatggtgctgaggcattggaacgcgtacagcaatgcctgtcagagagggcatttttgccgtttgaagagttaatcacggatcaacgtttgattgaattacagaacaatttcgagaatcttgatgaaggcgagatgcgtttgcttcaaggtttaataaataatcatgatctgcttctatcaggcgataaacgctttttgaaggcaattgctgagactggatttatagaggaagcatctctcaataatcgttttgtatgtttagaacaagtggtttgttttcttatcaatgagttatctcttgatcatgtcaacgcaaaagcctcgattgcttttcagggtgaatgtagagttgatagtgctttaagaacatgtattggttacgggcgtacgcatgagcacgttatggaagggatatttcaccaacttcgtgggctacctgaaactcttctatcaatagaggtgcattggagtttgactcaaccttaa

SEQ ID NO: 396036 - DNA, 387 bp, Salmonella enterica
atgaaatattattcaccttcaattaatggatttcccgaacaaaagactgatgacagtattgagatcagtgaagaggtctggagaatacttcttagtgaaatttactcaggccgggagttatttaacgatggcggcgtacccgctacccgtgtgccgcaacctacgcaagaacaagtaattgcagccgcagaaaatgagcgccaacgattgctgaattatgctgataccgtaatgctcgactggcgtacagaattgatgctgggtgaaatcagcgacgccaacagggctaaattgtcggcgtggctggcttataaaaatcaagttaagtcggttgatgtgacaactgaccctgagcatgttaactggcctattcccccggaggcgtag

SEQ ID NO: 396037 - DNA, 3078 bp, Salmonella enterica
atgagtgataataacctgcgcctgcaggtcattcttaatgcggttgacaaactcacccgcccattccgtgctgcacaggccagttcgaaagagctggctggcgcaattcagaatacccgaaacagcctcaaagaactgaataagcaggctggcagaattgatgaatttcgcaagacgcgctcgcaactagccataacagccaacaacctgaacgcagcccgcgaagaggcggcaaaactcgccacacaatttgctgccactaacaggccaaccgccgcgcaggcaaagttattcagtcaggccaaaacacgagtacaggaacttcagcagacctataacggcttgttgggggcggtccagagacaacgtcaggcacttaaagaatcagggattgataccagacaactcagtagtgcccagcgagaacttaagaaaaatgccgaagaaactcgtcaggcactagagggccagcaaaaagcacttaaacgtctgggtgaacaacaggcacggatgaacgctgccagagaacaatactcaagacggcttgaagtgcgcgatcgcatcgcaggagccggagccaccaccacggctgcagggctggcaatgggcgcgccagtgatggcggcggtaaaaagctataccagcatggaagatgccatgaaaggtgtggcaaagcaggtcaatggtctgcgtgacgataatggcaaccgcactgcgcgtttttacgaaatgcaggatgccatcaaagctgccagtgaacagctgccaatggaaaacggtgctgtggacttcgccgcactggttgaaggtggtgcgcgcatgaatgtggcaaaccctgacgacagctgggaggaccagaaacgtgacctgctggccttcgccagtacggcagcaaaggcggcaacagcctttgagctgccagcggatgaactgtcagaaagtctggggaaaatcgcccagctctacaaaataccaacccgcaatattgaacagctcggtgatgcgctgaactatctggatgataacgctatgtcgaaaggggcagacatcattgatgtcatgcaacgcctgggcggtgtggctgatcgtctggattatcgtaaagcggcggcgctgggttccaccttcctgacactgggggctgcgccggaggtcgctgccagtgctgccaacgcggtggtgcgtgaattgtccattgcgaccatgcaaagcaagagtttctttgaaggaatgaatctgctgaaactcaatcctgaagtgattgaaaagcagatgacgaaggatgcgatgggaactatccagcgcgtactggagaaggtgaacgcactgccgcaggataagcgcttgtctgccatgaccatgttgtttggtaaagagtttggcgatgatgcggcgaaactggcaaacaacctgccggaactgcagcgccagctaaaactgacagcgggcaatgatgcgctcggttcgatgcagaaagaatccgacattaacaaggactcactttctgcgcagtggttgttggtcaaaaccggagcgcagaacaccttcagcagcctgggcgaaacgctgcgccagccgctgatggatattctgtacacggtgaaaagcatcacgggggcgttgcgtcgctgggtggaagctaaccctgaactgacgggcacactgatgaaagtagccgcggttgtggctgctgttactgtgggcctcggcaccctggctgtggtgttggctgctgtgctggggccgctggcagtcatccgtctgggattctctgtgctgggtatcaaaacgttaccttccgttacggcagcagtaacgcgaaccagcagcgcgttgtcctggttggcaggcgcaccacttgcactgctgcgacgcgggcttgcttcatcgggcaacgccgcaggtttacttactgcaccgttgtcgtctttgcgccgcacggcatcactgacgggaaatgtcctgaaaactgtagcaggtgcgccggttgcacttttgcggtctggattatccggtttacgtgctgttgctgtgatgtttatgaatcctctggcggtactgcgcggtggactggcctccgcaggcacggtgctgcgagtactggcatctggtccactggcgatgctgcgcgttgccctgtatgccgtatctggtctgttaggtgctctgctcagtccgataggtcttgtggttactgcactggcgggcgtggcgctggttgtctggaaatactggcaacccatcaccgcatttcttggtggcgtggtggaaggattcaaagcggcggcaggtcccgtcagtgcagcattcgaaccgcttaagcccgtgttccagtggattggcgacaaagtacaggcgctgtggggctggtttactgatctgctgacgcccgttaagtcgacctctgccgaactgcagagtgcagcggcaatggggcgacgattcggggaggcactggcggaagggctgaatatggtcatgcatccgctggactccctgaaatccggcgtttcctggttgctggagaaactcggcattgtcagtaaagaggctgcaaaggcgaaactgccggaaagagtgacgcgtcagcaacctgcgacggtgaatgcagacggtaaagtgatgatgccaccgggtggttttccgtcatggggatatggctttgcggggatgtatgacagcggcggctatatcccgcgcgggcagtttggcatcgtcggtgaaaacgggccggaaattgttaacggcccggcaaatgtgaccagccggagaaatacagctgcactggctgccgttgttgccgaaatgatgggcgttgctgccgcgcctgcagagcttccaccgttgcatcctttggcacttcccgcgaaaggcggcgaagcgatggtgagtcgtgcagccactgtaccgcccgttcaccggattgaggcaccgacgcagatcatcattcagacgcagccaggacaaagtgcgcaggatattgcgcgggaggtggcacgccagcttgatgaacgtgaacgcaggctgaaggcaaaagccaggagtaactacagcgatcaggggggatacgacgcatga

SEQ ID NO: 396038 - DNA, 483 bp, Salmonella enterica
atggaagaacttcactttgtttacatcaatgcaaatggtcgtatcggtgttcactctatacagagcatcagttatagcgaaaatcatatacagggcatttgtaagaacaccgatcgaataaaaaccttccgaaaagaccgcattcttaaacagtacgattcaccagaacaagccattcaggagtgcgcgtcattcctccccgaaaactactcacatctaaccaagcagtctggtccgaaaaaaaatacattcgatgtgtgtttcaccggatttaagaaagcagataaagaaagattggttgataaggcgaatgaacaaggattaacggtaagaacctctgtaacccaaagccttcagatgctctgttgcggttacaatgcaggcccatcaaaagtatcggcagccaggatgaaaggcacaatcatcatagatgagcctggctttatacattttcttgaaacgggtgagatcccagatgaataa

SEQ ID NO: 396039 - DNA, 243 bp, Salmonella enterica
atgcaaaaaaagctcaaccgttcacttttcaaacaacatttgaaccaaaagcctattttcgcctggtttttaaacaaaaacgagcccgtcagggcccgttttattcaaatttgtgacttactgcactgccacaatacgatcatcactggcttcaaggcgaatcactttgccaggaaccagttcaccagacaggatttgctgcgccagtgggttttcgatctgctgttgaatagcacgttttaa

SEQ ID NO: 396040 - DNA, 420 bp, Salmonella enterica
atgaaaaaagtcgtcacggtttgcccgtattgcgcatcaggttgcaaaatcaatctggtggtcgataacggcaaaatcgtccgggctgaggcggcgcaggggaaaaccaaccagggtaccctgtgtctgaagggctactacggctgggattttattaatgatacccagatcctgaccccgcgcctgaaacccccaatgatccgtcgccagcgtggcggcaaactggaatctgtttcctgggatgaagcgctcaattacgtcgctgaacgtttgagcgccatcaaagcgaagtacggtccggatgcaatccagacaaccggctcctctcgcggtaccggaaatgaaaccaactatgtaatgcaaaaattcgcacgcgacgttattggtaccaataacgttgactgctgcgctcgcgtctga

SEQ ID NO: 396041 - DNA, 159 bp, Salmonella enterica; identical to SEQ ID NO: 371199

SEQ ID NO: 396042 - DNA, 468 bp, Salmonella enterica
atgctactggcgttactggctggccgtaaacaggccagacgtgcagatctgttgccgaaatggcagacttccttgcaccagcactctaaattcgcctcccctagctcggttaaaactacgctctatgcccggctttataatctggtcgaacgaagactggttgcccgtaaaggaatgagctacaaaattaccgatgcagtccgaaaatggctcaacaaagcgctacctgaacgtcgtaccgatccgcgcaaagagctgcttgacgccgtaaaacgctataacgagcagccaaaagaggtgttgcgcgaacagctctctaccatgaacccgtacaaatttgaacatctggtgggccagttgctggaagcgatggattatgaacaggtggaagtcacaaagcctctggtgacaaaggcgtgtatgtcatcggtaaagtgcaggtcggcatcaccaccattaccgaagtag

SEQ ID NO: 396043 - DNA, 147 bp, Salmonella enterica
atgctggacagcgatggtcagttttatctgctggaagccaatacttctccggggatgaccagccatagtctggtgccgatggcggcgcgtcaggcgggaatgagcttctcgcagttagtggtacgaattctggagttggcggactga

SEQ ID NO: 396044 - DNA, 336 bp, Salmonella enterica
atgtcggatgataaatttgacgctattgtggtgggcgcaggcgtagcaggaacggtcgccgcgtatgtgatggcaaaagcgggactggatgtactggttattgaacgcggaaacagcgcgggcagcaaaaatatgaccggtggccggctctacgctcacagtatcgaaagtattatgccgggattcgcaacgtccgcccccatcgaacgcgtcgttacccgtgaaaaaatctcctttttaaccgaagaaagcgccgtcacacttgattttcaccgcgcgccccctactccgccccttacgtcatataccgtactgcgcaacaaactggacccgtag

SEQ ID NO: 396045 - DNA, 237 bp, Salmonella enterica; identical to SEQ ID NO: 382246

SEQ ID NO: 396046 - DNA, 141 bp, Salmonella enterica
atgaacacgctggcgacccttttttcctccatgatggcggtgagctgtacaaaactttttacgtcttccgctaccaacggcggcgtggggatgccgtgttacagtaagcgccgcttgcagagttttttatccaacaggtga

SEQ ID NO: 396047 - DNA, 123 bp, Salmonella enterica
atgatttacgttggctttgagcagctactgttcgacgaggttttcctgctgaagaacgccatcaataatgagctggatatcttctttctgacgatactgttggatttttttgctgttaaatag

SEQ ID NO: 396048 - DNA, 1407 bp, Salmonella enterica
atggataccctgcaacaatctccgccagcagagcctgaaggcggtctgcggcgtaacctgaagaagcggcacctgctgatgatgtcgctgggcggcacgattggcaccggcttatttatcggcattgccgaaccgttaagcagcgtcgggccggcgggaaccttactggcctatctgtttgccggaaccattatgctggcgacgatgatgtgtcttggcgaattatcatgcgcttttcctcactccggttcatttcaacattacgcgctgatgtttatgccgtcaccttgctggagctataccattggctggctttactggtttagctgggtcttttccttggcagccgacctcactgccgcagggtttattgctcaccagtttttccccgcggttccggtatatatgttctgcctggcgattctgctcatcctgacggctatcaatctcacctccgcaaaaagttttggcgaatgcgaatactggctttcggccattaaggtcttcgcgatcgtgctgtttatctgcgcgggcggggtcatgatctactcgctaatgggcaatagtgactggcacccgacgttaaaaatagacggaatgtggtttccccacggttgggagcaaattgtggtctgtatgacgatcgtgatttactccttccagggggtggaactggtcggaaatgcggcaggggagaccgaatcgccgcacattattttaccgaaagtgatcctggggatcggtctcagaatcattttgttttacggcctggcgattgcggtgctggcgctggtctatccgcatgaactgacgccaaatggacaaagtccctttgtatgggtattctcccacgcgggcattccgggggcggatacgctgatgacgctggtgatcttttccgccgcggtttctgccgctaactcggccatttacgccagttcgcgtatgctgtggtctatggcgggcgatcgctttgcgccagcctgctttggtaaaacgaacggcggcggcgtgccggtgtatgctattttaatcacggccttgttggcgttagtgtcgttgctgacccgctatattcccgcacagcaattttatttatatctgatcgccagtaccgggcaggtgggttgcctggcatggataaccatcggatggtgccagtatcgtttccgacaatcggtgcgtaatggaacgtacgccagcgatttgctacgctatcgatcgccgcttttcccctggacggcccgatttgtcattatcaccaattttgccattatggtcggcacctggtttagtgagcaaggggtagtgataatgttggttgagctggcttttatgatagggattcttttgtcatggtatctcttcagacccactttgagccgattacgtaacacagtgggatga

SEQ ID NO: 396049 - DNA, 468 bp, Salmonella enterica
atggtatttgataacggtaactaccgttcgcgtgatgacagcaaaagcctgttaccgccggataactacagccgcattgtccatttcgtggtgaatatgaatgagatgaccgttatgcggccatttgaatacggcaaggagctgggcgcgcgtggctacagtagctgcgttagcgcgaaagcgatccagcagaatggcaatattgtggtgcattttgccgactgcacgtttgatgaaaatggccgcgccatctcttgccagcctggcgagagcgatattatcgatccgcaggcgggcagcgaggcgatggggctgctaattttacaggagattgcgcctacggagaaaaccgtgctttttgaagcgaccatgacgtcaggttactacaaaaacgcggaaacgaacggggaaggctatcgctacgatattaccagtttccgggtgtataaaatggatctgtacgcgtag

SEQ ID NO: 396050 - DNA, 168 bp, Salmonella enterica
atgagaaggttatatctggcgcttattctgctgttcgcgtattccggtcatagttacgcctcctgtaaacgttccggtaatgaaggcgcgatcactatcaccccgccgtcgcagcttgtggcaatcgggctgggtttccacctccgaagtcacaatggatggctgtag

SEQ ID NO: 396051 - DNA, 393 bp, Salmonella enterica
atgcttgccgtttcttcccgacgcgtgctgcccggctttacgttaagcctcggcaccagtttgctgtttgtctgcctgatcctactgttgccgttgagcgcgctggtgatgcagctctcacagatgagctgggcgcaatactgggatgtcgtgaccaacccacaggtggtggctgcctataaagtgacgctactggcggcatttgtagcgtcgatttttaacggcgtgtttggcctgctgatggcgtggattttaacccgctaccgttttccagggcgcacgttgctggatgcgctgatggatctgccgtttgcgctgccgacagcggtggcggggttaacgctggcctcgctgttctcagtgaacggtttctacggtcagtttcttgcgtag

SEQ ID NO: 396052 - DNA, 207 bp, Salmonella enterica
gtgctgcccgcgctggcgttaccgctcccgcagggcagccacttgcaggttaaacggctgacgcccgtagttgaaaggcagctcatgctggcgcgacgaaaaaaccgatcgctctccacggcggcgcaggcgttgtgggacgtggtgcgtacccaggccagcgaattaaccgccgcgagggcgaaagatccgctgtatcagctataa

SEQ ID NO: 396053 - DNA, 381 bp, Salmonella enterica
atgaaaatcggcaaggaaaacatggttgggctggtgtatgcgctggagaattaccaccagggccagacgaccgtgaccgcagcacagttacagccggtcgcagaagcgatttccgctatccatgggctttatgccgatatcgaacaggatgaggccgggcgtgcaatctggcgtattcgtgtgcgggtgaacgcatctgaattggagatgaacgcgcaggacgtcgaagcgcagctgcgcggcggcgagatagcgatttacgcccgcaaatatcagcttcatcagggggtttttagcctcgatccacgcacggtagctgaaggggaaatggcattgattgtggcgcgactcagggagattgcagaacatgcagcagattaa

SEQ ID NO: 396054 - DNA, 351 bp, Salmonella enterica
gtgtttaaaccgcttattgcctctctcatgctgaccagcgcggtcgtctatgcgaaaccgatgcctttgacggcggcgcgctatgcgcagcagcttggcgttgggatggatgttgactgggcgcgaacggaacggggtattcgtgagtttgatccgttggtcgtgcgggattttaaggcaaaagggttaacgcatgtccgtattcgtgtggcaggcgcgccgacggaagcgcgcctcatccatttgcgtaagctggtagaagcctgcgaatactatgcgtcatacccattattgcctatcaggcggatgcgtataaaaccgatcccagcgccagccatgaaaaggagctga

SEQ ID NO: 396055 - DNA, 1524 bp, Salmonella enterica
atgtcaacgccttcactgacccgcagattatggctggccttcgccctgatggcggcactcaccctgctcagcaccgtgatcggctggataagcctgcgcgtcattagtcaggtggagcaaaccaatacgcaagcgctgctccccacgatgaatatggccaggcaattaagcgaagccagcgcttacgagctcttctccgcgcaaaatctgaccaatgccgacagtgagggcgtttggctggcgcaggggaagatgctgaaagcgcaaagccttaaaattaaccatcttttgcaggcattaagcgagcaggggtttaatacctcggccatcgcccggcaagaaaaagagattgcgcaaacgcttgggcaacagggaatgctggtcggtgaaattctcacgctgcgcgcacagcaacagcagttaagccgccagattgcggaggcggcggaaagcattgccgcccaggctcacggtcaggccaataatgcagcgacatctgcgggcgccacccaagccggtatttacgatcttatcgaaagcggtaaaggggaccaggctgaacgcgcgcttgaccgattgattgatatcgaccttgagtatgtgaatcagatgaatgagttgcgggtcaatgccctgcggtttaagcagctcattgtgaccttaaaagacgcgcaagggctgagcgatgccgaggacaccgatgaaaaacttaatcagttggttaaaattttatcccgccgccagcagcgtatagaagatcctaccgttcgcgcccaaatcgccgacgcgctggagaaaataaatcagtacaccacactggttaccctgtttcgtaaggaaaacgctatccgcgaccagcttcaaacgcttatggccaataacctctttcagtttacccgcttcagtacggaagtgtcgcagttggtgaacgccatcgaaaaacgaaacgaggctgggttagcgcgtcttacacacgccagtcagcgtgggcaaatagggttagtgatcttaggtatcctggcgctgtgctcattaagttttattctttggcgagtggtttaccgttccgtatcccgcccgctggcgcaacaaacgcaggccttacagcggctactggagggcgatattgactcaccgtttccggaggcggctggcgtcagcgaactggataccatcagccgtctgatggaagcgtttcgcgccaacgtgcgcaaattgaaccgccatcgtgaggattttgcggaacaggtgcgttcgcaaacggcggagcttcatgcgctggtgctggaacaccggcaggcgcgcgccgaagcggaaaaggccaacgaggcgaaatcgacgttccttgccgccatgagccatgaaattcgcacgccgctttacggcattctcggtacggtacaattgctagccgataaaccgctcatggcaaactaccgcgacgacttacagccattaatgattcaggcgaatcgctactggcgattcttaacgatattcttgattactcggcgattgaagtag

SEQ ID NO: 396056 - DNA, 204 bp, Salmonella enterica
atgtctgtgtcgctcgtgagtcgaaacgttgctcgtaagcttctgttcattcagtttctggcggtaatagcaagtggattgctgttttgcctcaaagaccccttctggggcatctccgcagtatgtgggggattggcagtggcactgcctaattatgttgtttatgatatttgcctggcgtcaccaggcgcatacacctgctaa

SEQ ID NO: 396057 - DNA, 441 bp, Salmonella enterica
ttgagcgaaaacctcgacggcgcggcgttacgccacaaggttgaggatatcttacgccgctggcctgcgggcatcggcagctcgccgcgcacgttttatcatcatctggcggcccagggccaggtccgcgacgcgctggccttcgactgtatgcgcaccgcctttctgacccgctgtatcgccgggctcggctggtgtaacgaaaacgaggcctggctggtgctattgctcaacgcccagcgcgctcaggactgttttgattcctgggaggattacgccaccgcctacgttcgcgctcgccgggtatggctcacgctacgtgacacgccaacagcgcttgccggacgggatttacaggaagccacccattatctgcaagaccctgtcagccgctggcgacaactgccgtggaatgaattcaaaattttcgagccgatttaa

SEQ ID NO: 396058 - DNA, 306 bp, Salmonella enterica
atgtcagttaccaattctaatgcaaaatccgcagtaaaaaccagccgtaaggcgaaaaacgccgccagtgccagtaacaccgtattgtcggcggtgctggcgcagaccgaagaacaacacgtaccgctgtccgcactggtcaaatccccgcagaacgtgcgtatcgtgccgtattccgcagagagcgtccgcgaactggcggactctattaaagggattggactgctccagaatctggttgttcacgccctccctgacggcctgtacggtgttgccgctggcggcgatgaatctgttggccactga

SEQ ID NO: 396059 - DNA, 381 bp, Salmonella enterica
gtggcaaaagtgcaggcttatgttagtgatgaagtggttgaaaaaataaatgcgattgtggaaaagaggcgttcagaaggagcaaaaagtacagatgtgagtttctcaagtatatctaccatgctgctggagttagggcttcgtgtatatgaggctcagatggaacgtaaagagtctgcgtttaaccagatggaatttaatagagtccttcttgaaaatgttctgaaaactcagtcctcagtggtaaaaattttaggtataggatctattagtcctcatgtggcaggaaatccaaagttcgaatatgcaaatatggttgaagatatcaaagagaaagtatcttcagagatggaaaggttttttcatgaaaatgacgaataa

SEQ ID NO: 396060 - DNA, 690 bp, Salmonella enterica
gtgtatccgatggatcgtattcaacaaggacatgatcgtcaaataaatctgctggaaaatttgataaccgttattcagcattttcataatccagcctgtataaggaatgtatctggtaaattcctcttttgtaatgctttgtttcgggaattgttcctgaaagaaacttatagtgctgaaaaatggcttctgtcacagcctgatttttccgaattgatctctataaccgagatggaagtatatcgaaatgaacatactcatctaaatcttgttgaggatatttttattcagaaccgtttctggacgatatctgttcaatttttctacagtaaacctgatggtattgtcgtatgggagttttttgatgcaactcatgtacggcatacgaataattacaaacccagattctctggggattatgatataaaaaaacttattgagacaataagagatatttcttctgtatcctcattcagaaatgatgttttttatttatacagttcaggactaagtcatagttctatatcgaaaatattaaacatctcaatagcaacctcaaaaaaacatgcatcatttgtttgctctcatttttcagtctgtaacagggatgaattgattattcttttatataaaaagaaagttattcagagtctctttgataaggtgatgggtattattaataactgttaa

SEQ ID NO: 396061 - DNA, 396 bp, Salmonella enterica
ttgaaaagatttggtacacgttctgcaacaggtaagatggtaaaactgaaattacctgtagatgtagaaaaacttttaagggaagcaagcgacaggagtgggagaagtcgatcattcgaggctgtaatcagacttaaagatcatcttcatcgctatcctaaatttaacagaaaaggaaatgtatatggtaagtcactggtaaagtatctgactatgcgtctggatgatgaaaccaaccagttacttattactgctaaaaatcgcagcgggtggtgtaaaacagatgaagctgcggacagagttattgatcatttgaccaaatttccagatttttataactcagatatattcagggaggcgaacgaaggtaaaaagtcaacgtttaaagagcgttag

SEQ ID NO: 396062 - DNA, 549 bp, Salmonella enterica
gtgaagaacctgcttgatactgtcactcaggcggccaactcgctgctgaccgcgctgaagctgccggatgaatcggcacaggccaatcagatcctcggcgagatgagcttcccgcagttcagccgtctgctgccgtaccgggactataaccaggagtccggcctgttcatgaatgacgccacgatgggctttatgctggaagccacgcctgtcaacggcgctaacgagaccattgcgctctcccttgaccatctgctgcgtaccaaactgccgcgcgggatacccctgtgtatccacctgatgtccagccagctggtcggggagcgtattgagtacgggctgcgggagttctcctggtccggtgagcaggcggagcggttcaacgccatcacccgcgcctactacatgaaagctgcagagactcactttccgttgccggaaggaatgaacctgccgctgaccctgcgccattaccgggtattcatctcatactgcgcgccgtccagaaaaaaagccgggccgatatcctggagatggaaaacctggtga

SEQ ID NO: 396063 - DNA, 216 bp, Salmonella enterica
atgaggataatagtttttctgctccggctgacggtgacggttatcgtggcatccccggcggtgtactggtcatgggatactgtaaaggcaacaacggcggaagatagcctgctcgcggggcttatcatcgccgcgaatgtcgtgatgttaatgccgctgtactgtttcgtgctcatcctgacgaaacgccggcaacatgataataaatccagttga

SEQ ID NO: 396064 - DNA, 483 bp, Salmonella enterica
atgaaaaattttattcagatatgcctggtgatgatggttcagtttattgcctgttatcttgccggatgggatatgccagaaactggatttatactcgcctttgttctgttgtggcagggattatttatctggctgtttcatcaaatcagtaagaaacataacaccccgggtgagtacaagttcagtaaggtcatttggtatatcattatgccgatatgttcactgatatcaccaatgctgagtctgatgatatttatattcgggacgttatgtgatttgagaaaagttagcaactgcataagcataaaagattggatgaaaactcaggttgctgttgaggaatctgataaccatgttagtttggatttcgaatctgttgaatttagtagatctaatccagcaacaggtttaccaatgtcaggtattggtgttgatattggtggtaactcttacggttatagttctagccatcattacaggtag

SEQ ID NO: 396065 - DNA, 582 bp, Salmonella enterica
atgcgtacgtttagtggcaaacgtagtacgctggctctggctatcgccggtatcacagcaatgtcggggtggatcgttgttccgcaggcgcaagcctccggctttttcgacgactccacgttaacgggcggcatctattattggcagcgtgaacgcgatcgcaaagatgtgaccgacggcgacaaatataaaactaacctttctcatgcgacctggaacgctaacctggattttcagtctggttacgctgcggatatgttcggtctggatatcgcggcgtttaccgcgattgaaatggcagaaaacggcgacagcggtcatccaaacgaaattgccttctcgaaaaagaataaaggctacgacgaagactattccggcgataagagcggtatcagtctttataaagccgccgcgaaatttaaatatggcccggtctgggcgcgcgccggttatattcagcctaccggtcagacgctgttagcgccgcactggagttttatgccgggtacttatcagggtgcggaagccggcgccagttttgactatggcgatgcgggcgcgttaagtttttcctacatgtga

SEQ ID NO: 396066 - DNA, 180 bp, Salmonella enterica
atgattgttaaatttcatgccaggggaaaaggcggtggcagtggtccggttgattacctgctgggaagggagcgtaaccgggaaggggcaacggtgcttcagggtaatccggaagaagtcagggaactcatcgatgccacgccatttgcgaagaaatacacgtccggtgttcacgtatag

SEQ ID NO: 396067 - DNA, 651 bp, Salmonella enterica
gtggccgtattcgcctttcagaatgcccgccgtttctttggcaatggttttgtagcgctcgccggtcaggacattgagcaccgcctgggtgccgacaatctgcgaggtcggggtcaccagcgggataaagccgaggtcctcgcgcacgcgggggatttccgccagcacctggtcgagtttgtccgccgcgttctgctgcttcagctggctttcgaggttggtgagcattccgcccggtacctgggccaccagaatacggctgtcgtagcccttcagctggccttcaaaggcgtgatactttttgcgcacctcgcggaagtacgcggcgatattttccagcttcaggatatccagcccggtgtcgtgctcagtacctgccaacgtcgccaccagcgcttcggtggccgggtggccgtaggtggcgctcatggacgaaatcgccgtgtccacgccgtcaacacccgcctcgatagccttcagcagggccatctccgccatcccggtggtggcgtgacagtgcaggtgcagacgtacgtcgtagcgttttttgatttcgctcaccagctcaaaagcggccatcggggtgagaatgccggacatatccttgatggcaatcgagtcaacgccggtttccagcagttgctctgttaa

SEQ ID NO: 396068 - DNA, 465 bp, Salmonella enterica
atgccgttaaaatttatcaggcgcgtttctggcgggttttcgggtggtttgttgtctgttttatcggtttcccgtcagaagtgccctcagaggctctcagggggtgcgggcaacggatgttatggtaaatcgaacagcggtttttcagcatgtactgtctggcaaaagccttatgacggtatcttggatgtaatcccctgctgtggcggtcaaaaaaaatcccgaaaccacgactgtatgagtcgggatggcaaagttgccagcgaaattcgcgttagggaaaacgcagtacaccatatcacacatgatacccgtgccgcaggtgtaacagggatgttatgggaaagctattttgcccaaacaccttctattttttttcctagcagagcgagggtagcaataaggctaacctcaattgatacggaccagcatatgtggcctagcatttcgctccaaaattcatag

SEQ ID NO: 396069 - DNA, 477 bp, Salmonella enterica
gtgctcaccgtggcgctgttcccgcaaatcggcctcaaattccttgagaaccgccataatccggcggcgtttgagccactgccgcaggcggaagccgcgcagcctgccgctgccccggcaaaagccgcagcttccggtatctacaccgtggaagtggaaggcaaagcctttgtggtgaaagtcagcgacggcggcgatatcagccagctcactgcggctgcacctgctgcctcttctgctcctgccaccgccccggcaggcgccggcaccccggtcaccgcgccgctggcgggcaacatctggaaggtgattgccaccgagggccagacggtggccgaaggcgacgtgctgctgattctggaagccatgaaaatggaaaccgaaatccgcgccgcgcaggccggaaccgtgcgcggcatcgcagtgaagtccggggacgccgtctccgtgggcgacaccctgatgacgctggcgtaa

SEQ ID NO: 396070 - DNA, 2541 bp, Salmonella enterica
atgacaactttaaatagaacattcttaataagcaatccaaatacaagttcagcggatagtagccatccgcaaccgcacaacagaaaacagttaccaggaataagagcaagagcatctgtagaacgactaagtgattctgagaccataaaccgactcaaaaaaatcatacaacaaaacatatctaatcatggtggtatgaatgaaatatctcatattaatctgattaacaaaataaataacaatcatattttgtctgctaagaataaagatcacaatttttttattagtcagtccacccatgcctgtacacaactaaagaaggcaatttgtcatgctgatatttgcatgcgaaaactggaagattacaaacttaacgatttttcaactcattcagattcagaagtatttaaggcgcttaatcaagctgttaaagcgcaatattcacttaaagaaaagttaaaaatatatggaaaaacggttactggtgatatgctagaatatattagcttatgcgcagaagattgtgaacgccgcatcagcgaaatgctcaatgttgccagccaggcaaataattccaatcgaaaaaacaatatcgacatcatgaaaaatatcggtgaaaatttagataatgttgtcactaatatgcatggcactcctcaagcaatgcaagaattttataaagaagtcaacgagttattgattgagctggatatattagagaaaaataataatgggataaataataaaatcgcctatcaccgattagaaaataaaacacgcaacctccagttcaaattaaacgcaatgctatcgcaaaataaaacatatgaaagaacaaaattaatatatgacgatattattttcaacactatcaacaaatcactaaatctcgcactcggaagatgtaaaataattgcaacagctaatattaatcctgttttcgaaaattcgataaaccaactatttcaaccgacaataaataccctgaaaacggcccaggacaaaattccgtacatatatacggaagaaaaagaagtcattaattatataatacaatatacagaaaaactccagactaatctacaagaacaggcaaaacggcttgggggtttaagcgagctcaattcggtacatcgagatgtacaaaaaatgattgaatatgtgaacacgtggtcctatcctattataggaaagctccctcaaagtcttattaaaatagtacgcgatagtttcaatcggacaatatataactcttttgattatcgggttttttcatctggattaatcgaactatctcagctatcaataaaatacgcctcgggaaactttactaacactggacgttatctgacacaagccttttataattcaccgggctctgatgccttgatagaatgttactcacgcggtattccacctaaatatcttgaaaaggattcatcctccgaaaggcttaaatcagctcatacgctaggttgcggaagcgtaaatgaagtgacattgtgtgtttataacgcaccacatggacaacatcctattgagaaagtttttaaacctgagtatgttggtcgttatggattaggtaatcttcaacttcattgtttggacggcaataacttttcagaaatgctagttcgtaatattgcatccagtgaggtagccaagtatttaggttgtcaaaatatagtatcaacagcaacagcgggagtgtataaaaaacagtttggactttttatgaataaagctcctggaaaaacaccttgtgatcttgtaagtacaggcgggataactcaatcccagttagaatcgattcttagcatatgtaaaacaaataacaaattggaaattgcaaaagcaaatttacggcatgaattaaataatctggaatgggctgatgcgttagccggccaaatagatcgacattctgataattatcttatcgatattgataagcttaccggcaacataaaagtaacagggattgataatgatgcctcctttagcgtagcattaacaggtataggtattatatcagtaaataatctaaatatatctgtacaagacaggaataagttaaccccttattttcttagaacatcgcagggaaaactataccttgatgattatcatagcccggtaattgatattcgcatgttagatcatatcggtcaagaaaccataataaatattactgggataaatcaaaaaatagtgcctgatcttatttctcaggagacttacgacgcattaatgtctatcgatgctgttgattatgcagaaaccctaagcgaattattaccaccagcgaatgttcaagctgcccttaagcgtcttgaatcagctaaacaacatgcttcagaattatatcgtaataatcgggtcataagtaattggcaagatcctgacattgaaatttattataacaacgaactgctagattatgaaaataaagtaaacagaggcatcagttatccacaaaatgccaatctcgatctatctttatatcttagggacttccactatagtgtattattggtttga

SEQ ID NO: 396071 - DNA, 630 bp, Salmonella enterica
gtgcctgagttgtctgtaattatacaatggatgaatcaataccctaagaccggctggctattgctgtgtatctatattgcactcggtgtagttcgtcacagagtaattaatgctgaatctggaagtgtatttcgtggactactcaatcttaggaagcgccggctagagcaaatgctgacacagccatatttaaataaaaatgcggtccgtctggcaaagcgtgagcttcgtcagcgcagcctttatcggctcacaggcttgtataattatcggctgcaggatttggctgtaataatgtgtgatcgttatgggttgcgggctggttatctcaagccgtggcgtaactggctcgaagaacgggatggacggattgtgttcaacaggaaatggcattgttttcgctggcgtctttttctggtaggtcagattgtaaacacagttctactaatattattcattatgtatatagtttctcattcttcggccgaaatgatcgcaccgcttatgttactcttcatgcttgtatggtggtttccttggctaatgatcacctcggtacctacccctaggtggactcgcgaaatggaagtctatcttgagaaatttaacgctgaacagaccatggtttaa

SEQ ID NO: 396072 - DNA, 972 bp, Salmonella enterica
atggttgacatgaaaattactatctgggaaggctgtgacctcacagttgcagctgcaattaaattatttgtagagcgtagttatccgtactccatattttcacggaggtatccaatactgcgtctcatacaggaagttattgatccagcagtagctgcttatgtaaattccctgccaccaagttataaagactacatttctggagtaaatctaggatttagtgatgtacttaaaaaagtgggcttaaacgtcgtagtacaggcacaaagacttcttttgcgtaatttcgttctgactttagatcaacaaaattctcttgataaatgctttaccgctacgattgagtctcttattgaattagtcagtgagtgcgcatccaagcggccgaagaagtcctctcctgcaaaaggagtaactataaattcacagcgtaagctcggttattgcgagttctgcggtaatctaaccgaattttccaagttgatcagtgagatatcagaatttgttgctaacgataatgagttccccgttcatgaaaaacaggtccttagtcatcgatattgttctgaccataggcccaaactcaccaatggtctatggaatcccaaatacagacaaggaaagcggtctctcgaacagttcaataaagaattaataaggcttagacggcaatgcgctaaaccgcataaagctaacgcaaacacaggggatatattgattgatacatattttcatgagtggatgcagggtcaaactttaaccccagcagatctagataaacttaggaatatcgccagacgaatggttgactccaaattcactgatactaagaaaaaaataatcatattaaaacaccaaggttttaaccagtttgaaaccgcacaggttttagaaaaaaatcactacacaactatgacaaagcaggctgtttccaaggccttagcgtctgtgaggaaagaattttatatttaa

SEQ ID NO: 396073 - DNA, 231 bp, Salmonella enterica
atgcaaacaaaggcacatagcacgctcattaacagaaaaacacttctggaaatgatcccattgtcagcccgcaccatttataaccttgaacagcgaggcgagtttcctcgccgtatagcacttactagccgaaatgtagcatggcagttatccgaagtagaacagtggattgcggatcgtaaatcagcaatgtttaaagcggccagacccggtgttgttttaggtaggtaa

SEQ ID NO: 396074 - DNA, 858 bp, Salmonella enterica
atgtcattgaacataatggaagcatttgaagttaagccgcaaccaattgattacgtcttgcctaatttggctattggtactatcggagcgattgtttctccgggaggcgttggaaagtcaatgctggcattacaattggctgtgcagattacttgtggtgtagatcttttaaactttggtgaatatccgactgggttggtggcatatttacctgtggaggactctgaaaccatcgttcaccatcgtttatatgctttgggaaaatatctaacagcacgtcagcagcagattgtagccgataagctactggtcgaacctttggtagggaagtgtccaaatattttcttgccggattggagcaacttgatcaatgaagtttcaaaaggtagacgtttaataattttggatactcttcgccgtttccaccaggaggatgagaataatagcgcagcaatgtccaaagtcatcggaaaactagaaggtattgctgctgatactggatgttcgattatatttctacaccatttaaacaaaggcgctgccacgatgggtgttggtgatatacagcatgcaagcaggggtagtagcgtcctggttgataatatacggtggcaatcttatctggcgggcatgaccgccttagaagcgaagacgtatggtatttctgatgatgttcgaggtcaatttgttagatttggaataaataaagcaaattatggagaacgtgcgccagattgttggttacagagacatgaggggggagtattaaggataacacaactcaaatcgaagaataaaaaacaaatagctaaagaatgtatgtcttcatggagtggtgcagaaaatgataactggtaa

SEQ ID NO: 396075 - DNA, 762 bp, Salmonella enterica
atgataactggtaataaagttacacctactagtactgctttgcaggctagagtcattctgtaccaaccaagtcaacgtcccttgacgctgaaggggcagtggatggagactagttttggtcgttgtcgagttaccggaagactaggacaacgtcatgcggatattgtggaaacaatgctctatgtggccgagaaacgtcgagaaatttctgatggaggaatcgagttattagtagatccagcgaaagtacgccgaactctatccgatgcacaatacagttatgatcgaattaaaaaactactcgttgatctacgagtggcgactgttgaaatagtaacaccagatttagaaaaaaacggttattgcattctaggcggtttaattgaccatgtcgtaccctcaccaatgaccaggcgtaatcctctaactggtggtgaacgtaacctatggagagtacgcttgggtgttgcattggtaatgttgttgaagcgagatttgcattttcatcatgatcctggtcctattgctcgtctccagcatggtattagtcaagcagttgcacgtcatatattaacacataagcacgatcctaaaggcggctggcatattgatacattaattttagctgtcagtggtgaaggtactaataatatgacattacgtaactatcggaggagattaaaagaagatagcaaacaatttctagcgattggcattgagatacaaaattctaggataaaacgagctacaacggcccggtag

SEQ ID NO: 396076 - DNA, 354 bp, Salmonella enterica
atgaaagttactcagactagaaaaaatagtacgccaataaaagtttattgtttacccgaagaaaaagttctcatccaagaaaatgcagaagcatctggattaagtgttgcctgttttgttcgtagagttgcaatgggttatcaggttgattctatcgtagatataaaacaggttaatgaacttagccgagtaaacgctgatcttggaagacttggaggattacttaaattatggctcacaaatgatcctcgaacagttgatttttcacccacactgataagaaccttgcttgcgaaaatagaatcaactcggcaagaactaaggaacattatggataaaatcttggataaataa

SEQ ID NO: 396077 - DNA, 795 bp, Salmonella enterica
atgaatttaatgttccgattggtttcatcacaaagagggattttagccgctaaaaaagctttaatagttcctttcgtggcgtccgtcatggcattaccggtgaaggccggaattcccgttattgatggcaccaatgtggttcagaccacaatcagcgcagttaacaacgttcaggctgtggctaaacaaatccagcagtaccagacgcagctgcagcagtatgaaaacatgctgcagaacaccgtagctcctgcggcctatatctgggaccaggcaaattcaacaattaataaattgttgcaggtgcaggatacccttaattactacaagaatcaggccgggagtctcgatgcgtacctgaaacgatatcaggatgttaactactacaggacatcaccttgctttaacagcaatgttaaatgtacctcgtctgaaattagcgcattgcgtgaagctgaacagaacagttcaggggcacgtaaaaaggccaatgacgcgctatttaaggtaattgacgaacagcagaacaccctgcagagcgatgctgataaccttgcagatttgcaaactcaggcaaccggctcacaagggcaaatggaagctattcaggccgctacccagcttgccagcgcgcagacaaaccagttactgcaaatccgctcgcttctgatagctcaacaaaacgctgcggcaacactggcacaggctcaggccgataaagaagcccaacaaatagctgctgatgagaacgtattagctgggcagaacacaccaagcccgaagcgaatttggtga

SEQ ID NO: 396078 - DNA, 174 bp, Salmonella enterica
atgaaaaataaaattatgatggtttttattataatcatttcaatgattatatgttcttgcgaaaaaaaagataacgattgctcatcgatgccagataataaatttgatgcacatagatccgataagtgtgcattgcgtagtaataacaatccaagccctaaacgagaatggtaa

SEQ ID NO: 396079 - DNA, 1392 bp, Salmonella enterica
atgaaaatagtaagtaagctcacctttttaggtatcataattttcttttctataaatgcctatgctggtcaattagatagtagcgggctacttgattctttattagataagtttcaacaagtagccagtacatggacaacagtaattgctgactatgcaaattggctcttctgggggctggtattaataagtatggtttggacatttggtatgatggcgatgcaaggggaagggttgacaggcgtacttgctgaaataattcgcttttttgccgtcattggttttttttattatcttttaatcaacggcccatccatatcgcaatccataattaattcaatgaggcaacttgcagcaaacgctttaggaataagtactggtatttcgccctcaagcatagttgatatggcgtttgcgatattaacaaaggtcagttcagccgcatcaatttggtcgccaatgatatccaccattatgataacagtcgcgataatcgttttggtagtgatgtcccttatagcgataaatatgctaatcatgttggtttctgcatgggtgttatgttatgcaggagttatattgcttggatttggtggttcgaaatggacctctgatatagcaattaattacttacgaactgttttatcgattggcattcaattattcacgatgacattaattattgggattggacaatcatttatagatcaatacttttctcttattaaagatgatgttcctgatcttaatagtcttatcgttttgcttctggcgtcaattatcctgttagtattaacgaataagctaccactgttgttatcaggtgttgtaggaggggcttctttacaagggattggtggatttggggcgggtatgattactggcgctgccgctactgccatcagcggtgttggagcaatggcaatgggggcatcagctcaagtcagcggcggagcctctgcattaaaggcagcgttcgagtctgcgcaagctgccatggccgaggaatctggttcaggcggtggaggcggttccggtggaggatttggcggcggggaagataccggttctgtagatacttctggaggccaaccctcaggcagttccggtggttcgtcagcatggagcagttcagttagcgccagcggaggaagtcaggggtttgcttcattctcacgagctggccgcatggcaagccatatgggaagcatcatggccaacggagctgctgagtaccagaaaatgaagcgaagtagcaattcttctcgtgtccaacaaactattggaggggagttggcgactcagatacgtaagcagacagctactcatcgggataaccgcgaacatgatgattttgccgatgatagcttatcgggtaataataaatcttga

SEQ ID NO: 396080 - DNA, 435 bp, Salmonella enterica
atgtccaggactccctatacacggttacgtattgagggcttccgcaaagcagaggcttccctgagacttgaaggaatggaccccagtggtacgccactgtacgagtccattaaggcacgtattatttcaggtgagcttacgtatgagcaggggcgttcagagattcttgcatactacacaaaagcagataccgccgggcctgtgacagtaggagaaattctgacagaagaatttttgaaaccgctgaacatgtctaatgatgaactggcggaagctatgggtagctgcaagcagtatattgacgatattctctgcggcttgcgtcgtcttacaaatgacgatactcgcattcttgctgccgtatttggtactgatgaggatttttggagcaatctgcagaagttgcaagatcaacagaaggaacgacggaagtaa

SEQ ID NO: 396081 - DNA, 1749 bp, Salmonella enterica
atgactcaacaacaagacgccgctgatagcgtgcgcagcaaggtcgctcctggagctatagcagtacctgtatgtcccgtcacatcagcgatagagttattggcgtcagagggggggctcgaagccaggggggccattttcacgcgctctgaggtggtggatttcattctcgacttggctggttacacagaggatcaaccgctttataagaagagaattttagagccatcatttggtgctggggacttcctattacctatcatcgagcggttattggctgcatggcgggtggcgaggccaaacggttcagctttaggggaattggccgatgcaatccgggctgtggaattgcaccacgagaccttttatagcacccaggcagcagttgtcgaactgctgaagcatcaaggcatctcttcgaatgatgctaatgccttggcttgttgttggctgtcgcaaggcgatttcctgcttactcctttggagggggaattcgatttcgtcattggtaacccaccatacgtccgtcaggagttaatccccgcaccattacttgctgaataccgctgtcgttacaagacaatgtttgatcgtgcagatatttacattccattcatcgagcgatctctgtcggttttgtcggatggtggcagcctaggtttcatttgcgcggatcgctggatgaagaatcgctatgggggaccgcttcgcagccttgttgctgagagattccacctaaaagtttatgtcgatatggtggatactcaggcctttcactccgatgtgattgcctacccagcaattactatcatcagccgtgaaatgccggggccaactcgcattgctcaccggccagctattgaccgggtaacactgactgaattgtctggtctgctcacagcccactctcttcctaaggaagtcggaccgacgcgtgagcttgctcaagtgaccaatggttcggagccgtggttgctggaatcattcgatcaaatggcgcttattcgccgtttggaaagagactttcccctgcttgaagaggtagggtgcaaggtcgggattggtgttgcgacaggtgcggacaaagcgtttatcggagattttgaagcactcaatgttgagcaagaccggaaagtgccgctggtaacaaccaaagacatcgtgagcggtgaagttgagtggcgtggtctgggggttatcaacccctttactgagcaaggcgggttggtcgaacttggtgaatatccactcttgcgaagctatcttgaagcaagacgtagtgtgattgctggacgtcattgtgcgcagaaaaacccgctcaagtggtatcgcacgattgatcgcattactccgaaattggccgcgaggccaaagcttttgatccctgatatcaaggggcaggctcatatcgtttatgaaggtggcgaactatatcctcatcacaacctctattacgtcacctcagatgattgggacttgcgtgcccttcaggcagtactactgtctgccatcagccgcttatttgtggcgacatattcaacgaaaatgcgggggggattcatgcgttttcaggcgcagtaccttcgcagaattcgtattccgtcttgggctgacgtgcctaaaatgctacgccacgagttggctgaggcggctatcaaacgggacattcaggcctgtaatcgggcggtgtttaagctttatggtctgaatcaggaagaacaatcatcccttgggggaaatggagaataa

SEQ ID NO: 396082 - DNA, 741 bp, Salmonella enterica
atggcgctcgatctcgttgattatgaaaagaaagcccgcgaagccgtaaaggcattttggggcaaccgtgaagcagcaagacaaaagcaaattgagtcgggtaaggccgaccaaggcgaacgtgcgggtgtcactgctggaaagaatatggacgggttcttggccttggtgctagacctcataaaggctaatggactagcccatgctgagatttaccagaaccgggcgatgttgacccttcccggatatttccgcccaactaagctgtgggatctattagttatctacaaaggagaattgattgcagcaattgagctgaaaagccaggtaggaccctcgttcggcaataactttaataaccgaactgaagaagcaatcgggacggcccatgatttatggacagccttccgcgaagaagcttttgggaagcaaccgcgtccatttgtagggtggatgatgatggttgaagatgcaccggagtctcgcaagcccgttcgcgactcgtcgccacattttcctgtgtttgatgaattcaagggagcatcatatctcaagcggtacgacctgttgtgtcagaggctggttcaagagcagctttacacgaccgccgctgtcatcgcagcggagcgcggcgcggtaaatactggtgatttcactgagctatcgtccatgaccagtctcagggcattcgtatctgcactggctggtcacatagcggcagaggctgctcggttgggctga

SEQ ID NO: 396083 - DNA, 1563 bp, Salmonella enterica
atgccggcaataaaaaaaatcgtgatcaaaaatttcaaaagaattgccgacctgacccttgagttcgaccctggcaagaacatactgatcggcgacaacgaaacgggtaaaagcagcgtgctattggcattagatctggcacttagcgcaagccgcagtcgagttgaaaacataggctatgaagccctgctgaatcagggggcggtgcagaatttcttggcagggccagcaagactggatttgcttccagaagtcatcgtggacgtttttctggaagagggggacgatcaaggtttttacggtacccaaaacgttcttggaatacagacagatggcctgcgcatggcgattgtccccttgatcgaagagttcggccagacaattgtcgatctgctcaaagcaaacaaggacagctttccttttgaatattacagtgtcaagttctcaacgttcgccggggcacctcacgtcagctaccggcgtccggtcaaacacctgatgatcgatagttctcgtatcgacagtgaatacgccgctcgtgaatacacccgaacactgttcggattccatgtcaatgcgccggatcgctaccgcctcgaaaatcgctatcggcaaggcaaagaagctttcagtcgagagagtctgaaggaattgaacaatgcgctcggtgattatcagttttccttgagaacaagttctcgcgccaaccttgaaaccgacttggtgatcactaaagacggcatccctattgagaatcgtggcaaaggtgaacagtgctttatcaagactaatttcgccctgaagaaatatgaggaaaaagggagcttgaacgcgctcctactggaggagcccgagaaccatctaagccacacgaatatgaaacgcttggttgaaagactggctgatacgacgggcactcagctgttcattacgacgcacagtagccatatctgtgctcggctcgatctacgccacgcgttactgcttggagcagggggggcgggacgcttgaaatacctgtcggagcccaccgcaaacttctttatgaaagcgcccgataacaatgtgcttgagctcgctctctccaagagagtcatattggtcgagggggatgcagaatttatcctcatggagcacttctacaagcagttggcaggccatcctcctcaggttgataatgtgcacatcatctcgatcggtggtacgagcttcaaacgctacctggagctcggaaagctcctgagtatcaggatcgccgcaattcgggataacgacagcgattaccaacagaactgtgtaacgaactacgaaggttacctgtacgaatcggcccagatctttgccgatacaaatcctgaccgaagcacctttgaaataggtctctacagagacaatcagcatctatgcgacgaccttttcgctgcaggtcgaaaaaaactgaccgttcaagagtacatgttaaaaaataaagcggatgctgctttcgagttgctaactaagaagtccgctgagctgatcgtcccgaaatatatacaggatgcgattgggtggataagagcgtaa

SEQ ID NO: 396084 - DNA, 1029 bp, Salmonella enterica
gtggataagagcgtaattttttccgtcgcaggatctggaaaaaccagtctgatcattgaaaggctcagctttgagcagcgggcattgatcgtcacttacacggagaacaatcaccggcacctgcgcaacaggatcatccagaagttcgggatgatcccacccaacattacactcactacgtacttctcattcctgcatggattctgttataggcctttgatgcaattgaagctagggaccagaggtataaatttcaggcgtccgcccaatagacatttccgcttagacgatttcaatcggtatcgcgatggcagcggaaggctctatcactgccgcctcgccaaactgctacaggtcgtaggggttataccggatgtgcgtgctcgcctggagcgcttttacgaccacctctacgttgacgaggtacaggattttgcgggccacgacttcaacctgctgctggaggtttcacaagcgaatattggtgtaacgttcgtcggtgacttccaccaacatacctttgataccagtagagacggtacgataaacaacaacctccacgacgatgttgtccgttacgagaaacgctttcgtgatgtcggcatcacggtagacaaggaaaccttgagctgtagctggcgatgcacaaaaatggtctgcgacttcattagtgcaaagttacaaatccctatgggtgctcatgagcaaagggtcagccggatcattacggttgatgaccaagagcaagcgagcttgttgcacgctgatcccaccattgtgaagctgtttttgagcgaacactacaagtacggctgctactcagagaactggggagcgagcaagggcatggatcactttaatgatgtttgcgttgtgatgggaccgggtatctggaaagactatttagcagaaaggctacacgaagcaaatccgcaaacgcgcaacaagttgtacgttgcctgcactagagcgcgtggtgacctgtatttcatgcccgagaagctattgaaagcatttaaacagaggtaa

SEQ ID NO: 396085 - DNA, 249 bp, Salmonella enterica
atgaagactgttgtcacgatgtggcaatggaagagcttttcaaggccgattttcttatgctgtggagctgctggttgggattgctcgtcagcttatgtaggtgagttggtcatcttggagaggcagcaattggcagcctttgccctgatagaggttaatccgatattcttaaatgtttttactgtgcatagcacttttcatggcttttcgattgcggtttatattaactccctgtttaataataactga

SEQ ID NO: 396086 - DNA, 1155 bp, Salmonella enterica
atgaagaaaaagctgcaattggcactcaacaagtacaagccgatccctcctaaacttcaaggggagagcgaagagagtccgaaaacgattattgatctggaccttgccgctctctatcaccacttttacttggacacctacggcactcagcccccgaatccggatcctgcccagtttgagcacatgagattcctagtgcctgacgatgagcttcgatttcaaggtgagggggtgggcgcttcaaccaatgccaagcgagccaaatccagcgagatggggcaggcgttctgtcgctggttcctgcatgagcatttggggattaaatacttcgcacatttggatcgtttgatcgatgacacaagcgagaatttgcatggatttactttagagcgtaccgcaccaggcgatatgcctgactacctgtgcagtgacggggcaggctccgtcgtacttgcagaggccaagggacgctatacttcggtggggttcaacacgaaacagtttggagattggcggaaacagttcacgcgggttcgggtgttggacagcaagggcgaggctgtttgggtaaaaggccatatcgtggccactcgctttgcaaccgaatccacacccaaggttcagaccaagttgtttgcagaagacccaatcacagagggccgggagcctttatcaggagaaactgcacgcagcctctccggacaaataatctgcagccattacggtaatgcgctgatgaaaatcgaccaacctcttttggctctcgccattagaagatcaaggcgtttggagtcgcaaagcagaattccagtaaccctctggaagttcgcatttgatgaccaacagcgatacttcgttgggggctattacgcaaatgataccaacgagccgttaattgacttagaaaatgggcaggccacacaccgcagccgtgatcccttcaggttaggtgtgcactcggggacgttcgtgggtgttgagctttcggtcttcgaacatctggtaaaggttgctcggggtgatgctcgtctgttggatggcctaccggaggtcgagcccattagggagatttacagcggaataagcatgttgcgagacggctcaattgttggacctttgtcaatgttcatacctgtcagcttaaataactattaa

SEQ ID NO: 396087 - DNA, 888 bp, Salmonella enterica
atgacacatattgcagtaagaaagatgattggcagccaaaataggtatgccaatcgcaactggtggtacgagtttcaggagatacctggcttcgctgaagagtcagatgttcaggtacgttcaagcgagctattgcagcagttttcaaccataacgaagaaatggagttcagaactaaattcggaatggacggtaagaatattttttgcagcaaagatggttttggcctcttccgttatggcacagagtttgaagtacgctgaggaaaataacctgcgccctgtggtctcatatctgagttattacacggtcatgcatgcattgcgcgctattcttttgacaagcccgcaagttaaatggaacaacggagaaattctccaaacgacccacacaaaaacgatcaatatcgcttgcgatgcattagcacatttcaataaggagcttgcgagtcaggtaaagagttcaacgattcatctaaaagccttcagagagcttatttcttaccgcgcaccatcgagtggtgacaacttcgaaaaaccagactttgatgtgtacagattctgccgactttttcttgaggtggcacagcttcagtctgagctacttgaagcatccatcggaaagcatgtaactaactcattcgaacttgaacaagactttactcaacatgtatacgacattgagatcgatggaattcacttccatgacaaggaggattggtatcggattgggtatttagctagaaagcatccagcaccaacaaacattcttcacataatgtcagaagggcatgtggaagacttttttggctcatggtgcccagaggaggaaactcctaatgcttttaaccccgatgacgattggcgcatactcttcgaggtcccctaa

SEQ ID NO: 396088 - DNA, 204 bp, Salmonella enterica
atgcccagatacggctgcttgttcgggcgtgaggagatcagtaccgcatctaattggcgctcggtgagccattggcgaagctatgtcagtcgcgtcatgttatcggtccttatttcacaggctttcaatcagcaatttaccccggcggtacatcatatggcgcaagaagaccaccatcagcgccgtaatgaccgcgcccagtaa

SEQ ID NO: 396089 - DNA, 372 bp, Salmonella enterica
atgaataaaaaaacgcttatgtctgattttattttggtcagaccccgaatttacattaatgacaatatctcgctgggaccggggaaaatcgatctgttacgcgctatagatgggtttcactccctctcagctgccgcaaaagatctgggaatcccctataaaagggcgtggctcttgattgatacgctcaacaaaggcataggtaagcaggtggtcattacatcaacaggcggcagtaaaggcggaggctcggttttgacaccacttggcaagaaactgcttacatggtacgacaaggtagaggccaaccttaacgagcaatcacagcaggacttgcaggatctcgaaaaaattatcttcggagatagctag

SEQ ID NO: 396090 - DNA, 807 bp, Salmonella enterica
atgtcgtcagtttcaaacaggaatggaaaaggttttttctcaggcgcgatgataggggctttaggcgggttgattggcctagggggggctgaatttcgccttcccgtcctgatcggtagtttcaaaatcgcgactctggaagccgtcatttttaacaaagcaatgagtctcgccgtggtgactatcgctttaattttccgaacaaaatctatatctctcgatcaattggtggagcatcttgatattgttataaacttgctggcaggaagtcttattggagcatggtgggccgctggtcgtgccattaagatgtccagaatttggctggacagaatcattctgatcctgcttgttttactgtcttttgtcatgctctcagaagcctggatgccgctgcacaatatttcaggcgggttatttcaacccggcgttgccacgattattgcggggggggtgtcagggttctttatcggaatagtcgcagcattgctcggagtggctggcggagagcttcttatccccacaattgttatccttttcggggtagatattaaactggccggaagcctttcactgatgattagcctgccaacgatgattgttggtttttcccgttatacaaatgcagatgctttcctagttctgaagaaagaaaggccactgtttgtatggatggttattggttcagtaattggcgcagcgattggtggacttatggtcggcctgttcccgcttaaagcgcttatgactttacttggcgtgatccttcttatctctgccatcaaaactttcaaacacacccggtaa

SEQ ID NO: 396091 - DNA, 420 bp, Salmonella enterica
atgagtgatttctttctggcgatgacgcgggaacaatggcttaagctgaaaagttgccctcacgatttcccgaccgttgaggggtacttttccacacagccggagatcggcgacatactgtcaatccattacccaacacggcaccggccatcatgggatcatcgcgtcgatgcagcgaaagaacttgttattgcctgggtagagccaattaccagcattcccaaccgctaccggctaaaagtgaccttcagtatgacgccggaagatgtaaagcagcgctacggttgcccgttcacgccactgtcggacatgttacgcaaacgccgggaagaaaaagaacgcgccagactggaaaaggcacgccagctactggcttgcagggtagagttagcggaaaaatacctgaaaaaagagaggtag

SEQ ID NO: 396092 - DNA, 1101 bp, Salmonella enterica
atgaccgccaccgcctactacaacgaaatcaatccctttgccgcagcctggctgcaaaaccttatcgacgctggttgcattgctcccggcgccgttgacacgcgctcaattgaggaagttaccgccaatgaccttaaaggattcacacagtgccatttcttcgccgggatcggcgtctggtcttacgccctgcggtgcgccggatggcctgacagtcgcccagtctggacaggttcatgcccctgccagccattcagccagtcaggaaaacgccggggattcaatgacccccgccacctgtggcccgcatggttttaccttgtatcgcagtgccgccctcacgttatctttggtgagcaggttgcaagcaaggacggccttacatggttcgacgctgtacaacttgacctggaaaaagcggaatacgccgtcgctgttgtcgatctttgcgctgcgggcttcggtgcgccgcacatccggcaacgcctcttctgggtggccgacgcagacatcatcagtgactggcgcggggacgtcagggcgtcagagcgggatgaacattcagtcagcggtaatgctagctggctggcagacaccagtagcgaacgatgcaacgggatcaacttattgttacagcggaaagaaccaggatggaacgccgaaggtttgtctgaaactaccgggcactgctcttctgacgtgctggcccacaccgacaacgacagcagggaaaggcggctatcagggtggcaggattcgcaacgggaagttatcaacggatcgtctggatgtggcggcacagatagtaggttgggcaactccaacagcagcaatgaaaatacgttcaccggagcggttgcagggacgaacgccagcaccacacgaagtggagatactgccagtccggttaacggcttctggcgagatgctgactggttgttctgccgggatggaaagtggaggccagttaaacccggacttaagccgctggttaatgggactcccggacgcgtgggccagttgcgcgcctacggaaacgccatcgttgcgccggtcgcggaaacgttcataagagcatacatggaggcggtcacgccatga

SEQ ID NO: 396093 - DNA, 330 bp, Salmonella enterica
atgttgatggattacctttgccatatcggtaacaccctgttttgcgcgtatcaaatgccattcagtcaggaatgggacgacaaacttaacgagcttctggatgaagggattttgctgttcgcagatgaatgcacagcaaccttttctatcggtgaacacacagtagaaatctggatcgccaatcgctggtatgcgttcggcgaaatgtatcgccttgacgagaaatacacatccagattcaccagctaccgcccgcgattccgcaccatgcgccgcctgcacgccgccgtcaaagaccacgccgcgaaggagtttaaatcatgcttctga

SEQ ID NO: 396094 - DNA, 441 bp, Salmonella enterica
gtgattaacccaaataaaagccttacccaaaaagcattagccggtgtgcaatttttgcgtatgcacgcccaagcaatggctgacgatgatgatttttttatcgcaataatgtctgatcctcacgccgtagccgctaccgccatcgaacaactcgttaaagaaaacgccgaactccgcgcccaactcgtcgcctttcagaaagcggctagccctgccgttgccgttgacccggcaaaggaaggctccgaacacacctgttacacccccctcgcaataggcactcgcgtattcctgaaggtacaccctcaccggcacggaacaataaaacattctcttcgtagcgggcgcaacgatcatcggtattacgtctgtttcgactccgaatttgaggaaaaccgctgggtaaaagcccggaacctggaattagttcctgacaaatga

SEQ ID NO: 396095 - DNA, 738 bp, Salmonella enterica
atgaaacttaccatcgaaaacgtacaggtcgccattaaaggcgtagcgaaatacggcaatacacatatatctgaaaaactgcttgccgtcgttgctggcaactacgccaaaggcaacaacattattacggtgcatttgcaatcgctgtatgaagacgagaacttcgactctatagtaggcgagattaaaaacctgtactacaccgaagctgacggacgcacccagctatgcggcgatattacttttgatacagaattgttggatttacaaagtctgcttcacagcctggcgcacggctgcgtgtacctgtcgccgtatttcatgaatatcgggtcactgaatcattgtttcgcctgtctgagttcagtcaccctaagtaaagccgaagccgccacctttttaggcatcgaaccgctcgacatttcctgtctggatggactgattaacgcactctacaaagaaccggcaaccgaagagacaataaaatacaccacaggccagatgacgtacacatcatccccttatattcatgcaggaaatatgaataacgaagacctcagaagatggcttaacagtgtcgtggaaaatattggaattgaagagaaatgcctgagcagactggaaagtatcaacaataataaagccaatgcagaatcagacttaaaagagtgccggaattttttggataaagtccttcgttatacacaaaccatacagtttaacactccacgttcgtag

SEQ ID NO: 396096 - DNA, 381 bp, Salmonella enterica
atgcaaatttctgatcgtctacgcaacgaaagggagcgcttagggctttcgcaaacagcgatgtcaaaggtgtgtagtgttgcttttagaacatattgtgattacgaggcaggaaaatcggagccgaaggcatccacattggcttcattagctgaattcggtgttgatattctttttgtgctgtcaggggtaaaaacaccaaagattgatggtatttctgaggatgagcaagaagttgtgaaaatgtaccgtgcggctccacttgctgttaaagctgcggtcttgggcgctcttactgctggtagttctgctcatggttcagtcaacgtttcaggtaacagcaaccgtgtagcgggcagggattataatgaaaagaaataa

SEQ ID NO: 396097 - DNA, 378 bp, Salmonella enterica
gtgaaaatatcaattggtgtgcgtttgaaggaagaaagggaaaggctagggctgagccaggctgctcttggtgagatcggcggggttagaaagcaagcgcagctcctctatgaaaaaggtgagcgcaatccagatactgcttacctttctgcgatatcaaagttcggggtggatattcaatatgttgtggttggtgagcgctctatatcggcgttaagtaatgatgaaagtgagcttttatcgctttatcgttctgctccattggccgttaaagcggcagcattggcagctcttacagccggtagttctgtttctgtcaatgtttcaggtaacagtaaccgtgtagcgggcggggattatcacgaaaagaaaaagtaa

SEQ ID NO: 396098 - DNA, 672 bp, Salmonella enterica
atggatttaaactcaaacggggataaaaataaaattgcagggcgtgattataaagaaaataacgtccagattgatagtcttgatagcagtcagacaattaacatcaatgttcctgctaagggggcggatgagcgcccgttagtaaagtcgcaacgtgccagcatacggcaacttgtaaacgctatagctgagtttgaaaatacagaagcggcaccaatttgggtaaagttgcacgctgaacttggcgtaaacggcgtgagcgagatatcaggtagtcagtataaggctgcgttaaacttcctcaatgctttattggccgacagtaaagagaaaaaagcctgcaaacttcttatcggtaaaattcttaagaggacagggaagccgaatttacggcataaacttaacgagcattgcagcatttattataaaacaacattgctggatgaattgaaccacagtcaacttgtggaaatttatgaatgggtggacaaaaacacgccagtagcttctcttgattttacagaagatatgacgacttcttttaataatgtcgaaatgagtaaaaccaccaagagagatcctcttgttgaattgttaacaactcattcgctggtatttgtaatcgtatttgttgctggtttcgttgtgggtgaaattttctcaaaaatatga

SEQ ID NO: 396099 - DNA, 498 bp, Salmonella enterica
atgctatggcgtgtgttttttatcccatatgtattactctgtatattatattgtgtctctttctcttacccaattacgggcattgccattatgctcttattacctgtagctttcggattcattatctattcaatgtgctacactgaattaaataactatttagataaaatggctgacactgtatctttttttagcggcacaattactgcttgcatcgcaataataaaattttcattatcggaagataatcagttattttcattaaaaagtaattttttaaatattcccatgttagttttcctgatcgtctttgctttttttgcaagcataaaattttttatttccatgaaccaaatgttaaaggcaagaaaggtatatttatctcaagcatcaaaccatcaagatagaaaaaacagaccaagagtaattcgagcactcaattttttattaacgaaaaaactatgtaatttcattaatactaaaatcaaattattttga

SEQ ID NO: 396100 - DNA, 237 bp, Salmonella enterica
atgatatatatacttgtctttattaagaaagagttttttagactattaataactattgcatatataggggggatcatattgggggtagttaactatgatgaaaatatacgctatatgaatgtgattatcccatttgttgtctctgctctgatagcattgtttcctttttttctaatgtgttttttcattcctctttatcagaaatttgaggatattgtatttctcaaaataatttga

SEQ ID NO: 396101 - DNA, 1686 bp, Salmonella enterica
gtgttatcatataagcaacaagtaaaggaagaaagtcgaaataaaatatggtcaagagccataaaaaaactgacaaaagaaaggaagaaccaatatataataaaaaaagaatacatcaaaaacctttggaattactcttttaatgaaattctcaaaaacactatctacgacaaaaaaaccataacctcttgggttgatttttcagatacgctaaatatcaaaaagaacccaaaccaattaaaaattgcttatttttgcggccctgaaccagaaaatgacttagatatactgatcaagttaggtgtaaaagttgagaatgtttgggccattgaagctgataaaaaaacttaccaaaaagcaattgaaagcgtaaggataaaatatccaaccttaaaaattttcaatggtgatatatcagacttagttaaggcaatatctttcaaatttgacataatatatcttgattttacagctccacttattagtagtaaatccaagccattattaaaaataaactcaatatttgagcatcatgctttagaagacctagggattttaattataaatggtgctcttcctgaaaataattctgataatgttgattttttagcatcttacttccgcagccaaacatttcttgagtctccaattattaccggcgatgatactgatgtatattataccgaaggtagcgatgctcaagggttgtttacggatgaagagattgcagagataactaagtcgggagaatgcgattggattgatgaaaatgactcattcaataaaaaaataaaggaaaactttgcgtcaacatatagtgcattttgcacacattaccctgcaatggtagcaagctacgcacaaccaatacataacgtatcaactataccctctttaaaaagaatgtttttcaaaacggatataaaaaccataaaaaactgtcttgaaagaatagccactccatctgataaattattcaaaaatattgactatgataaattactatccgatgatgagtatgctaaaaaagttgatttaactggttctgagttatatgaacaacatcaggaattccctatatggagttttatttctagactttctcgttctaaaaattcattaagtagttactggaatcaacagtttaataaaaaaaatgatggctgcctatctttagaaagcatccaactatatgatttactaaagacagcacactattcatacaagagtattctttcagatacgctgtctaattcaatagaagaaatcatggaaaaaatccctgacagacatggaggcattttttgtgatgtaccaatgcctcacttgtggatggaattagctttaaaccacttaggcggtacatatcatataaacacaaaacaacattggcgtgcaaagtataaggcaaaagagcatgaaatgtatttagatatgtttgtttttgataaatgtagagcattatatgattggttacccatgctcgacttgtatggcacttatatatcagccatagaaagacaaataatagttagatcttgtatggatgccattaaaaaacagtgtcactattcctttttcgacttatatttcggttcacatttaatagggatacatacaaaagagtggtcaggttgcccaaacctaaagattcgccacaacctgaacaatccaaatgaaaagtaa

SEQ ID NO: 396102 - DNA, 2238 bp, Salmonella enterica
atgaatgtcgagcaaattcgcccgcgcattagcaaaaatttgaaaaatttatttctagatcctaataactaccgttttgttgacaatgaccagcacaagccagtctcagaaaaggacatgctagatccaacaattcagcgtaggactcgcttttttatagaaggaaatagacaagagaatatcaaagatctaatagcaagttttaaagctaatggatacttagatgttgatgttattcaagtaaaggatttaggagataacaattatttagtccttgaaggaaatcgtcgtgtaacggcgctgaaagcattgcaggaagcacatgaaaagggttttgatattggaaaactagacccatctatttttagaagtgtgcctttcgaaatccataataatcaagatgttgaaaaacatctgattgtgatgggattaaagcatataagtggcaataaaaagtggtcaacatttaaccaatccaaactgctttatgattttttaaaaccatatgaagacaaaactcgagatgagtatgttgaaaaagaagatgagctagttagttcgctcggtatttctaaaactcgtcttcgctctatgcttagagtttataatctaatttccttatataaaacaagtgagtatggtgagcaattcgaaccaagtatgtttggtatttttgaagaaataatcaaaaagcctgtaattaaatcttggttagactggagtgataacggttattatgctcgaaatttagtgaatcttgataggcttttttcgtggatctctaaaacagatgaataccttgagaaaaatgagctagaagatgacattgaagaggaaagtaatggtgaatacgttgagctagaaccaataattactaaatctcttgagatacgagatcttgctctgttcatcaataatgaaaaagccttgaaggtaatggaggatgagcgtagccttgcaagaggattagctgcgagcggttcagtaaatcagcaaaactataaaaatgctttaagcaagcttgaagactccttgaaggatttaaatttatatagtagcctcataaaccaagaagatttgcgcttattagatgatgcaaaagaaaaactaacacaaataatgccaaaacagacggctataaatatcgaaggaggaaactatacaactaattttgagtatggagtaaaaaaacactttaaatctattcatatcaaaaaatataaattctttaaaaatttctcattggataatttcaataagattaatatcattgctgggtttaataatgctgggaaaacttctttacttgaagcgatttacttattgacgcagcgtaatgatatatcatcgcattttaatcttattaggcaaaaaaataaaatcagtactttgagtccaacattgttgaatgctcttttccaagataaaataatcttatcaggagtgtttgatgatagtaatgttactgttgaaatgattaaatatgatgattcttcaattgataaacaagatgactatatagcgtcttatagcttaaagtctagcattgatggagaatttagaaataacacagtccatacttttattcatgaacgtatgagaaggaatgctgatcaagtttcgcatttgtgttcatcgtcatttaaaagcccttatttctacgatatagacgatttgctcactgattataacaaaagtataggtgcaagtttaacgtctgtaactgactcagagtcagatgatttaaatatacaatccgctatcggcctggttattgaatttatgaataaaattgagccaacgataaaagatgtcagattcactgaggacatggagctcaaaaggtttatcgtagaatcagcatatgattttaacagaagtttcgatcttacctcttatggagagggtattcagcgcatcttttatatagccttatcttttgctgcgtgtcgcaacggtgtactttttattgatgaatttgaaactgcgattcattatagtttactattggagtttactaaatttacgcaacaacttgcagaacgtttcaatgtgcaagtgttccttacgtcacattcgggggaatgtatcacagcttttttaaataacgattataacaatgattgcattactggatttcagttaagcaaagttgacgataaagtagtagtgaaaagggctgatggcgaaagatttggctatttgataaaaaatattgatcttgatattagaggctaa

SEQ ID NO: 396103 - DNA, 843 bp, Salmonella enterica
gtgagtgtatcttataatagagtcatagttgccttttgtgaaggacagcatgacgtcgcttttcttagcagaattcttttagttaatggattcctacttcaagatctcaaaattggtcaattacctccaccgtttgataaacgctttgaaaaagaactaagtcaagtaagaattccagataaaaaacttggttttcagccaaacgggccgaaactaccttctgtttgtttctatcatgatggaaacttaatttttatacataatctaaatggtgatggcagaagtcgtgaaagggctgagttagttactatgtataaagaactttctggtacagatgacttcagtatagaaattgcatatagatttttatacttttttgatgctgatgaacttggcattgatgcaagaataacagatattaaaaatgagataggtttagaagaagctactcaactctccaatggtaatattattgatttcgatgggagtgaatggggtggttatatttttcatgatgttcaaactcagcttggtaccttagaggatcaattgttaggttattttcataacaaaagccaacaattgcagcaagatattttgagtttccttcaaactaatttattgatacaagaaagaacgaagcgatttataagttctaatgctggtgaaagttatagtggaagatctcagtattacgaaaaaaaatccgttttaggtatgtatgctcagctccagttttcaggtgttagtaatgctgttttgattagtaacacagattttttaaaagctgtcgatattaatggatgtcagcaatgtactctaattaatagactttttatgtga

SEQ ID NO: 396104 - DNA, 267 bp, Salmonella enterica
atgaataaaccacgtctcgctatagataactctgaaaccccaaaaattattgatagtggtgatggcggaggcgatggtatgcaagctagagttgcaaagctggaatctgatgtcgaatatataaaaagcaccctcaaagacatcaaagatgatgtgcgcgagattaagcgtgacgcgagaacggattttcgaataatttttggagcaattatcactgtagcccttggtcttgctggattaatggctaagggatttaattggctttaa

SEQ ID NO: 396105 - DNA, 342 bp, Salmonella enterica
atggaactggtttcacttgaacatatcgatgctctcctagaaaaacttgataagaaaaaatgtccttggtgtgatggtgaacattggtcgatacgtgttattcctgaagctaaaatagactcaactgaagatatatccggcctgcgtgctctgcctcacttccggatgtttaaagaagatggtagccttagaggcacaatgacaactggtgtgcagaacgccttcccagttgtggttgtcaggtgtgacgattgtggttatatatatctttttgattactttagacttattgaattatataaagaaaaatacaataacgatctagaggcagatgatgaataa

SEQ ID NO: 396106 - DNA, 828 bp, Salmonella enterica
gtgaaagagaatcaaataacagcatcaatggcgaaagatattgcctttaagcttggcgcagtcctgaacgacgaagaagcagaaatttttgccgatggctataacgccgccctgcttaaagttaacaaaaacgcgtcaactgaattaccaaattacgctaatttatcaaccagttctcaggctgcacctgatgacagcgtcctgcttccatgcccattctgcggatcaccggctgaacactaccctgatggtgatatggaaggttacatcatcatgtgcggtaacaaaaatggagactgtaacctccaggcatttgggttcaccactccggaggaggcagagaaggcgtggaacactcgcgctgccctgcttcagggtggccaacctgtaagccaaacttacgagttgccagaatacgagttgccagaattaatcgaaggcatggaagtatcggtagacgtcagtacctgcgattttgatgctggtcatcgctatttcggtactgtcaccgagttatcggaactgtacacagcaaagaatggctatatccttctggttcaggacgcaaagccaaatttcgatgtgaatggcaactctccggtaattccggatggttggataagctgtagtgagcgaatgccggataatgatgaatctaaacccatcgcaatttttaccggaaaatgtctgggtcaggggatgttcgttgctacatacgacgatgatgggttctttgactattgggagggtatggaaattatcggtgtaagccactggatgccgatgccagcagcaccagaaccggagaccgggccatgtacaaaataa

SEQ ID NO: 396107 - DNA, 333 bp, Salmonella enterica
atgctgagcctcagtgctaatgaaaaaaccattagggtgaaagtggcatgcgtaaattttcatgtattccccccagaaacgcaaaagcccaaggcgttaacctcgggcttgaatttgtttggtcgacgattgaagctatggcaacgatatcagatttacataaaatatatgctaattagttcatttatgcaatacattgctgataatttgctgctttttgctgtgaacgtgattgtacaacgtgatgtagcgcttgggagtctaatctcttatacagtctggtcattgcctcgtaatgctccacgtaattttgagaccagtttgttttgttaa

SEQ ID NO: 396108 - DNA, 498 bp, Salmonella enterica
gtgggggctgaaatgaaccgcataagcacgggcgtaatagcctcattgttgattgtggtcgcggcgctggcatgggcaacagaccattaccacagtaacgcggtacggttccggcagcagcgggacaccgccactcacaacctgaatctggcgaacgagactatcagtgatatgcaaacgcgccagcgtgacgttgccgccctcgatgccagatacacgaaggaattagccgatgcgaaagctgagaatgatgctttgcgcgatgatgtcgccgctggccgtcgtcgcctgctcgtcaacgccacctgtcccgcaatgccgacaggtaaatccacctccgccgcccgcgtggataatgcagcccgccccagactggcagactccgctcaacgggattatttcaccctcaaagagcgagtgacaacaatgcaaaagcaactggaaggggcgcaggactatatcagaacgcagtgccagaaaataaacaaaaaaagttaa

SEQ ID NO: 396109 - DNA, 2109 bp, Salmonella enterica
ttgacaacgttttcagatgtagaagatgcttcggttgtatttgaagagttacatgaaatttttaaaaatagtgggaatttaataggctatccctttgagaaaaacttccaacttttgaacgaactagatgacatttttttcgatgtagatgcatatgaaaatttattagactatatgactgagcaatctgctgttagaggtggtgaagttaaaggggcattattaaatctacgaagaggtataaagaggcttcaaaatggtcacccttatcaggcaatcaagtatttaggaaaatcttttattccactctataaagaggaatcacgagataaatttatattagcattaaaagctattgcttatgcttacgaatccattggattgctatggagttcacgttcatgcttgcttctatccgcttctttgattacagataacttctggaagtatgatgagatatcattaaagcaggctgagatttattatagtttatgcctaacagaaataaaactagggaaattagcacatgcccttttatggtatgaactgtttttaataattaacgagaatatcagtgatagctcgttcggcgataaagaaaatcagcaagtcgatttttacataagtcaactcattttgaacactgacctaaagggaataaatcgacagagtaatatccccgatgaactcgatagattaggcctttttgtatcatcgggatgtcttaaatatgctttaggttatattgaagattttgaacgtgagtacgaagttactgccgataaagatcataatgatttcttgcaaaaaatacgtgactttgatgcaggatttaatagtaagggcataaaagataaccatgacaaacgaggagtacatacatcttttatttttggatgcaccatagaaattaactttccgaatcggtcaccatttatagaattttcaactaatgtcttatcacttttagagggtgcttttgcaacctgtacgattgacaacatccatcttaaagaagcatttttaattattgaagtaatagcagatgacgatgatgacttatccttatcacatgaaataaatagcaatagtggaaaactaaatcttacaataaattgcgctggttttgatgcaagtgattttagaatcgaggctcaacaaaaaatcactaatgaattcaagaaattagtatttgatcttctccctgaattattttttataaaaaatacagaatacattgaaaaaatgatcttcgaagatgctgcattcgacagagcaattagttttggtgcctgtatcaaatctattgaaaatgttcttggaaatgatattgatcaacaaattaagaaaatttattccaccagtgctgaaaagaaaacttatcctcttttaagagataaatcctgggatagtgaatttccgaaagtgttggagatcgaggatataaaagctccaacacctggtaaaggaagaatgcctgaagaggaacttaattccgaaaatataacacataaagattattccatacaaagtctaatcaagcctcgtctatgggatagaacacgctggcaaggagtaggcttcgctcaatttaaatcgtgttatccagggttatatctattatttaaacaccccgatataggtgaggacattttcaaagatcttatatcatcagtaggcttggtagatagtaaagccagattacgggtttgtattgtcaagggtatttcagttaaaaacccaactcattatagagtactaatatctgaaaatatgatgacaacgccgttaactaaaagaatgacaatgatcagtagaattaatacgatgactcctgatagcaatgtcaatttagaaaggtttcttgctgcatatcaggcttgtggaaaattctatcttggatgtgatgcgatgttaaaaaatattgttcctgagcatccacaaagagatagtttagggatagaaatgagtacgttcgatgttagatgggcttgggaaattgggttaaatgatgttgattgcattggggttaatttaaaagaagatgacccctatattcctagtgatgtagctgagatcccattattgcaattgataaacagtaaataa

SEQ ID NO: 396110 - DNA, 267 bp, Salmonella enterica
atggaacgcaataaaatccagtgtcctttctgcttaaaagaaagtcagcatggtgtgcgagtttgcactggctgtatggcgactgttctgtatagagcctatccgcagtggtatgcgcttttggttatctttctgtcgtttggtctgtcaatcctgataggaatgtctacaggtatagctggggctactatcagtttgccgattataggcattgtcggacttattgctgggaaggttatcttttctgataatgttgttttcaggtga

SEQ ID NO: 396111 - DNA, 195 bp, Salmonella enterica
atgtctgaaaaactgaacgtcagagagctggcatttcattatcttgccagccagcatgaaaagctgagtgaagaggcgtatctggaaaaactcatgaaggcagaggcagaattttccaggctgctggagtcagcaaatccaccaaaatttaacgaccctcttgagacgtttcatcagttggggaaacaggcttag

SEQ ID NO: 396112 - DNA, 252 bp, Salmonella enterica
atgaaaaaagaaacggtattaattggaggccatgagatagacgcaggcgttgcacgcgatatttttaacgccgttcagtcatctgtgcagcgagtggttgaagcgttagtggtcgccggaaaaacagataaagaggtgaaaacagcggcaaaaaccaccgcagaagcggtggtggatacttttgtcatattatgccagacaaaaactaagcctgtttccccaactgatgaaacgtctcaagagggtcgttaa

SEQ ID NO: 396113 - DNA, 255 bp, Salmonella enterica
atgagtacagaaaaaacactccccccgacacctaaaaaattacgggaagcgcgtgaagaaggacaggtagccaaaagtaatgaactggcagcaggtgttcagcttgctgttattttattatacctctatacttttggtaatgatatttggaaggatttaagtgaaatactattgctaacatttgatcaatttgaacaacccctgccaacagcgttttctgcattttttttcagcactttgttctttcatttttaa

SEQ ID NO: 396114 - DNA, 1098 bp, Salmonella enterica
atggaaaatgctattttatataaaaaacgcaattcaaaaaaaatttacgtcggcgatgtcgctgtaggtggtgatgctccgataactgtacaatcaatgacaaatactaatacctgtgatatacattccacattagagcagatccacaaactagaatcggcaggggccgatatgattcggatttccgttcccacgatggaggcagcagagtcttttaagaaattgaaacaatacagtcaggtaccattgattgcagatattcattttgactatcgtattgcattaaaagtcgcagcttacggtgctgattgtttgcgaattaacccgggaaatataggtaatgaacaacggatatcttcagtcattgattgtgctcgggactgtaatatacctatccgtattggtgtcaatgctggttcgcttgaagtggatattcaggaaaaatatggtgaaccaacaccggaagcactgctggaatcggctatgcggcatattaatattctggaaaagaataatttcgataactttaaagttagtgtgaaggcatctgatgtgaatcttgcggtaaacgcctatcgtttgctggcaaaaaaaattgaacagccattgcatcttggaattactgaagcagggggatttcgggctggagcggtaaaatctgctatcggtatcggattattgcttgccgaaggtattggtgatactttacgtgtatctttggctgcagatcctgtagaggaaataaaagtaggatttgatattctaaaatccttacgtttacgttcacgagggattaattttatcgcttgcccgacatgttcacgtcaagaatttgatgttatcagcacggtgaatgagctcgagcaacgactcgaagatattgtcactcctcttgatgtgtcaattattggttgtgttgtgaatggtccgggagaagcactggtatcaacgataggagtagccggaagtaagagtaaaagcgcactatatttacatggaataagacagaaaaatcgtctgaataatgaaaatatgatcgatgaacttgagaaggaaatccgaatgctacttactcaagacagtcatgagaaatcctga

SEQ ID NO: 396115 - DNA, 150 bp, Salmonella enterica
atgatagaggttagcgtggatttcgctatcgctgataagactgtagcgaaagttgcagtcttgctttcggtttatcagaatgataaagagttgccattgtacctgtctattaaaactgattcgtattcgatattgtttttttcacaatag

SEQ ID NO: 396116 - DNA, 375 bp, Salmonella enterica
atgaaaaaaatcataatcgtaggattcgtttttctggccttggcaggttgttcttcagtaggcaaccagtcattgaaaaatgagacgcaggaaagtgtgaaaaccaaaattgttaaaggcaaaactactaaacaggacgtgttggcatcgttcggtgaacctgacagccgttctttgatcgatggtgaagagcaatggtcatacactatgtataacagccagtccaaagcaacctctttcatccccgttgtgggactgcttgcaggcggcgcagactcacaaactaaatctctgacaatttctttcaaaggcgaaaaagtcagcacatacatctttaattctggaacaagcaacgtgaagactggcattttttag

SEQ ID NO: 396117 - DNA, 669 bp, Salmonella enterica
atgagcatctccgctacgaaaagcaggaagaaagaagctgaagctggtctttctgatgatcctcggcaaacggaaatcacgacacccaattttgtgctgtttggtgaaactttcacatttattgagactttctctgccactgtcatcgactccgatccaagcaatggtcatatctgggtaaaaaccaacacaggggatgagaagcagatttctgactatggtatccctttcagaagttcacacactatccataaatacgagcttcgccaatatagtgaggatggttcgtataatgcatataaagatgcgcttatcgttaataagaaaacgggtgaacacgaggtaaacttaaaaagaaaaaccattattatccccgcttttctgacaatgctatttcatactgcctccacagcatcgtattacagagcaatgcctgttccaaagatgctcaccgttatttttattttactttgctctgctgcacttctttcatttcttacattaccttggagctttaaagacggatacgtgtggagcgatcataaatacatttggtttacatattttttctcaagagttggaagttttattggtatcaagttgatgaaaagaagaagccagaaatttgaaaatgaacttagaaaccttattgagtcagtaaagcgctaa

SEQ ID NO: 396118 - DNA, 417 bp, Salmonella enterica
  misc_feature (400)..(409): n is a, c, g, or t
atgagcacaaataatacttttaataaaatcaatgaaagcaggcattaccgtaatggaagcgttagcgaaacgaagctctcgcacgatcagcttcgttcacattgcgtcagtgtcagacttaataatgaagagcttactcttctgaatgcgaaacgtggtcgtcatcgtaaaggcgaatggcttcgtatggcgtttctgcataacctcccctcagttattccatcgatcaatctcgaaacatggaaaacccttggtgagatttcacataagttaaacaggcttgtcgctcatctggatagcaagagcaatgatagttctctctcacaaactgaactctttgcagtgaagcgtcagatctccagcatcacttccatccatattcccaccaatgacataaggnnnnnnnnnntcgtttga

SEQ ID NO: 396119 - DNA, 519 bp, Salmonella enterica; identical to SEQ ID NO: 197539

SEQ ID NO: 396120 - DNA, 2403 bp, Salmonella enterica
atgccgggaaattacaatttggatgtccttgttaatgatcagctaaagttaaatgcaatgatcttatatattgatgatggtaataaaaacatttctccctttgttactgaaaaaacactgacgcagctaggtattaaatactcacttaagtctcaggataagatgaagaaggcgggtgaggactattacaacttactaaaagtcacgcccgggataaaagtacgttttgatcaggaaacgcaagagttaaatatcagtatcccacaactttatatagaaaacagaccggatggttatattgacccaagcctatgggatgagggtatcactgccggtacattttcatatgacgtcaatgcctatcattcagacaacgcggatgattcaagcgacagtgtgtattcagggcttcactatgggctcaattttggtgaatggcggtttcgcagtcgtggtgctctgaactgggaatcaggcaataaagccacctatgatagtcaagaggcctggttacagcgtgatattgcctccctgaagtctcagttggttattggtcaaagcagtacccgtggcgatacatttgattctgtagcagtaaaaggtattcatctttataacgatgatcgtatgttaactggagctgagtctggttatgctccgactatcaaaggggtagctaacaccaatgctaaggtcaccgttaaacagaatggtaatatcataaaacaggtcactgtaccgcctggcccatttgaaataacagatattaccccctccgggttcggaaatgatttggatgtgacggtcactgaggctgatggcagggagcaacatttttcggttcctttctcctctgtttcacaacttttacgtgaagatagcctgcgttgggaggttgccttaggtcagttggaccaggatggattgtaccattcccctgatattgcgaccgcatctgtctattacggtctgactgacaaactgactacctatgcaggattccagtcaacagaccaggactacgaggcatttttgttaggaagcgccgtcaatactgctttaggcgcttttgcgttcgatgcgacacagtcctatgctacgctgcctgatataggaaaatggaatggtacgagttaccgtttgtcctatagtcagcaattagcgcaaagtaaaacctcagttaacgttgctgcatggcgttatgctacagagcattatttatctttgagtgatgcaactaatatttatgatcaattaaaacatacccaaaatcaggctcaatgggtgatcagtgactatcaaagattaaaggatcaattgcaagtcaatattacccagcctcttgacttttataatgaatattggggatcgctgtatgtgtcagggagttggaatagatattggtcagagcagagcaacacccaatattcattagggtacagcaatgctttccgttggggaacatacagtattaccgctcaacgcagctatgatgagaataatgattcggatgatagtgtttatctaagttttaatttaccgtttgaaaaattatccccaaattttaagaaaaaatatgggtttactgatgttaatatggggctgcgaagcgattctgacggcactacccagcttgacgccagtaccaatggtaattcaaccgataaccgattcaattatagtttgaacacctcatattcggcagactctaaccagtcgggtaacaatctcacgcaggttgggggaaatgttaattatgcaagccggttcggtccatggaatgcatcactctccggcagtgaccggggtgataagcaaatgtcattgggtgctagcggaggcatgatcctttaccatggtgggcttgtttttgtcccggataatattgatagcgcaaatacgatagcattagttagtgcgcctggggccgaaggaagtcatgttggatcttctgataaccaaatcgatcactctggctatggtgtagtcactaatttatctccctatcatcgtaatatggtaaatgtagatattagccagcttgataactccgtttatttggataatacctctgcaacagttattcctgatgccggtgcggtagtggaggttagttttaagactaaagtgggaacaccgtatgtctttgacattatgaccgaacagcattctcatataccattcggtgctgacgtgtatgatgaaaataatgaatggcttagcgcggttggacagggtggtaaagtgttacttcgtgggatgaaggatactggcacattgcatattaaatggggggaagatacaagccagcaatgctatgtcaattaccatttgcctgcacggaatgataaaaaaaataccagtatgctgctatctgcaatgctttgtaagcagaataattaa

SEQ ID NO: 396121 - DNA, 309 bp, Salmonella enterica
atgaatattaatgactttgcaaaatttgaaaactatgaaggtaccatcagtgatggtacctttgaggatgttttttatatggactatgttgaagatattgaactaacagaagagaatgagaaatatattgaatggttaagctacttctttgttgccgaaatgcaagatgtgttagatgaaattagcgagttggatatgcttgaacagatttctgtttttgatttctggttcaagatcatccagtcaagagatgaagtagaagcactggcaagaactattatctattataaatcagggatgcctgtttga

SEQ ID NO: 396122 - DNA, 2052 bp, Salmonella enterica
atgctagaatatattagcttatgcgcagaagattgtgaacgccgcatcagcgaaatgctcaacgttgccagccaggcaaataattccaatcgaaaaaacaatatcgacatcatgaaaaatatcggtgaaaatttagataatgttgtcactaatatgcatggcactcctcaagcaatgcaagaattttataaagaagtcaacgagttattgattgatctggatatattagagaaaaataataatgggataaataataaaatcgcctatcaccgattagaaaataaaacacgcaacctccagttcaaattaaacgcaatgctatcgcaaaataaaacatatgaaagaacaaaattaatatatgacgatattattttcaacactatcaacaaatcactaaatctcgcactcggaagatgtaaaataattgcaacagctaatattaatcctgttttcgaaaattcgataaaccaactatttcaaccgacaataaacactctgaaaacggcccaggacaaaattccgtacatatatacggaagaaaaagaagtcattaattatataatacaatatacagaaaaactccagactaatctacaagaacaggcaaaacggcttggggatttaagcgagctcaattcggtacatcgagatgtacaaaaaatgattgaatatgtgaacacgtggtcctatcatattataggaaagctccctcaaagtcttattaaaatagtacgcgatagtttcaatcggacaatatataactcttttgattatcgggttttttcatctggattaatcgaactatctcagctatcaataaaatacgcctcgggaaactttactaacactggacgttatctgacacaagccttttataattcaccgggctctgatgccttgatagaatgttactcacgcggtattccacctaaatatcttgaaaaggattcatcctccgaaaggcttaaatcagctcatacgctaggttgcggaagcgtaaatgaagtgacattgtgtgtttataacgcaccacatggacaacatcctattgagaaagtttttaaacctgagtatgttggtcgttatggattaggtaatcttcaacttcattgtttggacggcaataacttttcagaaatgctagttcgtaatattgcatccagtgaggtagccaagtatttaggttgtcaaaatatagtatcaacagcaacagcgggagtgtataaaaaacagtttggactttttatgaataaagctcctggaaaaacaccttgtgatcttgtaagtacaggcgggataactcaatcccagttagaatcgattcttagcatatgtaaaacaaataacaaattggaaattgcaaaagcaaatttacggcatgaattaaataatctggaatgggctgatgcgttagccggccaaatagatcgacattctgataattatcttatcgatattgataagcttaccggcaacataaaagtaacagggattgataatgatgcctcctttagcgtagcattaacaggtataggtattatatcagtaaataatctaaatatatctgtacaagacaggaataagttaaccccttattttcttagaacatcgcagggaaaactataccttgatgattatcatagcccggtaattgatattcgcatgttagatcatatcggtcaagaaaccataataaatattactgggataaatcaaaaaatagtgcctgatcttatttctcaggagacttacgacgcattaatgtctatcgatgctgttgattatgcagaaaccctaagcgaattattaccaccagcgaatgttcaagctgcccttaagcgtcttgaatcagctaaacaacatgcttcagaattatatcgtaataatcgggtcataagtaattggcaagatcctgacattgaaatttattataacaacgaactgatagattatgaaaataaagtaaacagaggcatcagttatccacaaaatgccaatctcgatctatctttatatcttagggacttccactatagtgtattattggtttga

SEQ ID NO: 396123 - DNA, 1866 bp, Salmonella enterica; identical to SEQ ID NO: 377853

SEQ ID NO: 396124 - DNA, 783 bp, Salmonella enterica; identical to SEQ ID NO: 377850

SEQ ID NO: 396125 - DNA, 795 bp, Salmonella enterica
atgttatttagtatacagcttctcataatattaatatgtctgttttatggcgcccgaaagggagggatcgcgctcgggttgctgggcggtatcggtctggtcattctggtgtttgttttccatctccagccaggtaaaccgcccgttgacgtaatgctggtaattatcgcggtagtcgccgcgtcggcaacattacaagcgtcaggcggtctggatgtgatgttgcagattgccgaaaagctgctgcgccgcaaccccaaatatgtctctattgtggcgccgttcgtcacctgtaccctgacgattctgtgtggtacaggccacgtggtctacaccattttgccgattatctacgacgtagcgatcaagaataatatccgtccggaacgtccaatggcggccagttctatcggcgcgcaaatgggcatcatcgccagtccggtttccgtcgctgttgtttctctggtggcaatgctgggcaacgtaacttttgatggcaggcatctggaattcctcgatctgctgtcgatcaccatcccctctaccctgctcggcatcctggcgatcggcatttttagctggttccgcggtaaagatctggataaagacgaagcgtttcagaaatttatctccgtgccggaaaaccgtcagtacgtgtacggcgataccgcgacgctgctggataaaaaactgccgaaaagcaactggctggcgatgtggatcttcctggcggctatcgccgtggtcgctatcctgggggcagactccgacttacgccctaccttcggcggctaa

SEQ ID NO: 396126 - DNA, 537 bp, Salmonella enterica
atggtgctggtcattcagatgttcatgctgctgaccggggcgctcattatcatcctgaccaaaaccaatcctgcgtctatctcaaaaaatgaagtctttcgttccggtatgattgcgattgtcgcggtatacgggatcgcctggatggcggaaaccatgttcggcgcgcacatgtcggaaattcagggcgtgctgggtgaaatggtcaaagagtatccgtgggcctacgccatcgttctgctgctggtctccaagtttgttaactcccaggcggcagcgctggcggcgattgttcccgtcgcgctggctatcggcgtcgatccggcgtatatcgtggcctctgcgccggcatgttatggctactacatcctgccgacctacccaagcgatctggcggcgattcagtttgaccgttccggcacgacccatattggccgcttcgtcattaaccacagcttcattctgccgggtttgattggcgtaagcgtctcctgcgtctttggctggatctttgccgcaatgtacggattcctgtaa

SEQ ID NO: 396127 - DNA, 492 bp, Salmonella enterica; identical to SEQ ID NO: 377634

SEQ ID NO: 396128 - DNA, 333 bp, Salmonella enterica
atgaaagaaaacgaaatcacgatggatattgcggacgcctccattactgcaaaagatataacgctggatacccctattattcgcggtaaatccacggttgaaaaaatcaaaatccgcaaacccagcgcaggcgaattacggggggtaaaacttcaggcgttaatggagtctgacgttaacagcattattacacttctgccgcgcatcacatcacctgcactgacaaccagtgaagttaacgctatggacgcttccgatttgctcgcgttaggtaatgaggtgattatttttttgttgccgaagtcggtgcgtgcggatttggaaaaagcctga

SEQ ID NO: 396129 - DNA, 285 bp, Salmonella enterica
atgaacaaaacatcaacagcatttgcagccaccgcgcagccttttatctttgaactcagtcaactggttggcgtacgtatcagtgacgaatggggcgaagtgcgggcgcgtgctcagtacgccaatggcgaaaatcagtatctgatccactatcaggcggcggataaatgcgcccgcagtgaatggttcagcgagtccgtactggaggctgtttgcgatgataactatccgggatgccctgtcttcgcagcggtaaatctgccggaaggcgcaacggtatcgtaa

SEQ ID NO: 396130 - DNA, 465 bp, Salmonella enterica
atgaaccacgtagcccctgcaattatcgcttgcctgtttatcactgtactcggcgcaagcttcaccgctgaccactggcacagccgcttcaccggggcagaaaaagcccgcaaggaagcggtagcactcgccgacacgcgccagcagaccattgacgatatgacgaagcgccagaaccagaacgccgcccttgacgcgaagtacacacaggaattagccgatgcaaaaaccgaatccgaaaagttacgtgctgatcttgcttctggccgtcgccggttgcagctccacgccgtctgtatgtccgccacagcgggtaataccgccgccaccggcacaactgatgcagccgccgtccgacttactccggacgctgaacgggattatcagcgtctcagaaccgaagccagagccatcacccaccaggtagagggcctgcaacagtacattaccgaacaatgccactaa

SEQ ID NO: 396131 - DNA, 957 bp, Salmonella enterica
atgaaccatgccatctaccacggcgactgccttgacgtcatgccgacacttgaacccggcagcgttgaccttatcgtgtgcgatccaccctatggcacgatgaagggatcaggcattaaatgctgggatgaatcaaccgccgcgtgggatatcgccattgaaccccgtgcgctgtttgccgtgtgcgaacatgtactcagggttaacggcgcgctggtattgtttgcccaggaaccctatacaagccgcctgataacgcaggcgcacaacaatctgccgttcagttaccgccttgtgtgggagaaagagcattttgccaactgcctgaacgtcaatcgtgcgccagtctcatattttgaagatgttctggtgttttcaaaggttgagcgatacgacccgaaatttgatcacccactgcgtgaatactcccgcagggtaaaggcatttaccggggcgacagcagaacaggtaaagcacacgcttggacatatgggcgcatctcatttctggggcgctgagggccagcagttctcgctacccacacgcagcacctacgaacaactgaccgccgcctacaacctgaccgctatgccgggttttctggcgcatgacgaaatgaaggtgatccacaacaactggcgaaaatccagacagttaacaccacgcatcttcaatctaccacctggcaaacggcataaatctaacattctgaaatatgcccgcgatcgggaaaagtatcacccaacccagaagccggtagcgttactggaagacctgattcagacctggagcaaccccggcgatacggtgctggatttcacgatggggagcggttcaacgggcgttgcctgcatcaacacaggccgtcgctttatcggtatcgaaaaagagcaacgttactttgatattgcggcaaatcgactcaataacgcagccgggcaagaggtggcagcatga

SEQ ID NO: 396132 - DNA, 339 bp, Salmonella enterica
atgaacagcagtccacacacctggtcagactggtggctgatggtaaaaagctggctacagggtgatatcccactcgatagcctgttaatgacgggcgtaatcgccgcgctcagggtgttttataccggacgtagctggcgccgccttttgctggaagtaccgttgtgctgtctgcttgcggtcgccgctttcactatcatcaagccggttcccgtcgcctggctgacagaagactggcgcgtagggattggcgctgctatcggccttatcggcgttgaacatatcagggcgcttggcgtgatcatcacaaagaaatttgcagggaaaaatgacgaatga

SEQ ID NO: 396133 - DNA, 204 bp, Salmonella enterica
atgatcgtgattgcactacagggcgacaccgtggatgccatatgctggcgatatttcggcacaacgcgcggagttacagaagaggtttaccggataaatccgggactggcggaaacggggccggtactcaaccaggggcagcccgttattttgccggatgtggcaccgccacaggaaaaaaaacttattcagctatgggattaa

SEQ ID NO: 396134 - DNA, 486 bp, Salmonella enterica
atgcaaaccatcttaaccagcaactcaccggaaccgattaaaccgacccccgtaagtcccgaagctattactaatttcgctttctggccggacattcgcgttgatcagtaccgtgaagtgatgcgccaggagggggaggaaacatcaccccgacttcgtgaagccatcatgcaggcgatggggtatgcaaacggacagcttgcacgatgggcacaacagcaacagcaaaagggctttaatcaccttgacgaggttcccgccgaaaaaataggcggcgagtccgttcgcgtgctttgttaccgcagagcggtattttttgccgcccgcgccttgctgactgagcaattccggggaactgacaccacacataaaggcgatatcagggcaaacgccctggaatccacaacagatgatatgtggcggcagtttcagtgggcgttaagtgagttacgggatgaaccccacatgaccgtggatcttatctga

SEQ ID NO: 396135 - DNA, 231 bp, Salmonella enterica
atggtatcggtgcgtatgaggcgtgttgatgatggggtatggcgtttctatgcaaccactgaggaaggcgttcacggtgtgatagcgcgtgctgtgcttacgcctgataatgtccggcttgagttcccccatatgggtaaaccgccgatgatgttcatgcacatatgccaggccaggcggtatattgaagagatgacagggtgccggatgcggtatccgggagggttgtaa

SEQ ID NO: 396136 - DNA, 498 bp, Salmonella enterica
atgactacagtgggactaggcattatttttctccttcactggtggcgtgttgatatctacagagtcacttttctctatcagcgagtttctgactactacattcttggtagcatgggcgttgcgtttttcctctccctgtatctggtaagtaaggggattgtgaaaccgggaggctggaagaaactgtcggcttatctgaaggtttatgccggggcgtgcgttcttacaggattttttctgattatagttatcacgacgcttgcctattttttgcctggtagaacgtcatcttatgtggcttcgtataagtatgctcccggtagttccaaaagctgttccggggctgacgttgacgatcctgacctgaaaactaatttcaaaatttgctaccccgctggtaattatagagatgacaatataatttacgttgagaaacggagtaatattttaggtgcagttgtgacattcgccatgacttcccgtcagggttctgattaa

SEQ ID NO: 396137 - DNA, 309 bp, Salmonella enterica
atgagaaaatacaccgcctaccgtcagggcgaagagcgatttgacggccagttatatcggataatggtacgtgcggaacaaaaggcgcgggaaaatccccgcgttggcataccacaacagccgccagtgccggaagttcaggaaccgaagccggaaacgccgaccgtgatttgcccggcgcgtcaggtaatgaacatatacagggaacttgaagcggaaagagagcgcgagaaactggaaaaagcacgccagatactgacccacaaggcagaaatagtagcaaaatatctgaaaaaacatgagagatag

SEQ ID NO: 396138 - DNA, 1020 bp, Salmonella enterica
atgaccgccaccgtctactacaacgaaatcgatccatttgccgccgcctggctgcaaaaccttattgacgctggttgtgttgctcccggcgtcgttgatacgcgctcaattgaggaagttaccgccaatgaccttaaaggattcacgcagtgccatttcttcgccgggatcggcgtctggtcctacgccctgcgatgcgccggatggcctgacagtcgtcccgtctggacaggttcctgcccctgccagccattcagccagtcaggaaaacgccggggattcaacgacccccgccacctgtggcccgcatggttttaccttgtatcgcagtgccgccctcacgttatctttggtgagcaggttgcaagcaaggacggccttacatggttcgacgctgtacaacttgacctggaagaggcggaatacgccgtcgcagttgtcgatctttgcgctgcgggcatcggcgcgccgcacatccggcaacgcctcttctgggtggccgacgccaacagccaatgcatggaagcacccgtcgaatgcggggagagagggaggattgaatttgcaaacggctgtagccttatcgggctggcccacaccgacaacgacagcagggaaaggcggctatcagggtggcaggattcgcaacgggaagctgtcaacagatcggctggatgtaacagcacagctagcaggctggcctacgccaacaacgagcaactaccgctcgccgtgcccgcaagaggccatgaagacctatcgcgacaatggaacaaaaattcagaaacggttgcaggatttagcagcgacaacggcgccagtccggttaacggcttctggcgagatgctgactggctgttctgccgggatgggaagtggaggccagttaaacccggacttaagccgctggttaatgggactcccggacgagtgggccagttgcgcgcctacggcaacgccatcgttgcgccggtcgcggaagcgttcataagggcatacatggaggcggtcacacaatga

SEQ ID NO: 396139 - DNA, 534 bp, Salmonella enterica
atgattctgaaacctatgagaacgccggggaaatgccctgcgtgtgaacgtgcgtggacgccggaagaagacgagttgttgataagcctgcacccgtcaatgacctataaaaaaatgactgcacatctgaacagatccgaacggggaataagagcacgcgcaagtatttttatccatgcggggattctggcagctaaaacaaagcctttcaccccagatcaggacgcgtttattcgcgctaaccgtcacagattgacgctctacgaggtggctatccatctggggaaatcaaaggattgtgtcagtaaacgcgctcagcgtctgggagttagttacaggaaaacaggagatcttcaccacgcaacgaaacacccggatagcgatgtagaccttatccatgccttgcgcgacgaaggcctgacattcccgtgcatagctaaaaaattcgagataccccgcacaacagcaagatcgttatattacgaccgcaagaccgccattgacgccatcgcaagggagtatctcccgcgatga

SEQ ID NO: 396140 - DNA, 537 bp, Salmonella enterica
atgctacagatgaaatttaagccccgcttcattgaagcattccgcagcggccagaagataacttcactgcgcatgctggattttgaatgccgctactacgaagagacagacgatcgtcaggctgtttttttctatgacgaagaactgaaatacaacacgtatgtagattctattggcggcatatctgtacaccttccagtaggaacagccgttacctattcaaccgaccttgccggaaccctggaaagacagccctacaggcaaggcgacgaaatcgaactggtcaaggaaactgaaagcggcgaaatagcgccgttcgccatcgctaccattgctgacatttccgttatcaagggcgacaaaatagaagacgttgacgccattcatgacggattcaaccctgaccgtgacccgctcgccgagctccatgcattcatgcgggatgtttaccacaccgcagaccccgttaaagaaacgtactggctgtacgtcttcaccaacgtgcagatgttgccgcagtggggaggtgaagcatga

SEQ ID NO: 396141 - DNA, 441 bp, Salmonella enterica
atgattaacccaaataaaaaccttgcccaaaaagccttaatcggtgcgcaatttttgcgtacgcacgccgaggtaatggctggcgacgatgattttttaatcgcgctaatgtctgagtctcacgccatcgccgccagtgccatcgaacagctcgtaaaagaaaacgaaaaacttcgcgagcaactcgtcactctccagaaagcgactaactacaccgttgccgttgacccagcaagcggcccggacaccacagcctgttacacgcctttcgtaagaggcgatcgcgtacgcctgaaactcaccccggaaaaacacggaacggtagatataacccggggtgatgattccgacaccctgtcctgttttgtgcattttgtttacccgcctgaaaaacattcctgggtatcggcaaagctcctggaattaatccccgacgaatga

SEQ ID NO: 396142 - DNA, 192 bp, Salmonella enterica
atgaacaacagcaaagcacacatggtgataagcgcacgaattgcacaggcaatggatgaattacaggctgcattactcaatattgcaaatagcgactatgccgaagcatataaaaatttaacctgtgcagacaaagaaacaagattaataaaaaggcgtttccgggaactttttagatcgccaaaaccttaa

SEQ ID NO: 396143 - DNA, 228 bp, Salmonella enterica
atgaacgcattaaccgtagcgcaatcatatttattgctcattggttcaatagtgctggccgtgtttattgttcagcttccgttattgattaaagactatctccataagcgccgccaacgcaacagactcaacattgagtggcaagaagtgcatattaatgcgtatggccatgttaaacgcagcgattaccagaaaatagctaccggaaactatgaggccaggcgatga

SEQ ID NO: 396144 - DNA, 243 bp, Salmonella enterica
atgagagaacacgtagcagaagcggtaaatgaagttttagacgactacgaaatcaacaaaagaaccgacccggcacatgtagaaacgcatttctacaacatggaagaggaaatcaacaatatccgtaaagttatcgcctttaacgaccctaacaaggaagacattaaggaacttgaccatatggtgtatttattgcgtaaccgcaagataccggaattagttagcatttcagaggtgcaatga

SEQ ID NO: 396145 - DNA, 693 bp, Salmonella enterica
atgaaactcaccatcgaagatgtgcaggtcgccattaaaggcgtaacgaaatacggcaaccgatgcatatctgagcaattattagccgtagttgcgggtaattacgccaaaggtaacaacatcattcttctgcgtttgcaatcactgtatgaagatgaatattccgacttcactgtaggcgagattaaaaacctgtactacaccgaaaagaccgggaaagcacagttgcgcggcgatctcattttcgataccgagaaattggatatacaaagtattctccacagtctggcgcacggctgcgtgtacctgtcaccgtattttatgaacgtcatgtcactggattatggcttcgcctgtctgagtcaagtcaccctgagcaaggccgaagacaccgattttgacggtattgaaccgctggatatttcctgtctggatgggctgattaacgcgatctacaaagaagaaccggcaaccgaagcgccagcagaaccgcagggcgacacgccatacatctacacgccgggtatggacagggacactatcaccaattggctcaactctatcgtctcagacctgaacactgtcgatgccagaaaaggaagaattaaatcactggaagaaagctgcaaagaattaaaggtcgaattaggcgatatcgaagcatttttgaataagaccattcgcactgagtaa

SEQ ID NO: 396146 - DNA, 384 bp, Salmonella enterica
gtgaaaatatctattggtgtgcgtttgaaggaagaaagagaaaggctaggtctgagtcaggctgctatgggggatataggaggggttaaaaagtggacccaaatcaaatatgaaaaaggggatagttccccggattctgtttacttagcgcttttatctaagttcggtcttgatattcaatatgttgtggttggtgagcgttctatgtcggcgctaagtgatgatgaaaatgagcttttatcgctttatcgttctgctccattggccgttaaagcggcagcattggcagctcttacagccggtagttctgctgctggttctgtcaacgtatcaggtagcggcaaccgtatagcgggcagggattatcacgaaaagaaaaagtaa

SEQ ID NO: 396147 - DNA, 429 bp, Salmonella enterica
ttgaagacgagcttttctgaacaaaacactttcgggcgtaacacgctgacgataggcggcaatgaggaggccgcacggctggccggcgtaccggttgtacgtaccaaaattatcatttttattctctctggcctggtgtcggcgggtatcattctggcttcgcgtatgaccagcggtcagccaatgacctccctggattatgagttaatcattatttctgtgtgcgtattaggggggggggcatccctgaaagacggtctcggaaaaatctcatatgtggtggcgggcttactgatattagggacggtggaaaacgcgatgaacctgctcaacatttcaccctttgcgcagtatgtggttcgcggcttaatccttctggcagcagtcattttcgaccattataagcaaaaagcgaagggtacgatttga

SEQ ID NO: 396148 - DNA, 138 bp, Salmonella enterica
atggtcgcagaacttgactctcatctggctgctgatgtggggtcagtccacatagacgaagaggcagggggggatgtggcaattgataacctgggcggagctgccctgggcgggataagcgcatcagggatgccgtga

SEQ ID NO: 396149 - DNA, 762 bp, Salmonella enterica
atgtttaaacaagctgagaaatcaaaacaggataaaaggaaggcgatttctgattcatttattcagaataaacagtttggaaagcacagtgtggtaatcgttgataacagagctgaaactacaacacaaagaatgcctgacccttctgccaggaaaaattattctgaattgaatgttccgatgactgaatcaaaaacgatgtctcatatgaacgggtgtgggtgtccctcatgtgcaggggcagcacaattgaaaataaatttatctgctcaaagcgcatcacttatcaatcgatcagatagaagtacagaggttaaacagctttgccaacataaccaccctgagcatgcggataaagatgtatgtccatatggtttaagcgatgcgagttttagagcacctccaaaacatataaagggacatacgggggggcctgcgaaaaaaagaaaaagagggaggaggaacgtacctccatcagttgcgagtgaatcagttatgactcatgcggaacgagaactatccgcagggcgtgcacaagtggtcaacccctcagccaatggcgggaatgacattgaggtcgctgtgaaaagacagcatcaccataagtccggttctgctgaaacacgtactttctacattcataaaggttccaaccctgttggcggaggcagaaaggcacatgacttcttcattaaggatggagaaccatcagaatctgattcatctgattctgatgtggaagaaaaaaaggagtccgaatga

SEQ ID NO: 396150 - DNA, 210 bp, Salmonella enterica
atgattatattctctgcgccactggtcgagaaacgttatttaacaggcgaactccattttgccttacagaaatcgcattacccggtgaacaggctgggcaccagatggaacgccgctgtaaaacgtgctggcattcatcgctgtaatccgtaccatacgcaaatactttgcctgccggccatcatttattatgcccatttttgttcctga

SEQ ID NO: 396151 - DNA, 264 bp, Salmonella enterica
atggctgaagacaaacagtttcgggaatggtttacactatgggaaccatggcataaagtcattgagcggatagcaccagaaatctgtactgaaattagcactgagaaaaaccgaattgtggagacaagtgatgatatcgcggtcgatgcaatggctgacgtaaaagtgatgagggagatcaacctgcgcctgttcaactccgcgactgaacgcgtgctggctaaaacagaccaggaacatcttttgaagccacaatgggcatag

SEQ ID NO: 396152 - DNA, 372 bp, Salmonella enterica
atgataataatcaactcaaacacgctgggcgcaccggaagaaccgcaaatagctctcgcggcattgtccggtcgtttcggcctgttctacgcagaagatgcaccggtatgcgaggatctcaacagcgcaatagtagggtatgtgtccattactcccgacacacacggtaacccgcagtctggtgaactggcttacggtaatgtgcagacactggattcactgggcgcaggcgctgacggtcgcaaggttataccggaaacaggcggcgctaaggagtggataacccaggttgcattcatggcggacggtagtctctattcgcgtatcagggtaaataacaacgccttccagtcctgggttaaacgctggtag

SEQ ID NO: 396153 - DNA, 363 bp, Salmonella enterica
atggccatctacacaaaatccccgccacccctgaagctaccggatttcgatccggcagcgatagccgggttattcggttccctcccggttgggccaatggaagaaataaccaacttcaacaccgcgctaatgggctttatgcgctgtacctatacagtaccccatgtaccagaccctaaatggccgtggggtacagtctggacggtatcatcaaagggcgctggtcggactggtaagcgttatattcccgccgttctggaacagggcgaagtgacgtatcagattttctacagtacgcagggtacgttgtattcacggggtggcctttggctgacaggctggggtaactggacattaaggtga

SEQ ID NO: 396154 - DNA, 240 bp, Salmonella enterica
atgccacgtaatgaaagcactcaaatcacgattggtaatgactggacgcaaatcacggatggtagcgctgatgaagtcatccagttttatgctgtcgtggatgtttgccggagtccgacaaaacctgctgatgacgtccccagcctgagatatgaggctacaaccctgacaattactgcccccgatattgcgtggattcgcacggtgtatgtcgatagcgctattgcaaatgtatggtga

SEQ ID NO: 396155 - DNA, 1134 bp, Salmonella enterica
atgggtaaactgaccgaactcgaacaatgggatgaagatgtctatcagattgaaacatccgatccggtgctgggtggccctgagggtgtttccaaccgtccacagaagcaactggccaaccgcacgcaatggctgaaaaaacgtctggaagacgcaaatgacgcactgactgaacacgaaaaatcccgtaaccatcctgacgccacactgaccgacaagggctttgttcggctctacagcggcgttaccagcatagatgaaacaatggccgccacgccaaaagcggtcaaaatcgcgatggacaacgctaacgcacgtcttgccaaagagcgcaaccttgccgacctgacaaacatcccgctggcccgtcagtccctgcagctcggcaacagcgccgtcctcaatgttggcaccaccgcaaacacagtggctgcaggcgacgacagccgcatcactggcgcaatgcaaaaagaccagaacggcgcagacatcccggataaaccaggctttatcaaaaacgtcggtttaaaagaaaccctcaatccgacaaaacgcgtcagtatcggtaacataggaaccggcgcttttgacggcagcacaccgagcatcaatatcggcgacagtgacagcggatttattggtagtgcggatggtgtactggatatttactgcaataacgccaaagtgggctatatcgacaataccggtctgtatatgctcgccgatattttcactaccgggtcgcttcatgcaggcgactctactctccacactaacggcaatgtttacggttcttcctggggtggctggctgagtgacttccttaataacaattacaaccgcaaaaatactgccagtctgggtggttatggatgggttcgtgatgaaagtaccagttttataatgcaatggggaacgcttggtgcctcaaacggaacctacaatttcccgcgcgctttccctgttggttgccttgctatatttgtcaccaacaccagtcggcagggaggtgcagtggataacgcattcggctatccagtgaataacagtcagttttttgccgcgactaaagcatcaacagacggaaatgtcgtcaatggctatcctgtagcctggtttgcgattgggagataa

SEQ ID NO: 396156 - DNA, 2688 bp, Salmonella enterica
atgtccacatcgttttcattaggtgtcgttatcggggctgcagtctccggttcatttacctcggcgatggggactgcgcaacgcacgctggggaaactcaccgacaccacctcccgccttaaaacccgtcaggacgccctcagtcgcgcctcagaacgctatggccagattggttccggcatcgctgaccgcctgcgcagcagctatgacagtgtcggtgacagtctgaagcgcgtcgaataccagcacacccggctgctgaaatgggatgcgaaggtcaacaccatgctgctcaaacgccagcagatcatgggtgaactcagagggcttgtcggtggtgtgacggcggctggcgcgctggcttataagtccacagcgacttatgccggtgaagaagcactggtacgttcaaccagtcagggcgcacgtaactatgaccgggctgaagagcgtcagttgctggccgacacccggacagcttcccgcgaatcctcacaaagcgtcactgagcttttaaaagccacggacgatctggtcgatgcagggtggaaccgcaaggaagccgcgaaactgaacgatattatcggcaaggtggcgaccgtctataacatggggacgcaggatacggcgaaagtggccgatgtgctgactcataacctcggctatgacaatgacaagggaacccggcacgccttcaatctgcttgccgacagcggtaatcgtgtcggttttgagttcccggatgtggctccggcgtttggcaaactggcggagtccttcgagaagcgcggtattaccggtgatgaggccataaccgagattatgtcctccctcggtgctgcacgcctgacgatgcgtaataaagaggacgtggtctccgggcttcagggctggatggataccagcgacggtcgcaggatggagcatcgttttgatgttatgggtgtcgactacgtccgctcgcgcgccgactacatgaaaggcggcatgtcggatttcgaagcctcgctacgcgttacccagcgctatcttgaagaggtgggtaacggccagttcatgagtaaatttagcgcactcaatggtgacgctgcggcgcagcagcaattaattcagtcttttggtctgggccagatagtatcttcgcctgaacagattaaatttattaacgccatgtcgaaaaactggggcgcttacgaaaataataagcagaccattaaaaaccagggcgactctaattatctgaatatggcttacgaccagaaggcggatacgcttggcgtgcagggtaagcagcttaaaaacgagctgagtattttatcttccacatttggtgaagtgcttgcaccggttattcgcgacaatatcgatcagctaaaaaccggtattcatatggtcactgactgggtgactcagaatcaggtgcttatccgaacttatggcggcatggccatcaccgcagggaaatacttcctgatgcttcggggaggatggctcatcggtaagcttttttacagtggcactcttggctggatctttggtctggtccggggaggtttgcgtggtgttgcgacaattgtccggctgacccatgaataccgcacgctgggcaaaagctcctcgatgctgtttaacctcaccatgaggacaggacgcggctttaaatcactgtggggcaaaatgcgcggtctggggccgctgacttcccggctggccacaggtgccggtcgtctcggtcgcgcactgggtgggagactgatgctcggtgcagtaaaggccggaggtggccttaaaagcttgtggggcaaaatgcgcggtctggggccgctggcttcccggttagccacaggtgctggtcgtcttgcccgcgtgctgggtggtggtcttctgcgcggcctgatggttgccgggcgcgccatcctgtttattggtcgggctttgatgatgaatcccattggcctgttaattaccggtattgccatcgcggcatacctgatttaccgctactgggaacctatcagcggctggtttaaagcccgctgggaagagattaaaacggcattcagtggcggtatcggcggcgtttgtgaattaattattaactggtcgccgctgggattattttataaagcctttgccggggtattaagctggtttgatattgacctgcccaaaaactttaccgactttggcaaaaatattatcgacggtctgacgaagggaataaaagacaaatggaaatccgttaaagacacctttaaagatttaaccgacggtattaaaggcttctttaccggcgaggtaagaattcaaagtccctcccgcgtctttatgggatacggcggttatatcgttgaaggtctgcagctcggtatcaacaatacggcatggaaagcgcagcaggccgcaaaggggctggccgctaaaatcatgcccgatggtctgcgttcgccgcgtattcccgctgtgccgtttattgccgatattccgcgtggtgccaccgcaggcggcggtgaatcttctccggcaattcatctggtctattccccgtcagtacatataaaggaagcgacgcccggcacattaaccacggatatgataaagcaggcgttaaaagagaacctgccggagcttgagcgtctgcttgatgaaatcatgcgccgcaaagagcgccgcagctttgatgcgtaa

SEQ ID NO: 396157 - DNA, 267 bp, Salmonella enterica
atgttttttgttattggcgtttatattattgccgtgctctccgcgtatggttatctggcctggctcattattgtcgacggcataatgaccggacaattaacgtttgttgtgggctttataatctttttcatcggcgcgttatttattttccttgtccaggcgatggtgacgccgctgatgtatccgctggcatatattgccgagggtatctggtggctgatgaaaaaagcctggcacggcattatccgtcgccgtactcacgcttaa

SEQ ID NO: 396158 - DNA, 342 bp, Salmonella enterica
atggcaacgcaacacgttattctcagtgaaaccctgacggccaccggcgcgctggtacagcagcgactggtgggttatgacggtaaaacctgcaccaaaggcgggctggcactcggtattgccgaggttgatgccgccgccggtgacgcggtagccgtcaacgtgctggggattatcgccgccgaggccggtgccgccattgctgtcggtgacaaactgcagtccgatgataacggctgcgtcatcccgctggaggccaccggcaatcctgagcaggtcggcgtcgcactaacggcggctgcggctgcgggcaactctcttaaagtcatgtggggtgcgtaa

SEQ ID NO: 396159 - DNA, 561 bp, Salmonella enterica
atggggcgcaaaagttcactggatgtactgccgcaggatgtccggcgctggcttgagcgggcgctgaccgagcgtaacttcacaggctatgccgagctggaggcgctgctaaaggacaagggttttgtgataacccgctccagcctgcagcgctttggctacaagatggaacagcaactggcgcgcgtacgtgcggccaccgaggcagcgcgactgatggctcgtgaggcatctgacgatggtgacgaccgctccggtggtctggtggcactcatccagactgagatgatcgatatcctgatgcggcttaaagaacttgatggtgacgatccgaaggaaagcagcgcccgcgcaaagctgatggctactgtatcaaaaaatatcgccacgctgacgcgcgcgtccatcaacctgaaaaaatatcaggcagaatggcagaaggaagcccgtgatgcgctgttgcgtgagcagcaggagaacctcaaggccgtggcgcgcgagcgcggcatggataaagagagtgtggacttctggaagcgccgcgtgctgggggtgagctga

SEQ ID NO: 396160 - DNA, 651 bp, Salmonella enterica
gtgtgggttaaatggattaagcgcctgccctggacaagtattgcgctggtgctggccgttatcgtggcctttgccgcctcatggcttgatggctacggagccgggcgaactgatggcgggcgtgatggcaaacagcagcttgcacaactgcagtcgcagtttgatacgtacaaacgcgaaagcgccgaacaacagaatgaagcgctgatgaccatcattggtcgttataacgatcaggtcgctgccgcgcataaggcggacgaagattttcaggccaaaaaacaacagatggagcgtgagaatgcagcccttaaaaaacagattgccgacgtcacccgccagtgggtggatgaaaaaggcaagagccatcccattgagtgcgtgtttactcgcggtttcgtgcagcagtacaactccgccctcggtgtcaccaacctatatgacgccggtcatcacgaatccactgccgccgcttccgccagcgctggcaaagcgaccggggctactgataccgctgtcacccggttacgcgactccggcgtcagtcaggccgatatcctcgccaacgttaccgacaacgcccggcagtgccgcgtctggcgtgagcaactgaacggcgtgctggattacacagaaggattgcatcaatga

SEQ ID NO: 396161 - DNA, 735 bp, Salmonella enterica
atgacgatgatttttcactggccgcaaatcgtctggtgcgtgctggccctgatgggtcttggtatgtcactggctgatagctctaagaaaaaaaacgggtttatcggctttctgtcaagcctgattgccacgctggttaccgcctggctgctctggtgtggcgggttcttctcgcaggcgaacgccgccgaaccaccgactgccgcccttaaataccgcagtgatgttattcgttctgctcgcgttgactgggggcttaatgcgccggtcgctgattttgccgcgcagctgcatcaggaatccggctggaatcctgccgcccgttcgccagtgggtgcgcaggggctggcgcagtttatgccgtcaaccgctgactggattgccgggctgatgccgcatctggcctcgcgcgaaccgtataaccccggctgggctatccgggcgctggtcagttacgaccgctggctgtggagccgcgtggccgtgcctgacggctgcgagcgtatggccatgacattgtcggcctacaacggaggactgggctgggtcaaccgcgaccgcaggctggcacgagcgcgcgggcttgatgatgcccgctggtttggagcagttgagacggtgaatgccgggcgaagtgctgccaactggcgggagaaccgccactacccgcagcgcatcctgcatatgctcgccccgcgttacctgtcatggggagggtctaattgtgtgggttaa

SEQ ID NO: 396162 - DNA, 1026 bp, Salmonella enterica
atgtcaaagacacttaaccccaccatcactattaccgtatcaggcccgacaggctcaggcaaaagcagcgtgctggcgatgattgccgatgcactgaagctcatccacagcgactgtattattgaagcgcctgacgtgaaagcagaaaaggagatgtgcggggatgattacaccgcgtggcataaaccccgcagcggcaccatctttaaactggaagaggtaaatcaccccatcaacaccgggcgatactctactcataatgtagagaccgtaatagagaaactcactactgccagagaaaacctggttaaagcagaagccgaaataagaaataaaatacaggcagccattaccagcaccgacctgtgcgatcgtccggtcccggtacatattcaggcgctgatgagtaagcttgggatatcgtttgaagagtatcaggaaaccgacctgcagccggtagttgacctggtgaactgggcgctgacaaccccaccagtcccggagcaaacaatacaaccagataaaaaagataatgaaccatccagacgaaatccaaattgcctttctggcgttgtaagcaaagaccatgatgacagggccagaagaaatactgccttttcgcaggcaatagggcttgttgatcaacagctaaaagggaggatagaccctgttaccgcacgcgcttcatggtatggatttatgaatgaacacggccataccgacctggcagactatctgggaaatatatttaatggcgcggttaaacgcattcgccgcattccgtccctacaaaacatcaatacaaatggtcttccggtagcatcctcagaacaggctgaaaaaatatccggcatttattcatgtgtcatgtcgcagcttcacggcatgagagacaccacgcgagcatgcaaattctggcgtaagacactggaagaacaagtcaacaaggaattgctggccgaaattatagtgcgatccattggtgatatgcatgactatatcgaagaaaacaaaccgattatttaa

SEQ ID NO: 396163 - DNA, 780 bp, Salmonella enterica
atggtgattgttttttgggtatctgttgtaatagccgcattgtctttcatgttcggcgtagtcggtctcataaaccctggtgcattgaaggatgataaaactggggaaatacccaaacggagtgaaacgttaaagattttttgtggattttttgtggtctttactgtgatcgctcttgtctcccatccgagtgatgaaaaaacaacggagaataaagttctgcctgatgtcgtggaatccaagaaggttgccaccagtgttcaagaggtgccatcaggtgatgtcaatatctctagcccaccagtactaaacaaaaactatgttgatttcatggatagcttaaatcaacatctaaagtttcagggatcaccttacgtgttaaatttaagtttagctaagaaagagccatctaaagatgatgatttttttcttctaaaatatagatttgacatcgcaaatgctattgctctaaagattcataaaggtgataacttgctatcaagaataaccattgggacaacaaatgatggcagtgacgagggggcaaagctttctctgtatttagttgtctcagtgatatcaactatacttgatgaaaaagtaactgatggtaatcaaaaagcaaggcaagtaattggtcatctggtcgatgaaaaatgccaagaaagggatggtgttgaatttatattgaatggagttaattttttccttacatgccctaagtctggagggatggtttatttgattacgaaagaaagttcttggattgataaggattga

SEQ ID NO: 396164 - DNA, 357 bp, Salmonella enterica
atgagtaaaaaaatacacattggagataggcttcgtgaggagcgggaacgtcttggtttgtcgcaagacgagttagcagcaactgcttctgtaaccaggaaaactctttacaattatgagaatggtgtcagaagcccggacgctgaggcccttggcatctggaatgaactaggtatggatgtttactatgtggttacaggtattaggttgaataaccaaggaacgccttatggaatcgtgaacaacgccgatgaagctgagatgcttgctgagtatcgtgagggagatgatgacgcgcgcgatgtcgcgcgctatacccttgcaaaagcagcggctagaaaaagaaaggcaagttaa

SEQ ID NO: 396165 - DNA, 204 bp, Salmonella enterica
atgaataaaaatctaacccccagtccagagctgctgacaagagtacgggttgggttcgtcgcgaatggcacgagtcttcataagtggtgtcaggaaaacggagtgaagtacgccaatgctcgacaagcccttatcggtgcatgggatggccctatgggtaaaaaattacgcaatgaattaatcacagaagccgggctggagtag

SEQ ID NO: 396166 - DNA, 306 bp, Salmonella enterica
atgagcgagaacactaaccctgcacttcgtcgaggactgcggattctcaaagccctgaaggggagatctcttaatggtcttagcaaccgcgaactggccaaagcattaggcgaatcagaagccaacatcagccgcgccatgggagtgcttgtagatgaaggtatggcgcaacgccttgaatcaggccgctacgtgcctggcatgcagcttttatgcatagctcaggctttctctaacgaaatggctaccgctcaggcccgtatcgcagaactcaaccagcgcgtactggctggcagtaagaattaa

SEQ ID NO: 396167 - DNA, 936 bp, Salmonella enterica
atggcgcgtaaacctactgaacttcaggttattgacactactgatggtgtgattccagacaacctgagcattgaactcaacgagatcacccaacatcgcctggcgattatggaacggttcggtgagggacttccttatgatcgtaatcgcattatacacgaagctaggttctacatggctcaaagcacagaggccatgctggagacggggaaacgtctggctattttaaaggactcagaacccactggggactttgaaaaaatctgcgaagaacaattaaacattcctaaaacaacagcgtatcgcttagctcaagcggcaataaaattcacatcaccaaaattagaaaactcattcccagcgctgggaatgctgggaaaaaccaaactcttcgaactcatgaccgaagatgacgaagaattagctgaactagccgacggtggcacggtagctggcatgacgcttgacgatatcgatcgcatgaccacacgcgaacttcgtaaagccctgcgcgaatccaaagaagatctcgccgccagtcgtaagctgaatgctgagaagagtcaggaaatcaatgaattaaaagaaactaaattcaaaaccattgagcctgacgccgccattcagaagtggatacatgagtttggcgaagagcatgagaaattcctgcgcacctttatcgccacagtaccttttttcttccagcaactggaggacgactacaacaaccgtggcgtcagccatatggggctgatggcaggactgcttcacgatattgagcgtgagatagccagcgtacgcgcgcagttcgatatccctgaattaaacacccccgacacttcgtggaacgacggacccagcgaggaagacgagaacttccagatgccggaactcaaaaccaccacccgctcactggaggtgagtgatgacaattaa

SEQ ID NO: 396168 - DNA, 234 bp, Salmonella enterica
atgacaattaatcgttttgatctgcctgcggatctggatgcgccggaatacaacaggctgatgcgctttaccgacggcgtgctgaccctgcagcaccagattaagcgcgctgacgattttgcgcaggacggccagtggctgatggcactggagtatctggacgtcagtacacgcaccctcaatattctgaagcgcgtggcgcgggaagttccgccgcaggaggtacagccatga

SEQ ID NO: 396169 - DNA, 228 bp, Salmonella enterica
atgaccgacacggccatcactaagccagaacgcaccctggaagaatgggtacagcgccagcagcttttgtctgcggttgaaagcgcgcaaaactggcttgccatgctgcgttaccacaccgtgcgctacaactggtctgaggcggggattctgctggcgctggccgacaacatctgccgtgacctgcgtaacaccgcaccaacagtcaacgaggagaagccaatatga

SEQ ID NO: 396170 - DNA, 231 bp, Salmonella enterica
atgactgacgcaccgattatcaaaacccgccgcactacggcacagcaggcgcaacgtgacgagttcctgaaagccgccagaacggcccagaactggattaactatatcgtccgttttgccgagcaggacgactggtctgaggtggagttttacattgggagcggcagatacgactacgaaaaaatgaagagcctgcggcccacagaccgcgccgaaccatggggtaaatga

SEQ ID NO: 396171 - DNA, 1818 bp, Salmonella enterica
atgaccatgagcgccatccagaacgaaatgctcgttgatatcgccagagcggcgcggatggcaccccacggtcagaagggggccatctatgatgccgcctgtcttaagctcggcggcatcagccgacatacgctgtatcgcttactggaagaagcggcaggcaaaaagccccgcaaaacccgcagcgacaaagggaaaacgtgtatcaccatgaccgatatgaaatacatcgcaggctccatcattcaggccacgcgccagaataataaacgcaatctcggcgtcgctcatgctgttgaagaactgcgcgacgacggaatggtggtcgcttcccgtctggataaagagaccggcgagctgataccggttcacgctgacaccgtgcgtcgcgccatgaataaggcgcacatgcaccctaaccagttaaaacagccagcgccgtccgtgcagttgcgtagcgaacacgctaaccacgtatgggaaatggacgcctcaatgtgtgtgctgtactacctgaaaaagccgaagaaagcgaaagcgcaacagactgcaccgaccaacctgtacatgatgtacgaggacgagttcaacaagaacaagccccggaacgccgaacgcgtcaccgactaccgcgtctggtcgtttgagatcaccgaccacaacagcggctggatctacgtggaataccgattcggcggcgagaaagccgagcactacgccgatgtactcattaacgccatgcaggaacgcggtggcgctgatgtgctccacggcgtaccggaagtgctgttcactgaccccggctcggcgctgatagcgacgtcatttggcaatatgtgtcgggcgctcggtatccgcatgatacagcacaaggcccgtaacgcccgcgccaccggttcggtggaaaaggcgcgtgacattatcgaacgccgctttgagtccctgctgagttttgaaggtgtgctgaatcttgacgacctgaataaccgcgcccgcgtctggcggatgaagttcaaccgtaccgtcgtacacagccgccacaagaagacccgcactgaccgctggctggaaagcgtaaacggacacctggtaaaagcgccatccgtcgaattgtgccgcgaagccgccatgcacgcgccggaatcccgcagggtgaacagcgatatgcacgtcaaattcgacggcagacagttcaatgtgtcccgtctggtggcaatggatctggtctgtattggtgattctgtacaggtgtcgcgcaacctgtttaacccgaacgctgtttacatcgtcatgaaaggcgaggacggctgggacaagttctacgaatgcccggttgccgattatatcgagggcagttgcttcagagtggattcctgcgtgattggggaggaataccgcgccctgccggaaacgaaggcgcagaagaatctcaaggagatcgagatgctgatcgcagattccgacacgccggttaaaccagaagatatacgcaaatcgaagacgctgccgtttggtggcaggttcaaaccccttactgcgctggataatgagtatcaccctgactatatgccggttaagggcgaagactccccactgacgcgccgtcagctggatatcccgccaatgagccacgtcaaagcggccatggcattacgcacgagatttgatgcgctgcggcgcgagtggaaccccactcactaccagtatctggtagacaactggcctgatggtgtccctgaagaacaactggacgtcatcatgcaggaactgctggccctgagcgacaacgttgtggtcagcctggcggcaggcaaatag

SEQ ID NO: 396172 - DNA, 378 bp, Salmonella enterica
atgtcagacgtaaaacgttatgaaatcacctggagtgcgcgcaaagacgcaccggtattaaccgtggagattgaccctgcagtttgtacaattggaacgttggaagatattaataaacattttttcgaagaaggtgaactcattaccgatacctatgacgattttattgctactgctttgaaggtaatagccatcacttactttactgaaaaaacccaacctatgcggagttggggttcaaagaaaatcaccctcagttataacgaagaaggcaatagctacttaccgtcaatggacggatgttcaggcataagaatcctgtgttttactggagatgattttgatttggatgatttaaaagtgaaaaagatagcctga

SEQ ID NO: 396173 - DNA, 372 bp, Salmonella enterica
atgtcagacataaagcgttatgaaatcacctggaatgcccacgaggacgcgccggtattaaccgtggagattgaccattccatttgtaccgatgcgttactgcaccagattaataacttctttattaacgcagaagatcgttatctggacagtgactgcgatattactgccaccgtattaaaaatgctggccgtgttttgttttaccgaacagacacaccagggctggaacgctgaagggcttattgatctgtttaaggatggcaatgtggaaggctggccaccaatggacggcagcgaagggattaagattctggcctgcgatgttcctggtgttcattacgacgatatggaagtggaagaggtgtcgtga

SEQ ID NO: 396174 - DNA, 186 bp, Salmonella enterica
atgaaattcgacgtcattcaacacctgcgtaaaaaggccgagaaagacatcaaccgcgccatgcgtgccgctgaatccggtaatgacctagaggcggcaaagttattcacgcgtgcaggcggaacactgataacactgggtcgtgggctggaaacagaaatcaacagctcccgtgaaatttattaa

SEQ ID NO: 396175 - DNA, 552 bp, Salmonella enterica
atgggacgtaaattaacgattcataaactgccggacgccatacggcaacacattgaacttcgtattcgcgaaaacagcatgacacttgatgaaataatagaggatctaagaaacaaatttcccgaggccatttcattacccgcacgtagcacactgggacgttacaaggcttctacggaaaaactcatcaaacgcatgcgcgaacaggaacagattgctcaaataatcactaaagaactgggcgacaaccccggcgaaagtgcaggtcagctactggttcagacggtcacttcactgactgcccatagcgccatgatgattcaggagcaggagaaaatagacctgacaaccattcgccagctcactcgttctgcacgtgatgtcatggttgcgcgcagaatcagttttgatgaaaaaaccaggatagaaaaaagggcgagagaaaaacaattagaagaacagagaaaaaatctggagaaagttgccagaactcaggggatgagtaacgaagatatacgtttctttaatgaaaatgtattaatcactcactaa

SEQ ID NO: 396176 - DNA, 219 bp, Salmonella enterica
atgagtacttatatagcaataggctggacatggatctggatgggatataccaccgcccaaattcatcaccataccggcagtctggatcattatcggtattccgtactccgctggggtgcagcctggctatttcttttcctgttctggccgctggcgcttgctctctacgaagagcgactggcgcagtggagtaaatggaggccctatgaaaagaagtaa

SEQ ID NO: 396177 - DNA, 225 bp, Salmonella enterica
atgaataccccttacgaaatacccacccttagcaatgaaaaggtagtattaactgcgttatccatcataaaaaatcatctggataacatgcctgttgggcaggcatgtagagtattacagcaaaccgagttactactcaaagcaactatgatggttgattgttatggtgaggagtttcagaaagcagacgaaggatttcaggtctatttttctcaattaaactga

SEQ ID NO: 396178 - DNA, 222 bp, Salmonella enterica
atgcaagatgatacgctgcaattactactatgtgcccaggttaccacactggcttaccaaatccgacaagcaagagagaaaggcttcaatgagctagggcctggtgcattgcttgggcgtggttctgatttacaagaggctatcagtttaattgagaaaaatagacctgaaatccttcgtctgctttctgaaactcctcaccataacaatcaaccatcatag

SEQ ID NO: 396179 - DNA, 1584 bp, Salmonella enterica
atgaagataataaatcagttggttgctccctccgtagatgctacagattatacgtctccggataaaaaggttttctttaaagaatcatatcttgctacaagtttttcagataaagcttgcgaacagaattgctactattttgttggggagaaagggactggtaaaacagcacttgcattccatattcaaaatgatgagcctcgaaatataaacgcaaaattattaccgatttctgaagcacaatatacaaggttcattaatttaaaattggcaggtaaattatcatatacagattatcccataatatggcgagccacaattctttaccttatctgcaagctaataattcaaaaaagaaaacggtggtatcataagttaacctataagttccataaccttgaaaaagcgataatgtcatatgataaagatgcccacatccctgaacttgaatatgtcatagagtttgctacttctttaagtgaaggaggaaaactttccggcaatataccagaagctttaaaggtagcatttgagtcaagtgagacgaattcaataaaaacgacacagacatcaataaaagcttctttattagaatgtgagaaaatattaaaagatagcctctctgggcttaagttaaaaaaacagattgtattatttttggatggtatagatgcaaagcctggtggcattgagttttctgagtaccaaaagtgtatatcagggttagctgatgcggcttggagtctcaataaagatttcttttcatgtatggagcactcccctcaaaaaccgagagttgtccttctattaagacctgacgttttcgactctttaaatttacataattctaactgtaaacttacggataattcagttgtatttgattggagtacatctaagcaaggttataaaaactcagatctctataaaatgtctaacaagtattttatttctcaaaatacagatggtagtggttgggaagagtatttccaggatgtaggtattccaaataaaaataaatcctatagaaagcttttgaggatttcctatcaaagaccacgagatgtgttctcggcgattaaaatacttttggatattcataaaaaagaggggcgaagtaatacgagattcttttcaggacaggatattcatagtcctgagttcacaaaaatttactctcaatacctacttggtgaagtgaaaaattacgctaattattatatatcaaactctcagtttgacgttttaatatcgttttttcaactatttgatggcaatagcacttttactgagggggagtttgagaatgcttttaataaatttaaaatacgcaatgaaaaagaaacaaatgaaactccaagcattaccaaggattacatctcatttttgcaattttggtatgatgtaaatgttattggatataaagaaaggattgctgaggaaaaaaacaatttttatcattggtcttatcgtgaaagaaatgcacttaatgtaatgccgaaaataaaaaaaggatgtgtttacatcatacatcctggtatagctaaagctattgatattggcaaacctactgtcagagaatga

SEQ ID NO: 396180 - DNA, 576 bp, Salmonella enterica
atgagtgcaatagacactttaagggaatacgccgaagtatggcatttatttggtggtctgccagatgatgcaacccttagtgctgaagtttcggctctttatcttggtgttagtgtcaaaaccctcgctcgctatcgccagaatggtaatggccctgcttatatccagtaccaagcagaagacagcaaagcacggaatcaacgagtaaattatctactgggtgatttaagagcttggcgggatagtcataaggtaagcagtacaatggaggcggcacaggtccgaggattggcttttacttgtttgactgattttactaagccagaaccgttttgggctattgataataaaatttactctcatgctctaactattcctgacgaaatatttaaggaactattaagtacaactcgtgcgaaagttgtctggatctctgtagaaaaagttttatcggaggactggcatagtgcgagagaacgagagagatggaatgatttatttgttgggtattttgaggggcttgtactggcttgtaagatagagcaagagagacatattcttaaagatagcttttaa

SEQ ID NO: 396181 - DNA, 1455 bp, Salmonella enterica
ttgaaaacaactctcagtcaggcttttattatcaataagttaagcattggtgtgaagcccacccttaaccatgcgggaaaagtcgttttcgaagcaaacccagagcataagccttacatagtttttgatgaccaccgcgactcaccagttggctttggtgtgaaggtcagtttgacgaaaaaaacctatgtgatccagcgaagagtagcctcatcagatcgtaatgccagtgagggtaagaagccaagctctgtcttgaaggtaaaggttggaaatgtgtctgattttccaagtatcgatcaagcccgtgaggtagctcggcagttggttcagacaatgatcgcaacaaagagaaatcccaacaagattaagagggaactcgatcttgccgaattgaccgtaagtgaagcttttgcccaatacagaagtcacttgcttggcagaaccaagccagctaaacccaacaccctaaatgtattggacaaagcagaaaatcgattaaaagagtggcaaaaccttcgaatcaaggatctcactggtaatgaaatcctccgtaagtttgacgagattgctgcaaaagctagaacagcagcagagcagactttccggtgggccaatgttgctgtcaaacatgcgattgaaattgaggctggaaatgctcagacacaacagcggctaccttcgttgtcatataatccattttcaatcctgaaagtgcagaaaaagttcaggactcgttctgaactggaagatagctatcgtgcgaaaggtgttcgtaaccccttatcacctaaggataccttaggacgatttcttaccgcattacacaacaagagaagcttcaatcgtctggggtgtgattatctgttgttgaccgttctgacgggggccagaaaagaagaaatggcttcactgtgctggcgagagactctgacagaagatgaagcaaaaacgaccagctatatcgatctcgaaaaccgggttattcgcttttacgacacaaaaaaccgcaatgaccatgagttgccaatctgcgatgctacaaagcgaattctggaagatcgacgagatatcgtcaacgataccgaaaaacgagcagataaacgcaaatgggtttttccggctcgttcgtcacgaagcaaggtcgggcactattcagacagtaaaagcttacgcgagaatatctgtcaggaagccggaataatgaagttgggaatgcatgatctgcgtaggacctttggtcgtgttgcagaagaactaacttcgtatgcagtggtgaaaagattgctcaaccatcgcaataccaccgaccccactgaaaggtatgcaatgcctgataatgaacgaatttatgaggcacttcaaaggattgaacttcatatgctgatgacggcaccaggattgtataatacacttttggcttcggcgaaatatccaccattaccagtaaattag

SEQ ID NO: 396182 - DNA, 396 bp, Salmonella enterica; identical to SEQ ID NO: 378715

SEQ ID NO: 396183 - DNA, 1455 bp, Salmonella enterica
atgaagcttaacgataaaccccgtcaactggcagtaccctttgcgagtaccggggacaaaaataatatcccggacaaggcgacgcagcagaccaaagagagcggtaacgcggcgtatgattcgggttttcctccggtgaccatgaccccgatttcagcgggcggtataccgccacacggcaaggattttaacggtctgatgcacgatattaccgcagcaatacggtacgtccaggctggtggtttgtacacgtataatgccgatttcgccggggccattggtgggtatgcaaaagatgccattctcgccggagtctcaacaacagcggtctggctgaataccattgacgataacctgaccgatccggaaggcgccgacagcgcaggatgggtaaacctgctggcagatcccctgaagctgtttctgtggcagaaaaacaatctgtcagaccttcagaataaaggaacggcacgggataaccttcaggtctacagtcaggagcagacggatcttaaatacctcgccaaagaccagaacggtagcgatattccggaaaagccgctgtttgtacaaaatatcggagcgcttcctgccaacggtacggctgttgcagcgaacagactggcatcacgcggcgcgcttccggcactgactggtacgacaaggggcagcgatagcggcctgataatgggcgaggtttacaataacggttatccaacgcaatacgggaatattttgcgtctgaccggaaccggtgatggagagatattaatcggatggagtggggttaatggtgctcctgcgcccgcatatattcgcagccatcgagataccgccgacgctgagtggtcagaatgggcgatgttctacacctcactaaatccgccaccggattcgtatccagtaggggcggcgattgcatggccgtctgatatgctcccggatggtggttatgcttttatgtatgggcagtccttcgataaatctgcttacccgttactggctatagcgtatccgtccggcgttatccctgacatgagaggctggacaataaagggtaagcccatcagtggacgtgccgtattgtcgcaagaaatggacggcaataaatcgcactcgcacaccgcgcgggcgcaggatactgacttagggacaaaatctacctcatcctttgattacggcacgaaatcgaccaataccacgggcaatcatactcaccagttcggcggttatatcaattcatactggggagattccaatcacacctcatttcagcctggaggtggtgcatggacacaggccgctggcgaccatgcacatacagtttatatcggaggacatgagcacaccatgtatataggtccacacggacacgtcgttattgtggacgcagacggtaatgcggaaaccacggttaaaaacattgcatttaactatattgtgaggctggcatga

SEQ ID NO: 396184 - DNA, 426 bp, Salmonella enterica
atggaaagaatttcttttttatacgtatctcaaatctttcccggaaagatagcccgctcgctgaactacccgcagccatggataaagccagatgagcaatcaggtaaaattagcattgatgtttcttttggtttgatcatcagaaccaaagtaaattatcgcgttgatgtcgatttattttatggcgatcaaagggttgaatttggaagcaatcagtctcttcaaacagaccctatcgttgcgggtacaacttctggcaatgaatctgtaagcattgaaaatatgtcaattatgaatattcacgctgaaaatgaaggggtttacagagtaaccttatccctccacgtggttgacgacaatgaaagtagtcgaatgattcataatagcgagtgttttttctatttatcaaaagaatggaagctttga

SEQ ID NO: 396185 - DNA, 435 bp, Salmonella enterica
atgtcacgatcagcttttgttatgcgagaagctaaagttgccaacgaagaatacggcgtgcataatccgaaccatggttatggtggcggtgacggcggtggaggcagcatgacggagcgactagaacgactcgaaaaaaaagtcgactcgattgagtcaactttgtcacggcttaatgaaacccttacacgcatcgataataaatttgaacgtgtagacgaccgattcaacgcaatcgacaaacgatttgatgaagtcgacaagcgttttgacgccgtcaataaatctctttcagaaaaaattaatacctcagtaaaactcactgaagcaaacacgaaaacgaccgtagcagaagccaaactagcaataattttagccattcctgccataattggtgctgtatatacagcatataaactacttaccaaacagtag

SEQ ID NO: 396186 - DNA, 150 bp, Salmonella enterica
atgattttattatatttattggcatgcgacaccattgtgcctgaaaaagcagcagatgagccattttataaaaatagccatttagatgtcctgatgtctgaaatgatggggaaaaattgtgctattagagcagaaaaatctaatccttaa

SEQ ID NO: 396187 - DNA, 297 bp, Salmonella enterica
gtgcgccagctccggtacaaaggcgaatgggccggacgttcagtggtagccattgagcagtttttcccgtcctcaaaacgctgtagccgttgcggtttcacgatgaaaaaaatgccgctggatgtcaggaaatggcactgcccggaatgcggcgcagaccatgaccgtgacataaacgcggcacggaatataaaagcggcgggactcgccgtgttagcttgtggagagccggtaatccctgaaccgcttaatgcggctcaggttcggctccgcgaaacaagaatccttgccctttag

SEQ ID NO: 396188 - DNA, 1551 bp, Salmonella enterica
atgaatcgccatttcataagggactttgacgaccgtgtcaaattgccacaaagtgtatttgggcgggtagaccatgtcgttacgtcagggcctccggccaacattgtgctaattgcagttgatgcaattgacgtcaagtggctgaacgaccaggcaaaacaagacccgcgatttgacatcaatagtcctataaaagcggttggggcttggaagagcaaaggcttcccaacacccggaactccgagcatctttgaaagcgccccactatttcgcattgaagtagaattagatgccagaacaaacccatttggactgccattcttgcctgactatgacggactaaatacgaacacgggttcgcaggctttagagagcgcatggtttaagttcgaggtgtctgcaacccaccgtaaaggcttcacgcctgcgctaatctatccgggcttgttcgccccgccaatttccgcgtttgttcagggaacgatgccgacacctgttcacgccaatgctctggcaggaatattttcgttgcagcatttcccaaaaatatcgggagcttgtcttcaagctactctcaagggaactcgcgcagacatgctcgctgtctacgatgttgggcagggaaacgcaaacgctttactcaatgcgaattcaaacatcacttgtcatccgctgccgtcgctctactttgaccttggtgctggggtatatcgtaacaagcacacaacgccgactcccctgcttttctgctttacactctgcccgccaattatactgtcacactgggatgcagatcattgggctggagcgtacgcgactggagtcggtactccgccaacctatcccgcacttctgcgcacatggattgcgccactacaaactgtcggaccactgcacattgcctttgcaaatgacatcattgcccaaggtggcaaactctccatctacaacccgcccccgggggggattgatgcggtcgcactctctatgaggactgaactccgattggcgctcggaaccgggaatggcagaaacgacactggaattgttgcggtagtggagaacagaaatctaagtcccagtagaacctggcttctaactggcgactgcaactatacgcacatcgagccttcattagcgcctaaaaaccctatagctgtggtagtccctcatcatggagcaaaccttaatggaggagccgctgcaccaaaaccattccgcggtgtgaacgagtactgccgcctgctctattcgttcggccacgacaatgcacacggggcaacaggtgtccgccacccgacgctcaacacggcgacactaaatataggagctgggtgggatcatggagcatggcatttacccactccggctgataaggaccctaactccttcgatgacgtcagagcgaccgcacgacatactgttgctggagccactggcgcaaatcttggtggtatcctggtgggctggaacggccttcccgcaatattcaagtccccatgcggtggtggtataagcatccagtgcaccacaacaccaggactgagctag

SEQ ID NO: 396189 - DNA, 5331 bp, Salmonella enterica
atgcttaacgaattagccacattattatacaggtttttagcgacagaccaaagttatcacgcacaacaacaacctgacggaacttacagaaagagagcaggtgccatcaccccaaaacttttggagaaaaccctaaatgatggtggatccgtcgcaatctatcaaaaaaataacgatctcacaattaactggatctgctttgactttgacataattaaatctaatttaaatagcgaaaaccacggagccgcccaacaagagcttgaacgtagcgtaaatcatttctgtcaatcacttgagtcacttaacataccccacttacttgagttctctggcaacagaggttttcatatatggataacattcgaggatagaataagttaccgaacaggctatgaaattcaacaaacactaattgatgcaactgaactcagcttcaataaagatcttatagctatagatttatttccaagctctggtacgcctactgacggggttggacttggagttaaatcccctctgtctaagcatgccaaatcaaaacagtacgcactacttttaagctcatcaaaaggaatacaatcagtcacaaaaatcacggaatttaatgacgaagtaataaacaaaaaccttgaaatactgaaaaaccatcgaaacaccagtaaatccgagttagaaagtgtttttggagtattcttcgacataacacacgatgaaacatctagacccacaagagtcaagtcaataaaagtacaacaaaatggcttcacgcttgacgaaatatttacgcactgggaaggcagcgcaccacttaatgcacttgcgaaaaaaatcaatgaaaccggaaagctgagtcatgaggagagaaaactactcgttggattattctgcaacattcaagctaaaaaaataaaaaatgcaggacaaagcattctacaagaattatttagcaagaccgacaactacaaccccgaagtaactagcagatcaattaaaaagctttcctcatttaacttcccatcacaagagcaaatagaaaagacgacgaaggtaaggtttcccaacacactttcaacagaagaactgataaagacctgcataccaaaatttttagcttatacagatgctacatttgatatctcgaaatctgatatagaaatcaccaaagccgctgaacttagctacctttttctaaacgatgaagcacagtcaaaaatcattattaacgatctttcatccgatgacagttttagactactgaacctcgcagaaaatgtaataaaaaacccaaaatcagctcaattttataaacatctacgaaacgaaaaaaacaaagtaagaactttaataacgttgaaggcaccagagagaatagctacttcgtgcattctcaagcagttaatatattttttaaaccttcaaccaagcaccaactcacatgggtataaaccaaataaaggctttagtggtggttacatattccagccatggttatacctgtggataaaatttgtatccaatataagtacagctatcgaagacaatgataatcaacagtgctatatcgtaaaaactgatatcagaaatttttatgacacgataccgcacgacaatctaaaaaggatgcttcttgggggagcaaaccctcgtatagtcgcaaaatcaggtgctttatctgaagcgtcaaagcttctgtacaaagcacatatcgacacattattcgaaataacagaaaaaacgattgactctaaaataggcttgccgcaaggaccggcttatgcacggtatttagcggagctgtatcttgacaatcttgaccaacaattcgacgcaaaaattcaaaaggaagaattacaactataccaacggtacgtagatgatattttcttcgtagcacctactgaagaatctgcaaatgttgcgcttaaaacattacatacagaacttgaactcctcggactagaaataaactatgataaaacagtaataacaaaaataagtaatttctctgaagattttaacagttatcgttcacaatccaaatacgctgtagacaaagtctcaaaaaactttgctgactcaaccgacacacaaaaaaacctggctattactgagtttatgagtcttgttcaatcagatagctgcgataatgaccttgccttcattttctcacatttagcgggcgtgccccaactagacacgttgaaaagagaaaaagtagagcctaccttaaatggcagagctggcagaggaagcctttacaaacatttgttcaactttgttctagactcaccagaaaactggagtgaattagaaaagatagagcgattcgatgatcttcaatcagaggtattgaccgcttgctttatcactatgctagagtcaagcaagtcggctactgaagcgcttaaacatttagtcactcagatagaagaaaagctatctgactctgaattaacccatgagaatcttgcacatctcgcattggtgttcgatgccaaaatcaatctaaaaaaaatttcttcaaccaccatcattaactgtctaaaatccataccagatgtagacactataaacgtaacaacagagctaattgaacagctaaacacatctctaaatgacattaaattgctgccagactttattgaggctatttaccctctctgcgccagtccgaaaataaaaaataaagaattaaataacttagcaattacattttacgcaaaactttcgacagaccaagctaatggtaaactggccacatccacacaacctgaaataaaatccccatcaactgcctctaaatactattacttgctttgccttttctcaatttccgacaaaaataaatcaatcgatcttttaataaatgcatggaaatactgtgcacatatattcaatacatgcgacacggaaaccacacacaagtcccaagactggttcaaaaaaatcaatagcattgattacagcgaagagaaagcattatttataatatcatctatagtcgacggaaatatattcagaggactttatgacagaagcaaagttttcgaaaaatttcacaacctactattaatatacataacattccaagataacaatttaaaaagcaccgatattaaaaaagctctcgaagagcttaaatacaaggcaaatttttacaactggcttatcgaaaaagacggaacacttttatttccaacgaccaataaatcatggtttgagaaaaacataattgaaaacagttcgattatattgaaaaaaggtaactctatacttttcaggaagcccaccaccaactttcacccatctagcctcccagaaagcgagcataatggctatagcgaagtaattgttgaatataacccagcagatctaaacactctttcagacactctttcaggtaaaactaccgcccaaaaactaaaaaaacttctcgaaataatagattactgtaaaaattcagatacatacccaaatattttttgtcgcgatcgcattctaaattacagcacttcacttccatttagcaacgaacttatgaattcgagaacaattctatttgaagacaaaaatgaaaacattgaaacactcgcaaacaatcagaaaaactttatcagaagttttttccgctcagaacctgatgaaaccgggctacttccgattaaagaaaaatacatcgacaacctagaagatgattttaatatagtagaatttataaaacacctatctcttcaactcgaagaaacaaatatagtagaagacaattttcattttgacattgcggcagcagctgcgctgtatctatgcttgaaagaaacagacacagtaagaagaattgataaatttgttaatcaataccaccgatttaatcaatccaataatgatcgccatatatatgctatagaccaaaacacaaatccgcttgatggcactcctatacagttactacacactgtagaagtctcactcaaattaatacctttagaagtaaccccatctttggctctatatatccacaaagatattcagcagtacaaacagcgacttatcagcttagttgagttgcacaactcagaagctccagcattagatataaataaattcatacgtgtttatccgagaatttcccctctcagcgaatcgttaaacattaataacaaagactacaaattcaaaaacatcaagcttataaatttgacaactaatgaaattcatccatttgaggctcgccactctgtagccataagctcatcagaacatatttatttttttgaaaacgcaaccgatacatatatagcctcaataaacagtgcaattagtaaaatatacgactccatagtaaaaagagcagaaaaaacaactaacactggtgtaccagctaaaagctacccagcatcaattttcgacgaaaaaagtatagtctgtttaaacaatttcgattctgccattgatgttatctcacagcatcgcgacattccgaaaacagacgcacaaaaaaacctagtaaaatggctcagtgcgattccaaagaaattccaccagatgttagtaacactaatatctgctcatgtagttatgcgcgaggaagacataaataattttgcgaaaaaggtagaagagctattgaatgacaaaaatgccaatccttttttaataaaacgtgttggtgattataatggaacccacaggattttatttaaatatacaactattggtcgaaatatcgaaaatctatctccattgagaatttcagaaaatgcagataatgcaacgataatcaccgacaacattatcacaggatcacagataatttcgtccctcaaattttacttatccgtcaacgaacctagaccaaacgcgaataactttgacataccaaaggagagccaagaatctttaaaaaacacactacaaggacttaaatcaataaatatatgcactattttatatacgcccacagcgctacagaacattgaaaatgaattaaaagaacttatcgacaaaaatataactgtaaatataatatgcggaaaagatattggtgatgacgcactatttggatcaacaagcaaaataggtgaaaaagaaaaggactctattcgaagtacactaagggacttggaggcgatgcaggagctgtataatcatcttgataccatacgggtttttaaacaagcaatagcctctatagatgacgagataaataaaaccaacttagtggctaggcatcaatctcttccaaaaaaatgtttcaactttcttagagcaggcctaagacatgaggccacctgtcaccctcttattcgagtgcttgaactgaatgagtaa

SEQ ID NO: 396190 - DNA, 435 bp, Salmonella enterica
atgtccaggactccctatacacggttacgcattgagggcttccgcaaagcagaggcttccctgagacttgaaggaatggaccccagtggtacgccactgtacgagtccgttaaagcacgtatcatttcaggtgatctgacgtatgagcaggggcgttctgagatttttgcatactacacaaaatcagataccgccgggcctgtgaccgtgggagaaatgctgacagaggaatttttaaaaccgctgaacaagtctcatgctgaactggcggaatctatgggtatttgcgaacaggatattgacgatattatctgcggtttgcatcgtcttacggatgatgaagctcgcgttcttgctgccgtatttggtactgatgaggatttttggagcaatttgcagatgttgcaagatcggaagaaacgacggcagaaataa

SEQ ID NO: 396191 - DNA, 174 bp, Salmonella enterica
atgaaagataatcttttgattgtatttattctgatcagtttattggccatatgttcttgcgataaaaatgataaagattgtttatcgatgccagataataaatttgatgaacataaatacgataaatgtgctctacggagtaataataaaccaagccctaaacgagaatggtaa

SEQ ID NO: 396192 - DNA, 324 bp, Salmonella enterica
gtgacggggtttctggaggtgccaccggtatttaacagtccgaagcggctgatgaactgtatggaccatctgctgtaccgggagatgctggcatgcggagtgagcccggcccagttgcgtctgttacaggaggtttaccgcggacggggaaagctgtcagcgctttacggcaggctgaacgccggggagaagcaaatctggcaggacaaataccggttactgttaaaactgggtatgaagaaccgcctgcatgagctcctgttcggcacccgtttcagtaaagatatgcagcgcagcccgtttatggtaccggagaaggattaa

SEQ ID NO: 396193 - DNA, 405 bp, Salmonella enterica
atgccggcccggcagattatcgtttacggtgactgctggccggtgacgaccgccgtggcccacctggtccggatatttctgccgggcagcgactgtgaaagcacatacaggctgccagagctgttacagcagctgagccggaaaccggaggccatactgatactgtgcctgcgcccccgtgaacatctctttttgttctatgccctgcggcggacgctgccggagcacccggtgatggtcatcagcgatgagctgcttttcagtgaccgggtggtactgaagctgtacgggggggggggggccagcactgccggagcaggcgctggaagaaatacttatccgggggcgtacgcctgcgcagaacgggagagctggacgcctttctgttatcaccggctccggtga

SEQ ID NO: 396194 - DNA, 939 bp, Salmonella enterica
atggcctgtagatcagcttctgtcgaacgagtagcagataaaacagttagtgctcgtgaccaaattgaaaaattgcaaaaaatgattgcgtctcaaaatgaccagcatactaatgctttccagaaccttatcggaaactattacaaatctgcaaaaataactgacgctaagatcatcgggcaaagctctgatgtaaaaacagaatatgccagcgaatttagcatcgacaaaatggcgaatgtggttataaaggttctcgaagcagccgccgcagtaaaaaacccggatgttcaaaaccctgcaaccagccctgaagcgcttaaagcctataccaatgttgtgaactcagttgctgaagctgccaaatccaaatcttcatctgctgcaaaccttgcattttcggcgacccgtattgtacccggcatcattgctttcctgtatgctgcgtcagtaaatcttcaagatgaagaaacttttggtagcgaaaccataacaaccactgctatctactatcaaattgtagaaagtatcaatgacttaaattctcaagcagcctttgatgtcgcaacaattcaatattattcaattgttgcgatgaagaaactgcaagcactacagatccaatcgcttgccaagaaagaaatgacattgcaagagtggaaagatctgaatgccagctactcgcagataattaaagaaatgcaagaagaattgagagcaatgtctatggataagtctcctgtccttggagcttcttctgtaaccaaatcaattgaagaacaaaaagcgaaattattggatcaagtaggagttaatgagattgatacaattctcaatgattcgatatcccagcttcaatcaatggggccagaatttgcggatgtagcatctcacgctcacaaactcaaaaataaacgttatttcacctctatagagtaa

SEQ ID NO: 396195 - DNA, 639 bp, Salmonella enterica
atgaaacaccggacatggatttttgaagccctgcgtctccacttcgaggagcatttatcccgggttgaggctggtcgccgtctgggcattcccagaacaaccgtttgtgagctgtttgttcgtttccgggaagccggacttgtatggcctttatcctccggcatgtcagagcaggaactggatgcccgcctttacaggccactctccgccgtacccactgtggttcctgaggctacggttatgccagaaacgccatctgtccgaaaacgtatccgcaggccaaacttcccgcgagagttcaagatcgcactggttgagcggtcattgcagccaggagctaatgtggcccaactggcacgtgaacataatattaacgataacctgctgttcaactggcgctggctttaccggaagggcctgttgctaccccacaatgatgagccagcactgcttcccgtcacattatcaccggagcaggataaaagcgttcctgttccggcctgtcccgggtcagaaaacatgccgggtgaaacactgtgctgcgagctgttacttccttccggtaccgtgcgcctgaaaggcgcgctgacaccaacattgttacaggtactcatccgtgaaatgaaggggaaatgttga

SEQ ID NO: 396196 - DNA, 1086 bp, Salmonella enterica
atgaaaactgagcttcctgatgatattgaacaacttaaggccatgttgcgtcagcaacaggcacggcttcgccagtatgccggccaggttgcgggttatgagcaggagattgaacggctgaaagcgcaactcgacaaactgcgtcgtatgctgttcggtcagagttcagaaaaaaaacgacataaacttgaaaatcagatccggcaggcggaaaagcgactgtcagagctggaaaaccggctgagcacagccagaggctacctggaggatgctgctgccgttactgaatcccccgaaaccagccctcccccggagcagtctgtagtggataaccccgctgttgccagccgtaaatcatcacgaaaaccccttccggcagagctgccccgcgaaacacatcggctccttccggcggaaacagcctgtcctgcctgtggtggtgaactgaaggtgatgggggaaacgatctcagagcaactggagatcattaactcggcctttaaagttatcgaaacggtacggccgaagctggcatgcagccggtgtgacgtcatcgttcaggcaccgcttccgccaaaacccatcgaacgcagttatgccagccccgggttgctggcgcgtatcctggtcagcaagtactgtgaacacatcccactgtaccgccagtcagaaatctacgcccgacagggcgtggaactgagccgtaacacgatgatacgctgggtgtctgaaatggcttgcaggctcagcccgctgtatatcgccctgaacagttatgtgctggaagccggcaaggtgcatacagatgacactccggtgaaggtcctggctccgggtagcggaaagacgagaaccggtcgtctgtgggtatacgtcagggatgcatcgcaatgcagggtcatccctgccggcagccgcctggttcgcgtactcggcagatcgcaaaggagaacacccacagcgacacctggcggaataccggggcgtgttgcaggcggatgcatactcagcttacgacgcgctgtacgaaacaggccgggtgaaggaggccgcgtgcctggcgcatgcccgccgaaaaatccatga

SEQ ID NO: 396197 - DNA, 261 bp, Salmonella enterica
atggataacgaagtgacgttttcacttagctatgaggccctcttttctgaagcagagagactcatccgggatataagggcattcagccatctccccatcatgcaggacgatatgacccggagtgaattacgggcaatcatccgtttctggaatcaggccgcagtaagaacaggctgcccggagatgacggtcggccgggatcattttcggctccagcagatcgccggccttccggaaggggatgaatcattgtgcaggtaa

SEQ ID NO: 396198 - DNA, 129 bp, Salmonella enterica
atggcatatttattcaccaccaatatttacatgacattattaaaaataactttatcaggttcattgttatactataaacaccataacgtaaggattttctcaaaaaacgatattttcgtctggtattaa

SEQ ID NO: 396199 - DNA, 609 bp, Salmonella enterica
gtgagtgagcgtcctgttcttaccctgaaacgccgtcctgcagcggaaacagcagcgtctgaagcgtccggaaataccgccccggtcatgcgccgccgcagaacggtggtggttgttgcgcctgacccgcgtaaacagaaaaagcaggcgaagaaagacgctgaaaaggccgcagaggctgcccgtaaagcggcggctaaggaagagcggcgccgtcagtggctgctgaaaaatgcccgccccccaaaaccggtaaaagcaccggtccgtcctccgcgcccggttcgtctgataccggtggcggatgcactccgggggctggcagagtgctggccacaactgtttaacccggaattaccgctgcgactgatgaaaaccggtatccgggaggagatggtggcggatatcgttgcccgccagttgcccgtttccatgaagcagctgcggcgctgcctgcggagtctgacccggagtgaggggtacctgaatgccaccctgaccggcagtgtccgttatggcctggacggtaaacccgcaggcgtggtaacggagaaggaataccggctgagccggttgcgtctggagaaggtactgaaactcagggattga

SEQ ID NO: 396200 - DNA, 477 bp, Salmonella enterica
gtgcctcacctgattcttctgctcctgctgatactggcgcccgctgttcaggccaccctgaccgggcgggtggtccgggttatcgacggtgatacagttgtggtgctgacggctccggcaactgaagtccgtatccggctggccggtatcgatgcgccggagaaaggccagccctacggacagcgtgcccgtcagtttctggcctcacgggttgcaggcagagtggtggaaatatccggcgacagccgtgaccgttacggccggactctgggaacgatatggactgacggcagggatattaacgcagagctggtctgcagcggcattgcctgggcataccgtgtccggaacgaagtgcaaaacccggcctacctgcagtgtgaaaatacggcccgggagcagaaaaagagcctgtggcaggaaccatcaccagtgccgccctggcagtggcgtaaacagctgcgtcctgacgtataa

SEQ ID NO: 396201 - DNA, 717 bp, Salmonella enterica
atgactattactgataccgttttccggaatttacctgccctgaatacccgccagtgtgatgtcctgaagctggtcgccttcgcggcgatggttctggaccacctcaacaccgcctcaggcctgaatgacactctgctgcaggcggtcggccgtctggcgtttccgctgttcgctctggtctggggctgcaatgtcatccgccgccccgtcacgcagaccggtctcaaccgcctctggctgatggcgatgctggcccagccaggtttctggctggctttccgcgataccggcgtgcagtggtggcaggccaatatcctgttcacttttgctgcgatggggcaggcggtgcgctttatgcagacgccctgcaggtgcactgccttcgtttccctgctgacactgtctgtgtacatacctgcatcgggggccagctatgagttgcgcgggctgttattgttgctgatgagtgccctttgttttatgacaaccgggcgccagcagatgatggctgccgccggtcttgcaacgtctgttctgctgctcaatgctccgtccggaggcgtgatgatgctgtccggcctgctgctgagcctgatttgcctcgtcgtggtctgccgtcatataccacagggggagcggctgcctggtggtcgctggtttgctcaactctatgccctgcatctggccgtcatcgggggcgtgctgtgcctcacctga

SEQ ID NO: 396202 - DNA, 624 bp, Salmonella enterica
gtgtcagtctcagaacaagcagaccgaagcgctcacctggcgtggtgctccctgatagccctgcatcttgcccgccaggatggccatgttcactcagaatcccaggaaaacctgtttctggtacgctggctggccggcgctgaaaaacagcgtcgtttttcacgtgacgtggccacagatatccgctggctgctgaagcagggccgattgtcaggcctgaatgcccggcttcgcagcaaactggagtttctctggcgtgccggcagcggtgatattctggcacagacagacttgttccggctgagctgggggctggatacgctcaaaggttacaaatggggttaccacgtcctgtccgacagtgaatggtccggtcggcgcaggatgcgcctcagcccggacgtcaatgcggtcagcctccttcagtcttcactggaacgggcatttgcggacgacggcagtcagctgcatccggtcagggtgaaggtgagcggcaatgtcgctgccctggaggcactgctgaccagctgtgggtggaagctacagcaggctggtgacggagaacactgtctgctggccggcgcggcaaggttcccggatgaggaggcattgcatgtggcataa

SEQ ID NO: 396203 - DNA, 360 bp, Salmonella enterica
atgaagaaaattatccttctgagcctcctgctcgtgacttctgccgccggggctgcaggtaacagccagcacaacatgagcgaacacattacgccgtcatcacccgccagccaggaatacctggacgggatgcagaaaatgcatgacggcatgatgaagggagcgatggtccgggacccggatgtggcgttcgctgaagccatgactgcgcatcatgagggcgcgattgaaatggcgaaaacgcagctgaagtacggtaaagacccggagatgcggaaacttgcagaggacatcatcaaagctcagcagccggagattgaccagatgcaggcctggctgaaaggaaaggtgaaaaaataa

SEQ ID NO: 396204 - DNA, 435 bp, Salmonella enterica
atgaaacttgataccctgcatgcacaacttgattttacgttaaacggactgcactggcttcttaacgaaaaagtcgagggctggaatacaacatgctgctctgctccgttgcctgctcgttttactgacagcgtaaaaccattctttcggtttatggttccctattcgattcaggagctatcggcaggtcggtacgtcgtcctgaaccgtggatataagccgctaggaatcatcggcgaatcatacagcacgccaactctcgactactcaaattatgctgttgcaggccctgagaaactacctgatgttacttctgtatacgcacaacataatgatcgttttttctttaatgatgcatcttctccatgggtgaaccggcagttgcttcgtgcttatatgcagcgccttgaatcattcgttaaagccctggcgtaa

SEQ ID NO: 396205 - DNA, 732 bp, Salmonella enterica
atgaaccggaaacagtttatccagagtcgggggggcacctgccggaactggatgtggagctggtcattcatcaatcatgatgagcagtttgtcatcttcggtgcctgggataccgaacgggaaaaggagcgcgcggtcattctgcgcgaagaatgggaattcagcgccagccataaaaaacagcccggttatacccaggccatcgaacacattggtttcattctgcaggggtacgaactgttcaccttcaatatggttcatgcaccgaacccggacaacccggacgttgcggtaataaaagattttgaacgccgcctcgaccaccgctttctgcgaaaagaaggtaccgtgtggtatgccgactttgctcctgtcccgtatccggatgagatttccgtcccggaaagtttcattgagggcgccaaaaagcagataaccgttaacgcctacgaacgggaccctgaagcccggcgggcctgcattgagcatcacggtgccgtgtgcaagtgctgcggtttcgattttgaaaaaacatatggtgagcacggcaaaggattcattcacgttcaccatatcaggcctctgagaacgctgggcgaaggatatcagatagacccggtcacggagatggtcccgttgtgtccaaactgccatgcgatggtgcaccggggaaatgctgccagacctttgtctgtggataagcttcgcagcatgatgaaacacaccacttga

SEQ ID NO: 396206 - DNA, 231 bp, Salmonella enterica
atggctggccacgccgtaaggtggcagggaactggttctgatgaggtgtctacccgggaccagaaaagcaaaaaccccgataaacttcctcatctttggcgaggcgagaagattatcggggccctaactaaactgtatagccaccaatcaggctatacagggagtatagttttatgctcagaaaatttcaatacttgtttctgtggcatttactccttccgtgcattgtaa

SEQ ID NO: 396207 - DNA, 5142 bp, Salmonella enterica
atgctgagtatcgcccccattgccggtggcggtgccggctattacaccgcacaggataactactattttctcggtagtgccgaatcccgctggctgggtgaaggtgcgaaggcgctggggctggaggggacggtggatgcccgtcagctggatgagcttatcgccggccgcctgccggacggaaccagcctggaacggatgtctgaagggaagaacacccaccgcagcggctatgacctgaccttttcagcgcccaaaagtgtatcggtgctgataaccctgtacggggaaagccggttgctggacgcgcataacaacgccgtggaggcggtcagccgagaaattgaatcactggtgggaacacgcgtgatggctgacggtatccgtcaacaggtcagtaccggcaatatggtcgctgccacgttcaatcatgatacttcccgtgagcttgatcctcaggtgcacacccatcttcttctgctgaacatgacggagaaggacggtcagtggtacacgctgtcaagcgatacacgggggcgcagcggcaccatcgatgcactgtacgacaacaaaattgctctggggcagatttatcgcagcgaactgcgacggcaggtggaggcgatggggctggagacagtcagtgtcggaaagcatgacctctgggaaatcaaaggcgtaccgaccgaacagttttcgactcgtagtcagcagatacgtgaggtggcgggtgaagatgcgagtgccaaatcccgcgatgtggcggcgctggatacccgtcaggcgaaacagaaagagcctgaccgtgatgagttgctgacacagtggcacgcacggatggataagaccggctttaattaccgggagcttcgtgaggcggctgcggcccgggcacaggagcagactcagctggcacagatgaacagtgcgggtaaggcgcaggcggtcgccacagatatgcaactggcggtcagccaggctatttcgcttctgagtgaccgtaagacacagttcagttattcggaagttctgagccggacactggctcaggtgaatgcgcagccgggcagtattgcgcaggcgcgcagcgggattgaagccgctatcggtcgcggagagctggttccgctggacaaggagaaagggctgttcacctcttccatccatctgctcgatgaactgagcgtacagcatctggcccgccagatggcccgggaaacccgggtgatggtgaccgcccgtccggagaaggcccccaccggagcgatgggcgtactggctgataccctgccggcggtggccatcgttactaccggtcgcggagccggcgcacagcgggaggggattcaggctatggtggcactggcagaaggccaggggcggtcagtacaggtgatggccacggacaaacgttcggcggcgttcctgtcagagcagtccggtcttatggggcgggtggcggataaaagtttgctgactgccggcagtctggtgccggacagtaccctggtggtgagcggggcggagaaactgtccgtgaaggagaccctgaccctgctggaccaggcgctgcgccgcaatgtgcaggttttactggctgacggcggcggacggcagggtaccggtagcgcactggccaccctgcaggaagccggggtgatacgtctgcaggcagagagtactggcggtatcagtgttgaggtggtgagtgtcggtgaccgtcgccagcgttatgcgcagctggcctccgattatgtgtcgctcagcgcccggggtgaagccgtggtggcacaggctccggggcgtgagcaacccgcgctggttgaggccatccgccaccgtctccgggaagagaatgttctggcggcaaaagaaaccatggttaagacgctgaccccggtctttctcgacagtaaaacccggcggcagactgacagctaccgggaggggcaggtactggaacggtttaacacggagacccgtcagacggagcgccacaccgttgacagggtgacggcccgcagccgtaccctgacactgacggatggttcagggcagtcgcgggtgatgaagctcagtgatatcgacagcagctggcgtctgtatcagcccggtacgctggcggtggcggcgggagagaggctgacgctgaccggacggcagggaaaattgtctgccggtgacactgtcacggtggagggtgtgacagagcgtcttctgaccgtgcgtcacggtgaccggattcaccgtctgcaggtccgggacgggctgaagattgcccagggttatgtgacgtcgccgggaaaaagggtgggtgaacacgggacggttctggctgcagtctcggcccgggatacgcaggcgcagatgctgaacacgctggctgtcagcggagacagcgtccggctgtatacctcgctgactgaggatgaggctcatacccgtctctcccggtcgccgctctaccgtcaggcacgggagcaggtcagtccggacgggcgtccactggatgtggcaatgcagcaggcgcgtgacggcctgatgtctgtccctgagaaagcggtccgccaggcgattgcggtggtgcagggtagcgaagtggtgttttcccgcctggatgtagcgcaggcggcgctgaagatgcatccggagatgaccctgccaaaagtgaatacggcattccgtgccctggtcagaagcggcgagatgctggcagtcccgggggataaaagtggtacccgctttgtgccggcggagtcctggctgcaggaaaaagccattatccgaacgctcgcggaaggtaaatccacacaggtcgcgctgatgccggccgcagacccggagctgtttaagggactgaccgttggtcagcaggcagccagccggctgatactggagagcaccgaccgctttatagccatccagggctacgccggggtcggaaagaccacccagttccgtaccgtgctggcggcgctcgataccctgccgacagagagcaaacctgacattctgggcctcgcacccacccaccgcgccgtcagcgagatgcagggcgtgggtgtaaaggcgcagaccatcgcttcctttctgatggacacagaacgccgtctgcaggccggggagaaaatcagctttggcaataccctgttcctgattgatgaaagctcaatggtgggaaaccgggatatggcggataccctgacccggattgctgcactcggtggccgggcggtgctctccggtgacagcctgcagttgcaggctgtggccagtggtgcgccgttcaccctgatgcagcagcgcagcgccattgatgtggcggtgatgaaggatattgtgcgtcagaccccggaactgcgcccggcagtgtatgccctgctggaagggcgcgccggggaggcgcttgataccatccgcagcgtctccccggcacagataccccgtgagacaggcggatatatgccggtctcttccgtcactgaaatccgccagacaaaagagcagaaagaacagtacggggaccgtgtcatcacggccatcgtggatgactataccgggcgtacggcagatgcccggcgccagacccttatcgtgacccagacgaatgcggacagtgccgccattaacgccggtattcacgaacggctccataagcagggaaaacttggcgcacgtgaagtggaaacgacggtactggtgcgtgagaagacgcaggcggaatccctcaaatcggtagccggtctggcccgttacgcagggaacatcgccctgattaaccagcagtactacaccatccatagtccgtccgggcagaacggcgtggtcctgctccgggacctggaagggaaagaccatctgctgtcagcgtttgaaagcagtctgcgggatatcgctgtgttctcgcgtcagtccataaccctgtcggagggagacctggtacgcttcactcgtaacgaccgggaacagtggcgggatacgcagagcctgtggacggtgagccagataagcgctgacggggcactgacactgaagaacggcaatgacacccggcacatccagccgggcactgagctgcaggacagtcatctggactatgcgtacgccggtaccgcgcaccgggcgcagggggccagtgaatcctttgtcattgcgctggccggtgccaccggcagcagaaaaatgctggcaggcctcagtgatgcgtatgtggcgctgtcgcgaatgaaagaacacgtccaggtctataccgatgacctcagtaaatggatgtcggcagtggctgacagcaccacccggttgaccgctcatgatgtgctcgggaaagaacaggaccgtcgcgcggctaccgggcaaaacctctgggagagtgccgggccgctgaatgccaccgccatcggccgggcgctgctgcgtgagaccgggctgtcaccggagggggaggcccgttttatcagtggcagccggaaatatccgtctcctcatgtggcctggcctgcatatgaccgcagcggccatcagcagggggtatggctcagtgaaattcgccgggatgagaacgggaaattacaggggctcagtgaagagggccgcctgatgggagctgaaagcgcaggactggttgtgctccagcagagccgcagcggtatcacacaccaggcctcagggcagcaggaggcgctgaagctggctgctgctcatccggagaacggagtggtgctgacagcggagaaagaacatctgccggactggctgctgcagaaactcacgcagggtcagcgggctgacaatgtcgaagcggtaccagcgtcccagcttcaggacagcacggtggtggtcctgcagacgccggaggagaaggcacagcaggccgcagagcaggcgatacgtgagatcctgcgacaggataaggaccggagcactgtgctaccagatcgggatggaaaacccgggctggatgcgctggtacagcagggggtggagcaggagttgcgccgcagcgagcgggagcaacgccaggaagaacgggaaaccgaacggcaggtggcccgtgagataaagacggcaaaagccatcacggcgcaggagcatctgcgcgaactggagaaggagatagtacttacccgggagaaaactctttga

SEQ ID NO: 396208 - DNA, 2247 bp, Salmonella enterica
atgagttctaccaagcatattacgcagggtgggcaggttttcagctatatgctgaacatgttcatgcaggttaaccgtcgtatttctttctggctgctcaatgcctttatcctgctggtcccgctgattttctggttccgtctgccgtgggagactatccgtaacgggggactgtactggtggctgcggatttttgccggcggagagaaagcgctgtaccgcgttcctccggtctatgagataccgtttaacgggaaggtacttaacgccacctctgaacagattctggccgatgcctatatgcgctgggccggggaaatgtgccttcaggagctgtacctgtccctgttctgggcatccgtggctgtactggtgattgccttcctcgtgtaccggtttttgcggcgcctcggggagcgtcaggcccgggacgaacgtatgggggggcgcgaactgacggatgatgtaaaggccgtggcccgggaaatgaaacgccggggggaggcatccccgttgcgtattgatgggctgccactgatgctcaacagcgaagtacagaatctgttgatgtacggcaccccgggctccggaaagtccaacactatcaacaaactgctccgccagttgcgctctcagggggatatggtcattgtctatgacaagggctgttccctggtaaagaaacattttaatgaacgtgatgacgtcctgctcaatgccctggaccgtcgctgcgcatactgggatatgttccgtgagttccagactatcccggattttgacagtgcctcttccaccctgataccgatgggaacaaaggaagacccgttctggcagagttctgcccgaactatcttctcggcagtggcctaccggcagaaaaaaagtggtaaccacagttacaacgccctgctgcgtacactgctggccatcgacctcaaagccctgcgcgagtatctggccgggactgaggccagtaacctggtggaagaaaaggtggagaaaaccgccatttcgattcgcagcgtactgaccaactatgtcaaggcattgcgttacctgcagggcatcgagcgtagcgggaaaaaaccgttcaccatccgggactggatgagcagcgtgaatgacccgcagattacgcagcacagctggctctggataaccagcaatgcccgtcagcacgaatccctcaaaccactcatatccatgtggctggcccaggcggccaactgcctgctggagatgggcgaaaatcagcaccgccgcgtgtggtttatctacgatgaattgccgtcgcttaacaaactgccggaactgccaggggtactggctgaggcccgtaagttcggggggtgttttgttctcggtttccaggctaaagcgcagatggattacacctacggtaaggattttgccgatgccatgctggggctggtcaatacccgttttttctttcgtaacccctcccgtgatgaagcggagtgggttcagggtgaaatagggcagacccgtgaccgggtgttcagcgaacagtacagctatggtgccgacaccgtccgtgacggggtgtcattcagcaaggatgaagaagaccgttaccttgtcaactacaccgatgtgcagacgctgcccaatctcagctgctacgtgacattccccggtgactatccggcggtacgtatgagcatgcgctatgagaagctgaaggactgcgcggaagagcttcagatgcgcgatattaacgacagtctggcaccggaaatcgaagcgcagcttgcggagcgcgagcgggaagacggtgacatttcgcgcctgatggccgtgctggacgggacgtctgtggccggagtgacggagacggcggataacacaccgcctgtgagcacagtggcagctccggtggtcacctctgttcatccgtctccggtcgcccctgtgtcttcaacagcaggtcaggtggcagttgcagctgctaccagcgcagttgtggcctctgctacgtcaggtgacagcaatccggtggaggagggggcgttatgccgtgaggacgacggtatcgtggatatggacaccggggaggtgctgtatccgggcgataccggctatgaagagctggatgagaaattcaaccgggccttcggcgaggcggtggaccagctgcgtgaagatgaacgcaatctggtgttccatgcccgtgacgaacgggaatgcggcggcggtgatcagcctgaaccgggtgagtggtaa

SEQ ID NO: 396209 - DNA, 507 bp, Salmonella enterica
atggatctcctgctgatgtcagggacggtgctgtgcatcctgtttctgacccttttgtatcgtaaaaccggtgcggttcccggcaagcgcatgctttccctgctgcagaagcgaacctgttatcaggcaaagcccttcctgactgacagggagaggcgtttttaccgcgacctgtcgcagggactttccggaacctcactgcaggtcatggcacaggtgcgcctggccgatgtggtgcagaccgcccccggactcagtcgtgccgatgccctgtctctttttcgccggatatcccggtggcactgtgactttgtcatcctcgatgtccgctcgtttaccgtgaaagccatcgtggagctcgacgaccgcacacatctgcgaccggagcgccagcgccgtgacgccatattcaatgtggttgtggcgcaggcgggtattccactgttgcgaccccgttcagtgaaggctgccggtgaagtagcggaggtgattcgccgtctggcctga

SEQ ID NO: 396210 - DNA, 750 bp, Salmonella enterica
atgataaaactaaattttagtaaaaaacataattatatggtttctgctcttattttaagcgcatttctattatcgggttgtggagctatgagtacagcgataaagaaacgtaatctggaagtcaaaacccagatgagtgaaacaatctggattgagcctactaacgaaaggacagtatttctacagataaaaaacacctcagataaagatatgagtgggttgcagagcaaaatcagcagtcaaatccagtctaagggctatcgtattgtttctgctccgggggacgcgtatttctggattcaggctaatgtcctgaaagccgataaaatggatttgcgtgaatcccagggcttcctgaaccaaggctatcaaggggctgttaccggggctgctctcggagccggtattgctgcgtacaataccggttccgccggaaccactttgggtgtcggtctggctgcaggtcttgtcgggatggcggctgatgccatggtggaggatatcaactacaccatggttacagacgtgcagatttccgagagaaccggagctgaagtgacaacggataatgttgcggcgctaaaacagggaacatcaggttataaggttcagaccagcacgcagctcggcaatcagcacaaatatcagacccgtattgtctcaaatgccaacaaggttaatctgaagttcgaagaggcgaagccggtgcttgaagaccaactggcaaaatccattgccaacattctctga

SEQ ID NO: 396211 - DNA, 576 bp, Salmonella enterica
atgaaaataacccgtagcatgctagaacaggatgctcaatatctgctggagtcagtctgcacaacggattatgagatccctcagtcaggcgatatttttaaggtgatttttaaagtttataagtttgtcgtgctcgtacagttggtggcagttttttctgattggctgttgtatggtgtcgataatgaggattacagctatttaagtatgttaatactgtctggtggttctctattagttgtttttggtgttttgtgtgcgacgctgtatcaaaatgttacattggcgttatgtatccctcaggatgtcagaaataagtctttgttatgttctgtaatccgaaaaaaaatacgctcatacctgcagattatagttttactaaattctgttgtagcagctgtattgctccttagtggtgagtattttgttggaggtttaggcgccagttggtttgtttctctggggatcgcttcagttagttttagttattcaatcggtcgatatttcactccaccggtcatctctgcgctgaataaaattgcagaaaccgtttcactcgcaggtgccggaaaatga

SEQ ID NO: 396212 - DNA, 2901 bp, Salmonella enterica
atgacagacaccatctatgtcatgagcggcgggagttttttcaacgcggcttttaatggcgtggccgcgctcttccgtacctccacctgggacacactcttcagcattgtgggctttttttccgcgatggtgctcttctggttttacgtgcgcagtaatgacccgaaagaggtggtgaagtttatcgccgtttttctgtttataaccagcgtactgattatcccgaagcgcacggtgcatattgtggacctgacgaatcccgcctcggtgtaccgggtggataatgttccggccggtctggcgataccgtttcgttttgtgacgagctttggcgccaacctgacaaaagccttcgaactggtttttcacacgccggactccgttacctacagtaaaaccgggatgctgttcggggcgaacctgatggccaacaccaccgatatgatgagccagaacgggcatctgtcacagctgttcggggagtatgtgaagcagtgcgtgattggcgacattatgctgaccacaaagtacacgatgcaggaactgatgcattccactaatccatatgagctgatattccgcaagccaagcccgctccgtggggtgattgtgccctacgggaataatcttaccggaccgggatttcagacctgtgaagagctggccaaaaacgtactgaagccggcgatggaagtggagacccgccagggcgggaagacatgggattactatgtgaagcgcctgttcggcacccgggcgtccgcgcactccctgttttcgcagatgatggcggacagttacggcttttattatcagggcgggcgcagcgccagcgagattatgcgccagaacgtgacaatgagcgccctgcgccagggtatcaccagtcactctgcggccagcgggaatgccgccagcctggtgaacctggcgaacgtctcatcggcaagcaaaatgcgtctgagccaggcggcagctggcggcctgtcttccactttcacgccggtgatgcacaccgtgctgatggcgatgctggttggtatgttcccgataattatcctgctggctgccatgcacagcctgacgattcccgtgctgaagggatatgtcctgtccattgtttatctgcagagctggccaccgctgtatgcgctgctgaactatgcgatgtcgttctatctgcggggggagacgaccgggctgaactttacgcttgccagtaccggcagtattcagcagacacacagtgatatcgggctgatggcggcatggctgtccaatgccattccgtttatcgccgccggtctggttttcgggctgtggcgtgtggtgtcacaggcaggcaactacctcggttcgtccatcaacagtaatgcgtcgtcggcggcggcacaggcgacagatggctcctggtcgttcaataacatgcagatggacaacgtctccgggcacaagtgggacactaaccagtcgttccgtaacggccagatgaccacccagcatgcttccggtgcaaccaccacgaaagcgcaggacggctcgctgattcatgatgcgcgcagcggcgtgtcaaatctggcgaccgatatccagttcgggaaaatgttgagtagtggttatcaggtccagcagcgagaggcggaaagtcaggtgcgcagcctgagccggggcatcagccactcgagtcagctggcaggcagtcagctatcccagtgggcacagcagcgcgggaacagcgacacctttacgcagggagcagacagcagccgggccacttctcaggggcaggcgctcagcaagctggacagtgtggtgaaagcgtatgcgcaacagaacggtctttcctactcagattctctggccgaagtgatgagcaagtcgcaggcgatgaatgtgggagcaggtgcccggggttatgctgatgtggctactgacaagcagattattggcaaactggccagattggggactggctggtcggttggcggacaggctcatgttgagatgggatataccggttcaaacggttcttctcacagcctgagttctgacctggcaaaccagagccgcaacagccaggatctgacggcacagcaggctaaggacgtgcgtgagtcgatggacatcatcaacagcacccgcgcaaccgacagcggcagcagtacgcagaatacatccggttctctgtcatcgcaggtgtccagcagtctgagtgagctgcagagccagatccgccagtacaatgatgccctgaatcgcagcagcgagtatgcgcagatggcgagctatgccgagaacaacagcgcgaatatcaacagcaattacagccaggagtttgtgagatatgcccatgccatggcgccgggtcgtgcaacggctatgttgactgattcggccgatccgcagttgcgcgccgaacgtgaacagctggcccagcagtttgtggatgagaaactgaagcctcagctggaacagacgtaccgcgagaatctgacccggacttcagaagggatgggggatgttagtgccccgtcaggtatggcgggggacctgcagcaacagcaccgtgctggtacggcgaccatgaaccggatggcgggagaggccggggtgcaaagtgcggagcatattggtcagcaggtcagtgatgtgcgtcagaaagtggccacatcggcaacagaaaccggacaaaaaatggcagaatacggtgataatattggtcaggagagaacgaaactgagccaggaataccaggataaatcaggacagtttgagcaggctaaagtcagcgaacagaaaaggcaggattttcccattggcgacaactttaatgccagtgataagttagatgatatcaaaaataagatgaaggatataaatccctttaaggatgataaatga

SEQ ID NO: 396213 - DNA, 1365 bp, Salmonella enterica
gtgctgccgtgcctgattttggccctgctggctgtgccggcacaggccgatgtgaacaacgacctgcataaattcttcaacaaacttggtttcgagggcaacgccacccgggcggccgtctggcagggacaggctgcagggtatgtgaccggcggcaacctgtttcttcgcaaccaggtcaatcacctgcagctggtttcgtttacgcctcccagtatcactgccgggtgtggcgggattgatgcctatctcggctcattctcatttatcaacagcgagcagattgagcgttttatcaagcaactgatgggtaacgccgtcggctacttctttgaccttgccctgcagacggctgttccgggaatgaaatcggtgaaggactttatgcagaagctgagcactgacctgaacagcatgaacgtgtcgtcctgccaggccgcacaggggattatcggcgggctgtggccgaaaagcaccgtacagtcgcaaaaaatctgccaggacattgccggtgaaaccaatatgtttgctgactgggccgcctcccgtcagggctgcactgtcggtggtcagcaggacaaggtgctcgatcgtgcgccggagaatatgaaggaccaggtgatgaaggataagaacctgatgtgggagatcctccggaagaacaaactggtcggcggggatacccaactgatggaaatggtgatgaccattaccggcaccattatttatgacagcaacggcgatatcacctttatcgacccgcaggcgaacaacagggatctggtgcgggccatcatgtacggcggcaaggtcaccgtgaccgggtgcgtgtcgtccggtgactgcctcagaaccacacaaaaggacgtgaccgtccgtcatgacaacagctttgtggagcgggtgacgaagattatccagaagatttctgaaaaactgcgaacagatgaacgcctgacggacgaggagaagggatttattgagagtaccagtgttcccatcctgcgttacctgatggatccgcagatgctcaatatctccagcttctatccgaacctggctgactatatcgcttacgatattctgctccagtacctgcatgagttgctgaagcaggcccggctgcagctgaacagcaaaaactactctgaagacgcgctggagaagatgcgggataacctgaatcaggcctcggcccagctgcagtctctgcagtcagaagtgaacgtgaaagccaatatcctcatggagctggagcagcgtatgagttacctgcgccagcaggtctccacccgtctgatggggcagtacgaacagaacctgaacttcagcgccatgcccaccctgacgaaggaggggccatga

SEQ ID NO: 396214 - DNA, 363 bp, Salmonella enterica
gtgaaaaagatcagagtatcagatgatattttttttggcagggtgtactgcgttctgctggcaacaggctgtgcgttcctggtgggctcattaatggcggattactactggagcgaaatgtttgaggcgatttatggcgcttcagttgccggctccggcgtggcaggacgggaaactgaccctgcagtggtggcggaatacgccacgctgaagccgctgctgaacctgaccatgtatctcgtcccgaccacgctggggtttttaggggcagggatggtcctgacgggggcggtttttgccgggatcgatgccctgacggaacgctggcaggcatggcgccagcggtgccgctctgctgcgtaa

SEQ ID NO: 396215 - DNA, 591 bp, Salmonella enterica
gtgaaaaaaaggagcctttttctggtgtatctccaggtcgccctgctggctgccgtcgtgggatggctgttgctgaaaccggcccgggcctctgttctggcggaaatccagcgtctggaggcccataaatcagccgggagcgcctccatgccgccccggccggaggtggccagcccccgggagagtaaagcaccggtcatgtggcgtctgccggacggcagccaggtgaatctgcgtgactacaaaattgtgctgttcatgcaggggcgctgcccgtactgccatcagtttgatccggtcctcagggccctgtcggaacagatggggctggatgtgttcgcctataccctggacggtcagggggatgcggcctttccggatgcaataccggcaccacaggcggtcatccgggacatgttcagcaccatgaagccggtgacgccgtcggcattcctggtggaggtgaacaccctgcgtacgctcccgcttttgtacggcatggtggatgctcaggccctgtcacagcgggttaacgatgcgctgatgctgtcagaacaggcgcggaaccatagccagcggaaggagaagtaa

SEQ ID NO: 396216 - DNA, 294 bp, Salmonella enterica
atggataaattaagggaaaagcagaccgagaacctgctgatgtatccggggatggccctgatgtgtgccgccgtggcgtattttttcctggccgggcagataaccctgcccgacagcctggcaaaggatgtgcattaccatgcgctctggcaactggagcttgtccgggagacgctggtgctgtttgtctccggcgccacgctgtcgctggggggatggggactgtctctcttcaatgcctggcggcgctggtcgctgatgactcagcagtgcgggaaggagcagaaacggtga

SEQ ID NO: 396217 - DNA, 777 bp, Salmonella enterica
atgcgcaggcgcatgataatcacagccttatcgctggcgctggccggcgccgcgcaggcacagagggagccggtcaggacgtatgtggacgaaccgatagtcggctggcactggtacaacgaacccgtggaaaaggaggaggaagagaagaacgagccgacggtttccctgacatccctgccgccttccttgcagatgaaagtactgcagcgtgtgacggcagaccgtctgaacaacgccattctgtaccccacggtggagaacttcaccgcctacatgaagatgcagaacttctggaccacacaggcgggacggttcagcgccgtggctgccaaatcgatgctggtacatccggagctcgactacaacctcaggtacagccactacaacagtaccgtgccgctgcaaatgaaggctgagctggggctacaggaggcagcactgcgagaactgacggcgaagtacggcctcttctatttctaccgggggaaaaatgccctggatgtgcagatggcgaaggtggtgagccaggtggcacagcagtacggggtggccctggtggcagtgagtatggacggtgcccgggcggcagagctgccggatacccgtccggacaccgggcaggcgcagcggctgggtatcactcatctgccggcgctgttcctggtggacccgggggcggaggattacaggcctatgtcctacggctttatgacccaggacgatctgatgaaacgttttctgaatgtggcccgggattttgccccccggtcctga

SEQ ID NO: 396218 - DNA, 1860 bp, Salmonella enterica
atgaaacggctgactgcaatactgctggccgcaacggtgacggtggtgaccgggttgcaggcgagcgataaataccgtccgggccaggactttgccgattccctgaagggcagcggtaccggggtactggaaagctttaatcccgaggccaccatcccgggctataacccgaatcccccggaaaccgggcactacgacggagtgacagccggtggtgcaggcagtctggagagcgccggagccggtgcccttaatacttcggacgtcggcaaactgacttctgaagtgattatgaaccgccccaaagacccgatatccatggacgctcctttcatcagcggtggttttgaaattcaggacaaggctgaccttattacaaacggtacccacgagaaatgtgaaacggtgaaggtcaacaaaacggaaatcaccaggcaccagtgtgaacgcacgccggctgtggagctgagctgtacgcgaaaggctgtcattggcggagagtgggtggatacagaagagtatcgggagttcacgataccgcattctcagtttcgcttcagccgggaggggaaaaggctggtattcagtttcacgtcccctgtgaccggaaccgttgaacacgcatcgctgacgatttatgccgcctttttctttctgaactcccgttacaccttcctcaactccactttcaatgtgggtctgaccggcgggcaaagtggcacctggacgctgtcaggagcgccgggtatgcgtctcactgagggacaggttctgaccggaaagggatgctcagctaacgggaactgtatttggggcgggaacggggacgacacaatctatgaaaaactggtcagtggtgcctccacctttacgctgaaactccgcatgaaagtggcggctaaagaatgggcgccaaaagtggagtgggtggagacctgcccgttcgacaaatcagaagaagtgctgcaggggaagcagtgtacggagcccggtggtaaccgggtcgtgacgatgggcggaaaaacgcacacggtttacagcgactgctgggcctggaaagacacctatctgagtcaggcggcagacaacggtagctgtgatgtctatatgaaaaatccggcctgtaccgtaagcagaacagagtgcctcgacaaaagtgggggggcctgcctgcaggaggatgtggtgttttcctgcgagaaaaaaatcagtggagagatgcagctctgcaacgggcagctggtctgcgccagcggtgaatgtgatgcgataaataacaacaaaaccgacagttttgcgaaagcggtgtctgctcttgctgcagtttcagcggccgcgaaggatgtctctgaactgaatgatgtcaatgtccgggccttcaccggtgaggcaaagcagtgccggatggccattgccggcttcagcgactgctgtaaggactccggctggggacagggtatcgggcttgcccactgtgacacagaagaaaaggcgctgggcaaagccaaagagaaactgttgaccgtgtatgtcggctcatattgttcgaaaaaagtgctcggtgtctgtctgcagaaaaagaaaacctactgccagtttgattcgaagctggcgcagatagtccaggtccagggccgtcggggccagctgggtatcggtttcggccggggtaaaagtccggactgccgggggattaccgtggatgaactgcagtccctgaagttcgaccggatggatttcagtaatttttacagcgatctggatgcgggtacgactatcccggccgacagccagctggctgacagagtgaagcagcagattgaggcggcactacagcaggccgcagggaaggggggatga

SEQ ID NO: 396219 - DNA, 609 bp, Salmonella enterica
gtgtggaagattatctctgcctgcagcgttgccatgagctgcacgctgtctcctggcattgtctgtgcttcgcaggacagcgccgattttatcgaatccctgcgcgaccggtctgatgcgcagcgttatcaggctccaccgcccgcctttctgcagccaccccgtccgagcgtgcagggaaatgccctggcgcagagtctgttgcagcaacagcggaccgcctcacagcgcaacaaaaagcagccggtagcgctttatttcgtctctttctccattccggaagaaggactcctgcgcatgctgccggaagcccggagcctgaacattccggcgctggtcaatggtcttatcgacaacgatatgcggaaaacggccagtgcggtcttccgactgacccgtgaaaaaaacaccggcggggtgcaggtcgatccgacccagtttgcccgctttggtatcaccaccgtaccgtctctggtggtgacctgtaatgacggggcgttcgatctggtacgcggcaatatccacctgcggcaggccctcgagcgcgtggccgcagaaggcgagtgccgggaaacggcaaaagccattcttgcggagaacccgacatga

SEQ ID NO: 396220 - DNA, 1035 bp, Salmonella enterica
atgatgtcatcagggctgggcgagcctgacaacacgctgctgacacaccggataatcatgacagaccaacattatggtctgacttccggtgaggaagtgcaggccgctttatcaaacacacaatttgtgctttcaaaaataacgaaacagtgttcatcaagcagaaatacagggcagtttttgcagtgcgccaacaacattctgggtgagcatttttcttaccaggaaactgccctcgccacagagggttattcgcggggaatttcagactgtgacctgaatgtttatttattacttgatgccgcaaggttactgaaccagaaaataaatattgtttatgcccccggacatgcttttattgcttacactgacgagaacggtcagccgcagttctgggaaacgattgaacctgacaatcacggtcagccggcagagctatggacatcaggctatgccaaaacgctgcatccttttttctacacaccgcaaccagaaaataagattgaaaaaatatatcagttatatatatcggaaaaactacctgagaatgaaaggatacatctactttctaccctgcatgaaaccttacaggataacccactctatctcagtgcgtattatggcaataaaaaagatattaccccaaaagatattagccacctgctctatttactgcaaagcgatacatactcatttgacaagaaaatcattactgctcgttactttaataataacaagagctatcagcgtgcagaaactctgcttaattcaatcccggaacatcagtgcgatataaaatgccttgaggaaaaagcaaagtattctattaaacataaaatattttattacatcatcaacaacagtaattacgaaacagaacacgccattaaaggagcggtcgaatcaatctggatcaatatccttatgttattggcctttacttctatactgataatatttctctgcagaaaagagatagcagaaaaatacaataattatcaccgaggaagaatacatcatatcatgagaaagtga

SEQ ID NO: 396221 - DNA, 462 bp, Salmonella enterica
atgacagtaaaaacggtactgaaatggctggataccctgacagcctggggatttgtggtggggttagcctgttgggcatacgatctcttcatggtccagtctcccgcccggtttcgtgtatttgggcagggggagataatgggggattttacgggggtgcagtttgtgatgatgccttacacaacatgtgtaatcatttcacttgcatccctggggcagcttagtggctggccgggagagcgaatatgctggaagatgattatctggctgcatactcgcctccttgcgccaacgctttttagttattactcagcatatgtcctgtacgataatgcagaagagcggattagtacgtcactttctcatgatatgatgtattcttcctcggtgataattattgtatttttctgctatctcttttctgcagagaaatattatcagtatagaagtaaaggccaataa

SEQ ID NO: 396222 - DNA, 996 bp, Salmonella enterica
atgattttactgcgtgcgctgttgtgtgtgctgctgttgtcatcgcctgcgctggcgaaggatgacagggacaaaatgtgtgacggcaattttgttaacccgatcagcgatatctgctgggactgtatctttccgatgacgattggcgatacggccgttttcccgggggatgtaccggatacggataacccgtccatgcccatccagttctgtccgttaccgccgccgctttttcagcgggtggggatggccattggttactgggaaccctttgcgctgaccgatgtaacccgctcgccttactgcatggttaatatggggggcttcaatatcccggtcgggaaagtgggggcgggcggggccggacaggaagataaaccggtggcagggggattttatcatgttcactggtacaaatatccgctgacctggtggctgaacatcatcatgtcgctggcctgcctgcaaagcggggatatggatatcgcgtatctgtctgaacttgacccgacctgggatgatgatgcgctgtcgctcatcctgtcgccggaagccctggtggtggccaatccgatagcgcagggggcctgcgcagccgatgcggtaaagaccctgaagtggaaacccatcaataccctgttctggtgtgcgggtgcgcacggcagcatgtatccgtttacaggatttatctcagatgagtacagccctcagtcggcctcggtactgctttcagaaaggatggcattcaaactgcaccggcaggggatgatcctgaacagtatcggtaaggaccgcaagatttgctgggaatatccgtcgcccatcataccgaaagaccgctatcgctatcagatggtgaatatgcatccggacacgaatgcgtgtcatcagtttggccgcagtgtcatgacctgggaagcagggcatacgacgcccaacaccaaaaagaactatggctatctcatctggcgtaagcgtaactgtgtgtttttgtga

SEQ ID NO: 396223 - DNA, 621 bp, Salmonella enterica
gtgagattaccgatactgatggcgctgtcactgagttttccgctggccgcaaaagacctgggggtttggggagacgtgtggccggtgcaggagcagagcatgctgtctttcattcagcagcggctcggcgagatggaaaagagtggccagctggctgagctgcaacaggggtttaaggagcgggtggtggagaacaccctgcgtccgccgccggtgggcgggctgcgaaccgacacccggtcacacacgcaccgggtggatccgacggtcagcctcagtgaggatatggcggaccacaacggacaggtgtttgcccgtaaaggccagcgggtgaatccgctggacaccgtatccctgccggggccgctgtattttctggatgctgatgacaggcgccagacagactggctgaaacagcagccggcagaactgaaccgcaaggtcattctggtcagcgggaatatccgtgaggccacaaaagcgctggatacgcgggtgtactttgatcagaacggtatcctcagccggcggttcgggctgacgtatatcccggcagtggtgagacaggaggggcgttacctgacggtggtgtctgcagcgatgccggaggggggctcatga

SEQ ID NO: 396224 - DNA, 231 bp, Salmonella enterica
atgaccatgaccgatgagaccgaacgttaccaggcgctgcagcacatgcttgaagaacaccgtattcaccttatccgccgccgcttcgccggtgaaagtgcaatgtggtgcgaaaagtgtgacgcaccgatcccggaagaccgccgccgggccattcagggggtgaagacctgcgtcggctgccaggaggtggcggagaatctgcagcggatttacggaggctgccggtga

SEQ ID NO: 396225 - DNA, 435 bp, Salmonella enterica
atggacgacgaaaaactgaaggccctgacggcggatacgccggcaaccacggcttccaacagcccctctccccgccgctcccgccgccgctggcggtgtgtgaaaccggtggccctggtggcaggggggatgacggcaataaatgccgcaatcaccctgctgctgatccagtggcagcagccggctcccgtcagcgtggatttgaccggtacggtaaacaactttgtaagccaggcggcagagcagcggctggatgaggctcagatgcaggccctgtccacccgttttcactcggtcctgagtgccagtctgacggactggcagcagaagcaccggaccgtgattctggtggccccggcggttgtgagtgggacgcgggacattacgccggaaatacaggctgaagtggcccgccggatggcagaaggagattga

SEQ ID NO: 396226 - DNA, 2643 bp, Salmonella enterica
atgcagcaacgtcctgctgattcagagaaggagcccccggtatcctcctggcaggtgtggctttcacagctgatggggagctggaaaaccccggatggcagccagaaagcccgtcagattctggaagagatggattatccttcctttgccagtatgctgccgtaccggcagtactgcccggagagtggcctgtttattaatgccgccaccaccggattcctgctggagtgccgccccctgtcgggggccaatgaatccatcaccaagtccctcgactttttcctgcgggacaaagtcccgcgcagaacgcccctgaccttcctgctgctgggctcctccggtgttcgcccgctgctggatcacgggctggccgacttcagctggcagggccggcgggcagaggagttcaatgccattacccgggcctattatgagcagggcgccctcagcggctttgccaacaaaaaaggttatccgctgaccctgcgtaactaccggctgtttgtctgttacgccgaggagacggggcatctgacggacgcccggaaagtggagataaatcagatcagcaaccgggtggaggcgggactggcttctgccgggctgtgggcctcccgggtgaataaacaggggctggtctcgctggtccgggagctggcgaatttccgtcacggcaatatctcgccgccgggtggccagaccactgaatttgaaccacttaacacggagtgtgtggaccgttccctgcgtctgatgctccacccggaccgtattgaacagagcctgcaggctcccggcggcggggagcgggaacgcacgcgtattctcaattatatgctggagaagaacccggaaaaaccttttgccctgtggcagaccggagacaatatcagcaatgtcaccgacccgctgtgtaccgtggcctgtccgttcgtgataaccctggccctggaggtgcaggaccaggcggccacccagcgcgaggccaaccgcaagtttatgtcggcagacaaaaaggcgaattctccctttgccaaatttgtgccttcagtcaaacggcaggcggcagaatggggcgggttacgtgaatccctgagcaccaaccaggactctctcgcccggttttattacaacatcacactcttttgcgaagaccgcgaagaggtggcgctgaacaccgaaatgactgtgctcaacacctaccgccgtaacgggctgtcgatgtttatgccggagttcatgcagctgcgtaactacctgtcggtgttcccgttcatgatgggcgaagggctgtggagtgatatctgtcgcactaatgccattcaccgggcacgggccagcaacgtggccaacctgctgccggtggtagcggacaaccaggtctgccggcaggggctgcccattccttcctaccgtaaccagctgtcgttcctcaacctgttcgaccgtaatgccggtctggatacggacaataacaacctgtcagtgaccggcacctcaggggggggcaagtcgtttctgatgcagggcgtgctgcgtcaggttatcgacagtggcggcctggcctgggtgttcgatatgggcgattcctacaagggcatgtgccgtaacgtgggcggggtttatctcaacgcgctggatctgcgtttcaacccgtttgccaatatcgtggacattaaagagtccgccgagaatatccgtaacctgctggtcgtactggccagcccctccggcgagtgcgatgacaccttcatgtccctgctgctcaaggcagtggaaagggtgtgggaggacaagaagaacgcggccctgattgatgacattgtgttctggctgcgtgatgccctggcgtcaccggagtaccgggagaccaccacggtgcgggcgaggatggaggagatcatcgtcgggctcgacaagtactgcagctggggggtgtacggcgagtacttcaacagtaaaaagccctcactggacgacagcgtgcgtttctcggtgctggagatgggcgagctcaagaacaagccggacctgctggcggcggtgatgttctctatgatgatttacgtcgaacagcgaatgttcctctccgaccgtcagcagtgcaaggtctgcctgattgacgaggcatggaagctgctctcgaaagacaacaagcgcgcagaagactttatcgaaaatggctaccgcactgcgcgtaaatacaacggcgcctacatcaccattacccagggtattgaagattttgacggcaaacgggccagcggggcggcgaaagcggcctgggccaacagttcgttcaagattgtgctgcgccagaaccgtgacagcttccgcaaatactgcctggagaacccggatgccttcagtgcgtacgagcgggaggtgattgaaggttttcctgccgcccgcgaggcgcacttcagcgcctttatgttgcgctatggcggacaggtctctttccaccgcctgctgctcgaccccatcagccgcgtgatgttctcctctgacggggaggattatgactaccgcgaggccggcatggcggccggacgtgacattcacgacatcattctggatctggcggtgcgcaagcatcccgatgaaatgcagaggttaatggcatggacgacgaaaaactga

SEQ ID NO: 396227 - DNA, 570 bp, Salmonella enterica
atgaaaaaatttaccctgatgctgacaggcagcgtcctgctgctgtccggctgtaccggaatgaaaagtgaatttgactgtactgagacggctcagaacggctgcctcacaatggacgaggccaataaccgtgcccggatgaaaacggaaacggagaagcagaacatccgtctgccgccgctggcggaggtgagggcggccaccgtgacagcgccggcgcttcgcgcttcttcagcacgcgcccctgttgcaaccacttctgttaccggagggacaccggccaacgtaaggcccacgccagccggcgccaccggcccccgtaatccgttccggggaaatgcggcgccggcgcgaggggaggttacccccccggccggtatgactgttgccgggacacgggccctgtcagcgtggtctaataccgggatgcagccgccggtgcgcctgccgtccggcaccgcccgtctgtggattgcggcgtggattgatgaagaccaggtataccatcagccgtccgtggtctcgtttgaggtaactccggcccgctgggccacacaggagggggcgtaa

SEQ ID NO: 396228 - DNA, 417 bp, Salmonella enterica
gtgcgtgactatagccagctttccactcaggaactgaccgtccggttagagggagtgcaggatatccataaaaaagtgacgttcgccgcaagggatggttctccccgctcgcttcagggcatgtctctggctgcgctctttatgtcgggtgtctggatcctcagcgataacctgctcctcagcggcgcgacatgcttactggtgtatggggtcgtcatgcgctattcccgcgcgcctgctgactggcaggaactgctggacaggttgctctcccggctggagcccctgcagtcctctccgctccggtggctgcgcacggaccgcgtgtcctggtcgtatgcggaacgtcgcctgcagcaggaaatggcgctgatcctaagcgctctgcgccatccctctgattgccttaatgcctga

SEQ ID NO: 396229 - DNA, 1347 bp, Salmonella enterica
atggccaatatcaatcatcttgtgcggcgtaaacagaacctgtatctgctgctggtcgcgctggggctgagcagtatcgggggggtggcctggtatatgtcggcttcccggccggctccgcaaaaagccgcaaaggcgccgcccgcaccaccaaacatgaccggggtggtctcgcagacgttcgataaaaaagtctccgatgcggccgttgccgatatccagcacaccgccagtgcggcagaaaagaaactcagggagtttgaaaaacgtcttcagggtatggaaagccgggaaaaggactaccgggccaaaatcgaagagcaggagacggaactggctgtcctgcgggcgaaagtggaaacagaggctgacaccgtcacgcctgaactgcctgccggtcagccggtacccacgttcggtaccggagcagcggttcccccgcccacggcattttatccgggagctgcagcggttccgggcggcagtctggcaccggtgacacagtatgatgtcacgcccgtcccccgtaagggcctgtcctccatcagcattgattatgccggtgctgatacaaaaccgcctgcgccggaactgccctatatcccgtctgcgagctttgcgccggcaatggtcattgaaggagcggatgccaacgcttccgtcaccggcaacagcaatccttccccgatgcagttccgtctgacgggagcgatccggatgcccaatgacaaaacctacgatatgaccggctgtatggtgaccggtggtgtttacggggacatctccagcgaacgggggcttgttcgtaccgatcgtctgtcctgtaacaaaaatggcaaagtgatcgatatgccgttcaaggggcatgtgtcgttcaaagggaaaaacggcatcaagggcgaaccggtgatgcgcaacggaaaaatcatcggctgggccttcgcggccggcgctgtcgatggtatcggcagcggggtggcaaaactcgggcaggaaacgccgggtgccggagccgttgcttccgtgagtggcagcgccatcatgaacggcgccattggcggcggggcctcccaggtggggaaaacgctgagcgactactacatcaaacgggccgagcagtatcacccggtcattccgattggggccggtacggaggtcaccgtggtgttccaggaaggtttccggctgaagtacaccgatgagggcaagaagaccggtccggcacaacaggcaaaggccgtggcggaccaggggattcaggtctcacagcagatgctgcgtgaactgaatctcggagacacggtaccgcaaccggggttacccggtcaggtggcgggaggacagtaa

SEQ ID NO: 396230 - DNA, 765 bp, Salmonella enterica
atgaaaaagacaagaaggattaacgcgatagccctgctgctgggcatggcatgctccccggtaatggcagccactgatggccgggtggcacagccggtgaaagtgccggtcagtgctgacgtgcaggccagcgtggcgctgagcaacacccagcccaatatggtggtagtccccggcgaccgtattgtggcggtggacagtgctcaggggatgtttctcaacagcaatgattacggcctgaccggccaggccaacgggggcgtcatcctgatgacagagaaaaccaccccgttcacgttttatgtccggaccgccggggggctgaccgtttccttggttgcccatccgcaggccagaaacgggcgggttatccacctgatgagtgaccagcctgtcagccatccggcggccacagagtgggaacgcagccatccgtatgtgagcactctggtgaagctgcaaaaagccctgatgaaaggacaggtaccggcaggctacgcggcatcaccggtggttcaggcgccggcgttcagtctgccgtccggcctgtctgcccgcgcggaagccatgtggagcgggggcgggctgcgggtttaccgctaccgtctggaaaaccggagttctgtgcctctgaccgttccggaacgtctctttgctgtacagggtgtccgtagcgtggtcgtcgatccgtgggcggaaaccctgctgccggcggcaacggcagcggtgtggataaccgtcagccagccggcgggagggcagtga

SEQ ID NO: 396231 - DNA, 576 bp, Salmonella enterica
atggatgtgagcgtacaccgctccgccagtaaatacacatccctgatgttcgtcattcttctggtccttctgagcctgagtctcgccgccaacctgcttgcctggctgcgcgttgatgacctgcaacggggacagaaagaaacctatatcccgatgttctttaaccagccgttttccatctcgcgtaaccaggccgatgccagctatctgcagcaggtggctgagtccgtgatgttcctgcgcctgaacgttaccccggagtcagtcaaggctcagcacaaagctctgctgcgttatgtgcccggtgatgtgcgggcgtcaatgcaggatatcctggcctccgaggcgcagcagatcatcaccaataacgtcagcacggctttttacatgagcgggattgatgtgtatccgcttgaaggagtggtggattttcgcggcaccctgcggacgtggattggcaaacgggagtccctgccggaagagaaacagttccggctggtactgaaataccgggacgggataaccaccatccgggactttaaggaagtggtgaatgaaaaagacaagaaggattaa

SEQ ID NO: 396232 - DNA, 306 bp, Salmonella enterica
atgagtgatgaagtggaagcacgctacctctttcctcagacgctgaccgagcagaagcgcctcatcggcatcccgctggatgaggcgcttgtcggactggttccggcctgtgccggcatttatgccggccagaatgtgccgggactgattgtgggcggcctgctctggttcgcgctgacgcatttcaaaaagggccggggaagtacctggctgttcaacatgtgctactggtatctgccgggctactgttttcggggaatgtacaaaattctgccggaatcgtcctggcggctgtggctcaagtag

SEQ ID NO: 396233 - DNA, 375 bp, Salmonella enterica
atggctgaaatcagcgttatgaatcatgtggcctctccgcgcaaaccgggtctgctgtcccgttgcctgtccgctgccaataaatccaccgcaaaagcgctgctaaagtacattgccgcgccgcttgcgctgtggctggcagcacagggcgtggcccaggccaccgacctggcggcagcaggtaagggggatgtggaagccaccttcggtgaagactccaccatgatgtactacttcatgatcgcggaagtgttcctggtcttcatgctctatctgcgtaaccacaacccggccaccttcgtgctgatcccggtgttcatcgtggtcacgaaggtcatcttcagcatcgtcggcggtacggccggtacgccgtaa

SEQ ID NO: 396234 - DNA, 216 bp, Salmonella enterica
atggacataaataaagccattaaacctatcaaatctattaaacctattcctgttgagttaaatgagattactgacagacgtcttaaggatgctgctaaacgttctggcagattggtacgacatgaagcgatgatccggctggcgcacagcctcaaacatattccggtaattgatgaggtttactgggaaatcttacaggaggataaacaaaagtaa

SEQ ID NO: 396235 - DNA, 759 bp, Salmonella enterica
atggctgaacgacactctattgatcactcgctcggatctcaagatctttcttctgcttttatgcatcattacatgaaatacggcgctccgtggttcataaaggatgctgatgggagatatttggctcattcggttacactgccaaacttacttagttctcacttaacatcctttcattttgttacagatgaagaactaaatgttttaacaagttgttacaggaatagcatttccaattcagagctaagcgcagtaaagttatctgaaagaattataacacttcatataaataatttttatcaccttaaaaccctatccccactgatttttataacagagcctttttcttttgatcgggagtggggttctttaacaaggattgttgatatttgctctttaagaaatttcgactgtataaattttgaaaaaataataaacacgggcacttctcctgactcattgttagaacgtccgcttgagttttattcagaaattaatccaacagttattttgaccgaagtgcaatggttagcttcatggctatgcttgatggggctgtcatatagggatattgcaaaatttacaaaaaaatcgcataaaaatactagtgctcaactcgctaagtcatttacagctcttaaattacatacgcttaacaattttattttcatctcaaaaaaatatggttgggaaaaatttattcctccagctgttcaacacctgcctacatccaaaattcttaaaagggaattattgtaa

SEQ ID NO: 396236 - DNA, 405 bp, Salmonella enterica
atgccgagacaaaatgtatatctgaagcaaaagacgcttgatgaaatccgtaaattaatggatgaacgaaaagcggaaggtgctacacccagtgatgccaacatgtccagcatttgctctgaacttctcgaaataggattgcgcgtgacgctacaaatgaaaaagcgtgagcagcaggaggagaaaaatgggggattaacggatgaagaaaagttcagaaaggagtgtcttgacggaataattaaaacgaaggtcattagccagaacctcttaaagcttttcttcagtctggaagaagtaaaacaggactcccgttttaattacatagaaatggtgggggaaataaaagaaaagtcggagctgcagttgcagcaggttcttggaggaactgaaaatcacgaatga

SEQ ID NO: 396237 - DNA, 147 bp, Salmonella enterica
atggtgctgcattttgtggctacagtgctgcttacagtgcctgatttttgctgtacagtgctgcttacggtgcctgtggtcgtctatggtgctggatcgaaagtgttgtcattttttgaacagtgctggttacagtgctggatttaa

SEQ ID NO: 396238 - DNA, 678 bp, Salmonella enterica
atgccaggtaaaaaaatattatcttactgttttacatgggaaatctggcaaaacgaagttttgcgacgggtgtgggaagtgatgcttcagggaagcgtatttgtcagcgtcctgtttcgggctgtttcaggtatatccgcgctttcgttctttcgccaaaaatgggagaatcccagcagggagtattcattcaggaatgggaacttcatgcgcctttcgattaccgcactattattttttatgtcggcttctgtttttgcacaggactgttttgatcgtgcaggcagggattacgggatcaatgccgatttattacgggcgatatccttccgggaatcctcatggcgatctgatgcactcaatatcgtttcaccggaaagttatgctgtgggtgctatgcagatacactcacaaaactttgcccatttatcactgttcggcattactccggagaagttaacgtcagacgtctgcatgaatatttataccggagcttactacctggcaatcgcgtttaagcgatggggagttagctggcgcgcggtcggagcttacaacgcaggattccgggaaactgataagcaggagagaaaaagacagaaatatgccagggaggtgaaagacatttatgagcagattttaagaaaccgggaggagttaacccgaaaaaccaggtaa

SEQ ID NO: 396239 - DNA, 384 bp, Salmonella enterica
atgttcaggaaaatattttcatccactgtccttgtaaccgtgttgctatcatcgcctgtatttgcggatttaaaagacaacatgcagacgttgtcccgtaatcttaatgttgttgaagcgtcacagaacagcaatgaaattcttaatgctctggatgagatgaaatcagctatccttaaatcaagagataaaatcccgaattctctggaggggaaagataataaaagccatgaatggcatgattaccagaagggatacgattcgctgattttcactatcgataaagcccgtgaacttgttctggacgggaatgtatctgaagcgaaaaaacttgttaatgaattaaaggcgaccaggaactcctggcataaaaagtaccggtaa

SEQ ID NO: 396240 - DNA, 156 bp, Salmonella enterica
atgccgggggatgtttttttctggccagtgtgtgaggttttcttcctgccggtgataatacgctgcctgttcctgttcctgttcctgttcctgttcctgttcctgttcctgttcctgctcattcagttgctggtattccctggcgggtttcgctga

SEQ ID NO: 396241 - DNA, 588 bp, Salmonella enterica
atgcaaaggaacacatacaacaaagtaggtctatacatcctatctttagctatgctttttgtttttatcattatcctgactgccaaaatccccttttgcttcacttcggattgtagcttcataggtttaaaaaaacttgtattaacaaatattgttcctattgtttgctttgtattttttctatttagtatttatttttataaaagattaaaaaatataacaaaatacaatggacaagatagtgttaaaataacatcatgtcaaagcgaaaactatgaaagcttaacattcttagcaacatacattgtaccttttatggggtttagctttgaagacatgcaaaagaatatagcatatcttttgcttgtagtagtaataggcattatttttattaaaacagacaagtattatgcgaatccaactttagctctatttggctttaaactgtacagggtaaatatactacacccaggaagcggagagacaaaaaatctgatagctatttcaaatgatgtattaaaagtggacgataatgtttattatagtttctttgatgaatttgtttttatagcaaggaaaaaagcatga

SEQ ID NO: 396242 - DNA, 1017 bp, Salmonella enterica
atgctgctgtattacacccgacccacctacgtttggtttttccctcttcttgtactcgcttgtggtatgactcctctcgcagcgtcaggcgcttgccacctgaccggtgtatatgcatctatgcacgccggggcacatccgccttctaccgtgaaccttactcgatggcccgccaaccctggaggactccgcgcgacgggcaccataaaaactaacctgtcttccccagtgtacggtcacatgcccggcacaaatacttacgtgccacgtggcacgatgacacgatcagaaatgatgtctctgctggaccatttacccaataatgggccgcaaggcgtaaacataaaccttgccgatgccataaacataaacactgaattgacaaattatgccagtgttaatatacatcaactcttacgcgacggtcaggctcggattagctggaattacgtaacccctcttgccgcctcgtccgcctattatctgcacgcgtctataaacctgaatgcgccaattaacatgactgtaaacgatcctcagttatgtttgaaactagccgaagcgtcatctccaccatcacacgcgcatatttggtacgataaccctaatacaactgtatccatccgccatcctcttaactcaacaagtgacacctttccataccattggcggtttagatttgtgtatacatttaagcaatcactgggattgcgcactcttcctaaacaattaaactttggtgccaatccggctggaaacacggtaaaaagggatgtatcaataggcttgtcatcttctattcagtcacgcgtacaatatacattctcgtacactagcatttccaaaacaagggaagaggtacttattgatgggcggaggttacccgtgcaatttgctgtatcgttacctgcatccaatagtaacagctttactgattttaaacatcaggtctctttgacatcgccagatcctggaaaggttgacgggaacattcttgttgttgctgaaatattataa

SEQ ID NO: 396243 - DNA, 156 bp, Salmonella enterica
atggccaccggcagcagggcggaagtgcttcagcaaaaaacggggaaccgtgtgctacctgaccacgtcggtctgcagattgagtcgttcagccatgaaaatatgcccttaatcagaaaaaaagccgcaaaagcggcttttacttttcaactatga

SEQ ID NO: 396244 - DNA, 2394 bp, Salmonella enterica
atgcgatgtgattttattgtcttggataaaaaagcatcccttgtcgataaaggaaatatcgacgacatactcgaacactcactagtcttggctgaaattaaaagagataacaagaaagctgattatgtaaaagatacacaggttaagcctcttttagattttgccaaaaatcagtcatgcatcgcactttattgggataatattgagcaaagaatattttggaatgtttactccaattctaaaaggacggttaatgaagggccgttggccttgcttcccaaatttggactaaaagttgaggttaaagctctttcattacaggacctgatgttacctgattctttattgggcacctatgctttgatagaagatatcctacatcagtcagcgattgatatggaagaacgttatgaaacaatattaaagcttcttttgtcaaaaatatatgatgaacattttactgctgctaagaaaaataatgaaatggtctttcaagactattttctgttaggatgctctttcaaagatggcagtgacaaacttaataaattattaaatgatgccgtcacttattatgaaagacacttacctaaaaaaatatctaaaaaattcaacattagaccagatgttctatgcgaatgcgccaaaattctggctccgattaaaataacgtcctcgaagagagatataattcaaactttttacatgaagtttgcaaaagatctttatcgttgggatttagctcagtacttcactcctccgactgttaccgattttataattgacatgctcaaccctcaatttggtgagcatctgaaagatccagcatgtggtagtgctgatttcttggttgctgcattccataaaggtagaagtatcgacaaaaactatgcagattgcctttggggtagtgataattcaatgaatgcggttcaagctgcagtgctgaacatgcttttaaatggcgatggaaaaacaaacataaaaaaagaagactcacttgagaatgtcaacaactctctagattcttataaaataatggtctgcaatcctccttttggagtaaaaattgtagaaaaaagagcagagattcttaatagatttgatttaggaaagctttgggagaaagatagcaagggtgatattgtaaaaacagataagatcgtaaaaagtcaggaaacaggattgttatttgctgaactgtgtgtcaaacaaacttcacctaaaggtagaatagccataatcgtccctaatggatatttaggtaatagatcagaaaactatgttttcttccgtgaatggttattgcgacactgtaagattgcatctatttgctccttcccaaggtttacattcaaaactagcggtgccgatgttagtgcaagtgttctttttttagaaaaaaggacagagccattaaaacgcagcactgattcggaagagtatttctttcatgttggaatgatagaaagagttggctgggacttagggaataaagtagccgctccagtattcaagcgaaatgaagatgatggtagttatttgatcagtcctgatacaggtgaacaacttatcgatagcgatttttcatctatattgactgacttcagaaatagcttatctgctgacgagatggactggattactgaaggaattacatctaaagtctgttcggctgaaggatggtctgtttcgattaaaaatgttcttgatgatgatttaaaaactttagacccgaagcgatactgtgaaaaatatgtatctttagtagatgctataaaacaagagagccatttctacctaacagatgcactagaaataatttcacaagggattaactccttaggtgagagaattaaaaaagaagattcgaaggtttataaatatatcgaaatacaagatattggatatggagattataagtataccgagatgaaaggatgggagcttccatccagggcaaaacatcacgtagaaccgggtgatatatatttaggttctgtatggggtagtgtaactaaatggttcatggccgattctcgtttagaagatgcaattgtcactaatggttgctatagattacgtcctttatctggtgagtccgacaaattaattgacatagtcgcatttctatgtactgaagcttatgcagtacagatgagagcattagccagaggctcagatggtttagcagaagtccatgaaactgatctttctaaaatcgtagtcccgatagttacagataaaaaacttagaatagaaatcaaggaatatttgaattcattgcttgatggtcgccaaacactgtcttcagcagtccagttatggcaaagcactaatgctatatcattgccaaaagtatccaaaagacatcatcatgccgtattagtttaa

SEQ ID NO: 396245 - DNA, 276 bp, Salmonella enterica
atggacataattaatgaagcaggtttatatgcaaattactttaactactttatagaacactattttttatggtctcttctatttatctgtgcatcaatatttttctggcgactatacagaaaagcacacattgaagatcaaatgaaatttaagaaatacttataccttctattagtatgctttttaatatttatctgcatatttatattcaacacaaagaaagaagttgataaggagcgtaaacaaagccatcaatacttatctacacataagtaa

SEQ ID NO: 396246 - DNA, 135 bp, Salmonella enterica
atgtatattaattttgaaaagacaaaaaagaaaatatttctgtggtggaaaggtcttagtttacaggaacaagcatttttcatttatcttgttccttttatctatggcatatggttagtttacgaaacgttatga

SEQ ID NO: 396247 - DNA, 438 bp, Salmonella enterica
atgcataagataaattatacagatgatatagatctatccaaaatttcccgccgtggtagttttaataaaagtaaaataccttcagaagcagtaagaagctattgtgtcagtgtccgtttgaatgttgaagaactgcaactcctgaatattaagcgaggctcttataaaaagggagagtggcttcgtatggcttcccttcaaaagttacctcctgttatacctgcgattaataccaaagcctggaaagctttaactgacatatcacaaaaactaaatcgaattgcgatccatatcgatggtaagagcaaagacagcaagcttactcatacagagcttttcgctgtgaagcgacaacttgaagagcttcgtcacaacttgttaagaacagatttttggagtgtccctcgtgaagggtatgcggaagatcaagaggggtaa

SEQ ID NO: 396248 - DNA, 1182 bp, Salmonella enterica
gtgaagggtatgcggaagatcaagaggggtaagaactttgccggtgtagtccagtatgcattgaagcccggagtacaccataaaagtgatccagttgccattggtgggaacatgttaggtgattcagcctttaaactgatcgctgaatttgatggcactaaacagcttcgcccagatgttcagaaggccgtttggcacaactcgcttcgcttacctgatggtgaatcattatcgaatgaccaatgggtaaagattgctgacaactatatgaagaagatggggttcagtgatactcacctccgttgctatgttctacatgacgattcagccggtcagcacatacatataattgcaagcaggatagacctcaatggtggcaagctttatcttggcaggaatgaaaacctaatcagcacacggatcattagtgaactcgaaatcgctcacggtctgacagtaactaaaacagccaccgccattacaccaaagcaaccgaagcgaagaaaagtttcccgtaatgaacagatgctttcagaacggactggccttccctcccctaaagaagctctacaacaaatacttgataaaagtttgactgatatgcccgaccttcttacttttgttaagcgactcgaagatgcagaagtcggttggacggcgaatgtcgcaagcacaggtaaaatgaacggcttctcattctcttaccgcgatatagctttcaaagcttcgcagttaggtaagggttactcctgggtaaatctcagtaatcggcttaactacaaccccgaccacttagaagctttacgaaccaacacaccggcaaaagaccaccctgctcctgctcctgctcctgctcctgctcctgctcctgctcctgctcctgctcctgcaaaagatgttgcaacaacggatattccaagggaaagcataagtgaaaaaattgctgaactcgaactgcgactcagagaagacagacgaaacgagatcgttgagaagattcttcaaaagaatgcaatacaacagaaaaagcatctaaggctcagtagctggtttccctttttacaacggctcatagagcttctccgaagctacggtaagagcattcttcacaaaccccaccctggattttcaaaactctatgcaacccgacttctacataaagaaaggaaaattcatttatag

SEQ ID NO: 396249 - DNA, 732 bp, Salmonella enterica
atgttgaaatacaaagaccttcttcaaaagagcttagataatggaaaagtagaatatgtaatttcagtgccacgagttaaacaacggggtaaagaactacgatatcgagaacttgcaataatatcagaggttgcatcaattgttcaattgcaagctaatcaatcagtgaaacttgttgagcaagctcttggaaaaactcttgatgattattctaaacgagaagttcctatctttttaaatgaggaaaaactctcagatttatccataacaggttcaattcttctggagtataataaattatatgcgaagcctacaattgctaatgtagcattgaaaagtattgttaataatgggggtataatatccaaccgtaccggttcgatactaaatgttactcctcgtaggcttcgttatacaatagcaactttgctggctaaggatgggcataatgttaatactatagctgaattattggatcattcctctacttcaagtgcggggatttatattaaaaatcatgctgacagtgttgaaaggattgattccgcagtttcagaacagttgtcatttgtcgctgatatttttatgaatggaatcacttcgaaagagaattatcatattaagttttgctcttcaagaaaatgcataagtcagaatttaaataaaaatttcccttgtgataaatgtgctttctttatgccagacgatattgatgaggtaaatatcaaatga

SEQ ID NO: 396250 - DNA, 342 bp, Salmonella enterica
atgccatccgtaaggggattctctaattttagtgaccatttcccttcactgtcagaaatgattgggtgtttctttccgttaaggatcaaaaatgcattagcattaggtgtagcaaagcctgaaaaagaaggagtagcacagttagtgatcgcatcaccatgtttgcccgaatctgatttggcgtccaacctccccgagataaataacaatttttcagtatctgttattgttggtggtgtaaccttattcattacagaagatgaagacgacgatgaagacgacgatgaagacgacaatccttcagtggtattgactgaaacactgttctggacatcaatttga

SEQ ID NO: 396251 - DNA, 270 bp, Salmonella enterica
atgagcaagggcattattcgtcttcatgacaaacttagcagcggcggggaagtgatttccgcctcttccaccatgattatcgacggtatcaaagctgcattacttaacgacctggtgtcctgcccgattgaagggcatggcgttaatcgcattgtggggacatcaccggaatggcagtcagacagtgaacaggctgcttttgatggtgcgcagtgccagtgcggctgcacggtgatcgccagcgccaccggcggtattctggggagctga

SEQ ID NO: 396252 - DNA, 456 bp, Salmonella enterica
atggctgtgatggggcaaggggatcactatgtaacttacgcattaatgattcctgaaattcagactatttctatgacacctcgttgtggggctggaagggaagctgaaatcagtttcggcaaatatgcggtcatggggataggaagcatttttctggttattttaacatatcttcgtattcgtggcgttgactgggaaggtatagccttttgtgctggtgttttcgctttcatgttagcgatggcctattttttcgccatgcgcagtatcagaaagaaccccggtcccgttattttgttgtctgaatctattttttccgcactggggttttctgatcctcaatgggttaatttgccggaaaaaacaaaaaaaaggttaaaaagcgaacctccgctaaaaggttccaggccaatgccggatcgtaatgcctggcgagactacttctattactactga

SEQ ID NO: 396253 - DNA, 414 bp, Salmonella enterica
atggttgatggattaagtggagcactatgcatactcatcttggtatcaacagtatttatcgtttccggtaccgatgcggtcgttggcgtagaagggggaaagctaacgttcagggattcgtttgttaatattggcgataaaactatttactatgtaggaggagtgtcactgtctaataatgatttatataaaatcagagaggcgattaaatcctcgaggattaaggggaaaaaaattgaattatggggtgctatatccgaacaaattgaaaataataccgggaaaaacacatataatttattaaagttatattccgatctgaaactacctagaaatatcgaagtgaagttcaataagggagatttggcgcggtgtggtgactatcgatcatgtatttactggagtgttgaataa

SEQ ID NO: 396254 - DNA, 846 bp, Salmonella enterica
gtgtatttatttgggatgttttcgtatgttataatagtgctgagttacgttatgtttcctgcgattaaaaacatgctgactcaggccgtacttttggcaccacaaattacgtacgcttgcggtgttctgttcttattggggttaatcggtacatttataggattaactgatatggtttcttctattgccggctcacttggtggcgatggtgatatggcggaaaaaatgggcgctatgatagcgtcgatttcttctgcacttaatgcgatgtcatttgcatttttgacctcaattctgggggtatcggtatcggtattattattgataaaccttaatttttggggttttttttactcagaagatataaaagataagtcaaataaaaacagtgatctggctgatcgccttgctgggattgagaaaataaatactgagatttccgggaagttaatttcagttccagagaatacggatgcgactaatttaattatttttgcattaaaagaggtgatagcagaagcaaagttattaaacgaaaaaactgaaaatatctatcgacttaataatgaaacaaaagaacaaaatgctgttcggtataaagaattttttcatatgttagaactctcaaacgttgagcagagagatttcaacatggatctttatgcgaaattaaaaaacatcgctgatgagggttgtgatataaaaacactatttaccttatacatagacaggaataatgaacaacaaaatatactgctagataaattaaccaaatatgaaaaccacaaaataaatctaaataaaaaaattaaatctattgctgagattattattgatgaaaattaa

SEQ ID NO: 396255 - DNA, 153 bp, Salmonella enterica
atgggaaacacctcagccagtactaccggtgctgccgtcagtacaccaccacgtccctttatccgggcctttccggtccctaaaaataaccgggggcacgcgttcagcaacattgacgacattctggctcatcttcagggagagcccacctga

SEQ ID NO: 396256 - DNA, 213 bp, Salmonella enterica
atggcttcgctgaataaacttcctttggtattaccagagattaataatccctacttgttctgtgaaatggcgggtataataactgacagcgatccaaccatgacagaaatgcatgtaatcaaacgacaggtgcagacacttcgcactcttctacttccctcaactttttggagtaatacaaatgaaaggtatgcagaaaatcaagagaggtaa

SEQ ID NO: 396257 - DNA, 201 bp, Salmonella enterica
atgcacttgaaccggcttcacaccataaaactgatcccaaggttgttggtggcaatatggctggtaacaatatcgttgaccttatccgcgagtttggacaaacaaaacttttacgacctgacatcaaaaaaccggtatggcacaattctcttcgtttaccgcatggagaaaaattgtcagaagcgcaatgggaaaccgtag

SEQ ID NO: 396258 - DNA, 669 bp, Salmonella enterica
atggaagagtcaaaaaatatatttagcccggttctacctattgaaagattttattcactttactggaacatgagtaattcagtaaaaatgcttaatcgctattgtgaaaaaaacaatatcgaatacgaatcagttttaattactcgtcccgatctaattttttacgatatagtcgatctctctgtatgtgatagaaaaaaaatatcagttccgactcatggcggaaactttttgtttggggaaaagcctaaaccatactttgcttgctattataagaatgttgagcgaggtgagttgataccatggaatacagtggtcttttctgatcaatttatatactcaagctttgataatattattaaattattaactctgtatgagaatttatcattctataataaaattggtgtgccagtatgtcacccggaaacagtactatattatcatctatctctttctaataaaattcccgtaaatacaatagatattgtatatgaaattttacgttctactactgtaaaagtaagtaatgaattactcttggcattcccacctcagaaggacagccttgatatacatagcaatactaagcaagtaaatctgcctgttaggtctctttttatccgttatttgaagcgcgttgctaaaactattttaaatcaaaactaa

SEQ ID NO: 396259 - DNA, 279 bp, Salmonella enterica
atggatccgataaagaaaaaaacagcagttatattatatggttacatgaggacatttaaggatactgcgccacatttaattaagaatatacttatggttaataatgctgatttgtttattttttgctatgaaaatgaaggcacatcgaatatcattaatatggaaaatgtaaacaatgaaaaaaataaaaatgctgtaaaatgggattcagaaggtggtttaataacagaaagtttgttaagaagtatacggaagtttttaaagcgaattttacgttga

SEQ ID NO: 396260 - DNA, 198 bp, Salmonella enterica
atgctgttaactaacaacattggctctaatctgagaaatgcagtagcacacgggttattggatgacgatactgccagtgggggggatgttgtttatctctggtggagaatattaagatgggtaatgctatctgtcgtgattggtcataatgaatatcaggaactaaaaaatgctcctgtcattgaggaatctgaatga

SEQ ID NO: 396261 - DNA, 351 bp, Salmonella enterica; identical to SEQ ID NO: 395583

SEQ ID NO: 396262 - DNA, 240 bp, Salmonella enterica
atgatccaatcgtatgcgcttgtcttaaataaaaagagcttatatgtgcattttatggttttaagtcttaaaagattttgtttttttattaatttatttgatataagcgctattaaattgatttttgttgttgttttttgttggtttaatgtgaaatttgaccatttggtccactttttatcatgccatacaattttttgtgaactcaaggaagagaaagcgttttctatcgtcacttag

SEQ ID NO: 396263 - DNA, 417 bp, Salmonella enterica
atgcacaggggaaatagcgggaaagcccctgattttctgttccccataaatgctgatatatcacaacagtgtgatgaccagtctggaagagatgacgccccgtgcgccgacagtgaaaaacttatggaagtgctggaccagcttaatgcaaaagatggtaaggggaaggctgtacttcgccgggccgggtatccagcaacagtgggaaatgaagagggagaagctatcacccgatataccacccgctatgaagacctgcttcaggttaagtgccaggttcaattaaatctgcaccctgatttttcacatttccgacagtacagggtaccgcaaccacgttgtatgcaagaacatgctttggtaggctgcctgctgtttatgtcaggactgactgtaaccttgtttataggtttatag

SEQ ID NO: 396264 - DNA, 207 bp, Salmonella enterica; identical to SEQ ID NO: 395412

SEQ ID NO: 396265 - DNA, 462 bp, Salmonella enterica
atggctctgccggcgcaagaagcattgccacaatggcaacccggagaggctaccagatgggacgctggcttgctggcaggctcaaaagagccggggctggtcagctgtcagcagccgactcaccggtataaacgtggtggtcatgaacatgtcgctatccctgactaccctgaacggcagttcgccgtgaccgggccaaatcaggtgtggtgcggtgatgtgacctgtatctggacgggtaagcgctgggcgtacctcgccgttgttctcgatctgttcgcaagaaaaccagtgggccgggccatgtcgttctcgccggacagcaggctcaccatgaaagcgctggaaatggcatgggaaacccgtggcaaaccagccggggtgatgttccacagcgtcagtaataatgtcggtgtcagtctttaccaccacttagtttgccgtttaacccgattggtgtga

SEQ ID NO: 396266 - DNA, 846 bp, Salmonella enterica
gtgtgccccttcagtgaggtctgttgtccagctataattccagataccagccgacgttttcgtcgcattaacccacgtcgtgccgccgtcaatgctcaggcgtaccgcgttcacatcttccggcaccgtcacccggaactccggacgcacatcgttggtcagattgtcatccggcacgccggtatcattgaccagtacaatgctgttaatctccgtctgcgtatcgatggtcactgccagtggcacggactggtttatgttccccgctctgtcctcgactttcaccgtcagggtgtacttgccatccgcccagtcactggtcggcgtaaagtgccactgccccccgctctgggtcagttccacctccttgctcgtgccattatgcgtaacctgtacagccaccctgatcgcatccgcatcaatgccgttaatagtaaaaccaggcgttttttcgttggtgatattgtcgccaggcacaccactgtcattcgcggtatccagcgtgatggtcgggtccaacagggtggtatcaacggtaaagtccagcgtccgcgtcaccgtgttcccagctatgtcgatagcctccacgacaagggtatgtttcccctcaggcagcgcgtccggccaggtgtaatcccagataccggtagaagactgtgtggcgttaatccatgttgtgccactgttgatgctcaggcgtactacgttgacatcttccggcaccgtcacccggaactgtggatgcacctcgttggttatattatcaccggtgataccactgtcattaaccaacaggatgccgtcaatcgtgatctgcgtatccactttcaccgacaatggtactga

SEQ ID NO: 396267 - DNA, 435 bp, Salmonella enterica; identical to SEQ ID NO: 395619

SEQ ID NO: 396268 - DNA, 270 bp, Salmonella enterica
ttgaaaaacaccgatccgatactgaatctcacctatgcagaactcctgttaaaaagcctggaggagctccgttcggtcatgagtgagcagagcggtgaatcccctgataatagtgaagtgggctggcgctgtggaggatccagcactggtacaactggccataggaaccgggattcctcagccgcagccttctggacattccgaagcactaccgcagaatttttggtaaagttcagccgttacaacgaaggaaaggtcaagcgttcctga

SEQ ID NO: 396269 - DNA, 210 bp, Salmonella enterica
atggctattgccgcaagttacaccatgcatctctactgtgattgtcgccagtgtacaaatggtaaatatcaaacgccagacttcggtgaatatatcggtacgtcatgggctggctgtgcaaaagaggcccgtaaagacgggtggcgaataagcaaagacaaaacgcgtgcttttgcgcccgggcataaagttttgaggattaacaaatga

SEQ ID NO: 396270 - DNA, 249 bp, Salmonella enterica
atgcaacagcagtcacatctctttcatatcttgggcgtgaggaagaagagtaaagcgatgaaaaaccgtaaagctaagatgcttatctcccgtgtatacagactttgctatcccagccagtggttgagagttagcaatcgccgtgtggtgttgttttcattttctggaattgccagagagggagtccgagataagcgcagcgcggcgcaaaaccgctggaaaaaccacttgcgcactaaaggagcctga

SEQ ID NO: 396271 - DNA, 234 bp, Salmonella enterica
atgatactggcgaatattaatgaaaccgtcaagcactacaaattttttatcattcaatttaaacaaacaacaataattcagcgactcaacaagagaatagattatgaaaaagaacttttttcaccttctgataatgattatctgcacttatatttcttttgcctgcgcgaatatcagcgactacagagttatgacctggaatcttcagggatcttcagcatctacagaaagtaa

SEQ ID NO: 396272 - DNA, 753 bp, Salmonella enterica
atgaaaaaatacgaattagtaactgaattatcagaagaatttttgtgcaaaaaactgttccgcattcgcgcactggtatcgttcgaaggggttgaagcgggtgatttaggtggttgggttgaaaaagaagataacctagaccaggcaggcgatgcgtgggtgtacggcaatgcgcgggtgtccggcaatgcgcaggtgtacggcgatgcgtgggtgtccggcgatgcgtgggtgtccggcgatgcgcgggtgtccggcaatgcgcgggtgtacggcgatgcgcgggtgtacggcgatgcgcgggtgtccggcgatgcgcaggtgtccggcgacgcgtgggtgtacggcgatgcgttggtgtccggcaatgcgtgggtgtccggcgatgcgcaggtgtccggcgatgcgtgggtgtacggcaatgcgcaggtgtacggcgatgcgtgggtgtccggcgatgcgtgggtgtccggcgatgcgcgggtgtccggcaatgcgcgggtgtacggcgatgcgcgggtgtccggcgatgcgcaggtgtccggcgacgcgtgggtgtacggcgatgcgttggtgtccggcaatgcgtgggtgtacggcgatgcgcaggtgtacggcaatgcgtgggtgtccggcaatgcgcgggtgtccggcgatgcgcgggtgtccggcaatgcgcgggtgtacggcaatgcgcgggtgtccggcgatgcgcgggtgtacggcaatgcgcgccgctggcatcaaggttaa

SEQ ID NO: 396273 - DNA, 177 bp, Salmonella enterica
atgaaacttactgaatacattgaaaaacatttcaacggtaataaagcggagtttgcgcgacatgagggggttcttgcgccccaagtgcataagtggatcgccatggattgcgtagttatcgacggggttctctacagcccgcgccgcgaactaaaagaaaaagaacttaaaaaataa

SEQ ID NO: 396274 - DNA, 633 bp, Salmonella enterica
ttgggttctgtggtttttgggtatctccgagcatcgacgagtgagcaagacgcagagagggcgaaaaacgaccttgttaaattcgcatccgatcatggtctgcgttcgccgatttggcatgttgaaaacgagagcggagcaaagctggagaggccggagcttttccgtattctcgaatcagcgcaaaaaggggatgtgcttctgatagagcaggtggatcgcctatcgagattaaatgcggaagattggtcgaaattgagaagcgttatcactgagaagggaattcgagtggtcgctcttgatctgccaacttctcacatgctggtggctagcggtgatgaattcacagggcgcatgctcgacgcgataaacggcatgatgcttgatatgttggcagcgatagcaagaaaggattatgaagatagacgccgccgacaaaagcagggtatagcaaaagcacagtcagagggtaagtacaaagggcgtggaacagatctagataaacaggccgctatcattgccttgctgaaagcggggcgtagttatagccagatagagaaagctatgggggttagccgcccaacaatagctaaagcggctaaagttgcaaaaagtgctgaaacaaaagaataa

SEQ ID NO: 396275 - DNA, 816 bp, Salmonella enterica
atgggggaatcggatcgcatcacaagggagagtattgttcttatgagcggtaaacttattggattggttattgttgccgtcatgctggcagggtgttctaaggctaggaatccgcagtgccaggatttggctgacaagtatgatggggctttgattggaggagcactttcaggggggggatatgctgcgtcgtacaaagctgatctagctgaggcccagctaaatcagtgtgagatgatgtttgactcaatgaagcagcagcagcagtaccagcagcagctgcaagaaacagcgctggaggcgagaagagagcagttgcaagctcaggagcaagcacagcagcaagagaggaaaagaaaaacgctggaagcactgaatagcccagaagtgcagaaaaagctgagaaatgactcactgaaggatctggtaagctgcgcaagaagtgaaggtggtgagagattgtcgcctgatgtcgtggctttagtgtcgggggcatgtaagagcgagattgatagacgagtgatagacgggaaggttagtcgtgccacggtggataagttgcttaataagcaagagcagcagataacgcaattgcaatcacctaaaggttcgtcaacatctaactcaaagttggcttacgcatcgctgcaggggttggtggattgtgagcactcggttgtttctccgcagagtagtgaacttcttaaggatggcgctagttcgtcatatcaatgtgaattggaaatagacaggcgggtagattcaggagtgattagtcgcgctgaggtgaataaagtagctaaccaaggaatgtaa

SEQ ID NO: 396276 - DNA, 1689 bp, Salmonella enterica
atgagtctgccatcaggatttagagttgtaagtaagccggcagcattgccggaagggtttaaagtcgttagcccgaactctgcggcgatggaatcaatcaaagaaaatgccaggatgctaggaacggcggtggtaaagatagcggacgcaatcccggatgcgggtaatgcggtactgagtgggttgtcgtggctcggcggtaagttgggggtaggagatggaacctatacgccagcggaaaaattcagcgagcttgaaccggaatggatgaaaccacaaacagaatggggcgatactgcatctacagtaggaagcgtcctgctgagtgctccagatgcgccattggtagcgggaagggtggcgaaacgcggagctgaggtgttggcagaaaaagcattgccagcggcaaataaagagttgatggatatcgctaagaggttgggatttaagccaacggtggcggttgtaacgcagtcagcacccgcaaagattaccgagcaggtattggcgaatacgccgttttcggcaggagtgacaagacaggcgattgctgatgagcatgaagggttagcggcagcatttggcgagatggcgggtgaatctccggattcaagccagttagggtatgacatacaggagcaggtaaaagactctattcaggccattaagagcgatgtgagtgatatgtatgatagggctttcagggggatttccggggagtcaaaagtaccagtaagtgcgtcgcaaaaacagctaaaagccattgccagtaaatacaaagacgatccggcgcttaatgatttgtttgggtcaaaaactgccgctaaattggctggtcaaaaagacatgacactaagcggattacgaaacctgcgatcgcaaacggggcaggctatcgccgagggtaatgttaaggcgcttaaagatctttctgatggtgagctaaagcagttatacggttcgctatcagaggacattaaatcagcactgagaagcaaaaagccatcggctgctaaattgtgggaggaggcagacagggcttacgcattatccatggagcgacaacagatgatgactggtaagtttcttactggtaaggatgccacgggggcatacaacgctatttttggcgcatcagataagggttttaaaacgctgtcaaaagaaaccgctgaatcgctgcgagacacgttatctccagaggtatgggatgatgttaagcgtgaatttttgcggagaatgggtaagtccacggctgctaatggtggagagttctccccatctgcattcgcgaccaactgggatagggttgaggatgccataaagtcagaggtgtttaccccgggcgagctaagtgatctggaggatatcgcgacatattcaaaggctgtaaaagaaatggaaaagtcgcgaaattacagcaataccgcgcacgttggcgcaatggcatcactaccgacatctatgtttcttgccccagtaacgacagcaaccacaatcgccggagctgcagcgctgtctcgggtgatggctagcggaaaaatgcttgattggctggcggcgctagtggcaaatggggagttaacaccggatttggcaaaagggcttgagttgattatcaaggagtctatgccagcaaggatgatgcttgccactgaaatcgccgcgggtgaaaagaaggataattaa

SEQ ID NO: 396277 - DNA, 1296 bp, Salmonella enterica
atgacagcagttacagacctccagaaacaacgccagcaagaccaggtacaaaccaacttcgacgccgcccagggttattccgtcacaccaaaccagggaagcgttgtgccaaacgtgatgcagactcaaagcatccttgaatcaatgctggcggctaaaaacgcagggccaaacatcacacctccgagtgatgcagagattcgccgcacatcatggattgcatccggcgtaatggggttattaggggctatcgtcaccgggaacgcagcaagcggcatcgaaattggcatgcaggccgcactggcacttcatgaccatggttacgatctgcgccagagggccgagcatgttggggagctgcatcaacagggatacagcgcattagccatcgagaagtggtacgaaacgggcgacaactccgagctggacaaggagcgtcagaacatggaagcgatggcgcgtgatgagttcaatagcgaagtagctgatcgccgacaagataaggagattaacgcagctaatgaccgccagaaaaatcagcagaactttgagcagggaatggaaggggctcgcgagaggttccaggccgagcagggaaggatgaatcgtgatgcgacattgggagcgcaagaccgggcagatagacgccaggaaaaacaggaggagtcacagtcgtgggctgaggttcgtccggcagttgctaatagccagtcgaaacaaatacagcttggcatggctgaaaaagatttagtcaacatggatgccgcagaaaaggctggagataaggacgcaatggcagcggcatataacaactaccgtgagcacatgggccgcgccatcattggcggaaccgggatgctggattcgggggagatcacaaaagctaccgggttgcctgatttggctgacgctgcttggaatacgggtatgctgaactttaccgggatgccgtccgctgaccaaatgaaggcataccacgatcaaacgaagtatgacgtggagaacgaaacgcaagccctgaagcagatcgcaacaaatcaatatgagtctttggtggctggcggagttcctctcgaggtggcaagtcagcgagtaaatcgcatgtttggcggtacaagcatcggaacgaatgattacgccaagacacagccgaagccagacagcaagcgcggtgagaaccagcaagaggagggtaatcagaatgatgattccggctatcctgagggcacggtgatacacaacgaccagacaggggaaactatggtgatgcataacggcaagtgggtgaagcaatga

SEQ ID NO: 396278 - DNA, 393 bp, Salmonella enterica
atgagtttttgggataacgcagagtcatttctgggcatgggggatacccctggtgatgtgaaacaggtggtagcgccggagctttcaggaattggagaggtagatacggcatacggaaccgcgccagcttctgaggcgtcgggtcttgggaaatcagctcccggatcgcaatttttgccggattgggcgggaaaggcgcttgggccaatcatgcaggggattatgggggcggcgttacgcccaaccacaagccgagcgccagcgttgccggccgccgcaggtcatggagtaaccgccaataccagcggatacgacagcctgctaaaacgggcatctcaactgggcgaaaacgacccgctacagggattaagcggatttaagaacctgctctaa

SEQ ID NO: 396279 - DNA, 300 bp, Salmonella enterica
atgtcaatcccagtgcatgaaaaaattaaactgattcgagagtcagaacggcttaaccggaagcaattcagcgacttaacaggcatcgcttatagctcgttggcgagtaatgaatctgggcataaaagccctggagttgagaccatcatgaaaattttgcaacatccgcaattcataaaatacacaatgtggtttatgactaaccagatagcaccagagtccgggcaaatcgcaccggcgctcgcacactatgggcaagacgtaacaacctcgcagccctccggccaaaagactggttaa

SEQ ID NO: 396280 - DNA, 276 bp, Salmonella enterica
atgagcattcgtatcgagattggtgggcgctatatcgtcaccagtgaccagtttcaatttattttgcaggaaaagaaaactgcaaaatcaggaaagagcgccggtaaagagtggctcggtgttattggttattatccaacaatttccagactcgtatctggtctgatattacatggcattctgaccggtgaggcggctagttttgctgatattggcgagcaggttgagcgcattggtcagcaatgtcagactgcgtttgctgcagatggccgttga

SEQ ID NO: 396281 - DNA, 588 bp, Salmonella enterica
atgaccttgctgacgcgaaatatacagctcaggacgccaccacaacgcgaaaaggccttgtgcaactcagtaatgccactgacagtatgtctgagacacttgccgcgacaccgaaagcggtcaaggtggcatatgaccttgctaacgcgaaatatacagctcaggacgccaccacaacgcgcaaagggattatccagctcagcaatgccactgacagtacgtctgagacgctggccgcaacgccgaaagcggttaaagcggctatggataatgcgaacgggcgcctggaaaaaaacagcaatggtggcgatattcctgacaagggattatttgcacagaatatcagtgcggcggtggcattcaatggcgggattaatattggtggtgacagtggaagctggactacggcggaatttatcacctggctggagtcgcagggcgcatttaaccacccctactggatgtgtaaggggtcgtgggcctatgccagtaacaaaatcatcactgacacggggtgcgggaatatctgtctggcgggcgctgtggtggaggttatggggactggcggtgcgattaccattcgggtga

SEQ ID NO: 396282 - DNA, 201 bp, Salmonella enterica; identical to SEQ ID NO: 375260

SEQ ID NO: 396283 - DNA, 330 bp, Salmonella enterica
gtgagccaggcccacatcaccgaggatgacgcgctgcgaatctgcgcccgggaaggcgaaggcgagaacctgattatcaatcacctcgccatcccccactgctggagcgagcaggaattccatttccgcggatttttcatcaccctggcgaaccccgtacaagttaataatgagcccgttgaccatgtgctgctcgcctgcgctgccgccgctgcgcgtcacaagctgaaaatcttcagttatcaggctagcgtcatataccgccatccggccgacacggttcgcaggttagatagctatgaagcatttatttcgctgttaaatcattaa

SEQ ID NO: 396284 - DNA, 2538 bp, Salmonella enterica
atgccgggacgtctgctcagcgtggttgagcaggccggcggcaagacgggtcgggtgacggagcggctgatctggtcggaaagtagcgcgaaggcaagcgcgaacaacctggtagggacgtgcatcaggcactacgacccgtcaggatgcgtcgagattgacagtatagcgctaagcgggttggcgctctcggtaacgcggtggctgatgacggatgatgaggtgcaggctgactggcagggggatgaccgcagggggtgggatgcacaactggacgacgtaccctatgctactctgagccagggcgatgcggccggaagagtagttggtatcaccgacgcagtgggcaacaaacagcggatggtgctggacatagcaggaatgtcaacaggccgcaggctgacggtgaacggagaggagaaggtcatagtcaggtcgactacccgaagcgccgctggacaggtgttgcaggaggagcatggcaacggggtggtggtaaaccgggagtacgagccacagacgcagtggctgaaaaggataaaaatagaacgcccggcagggcatccgcagggggcaggagtgcttcaggacctgcgttatgaatatgacccggtaggcaacgtgaaatgtgttcgcaatgacgcagaagaaacccgattctggcgcaaccagcaagtggagccggagaaccgatacggttatgacagtctctaccagttggttagcgccagcgggcgggaaaaggttaatataggccaacagaaccgttccttcttccccgccgacagtatctcctgtacccgttatctacgcacctatacctacgacagcggcaacaacctgactcggatacggcacagcgcgtcgggaagtggcaactgtcacaccacatatataaccgtcagcgacagtagtaaccgggccgtattacgttctctagcggcgacgccggcagaggtggaaatgcattttggcccaagtggggaacaacttcagcttcagccaggccaggcgctggcatggacagagcgtggggagttgttacaggtgacgccggtggaacgtgaaggagcgcaggacgattgggaatactatcgatacgatgcgagaagccagcgagtggtgaagggaagtcggcggcagacagggagtgggacgctgacccaacgggtagtatacctgccggggctagagctgcgaacgaaaagcagtggagaaagcctgcagacagtggtatcggataacgtgcggttattgcactgggagagtggaaaaccggaggggcttagtaatgatgggctgcgttacagctacgagaatctgacaggaagcagtggactggaggtggatgaggatggctgcatcattagtgtggaggaatactacccatacgggggaacgtctgtctggagcgggagtagcgaaacggaagcagactataaaacggtgcgctattcaggcaaagagcaggatgcgacagggctgtattattatggttatcggtattaccagacgtgggcgggaaggtggactagcgcagatcctgcagggacggcggacggtctgaacatgtaccgcatgtgtcggaataatccggtgacgtttagggatagcaacggtttgctgacggaaaaggaaatccagactctgatgttccagaccaggcaacatatgagtcagaccggcaaggatcttgagtcggtaatgcataatatcctgggattaaacggtgatgatgcggcagtgatccgtagccgactgggaaatacgcttccagagcctacggcaagtacatccggcatacatgaaatcacggcttttcaggaacaaatagaggccatgagtacgtcagaggttatttcccttcatatcgatcttcccagtctcacgccagagaattttcgacacccgccgtctccggactgttgtgtagaattgccgccgttgacttcttcggatacatccgatgatgacatgtccggagtggcaggcccagagatgtcgcttccagagattactccggaattgatgacatctcattttccgaatatgtccgaagctgacaggcaagccttagaatatattgcgaaccctgaaaacttttcccataccttatatgctgatggcacggttgtatcttccagtgataaacaatcccccggtcattttataaataattataagccagatacatggaaatttctatataattttaaatcacaagaaattgatgagggagttaatccttattttgccagccatgtcgcgcaatatcaatatttactggcagcagtctcaggtggatgggtaggacagatgccatcaactttgatcaggaaaaatgtcattaataaggatacaatagtgaacactgctgggttaaagggcgagcagttaatgtcagcttttcttaataatacgccaaatgggaaatctaccgctaagattttggaggcttttaatcttaacgctacgtcagttaaaatcaaaaacacttatgcaggtgtcaatttttatgtaaaattaaagcgtaaataa

SEQ ID NO: 396285 - DNA, 399 bp, Salmonella enterica
atgaccactattaccagagaacagttaatcgaaaaacttcagaacaggattgcggtaactgccaattatcccggcgtcgaagaagcgcaacttgatgcagctattttcaaaatcgcgctggcatcgctggaagctgagccaataggtgcattccacatcgaagatcagcaggtaagtggaacaactgactacatcaaggatggggagtggcccatcgataatggtgttattgaagtctacgccgtcccgccagcgccggtagtacctgaaaaaatgaacttttccaccgcctgcaactttgtgcaaatcaacggaatggcgaaggaggaccgggcaactcttgcaatgagagcatggaacgcctgtcgctccgccatgctcaacggaggtaaatcgtga

SEQ ID NO: 396286 - DNA, 303 bp, Salmonella enterica
atgctgattatcgatcggattgtcgagctggtgaaatcgcacggaaacatgaatacgtcagaggtggtttcgctgttcggtctgcatcgaggtactgctgaaaaatatctgcgtatcgcgctggagcgaggcggcttcattcgtcatggccgctgcggcattttccgagaccagcgtgcggtgattgattatgacctcaagcgatacagcagtagtcaggtaacgggattttcagcgctgccggtgctggagagaagccctgtgctggggcgtgtaatgctggtttatggggtatcggtatga

SEQ ID NO: 396287 - DNA, 852 bp, Salmonella enterica
atggctgaactggagaaaggctatttacgcttagccaaccagattcaggatgccctgtgtatcgtcgagctatccgggcgcgagttccgggtactgaatgctatcgttcgcctgacctatggctggtctaagaaatcagatcgtattgccaacagcctcattgcagacaaaacgacgctaaaggtgaaacacgtatctgaagccgtgcttagccttgcctacaggaacatcattaccctacgccgaattgggcaaaccagatacatagggattaacaccagcctggataagtgggcgtataccaagccaaattgtactaagtgcccgacggctttcccgcctgctgaagttgttacatgggttattaccatccctgaattcagggacagcagttttagccattcaaccatccctgaaaacggggataaccatccccaaaaacagggagaggtatccctgaaaacagggaacaccaaagacattcttccaaatacaaatataaatacagatctaaccccctctaatcccccaagggggaaggtgaagtttgacccactgacaattcccgttcctgagtggcttgattctgtatcctggggggaatgggttgcctatcgccagcagtctggcaaagccatcaaaaccgagctgacggtcaccaaagcgttcaaattgctgaaggcatgtctggacgaagggcataacccggttgatgtgattaacaccagtatcgccaacgggtaccagggactattcaaaccgaagttcgctctcaacgaccgcagagctggcagagatgtgaaccgcatttctgagccagacaaaaccattcctaccggattcagggggtaa

SEQ ID NO: 396288 - DNA, 498 bp, Salmonella enterica
atgcaagttagtttgtttacagcaaaacaaatgcaagaattgattgacattgcaaaaaaatctgaacgactgagagcgcatttaagcttacatgaaagtcatcaagataaagttcaaatggttctgattgccttaatcaaaggtacatatatccctccgcactttcataaaaacatatggcaatgggagtattttcagatcattaatggtgaagtggagttatatatatttgatgaaaatggtaaagtgagaaatatatttcaattaggcggtaagaatggtgcattattcgctaaaatagaacctaatactattcatacacttatctgtcgttcatcacttgctgttgtattagaggttaaagaagggccatttatcgagttagatgcaaaagtagtaccttgctgggcatttactgaaagttataaaaccatctctcgagaaaaaattatttacaaattagagaatttaagagtcggtcaggtgtatcgaatttaa

SEQ ID NO: 396289 - DNA, 1197 bp, Salmonella enterica
atgcggatagtgttaatttgcgatgactatctgcctgatagtacacgcgtaagtgccaaaatgatgcatgagctcgcttgcgaacttctcagacaaggacatgaatcaatagttatatgtccaaataatgggacagacgtaaaaaaaatcactcatctgaaacttgatggtgttgatatttttaagtttcccaatggaaaagttaaagatacatttaagtttaagcgtgcgattaacgaaagcttgctttccataaatgcatggcgttacttggcagctgaaattaaaaacaaaaaaattgatggggtggtttattattcgccttcaattttttttggcccgctagttaagagaataaaaagctattggcattgtaaatcgtacttgattttaagggattcatttccacaatggcttattgatcagggaataatccgtagtggtgggtttacggataaatatttcaggttctttgagaaaataaattataaatctgctgattgcattggagtaatgtctcacaaaaataaagagttgtttttgaaacactaccctgagttttctaatgtttgcgtgctatacaattggactaatctgaaaaacagcactttaactcgcccaagtgaaatactcaagcagcagtcattaacagaaaaaattatatttttttatggcggtaatattggtcatgcccaagatatgagtaatttaatgcgacttgcattgggaatgaaggagcttgataatgttcattttctttttatagggcaaggtgatgaagttgaattggttaagaattttattaaaatacactcgctaaaaaattgtacgtatttaccatcaatcagccagcatgaatatttatccttattgaggatcgttcatgtcgggttatttagtttggcaaaaaatcatactgtacataactttccaggaaaacttcttggatatatggccaataagttgccaattttaggtagcgtaaatgctggaaatgacttaaagcaaattgttgaaaaagctcactcaggctatgtacatattaatggggatgaccagagtttattagattcggcagttatattagctaatgatatacacatccgaaaaaaaatgggggaaaatggttatgctcttttatacgaacgattttctgtagagtttgcagctgaacatattgtattacagctacagtaa

SEQ ID NO: 396290 - DNA, 546 bp, Salmonella enterica
ttgtttgaagcgagacttgataacaaggaaatatcaaaaaatacattattgtatccagctacagcattaagctataaaaatcatttagtcatccttaaaagcttaactttgctaaaaaaacaatttggcataaatgatattaaatttcaggttacttttgataaagggcaatataaagtattcgatcgttatgtttatgaaaatgatttgtctactaatatagaatacctaggggtgatatcttatatcgaattgcaaaaaaaatacctcagcgcatcactggttgtatttcctagctatatagaatcatatggattaccgttaatagaagccgccatcttaggtaaacggattatatgtagtgatttgccatatgcaagggatgtacttaataattatgaaggagggatttttgtcaaatacaatgatgaaaataattgggctaatgtcatctatgatgtactaacaaacaagtcttgcacacaaatcaggccttatgagaatgataattgttcttcttggccacgtttttttgatcttatttaa

SEQ ID NO: 396291 - DNA, 165 bp, Salmonella enterica
gtgtcagtgggtgcagagcttaagcgagcaggtgaggcgcttgagccgtcagtgacgcggcacgagtacgaggtggcggcagcgcatgtgcgggtggtgcatgagcagcgccagaaagaactgacaaaagagcgggagtatccggggccatcgctggagctgtag

SEQ ID NO: 396292 - DNA, 432 bp, Salmonella enterica
atggcaacgctgagaggcttccgtacaggacgttggcttgccggcaggctcatgaaagagccggggctggtcagttgtcagcaacctgctcaccggtataaacgtggtggccatgaacacattgctatcccgaatcaccctgagcggcagttcgcagtgacagagacaaatcaggtgtggtgcggcaacgtgacgtatatctggacgggtaaacgctgggcatacctcgctgttgttctcgacctgttcgccaggaaaccggtgggccgggcaatgttgttctcactggacagcagactgaccatcaaagcgctggaaatggcgtgggaaatccgtggtaagcccggcggggtgatgttccacagcgtcagtaataatgccggtgtcagtctttaccaccacttagtttgccgtttaacccgattggtgtga

SEQ ID NO: 396293 - DNA, 459 bp, Salmonella enterica
atgacgcatgattttggtcagatgctgacgcacccgaccggcaacgtcatgaacgcctttatcgtcgatggatttaacaagctgcgccagatggcgggtttcaatcgttgcaatatccattgcgccaatatcagggaagacgtagcgcttcaggcaggtgaggattttatcggcgtggccagccgaccagagtttcagacaactggtgtgccatgcggtagcgatgtactgaaaggtgcgcgtgccgtcaacagcggctttttccgccttgcggggcagggaagggcaaacaccggataccagcagcttacgcgctgcgtcgcgcttttcgcgggcttccgccagcgtgataaggggatatgcaccaaaagccagacgattttccttaccttcaaaacggtagcggaaataccacagcttagagccgctggtggatattgtcaggtacagaccttgtga

SEQ ID NO: 396294 - DNA, 651 bp, Salmonella enterica
atgaacataaacgagataattaagtattctgtcgcgataattaccccgatcatacagatgctcgcggtaagatccggctgggttttccccaaagataagattttcaactcgcgcaaaaacattagcgagtttgcatacaatctatataagaatactgaagatcccaaaatcaagaaagttgcatataattatggtattgctgcaataacaaaagataagaacctaactccagaacagagagagattcttttaggtgttaacgatccagttaatgacattgataactatagcaagtgtcaaaaactaatttctattagtagtgaaaaacaaatatttaaatggacaaaaaaaagatatcgcttttggatatatagaaaatctataaagctgataagcttaacattctattttattggcggttttataacttccataccttttgtatacgaaggattagtaacccaacatattttagagaaaattaataaacttactgatatgcaaagattaggaatgtccagctacttttttgcacttgggatttgtatagcactgatgaacctgcataaattttcgactattcgtatcgctgaaaaaaccataagatctaatctccgtaaacccacagatttcaactcaagcagcggataa

SEQ ID NO: 396295 - DNA, 873 bp, Salmonella enterica
atgacggctcaagttgaagctctaaacattgtatacactggcaaagctttggatacccataagatggacatcctggcgttagcacaaagtcttaagggcctaggagaggccctttatgaagccaatgttttgcttaatggcgatgaaaaatttgaagtgaatgtcgatgctgaacttattgcagggtcctttggctttcaacttcagattgtacagcatttaaacaatgccaaagatgtacttaagctctttggtttaaaggcttcaaaaattattgtcggtgaatcaacagttttagaagttttagagaaacttgatgggcgaaagatcgacattgttgaaactgataagtcgtccggaaaagttaaacttttggtagatggcgaggaaatcgtgtgcagtcaagatgtagaaaagattgtcaactcgcctgaaattcgaaaggcagtggattcgttcattagacaaccgctgcttaaagagggaatcgaagggtttgttgttaagccgtccagggattcaactaatataattttagaggtgaaaaaggaaaacgccgacaacttcaaatccccacgagttctttttgaaaccaaagaggaagaagatgaatcggaaacaacggttactttcctttcagctgacattgagaagaagactggctggcgggtaatgttgaataaagaagcccggaccgtgcggatggaggatgaggagttcatgctacgtcttaagagtaaggacacccctaatatctttggggatttgtatgctgttactattcaaaagaaagttaaaaacactggtggtgatgtttctgagtccctaaaaattgtgaaggttggcagacgtttgggtggtaaaaagagttaa

SEQ ID NO: 396296 - DNA, 249 bp, Salmonella enterica
atggtacataacttaataagcttgctgggcatcctggcagcgctacctgccataattttaactatcaggattcttatcaagcttctgatttcatggatctttaataaagagaaagtcacagttacttatcattcagaagatggtgaaaagttcgagacaaaactttatctcaagaaaaatgatgatcttctacacatactggatgacatagcgcggaagagcagtcatgaggggaaatcccatggctga

SEQ ID NO: 396297 - DNA, 447 bp, Salmonella enterica
atggctgaagatagtaaagttaatggtagccgtgcagtcggcattgctggcggtggtggtgtaggaatgtttctaacacagttagccccactaattgtagatgaaactaaacgaaatatttatattgcggcaatacctttttttgcgcttcttttaggcgaaatttttaccttcttgacgaagttggtatctttagatgccgataaaattagagtaagaattcgcctcaagttcttgaaattcaagctgtggcggggcaaaagtgatatgtcggtctctgaagagttacggacattggctgaaaagcgttataacattataaagggtattgaaatgggggtgtatgatattgatatgtacttccagcaagttgccgcaccagctcctgatctagcaccaactcagccagaacaaccgcccctggcatcgtcggaagatccgaaatga

SEQ ID NO: 396298 - DNA, 699 bp, Salmonella enterica
atggttatgttagtggatgactgtccacgatgtggatcacaaaaaatagcgtttgatgttaatgggctgaattgcactagggtttacaatgcattgggcgggggtaaaacatacgagtacgaggtctattgtgtttgccgagagtgtcataaaacgacaatgtttctttgcagacctttaacgaaaaataaaactttagatggctataattgggaaagtggaatattcggattaaaggaagttgcagaggttgttaggcctatatcaccggcagacttagcagtagaggagccaccagagttcttacctgagcatatcaatagtgcatatgaggaaggggcgaaatgtttggctataggttgttataatgcagcagcaaccatgtttaggctttgccttgattatgccacaaaaggacttcttcctgatggggagcaagggcctgcgcaaaaaataaggagaagcctagggttaagaatggagtggttatttgataatcatctactgcctgaagctttaagggaactagctgaatgcgttaaagatgacggaaatgatggagcgcatgaaggtattttggataaagctgctgctgaggatcttgaagattttacctatctttttttagaacggctttacactgaacctcaacgccttatcgaagccaagacaaggcgtgaacaaagaagaaacaaataa

SEQ ID NO: 396299 - DNA, 264 bp, Salmonella enterica; identical to SEQ ID NO: 374646

SEQ ID NO: 396300 - DNA, 135 bp, Salmonella enterica
atggcaaccgcaaaagagtcgaatgcaggagcaatgccagagttaactgattttgctatcagttactgtgcgctcactgaacatgttctgttacacgccaaattcacagacactatggcttctgtcccatcatga

SEQ ID NO: 396301 - DNA, 192 bp, Salmonella enterica
atgaaaaccttcaaaggtctcaccctggagcctgaaaccgcttttcgtcagatcgcggcattaattgaagcgggattaattatttcggttaccaatacaaatgacaagtcagatcttagtgactgcgtttttattctggccagacaatacgcagaagcagctcacgattacgcgatggagaacggaaagtga

SEQ ID NO: 396302 - DNA, 306 bp, Salmonella enterica
atgggtgtttacagcgatgtgtataaatggcagcaaatgccccagcgaaaaccagacccgaaaacgatatgcaatttctgtaagcagattacaagcgaagacaagctcattctcggttccggcgccaacatttgcatggaatgcgtcgatgtttgtaacgaaatcgtcgctgagtggcaagccaaataccggaagaaaactattgaagaaatggcaagggagctctgcgtggcagatgaaacgcttaccgctgataaagcaatcactttagccagcagtattttcgatgccgggtatcgtaagtaa

SEQ ID NO: 396303 - DNA, 147 bp, Salmonella enterica
atgaacaaggtgtttgaaatctgggtgcgtcagcggtacggaaaccgctacgaccttacgcgagattgcgacggtttctactgccgggaagtggtaaagcggatgtttgatgtgtggtaccactgccgtggccttgacgtggtgtga

SEQ ID NO: 396304 - DNA, 228 bp, Salmonella enterica
atgaaagtcgaaaatgatatcatttcagacgctgatattgaaaagttgaccggttataaaattccgtcaaagcaatgcgaaagcttgcgtgatgccgggatattttttataaccaggcgcgatggacgccctcgcacaacgtgggcgcatttcaatgatccgctttcacaccgacagaaagcggttgatgctaacgggcctcagcctaattttggagctcttgactaa

SEQ ID NO: 396305 - DNA, 1011 bp, Salmonella enterica
atgccacgcgcacgcaaaaataaagacgatgcctggatgcctccgagggtttacctcggacgttcagcctatgagtatcatccaaagggaggcggtaacatccgcctctgtgataagacctgcacacaggcgcaggtatggactgcctgggaagcgctgattaatgacagaccggacgaatcagcactttcaggacttatagaaaaatttttccagtcaggagatttttttgaactggccgctgaaacacagaaggattaccgcaaatactccaaaaagataatcgatgttttcgggcagatgccaccagatagcattaagcctgaacacgtgcgtaaatacctcgataagcgtggcgtgaagagtcgcacccaggccaaccgggaaaaagcatttatgtcacgcgtttatcgctgggcttacgaacgcggctatgccaagggcaatcccacaaaaggcgttaagcaatttaaagagactggccgggatcgctacatcacgcacgaagagtacaacgccttatatagcgcatcacctgatgtcgtacgtgtagctatggagctggcatatctgtgctgcgcacgtcaaaacgatgtacttgagatgaagaaaagccagcttatggatgaaggaatactgattaagcaaagcaaaacagcagtagcacagattaaagcatggtccgaccggttgaaggcagcaattgaacttgctaaatcactgcccctcaacgaagggatgagcagcctgtatattcttcatcaacctaccgggcacaaatacaccagagatggcttcaacagccgatggagaaaagccaaagaagaagcgcggatcaaacacccacatttgagtttcgacttcacatttcatgatctgaaagcgaaaggtatctcagacctgcaagggaatatttacgagaaacaggctatctccggacataaaagcgtggaacaaacagcgcggtatgatcgcaaaattgctgtcgttccggtcgttggcggtcaataa

SEQ ID NO: 396306 - DNA, 258 bp, Salmonella enterica
atggctactttgacgaaacaggaaaaagcctgggtaaagaaactcaataagctactggcggagtgtccctcaaatcggatcgcgtttgcgacgactggcgattgtgaagtatcgctatttgatgtgacgcgctatgacgaaatttttgatgaagtagagaaggggaaaagcgaatttatcccttccgctatgcgtatcggcgcaacctttaatgagtgcctgacattccctaatcaggttgaaagcacggcaggctga

SEQ ID NO: 396307 - DNA, 384 bp, Salmonella enterica
atgacaatcgacaaacaggcgctgctgggtcccgataaacactcaaatcagcacaaactttctcgtcttatcgctgaggcaaatagcgctgagattcgtgatatagcggaagccgtcgagcagtacaccgaccagcttattgcggcgttggaagccgcagagaagcggattgctgaacagcgtgagtattacgaaggtgttatctcggatggaagtaagcgcatagcagaactggaggcgcggacggtggtagtaaagcaattcgatgacttccaaattgtccactatggcgctactgaggattacgcgaaaggttatatcgactgccagagcaattataacaaagcaatccgcgccgctggcatcaaggttaagggggagtga

SEQ ID NO: 396308 - DNA, 1131 bp, Salmonella enterica
gtggaaaatatcatatttttaacattagatcttgtttatccagatgatacaggaggtcgtaaattatcactaggcagaatattgtatgagcaagagaaagggaataatgtaactgtaatccattataactataaaaaacaggatgaagaggatgctcaacgtttttttaaagaaaacaatatatgcttttattcatttagcccgaggcataaccatcatggttttactagactcttatgttatatgaagtcatttttaaataagatgcctgaaccctattatatgatatacagagatgatttttttcatcattttttagatgcaaaaattgaagaaatagctccaagtctaatatctttagagtcgatttttttaggctggacagagaatgtaataaggtcaaagaaagttaaaataaattatacctttcataatgtagagtctgaattttattatagtttgtttgtatctgaggtgaataagataaaaaaagcacattattatattcagtccctattgttagaagttattgaacgaagaatattaaatgatactagtgctaatgttacatataccttcttatcaaaagaagatatgagtgaatatatgaaaaaatataacattagccgtggaaatattataattaatcataataacatcaaaacatctaacaaagttaacaggaaagttgattttgctgaaccgtttttcctgtttcctggaagtttagattttcctgcaaacagttttgcaattaaaaatatgctcgaaacgccaaatttaaattgggatttattacccagaattataataacaggaacggtttcctataatacacggaaaaaattcttaggcttaaaaaatatttctttggttggtagggtttctgaagatgaattatatagattatattcatcatgtattgcgtgcatttcgccaatagtgacaggtgcgggcattaaaataaaaaacttagaggctataaaattaggggttcctctaatagccacaaaattttcctgtgtaggtataaatacctctaatgaaaatattttccttgcagaaaataatttcaactctttttatgaagtaatgcttaaatattacaatgaagttttaaataaattataa

SEQ ID NO: 396309 - DNA, 1287 bp, Salmonella enterica
atgaatttaattataaatttgaataagaaaaatatgctaaatagatacttgcaacaatcaagttcattttttgcaaggataggtgtttcactgatatcaatggtattaagtgtcataattgttcgggtatatgataaaagtacagtaagtgcctttttcctttttgtaagctatacaacatttttgacacaagtttttttgttgggtatgactccctttctaaatatcttagcagctaagaaggttcgctcctcaagtatttataaagaaattatcaaaaaattatatttatctataccagtaacgatagttgtattatggggattgaatgagacatttgaaatcgaagatatattcctgttgtttttagctactgttattagtggattaagcagtgtgctaacagagttaatgaaaggaaacggttcatatgtagcatctcagttatataatggcggtgtaagtacattattatttataattttacttgcgtctaatcaattgcttggttatgacacagatatcataatattatatttggcatcattattcatttcatcagttatgaattattatcagtggaggttaagttataataaagtacacgtgattgatctttctctgaaagataaaattctatttaagaaaattctcccaatttatttatctactgttatcgtatatttattctcccaagttgatctatgggtggtttctaagaactttgactcttctgtagtcgctcaatatgggctggcaataagattggcggcactattgagtttctcaacattatcggtgcgcgcaatagctgctagtcgtatacccatattaattcaagataaaaagctattacaaaaagagatttattgtagctgtaatttttcttttgtggtaagtctcttaacactgctatcgttgcttattttaggttattggttaataggtatgatttttggtgtagattatcagtattcgtggtttatattgatgatttttgcggtggggcagattgtcaacgctgcgacaggaccttgcgattttctattaagccatactggacacggtatatcgctaatgtggataacttttatttcattcatactgttaatcgcttcatttgtgggaatccaattcttagaagataaaacggtttttttatattgcagtgctgtgtctctcattattgctgtgcagaatttaagcgtggtatatatagcctttaaaaaaacaggtattttggcgctaccatattttaaaagagaatatttacgtgtcgaaaagtaa

SEQ ID NO: 396310 - DNA, 183 bp, Salmonella enterica
atggaagttgcaatttcattagcactagtagttacttttcctactcccgttgttactaaaaaaaatatttgtgcaattaataagaaaaagaataatttattaatttttgtcttattaaaaatcacgttgatatttttattaagcttaagcctaaaactagaaagcacgagaaacacaaaatag

SEQ ID NO: 396311 - DNA, 258 bp, Salmonella enterica
atgacaacggcgctggcgggactggcgttggggccgttactcaccccactaaatgcgccaatgtcattactggccgggttaattattggcggcaccgggttttgcggcgatgtagtgatgtctgcggtaaaacgtgatatcggcgtaaaagacagtggtacgttgttacccggtcacggcggtctgcttgaccggttggactctctgatctttaccgcgccggtgttttttcattttattcgttatttttgctgctga

SEQ ID NO: 396312 - DNA, 402 bp, Salmonella enterica
atgagtgatatcggaagtacgtttcccgtttcatccagcaaaataggtacttttccgcgagccggaggaggccgcctgggtggtgtgattgggatcattcaggagcttgattctgccagagaagcatatcttgtacggatggctgaaatggagaaagtgaaagcagaagctgcaacaatgactaaggaattgagtgaggaagggtgtgatcagtgtgtctatactcaagggcaggttactctacagaatataaaaggttggtccgatgttagtatcgcgtaccagttttatatttgtcagttccctattcgctacggttgcccgcgtattcatattcagttgcgccgggagggatggcctgttaaggggtctgaagcccaaccgtacgaaaacgtacgctaa

SEQ ID NO: 396313 - DNA, 357 bp, Salmonella enterica
ttggtaataaaattatctcagcagcaacttgaacagctcacacaaagagaaagtgttaattatattaatcgccttcatgatattcttgtcagaaactcaccctctctttccggtgataaggaattacttgcaagacttaaagatgctgatgaatttgtgagtattcacgattttcataatcaagaggttaaaacagactttttgataatgaatgcctttgaaccctatttctataaaacaaaagcaatgcaagactggttactgaatggtgaagaaagcaccgaaagtgaatacattaagtatcaacaaatcagggggaatctggtaaaaagaatgttcggaggagtcaatgagtga

SEQ ID NO: 396314 - DNA, 474 bp, Salmonella enterica
atgttctatcctgattgttcactgtttgcacttattgatggtttgcaatacgagcgctatttcggggatgagattcagcatgaacagggtgtcgctgaaccatttttaaatagctggcctgactcccgtcttgcttttgcaggaccctggttatttcgtcttaataactctgtcagtcatcgtgaaaagctgaagcaactggcagaggctattccatctgtttcgtggataatttcctcagaatctcttgaaagtttaattgtccatttcaaatcctttctcaatttacagttgccggatggtcggtgtgctctttttcgattttatgatccacgtatcctggcggaagttgaatttttgctggacgaaactcactatgtgcaacttattaatcgaacaagagagtgggtttttcaggtgggtggggagatgaggaatatgaagggaaaagctaattattatacaggtcgataa

SEQ ID NO: 396315 - DNA, 2322 bp, Salmonella enterica
atggataactggttggcgctttttgacggacagacccgttactttctggatattaatgacagcctggtaaaaccggacgtcctgcagtttcgcggcagggaagcgctgagcgagccgtttaagtgggatattgagttcactactccgcaggcgaacatttccccggaggaggtgctgatgaaatatgcgtcgttccggatgcgcagcggcaaaaacgttcacggtgttgtcacccgcctggagtggctttccactacccgggaccagtctctctaccggcttacgctcagttcccgactggcgctgctggagcacacccggcagtgcgccgtatttcagaaccagtcggtgccggaggtggtggagcaggtactgcgcaaacacgggctggagggacctgattttgaattcagactggagcgcacctacccgccgcgtgaacttatcacccagtggcgggaaacggacctcgaatttattcagcgcattctggctgaggtgggaatttactggcgcacggtgatggacgatgtgcgcggtctggatacgtacatttttgccgacagccagcttaactaccagtttgatgtgcgcctgccgtacagcgagccatcgggtctgttcgacggcgcggcagaatcggtctgggatgtgcggacctggcacaacatagccaccggcactgtcgtcacgcgggattacaactaccggaccgccaccacgccgatggatgcggcggtgagtgtgcgcagtgatgcggtcaccaccggggagcattaccgctacgcggcaccttatcgtgaagcgggcgatgacgccagcccggagccggaaaccgaatcaggcgcgttctatgcgcgccttcaccatgagcgggagctgaacaaatcgtcccgtattcacctgttcagcaacgcctctggtcttacacccggacaggtgctggagccggagggcgacgtcattgcagccctgaaagaaggcgttatcctcacgctggtgacctttcgtggtgcccgtgattcccgcctgcatgtgtcggtctggggcttgccttacaccgaacgttactgtttccgcccggcggaaatcccgcgccctgaaatccacggtaccctgcctgcccgggtggaaagccgggagaaaaacgacatctacgcctggctggacgagcacgggcgctaccgggtcaggctggacttcgaccgggaaggcacggcgcggggctacggctacctgtggctgcggatggcgaagccgtacgccggtgacacgctgggctggcacacgccgctcactgacggcacggaagtggcggttgcgtacagcaacggtgatattgacctgccgtacatcgcgtatgcgctgcacgactcgaagcacccggaccacgtcacccgcgacaaccctacccgtaacgtgctgcgcaccccggcgaacaacaagctgcggatggaagacaggcgcggggaagagcacatcaaactcgccacggagtacggcaagacgcagctcaacagcgggcacctggtggacgcgcaggggcaacgtcgcggcaagggcaccgagctgcgcaccgatgagtggggaagcctgagagcggggaagggactctttgtcgctgcggatgcgcaggcgaaagcgcagggtgaggccctggacatggatgccgcgctgaaggaaatcgacaggcttaatcagcaactgcaacagctggaaatcgcggcggagcaggcgcaggcgctgaaggcggatgtggacagccagatacggatgtttgcgcagcggctgaagccgctacaagaagctttattgctctcggccccggaaggaatggcgctgaccagcggggagcatatgcaaatagccgcaaccaaaaacgttgccatgaatgccggaggcgatatcagtgctggcgtgatgggcaatctgaccgcgctgaccggagagaagctgggggtgtttgcgcggaccgggcaactgagtctcaaagtcagcgaaggtccggtggaaatgcaggcgcagaatgcggctatgcggctgtttgcggagaagaagctgacgatgagctcagcgagtgacatctcgtttgccgggaagaaacgcatcacgctgatcggtggcgggagctatctgcgacttgaggccgggaaggtcgagtatggtacgacagcgtcgtatctgcgcagggtgaagcggacgatggcggcgggggcggcgagtataccggttaaagccgtgacgggcggaggtctctgcctcagttgcctgatgaaggcggcgataaatggtaatgctttcgtcatacggggggagccatga

SEQ ID NO: 396316 - DNA, 414 bp, Salmonella enterica
atgaacaggggcattcatcctgcgctggcctttgctaaacaggtagagggctggtctccgggcgtattcagtcaggttgataagtggcgggagaccgattcacttgccccatggcggtttatgacgtttcgccagtgtaaacgcaggtttgcggactggctgaagcgtaacccggcgccagaagaagggttcctttgtcctcaaattatgaagcgtttcccgccgcatattgtttatatgacgcttgcggcctggcgaaccggtaaaaccctgcttcattgcgatgaatctctcttccggatgctgggtgaaactcgtcagaccgatgctctgtcaggcgaaatgcttcgccgcctgccattctggggattctggctcgattttccggctgacatggtttttgctgaaggctag

SEQ ID NO: 396317 - DNA, 291 bp, Salmonella enterica
atggaactcacaaatcacagcaaaaagatacgcgaagtggaaacagagcttcgcgcccgactcgtatcaatggggcagacaaatttcgcaaagatggcgggatggtctgattcaaaagtaagccgcctgaacattcaggatatggcggtgacgttcgttcttctggagaaggtatgggagacgagcttaatcagggaagtagcaaggcaagcggtggaagctgtgatgccgagaaataaaaaacgcccggcggcaaccgagcgttctgagcaaatacagatggatttctaa

SEQ ID NO: 396318 - DNA, 330 bp, Salmonella enterica
atggacgaatcaagaaagcagtttgaagagtggtttaaaaacaaatatcacgtttcaagtgacgtgatgaagattatgcatatcaaggtcgagattgcatgggaggcgtggcaggcatcgcgagcagctattgaactggatatcgactggcccgaatcgaatgacgacttttggagagatggtgaagaaggtgcttatgcgatgggttatgaggatgggcgtgacaaaacagtaattgcagtaatgaaagctatcagagccgctggaattaaagagaagaatttcgatgaagcaaatatacatgcttcgcaacgaagcaatcagaaataa

SEQ ID NO: 396319 - DNA, 534 bp, Salmonella enterica
atgttaagtgaagatgcaaaagatatcgaaggatatgaaggactgtacgccatcactaatgatgggagagtttactcgcattcaagagtaaatttgagggggcggcttattaaggggagatggctgaagcataatcataacgtaaatggatataagtatgtatgtttatataaggatggcgcaaaaaagaacatactaatacataagcttgttgcatctcactttgttagtgggtttgctgaagggttacaggttaatcatatcgatggtgataaatataataataaccatctaaatcttgaatgggttactccatcaggaaacatctcacactcatatgggttggaatcgagaggtaatgtaaaaggagaaaggaatggtaattctaaaatatctaatgatgatgtcataaagataaaagaaatggttgccaatggctttcctcagtgtgaagttgctaaattatttggaattcacaattcaaaggttagtagaattgtgaatggcaaggcatggaggcatgtgaatggctga

SEQ ID NO: 396320 - DNA, 702 bp, Salmonella enterica
atggctgattcgaatctcaacacacctgtcgttattcaggccacccgtctcgacgcttcaattcttccccgtaacgtctttagtcagtcttatctgctctacgtaattgcgcaaggtacggatgttggcgctattgcgggaaaggcaaacgaagctggacagggcgcttatgacgcgcaggtaaaaaatgatgagcaggatgaagagattgcagaccacgaagcaagaatagcggctaacaccaaagcgataaatatccttgaggtaaggctaacaaccgctgaagggaagatagtcgtactgcgtagtgatgttgactacctgcttgatgaagttatcgatattcaggctgacatagtatccctgcaaacagacatcagtggtctgaaaacatctgttactgaaattcaggatgactacgtatctaaaaccgccactacatctcaatcgctggcgtcacctctcaacgtgacaacgtcctattcagttggcggcactaaagttatcggtgcgcgacagacaggatggacagcagcaaccggaacagcacttctcggcgcattcaacgcaaaccaggcatacacggtcagtgccacatatacacagtctgaggtatcagctatggctaccggattgcagcaggcgcggcagcgtatcaaagctctcgaagatgcaatgcgaactcatggaatgatcaactga

SEQ ID NO: 396321 - DNA, 654 bp, Salmonella enterica
atgagcaatatttttatcgcaaactttgatggagtcagcgttcgatttgtgaacattgaagacgacgtctttgtttcgcaaaatgactttgtctgtgccattaaacgatgcttaacagatgatatgaagcatcttgctgacttgatcgtgtctggtggtgtgaaaatcttaggtgatggtcaagatagtcgttcagcaatactcggtgatagcgtaattgggccagctattcactttcatgctttggggaatttcatcacttcgtttgttgagttgactgacgttgataacccctcattaagagagagttgttatcgcatgaatagcctggttcaatggtattccttggctttgtcagaagcggatgagtattttgggcgagatgttgcagacttactcggctccgttaagcgtagactagatcgcataacccctccgtacatcgtaaatatttaccatgacaatgaggtgtgggttgctacttgtgatgatttggggttggttaccgaagccacagattacgagtccttaactgagagagtatgggaagttgcagaagatctgctagatgaaaatgatattgaccagccattcgaaacattgcgcctttcatttgtacagaatcaggttgctgatgacaggatggcgctatag

SEQ ID NO: 396322 - DNA, 186 bp, Salmonella enterica
atgaccatagaagaacgtctgaacaacattgagttgaatcaaaccctgcttgaccagcgactttcagatcttgagcttaaagatctggatgcgcaaatatcagaagtagaagcaaagctctccaacctaaaccaccgcaggaagcaaatccgcaacagaattactcagggacgcggaagctgttga

SEQ ID NO: 396323 - DNA, 318 bp, Salmonella enterica
atgaaacgtatcacaatcctattgctcctgtgtctctcgagcatagctaacgcagaaacaaaatcagacgacagcagtcttgatgaaatacaaggcctcatgatagcttcgaaaatggctggtatgtgtggtgcaatcaaacaaatggcaacattccaagaatctacaaacatgccaggtgggaatgaattcttacagagattccttactacagagcaagcaaggcttgggatgactccgcagcaatttcttgaagcatgtcagaaatcaatctctatttataccacctattacaatatgagctctgagaaaaaatag

SEQ ID NO: 396324 - DNA, 252 bp, Salmonella enterica
atgtctgatcgtaagtacaaaaaccctcaagtgaatctgaggcttcctgtagagataaaggaacgtcttattgaactggctgaggctaattctcgttcattaaatgctgagatggtcgcagcacttgaagcatggaccgaaaaaaacaaacacattcaagcactagatcttgcaactatagcatcacgattgatagagcttgagcatgatgttgagaagttaaaatgtatgtatggcaatggtgaaaaatga

SEQ ID NO: 396325 - DNA, 141 bp, Salmonella enterica
atgaaggtaaaaacactgcgtatgccagagaagttagaaaaaatccttgaagagaaagcaaaggaagagtgtcgctcatttagcgcagaagtaattaaacgggtgatggatagcctgaagagagaggggataacggtatga

SEQ ID NO: 396326 - DNA, 243 bp, Salmonella enterica
atgagctttataaccctaactaaaacaaagtttgaaagccgaaggacaagtgattggtggcggattagattcgaaaaaaccaaaacgacatacaccataagacgccaaaacattgagttggtagagggcacaggtgacgattgtgcgcttattacattaacttctggcagaaaaattgaggttgaccagtcagtagagcatgtatctggacttttactcggacaagccggacaaaaaagttga

SEQ ID NO: 396327 - DNA, 891 bp, Salmonella enterica
atgtcaagcttagcaaagtcaactgtaaattgcactaatagcatcatcatttctgacgtcaagattcatatggattcagagggtcgttactcgcttaatgaccttcatgtagcgtctggaaaggaggaaaaacatcagccagctttcttcatgcgtagaaatgaaactattgaattgattaatgaaatttttaattctgcggatatgcagaataagaatcccgtcatttctaagaaaggtcgatatggtggaacctacgtgtgcaaggagcttgtttactcctacgccatgtggattagcgcagcctttgcgctgaaggttatccgtgcatatgacgcaatggttactgccacacaagagaggaaggctattggaggtaaaacttcagtagctgaacgcacaccgctacgcgatgcagtaaacatgctggtaggaaagaaaggacttcgctatgacgatgcatacaatatggttcatcagcgttttggtattgacagcattgatgaactttcaattgaacaaatcccgctggccgtagagtacatccacagggtagtgcttgaaggcgaattcatcggtaaacaagagaggaaaaccaacgagctttctgcaaaagaagcaaacagccttgtatggttatgggattatgccaactgctcacaggcattattccgcgaactgtatccggcattaaaacaaatacaatctaactattccggcagatgctacgactacggtcatgagttttcgtatgttatcgggatggcgagagacgttttaataaaccacacacgagatgttgatatcaatgagccagacggaccaacgaatctttccgcatggatgagacttaaggataaagagcttccaccttcattacatcgctactga

SEQ ID NO: 396328 - DNA, 2178 bp, Salmonella enterica
atgacagacattacagccaatgtgatcgtatcgatgccttcgcaactcttcactatggcgcgttcttttaaagccgtagccaatggcaaaatttatatcggtaaaattgacacggatccggtaaatcctgaaaaccagattcaggtttatgtggagaacgaagacggttctcacgttcctgttgcacagccaatcatcattaatgctgccggataccctgtatataacggacagattgccaagttcgtgactgtgcagggacatagcatggctgtttatgatgcatatggttcgcagcagttctattttcctaatgtactgaaatatgaccctgatcgacttagacaacagttagcaagccatgccgcagggaatggtgacgaattggtagcagtaaagcaaccaatagaaaactctaaagaaagaactgtccatgactggctggcggacatcattaccgcaaaagatggggcaaatattattgcagacggaattaataatgacgctgttggcattaatgctcttcttcctgtattgtcggatttacagcgtgaacttattttggttcctggcgtgtacctgataaatgacgacataacgatagatattccggtaacgtttcaacctggtgcgatcataaagccaagaaatggcgcacaggttacatttaacgctgaaattatggctgggaactaccatatatttgatactgaggacgatttttatgcatcacctgttgctgcaccatctgtaaagatcgcaaagggaggagtaaaaccagaatggttcggagcaaaaacagttagttcttacgacgaaatttcaacttctattaactgctctcatgcatttatgaaggcgtggagggcaaccactggagaatacacagcaaacgtcacctcatcctatagacagtcagaatatatacattcatatatagagttgtcagcgggaaaatacaggatggataaagaggtgttccttggtcacactgatttcactcctactacggtgaggtacaacaaaaatggtggtggtgttattgggaagggagcggggttatctgttctcgttttcactgatagcgaatatgcaggaaacgcatttttttcagctgttgatatgtctggggatatgcatgaattcagatcatttaagtgtacattctactgtccttcaaaagttggcgatgagagatatgaaagcaaagttggtgcaatgatgcttttttcaacaatagattcgttgacaacaacagatatatgggcatccggcgcgaaatttgttgttcccgatccgtcaggttttggtcgtggcggagttggtgttcagtttgactctgttgtggatcattatttcagtaatatattagtagagcattgcgcacatggatgtgcatttagttcatccattagtacaggtgttaatgtaaaaggatttagaaatacattaagcgacttgtcatttgggaatatgattcctgcatggcctgatataatcagtcaaaacactaaaaatattatttcaatatatggggttgaatcaaaatcaaattttaactcaccaattacatttggaactaatgataacaacgtatcaattaatggagtagttgtagacggcaggtatgaatcatctagtaatgtggtaactaagttaataataacatttgccactggtggtggatgttcaggaaatataagtggctgtgtagataatgttttatacggacttataaatgatggtggttcatctcaagctgggaggcctggtggaacgttacatcttgatttcgttgtaaataatgtcactggaagcacttcatcagaaaatgctgttgtagttcttgataaaaccgattctagtgtaatcatgaatttaagcatcaatggaactacatttccggcaataataaacagaacatcgcagttaaaatcatatctcaatatatcaaatatgaatttaacctctccggtaagcggatttagacctatcatatcaaaaggaggaaatatcttaatgatatctataaatatcaccgatacaaccacagcaacagatatagcgtatgttgaaaacagcacattgatacttccttcgttgatgataacccccgtcatttctgtagcaaaaggtatcgggggcgtagtgaaaacaaatcagttaattgattattga

SEQ ID NO: 396329 - DNA, 747 bp, Salmonella enterica
atgaacagagattcaacattaagtataaatatatgcagtgattactttttaaaaatactgaacggatctctttctgttcatttttggttcgtttatgttataattggaatgtatttgtttactccagttttttcatatattattaatagcattagtgatctcactttaaatctatcattcattgcattattgatagcatatttaataaatatgtattctattaacttgactattataaacataaaaatatttgaaataccatatttaaactactggtacctttattttttcattggtgggtatattgggcgtaaaaaatttacaatgtctaaagaggcagctctttcatttatttttttaggctatgctttaactgctgtatctgtttataaaacaaaagattatcctcatttaatgccttttgatgcaggaattaacatgattattttatcaacatcaatatttcttttttttgcacgtactgattttacagtatctaggggtgtaactttaataccattaatttcaaagcatacttatggggtttacttaatacacatggcaatcctcaatgttatatatatttattttatgacaagaaatattgtatataatgcatttatgatgatatttgcatgtttcatcatatcacttatcatctcatatgttacagataatattttaataaatagaattacaatgctatctggtgtatcaagaatattatcaacaccagatagaaaataa

SEQ ID NO: 396330 - DNA, 183 bp, Salmonella enterica
atgttaattgaagaagcgctacgccagcgccgatcggtcattgcacggcggcaatattgccatcagacgttacaggttgaactgattgggcgcagcgagtggatgaatcaatttcgacatcggttaaagcagttggcggaaacggacattgccgtgtggttttacggtgagcatggaacctga

SEQ ID NO: 396331 - DNA, 324 bp, Salmonella enterica; identical to SEQ ID NO: 395484

SEQ ID NO: 396332 - DNA, 768 bp, Salmonella enterica
ttgaactttctcagtaaaaccgtcgttgtcgtgttggctgcaacactgctttccgggtgtgataaccggcctgacaagacgctgtcccctccggtgggtgcaaagtgggtggacgtcactttccgggtgccggagggcattacactgcagccagccgagctgctgtaccgttcggcgcagtgcaaatccgtgcgctataactcaagcaatgaaccgcatgatataccgggctacaacgacgttgagcggccattcggtgcgcctgatggtgacaatatccgccgtctgcgggttgccgtggacggtggcggttcgtgccagtggcaactgaactcgctgaaggtgagcttcagaattgcggactatgttcccctggtgaagggaaaagaggttatcgataccagttatattttcgatttcagggactacggacttagtgacggctacgggaccgggcgggcgaaggtgttcagcgagaaaatattggatctgaatacagatttcttccctatggttgctaatcacatcgataatacggttagcttgaagttatttgggggggagactggaacagaaaagtggcgcaggcgttttagtctaagtaatacacaacatatagctattgaacctgttgttcatcttatgaaagttgttgtattaaacccaccagatcatccaggaaatctgacagcaacttatccggatggcagtcgtgaagatataccgaatatttccccggattatgacaagttgctgtcaatgaaatag

SEQ ID NO: 396333 - DNA, 459 bp, Salmonella enterica; identical to SEQ ID NO: 391369

SEQ ID NO: 396334 - DNA, 894 bp, Salmonella enterica
atgagtcagttcagcgcattaaactactcgcataatagagataaggccattgcaaaccttataaatattatcgagggtatgacatgcgacggaaaagtcagtgaaaaggaaatgatttttcttgatacatggttattagaatctgaaataatttcgcaaaattattatgtaggttgcattagagataggattgcagacattctttctgatggtatcgtggaacaaaacgaactagatgatttaaaagaattgctacttgagatgcagcgcggactgatagacacaccaaacattgacctgtattcagttgactctgacaagcatttactggaagggttatgcaaaggactggcttctgattatcatcttagcaatgaagaaattagctatcttaattggtttctctccacgaatgcctctcttaaaaataactaccccggaaaacatttatatgaattgatcagggaaattctcagtgatggggtcatcactgaagacgagcgcatttcgttattgcaagagattaccgctttaactggttctaatatttctgagggaatagttgacggatattccacaacatcaccagtagatctcatagacacatttacccctgaaaatagcaaagtatgtcttacagggaaatttctatgcggttcccgccgccagtgtgaagccgacttaataaaattagggtgcaaaatatctgatcgcgtcactcaagatctggattatctcatcatcggagcgcttagctctaaagactggaaattccagagttttggtagaaaaattgaacaggcaatagagtaccgagataacaaaggtgcttctcttaaaatcctcagtgaagaacattggcaaagcttaatgcgttcagtaagccagggttaa

SEQ ID NO: 396335 - DNA, 615 bp, Salmonella enterica
atgtcaaacacaaaagaaaccccacaggcgatctcaccctataacttttcatctcaaaatggtgggaaagatgcaataacacgcatacttcaggcctacggattcagtacaagacaggctctatgtgatcatttgggtgtgtcccaaagcaccatggcgaaccgctggatgcgcgatactttcccgcatgactggctaattgcctgccatctcgatacaggtgtgtctatgctttggcttaccacgggacaaggaaaactcactacagagtcaagctctgacgcaacattgcttttgcaactaaaggaaatcacaaatggggtatacgcttccatcacgcaggttgcctatgattccaacctcgtgcctcaaaacgccgcagatccgttctttgtaaagttcgaaagcacatactatctagcagaagaatttacaggcgagatcaccgatggaatatggctcattgagctagatgggcttttgagtatcaaacaggtgtaccgcctcccaggcgggcgcttgcgagtagaaaatggcccagcatcatttgaatgttcagtatctgaaataaaggttcaaggtaaagtcatcagcaaaactgagtttatggaataa

SEQ ID NO: 396336 - DNA, 237 bp, Salmonella enterica
atgaaaagcaatttttcaatgcgccccagcatcaaccttgtggtgtctgaaccattcatcacactggatgagttctgccgccgtactggttacaagcttagctatgcccgccagatggtccgcgaaggtcgtttacctatccgtaaaaaagaaggggtaaacagccttgttgaagtaaacatgtttgcgttgacgttggaagcagctcaaggctgtgaaatcgcaatgcaagcctga

SEQ ID NO: 396337 - DNA, 222 bp, Salmonella enterica
atggctgattcaatggaccttgtacagcagcgcgttgaagaagaacgccagcgccatatcaacatcgcacgcagccgcatcgctgcgccctctcgtttcctctgcgaagaatgcgacgcaccaatcccggaagcacggcgcgctgcaattccgggcgtggcctattgcgtgacctgtcagcaaatagcagagctcaaatccaagcattataggggcgtttaa

SEQ ID NO: 396338 - DNA, 318 bp, Salmonella enterica
atgagcacagttcatagtttaaaaattgggccgatgttttttgtagatgttttatctggtcataaaaaagccgaattcagaatcaatgaccgtgattttaaatgtggtaattttctgttactgcgggaatgggagggtaaatacactggtaataaactcattgtaaaaatcactcacatcttaccaattgataacttaattagcggttgcggtaattgggtgatgttatcaatcactccaatcagtactaccgacccattaacgataattgaagcaatggtgggggggagttatgagcctccgcatagaaatcggtga

SEQ ID NO: 396339 - DNA, 279 bp, Salmonella enterica
atgagcctccgcatagaaatcggtgataaatgggttgttaccagcgaccaatatcaattcatcctgaatgaaaagaaagtcgttaagtcaggtcataaagctggcgaggaatggctcgacactatcggatattacccgaagattaaccagcttatttccggtctggtgcattatcaaattcaaacggcaccgttaaattctcttactgaaatggcagcagaaatagagaagttatcgtttatctgtgaagacgcatttaaggcggtgaaaaatgattga

SEQ ID NO: 396340 - DNA, 1005 bp, Salmonella enterica
atgattgattcccgctgcttagccgaaaacacaataaatattgtttatgtttcaggtggaaaggacagtcttgctgactggctgcttgccattgaagcagggattgcacatatgccagcgcttgccgataccgggcatgagcaccctcaaacaatggaatacctggaatatctggaatcaaaactcgggaaaataacccgtgtgaaagccgatttttcgcgacaaattgaagggaagcgcaagtttatcgctgagaaatggccggtgtcgttggttgaagagtgcgggatgtctcacgatgaagcggcggaacgtattgctcgtgcgctggaaattcttcacccgaccggaaatccttttctcgatttatgtatgtggaaggggagatttccaagcactaaggcaagattctgcacctttgaccttaagcatgagccgattcgcacgcagattgtattacctgcactggaggaatacgacgaggtaataagctggcagggtgttcgtgctcaggagtcaccagctcgcgcggctttacctatgtgggaggaggacgcagacgatacaccgggccttcatgtctatcgtccgatcctcaactggctgcatgaagatgtgttcgctcttgccagacgccatggtattaagcctaacccactttatctgcagggctgcagccgtgtcgggtgtatgccatgtattcacgcccgcaagtccgagcttgcagaaattttccagcgctggcctgaagaaatcagccgtgtggctgaatgggagaggatggttgcggaatgttcacggcgtggaaattcaacattcttcccgtccacgcatgacccgcgccgtgctgaaaaacgtattgaagtcattaccgttgatgcttatggcattgagtcttatcgcgactgggccttaaccactcgtggcggtgtgcagttcgatctgctggcaggcatgaatgataaggcggtgtgtagcagtgtttatgcgggagtctgcgagtga

SEQ ID NO: 396341 - DNA, 579 bp, Salmonella enterica
atgagggtctgcttcggcaaggtgttttgccatcagctcatccacatacaccttcaactccagcaccttgtcatccacatacttgcgggttgccagcaccactgccgggtcaattttcagggtaatattatcggtgctgctggtaatcagcaccatgcgcacggtctgcgtgcgcccgctcccttccgccagttgcggcttgtaactctccgggcagttgcccacggcaatcagcgcgccggtgtcatcaaacaaaccaacctcacgaatccaccaaccgccctcagtttcggggatcacctgttcagcaataatctggctgctgttctgcggatcgatgtacagcatattgagggaagcgcggcgtttttcagcaaccagcgctgtctgctgtgcgcttggagtcggcagcactccgccaccgtcgcccaccgccatctgggtaattttcaacgggacaccgagcgcggcggcgcttgccagtttcgccgcgccgatatccgtcagcagggtataaaattttgcgctcatgggttcactctcatcgtgtcaataacatggaccgcgccgccctcataa

SEQ ID NO: 396342 - DNA, 315 bp, Salmonella enterica
atgtcggaaaaattcccaagccagatgcaagacaagttcaccgtaaggtttccggacgggctgcgggacgcagtagctgagagagccaaacgtaacggacgctcaatgaactctgagatcattcaaataattgaggatgccatcagcacagaattggtttcttgggatgaatcactagcccctaaaagaaccggtgagaatgtgaccatgtcaatggagcaactaaacaaaataatttcgattaccgctgaagaggcggtttcagcagtaacaaagaaattgactgaagaatacacaatgcagcctaaaaaatag

SEQ ID NO: 396343 - DNA, 279 bp, Salmonella enterica
atgctggtcatgggatttaatggcgcaaaagccgacgccgttaaagaggcctatataaatgcctttaactggatgtcagcagaactccgtaagtacagcgaaagttatgaagcagaacgcaacgccataatgctggagtatatgaaagagaaggatgtcgccagcatgtctggccgcctgctcaatcgctggggaaaaattaagaagcctcagctactggcgagaattgaacgccttgaacagcacgggcaaaccgtaatccccgggctcactaattaa

SEQ ID NO: 396344 - DNA, 1359 bp, Salmonella enterica
atgaagaatattgcagtaattctggcatccggtactggaagtagatttggcgcaagaatacctaaacagtttgttaagcttgcaggaaagcctgtaattcaatatacattacaagcatttcaaattgcaaaaagaatagatgaaattatcattgttacaaatgaagagtatgttgattttgttactgagttgactgtagaaaataattataataaagttaaaaaaattattaatggcggaaaggagagatatgagtcttcatgggctgctctgcagagtattgaattagcagaatgtaatgttatttttcatgacgctgtcagaccatttgtttcacaaagaattataaatgactgcattgaggggctaaatagttataatgcagtcgatgttgtagtagatcctactgatactattgtaaaaattaaaaataaagagatcatgtccattcctgatagacggttcttggctagagggcaaacacctcaagggtttaaaaaaacgttaatagagaaagcgtatgtcaattttttgaaagaagagcaccgaattgcttcagatgattgtggtatatttttaaaatatatgccaaatgaaccaattggaattattaagggagatgaatctaatttcaagatcactcaccaacaagatatatatcttgctgataatttaataaaagatggtttattagagttggcttctgaaagtagtgataaaatagaacgggtcatatctgaaaaagtaattgtaatatttggtgggaatagcggcattgggaagtctcttttagttaaaactaagtcgcttgacggaaatgtttattcttttagtcgtagtaatggtatcgatattagtgtttctctggatgttagaaatgcgttgcagcaagtatttgagaaagaagggagaattgattttataattaatacagctgcagtactgattaaaaagccaatcaattttatgtcggaagaagaaatagaagaaagctgtaatactaattatttaggtgcaattaatattgcacgagaaggatataaatacttaaagcaaacaaaaggaatgttaattaattttacctccagttcatttactcgaggaagggctacatatagcctctattcatcttctaaagctgctgttgtgaatttaactcaagctttatcggaagagtggttaaatttaggtattaaagttaactgcattaatccggaacgtacagatactccaatgagaagagttaactttggtattgaaccaccagagtcattattaacctcggagcaggttgcagatatgacattgtcaattatgtcttcggattatacaggacaagttgtagctgtgaagaaatag

SEQ ID NO: 396345 - DNA, 1221 bp, Salmonella enterica
atgtctttacggaaaaatataagtgggctagcagtagctcaaatctttagttacatagtgcctctgttgcaattcccctatttgagtcgaatcgtaggggactcttttttaggtgctattattttcatgctgtcaatatctcaaatggcaatggtattgactgactatggttttgatttatcaattggagaacaaatagctcgcggaagaaaaaataaaaagtggctgagtgtcttttattgtcaggtagctgtaataaaaactattctgctaatattcgcatttatgctgataattggagcgcttaatatatcaggacatgcttttccaatccagttaactttgggattaattatatgtgttatgtttaacgcatataatccatactggatatttcaggggttagagaaaatatatatatatagtgctttagttatcatttcaagattctttgggctaatgctagtatatctcattattaagattcctgaagattatatttattactcttggatactggcatttcaggcaggggccataaccctgattagtcactatttcgtgataaaatggggggttcagattagacgcatcaaagtaaaaaatatcattaagcaattaaagtatagttttgattttttcttatctagagcctgtgtttcattatattcgtctggttgcagtgtcttcttggcaacctttggcggtagtttgaatcaggtcgcaatttatggtgttgcagaacaattatacaaagcaggcgtccaggtatttagtcctattatttcagccttaacaccttatatggtaagaacaaaaaactacatagtttttaataaaatattattaggttgcttggtggttacagtcgttggtatatgtactggatttctcgcaggtaatcaaattatcacattaatttatggttatggatatcaggagtcaaaatctgtacttaatattttcatgattataattgttgcaagcgtttttggtatgctctttggttatccagcactattacctctggggttgggtaaagtagcaaactatagtgtaattgtctctggcatattacaaatattaatgtttagcattttatatattggcatattcccaataacggcaattagtgtatgcattacttaccttatttgtgattggtttatgttttttattaggctttatgcttttgtaaaatacaggaaatttaatggataa

SEQ ID NO: 396346 - DNA, 429 bp, Salmonella enterica
atgaaaaaattaaaagtagtgactattggaggaggaagtagttacactcctgaacttcttgatggatttattaaacgctatgatgagttacctgtcagtgagttatggctggtggatatcgaagaaggtagcgaaaaactcgatattatttttgcgctttgccaacgtatggtcgcacaggcgggagtgccgatagcgatttataaaagtttaaatcgacaggaagcgttaaaggatgcggatttcgtcacaacacaattccgggttggtcagctaaaggcgcgtgagcaggatgagcgtatcccactgtcacatggttatcttgggcaagagactaatggtgcgggcgggttatttaaagggttacgcaccattcccgttatttttgatattgtgaaagatgtccagcagatttgtcctcaggcgtag

SEQ ID NO: 396347 - DNA, 603 bp, Salmonella enterica
atggcgcacgaattacaactcatcaagcagtcatctggaatcctgatccccgcgacgccggagaccagcgatattctgcaatcaaaaattaaactcggcgccgtgctggtggctgagtttcgtcaggtgaggaatcctgcattccatcgccgctttttcgcgttgcttaatctcgggtttgaatactgggaacccaccggcggcgccatttctgccaacgagcgcaaactggtaaacggttatgcaaagtttcttgctgcatatggcgggaatgagggcgcattactggatgcggctgaacagtatctggaacagattgcaaaccgccgggtaacaaacgggattagcctgtgtaaatcattcgatgcctaccgcgcatgggtgacggttgaggctggtcactatgacgccatccagctacctgatggcaccctccgcaaacatccccgcagcatcgctttttccagtatggatgaggtcgaatttcagcagttgtataaatccgcgcttgatgttctctggcgctggattttatcacgtacattccgtactcagcgcgaggccgagaacgccgccgcccagctaatgagctttgcggggtga

SEQ ID NO: 396348 - DNA, 327 bp, Salmonella enterica
atgaaagatggcctttataaggtagtttttgacagtaatgttaatccgaatggtcaatgtgatgggatagtttcaattcgtgataatcgtataaatggtggtgattacgtttgcttttatcgtggtttgatccagtctggtggcgttacccttcaagtggttcgccacaatcctaacgacaccactgtattcaatggtgtcaacaatgtagagcttgcactccaagttaaagagattggcgaaggtgctattttcaatggtagtgtctggagtagaccagatttgactatcagcggcagcttaacttttcttagcgagctaatctaa

SEQ ID NO: 396349 - DNA, 1191 bp, Salmonella enterica
atgatcataaaagatacaacaaataagataaaaagtgtttatgaagatataaaagatggcgagttagatcttagacctaacttccagcgcggtgaggtttggacaacaaaaaagaagaagttattaatcgattcaatccttcgtgaatggtatattccgccaatacatacagtatctattggtaatggaaaagctgaagttttagatgggcagcaacgattgtctgctatccgagattttttagacaatcaatttcaaattgatggttttattgaacctaaagatgatgacatcgttgagttgaacggaaagaaattcaaggatttaccccctgatattcaaaggaagattgagcgctttgggattactatttatgagataactgattataaccaaggtgaaccgaatgaacttttttatagattgaatcaaacaattaaactaacctcgtctgaggccagaaatgctatatttggtgacgtgcgtgatgatatgtcatcatttgtctcttacatggatgagcttaatgttgataagaacatcttgggattcagtaattccagaatggcttataatgatttgctttctcgagtttgccttcttcttgagaaaaaaagtattcgctatcaattaagcgatgcaaacttaacaaatagatatcgtaacaataccagttttgacaacgaaatatccactgcaattaaggatacaataagaatattcggtgagtttagctcttatataaaagatatggaaataaatacgaatcttacaaaagcatcatctttgaactggatatatcttattgcgtgcatgaatatctctggtgaagaatttgacaacaatcagatatataatgcttttttcaatttagaatcagccaagtctcatgttaaaataaatgaaaaaattccagctgaaattttagatttttttgatattgatgaacaatgtcttcgtgaactattaatgatatatattgagagaagttcttcacgagtaatgtccattggctcaataattataagggatattatacagaatttcgcatgtttcagggccggaattaatctatcatatctagatgaaaaagattatgatgctcttgattggttttcaaacctgatgaaggacaaaaatcttgatgtaaaatatattgtagaagacctctctgaagactggaaggggtaa

SEQ ID NO: 396350 - DNA, 5076 bp, Salmonella enterica
atgtccgtaaaacagtatgaaacctatctggcagaaaccttcattgaatgggttagcagcaccatccagccgggtgagcgctaccagtttaaatctcccgatcccgataatgccttaaagctctggcaggctttcgtctccttagcgagtggaaataaattagaaattgcaccgggacagcaccttacctgtgtccaatgtaatagcatccagcttattccagtactgcacggcacaacagctcctgcgtttacagaaaactatatttcccatctgcgcgatcaggtttccggccgcaacggagtttttgcccatacggcattgttaattatccataacagcatgctggataccttgctcaatagtaccaaagatgtggctgcgcccgatgctatctggcatcccgagaccttccgtcatcaactcgaaaagttgatcacaacggacagtgcccgttctcaagtgtcccgctgtttgctgggcgatcaattgacaacaatactggatgaaggagcaaccgtatttggtttttcatcgttataccgtctgctggatgacggtaagctggatttctccgagctgaagttattcaacgataataatctgctgaattttagtgataaacagttacgcgcccggttaaacgaaaaccaaaagttatatcgccagatagaggacagtattgagcgttatagcgggcaactggagaatgtcctgactgaatttagtacaaaattcattcaggagcatttcgttgacaaagacgactggcgtgaactcgatttttctgtctatctggatgaaaagacgcagaacagcgaacagaaactggtactggaaaacattgtcgttgaaagcggtgtagtctggcaaagagccaaaagtgccagtaaagcgggtaaacgagatatcagcgtcttggtacaagctcagcctgaacagtctcaggttgagctggagtttatctttcagggtaacgaccttcaggacaatcagataaaaattgctcatcatcgccagttacagaaagaacgattctggcgtatcagccggcactctaaaattctggcgtcagtgcctttcgatggtcggccctgcttctttagcctcgaaataatcaatcgcaataattcggcggaagagtacaagtttcgcctgttattagttgaacaagggcaattctggcttaatgaaatccagcattgttatcgtattgaaccaggtaaaggccaactgactctacaactggaagataacgagttacgtattgccgagaccggcgaccagacttgtttacttgatgaagaaagtgatgatattgattgtcggcattatgcactcgttaattttgaaacgttggcgaatcaaagtgagctgatcaaatttgcgctgatttcaggtgattcccgtttgttgtttaacattgaagggcctggcgcagaggaaggattaacactgcccctgctttttgatcagagccgcttcaataaactcttcaaagaagaagggaatgcaacctggaaccggatgaaaggtcgcgtcattctggacaatatcgaacataatgtggtcggtgtacgccagcagttgcttatgcaggaatcctccctgatcgagcataatctgctcagcacaggcagtaacaatagcgagtttgcactggacgagcttcaggctatttatcccgacctccataatgcataccaccaactgtttgtttactatcaacgccgaaataccctgccaagtctggtgtcatggtcagcggaatatcgtgcgttagtcagtcacatgctcgctacttttgaacaggcgttacagcaaatcggtctgagcagagcattaaccgcacaagagaagcgtctgctacatctggggatttgccgtggcgacaattatgaacgcctctcgcctttgcatcccctggtgctggcttaccatttgcagttggcggaaacgattattgcggagccaggagaccccacatcagcctctttcgcttcattaccgcagattactctcgatcgtctggtcgtttctggcttaatgccatttgtgtatcacagcgagcatgaatacgcgcagttacaaccgatggcggaaaaccgcttctggatagacattgttcctcagcgtcagatgagtcatgaatatgttaagcgcctggtgaaagacaagctcaatgaatttacagatgcctattcccgattgttccagagtgcaggaaataatgcgctggtgataaatgccattaatctgggagatgccagggagctattcctggggctggttgaatattttaagcaggaaaaagatggcgcaatttcgatacatgtaaactgctacgacgaacgcctgctccccaatgcctttgatcgctttgccgaaagtggcagctatgaacaacttaaaaatgatcttggcctgaacagtggcgcatggcgtgctgaagccgatatgttaatcgatctactgcgtagtcgcttaacattcagcaaatttgtcctgccgccggaaagcgataagctagcttacgcccatctggcatttttcaccaataccgcaccggttgactgccgccagattcgcattgaagatgccgccagcggggtgctatgccatgggcttattgcgggcgaaggtgcagaaactcagggcgatgcctactttactgcttttgggttacgtaatgtcgatactgaaccttattgcgccctacgccttgcccgcttgttgggttgtctgtggcaaccggcacggcagagcaacagccaatatcacggtcaggggattagtctggcagtcagcggtaactttaagcagttactcaaccgctcttatgatagttctctctggactacaattatcgaccctaaggtcaccctcgatttctttaccagtcaaaaagatgtcgtgctgattcattactctgaccagtataccagttgtgcaggttatgacgccgtaaccgtcacaaaacaggttgagttgttcttgcgtctgcttcagacaggaaatcaagccgggcaatccaccgttgatagccagcaactgcttgctgaatttaatgcctttaacggcgagtggttgttgaaaatgttgcgctcaaatgagaaggagcgcaaagagaaacacggcattatcggtgcatacaaattcgtacagtcgatgctgcagcagtcagatatttgctgggttccactgtccgtagctgagatgatccgcgtgtccggcaatgtcgggctgagaatgaaagaaagcgatttatcccgccatttacagggttatcagaaaggagcgatctctgacgatgtgctctttgtcggcttcaaagataacaacctgtatctgttaccacttgaagtaaaaacaggggctcgccccgattacaaccatgcggggcagcaagcccgcgagctaaaacgctatttacagcaagatattcttgggccgcaaactctggcatcacaactataccgggcactttttatccgccaggtattaatgcaggtagagaagttgcgtctatacggtgtgttggataacgacaagctatcccctctcctggaacgacgcgaatggtggctcactggcgactataagctgggcgaacttactgactatgttgatggctttgtggtagcgcatgtagacagtaagacctgctttgtagtctcttataaaaagactacagagaatattctacagatcgaaatccccttctcattgctaccatcgttaattgcagcgcagggagatcaacctcctctagctgaaatccatttggcacctgaaaaatatcggcttaagccagcctgtgatatgagtccgtcacaaccaacacaggtgacaacacaggctgattcgcagactaattcaataccggagtctccacagcctgaagcatcaactctgccgactgataatgtcaacaacatgccattacaggtcttgtttggtcatgatgttctgcgccaaagtccgttgtactgggcgccaaccaacaccgcgaagttcatgaataccaataccggcattattggaacgatgggcaccgggaaaacccagtttactaaatcgctggttacgcaactgatgcgcaatcagtcctgcaacgttgatggtaaaccgattggcttgttgatcttcgactataaatccgactatgtggatgatgcgtttctggaagctacgggagcaaagaggtatcagctatcgttgttaccttacaatccgttatcgttatttggtgatatgcccatgttaccgaggcatacggccatggcattcgctgaaacaatgggcaaagcgtataaccttggcgtaaaacaacgcatgaagctggttacgctaataatggagtgctatgacttagcaggaatagtgcctcatgatcgatcaacatggaatcgtatagcaccgactattgaagatgtgtggcagcagtacctggcacaagagaaagtcgacgaagattcattatatgctgcgctttataatctggctggtttccagatttttgaaacagatccagagaagatgaccagtttgtacgatctggttgagggagtcacagttatcgaactcgctgggtatccatcagagattcaaaacctggtggttgcactgacactggatctcttttacgcacagatgcaaaagcgtggaaaaccgacggtgcgaggagattatcgccagctaaccaaaatgattctcgtcgatgaagccgataactttatgcgccaggattttgccagcctgcgaaaaattcttaaggagggtcgcgaatatggagttggcgcgatcctgtcaacgcaggagattactcacttcaaaactggagaaaataattacgcctcctatattttgacttgggtgattcatcgcgtgtctgagattaggaatgcggatatcaaggcggtatttaacatcgatgataaaggtgagcaggagtccttgatggggcagattcggcagcttgagaagcattttagcctgtatgtagatggggataagcaggttaagaagatgcgtgataaagcgttttgggaactaattcaaggacaagaaaaatga

SEQ ID NO: 396351 - DNA, 1329 bp, Salmonella enterica
atgtatcccattgcaacaaaattaaaagttggcaacaaccaactggatagctacctaccgatacgcaataagaacaataatattgactggcaaattgtcaccggtctggtactaagctatgccgtgaaatataaaatcgacacttacaatctcgaacaatttcgcgaagattgcaaagcccacctacaaatattaattgatgagcaaggtttctggccggtactggagcggatgtatttttccagtcaggatatctttcgtgtctctccgcttttcttgctttttcacgcccagtttgatgctgaaaaaataagcgcaggttccgcagcagataaacgtcttggaacgctgtttgccaatctgatgaggggttttagccttaaccatccgatacaagataagttgaattttatcgaacaagaaatgctgaataagctcaatactagattaacacggctgggagaaggcccatttgcaaaagagcaaccttatttaccctatctggtgacatgttttcagtccgatttagcatttctggcagatcatccacaatatcttttgcaggagttgaccaataccctgcgtttgtacgcctttagctggtgtgctcagttggcgctcaacctggactactggcgggatggtgagccgcaaagtagatcactgttttttatccttgatactgagaaagccagctcagagcgtgaccagattaagcgctttggttataagtggtttgccagccaaagcgaaaaacttttcccgatactttccgcactggaggttttgcagtggggtaaaggagagagaaaacgccctctctggcaggtatatcaagattgtttaaattattcagatacatcgaatcaagtactgaatgagcttaatgattacatacagaagtttataagtaaggaggagcgagatcttcctgaacgcgatcgagctacaaacctggaagaggccttcaaacaattattatccgttgccgttgaacaatttcagggtaaaaagtctgaacgagcatcagtaaatcgcaaatacattaacgagctggaaagccagatttgtactgacttcattcaggttcgtggccgggcggggaaagtgctggtgctgaatcaggatcggctgctgttactgaccaaccttaccgtgggtaaaaacaaaaaactccggctgcatgaactgctacgtggttttgagcaacgcggattttatctggataaccagtccacacaaatgctggttgcgttttatgaacgcatggggaacgtggagcgaatgagtgacagtggagacgccgtatatgtccgtaaaacagtatga

SEQ ID NO: 396352 - DNA, 1647 bp, Salmonella enterica
atgagcgcgatcacattacgtaaagcgttgggtgtacttgcgaagtcatcttcgttttccgtaaccaccgagactcatcggcaaaaggatgtgttcgatgagctaaaagaacaactctttgttaaacaagaaattgaagaagaattacagcgttatctggatatagcgaagcccggtgagatcatttttctatgcggcagtagtggcgatggtaagtcggaaatattaactcgctgtaagtcaaacccccgttatcagcagcagtttacctttcatctggatgcaactcatagcttcgctcctcagcagaccgctattgatgcactgaatcatttatttagcaatcatcatcaagaatcatctcctttgcttgtaggtatcaataccgggatgctcgctaattttgccagagaaggtgctgaatgccatcaggcgcttcgtttaatgattgatacattcctggcggaacagcaggaatgtagcggacctttttgcattggacattgctcattttttgattttgaacattaccctaagttccagtttgatgaggaacggcaatactcaccctttataaagaaattattaaatcacttaacggatgatgataagaatctattttacacaatttttcaacgggatgaatcaacaggacatgatttaaaaaccgttgccaacttcaaactgctttgcatgcccggcgttcagcatgttttaatcacacagctttttaaagcccggttaattaaagatcagtttgttacaacaagaacgctgttggactttttgcatcacctactgactggaccaggatacctttttgataacctttttaatggtgcagaaaatgacctgattaaaaagatttctgatttcgatccagccagaatgcatacctatgagctcgatcaatttattttgcgttacgagcttggattagtggatcccgaactggataattttctggcaaagcttgaacaattacatattacatttgatcgccagtgtattaagccgggtgatgctgcttccttaattaggctattctggttactacaacatgaatcagtggggaataactatcatcaaaacttctcagtattctttaaagaatctctatttgaacgctattcagatatctggcatctacataagaactatactgcgaatccggaacaaaaaagagcgctgaaccggttttattcttttgaacttatcgctggtatccaacggtacgcaaaccgtaaagcacctgaactgagtacccaaaaagaagagttctttttaggcgaatttggtggagttaaaatcacggcaccagtcgcgctaaaaccagactgggatgctattctcaagaaaaacacagctcatccaacctgtttcgacgttcatttaaaagtgggccagaactcgctggagcctattcgtatcggtcttaatttatttgagctattgagcaaactcaataatggttatcgtcctaataaatatgacaaaagcgcgattgtattactagatgaaatcgttgaactgattgcagaacaggccaaatccagcagcgaaatcaaattttatgatggcatgcagcgggtttacagtgcaagagcggacgacgacatgatcactatcagcggcatggagggataa

SEQ ID NO: 396353 - DNA, 654 bp, Salmonella enterica
atggataaaatactggatatcgtgaatggatggctcactgctgctgtgtcaagcggagctttacagataaagcaggtccttctttttattcttattgcagggccgctggctatcattatctggagaataagaggaattattgcatttgttaatgaggtcaggaactctaaattaaatgagttgcagcgtcttctggatagccacgagctatcggatgaggttagtatctgcatcaaagaggatattaagagaataactagctatcgcatgaccggaattgcggatgtcgctagacaaaaaattgttttgcggttactggtagagaatagagatttaatacctgcaggtttctttaaaaaattcagaacgtttttgctgattaaagatggaactcttgtatttaaaaaagggttctctttctggtttgagaacggtatgtatggtttgttttcgcttcaatttctgttgcttgcaattttatctttaatattatccacttacagatatgagcaaattcctgtttgggggcattttatattatattcagttgctgtagttatgttcctgttctttattgcttttgggagaatgataccccgacctgaagaatgtaaactattgagcaggatactacggatacaatataataattaa

SEQ ID NO: 396354 - DNA, 1731 bp, Salmonella enterica
atgtctaaggtattaaaagctcttgatgcattcttaaaatcggataataaggtattggttatcaaaggagattggggtgtagggaaaactttcttttggaataaatattatgaaaacaacataaacaacttatcacaattagcctactcctatgtatcattattcggaaaaaattcattatcagatcttaagaaagaagtttttcattcagctaaacctattaagaaagataggatcgcacaatcctttcaacaacaaactgaagaagcgagcggtatttactcctacatcccgtggttaaaccctaaagaaaaaatagttcatagaataccttttcttaagcctattgtaaggtatgctgataacactcctatattatttagagccacaaatgcaatttccagccttgaatattcacttgttaataattatttagtttgttttgatgatctcgaaaggcgtggtaactcattatccatcaaagaagtgatgggttttatagatgaactagctcagcgaaaaaattgtaaaatcattcttatatttaatgaagagactctacatcacaaagacgatttggatattttcaatacttacagagagaaaatagttgatattgagataaaatactgtccgacaataaaagataatttcaatcatattttccttctaaacacccaacatcatgggtatattttagaaataatggagagattaggtgtaaacaatatcagatttttcaaaaaattaaagcagttattattatcatatgatggcaacctcagtcatgcagatgatgaaattaaaaaagattttatattacgcgcatgtatcttatgctatggctattatattccatcaaaaaagctttcttacagtgaattaaaaacaagattagaaaaaggagttcggtattcatttacagctgataaagaaaatgaaaaaaatgaaactgatgaacactttgataaacttattaaaaacttttcattacgatctccaattttcatttcagaaattgactttttcctaaacaacggataccactataacgatgctgaattgcatgatctgatacataaaaaaaatcatgacattacaacaaaaagacttgaacaaaaaatttctagtgcatggcatttgtatcaagactcattcaaaaacaatgacaatgaatttataagtacactgtcctccattctcaatacagaattaacaaatattccgctaaatagctttgatagtatagtagacatgctcaggaattttgacgtgaattgtgatgagtatatcaataattatttcgttgatatagataaaagaattgatttatcaaatcgacgccttgggtatttcttaggggatttacgttgtcaagatattcaagaacgattaaaagaaaccattagaaaattaaaggaaagtaatcgaaacataacaagcattgcaattgatttggcccaaaccaacggatggaacccagaggacattaattatttgaactcattctccactcatgattttgtcatttggataaaggaacaagaaaataactcagtagaccttgttcgtaatggtttattaaaattcagaaatattcaaaacaacgatcctatttatgaagagataaccaacaaggtcattgaagctctcaaagtaatagcattagagagcaaaataaaccaattgcgagtgaagaatattttcaaaatcgatattaatgaacaataa

SEQ ID NO: 396355 - DNA, 510 bp, Salmonella enterica
atgagtaagcgcaagcggccacaacctccccactccgtcgaagcggaacaatcggtgctcggcggcctgatgctggataacaatcgctgggatgacgtcgccacgcagatttccgcgcaggacttctttatctcagcgcaccgtactatctatagccatatgcagaccctgatcgaacaggtgggtggcttcgcctatctggcggagctttccaaaaacacgcccagcgccgccaacatcattccctacgcgcaatacatctccagttacggtgaattgcgccagcttctattactgagcaatgaactgagcgatatggcaggccagccgcgtaacaatgtggccgatgtgctggccttcgccgagcaaaagctgtttgccattgcccagtcgcatcaggacggcgacctgaccgatatcagcgcctgctttgacaacgtgctggcaggcatcgctcaacgctatgaggctgaacgtggcagcctcagcggcacgccgtccgggctgtaa

SEQ ID NO: 396356 - DNA, 3066 bp, Salmonella enterica
atgagtgacaataacctgcgtctgcaggtgattctgaatgcggttgacaaactcacccgcccatttcgatccgcgcaggccagctcgagggagctggctgctgtgcttcaaaccacccggaacagcctgaaagaactgaataaacaggccgggcgtattgatgaattccgtaaaaccaggtcacagcttgctattactgcaaaaaatctcaacgccgcacgcgaagaagccgcaaaacttgccactcagtttgctgcaacaaaccgcccaaccgctgcgcaggccaagttatttagccaggcgaaaacccgcgtacaggaactgcagcagacatacaacggtctgttgggttcggtacaaagacagcggcaggcgctgaaagaatctgggatagatactaaacagctaagtagcgcacagcgggaactgcggaaaaatgcagatgaaacaaggcaggctctggaacgtcagcagaaatccatgaaacgtctgggcgaacagcaggcaaaaatgaatgctgcccgtgagcaatattcccgacgccttgaggtgcgggatcgcattgccggggcaggtgctactactacggcagcagggggggcaatgggggcacctgttgtggcggcagttaagagctatagcagcatggaagatgccatgaaaggcctggcaaaacagatgaatggcctgcgcgacgataacgggaatcgcacgaaacaatattatgacatgcaggacgctatcaaggcagccagtgaagatttgccgatggagaatggcgcaatagattatgccgcgctggttgaggggggcgcgcgcatgggcgtgaccaaccaggacgatccatttgaggaccagaaacgtgacctgctggcctttgcatccacggcggcaaaagctgcaacggcctttgagctgcccgccgatgagctggcggaaggattggggaaaatcgtgcagctctataaagtgccgacacgcaatattgaacaactgggcgatgcgctgaactacctggacgataacgccatgtcaaagggtggggacattatcaacgtcctgcagcgtatggggggcgtggctgaccgccttgacttccgaaaggctgctgcgctgggttcaacattcctttctcttggggctgccccggaaattgccgccagcgcctctaatgccatggtgcgtgaactgtccattgccaccatgcaaagtaagcgcttctttgaaggtatgaacctgctgaaactcaatcctgcggagattgaaaagcagatgactaccgatgccatgggcaccattcagcgggttctggagaaggtcaacaatctgccgcaggataaacgcctgtcagccatgacaatgatttttggtaaagagtttggcgatgatgcggcaaagctggctaacaacctgccggagctgcagcgtcagctgaaactcacatcaggcagtggtgctaatggctcgatgcagaaagaatccgacattaacaaggattcattgtctgcgcagtggttgctggttaagactggcgcgcagaacgctttcagcagtctgggggaaacgttgcgccagccgctgatggatattatgggcatggttaagggcgtgaccggggcgctgcgtcgctgggtggagcagaatcccgtgctggctggcacgctgatgaaagtggcggcggctacggcggctgtcactgtcgggctgggtacacttgccgtggcagtggctgctgtgctggggccgattgcggtgattcggtttggcctgtctgtgctgggtgtaaaaacattaccttccgttgctgcagcggtaacacgtactggcggtgccctgtcatggctggcaggtgcgccactttccctgttgcgtcggggtatggcgtcatccggtggcagtgtcgggttgctgagtgccccgcttaattccctgcgtcgctcagccggaatagcgggtaatgcactgaaaacggtggcaggtgcgccgcttgccgtgttccgtgccggtatgtcaggcatccgtaatattatcggtatggtgatgaacccgctggcggtgttgcggggtgggctgacagctaccggtggcgtgttgcgttttcttgtttctggttcgctggcattacttcgcggcgcgctgtttggtatttccggcctgctgggtgcgctgctcagtccgatagggctggttgtggctgcgctggcgggtgtggcgctggttgtgtggaaatactggcagcccatcagtgcatttctggggggcgtggtggaagggttcaaagccgctgctgcacccatcagcgccgcctttgagccgctcagacccgtgtttcagtggattggtgacagggtgcaggccttgtggggctggttcagtgatttgctgaccccgattaaatccacttccgaagaactgaacagcgcagctgcaatggggcgccggtttggagaggcgctggcggaaggtctgaatagggtgatgcacccgctggagtctcttaaatccggtgtgtcatggctgctggaaaagctcggtattgtcagtaaggaggcggcaaaggcgaaactgcctgcgcaggtcacgcagcagcaatccgccacggtgaacagtgacggcaaagtggtgctgccgccaggcgggtttccggcttacgcagggatgtacgacacgggcgggatcattccacgcgggcagtttggcattgttggagaaaatggccctgaaattgtgaacggaccggcaaatgtcaccagcaggcggcgtactgctgcgcttgcctctgtcgttgctggcgtgatgggggtagctgcgacacctgcagaagcggccccgcttcatccgttcagtctgcctgcgagggcataccagacgcagccagtgaaggctgacagcccgccgtcagttattcgttatgagataaatgcgcccattcatatcgtcgcgcagccgggacagagtgcgcaggatattgcccgtgaagtggcacgccagcttgacgagtgggaacgcagggccagggcaaaagcgcgcagcaatttcagcgatcagggggggtatgaatcatga

SEQ ID NO: 396357 - DNA, 2277 bp, Salmonella enterica
atgtggccagttggtgattacgcgggacgtattacacccacagcatcagaagcatcccccgcagcaaatacgagctattataccttatggcaaacctgggctaatgaagccattgtcggagaaggggaacaacgagatatagcggttgaaagattgtatgcttgcctttccaatcaggagagtattcttgatttaggggagcttaacctgcgcactttacccctattgcctgcatgtgtttcaactctgaatgtcagtaataatcatttatctgcccttccagatctacccaaaggattaagagctcttacttgcgctggcaatacattggcctcacttcccgtgctccctccaacgttacaaacacttgattgctcacaaaacacattatccgaactacaaaacgtccctcccgcgttaacggcgctcaattgctcaaaaaatagtttgagagagctttctcatttacctgatacacttcaatcattagattgttcaggtaatatgatagcctcactttcagaattacctgataacttacaaatactcgattgttcaggaaataggcttgaagtcctaccggatctccccccttcattgaaaactcttaattgtgctgtcaatggattaataggctttccatttatgcctttttcgctgcaaacactcaattgctcatacaatgaactcaccgggcttcccccttttcctgattcactgataaatctcgacatcgcctataatgaatttaattctctaccgccactccctcctttattggctacattcatatgtacaaataatccacttcaccagtttccagtattgcctctttcactacaaagacttacctgcgccagcacatcactaacggcactcccgcctctgccatctgcactacaggaacttcattgccagaataatgagcttatcttcctgcctgagttgcctgcttcattaaccgatttgaattgctcaaataattatctggtgagaatgccagcgctacctgactcgctcatttcgcttgattgctcacacaatcgtttagaaacgctttctattttacccaattcacttcaattcctgattatccttcataatcgattaacgacgcttcctcaattatctgaatcactgaggtttctcaactgttcgagtaatgggattacggtactcccagatttacctaatactttaaatagcctttattgctatgccaatagactggaaacgcttcctactttgccagataccctacaagagcttggctacagcggtaatccactgacaacgttacccgaattaccggcgtcactcataagcctgaataacagtgagtctgccggaggcgctatcgctcctctttcgttcatccaaagtattggatattggtttccgttctcgcagagagctgaaatgcttactcgttttgagggaatagccaacgaagagaatgcagagatatttagtcgttttcttaacagacttcaatatcgttacagagacccacagtatgaagatttcagatcccaggttaaggagtgccttatccgactcgctgacaaacctgaattgagagaaaaattatttatgtgcgcctatgaatcaacactaaattgcgatgatcgcatttctctcacatggaatatgatgcgggtcgctgaaatggcttttaccgtagagcaagagggtcatgagggaaatcttccggaaatgatcgatatagctcgtcaagtatttagaatagaatcgttaacggagattgccaacagaaaaatccagcagatcctgagagtaaacaatacattcaatgaagatttagaggtgatattaggcctacaaacccaactgcgcgacgctcttcgcttaacgcatgtcgccccagatatgtatttcttccgtttttctcatcttactgaaatagatgtaaaaactgcagaacgtcaggtgcgagtagcggaaaatagccggtttgaatcatggctcaacaattgggaaccgtggcaaatgttgctaaaacgtatagatccactgtggtatgaaacggctgtaaatgaaaaatacgcttttgtggatggcccggattttcaaaaccgactggacgaaaaattccaattacatcaggtacctcctgaggctcgtgacgatgcccgctatcctttaggtaagatcgttcttgcagaaaaaatacacgaaatttttgttaatcagacacgcaaaattttggcagcgaaagagcactcatccttgttggagccactatggaccgaataa

SEQ ID NO: 396358 - DNA, 306 bp, Salmonella enterica
atgaaccaaaatcatgatactcatgtcaagcgtgtctgtaccaaacacaatcattactctaaagtaatcaaaaatcttgttggtaaaagcaaatcatcaacagggtattcccggtgtgccagttgcgctctggaggctggaatgcttcaggctgctttaggattacctaaagcatccgccgaactagcccttaaatacctacctgaaagtcattcaggactcaataaagaacgtgatgcactggaagcctataatctggggtatgactcttataccaatccggaagattttaatatcgtatcctga

SEQ ID NO: 396359 - DNA, 234 bp, Salmonella enterica
atgacaacaaaaaacctgatgataaccaatgaatgggtgcaaatcaccgatggcaccaaagacgaggttatacagtttcgtggggaaatagctatctgcaacagcccagccaaacccgcccccgacgcaccggcattattgtttgagaaccagactctcactattacagcgggtgatattgcctgggtcagaacatctgcgccgggtgtggcaatcattctggttgtctggtga

SEQ ID NO: 396360 - DNA, 480 bp, Salmonella enterica
atgtcagagcaaaacaacgccgctttaccaggtggcgcagcggataaccagagcgctgacggagatagtccggtttctcagtcaggttttttcctcgttgaggttcgctgtccgcgcgagcgttacatccgtgccggcatcaactttatgcgcggcaaacagacgctggagaatgttccgcagtccacactcgatgtcttacaggctgacccatgcctcattgtggtgtcggttcagtcggcagccgcgccatctggtgaggctggcgtgcaaaacgtggtggatgttgtcaatgcaggcagtgatgtgatgccggaggaaattaacgccgctattgacgtgctgattgcccgcgccgatccgcaggcattcactaaatcaggtgtgccgagcgtcaaggctgtcagtgacgagctgggccagcctgtcaccaaagcgcaactggacgctgcatgggcggcacgtcaggagcacccgtaa

SEQ ID NO: 396361 - DNA, 972 bp, Salmonella enterica
atgagtacacctaccacccccgccatgattgaagccctctttacggggtataagtctgactttcagaacggtctggggatggcggcctcgcagtacaagcagattgcgatgaccgttacgtccaatacccgctccaacacctttggctggctggggcagttcccgcacttccgcgaatggatcgggacgcgtgtcatgcagcagatggcggcgcacgggtattcgatcactaacaaaacctgggaagatacggttgcgatttcccgcgacgacttcgatgacgatattctcggcatctactctcccatcttccaggaaatgggccgcgcggcgggctgtttcccggatgagctggtcttccaggcgctggcgaacgccgacaaagcagcctgctatgacggccagaacttcttcgacgcagaacacccggtctacgagaaagtagacggtacgggaaaaatggtgccgacctccaacctgtttaccgcgaaaatcggtgcagcaggtgccaccacggcttataccggccctggctggtatctgatggactgtacccgcgtcattaagcccattatttaccagaaccgccgcaatcctgaactggtgatgcaggcagacccgaaaacgggtgtgaccttcaccgataaccagattgtgttcggcgcgtccctgcgctccaacgttggttacggtttctggcagatggcccagatgatgaaagccccgcttaacggcgacatgttctgggaagcctggcagtccattactgaccgtaaggccgacggtggccgtccgctgggtctgcgtccatccgttctggtggtgccgccgtctcttgagaaggttgccaccaagctgcttgaacgcgagctgaccgttgatgatggtgccaccaccaccaacgaactcaagggcaaagtctcgctggttgttgctaactggatgccggctgcgaccgctgccacggcataa

SEQ ID NO: 396362 - DNA, 1236 bp, Salmonella enterica
atggatcatccactcgatccatttttcctgtcctgttttttactgatttaccgcaaacccaccccctcgcctgaccgttctacgattccggtcatgacgacgaacaccttaaaagcgacaggcgctcagcgccgcacagagaccgcggctctctcggcttcactggcatcatccgatgatggatggtgccagttgctgccggccggccgcgtcagagcccgagacggcagaccgaaaaagcctgctgcgggctggctgattaataaagtgtcctgtgaccgtattaaggccaatcttgccgctttacagcagcctttgctgattgactatgaccaccactccgaaatcgctcaggaaaaaggtgtcaaagctgtcgctgctggctgggtgaaggccgaggatgtggcgtggcgcgaaggtcagggaattttcattaaacccacctggacgccgcaggcgcagaagcatatcgacgatctggagtacgcctatctctcggcgaagctggagtattacgtggataacggcgaaccggcgtccattcgtattgcgtccctgacgaacgatccagcgattaccggtatgaaatccgtcgcggccctcagcgctgacgacctttatgtaacaaccccctctatggagttaacccccatgaatgagcaattacgccagttactggcggcgctcggcctgactgtgcccgatgacggcgaactgacgcccgaacttggtacggcggccctgtcggcgctgacggatattcaggcaaaagcgggtaagcatgacgagctgaaaacgcaggtcgccacgctgtctgctgaactggacacagcaaaacaggcgagcaccaccgcaaccggtgatgttgacctgacgaagtttgttccggttgagacctacaacgccctgcgcacgcagtacgtttccctgtctgccgaacacggcactaccacgcttgagcaggtgctggataaagctgagggtgaaggtcgcgtgtttaagtccgagcgcacctactacgaaggtctcggtaagcagattggcgttgcggcgctgtccgcccaactggacgcccgccagccgattgccgcactgaccgcaaaacagacggacacgctgccctcaccgaaaaaagaaaccgcatctgccgcgctgtctgcggaggatatccaggtaatgaaactgctcggcaagaccgaggaagagttccttaaagctaaaggggttaaccaatga

SEQ ID NO: 396363 - DNA, 477 bp, Salmonella enterica
atgtcacagcttgatttagccgttgttgttgacgttaaacgcctgcagcgggtgtttctggaactgcaggcaattggtgatgacggtaaagggttgacccgctccgtggccgccagtctgctgtcgtcgtctgaaatggcctttgagcagcaaaaagaacctgatggtgatgcatggcatgaatggtctgagccgtggcgggcatggcgtacaaagcacggctatgtgccgggtaaaatcctgacgttacacggcaagctcgccggggaaatgaccaccgactacggcgatacgtatgccctgattggctctaatgagccctacgcagctattcatcagtggggtggcacacctgatatgcgaccggggccggcggctattccggcgcgtccgtacatggggtttgataaggtcgccgagaaggagatccttaacctcatcaaaaaacgctttgagaaggccgtggcggcgtcgtaa

SEQ ID NO: 396364 - DNA, 1323 bp, Salmonella enterica
ttgattgatttaggttacgccgccacgcttgcgcccaaagaggcgatcgcctacttccgggctaaagggcagcacatcggctggaactggtacgatacggccgtggacgttcacgcccgctcgtttactgtggcaaaagccgcgcgcgtggatgtgctgacaaccattcagggtgaagttgagcgcgccatcgagcaggggctcagtcagcaggagtttattgacaccctcgcgccacgcctgaaaaaactcggatggtggggtaagcaaatagtggtggacagcgccggcaacgccgaaactgtccagcttggcagcccccgtcgtctggcgctgatatataacgtcaatacccgcgtggcgtataacgtcgggcgctatgcgcaactgatgaacagtaccgacacgcacccgttctggcagtatgtggcagtgatggacagccgcacacgtccttctcacgcggcgctgaacggcctggtgttccgctatgacgatcctttctggaaaacccactatccgccgaacggctggaactgccgctgtcgcgtccgggcgctctctcaggagcgcatgaatgcgctgggcctgacggccacgcaaggcgataaatacctcaccacgaagaaggtgcaggcggcggtggataaggcgacgggtgaaatcattaacatggacgtgaccaccttcgccgatggtgcgcgcgtgatgaccccggacgctggctggtcttataaccccggccaggcggcattcggccttgaccagacgcttatccgtaagctgattgaagtgaaaagcccggcgctgcgtgagatggtggttcaggagatgaataacagccctgagcggcaactggcgttccggcgctgggcggaaaaaatcatggaaagccggcgcgggggtaacgatatccgcacgctcggttttatgtcggagtctgtagccgatgcggttgagcaacgtactggtgaaccacccgcgcggctgctggcgatgagtggtcgtaacgttctgcatgttgatagtagtaaacactatgatacaggggtggcgctgaatgctgacgaccttgcccgactccctttactgctggcgcatcctgacgcggtgctgtgggataaagtacacaagaatttgctgtatatcgttacatcaaaagatggtctggcaaaaattgtggtcaatgcgccttatggtattaaacgtcagcgtgatcaacttgatgttgtgattaatgcctatcgttttcgtgatgtggaagatttaaaggcagatattcgtagcgggaagttggaagttcttgagggagatattaattag

SEQ ID NO: 396365 - DNA, 1575 bp, Salmonella enterica
atgggcaaaattgtagacctggacggaaaaccgttcgactttgatccagacctgcagacggcggttctggatattccacagatagccaaccgctttattgaacatccggcgtcgggtatcaccccgaaccgggcggcgcagtgtttacgcgctgccgaacagggtgacctgatggcgcagtctgatttagctgccgacatcgaggagaaagacactcatcttttcgccgaactcagcaagcgccggctggcgatacagagtgttccctggaatatccagccgccgtcgaacgccaccgcgcaggaaaagaaagacgcagagatgctcgatgagtaccttcagggggcggactggttcgacgcaatgctgtttgatgccaccgatgccattctcaagggctacagttgtcaggagattgagtggggtcgcatcggccgcgcgtttgttgtcaataaggttatctggcgcgatgcggggcatttctgcctcaatccgcaggatttcagcgaactgcggctgcgggatggcagcgttgagggggtggcgttccagccgttcggctggattgttcaccaggcgcgatcgcggaccggttacgccggcgcgcaggggctggtgcgcacgcttgtctggccgtttattttcaagaactattccgtgcgcgatctggctgagtttctggaggtgtatggtctgccgatgaaggtcggtaagtatccggccggggccacgctgggccagaaagccgccctgatgcgggcggtgatggaaatcgggcggcgtaccggcgggattatccccaccggtatgagcctggagtttgaggcggcggccagcggtcaggctgacccgttccttgcgatgatgcagtggggtgagcgctccatctctaaagcgattctgggcggtacgttgaccaccgacgccggcgataaaggcgcgcgcagcctgggtgaagtccatgacgaggtgcgcaaagagattcgtgacgctgacctgcgccagttaaccaccacgctgagccgcgatctggtttacccgctgtatgcacttaacaccactcacgcggttgatattcgtcgtctgccgcgcctggtcttccagaccaaagagccgggcgatatcaccaaaatcaccgcggccgtcgtgcagctcggtgccgggatgccggtgccgctggcctggattcgtgaccagaccggcattcctgaaccggtcggtgatgagccagtctttaccatcgccagcccggaaatgaccctgccgccgccggagcgaccggagaaacaggcggcattatcagcgctcccggcgcagctacccgcgccggtgacgaccggcccgcgtgatgaactggatgatttgggcgattctgtccccgccagcgtcctgcaggcggcgattgatccggtgctggagccggttatcaacgcgattaaaacgcgggggctcgcggaggcgctgtctgacctgccggcgctgtatcagcagatggacgataaaaagctgatgacactgctgaccgatgcgatgtttgcggcggaaacaaagggcatggtggacaatcttgattga

SEQ ID NO: 396366 - DNA, 1719 bp, Salmonella enterica
atgggtaaaaagacaaaacaagccggtgatgtaacaatttcgcaaggaagtagcctgataaagttgacctcaccccgaaaaatcgaccttgccgagcaaaaagccctgctgggcgttgatgtgcctgaatcgctcgatctccccagacgtatgccggtgcttctcggttatcaggctaaatggtttaaagacaatagtcagatttgtattgccgaaaaatcccgccgtaccggactgacctgggcggaagcagcccgtaacgtcattaccgccgcaaagccaaggaagcgcggtggtcgcaatgtcttttacgtcggctccaagcaggagatggcactggaatatatttccgcctgcgccctgttcgccagagcctttaaccagctcgcacaggccgacgtgtacgagcagaccttctgggacagcgaaaagaaagaagaaatcctgacctacatgattcgcttccccaacagcagctttaaaatccaggcgctgtcttcccgtccatccaacctgcgcggcctgcagggggatgttgtcattgatgaagcggctttccatgagtccctcgacgagctgctgaaagcggcgatggcgcttaccatgtggggagcccgcgtgcggatcatctccacgcataacggcgtggacaatctcttcaatcagtacattcaggaagcccgcgaggggcgtaaggactactcggtacaccgtatcacactggatgacgccattgcggacgggctgtatcagcgtatctgctacgtcaccggtcaggtgtggtcgccggaggcagagaagaaatggcgtgatgacctctacaagaacgcacccagtaaggaagatgccgacgaagaatacggctgcgtaccgaaaaagtccggcggtgcctatattcctcattcgctcattgagctggcgatggtacgcggtgttcccattctgaccttcgaagcgccggaagacttcctcagtcgtgcggcctggctgcgtgagtcagagattaacgcctggtgtgaagaacatttaaagccgcttttaaccgcccttaatgaacgctcacgctacagctttggcgaggactttgcccgccgcggcgatctgacctgttttaccgtcctggaaatcaccgaagacctgcaaaagcgcgaggcgttccgcgtcgagctgcgcaacatgccctacgagcagcagaaacaaatcatgctctatatcctggaacgcatagcccggcttatcggcgcggcgttcgatgctaccggcaacggtggttttctggcggaggccgcgcttgaacgctttggccccgaactggtggactgcgtgatgttgtcggctaagtggtacggcgaatggatgccaaagttaaaagcggagtttgaagaccagaatatctttgttgcccgccaccagaccacgctcgatgacctgcgtcatatcaaggtgacgaacggtattccgcagatagataagggtcgcaccaaagacgagaacgccaccgcagccggcagccgtcgccacggtgattttgcggtggcgttgtgcatggctaaccgcgcgtcgtatctggatggttttgtgctcgatgacgaggcgtgtcaggcgatgccggcgcgcgggcgcacgatggaagatgccgaagacagagaccggttctttatgaccccggaggaagaagacgtcaacgcgtatcacgaatttgagcaggggtgctggtaa

SEQ ID NO: 396367 - DNA, 489 bp, Salmonella enterica
atgtacctcacccaaattgaactgcttgatcacatctgccgcgaagaacgaggtgttcccctggaatgcgtaccactaggaaacttaaacggaggcgaagttattgacatattgttacccatatcagaacagttcattccggtcattagccagatacctgggtttccttatcagtcccgatacgaaaaggaggcaaataaagcgataaaagatcttgttctgcgagatgccaactggaagctggaaacgcttcccattgaggtatggcgcgtattgcttgagcgatacatacaaacaatcctcttctgcgaagaaaaatcccacctgaacagccttatgtttattcctggcgggatgacagatcgtgcgaaattaaagttcgtagttgttttctggtggtatgccatgaaactcccgtacaaagttgacgaagaatcaacacgcgacacgctttcacagtttcatcgcttaaccgggaagcgttgttga

SEQ ID NO: 396368 - DNA, 585 bp, Salmonella enterica
atggataagcaacccacccgcggacgagtgaaaaaggtcgatctgctgcctgacagcatccgtaagcctttgcttgagatgttgcgtgaaaagcggatgacacaggttcagatcagggaagagatcaaccgcctgatactggaggccggacttcccgaagaggctcagttgtcgtcggcagctatcagccgggaagcggcccgtaacgaggcgattgcccgcaacctccgggaacttcgcgaatgtcataaatccatgatggccgagcttggcgacaaacccacaggtgagaccactgcgcttattctggaaatgtcccgcgccctgatgtaccgccgtttgcgcgctgccagcgagtcgctgaaaaacgatgaagacgtggatatggggttgattaaggacattctgctgtccgctcaacgggctgagagtgccgccgagcgcagcatgaagcgcgagaaagaaattcgcgcggcctttgccgaagagatggcgaaagccgtcaccgaggagttacacggtgtggacgggatgagtgaaaaactggaagcccagattgcggacattctgctgggtaaggcatag

SEQ ID NO: 396369 - DNA, 300 bp, Salmonella enterica
atgagcaactttagcaattttattaccgaagaccagcggctggtcattctgcgttcgctggctgattacaacggcgaactcggtgaatccgtccttcaggactgtctggacgactacggtcataaagtatcgcgggatacggtacatacccatatcgcctggcttgccgaacaggggttagtgcgtctgcgtaccctgattaacggctactacattgccgaactgaccgggcggggccaggacgtggccgaggggcgcagcactgcgccgggtgtgaaaaagccgcgtgcgagggattaa

SEQ ID NO: 396370 - DNA, 309 bp, Salmonella enterica
gtgtggatcagcatcgttaaagactatgcggtgccgatactctcggccaccgcgacggcgggcggcatctttatggcgctgatgcgcaaaacctttgtgccgcgtgaggcgttcgaaaaattgcatgaccgcgtggagcgggtggaaacccgcattgcgaacctgccaacgcaggacgaagtgaaccggctcaatgtggagatagcaacgctacggggtgacctgaaagcgaccagcgccacactgaaatcggtttctcaccagaacgaattattgctggaacaggctgtaaggaagaatccgcaatga

SEQ ID NO: 396371 - DNA, 294 bp, Salmonella enterica
atgaatttactgctgtggccggagcgtctgttcttccggtccgaaagcgagagtaaggaagatgatgtggatgaattagacagagcccaggaactggcggcgcagtttaacgagcgctgcctggccgggcatatgcggcaggcgcatcaaaatacgccggcgtcggccgttcggtgctgtgaagactacggcatcctcattccggctgcacgtctggcggttctgcctgacgccgtgtgttgcgtggactgtcaggcattacgggaggcttacggtgtggatcagcatcgttaa

SEQ ID NO: 396372 - DNA, 186 bp, Salmonella enterica
atggtgccgccgctgccggagccgttcacctttggtgcctcggtggactacaacctgcaactgctggcggtggtgaaaaactgcaacgtcgataaagcgaacatccgccgcgctgaggaacaacgacaacatgaatttactgctgtggccggagcgtctgttcttccggtccgaaagcgagagtaa

SEQ ID NO: 396373 - DNA, 360 bp, Salmonella enterica
ttgccgggactcattctcatactggtcatcagctttctgtggctggtgacctggagtgaacacctgaagattaaacagcttgagtcggcgaacaccaccctcacgcaacagcgcgacgaagcccggcgcatcctaaacaaccagcagtacaccatgcagttttttaacacgctcagtaaggcggccgccgatgagaagcaacgtaatacgcaggcaagcgaagccgtcagggctgaaatccgtccggttctggcggcggagcctgcggcccgtgttgctgtgcctgccgtggctgctgaccgcgtgcgcgccgccgtcagtgaaatacgtacaggtgccgccagttccgcttcccgctga
